United States Patent Application Publication US 2005/0255487 A1 - sequence listing, part 58

SEQ ID NO: 1589577 - RNA, 19 nt, Homo sapiens
  misc_RNA (1)...(19): siRNA sense strand
aagagcaccuucuccaaga

SEQ ID NO: 1589578 - RNA, 19 nt, Homo sapiens
  misc_RNA (1)...(19): siRNA sense strand
gggagugaccuauuucuuc

SEQ ID NO: 1589579 - RNA, 19 nt, Homo sapiens
  misc_RNA (1)...(19): siRNA sense strand
cauccaaggcuacaagauu

SEQ ID NO: 1589580 - RNA, 19 nt, Homo sapiens
  misc_RNA (1)...(19): siRNA sense strand
gagccaggccuaccacaga

SEQ ID NO: 1589581 - RNA, 19 nt, Homo sapiens
  misc_RNA (1)...(19): siRNA sense strand
ugugucagcucaaguggaa

SEQ ID NO: 1589582 - RNA, 19 nt, Homo sapiens
  misc_RNA (1)...(19): siRNA sense strand
guaauaaugaccgccuaua

SEQ ID NO: 1589583 - RNA, 19 nt, Homo sapiens
  misc_RNA (1)...(19): siRNA sense strand
ugacuucaguucagagaca

SEQ ID NO: 1589584 - RNA, 19 nt, Homo sapiens
  misc_RNA (1)...(19): siRNA sense strand
uccgugggcuacaggauua

SEQ ID NO: 1589585 - RNA, 19 nt, Homo sapiens
  misc_RNA (1)...(19): siRNA sense strand
cacguccucuguccugaua

SEQ ID NO: 1589586 - RNA, 19 nt, Homo sapiens
  misc_RNA (1)...(19): siRNA sense strand
gaugacagccauucuaagg

SEQ ID NO: 1589587 - RNA, 19 nt, Homo sapiens
  misc_RNA (1)...(19): siRNA sense strand
ggcaaggagugacuuacga

SEQ ID NO: 1589588 - RNA, 19 nt, Homo sapiens
  misc_RNA (1)...(19): siRNA sense strand
ggaguccgcauacaucuuc

SEQ ID NO: 1589589 - RNA, 19 nt, Homo sapiens
  misc_RNA (1)...(19): siRNA sense strand
ucacuuccguucugugcuu

SEQ ID NO: 1589590 - RNA, 19 nt, Homo sapiens
  misc_RNA (1)...(19): siRNA sense strand
cuacuucacuuccguucug

SEQ ID NO: 1589591 - RNA, 19 nt, Homo sapiens
  misc_RNA (1)...(19): siRNA sense strand
ccagaggacuccggaaucu

SEQ ID NO: 1589592 - RNA, 19 nt, Homo sapiens
  misc_RNA (1)...(19): siRNA sense strand
uaugggacauguuugugaa

SEQ ID NO: 1589593 - RNA, 19 nt, Homo sapiens
  misc_RNA (1)...(19): siRNA sense strand
auccaaggcuacaagauuu

SEQ ID NO: 1589594 - RNA, 19 nt, Homo sapiens
  misc_RNA (1)...(19): siRNA sense strand
gaaggugcaucugucaaac

SEQ ID NO: 1589595 - RNA, 19 nt, Homo sapiens
  misc_RNA (1)...(19): siRNA sense strand
ggacaucugcaacaaguac

SEQ ID NO: 1589596 - RNA, 19 nt, Homo sapiens
  misc_RNA (1)...(19): siRNA sense strand
gggcagaauaagaaguaua

SEQ ID NO: 1589597 - RNA, 19 nt, Homo sapiens
  misc_RNA (1)...(19): siRNA sense strand
gcuaucgggugguguacga

SEQ ID NO: 1589598 - RNA, 19 nt, Homo sapiens
  misc_RNA (1)...(19): siRNA sense strand
ccagugggcggacuaauca

SEQ ID NO: 1589599 - RNA, 19 nt, Homo sapiens
  misc_RNA (1)...(19): siRNA sense strand
gaacaugucuaaagaguga

SEQ ID NO: 1589600 - RNA, 19 nt, Homo sapiens
  misc_RNA (1)...(19): siRNA sense strand
gaagggagcugagcacaua

SEQ ID NO: 1589601 - RNA, 19 nt, Homo sapiens
  misc_RNA (1)...(19): siRNA sense strand
cagcauaccuucuguaaga

SEQ ID NO: 1589602 - RNA, 19 nt, Homo sapiens
  misc_RNA (1)...(19): siRNA sense strand
ucaagaacaugucuaaaga

SEQ ID NO: 1589603 - RNA, 19 nt, Homo sapiens
  misc_RNA (1)...(19): siRNA sense strand
guucagagcuucuauacuc

SEQ ID NO: 1589604 - RNA, 19 nt, Homo sapiens
  misc_RNA (1)...(19): siRNA sense strand
gcaagaagaagcagaauag

SEQ ID NO: 1589605 - RNA, 19 nt, Homo sapiens
  misc_RNA (1)...(19): siRNA sense strand
gaauagacacuucauuguu

SEQ ID NO: 1589606 - RNA, 19 nt, Homo sapiens
  misc_RNA (1)...(19): siRNA sense strand
cagcagacuugcauauauu

SEQ ID NO: 1589607 - RNA, 19 nt, Homo sapiens
  misc_RNA (1)...(19): siRNA sense strand
gcauauauuugacugcaau

SEQ ID NO: 1589608 - RNA, 19 nt, Homo sapiens
  misc_RNA (1)...(19): siRNA sense strand
ucagcagacuugcauauau

SEQ ID NO: 1589609 - RNA, 19 nt, Homo sapiens
  misc_RNA (1)...(19): siRNA sense strand
gggagaaggccaugaaaga

SEQ ID NO: 1589610 - RNA, 19 nt, Homo sapiens
  misc_RNA (1)...(19): siRNA sense strand
cagaauagacacuucauug

SEQ ID NO: 1589611 - RNA, 19 nt, Homo sapiens
  misc_RNA (1)...(19): siRNA sense strand
aauagacacuucauuguuc

SEQ ID NO: 1589612 - RNA, 19 nt, Homo sapiens
  misc_RNA (1)...(19): siRNA sense strand
cgacuuacacguucaauac

SEQ ID NO: 1589613 - RNA, 19 nt, Homo sapiens
  misc_RNA (1)...(19): siRNA sense strand
ugaaagagcacaagaccau

SEQ ID NO: 1589614 - RNA, 19 nt, Homo sapiens
  misc_RNA (1)...(19): siRNA sense strand
gcuagacaccuuugaauac

SEQ ID NO: 1589615 - RNA, 19 nt, Homo sapiens
  misc_RNA (1)...(19): siRNA sense strand
gcacaagaccaucaagaac

SEQ ID NO: 1589616 - RNA, 19 nt, Homo sapiens
  misc_RNA (1)...(19): siRNA sense strand
cugagcacauaacgacuua

SEQ ID NO: 1589617 - RNA, 19 nt, Homo sapiens
  misc_RNA (1)...(19): siRNA sense strand
ccgccaagcuccugcuaga

SEQ ID NO: 1589618 - RNA, 19 nt, Homo sapiens
  misc_RNA (1)...(19): siRNA sense strand
gauguggcguucagagcuu

SEQ ID NO: 1589619 - RNA, 19 nt, Homo sapiens
  misc_RNA (1)...(19): siRNA sense strand
uaagagauguggcguucag

SEQ ID NO: 1589620 - RNA, 19 nt, Homo sapiens
  misc_RNA (1)...(19): siRNA sense strand
gcagaauagacacuucauu

SEQ ID NO: 1589621 - RNA, 19 nt, Homo sapiens
  misc_RNA (1)...(19): siRNA sense strand
agaagaagcagaauagaca

SEQ ID NO: 1589622 - RNA, 19 nt, Homo sapiens
  misc_RNA (1)...(19): siRNA sense strand
gagcacaagaccaucaaga

SEQ ID NO: 1589623 - RNA, 19 nt, Homo sapiens
  misc_RNA (1)...(19): siRNA sense strand
aagaacaugucuaaagagu

SEQ ID NO: 1589624 - RNA, 19 nt, Homo sapiens
  misc_RNA (1)...(19): siRNA sense strand
ccaucaagaacaugucuaa

SEQ ID NO: 1589625 - RNA, 19 nt, Homo sapiens
  misc_RNA (1)...(19): siRNA sense strand
gcaguucguuuugaaguuu

SEQ ID NO: 1589626 - RNA, 19 nt, Homo sapiens
  misc_RNA (1)...(19): siRNA sense strand
acaagaccaucaagaacau

SEQ ID NO: 1589627 - RNA, 19 nt, Homo sapiens
  misc_RNA (1)...(19): siRNA sense strand
uauggucacugaggaauuc

SEQ ID NO: 1589628 - RNA, 19 nt, Homo sapiens
  misc_RNA (1)...(19): siRNA sense strand
gagcacauaacgacuuaca

SEQ ID NO: 1589629 - RNA, 19 nt, Homo sapiens
  misc_RNA (1)...(19): siRNA sense strand
ggagaaggccaugaaagag

SEQ ID NO: 1589630 - RNA, 19 nt, Homo sapiens
  misc_RNA (1)...(19): siRNA sense strand
gcagacuugcauauauuug

SEQ ID NO: 1589631 - RNA, 19 nt, Homo sapiens
  misc_RNA (1)...(19): siRNA sense strand
cacaagaccaucaagaaca

SEQ ID NO: 1589632 - RNA, 19 nt, Homo sapiens
  misc_RNA (1)...(19): siRNA sense strand
cagacuugcauauauuuga

SEQ ID NO: 1589633 - RNA, 19 nt, Homo sapiens
  misc_RNA (1)...(19): siRNA sense strand
agaauagacacuucauugu

SEQ ID NO: 1589634 - RNA, 19 nt, Homo sapiens
  misc_RNA (1)...(19): siRNA sense strand
cacguucaauacucacaaa

SEQ ID NO: 1589635 - RNA, 19 nt, Homo sapiens
  misc_RNA (1)...(19): siRNA sense strand
cccggaggcuucggaauug

SEQ ID NO: 1589636 - RNA, 19 nt, Homo sapiens
  misc_RNA (1)...(19): siRNA sense strand
ucacugaggaauucaaugg

SEQ ID NO: 1589637 - RNA, 19 nt, Homo sapiens
  misc_RNA (1)...(19): siRNA sense strand
gccaagcuccugcuagaca

SEQ ID NO: 1589638 - RNA, 19 nt, Homo sapiens
  misc_RNA (1)...(19): siRNA sense strand
gcugagcacauaacgacuu

SEQ ID NO: 1589639 - RNA, 19 nt, Homo sapiens
  misc_RNA (1)...(19): siRNA sense strand
caagaagaagcagaauaga

SEQ ID NO: 1589640 - RNA, 19 nt, Homo sapiens
  misc_RNA (1)...(19): siRNA sense strand
cuucuauacuccacgauca

SEQ ID NO: 1589641 - RNA, 19 nt, Homo sapiens
  misc_RNA (1)...(19): siRNA sense strand
gaauucaauggcagcgauu

SEQ ID NO: 1589642 - RNA, 19 nt, Homo sapiens
  misc_RNA (1)...(19): siRNA sense strand
acaaagcccagcauaccuu

SEQ ID NO: 1589643 - RNA, 19 nt, Homo sapiens
  misc_RNA (1)...(19): siRNA sense strand
gcauaccuucuguaagaga

SEQ ID NO: 1589644 - RNA, 19 nt, Homo sapiens
  misc_RNA (1)...(19): siRNA sense strand
aaagagcacaagaccauca

SEQ ID NO: 1589645 - RNA, 19 nt, Homo sapiens
  misc_RNA (1)...(19): siRNA sense strand
ugcuagacaccuuugaaua

SEQ ID NO: 1589646 - RNA, 19 nt, Homo sapiens
  misc_RNA (1)...(19): siRNA sense strand
ugcaagaagaagcagaaua

SEQ ID NO: 1589647 - RNA, 19 nt, Homo sapiens
  misc_RNA (1)...(19): siRNA sense strand
caagaacaugucuaaagag

SEQ ID NO: 1589648 - RNA, 19 nt, Homo sapiens
  misc_RNA (1)...(19): siRNA sense strand
cccagcauaccuucuguaa

SEQ ID NO: 1589649 - RNA, 19 nt, Homo sapiens
  misc_RNA (1)...(19): siRNA sense strand
gaguauggucacugaggaa

SEQ ID NO: 1589650 - RNA, 19 nt, Homo sapiens
  misc_RNA (1)...(19): siRNA sense strand
cuuacacguucaauacuca

SEQ ID NO: 1589651 - RNA, 19 nt, Homo sapiens
  misc_RNA (1)...(19): siRNA sense strand
cauaccuucuguaagagau

SEQ ID NO: 1589652 - RNA, 19 nt, Homo sapiens
  misc_RNA (1)...(19): siRNA sense strand
ccucagcagacuugcauau

SEQ ID NO: 1589653 - RNA, 19 nt, Homo sapiens
  misc_RNA (1)...(19): siRNA sense strand
gcauuugcaagaagaagca

SEQ ID NO: 1589654 - RNA, 19 nt, Homo sapiens
  misc_RNA (1)...(19): siRNA sense strand
caucaagaacaugucuaaa

SEQ ID NO: 1589655 - RNA, 19 nt, Homo sapiens
  misc_RNA (1)...(19): siRNA sense strand
ggucacugaggaauucaau

SEQ ID NO: 1589656 - RNA, 19 nt, Homo sapiens
  misc_RNA (1)...(19): siRNA sense strand
guauggucacugaggaauu

SEQ ID NO: 1589657 - RNA, 19 nt, Homo sapiens
  misc_RNA (1)...(19): siRNA sense strand
caagguagcuccucaaaga

SEQ ID NO: 1589658 - RNA, 19 nt, Homo sapiens
  misc_RNA (1)...(19): siRNA sense strand
ggacaaaacuggaaaagac

SEQ ID NO: 1589659 - RNA, 19 nt, Homo sapiens
  misc_RNA (1)...(19): siRNA sense strand
cuaugacacuuccuuacua

SEQ ID NO: 1589660 - RNA, 19 nt, Homo sapiens
  misc_RNA (1)...(19): siRNA sense strand
uaugacacuuccuuacuaa

SEQ ID NO: 1589661 - RNA, 19 nt, Homo sapiens
  misc_RNA (1)...(19): siRNA sense strand
caacagcugcuuggcuaua

SEQ ID NO: 1589662 - RNA, 19 nt, Homo sapiens
  misc_RNA (1)...(19): siRNA sense strand
caacagcgcuacuuuuaca

SEQ ID NO: 1589663 - RNA, 19 nt, Homo sapiens
  misc_RNA (1)...(19): siRNA sense strand
cgggaagccuugucuuaug

SEQ ID NO: 1589664 - RNA, 19 nt, Homo sapiens
  misc_RNA (1)...(19): siRNA sense strand
cagcugcuuggcuauauua

SEQ ID NO: 1589665 - RNA, 19 nt, Homo sapiens
  misc_RNA (1)...(19): siRNA sense strand
gaaaagacaacaaaagcuu

SEQ ID NO: 1589666 - RNA, 19 nt, Homo sapiens
  misc_RNA (1)...(19): siRNA sense strand
cuaccuagggcccaaagua

SEQ ID NO: 1589667 - RNA, 19 nt, Homo sapiens
  misc_RNA (1)...(19): siRNA sense strand
gggaagccuugucuuaugc

SEQ ID NO: 1589668 - RNA, 19 nt, Homo sapiens
  misc_RNA (1)...(19): siRNA sense strand
gagagccucagccaaggua

SEQ ID NO: 1589669 - RNA, 19 nt, Homo sapiens
  misc_RNA (1)...(19): siRNA sense strand
caucuaugacacuuccuua

SEQ ID NO: 1589670 - RNA, 19 nt, Homo sapiens
  misc_RNA (1)...(19): siRNA sense strand
ggcaacagcgcuacuuuua

SEQ ID NO: 1589671 - RNA, 19 nt, Homo sapiens
  misc_RNA (1)...(19): siRNA sense strand
cuuaugcucuuguacuuag

SEQ ID NO: 1589672 - RNA, 19 nt, Homo sapiens
  misc_RNA (1)...(19): siRNA sense strand
guuccucccuccaucuaug

SEQ ID NO: 1589673 - RNA, 19 nt, Homo sapiens
  misc_RNA (1)...(19): siRNA sense strand
uaccuagggcccaaaguaa

SEQ ID NO: 1589674 - RNA, 19 nt, Homo sapiens
  misc_RNA (1)...(19): siRNA sense strand
guacuuagagauucaacca

SEQ ID NO: 1589675 - RNA, 19 nt, Homo sapiens
  misc_RNA (1)...(19): siRNA sense strand
gcauuaugaggauuuacaa

SEQ ID NO: 1589676 - RNA, 19 nt, Homo sapiens
  misc_RNA (1)...(19): siRNA sense strand
gccaagugcucaggaacug

SEQ ID NO: 1589677 - RNA, 19 nt, Homo sapiens
  misc_RNA (1)...(19): siRNA sense strand
caucaguacuaccuguauc

SEQ ID NO: 1589678 - RNA, 19 nt, Homo sapiens
  misc_RNA (1)...(19): siRNA sense strand
acagcauuaugaggauuua

SEQ ID NO: 1589679 - RNA, 19 nt, Homo sapiens
  misc_RNA (1)...(19): siRNA sense strand
cugcagacccgcuacauuc

SEQ ID NO: 1589680 - RNA, 19 nt, Homo sapiens
  misc_RNA (1)...(19): siRNA sense strand
aacgggaagccuugucuua

SEQ ID NO: 1589681 - RNA, 19 nt, Homo sapiens
  misc_RNA (1)...(19): siRNA sense strand
ugacacuuccuuacuaaag

SEQ ID NO: 1589682 - RNA, 19 nt, Homo sapiens
  misc_RNA (1)...(19): siRNA sense strand
acuaaaggcccucaaccaa

SEQ ID NO: 1589683 - RNA, 19 nt, Homo sapiens
  misc_RNA (1)...(19): siRNA sense strand
gccaagguagcuccucaaa

SEQ ID NO: 1589684 - RNA, 19 nt, Homo sapiens
  misc_RNA (1)...(19): siRNA sense strand
gucuuaugcucuuguacuu

SEQ ID NO: 1589685 - RNA, 19 nt, Homo sapiens
  misc_RNA (1)...(19): siRNA sense strand
cugcuuggcuauauuacuc

SEQ ID NO: 1589686 - RNA, 19 nt, Homo sapiens
  misc_RNA (1)...(19): siRNA sense strand
cagacccgcuacauucaca

SEQ ID NO: 1589687 - RNA, 19 nt, Homo sapiens
  misc_RNA (1)...(19): siRNA sense strand
aaacuucagccaugacaag

SEQ ID NO: 1589688 - RNA, 19 nt, Homo sapiens
  misc_RNA (1)...(19): siRNA sense strand
cuuagagauucaaccaaga

SEQ ID NO: 1589689 - RNA, 19 nt, Homo sapiens
  misc_RNA (1)...(19): siRNA sense strand
gaguuccucccuccaucua

SEQ ID NO: 1589690 - RNA, 19 nt, Homo sapiens
  misc_RNA (1)...(19): siRNA sense strand
ucacagccuucagcaccaa

SEQ ID NO: 1589691 - RNA, 19 nt, Homo sapiens
  misc_RNA (1)...(19): siRNA sense strand
uuaugaggauuuacaacuc

SEQ ID NO: 1589692 - RNA, 19 nt, Homo sapiens
  misc_RNA (1)...(19): siRNA sense strand
acagcugcuuggcuauauu

SEQ ID NO: 1589693 - RNA, 19 nt, Homo sapiens
  misc_RNA (1)...(19): siRNA sense strand
uuacagcauuaugaggauu

SEQ ID NO: 1589694 - RNA, 19 nt, Homo sapiens
  misc_RNA (1)...(19): siRNA sense strand
caacgggaagccuugucuu

SEQ ID NO: 1589695 - RNA, 19 nt, Homo sapiens
  misc_RNA (1)...(19): siRNA sense strand
ggacgcgaggcacagaugu

SEQ ID NO: 1589696 - RNA, 19 nt, Homo sapiens
  misc_RNA (1)...(19): siRNA sense strand
gaggagggcuaccggacua

SEQ ID NO: 1589697 - RNA, 19 nt, Homo sapiens
  misc_RNA (1)...(19): siRNA sense strand
caucaacccugucaucuac

SEQ ID NO: 1589698 - RNA, 19 nt, Homo sapiens
  misc_RNA (1)...(19): siRNA sense strand
cuaggaauguggacgcuuu

SEQ ID NO: 1589699 - RNA, 19 nt, Homo sapiens
  misc_RNA (1)...(19): siRNA sense strand
gcguggcgcucaucucguu

SEQ ID NO: 1589700 - RNA, 19 nt, Homo sapiens
  misc_RNA (1)...(19): siRNA sense strand
ugacggcagugaccaaaca

SEQ ID NO: 1589701 - RNA, 19 nt, Homo sapiens
  misc_RNA (1)...(19): siRNA sense strand
cauccgcaaucccaacauu

SEQ ID NO: 1589702 - RNA, 19 nt, Homo sapiens
  misc_RNA (1)...(19): siRNA sense strand
ucaucucguuggaccguua

SEQ ID NO: 1589703 - RNA, 19 nt, Homo sapiens
  misc_RNA (1)...(19): siRNA sense strand
ugaccaaacagccuaaauc

SEQ ID NO: 1589704 - RNA, 19 nt, Homo sapiens
  misc_RNA (1)...(19): siRNA sense strand
ccaucaacccugucaucua

SEQ ID NO: 1589705 - RNA, 19 nt, Homo sapiens
  misc_RNA (1)...(19): siRNA sense strand
caacauuucgaugcuccua

SEQ ID NO: 1589706 - RNA, 19 nt, Homo sapiens
  misc_RNA (1)...(19): siRNA sense strand
gcaaucccaacauuucgau

SEQ ID NO: 1589707 - RNA, 19 nt, Homo sapiens
  misc_RNA (1)...(19): siRNA sense strand
caucuacgccauccgcaau

SEQ ID NO: 1589708 - RNA, 19 nt, Homo sapiens
  misc_RNA (1)...(19): siRNA sense strand
gaccaaacagccuaaaucc

SEQ ID NO: 1589709 - RNA, 19 nt, Homo sapiens
  misc_RNA (1)...(19): siRNA sense strand
ccaccaccguccucaucau

SEQ ID NO: 1589710 - RNA, 19 nt, Homo sapiens
  misc_RNA (1)...(19): siRNA sense strand
cagcgagcauggccuuacu

SEQ ID NO: 1589711 - RNA, 19 nt, Homo sapiens
  misc_RNA (1)...(19): siRNA sense strand
ugggagggcucaacuuuaa

SEQ ID NO: 1589712 - RNA, 19 nt, Homo sapiens
  misc_RNA (1)...(19): siRNA sense strand
agacaauuaugacaacuga

SEQ ID NO: 1589713 - RNA, 19 nt, Homo sapiens
  misc_RNA (1)...(19): siRNA sense strand
ggaguggcagguauuauga

SEQ ID NO: 1589714 - RNA, 19 nt, Homo sapiens
  misc_RNA (1)...(19): siRNA sense strand
ggaggaaauuacagagaca

SEQ ID NO: 1589715 - RNA, 19 nt, Homo sapiens
  misc_RNA (1)...(19): siRNA sense strand
ggucgcagcuacucuagag

SEQ ID NO: 1589716 - RNA, 19 nt, Homo sapiens
  misc_RNA (1)...(19): siRNA sense strand
gggaguggcagguauuaug

SEQ ID NO: 1589717 - RNA, 19 nt, Homo sapiens
  misc_RNA (1)...(19): siRNA sense strand
gaggguauggauauggaua

SEQ ID NO: 1589718 - RNA, 19 nt, Homo sapiens
  misc_RNA (1)...(19): siRNA sense strand
gugggagggcucaacuuua

SEQ ID NO: 1589719 - RNA, 19 nt, Homo sapiens
  misc_RNA (1)...(19): siRNA sense strand
ggacguuccagagacuaua

SEQ ID NO: 1589720 - RNA, 19 nt, Homo sapiens
  misc_RNA (1)...(19): siRNA sense strand
ucucugagguggucguugu

SEQ ID NO: 1589721 - RNA, 19 nt, Homo sapiens
  misc_RNA (1)...(19): siRNA sense strand
ucaaggaccgggagacuca

SEQ ID NO: 1589722 - RNA, 19 nt, Homo sapiens
  misc_RNA (1)...(19): siRNA sense strand
cagagacaauuaugacaac

SEQ ID NO: 1589723 - RNA, 19 nt, Homo sapiens
  misc_RNA (1)...(19): siRNA sense strand
ggagggcucaacuuuaaca

SEQ ID NO: 1589724 - RNA, 19 nt, Homo sapiens
  misc_RNA (1)...(19): siRNA sense strand
uggcagguauuaugacagu

SEQ ID NO: 1589725 - RNA, 19 nt, Homo sapiens
  misc_RNA (1)...(19): siRNA sense strand
gagacuauaauggcagaaa

SEQ ID NO: 1589726 - RNA, 19 nt, Homo sapiens
  misc_RNA (1)...(19): siRNA sense strand
gaccuggaggguauggaua

SEQ ID NO: 1589727 - RNA, 19 nt, Homo sapiens
  misc_RNA (1)...(19): siRNA sense strand
cagucgaccuggaggguau

SEQ ID NO: 1589728 - RNA, 19 nt, Homo sapiens
  misc_RNA (1)...(19): siRNA sense strand
cgugggagggcucaacuuu

SEQ ID NO: 1589729 - RNA, 19 nt, Homo sapiens
  misc_RNA (1)...(19): siRNA sense strand
gacguuccagagacuauaa

SEQ ID NO: 1589730 - RNA, 19 nt, Homo sapiens
  misc_RNA (1)...(19): siRNA sense strand
acagagacaauuaugacaa

SEQ ID NO: 1589731 - RNA, 19 nt, Homo sapiens
  misc_RNA (1)...(19): siRNA sense strand
aaccagaggagguggcuuu

SEQ ID NO: 1589732 - RNA, 19 nt, Homo sapiens
  misc_RNA (1)...(19): siRNA sense strand
gcuaugggaguggcaggua

SEQ ID NO: 1589733 - RNA, 19 nt, Homo sapiens
  misc_RNA (1)...(19): siRNA sense strand
caacccagagcaugcuuca

SEQ ID NO: 1589734 - RNA, 19 nt, Homo sapiens
  misc_RNA (1)...(19): siRNA sense strand
gcuacucaggaggaaauua

SEQ ID NO: 1589735 - RNA, 19 nt, Homo sapiens
  misc_RNA (1)...(19): siRNA sense strand
uggaggguauggauaugga

SEQ ID NO: 1589736 - RNA, 19 nt, Homo sapiens
  misc_RNA (1)...(19): siRNA sense strand
cccagagcaugcuucaguu

SEQ ID NO: 1589737 - RNA, 19 nt, Homo sapiens
  misc_RNA (1)...(19): siRNA sense strand
ccagagcaugcuucaguug

SEQ ID NO: 1589738 - RNA, 19 nt, Homo sapiens
  misc_RNA (1)...(19): siRNA sense strand
gagacaauuaugacaacug

SEQ ID NO: 1589739 - RNA, 19 nt, Homo sapiens
  misc_RNA (1)...(19): siRNA sense strand
caggaggaaauuacagaga

SEQ ID NO: 1589740 - RNA, 19 nt, Homo sapiens
  misc_RNA (1)...(19): siRNA sense strand
cuaugggaguggcagguau

SEQ ID NO: 1589741 - RNA, 19 nt, Homo sapiens
  misc_RNA (1)...(19): siRNA sense strand
cgacgagcaggcacuggaa

SEQ ID NO: 1589742 - RNA, 19 nt, Homo sapiens
  misc_RNA (1)...(19): siRNA sense strand
uuacagagacaauuaugac

SEQ ID NO: 1589743 - RNA, 19 nt, Homo sapiens
  misc_RNA (1)...(19): siRNA sense strand
gaccgcuacucaggaggaa

SEQ ID NO: 1589744 - RNA, 19 nt, Homo sapiens
  misc_RNA (1)...(19): siRNA sense strand
agacuauaauggcagaaac

SEQ ID NO: 1589745 - RNA, 19 nt, Homo sapiens
  misc_RNA (1)...(19): siRNA sense strand
gaggaaauuacagagacaa

SEQ ID NO: 1589746 - RNA, 19 nt, Homo sapiens
  misc_RNA (1)...(19): siRNA sense strand
gagcgcagcugaaagaaga

SEQ ID NO: 1589747 - RNA, 19 nt, Homo sapiens
  misc_RNA (1)...(19): siRNA sense strand
gcacuuugcaggagaguua

SEQ ID NO: 1589748 - RNA, 19 nt, Homo sapiens
  misc_RNA (1)...(19): siRNA sense strand
ggaacaccauaaccaauga

SEQ ID NO: 1589749 - RNA, 19 nt, Homo sapiens
  misc_RNA (1)...(19): siRNA sense strand
gaucauacaauacgaauuc

SEQ ID NO: 1589750 - RNA, 19 nt, Homo sapiens
  misc_RNA (1)...(19): siRNA sense strand
gaaccgagcgcagcugaaa

SEQ ID NO: 1589751 - RNA, 19 nt, Homo sapiens
  misc_RNA (1)...(19): siRNA sense strand
ggcccaggaucauacaaua

SEQ ID NO: 1589752 - RNA, 19 nt, Homo sapiens
  misc_RNA (1)...(19): siRNA sense strand
agacagcgcucuauuacag

SEQ ID NO: 1589753 - RNA, 19 nt, Homo sapiens
  misc_RNA (1)...(19): siRNA sense strand
ggagacaagagaaagauga

SEQ ID NO: 1589754 - RNA, 19 nt, Homo sapiens
  misc_RNA (1)...(19): siRNA sense strand
augaggagcugaagaagaa

SEQ ID NO: 1589755 - RNA, 19 nt, Homo sapiens
  misc_RNA (1)...(19): siRNA sense strand
ccaaugaggagcugaagaa

SEQ ID NO: 1589756 - RNA, 19 nt, Homo sapiens
  misc_RNA (1)...(19): siRNA sense strand
gcacuaacccugagacaac

SEQ ID NO: 1589757 - RNA, 19 nt, Homo sapiens
  misc_RNA (1)...(19): siRNA sense strand
gaggauacgagaucagaaa

SEQ ID NO: 1589758 - RNA, 19 nt, Homo sapiens
  misc_RNA (1)...(19): siRNA sense strand
caucauuccuggcacuuug

SEQ ID NO: 1589759 - RNA, 19 nt, Homo sapiens
  misc_RNA (1)...(19): siRNA sense strand
gggagcagguggagaagau

SEQ ID NO: 1589760 - RNA, 19 nt, Homo sapiens
  misc_RNA (1)...(19): siRNA sense strand
ccaggaugcugccaggaaa

SEQ ID NO: 1589761 - RNA, 19 nt, Homo sapiens
  misc_RNA (1)...(19): siRNA sense strand
ggagacagcgcucuauuac

SEQ ID NO: 1589762 - RNA, 19 nt, Homo sapiens
  misc_RNA (1)...(19): siRNA sense strand
uaucgucaguggaacauug

SEQ ID NO: 1589763 - RNA, 19 nt, Homo sapiens
  misc_RNA (1)...(19): siRNA sense strand
gauacgagaucagaaagag

SEQ ID NO: 1589764 - RNA, 19 nt, Homo sapiens
  misc_RNA (1)...(19): siRNA sense strand
agaagaagaugcgggaaga

SEQ ID NO: 1589765 - RNA, 19 nt, Homo sapiens
  misc_RNA (1)...(19): siRNA sense strand
cggagcaacugacaccaaa

SEQ ID NO: 1589766 - RNA, 19 nt, Homo sapiens
  misc_RNA (1)...(19): siRNA sense strand
gacaagagaaagaugaaga

SEQ ID NO: 1589767 - RNA, 19 nt, Homo sapiens
  misc_RNA (1)...(19): siRNA sense strand
gcaagaggaggagaggaua

SEQ ID NO: 1589768 - RNA, 19 nt, Homo sapiens
  misc_RNA (1)...(19): siRNA sense strand
ggagauagaggcccaggau

SEQ ID NO: 1589769 - RNA, 19 nt, Homo sapiens
  misc_RNA (1)...(19): siRNA sense strand
aaaccagacagaacaaauu

SEQ ID NO: 1589770 - RNA, 19 nt, Homo sapiens
  misc_RNA (1)...(19): siRNA sense strand
ggaagcaggaggagaagau

SEQ ID NO: 1589771 - RNA, 19 nt, Homo sapiens
  misc_RNA (1)...(19): siRNA sense strand
acagguacaucgaggaguu

SEQ ID NO: 1589772 - RNA, 19 nt, Homo sapiens
  misc_RNA (1)...(19): siRNA sense strand
acaagaaggcagacaggua

SEQ ID NO: 1589773 - RNA, 19 nt, Homo sapiens
  misc_RNA (1)...(19): siRNA sense strand
uggagacagcgcucuauua

SEQ ID NO: 1589774 - RNA, 19 nt, Homo sapiens
  misc_RNA (1)...(19): siRNA sense strand
gaggagaggauacgagauc

SEQ ID NO: 1589775 - RNA, 19 nt, Homo sapiens
  misc_RNA (1)...(19): siRNA sense strand
gccaggaaauuugaagaug

SEQ ID NO: 1589776 - RNA, 19 nt, Homo sapiens
  misc_RNA (1)...(19): siRNA sense strand
gaggagaugaugcgagaga

SEQ ID NO: 1589777 - RNA, 19 nt, Homo sapiens
  misc_RNA (1)...(19): siRNA sense strand
cgaauucucacgugucaga

SEQ ID NO: 1589778 - RNA, 19 nt, Homo sapiens
  misc_RNA (1)...(19): siRNA sense strand
gagagaaggaggagaggau

SEQ ID NO: 1589779 - RNA, 19 nt, Homo sapiens
  misc_RNA (1)...(19): siRNA sense strand
gagacaagagaaagaugaa

SEQ ID NO: 1589780 - RNA, 19 nt, Homo sapiens
  misc_RNA (1)...(19): siRNA sense strand
ggcaguaccuccuguaucc

SEQ ID NO: 1589781 - RNA, 19 nt, Homo sapiens
  misc_RNA (1)...(19): siRNA sense strand
gagaggauacgagaucaga

SEQ ID NO: 1589782 - RNA, 19 nt, Homo sapiens
  misc_RNA (1)...(19): siRNA sense strand
gaaggcaagccaccaacau

SEQ ID NO: 1589783 - RNA, 19 nt, Homo sapiens
  misc_RNA (1)...(19): siRNA sense strand
guacaucgaggaguuaaca

SEQ ID NO: 1589784 - RNA, 19 nt, Homo sapiens
  misc_RNA (1)...(19): siRNA sense strand
ccagcagugcccaggauua

SEQ ID NO: 1589785 - RNA, 19 nt, Homo sapiens
  misc_RNA (1)...(19): siRNA sense strand
gucuggaacuguacaggaa

SEQ ID NO: 1589786 - RNA, 19 nt, Homo sapiens
  misc_RNA (1)...(19): siRNA sense strand
agaagcaggaggagaauau

SEQ ID NO: 1589787 - RNA, 19 nt, Homo sapiens
  misc_RNA (1)...(19): siRNA sense strand
aggagaagaugcagaagca

SEQ ID NO: 1589788 - RNA, 19 nt, Homo sapiens
  misc_RNA (1)...(19): siRNA sense strand
gggaagaggaggagacgau

SEQ ID NO: 1589789 - RNA, 19 nt, Homo sapiens
  misc_RNA (1)...(19): siRNA sense strand
gaagaugcgggaccaagag

SEQ ID NO: 1589790 - RNA, 19 nt, Homo sapiens
  misc_RNA (1)...(19): siRNA sense strand
cauacaauacgaauucuca

SEQ ID NO: 1589791 - RNA, 19 nt, Homo sapiens
  misc_RNA (1)...(19): siRNA sense strand
ggagcaggaggagaagaua

SEQ ID NO: 1589792 - RNA, 19 nt, Homo sapiens
  misc_RNA (1)...(19): siRNA sense strand
gagcaggaggagaagauau

SEQ ID NO: 1589793 - RNA, 19 nt, Homo sapiens
  misc_RNA (1)...(19): siRNA sense strand
ggagcaggaggagaagaua

SEQ ID NO: 1589794 - RNA, 19 nt, Homo sapiens
  misc_RNA (1)...(19): siRNA sense strand
ucgaggaguuaacaaagga

SEQ ID NO: 1589795 - RNA, 19 nt, Homo sapiens
  misc_RNA (1)...(19): siRNA sense strand
gagaucagaaagagaagau

SEQ ID NO: 1589796 - RNA, 19 nt, Homo sapiens
  misc_RNA (1)...(19): siRNA sense strand
ggagaucaugcagcuguuu

SEQ ID NO: 1589797 - RNA, 19 nt, Homo sapiens
  misc_RNA (1)...(19): siRNA sense strand
gcacuuucacaggccuuua

SEQ ID NO: 1589798 - RNA, 19 nt, Homo sapiens
  misc_RNA (1)...(19): siRNA sense strand
ggauacgagaucagaaaga

SEQ ID NO: 1589799 - RNA, 19 nt, Homo sapiens
  misc_RNA (1)...(19): siRNA sense strand
aagagaagauguggagaca

SEQ ID NO: 1589800 - RNA, 19 nt, Homo sapiens
  misc_RNA (1)...(19): siRNA sense strand
gaagaugcgggagcaggaa

SEQ ID NO: 1589801 - RNA, 19 nt, Homo sapiens
  misc_RNA (1)...(19): siRNA sense strand
gaugcugccaggaaauuug

SEQ ID NO: 1589802 - RNA, 19 nt, Homo sapiens
  misc_RNA (1)...(19): siRNA sense strand
ugucucaaccucucucauu

SEQ ID NO: 1589803 - RNA, 19 nt, Homo sapiens
  misc_RNA (1)...(19): siRNA sense strand
cagacuaucgucaguggaa

SEQ ID NO: 1589804 - RNA, 19 nt, Homo sapiens
  misc_RNA (1)...(19): siRNA sense strand
uaugggagcaggaggagaa

SEQ ID NO: 1589805 - RNA, 19 nt, Homo sapiens
  misc_RNA (1)...(19): siRNA sense strand
uacgaauucucacguguca

SEQ ID NO: 1589806 - RNA, 19 nt, Homo sapiens
  misc_RNA (1)...(19): siRNA sense strand
aggagaagcugugggaaca

SEQ ID NO: 1589807 - RNA, 19 nt, Homo sapiens
  misc_RNA (1)...(19): siRNA sense strand
caacaucaggaagcccuaa

SEQ ID NO: 1589808 - RNA, 19 nt, Homo sapiens
  misc_RNA (1)...(19): siRNA sense strand
uacgagaucagaaagagaa

SEQ ID NO: 1589809 - RNA, 19 nt, Homo sapiens
  misc_RNA (1)...(19): siRNA sense strand
gaauaugugggagcaggaa

SEQ ID NO: 1589810 - RNA, 19 nt, Homo sapiens
  misc_RNA (1)...(19): siRNA sense strand
gagcaggaagagaagaugu

SEQ ID NO: 1589811 - RNA, 19 nt, Homo sapiens
  misc_RNA (1)...(19): siRNA sense strand
agauccagcucaacgugaa

SEQ ID NO: 1589812 - RNA, 19 nt, Homo sapiens
  misc_RNA (1)...(19): siRNA sense strand
agauagaggcccaggauca

SEQ ID NO: 1589813 - RNA, 19 nt, Homo sapiens
  misc_RNA (1)...(19): siRNA sense strand
gagcuacgggagcaggaaa

SEQ ID NO: 1589814 - RNA, 19 nt, Homo sapiens
  misc_RNA (1)...(19): siRNA sense strand
gaggagacaagagaaagau

SEQ ID NO: 1589815 - RNA, 19 nt, Homo sapiens
  misc_RNA (1)...(19): siRNA sense strand
cgaggagacaagagaaaga

SEQ ID NO: 1589816 - RNA, 19 nt, Homo sapiens
  misc_RNA (1)...(19): siRNA sense strand
gaagcaggaggagaauaug

SEQ ID NO: 1589817 - RNA, 19 nt, Homo sapiens
  misc_RNA (1)...(19): siRNA sense strand
ccacucgccugaggauaca

SEQ ID NO: 1589818 - RNA, 19 nt, Homo sapiens
  misc_RNA (1)...(19): siRNA sense strand
gggagaaggaggagaggau

SEQ ID NO: 1589819 - RNA, 19 nt, Homo sapiens
  misc_RNA (1)...(19): siRNA sense strand
gauagaggcccaggaucau

SEQ ID NO: 1589820 - RNA, 19 nt, Homo sapiens
  misc_RNA (1)...(19): siRNA sense strand
ugcaggagcaggagaagaa

SEQ ID NO: 1589821 - RNA, 19 nt, Homo sapiens
  misc_RNA (1)...(19): siRNA sense strand
ggagacaggaggagagacu

SEQ ID NO: 1589822 - RNA, 19 nt, Homo sapiens
  misc_RNA (1)...(19): siRNA sense strand
aaagaaggcaagccaccaa

SEQ ID NO: 1589823 - RNA, 19 nt, Homo sapiens
  misc_RNA (1)...(19): siRNA sense strand
gaaggcagacagguacauc

SEQ ID NO: 1589824 - RNA, 19 nt, Homo sapiens
  misc_RNA (1)...(19): siRNA sense strand
ggaugcugccaggaaauuu

SEQ ID NO: 1589825 - RNA, 19 nt, Homo sapiens
  misc_RNA (1)...(19): siRNA sense strand
gccaggaugcugccaggaa

SEQ ID NO: 1589826 - RNA, 19 nt, Homo sapiens
  misc_RNA (1)...(19): siRNA sense strand
gggaggagaagaagaugca

SEQ ID NO: 1589827 - RNA, 19 nt, Homo sapiens
  misc_RNA (1)...(19): siRNA sense strand
gagcaggaggagaagaugu

SEQ ID NO: 1589828 - RNA, 19 nt, Homo sapiens
  misc_RNA (1)...(19): siRNA sense strand
gagcaggaggagaagaugu

SEQ ID NO: 1589829 - RNA, 19 nt, Homo sapiens
  misc_RNA (1)...(19): siRNA sense strand
gaagcaggaggagaagaug

SEQ ID NO: 1589830 - RNA, 19 nt, Homo sapiens
  misc_RNA (1)...(19): siRNA sense strand
uaaccaaugaggagcugaa

SEQ ID NO: 1589831 - RNA, 19 nt, Homo sapiens
  misc_RNA (1)...(19): siRNA sense strand
gucucaaccucucucauuc

SEQ ID NO: 1589832 - RNA, 19 nt, Homo sapiens
  misc_RNA (1)...(19): siRNA sense strand
uacgggagcgggagaagaa

SEQ ID NO: 1589833 - RNA, 19 nt, Homo sapiens
  misc_RNA (1)...(19): siRNA sense strand
gggagcaggaggagaagau

SEQ ID NO: 1589834 - RNA, 19 nt, Homo sapiens
  misc_RNA (1)...(19): siRNA sense strand
cuaccgaggagacaagaga

SEQ ID NO: 1589835 - RNA, 19 nt, Homo sapiens
  misc_RNA (1)...(19): siRNA sense strand
ggcaggagaagaagaugug

SEQ ID NO: 1589836 - RNA, 19 nt, Homo sapiens
  misc_RNA (1)...(19): siRNA sense strand
gggagcaggaggagaagau

SEQ ID NO: 1589837 - RNA, 19 nt, Homo sapiens
  misc_RNA (1)...(19): siRNA sense strand
gggaacaggagaagaugca

SEQ ID NO: 1589838 - RNA, 19 nt, Homo sapiens
  misc_RNA (1)...(19): siRNA sense strand
gggagcaggaggagaagau

SEQ ID NO: 1589839 - RNA, 19 nt, Homo sapiens
  misc_RNA (1)...(19): siRNA sense strand
gggagcaggagcagaagau

SEQ ID NO: 1589840 - RNA, 19 nt, Homo sapiens
  misc_RNA (1)...(19): siRNA sense strand
gggagcaggaggagaagau

SEQ ID NO: 1589841 - RNA, 19 nt, Homo sapiens
  misc_RNA (1)...(19): siRNA sense strand
gcagaagcaggaggagaau

SEQ ID NO: 1589842 - RNA, 19 nt, Homo sapiens
  misc_RNA (1)...(19): siRNA sense strand
aagagaaagaugaagauca

SEQ ID NO: 1589843 - RNA, 19 nt, Homo sapiens
  misc_RNA (1)...(19): siRNA sense strand
aaccagacagaacaaauug

SEQ ID NO: 1589844 - RNA, 19 nt, Homo sapiens
  misc_RNA (1)...(19): siRNA sense strand
ccaggaucauacaauacga

SEQ ID NO: 1589845 - RNA, 19 nt, Homo sapiens
  misc_RNA (1)...(19): siRNA sense strand
ugugggagcaggaagagaa

SEQ ID NO: 1589846 - RNA, 19 nt, Homo sapiens
  misc_RNA (1)...(19): siRNA sense strand
ggacaugcaugaucaagau

SEQ ID NO: 1589847 - RNA, 19 nt, Homo sapiens
  misc_RNA (1)...(19): siRNA sense strand
gcaccgacuucucaccuaa

SEQ ID NO: 1589848 - RNA, 19 nt, Homo sapiens
  misc_RNA (1)...(19): siRNA sense strand
gggauugggucuucaagga

SEQ ID NO: 1589849 - RNA, 19 nt, Homo sapiens
  misc_RNA (1)...(19): siRNA sense strand
caccuaagcugcacuucaa

SEQ ID NO: 1589850 - RNA, 19 nt, Homo sapiens
  misc_RNA (1)...(19): siRNA sense strand
gauugggucuucaaggauu

SEQ ID NO: 1589851 - RNA, 19 nt, Homo sapiens
  misc_RNA (1)...(19): siRNA sense strand
agaaguggcugaacugcaa

SEQ ID NO: 1589852 - RNA, 19 nt, Homo sapiens
  misc_RNA (1)...(19): siRNA sense strand
ggacaaagaggaagaugag

SEQ ID NO: 1589853 - RNA, 19 nt, Homo sapiens
  misc_RNA (1)...(19): siRNA sense strand
cuacggacaugcaugauca

SEQ ID NO: 1589854 - RNA, 19 nt, Homo sapiens
  misc_RNA (1)...(19): siRNA sense strand
caagagcgacuuccuaauc

SEQ ID NO: 1589855 - RNA, 19 nt, Homo sapiens
  misc_RNA (1)...(19): siRNA sense strand
gauguuggacugucacuga

SEQ ID NO: 1589856 - RNA, 19 nt, Homo sapiens
  misc_RNA (1)...(19): siRNA sense strand
ggaggaagacgaggacuau

SEQ ID NO: 1589857 - RNA, 19 nt, Homo sapiens
  misc_RNA (1)...(19): siRNA sense strand
caaagaggaagaugaggaa

SEQ ID NO: 1589858 - RNA, 19 nt, Homo sapiens
  misc_RNA (1)...(19): siRNA sense strand
gcgagcgccuggacaucua

SEQ ID NO: 1589859 - RNA, 19 nt, Homo sapiens
  misc_RNA (1)...(19): siRNA sense strand
caauggaacuacagacaac

SEQ ID NO: 1589860 - RNA, 19 nt, Homo sapiens
  misc_RNA (1)...(19): siRNA sense strand
cauggaugcuggacuguca

SEQ ID NO: 1589861 - RNA, 19 nt, Homo sapiens
  misc_RNA (1)...(19): siRNA sense strand
caucagcaccgacuucuca

SEQ ID NO: 1589862 - RNA, 19 nt, Homo sapiens
  misc_RNA (1)...(19): siRNA sense strand
aagagcgacuuccuaauca

SEQ ID NO: 1589863 - RNA, 19 nt, Homo sapiens
  misc_RNA (1)...(19): siRNA sense strand
aggcagagcuacaccaaca

SEQ ID NO: 1589864 - RNA, 19 nt, Homo sapiens
  misc_RNA (1)...(19): siRNA sense strand
gcagagcuacaccaacaug

SEQ ID NO: 1589865 - RNA, 19 nt, Homo sapiens
  misc_RNA (1)...(19): siRNA sense strand
gaacugcaagagcgacuuc

SEQ ID NO: 1589866 - RNA, 19 nt, Homo sapiens
  misc_RNA (1)...(19): siRNA sense strand
gaugcuggacugucacuga

SEQ ID NO: 1589867 - RNA, 19 nt, Homo sapiens
  misc_RNA (1)...(19): siRNA sense strand
ucaaggauucugucagcua

SEQ ID NO: 1589868 - RNA, 19 nt, Homo sapiens
  misc_RNA (1)...(19): siRNA sense strand
gcgcucugguucaauggaa

SEQ ID NO: 1589869 - RNA, 19 nt, Homo sapiens
  misc_RNA (1)...(19): siRNA sense strand
cuaggccucugaaggaaga

SEQ ID NO: 1589870 - RNA, 19 nt, Homo sapiens
  misc_RNA (1)...(19): siRNA sense strand
aggaguaccuagcacaguu

SEQ ID NO: 1589871 - RNA, 19 nt, Homo sapiens
  misc_RNA (1)...(19): siRNA sense strand
gcagagccacaccaacaug

SEQ ID NO: 1589872 - RNA, 19 nt, Homo sapiens
  misc_RNA (1)...(19): siRNA sense strand
guggacagcugugagaagu

SEQ ID NO: 1589873 - RNA, 19 nt, Homo sapiens
  misc_RNA (1)...(19): siRNA sense strand
gcaaugcuacggacaugca

SEQ ID NO: 1589874 - RNA, 19 nt, Homo sapiens
  misc_RNA (1)...(19): siRNA sense strand
gauguggacagcugugaga

SEQ ID NO: 1589875 - RNA, 19 nt, Homo sapiens
  misc_RNA (1)...(19): siRNA sense strand
gcaggcagagcuacaccaa

SEQ ID NO: 1589876 - RNA, 19 nt, Homo sapiens
  misc_RNA (1)...(19): siRNA sense strand
caggcgcucugguucaaug

SEQ ID NO: 1589877 - RNA, 19 nt, Homo sapiens
  misc_RNA (1)...(19): siRNA sense strand
ucaagaggacaaagaggaa

SEQ ID NO: 1589878 - RNA, 19 nt, Homo sapiens
  misc_RNA (1)...(19): siRNA sense strand
gagcuacaccaacauggau

SEQ ID NO: 1589879 - RNA, 19 nt, Homo sapiens
  misc_RNA (1)...(19): siRNA sense strand
gcaagagcgacuuccuaau

SEQ ID NO: 1589880 - RNA, 19 nt, Homo sapiens
  misc_RNA (1)...(19): siRNA sense strand
gauaaccaggugaccauca

SEQ ID NO: 1589881 - RNA, 19 nt, Homo sapiens
  misc_RNA (1)...(19): siRNA sense strand
ggaggaggaguaccuagca

SEQ ID NO: 1589882 - RNA, 19 nt, Homo sapiens
  misc_RNA (1)...(19): siRNA sense strand
ggauaucgagggugaggau

SEQ ID NO: 1589883 - RNA, 19 nt, Homo sapiens
  misc_RNA (1)...(19): siRNA sense strand
ggaguaccuagcacaguug

SEQ ID NO: 1589884 - RNA, 19 nt, Homo sapiens
  misc_RNA (1)...(19): siRNA sense strand
gcaggcagagccacaccaa

SEQ ID NO: 1589885 - RNA, 19 nt, Homo sapiens
  misc_RNA (1)...(19): siRNA sense strand
ugcaagagcgacuuccuaa

SEQ ID NO: 1589886 - RNA, 19 nt, Homo sapiens
  misc_RNA (1)...(19): siRNA sense strand
ucaauggaacuacagacaa

SEQ ID NO: 1589887 - RNA, 19 nt, Homo sapiens
  misc_RNA (1)...(19): siRNA sense strand
agaggaagaugaggaagag

SEQ ID NO: 1589888 - RNA, 19 nt, Homo sapiens
  misc_RNA (1)...(19): siRNA sense strand
aggccgaggugucgauaga

SEQ ID NO: 1589889 - RNA, 19 nt, Homo sapiens
  misc_RNA (1)...(19): siRNA sense strand
auaaccaggugaccaucaa

SEQ ID NO: 1589890 - RNA, 19 nt, Homo sapiens
  misc_RNA (1)...(19): siRNA sense strand
uaucgagggugaggaucaa

SEQ ID NO: 1589891 - RNA, 19 nt, Homo sapiens
  misc_RNA (1)...(19): siRNA sense strand
ugcaggaggccaaggagua

SEQ ID NO: 1589892 - RNA, 19 nt, Homo sapiens
  misc_RNA (1)...(19): siRNA sense strand
cauggauguuggacuguca

SEQ ID NO: 1589893 - RNA, 19 nt, Homo sapiens
  misc_RNA (1)...(19): siRNA sense strand
ggaucaagaggacaaagag

SEQ ID NO: 1589894 - RNA, 19 nt, Homo sapiens
  misc_RNA (1)...(19): siRNA sense strand
ggauugggucuucaaggau

SEQ ID NO: 1589895 - RNA, 19 nt, Homo sapiens
  misc_RNA (1)...(19): siRNA sense strand
ccgcaaugcuacggacaug

SEQ ID NO: 1589896 - RNA, 19 nt, Homo sapiens
  misc_RNA (1)...(19): siRNA sense strand
gccagcacaaccuugagua

SEQ ID NO: 1589897 - RNA, 19 nt, Homo sapiens
  misc_RNA (1)...(19): siRNA sense strand
gagcgacuuccuaaucaag

SEQ ID NO: 1589898 - RNA, 19 nt, Homo sapiens
  misc_RNA (1)...(19): siRNA sense strand
ugugagaaguggcugaacu

SEQ ID NO: 1589899 - RNA, 19 nt, Homo sapiens
  misc_RNA (1)...(19): siRNA sense strand
ucaccuaagcugcacuuca

SEQ ID NO: 1589900 - RNA, 19 nt, Homo sapiens
  misc_RNA (1)...(19): siRNA sense strand
agagcgacuuccuaaucaa

SEQ ID NO: 1589901 - RNA, 19 nt, Homo sapiens
  misc_RNA (1)...(19): siRNA sense strand
ccgagacccguaccuguga

SEQ ID NO: 1589902 - RNA, 19 nt, Homo sapiens
  misc_RNA (1)...(19): siRNA sense strand
gcaggaggccaaggaguac

SEQ ID NO: 1589903 - RNA, 19 nt, Homo sapiens
  misc_RNA (1)...(19): siRNA sense strand
caugcaugaucaagaugug

SEQ ID NO: 1589904 - RNA, 19 nt, Homo sapiens
  misc_RNA (1)...(19): siRNA sense strand
aggcagagccacaccaaca

SEQ ID NO: 1589905 - RNA, 19 nt, Homo sapiens
  misc_RNA (1)...(19): siRNA sense strand
gcugugcucccucccaaca

SEQ ID NO: 1589906 - RNA, 19 nt, Homo sapiens
  misc_RNA (1)...(19): siRNA sense strand
gagccacaccaacauggau

SEQ ID NO: 1589907 - RNA, 19 nt, Homo sapiens
  misc_RNA (1)...(19): siRNA sense strand
gaagaaagauuccaaauga

SEQ ID NO: 1589908 - RNA, 19 nt, Homo sapiens
  misc_RNA (1)...(19): siRNA sense strand
guaaagauguggaaaguua

SEQ ID NO: 1589909 - RNA, 19 nt, Homo sapiens
  misc_RNA (1)...(19): siRNA sense strand
gagcuaccaucaauaauga

SEQ ID NO: 1589910 - RNA, 19 nt, Homo sapiens
  misc_RNA (1)...(19): siRNA sense strand
aaaguuaccuccagccuaa

SEQ ID NO: 1589911 - RNA, 19 nt, Homo sapiens
  misc_RNA (1)...(19): siRNA sense strand
uaaugacgauuccaaguuu

SEQ ID NO: 1589912 - RNA, 19 nt, Homo sapiens
  misc_RNA (1)...(19): siRNA sense strand
aaacagaucuugacugcau

SEQ ID NO: 1589913 - RNA, 19 nt, Homo sapiens
  misc_RNA (1)...(19): siRNA sense strand
ccacagaucauauuaaagu

SEQ ID NO: 1589914 - RNA, 19 nt, Homo sapiens
  misc_RNA (1)...(19): siRNA sense strand
gaagaagaaagauuccaaa

SEQ ID NO: 1589915 - RNA, 19 nt, Homo sapiens
  misc_RNA (1)...(19): siRNA sense strand
ugacgcagguagaacguaa

SEQ ID NO: 1589916 - RNA, 19 nt, Homo sapiens
  misc_RNA (1)...(19): siRNA sense strand
ggagcuaccaucaauaaug

SEQ ID NO: 1589917 - RNA, 19 nt, Homo sapiens
  misc_RNA (1)...(19): siRNA sense strand
guaaugacgauuccaaguu

SEQ ID NO: 1589918 - RNA, 19 nt, Homo sapiens
  misc_RNA (1)...(19): siRNA sense strand
agaggacgcuacacuagaa

SEQ ID NO: 1589919 - RNA, 19 nt, Homo sapiens
  misc_RNA (1)...(19): siRNA sense strand
gcaaggagccacagaucau

SEQ ID NO: 1589920 - RNA, 19 nt, Homo sapiens
  misc_RNA (1)...(19): siRNA sense strand
uaaagaggccacagguaaa

SEQ ID NO: 1589921 - RNA, 19 nt, Homo sapiens
  misc_RNA (1)...(19): siRNA sense strand
auaaagaggccacagguaa

SEQ ID NO: 1589922 - RNA, 19 nt, Homo sapiens
  misc_RNA (1)...(19): siRNA sense strand
uggcagcacugaagaacaa

SEQ ID NO: 1589923 - RNA, 19 nt, Homo sapiens
  misc_RNA (1)...(19): siRNA sense strand
agaagaaacgcuagugaaa

SEQ ID NO: 1589924 - RNA, 19 nt, Homo sapiens
  misc_RNA (1)...(19): siRNA sense strand
ggagccacagaucauauua

SEQ ID NO: 1589925 - RNA, 19 nt, Homo sapiens
  misc_RNA (1)...(19): siRNA sense strand
agccacagaucauauuaaa

SEQ ID NO: 1589926 - RNA, 19 nt, Homo sapiens
  misc_RNA (1)...(19): siRNA sense strand
uggccgaacugaacacuug

SEQ ID NO: 1589927 - RNA, 19 nt, Homo sapiens
  misc_RNA (1)...(19): siRNA sense strand
gcagaggacgcuacacuag

SEQ ID NO: 1589928 - RNA, 19 nt, Homo sapiens
  misc_RNA (1)...(19): siRNA sense strand
agaagaagaagaaagauuc

SEQ ID NO: 1589929 - RNA, 19 nt, Homo sapiens
  misc_RNA (1)...(19): siRNA sense strand
ggaguaaugacgauuccaa

SEQ ID NO: 1589930 - RNA, 19 nt, Homo sapiens
  misc_RNA (1)...(19): siRNA sense strand
gagccacagaucauauuaa

SEQ ID NO: 1589931 - RNA, 19 nt, Homo sapiens
  misc_RNA (1)...(19): siRNA sense strand
caaggagccacagaucaua

SEQ ID NO: 1589932 - RNA, 19 nt, Homo sapiens
  misc_RNA (1)...(19): siRNA sense strand
acucggagcuaccaucaau

SEQ ID NO: 1589933 - RNA, 19 nt, Homo sapiens
  misc_RNA (1)...(19): siRNA sense strand
caaggccucugcucaggau

SEQ ID NO: 1589934 - RNA, 19 nt, Homo sapiens
  misc_RNA (1)...(19): siRNA sense strand
gaacacugccuggaguaau

SEQ ID NO: 1589935 - RNA, 19 nt, Homo sapiens
  misc_RNA (1)...(19): siRNA sense strand
gaggaaaaguccaaaaucu

SEQ ID NO: 1589936 - RNA, 19 nt, Homo sapiens
  misc_RNA (1)...(19): siRNA sense strand
acaacuggauugcccauca

SEQ ID NO: 1589937 - RNA, 19 nt, Homo sapiens
  misc_RNA (1)...(19): siRNA sense strand
guuccagggucugacauuu

SEQ ID NO: 1589938 - RNA, 19 nt, Homo sapiens
  misc_RNA (1)...(19): siRNA sense strand
agaagaaagauuccaaaug

SEQ ID NO: 1589939 - RNA, 19 nt, Homo sapiens
  misc_RNA (1)...(19): siRNA sense strand
ggacgcuacacuagaagaa

SEQ ID NO: 1589940 - RNA, 19 nt, Homo sapiens
  misc_RNA (1)...(19): siRNA sense strand
gaagaaacgcuagugaaaa

SEQ ID NO: 1589941 - RNA, 19 nt, Homo sapiens
  misc_RNA (1)...(19): siRNA sense strand
gagcaaggagccacagauc

SEQ ID NO: 1589942 - RNA, 19 nt, Homo sapiens
  misc_RNA (1)...(19): siRNA sense strand
gaagugggcuguggauccu

SEQ ID NO: 1589943 - RNA, 19 nt, Homo sapiens
  misc_RNA (1)...(19): siRNA sense strand
uagaagaaacgcuagugaa

SEQ ID NO: 1589944 - RNA, 19 nt, Homo sapiens
  misc_RNA (1)...(19): siRNA sense strand
uaaugaagacaacuggauu

SEQ ID NO: 1589945 - RNA, 19 nt, Homo sapiens
  misc_RNA (1)...(19): siRNA sense strand
ccacagauuccucggacaa

SEQ ID NO: 1589946 - RNA, 19 nt, Homo sapiens
  misc_RNA (1)...(19): siRNA sense strand
gccagcggaugcuagagaa

SEQ ID NO: 1589947 - RNA, 19 nt, Homo sapiens
  misc_RNA (1)...(19): siRNA sense strand
ggucuaaaggaaaggguuu

SEQ ID NO: 1589948 - RNA, 19 nt, Homo sapiens
  misc_RNA (1)...(19): siRNA sense strand
gggcaggaaaccacagauu

SEQ ID NO: 1589949 - RNA, 19 nt, Homo sapiens
  misc_RNA (1)...(19): siRNA sense strand
ggacucggagcuaccauca

SEQ ID NO: 1589950 - RNA, 19 nt, Homo sapiens
  misc_RNA (1)...(19): siRNA sense strand
ucggagcuaccaucaauaa

SEQ ID NO: 1589951 - RNA, 19 nt, Homo sapiens
  misc_RNA (1)...(19): siRNA sense strand
ggacaagaaggaaaagaaa

SEQ ID NO: 1589952 - RNA, 19 nt, Homo sapiens
  misc_RNA (1)...(19): siRNA sense strand
caucaauaaugaagacaac

SEQ ID NO: 1589953 - RNA, 19 nt, Homo sapiens
  misc_RNA (1)...(19): siRNA sense strand
aaaccguguucacuauaug

SEQ ID NO: 1589954 - RNA, 19 nt, Homo sapiens
  misc_RNA (1)...(19): siRNA sense strand
ggcaggaaaccacagauuc

SEQ ID NO: 1589955 - RNA, 19 nt, Homo sapiens
  misc_RNA (1)...(19): siRNA sense strand
ggaaaagacagaguaagaa

SEQ ID NO: 1589956 - RNA, 19 nt, Homo sapiens
  misc_RNA (1)...(19): siRNA sense strand
gggaaaagacagaguaaga

SEQ ID NO: 1589957 - RNA, 19 nt, Homo sapiens
  misc_RNA (1)...(19): siRNA sense strand
aacacugccuggaguaaug

SEQ ID NO: 1589958 - RNA, 19 nt, Homo sapiens
  misc_RNA (1)...(19): siRNA sense strand
acagauuccucggacaaga

SEQ ID NO: 1589959 - RNA, 19 nt, Homo sapiens
  misc_RNA (1)...(19): siRNA sense strand
gagcgaguggccaagaaga

SEQ ID NO: 1589960 - RNA, 19 nt, Homo sapiens
  misc_RNA (1)...(19): siRNA sense strand
gcagaagugggcuguggau

SEQ ID NO: 1589961 - RNA, 19 nt, Homo sapiens
  misc_RNA (1)...(19): siRNA sense strand
cagaggacgcuacacuaga

SEQ ID NO: 1589962 - RNA, 19 nt, Homo sapiens
  misc_RNA (1)...(19): siRNA sense strand
ggagcaaggagccacagau

SEQ ID NO: 1589963 - RNA, 19 nt, Homo sapiens
  misc_RNA (1)...(19): siRNA sense strand
aauaaagaggccacaggua

SEQ ID NO: 1589964 - RNA, 19 nt, Homo sapiens
  misc_RNA (1)...(19): siRNA sense strand
ggauggcagcacugaagaa

SEQ ID NO: 1589965 - RNA, 19 nt, Homo sapiens
  misc_RNA (1)...(19): siRNA sense strand
caacuggauugcccaucag

SEQ ID NO: 1589966 - RNA, 19 nt, Homo sapiens
  misc_RNA (1)...(19): siRNA sense strand
agaagaagaaagauuccaa

SEQ ID NO: 1589967 - RNA, 19 nt, Homo sapiens
  misc_RNA (1)...(19): siRNA sense strand
gaaaagacagaguaagaag

SEQ ID NO: 1589968 - RNA, 19 nt, Homo sapiens
  misc_RNA (1)...(19): siRNA sense strand
cagaacacugccuggagua

SEQ ID NO: 1589969 - RNA, 19 nt, Homo sapiens
  misc_RNA (1)...(19): siRNA sense strand
gcggauggcagcacugaag

SEQ ID NO: 1589970 - RNA, 19 nt, Homo sapiens
  misc_RNA (1)...(19): siRNA sense strand
cagauuccucggacaagaa

SEQ ID NO: 1589971 - RNA, 19 nt, Homo sapiens
  misc_RNA (1)...(19): siRNA sense strand
gagaacgaaaccacgacaa

SEQ ID NO: 1589972 - RNA, 19 nt, Homo sapiens
  misc_RNA (1)...(19): siRNA sense strand
ggccagcggaugcuagaga

SEQ ID NO: 1589973 - RNA, 19 nt, Homo sapiens
  misc_RNA (1)...(19): siRNA sense strand
ucaauaaugaagacaacug

SEQ ID NO: 1589974 - RNA, 19 nt, Homo sapiens
  misc_RNA (1)...(19): siRNA sense strand
gguaaagauguggaaaguu

SEQ ID NO: 1589975 - RNA, 19 nt, Homo sapiens
  misc_RNA (1)...(19): siRNA sense strand
aaagacagaguaagaagac

SEQ ID NO: 1589976 - RNA, 19 nt, Homo sapiens
  misc_RNA (1)...(19): siRNA sense strand
gaagaagaagaaagauucc

SEQ ID NO: 1589977 - RNA, 19 nt, Homo sapiens
  misc_RNA (1)...(19): siRNA sense strand
agguaaagauguggaaagu

SEQ ID NO: 1589978 - RNA, 19 nt, Homo sapiens
  misc_RNA (1)...(19): siRNA sense strand
cagcggaugcuagagaaga

SEQ ID NO: 1589979 - RNA, 19 nt, Homo sapiens
  misc_RNA (1)...(19): siRNA sense strand
ucugucaucucggagcaaa

SEQ ID NO: 1589980 - RNA, 19 nt, Homo sapiens
  misc_RNA (1)...(19): siRNA sense strand
aaugacgauuccaaguuug

SEQ ID NO: 1589981 - RNA, 19 nt, Homo sapiens
  misc_RNA (1)...(19): siRNA sense strand
gacgcuacacuagaagaaa

SEQ ID NO: 1589982 - RNA, 19 nt, Homo sapiens
  misc_RNA (1)...(19): siRNA sense strand
ucacaucauucauggcaua

SEQ ID NO: 1589983 - RNA, 19 nt, Homo sapiens
  misc_RNA (1)...(19): siRNA sense strand
ccuagaagcuuguuccaau

SEQ ID NO: 1589984 - RNA, 19 nt, Homo sapiens
  misc_RNA (1)...(19): siRNA sense strand
ugaaugagcuggcgauugc

SEQ ID NO: 1589985 - RNA, 19 nt, Homo sapiens
  misc_RNA (1)...(19): siRNA sense strand
caaguacagugucaagguu

SEQ ID NO: 1589986 - RNA, 19 nt, Homo sapiens
  misc_RNA (1)...(19): siRNA sense strand
gaucucaucuguacacacu

SEQ ID NO: 1589987 - RNA, 19 nt, Homo sapiens
  misc_RNA (1)...(19): siRNA sense strand
agcagaaucuccaggguua

SEQ ID NO: 1589988 - RNA, 19 nt, Homo sapiens
  misc_RNA (1)...(19): siRNA sense strand
gaagcuuguuccaaugaga

SEQ ID NO: 1589989 - RNA, 19 nt, Homo sapiens
  misc_RNA (1)...(19): siRNA sense strand
ucaauagcauccuucucua

SEQ ID NO: 1589990 - RNA, 19 nt, Homo sapiens
  misc_RNA (1)...(19): siRNA sense strand
caauagcauccuucucuaa

SEQ ID NO: 1589991 - RNA, 19 nt, Homo sapiens
  misc_RNA (1)...(19): siRNA sense strand
gcagcaaccucagcaugau

SEQ ID NO: 1589992 - RNA, 19 nt, Homo sapiens
  misc_RNA (1)...(19): siRNA sense strand
ugaaggcccucgacuacau

SEQ ID NO: 1589993 - RNA, 19 nt, Homo sapiens
  misc_RNA (1)...(19): siRNA sense strand
aaacaggaggucaugagua

SEQ ID NO: 1589994 - RNA, 19 nt, Homo sapiens
  misc_RNA (1)...(19): siRNA sense strand
guuaugaugccaagucuga

SEQ ID NO: 1589995 - RNA, 19 nt, Homo sapiens
  misc_RNA (1)...(19): siRNA sense strand
caacccggaugccagguau

SEQ ID NO: 1589996 - RNA, 19 nt, Homo sapiens
  misc_RNA (1)...(19): siRNA sense strand
gaugcgagcucagagucaa

SEQ ID NO: 1589997 - RNA, 19 nt, Homo sapiens
  misc_RNA (1)...(19): siRNA sense strand
ccacccagaugcugcuaga

SEQ ID NO: 1589998 - RNA, 19 nt, Homo sapiens
  misc_RNA (1)...(19): siRNA sense strand
uagcauccuucucuaaaca

SEQ ID NO: 1589999 - RNA, 19 nt, Homo sapiens
  misc_RNA (1)...(19): siRNA sense strand
gaaucuagcaagguacaaa

SEQ ID NO: 1590000 - RNA, 19 nt, Homo sapiens
  misc_RNA (1)...(19): siRNA sense strand
ccugaugacugugaaucua

SEQ ID NO: 1590001 - RNA, 19 nt, Homo sapiens
  misc_RNA (1)...(19): siRNA sense strand
ugugauaggcaaaggauuu

SEQ ID NO: 1590002 - RNA, 19 nt, Homo sapiens
  misc_RNA (1)...(19): siRNA sense strand
aacaggaggucaugaguag

SEQ ID NO: 1590003 - RNA, 19 nt, Homo sapiens
  misc_RNA (1)...(19): siRNA sense strand
cuagaagcuuguuccaaug

SEQ ID NO: 1590004 - RNA, 19 nt, Homo sapiens
  misc_RNA (1)...(19): siRNA sense strand
uugaggaccugaugacugu

SEQ ID NO: 1590005 - RNA, 19 nt, Homo sapiens
  misc_RNA (1)...(19): siRNA sense strand
ggucaugaguagcuuucug

SEQ ID NO: 1590006 - RNA, 19 nt, Homo sapiens
  misc_RNA (1)...(19): siRNA sense strand
gugacuguacggaggauua

SEQ ID NO: 1590007 - RNA, 19 nt, Homo sapiens
  misc_RNA (1)...(19): siRNA sense strand
cgagcugcaugucuccaaa

SEQ ID NO: 1590008 - RNA, 19 nt, Homo sapiens
  misc_RNA (1)...(19): siRNA sense strand
gcugaggagcugaccauga

SEQ ID NO: 1590009 - RNA, 19 nt, Homo sapiens
  misc_RNA (1)...(19): siRNA sense strand
gcaugucuccaaacucuuc

SEQ ID NO: 1590010 - RNA, 19 nt, Homo sapiens
  misc_RNA (1)...(19): siRNA sense strand
caacggccauguccccuuu

SEQ ID NO: 1590011 - RNA, 19 nt, Homo sapiens
  misc_RNA (1)...(19): siRNA sense strand
agucugacaucuacagugu

SEQ ID NO: 1590012 - RNA, 19 nt, Homo sapiens
  misc_RNA (1)...(19): siRNA sense strand
gagcucagagucaauagca

SEQ ID NO: 1590013 - RNA, 19 nt, Homo sapiens
  misc_RNA (1)...(19): siRNA sense strand
gcugaaggcccucgacuac

SEQ ID NO: 1590014 - RNA, 19 nt, Homo sapiens
  misc_RNA (1)...(19): siRNA sense strand
aauagcauccuucucuaaa

SEQ ID NO: 1590015 - RNA, 19 nt, Homo sapiens
  misc_RNA (1)...(19): siRNA sense strand
gcaacccggaugccaggua

SEQ ID NO: 1590016 - RNA, 19 nt, Homo sapiens
  misc_RNA (1)...(19): siRNA sense strand
cugaggagcugaccaugag

SEQ ID NO: 1590017 - RNA, 19 nt, Homo sapiens
  misc_RNA (1)...(19): siRNA sense strand
cccagaugcugcuagagaa

SEQ ID NO: 1590018 - RNA, 19 nt, Homo sapiens
  misc_RNA (1)...(19): siRNA sense strand
cugcaugucuccaaacucu

SEQ ID NO: 1590019 - RNA, 19 nt, Homo sapiens
  misc_RNA (1)...(19): siRNA sense strand
cugugaaucuagcaaggua

SEQ ID NO: 1590020 - RNA, 19 nt, Homo sapiens
  misc_RNA (1)...(19): siRNA sense strand
cuagcaagguacaaaccaa

SEQ ID NO: 1590021 - RNA, 19 nt, Homo sapiens
  misc_RNA (1)...(19): siRNA sense strand
gucaauagcauccuucucu

SEQ ID NO: 1590022 - RNA, 19 nt, Homo sapiens
  misc_RNA (1)...(19): siRNA sense strand
cagcaaccucagcaugaua

SEQ ID NO: 1590023 - RNA, 19 nt, Homo sapiens
  misc_RNA (1)...(19): siRNA sense strand
cagagucaauagcauccuu

SEQ ID NO: 1590024 - RNA, 19 nt, Homo sapiens
  misc_RNA (1)...(19): siRNA sense strand
ucucaucuguacacacuuc

SEQ ID NO: 1590025 - RNA, 19 nt, Homo sapiens
  misc_RNA (1)...(19): siRNA sense strand
uagaagcuuguuccaauga

SEQ ID NO: 1590026 - RNA, 19 nt, Homo sapiens
  misc_RNA (1)...(19): siRNA sense strand
ccaaugaugcgagcucaga

SEQ ID NO: 1590027 - RNA, 19 nt, Homo sapiens
  misc_RNA (1)...(19): siRNA sense strand
ucuccaaacucuucaacca

SEQ ID NO: 1590028 - RNA, 19 nt, Homo sapiens
  misc_RNA (1)...(19): siRNA sense strand
ugccaagucugacaucuac

SEQ ID NO: 1590029 - RNA, 19 nt, Homo sapiens
  misc_RNA (1)...(19): siRNA sense strand
ugucaaagccagccacauc

SEQ ID NO: 1590030 - RNA, 19 nt, Homo sapiens
  misc_RNA (1)...(19): siRNA sense strand
cuucaaccaucccaauauc

SEQ ID NO: 1590031 - RNA, 19 nt, Homo sapiens
  misc_RNA (1)...(19): siRNA sense strand
ggcauacgguucugcaaaa

SEQ ID NO: 1590032 - RNA, 19 nt, Homo sapiens
  misc_RNA (1)...(19): siRNA sense strand
ccaaguacagugucaaggu

SEQ ID NO: 1590033 - RNA, 19 nt, Homo sapiens
  misc_RNA (1)...(19): siRNA sense strand
gaggaccugaugacuguga

SEQ ID NO: 1590034 - RNA, 19 nt, Homo sapiens
  misc_RNA (1)...(19): siRNA sense strand
caaaccaacaggagaguac

SEQ ID NO: 1590035 - RNA, 19 nt, Homo sapiens
  misc_RNA (1)...(19): siRNA sense strand
ccacuuccaccacuuugug

SEQ ID NO: 1590036 - RNA, 19 nt, Homo sapiens
  misc_RNA (1)...(19): siRNA sense strand
ccagaugcugcuagagaaa

SEQ ID NO: 1590037 - RNA, 19 nt, Homo sapiens
  misc_RNA (1)...(19): siRNA sense strand
uacggaggauuaaccuaga

SEQ ID NO: 1590038 - RNA, 19 nt, Homo sapiens
  misc_RNA (1)...(19): siRNA sense strand
ugccauaucgagccacuuu

SEQ ID NO: 1590039 - RNA, 19 nt, Homo sapiens
  misc_RNA (1)...(19): siRNA sense strand
gccacauccugaucucugu

SEQ ID NO: 1590040 - RNA, 19 nt, Homo sapiens
  misc_RNA (1)...(19): siRNA sense strand
cgacuacauccaccacaug

SEQ ID NO: 1590041 - RNA, 19 nt, Homo sapiens
  misc_RNA (1)...(19): siRNA sense strand
caucuacagugugggaauc

SEQ ID NO: 1590042 - RNA, 19 nt, Homo sapiens
  misc_RNA (1)...(19): siRNA sense strand
ugagaugguaacauucuug

SEQ ID NO: 1590043 - RNA, 19 nt, Homo sapiens
  misc_RNA (1)...(19): siRNA sense strand
ggauuugaggaccugauga

SEQ ID NO: 1590044 - RNA, 19 nt, Homo sapiens
  misc_RNA (1)...(19): siRNA sense strand
ggaggucaugaguagcuuu

SEQ ID NO: 1590045 - RNA, 19 nt, Homo sapiens
  misc_RNA (1)...(19): siRNA sense strand
ccauaucgagccacuuuua

SEQ ID NO: 1590046 - RNA, 19 nt, Homo sapiens
  misc_RNA (1)...(19): siRNA sense strand
ugacuguacggaggauuaa

SEQ ID NO: 1590047 - RNA, 19 nt, Homo sapiens
  misc_RNA (1)...(19): siRNA sense strand
uggcauacgguucugcaaa

SEQ ID NO: 1590048 - RNA, 19 nt, Homo sapiens
  misc_RNA (1)...(19): siRNA sense strand
caggagaguacgugacugu

SEQ ID NO: 1590049 - RNA, 19 nt, Homo sapiens
  misc_RNA (1)...(19): siRNA sense strand
uaaacaggaggucaugagu

SEQ ID NO: 1590050 - RNA, 19 nt, Homo sapiens
  misc_RNA (1)...(19): siRNA sense strand
cgcagcaaccucagcauga

SEQ ID NO: 1590051 - RNA, 19 nt, Homo sapiens
  misc_RNA (1)...(19): siRNA sense strand
gguugucacaucauucaug

SEQ ID NO: 1590052 - RNA, 19 nt, Homo sapiens
  misc_RNA (1)...(19): siRNA sense strand
cagaaucuccaggguuaug

SEQ ID NO: 1590053 - RNA, 19 nt, Homo sapiens
  misc_RNA (1)...(19): siRNA sense strand
caucuguacacacuucaug

SEQ ID NO: 1590054 - RNA, 19 nt, Homo sapiens
  misc_RNA (1)...(19): siRNA sense strand
ggguuaugaugccaagucu

SEQ ID NO: 1590055 - RNA, 19 nt, Homo sapiens
  misc_RNA (1)...(19): siRNA sense strand
gaaggcccucgacuacauc

SEQ ID NO: 1590056 - RNA, 19 nt, Homo sapiens
  misc_RNA (1)...(19): siRNA sense strand
ugaauaggcuccugaauua

SEQ ID NO: 1590057 - RNA, 19 nt, Homo sapiens
  misc_RNA (1)...(19): siRNA sense strand
uaacagagaugaccaguuu

SEQ ID NO: 1590058 - RNA, 19 nt, Homo sapiens
  misc_RNA (1)...(19): siRNA sense strand
gaacuugccuucagagaaa

SEQ ID NO: 1590059 - RNA, 19 nt, Homo sapiens
  misc_RNA (1)...(19): siRNA sense strand
ugaagaagaugcucucuaa

SEQ ID NO: 1590060 - RNA, 19 nt, Homo sapiens
  misc_RNA (1)...(19): siRNA sense strand
ggacaggccagauacauua

SEQ ID NO: 1590061 - RNA, 19 nt, Homo sapiens
  misc_RNA (1)...(19): siRNA sense strand
gauggaaacugguaauuau

SEQ ID NO: 1590062 - RNA, 19 nt, Homo sapiens
  misc_RNA (1)...(19): siRNA sense strand
gaaggaagauuauauugag

SEQ ID NO: 1590063 - RNA, 19 nt, Homo sapiens
  misc_RNA (1)...(19): siRNA sense strand
caaauucucuuuccugaug

SEQ ID NO: 1590064 - RNA, 19 nt, Homo sapiens
  misc_RNA (1)...(19): siRNA sense strand
gauaaggaauggauacaga

SEQ ID NO: 1590065 - RNA, 19 nt, Homo sapiens
  misc_RNA (1)...(19): siRNA sense strand
gggaagaaaucauaucuag

SEQ ID NO: 1590066 - RNA, 19 nt, Homo sapiens
  misc_RNA (1)...(19): siRNA sense strand
caacaagaaugucuaucaa

SEQ ID NO: 1590067 - RNA, 19 nt, Homo sapiens
  misc_RNA (1)...(19): siRNA sense strand
ggaagaagcucuggagaag

SEQ ID NO: 1590068 - RNA, 19 nt, Homo sapiens
  misc_RNA (1)...(19): siRNA sense strand
uaacuaagcuacuggaaag

SEQ ID NO: 1590069 - RNA, 19 nt, Homo sapiens
  misc_RNA (1)...(19): siRNA sense strand
gaacagcuccuaucagaca

SEQ ID NO: 1590070 - RNA, 19 nt, Homo sapiens
  misc_RNA (1)...(19): siRNA sense strand
agaaauggcugcucacaau

SEQ ID NO: 1590071 - RNA, 19 nt, Homo sapiens
  misc_RNA (1)...(19): siRNA sense strand
gaugaccaguuucacauuu

SEQ ID NO: 1590072 - RNA, 19 nt, Homo sapiens
  misc_RNA (1)...(19): siRNA sense strand
gaaagaagaauacuugaag

SEQ ID NO: 1590073 - RNA, 19 nt, Homo sapiens
  misc_RNA (1)...(19): siRNA sense strand
caaauaaggagccaggaua

SEQ ID NO: 1590074 - RNA, 19 nt, Homo sapiens
  misc_RNA (1)...(19): siRNA sense strand
gcaaugcuaccuucuauga

SEQ ID NO: 1590075 - RNA, 19 nt, Homo sapiens
  misc_RNA (1)...(19): siRNA sense strand
cgacagaacugccguaaaa

SEQ ID NO: 1590076 - RNA, 19 nt, Homo sapiens
  misc_RNA (1)...(19): siRNA sense strand
gaaauuagaacgagauaag

SEQ ID NO: 1590077 - RNA, 19 nt, Homo sapiens
  misc_RNA (1)...(19): siRNA sense strand
ggagaaggaagauuauauu

SEQ ID NO: 1590078 - RNA, 19 nt, Homo sapiens
  misc_RNA (1)...(19): siRNA sense strand
acaaguaccugaagaagau

SEQ ID NO: 1590079 - RNA, 19 nt, Homo sapiens
  misc_RNA (1)...(19): siRNA sense strand
gcaaguuauucaucacaaa

SEQ ID NO: 1590080 - RNA, 19 nt, Homo sapiens
  misc_RNA (1)...(19): siRNA sense strand
ggaguuugcuucuaaagag

SEQ ID NO: 1590081 - RNA, 19 nt, Homo sapiens
  misc_RNA (1)...(19): siRNA sense strand
ggaagaggauuuugacauu

SEQ ID NO: 1590082 - RNA, 19 nt, Homo sapiens
  misc_RNA (1)...(19): siRNA sense strand
ggaggaagaguauauugaa

SEQ ID NO: 1590083 - RNA, 19 nt, Homo sapiens
  misc_RNA (1)...(19): siRNA sense strand
uggcuaugcucaucuuaua

SEQ ID NO: 1590084 - RNA, 19 nt, Homo sapiens
  misc_RNA (1)...(19): siRNA sense strand
caaggcaaguuauucauca

SEQ ID NO: 1590085 - RNA, 19 nt, Homo sapiens
  misc_RNA (1)...(19): siRNA sense strand
aagagaaucuggauggaaa

SEQ ID NO: 1590086 - RNA, 19 nt, Homo sapiens
  misc_RNA (1)...(19): siRNA sense strand
ggaaagaagaauacuugaa

SEQ ID NO: 1590087 - RNA, 19 nt, Homo sapiens
  misc_RNA (1)...(19): siRNA sense strand
uaacagaugaguccauuga

SEQ ID NO: 1590088 - RNA, 19 nt, Homo sapiens
  misc_RNA (1)...(19): siRNA sense strand
gaacugccguaaaaucuuu

SEQ ID NO: 1590089 - RNA, 19 nt, Homo sapiens
  misc_RNA (1)...(19): siRNA sense strand
ggaagaguauauugaagag

SEQ ID NO: 1590090 - RNA, 19 nt, Homo sapiens
  misc_RNA (1)...(19): siRNA sense strand
cauagaggccgucaguaua

SEQ ID NO: 1590091 - RNA, 19 nt, Homo sapiens
  misc_RNA (1)...(19): siRNA sense strand
aagagcauguuaacacuaa

SEQ ID NO: 1590092 - RNA, 19 nt, Homo sapiens
  misc_RNA (1)...(19): siRNA sense strand
ggaagagcauguuaacacu

SEQ ID NO: 1590093 - RNA, 19 nt, Homo sapiens
  misc_RNA (1)...(19): siRNA sense strand
ucaaggugauggaaaauua

SEQ ID NO: 1590094 - RNA, 19 nt, Homo sapiens
  misc_RNA (1)...(19): siRNA sense strand
gaggagacgugaagcucaa

SEQ ID NO: 1590095 - RNA, 19 nt, Homo sapiens
  misc_RNA (1)...(19): siRNA sense strand
gagaaggaagauuauauug

SEQ ID NO: 1590096 - RNA, 19 nt, Homo sapiens
  misc_RNA (1)...(19): siRNA sense strand
ugagcgaaaugaagaagaa

SEQ ID NO: 1590097 - RNA, 19 nt, Homo sapiens
  misc_RNA (1)...(19): siRNA sense strand
gcuccaaccugggcuacua

SEQ ID NO: 1590098 - RNA, 19 nt, Homo sapiens
  misc_RNA (1)...(19): siRNA sense strand
guucaaggaaacaaucuua

SEQ ID NO: 1590099 - RNA, 19 nt, Homo sapiens
  misc_RNA (1)...(19): siRNA sense strand
ggaaguggaagauuuagau

SEQ ID NO: 1590100 - RNA, 19 nt, Homo sapiens
  misc_RNA (1)...(19): siRNA sense strand
gcuggaaguggaagauuua

SEQ ID NO: 1590101 - RNA, 19 nt, Homo sapiens
  misc_RNA (1)...(19): siRNA sense strand
gggaugguauaacagauga

SEQ ID NO: 1590102 - RNA, 19 nt, Homo sapiens
  misc_RNA (1)...(19): siRNA sense strand
ggaggaagaggaucuggaa

SEQ ID NO: 1590103 - RNA, 19 nt, Homo sapiens
  misc_RNA (1)...(19): siRNA sense strand
gacaacaaguaccugaaga

SEQ ID NO: 1590104 - RNA, 19 nt, Homo sapiens
  misc_RNA (1)...(19): siRNA sense strand
gaagagcauguuaacacua

SEQ ID NO: 1590105 - RNA, 19 nt, Homo sapiens
  misc_RNA (1)...(19): siRNA sense strand
ucacaaaccaugcuucuuc

SEQ ID NO: 1590106 - RNA, 19 nt, Homo sapiens
  misc_RNA (1)...(19): siRNA sense strand
aagaagcucuggagaagga

SEQ ID NO: 1590107 - RNA, 19 nt, Homo sapiens
  misc_RNA (1)...(19): siRNA sense strand
ggaagaggaucuggaagag

SEQ ID NO: 1590108 - RNA, 19 nt, Homo sapiens
  misc_RNA (1)...(19): siRNA sense strand
uugaacagcuccuaucaga

SEQ ID NO: 1590109 - RNA, 19 nt, Homo sapiens
  misc_RNA (1)...(19): siRNA sense strand
ggaagagaaucuggaugga

SEQ ID NO: 1590110 - RNA, 19 nt, Homo sapiens
  misc_RNA (1)...(19): siRNA sense strand
gaagaaauuagaacgagau

SEQ ID NO: 1590111 - RNA, 19 nt, Homo sapiens
  misc_RNA (1)...(19): siRNA sense strand
uauaacagaugaguccauu

SEQ ID NO: 1590112 - RNA, 19 nt, Homo sapiens
  misc_RNA (1)...(19): siRNA sense strand
gaagagaaucuggauggaa

SEQ ID NO: 1590113 - RNA, 19 nt, Homo sapiens
  misc_RNA (1)...(19): siRNA sense strand
gaacccaaggcaaguuauu

SEQ ID NO: 1590114 - RNA, 19 nt, Homo sapiens
  misc_RNA (1)...(19): siRNA sense strand
gaagcagauuuguuuaaac

SEQ ID NO: 1590115 - RNA, 19 nt, Homo sapiens
  misc_RNA (1)...(19): siRNA sense strand
gaaaucagaaacagagcaa

SEQ ID NO: 1590116 - RNA, 19 nt, Homo sapiens
  misc_RNA (1)...(19): siRNA sense strand
aaacagauggaaacuggua

SEQ ID NO: 1590117 - RNA, 19 nt, Homo sapiens
  misc_RNA (1)...(19): siRNA sense strand
gaagaagaugcucucuaaa

SEQ ID NO: 1590118 - RNA, 19 nt, Homo sapiens
  misc_RNA (1)...(19): siRNA sense strand
gaauggauacagaagaaga

SEQ ID NO: 1590119 - RNA, 19 nt, Homo sapiens
  misc_RNA (1)...(19): siRNA sense strand
acacagaacuugccuucag

SEQ ID NO: 1590120 - RNA, 19 nt, Homo sapiens
  misc_RNA (1)...(19): siRNA sense strand
cagaagcagauuuguuuaa

SEQ ID NO: 1590121 - RNA, 19 nt, Homo sapiens
  misc_RNA (1)...(19): siRNA sense strand
ccaacaagaaugucuauca

SEQ ID NO: 1590122 - RNA, 19 nt, Homo sapiens
  misc_RNA (1)...(19): siRNA sense strand
gcucaaaaguuaacagaga

SEQ ID NO: 1590123 - RNA, 19 nt, Homo sapiens
  misc_RNA (1)...(19): siRNA sense strand
gaagcuggcuccggaagag

SEQ ID NO: 1590124 - RNA, 19 nt, Homo sapiens
  misc_RNA (1)...(19): siRNA sense strand
ggaagaguaucuggagaag

SEQ ID NO: 1590125 - RNA, 19 nt, Homo sapiens
  misc_RNA (1)...(19): siRNA sense strand
ugagaagccugagacagaa

SEQ ID NO: 1590126 - RNA, 19 nt, Homo sapiens
  misc_RNA (1)...(19): siRNA sense strand
gaaagaacccaaggcaagu

SEQ ID NO: 1590127 - RNA, 19 nt, Homo sapiens
  misc_RNA (1)...(19): siRNA sense strand
aaggguaucuggagaagga

SEQ ID NO: 1590128 - RNA, 19 nt, Homo sapiens
  misc_RNA (1)...(19): siRNA sense strand
gaggaagaguauauugaag

SEQ ID NO: 1590129 - RNA, 19 nt, Homo sapiens
  misc_RNA (1)...(19): siRNA sense strand
aagaguaucuggagaaggu

SEQ ID NO: 1590130 - RNA, 19 nt, Homo sapiens
  misc_RNA (1)...(19): siRNA sense strand
ggaagaaaucauaucuaga

SEQ ID NO: 1590131 - RNA, 19 nt, Homo sapiens
  misc_RNA (1)...(19): siRNA sense strand
gaaggaagagaaucuggau

SEQ ID NO: 1590132 - RNA, 19 nt, Homo sapiens
  misc_RNA (1)...(19): siRNA sense strand
aguggaagauuuagaugaa

SEQ ID NO: 1590133 - RNA, 19 nt, Homo sapiens
  misc_RNA (1)...(19): siRNA sense strand
gaaaaucaaugaguacauc

SEQ ID NO: 1590134 - RNA, 19 nt, Homo sapiens
  misc_RNA (1)...(19): siRNA sense strand
aggaauggauacagaagaa

SEQ ID NO: 1590135 - RNA, 19 nt, Homo sapiens
  misc_RNA (1)...(19): siRNA sense strand
aggaaagucuacaggauga

SEQ ID NO: 1590136 - RNA, 19 nt, Homo sapiens
  misc_RNA (1)...(19): siRNA sense strand
cuaagcuacuggaaaguga

SEQ ID NO: 1590137 - RNA, 19 nt, Homo sapiens
  misc_RNA (1)...(19): siRNA sense strand
ggaaggguaucuggagaag

SEQ ID NO: 1590138 - RNA, 19 nt, Homo sapiens
  misc_RNA (1)...(19): siRNA sense strand
agaagaugcucucuaaacu

SEQ ID NO: 1590139 - RNA, 19 nt, Homo sapiens
  misc_RNA (1)...(19): siRNA sense strand
cugaguugcuucugacauu

SEQ ID NO: 1590140 - RNA, 19 nt, Homo sapiens
  misc_RNA (1)...(19): siRNA sense strand
ugaggaaagucuacaggau

SEQ ID NO: 1590141 - RNA, 19 nt, Homo sapiens
  misc_RNA (1)...(19): siRNA sense strand
gaaucuggauggaaaagaa

SEQ ID NO: 1590142 - RNA, 19 nt, Homo sapiens
  misc_RNA (1)...(19): siRNA sense strand
aaauaaggagccaggauaa

SEQ ID NO: 1590143 - RNA, 19 nt, Homo sapiens
  misc_RNA (1)...(19): siRNA sense strand
gaaauggcugcucacaaug

SEQ ID NO: 1590144 - RNA, 19 nt, Homo sapiens
  misc_RNA (1)...(19): siRNA sense strand
ggaaaaggcucuggagaag

SEQ ID NO: 1590145 - RNA, 19 nt, Homo sapiens
  misc_RNA (1)...(19): siRNA sense strand
ggacaacaaguaccugaag

SEQ ID NO: 1590146 - RNA, 19 nt, Homo sapiens
  misc_RNA (1)...(19): siRNA sense strand
ucauagaggccgucaguau

SEQ ID NO: 1590147 - RNA, 19 nt, Homo sapiens
  misc_RNA (1)...(19): siRNA sense strand
aaugcuaccuucuaugaug

SEQ ID NO: 1590148 - RNA, 19 nt, Homo sapiens
  misc_RNA (1)...(19): siRNA sense strand
agaagacaguggugcauca

SEQ ID NO: 1590149 - RNA, 19 nt, Homo sapiens
  misc_RNA (1)...(19): siRNA sense strand
ugacugucccguugacuuu

SEQ ID NO: 1590150 - RNA, 19 nt, Homo sapiens
  misc_RNA (1)...(19): siRNA sense strand
gaguuugcuucuaaagaga

SEQ ID NO: 1590151 - RNA, 19 nt, Homo sapiens
  misc_RNA (1)...(19): siRNA sense strand
caaccugggcuacuacuuc

SEQ ID NO: 1590152 - RNA, 19 nt, Homo sapiens
  misc_RNA (1)...(19): siRNA sense strand
gcuaugcucaucuuauaug

SEQ ID NO: 1590153 - RNA, 19 nt, Homo sapiens
  misc_RNA (1)...(19): siRNA sense strand
gcaaaccaacaccugagaa

SEQ ID NO: 1590154 - RNA, 19 nt, Homo sapiens
  misc_RNA (1)...(19): siRNA sense strand
agauggaaacugguaauua

SEQ ID NO: 1590155 - RNA, 19 nt, Homo sapiens
  misc_RNA (1)...(19): siRNA sense strand
gaagaugcucucuaaacuc

SEQ ID NO: 1590156 - RNA, 19 nt, Homo sapiens
  misc_RNA (1)...(19): siRNA sense strand
ggaccuaccugugggaguu

SEQ ID NO: 1590157 - RNA, 19 nt, Homo sapiens
  misc_RNA (1)...(19): siRNA sense strand
caacggccaugucaagacu

SEQ ID NO: 1590158 - RNA, 19 nt, Homo sapiens
  misc_RNA (1)...(19): siRNA sense strand
ccaguucgacuuugacuuc

SEQ ID NO: 1590159 - RNA, 19 nt, Homo sapiens
  misc_RNA (1)...(19): siRNA sense strand
guucgacuuugacuucaug

SEQ ID NO: 1590160 - RNA, 19 nt, Homo sapiens
  misc_RNA (1)...(19): siRNA sense strand
ugugggcccucuucaucua

SEQ ID NO: 1590161 - RNA, 19 nt, Homo sapiens
  misc_RNA (1)...(19): siRNA sense strand
gcaccuccauccucaucgu

SEQ ID NO: 1590162 - RNA, 19 nt, Homo sapiens
  misc_RNA (1)...(19): siRNA sense strand
ccugggaguucguggugaa

SEQ ID NO: 1590163 - RNA, 19 nt, Homo sapiens
  misc_RNA (1)...(19): siRNA sense strand
ucuacacgcucuggaccua

SEQ ID NO: 1590164 - RNA, 19 nt, Homo sapiens
  misc_RNA (1)...(19): siRNA sense strand
ucacagcggccugggaguu

SEQ ID NO: 1590165 - RNA, 19 nt, Homo sapiens
  misc_RNA (1)...(19): siRNA sense strand
acucccaguucgacuuuga

SEQ ID NO: 1590166 - RNA, 19 nt, Homo sapiens
  misc_RNA (1)...(19): siRNA sense strand
cuacucccaguucgacuuu

SEQ ID NO: 1590167 - RNA, 19 nt, Homo sapiens
  misc_RNA (1)...(19): siRNA sense strand
caaggccggugcuguguac

SEQ ID NO: 1590168 - RNA, 19 nt, Homo sapiens
  misc_RNA (1)...(19): siRNA sense strand
guaccuccuccacgacaaa

SEQ ID NO: 1590169 - RNA, 19 nt, Homo sapiens
  misc_RNA (1)...(19): siRNA sense strand
cgacaaaaggggaaacuga

SEQ ID NO: 1590170 - RNA, 19 nt, Homo sapiens
  misc_RNA (1)...(19): siRNA sense strand
ccaaggccggugcugugua

SEQ ID NO: 1590171 - RNA, 19 nt, Homo sapiens
  misc_RNA (1)...(19): siRNA sense strand
cgacgacacugcacugaau

SEQ ID NO: 1590172 - RNA, 19 nt, Homo sapiens
  misc_RNA (1)...(19): siRNA sense strand
gcgccuaccuaguggcuuu

SEQ ID NO: 1590173 - RNA, 19 nt, Homo sapiens
  misc_RNA (1)...(19): siRNA sense strand
gcaauacgcacgugguaga

SEQ ID NO: 1590174 - RNA, 19 nt, Homo sapiens
  misc_RNA (1)...(19): siRNA sense strand
gggaacguccuaggcaaua

SEQ ID NO: 1590175 - RNA, 19 nt, Homo sapiens
  misc_RNA (1)...(19): siRNA sense strand
cuagaggccucggcgauga

SEQ ID NO: 1590176 - RNA, 19 nt, Homo sapiens
  misc_RNA (1)...(19): siRNA sense strand
ugagaugugucccgaugga

SEQ ID NO: 1590177 - RNA, 19 nt, Homo sapiens
  misc_RNA (1)...(19): siRNA sense strand
ccacgacccucggugacaa

SEQ ID NO: 1590178 - RNA, 19 nt, Homo sapiens
  misc_RNA (1)...(19): siRNA sense strand
gagacuggagugaccauug

SEQ ID NO: 1590179 - RNA, 19 nt, Homo sapiens
  misc_RNA (1)...(19): siRNA sense strand
acacggcggucaucgaagu

SEQ ID NO: 1590180 - RNA, 19 nt, Homo sapiens
  misc_RNA (1)...(19): siRNA sense strand
gacccucggugacaacaca

SEQ ID NO: 1590181 - RNA, 19 nt, Homo sapiens
  misc_RNA (1)...(19): siRNA sense strand
gcgacugguuucacaugug

SEQ ID NO: 1590182 - RNA, 19 nt, Homo sapiens
  misc_RNA (1)...(19): siRNA sense strand
gcgaugacacugcgcugaa

SEQ ID NO: 1590183 - RNA, 19 nt, Homo sapiens
  misc_RNA (1)...(19): siRNA sense strand
cuacacggcggucaucgaa

SEQ ID NO: 1590184 - RNA, 19 nt, Homo sapiens
  misc_RNA (1)...(19): siRNA sense strand
gaugugucccgauggauuc

SEQ ID NO: 1590185 - RNA, 19 nt, Homo sapiens
  misc_RNA (1)...(19): siRNA sense strand
caacacagcagcgaacaac

SEQ ID NO: 1590186 - RNA, 19 nt, Homo sapiens
  misc_RNA (1)...(19): siRNA sense strand
ggaacguccuaggcaauac

SEQ ID NO: 1590187 - RNA, 19 nt, Homo sapiens
  misc_RNA (1)...(19): siRNA sense strand
ucacaugugcacagacaga

SEQ ID NO: 1590188 - RNA, 19 nt, Homo sapiens
  misc_RNA (1)...(19): siRNA sense strand
caagauccagggaccuaga

SEQ ID NO: 1590189 - RNA, 19 nt, Homo sapiens
  misc_RNA (1)...(19): siRNA sense strand
ggcgacugguuucacaugu

SEQ ID NO: 1590190 - RNA, 19 nt, Homo sapiens
  misc_RNA (1)...(19): siRNA sense strand
uuucacaugugcacagaca

SEQ ID NO: 1590191 - RNA, 19 nt, Homo sapiens
  misc_RNA (1)...(19): siRNA sense strand
agacuggagugaccauugc

SEQ ID NO: 1590192 - RNA, 19 nt, Homo sapiens
  misc_RNA (1)...(19): siRNA sense strand
gcgacgacacugcacugaa

SEQ ID NO: 1590193 - RNA, 19 nt, Homo sapiens
  misc_RNA (1)...(19): siRNA sense strand
aacgugcgcuuccgcuguu

SEQ ID NO: 1590194 - RNA, 19 nt, Homo sapiens
  misc_RNA (1)...(19): siRNA sense strand
gguuucacaugugcacaga

SEQ ID NO: 1590195 - RNA, 19 nt, Homo sapiens
  misc_RNA (1)...(19): siRNA sense strand
gggcgacugguuucacaug

SEQ ID NO: 1590196 - RNA, 19 nt, Homo sapiens
  misc_RNA (1)...(19): siRNA sense strand
ggaaguagaugaugaggaa

SEQ ID NO: 1590197 - RNA, 19 nt, Homo sapiens
  misc_RNA (1)...(19): siRNA sense strand
gcaagaaaaucgaaguuua

SEQ ID NO: 1590198 - RNA, 19 nt, Homo sapiens
  misc_RNA (1)...(19): siRNA sense strand
gaaguuaugagaugaauga

SEQ ID NO: 1590199 - RNA, 19 nt, Homo sapiens
  misc_RNA (1)...(19): siRNA sense strand
gaugauuucucucuucuug

SEQ ID NO: 1590200 - RNA, 19 nt, Homo sapiens
  misc_RNA (1)...(19): siRNA sense strand
uggagaagccuaagaaaua

SEQ ID NO: 1590201 - RNA, 19 nt, Homo sapiens
  misc_RNA (1)...(19): siRNA sense strand
ggaauaagaagaugaugaa

SEQ ID NO: 1590202 - RNA, 19 nt, Homo sapiens
  misc_RNA (1)...(19): siRNA sense strand
gaaccaagcguuucuucaa

SEQ ID NO: 1590203 - RNA, 19 nt, Homo sapiens
  misc_RNA (1)...(19): siRNA sense strand
ucagagaaguuaugagaug

SEQ ID NO: 1590204 - RNA, 19 nt, Homo sapiens
  misc_RNA (1)...(19): siRNA sense strand
gaaauacaauccaggucau

SEQ ID NO: 1590205 - RNA, 19 nt, Homo sapiens
  misc_RNA (1)...(19): siRNA sense strand
caauacagucgaagugaua

SEQ ID NO: 1590206 - RNA, 19 nt, Homo sapiens
  misc_RNA (1)...(19): siRNA sense strand
ggagaagccuaagaaauac

SEQ ID NO: 1590207 - RNA, 19 nt, Homo sapiens
  misc_RNA (1)...(19): siRNA sense strand
gcaaauauggaacaaaugg

SEQ ID NO: 1590208 - RNA, 19 nt, Homo sapiens
  misc_RNA (1)...(19): siRNA sense strand
uaaugacaguagagaagua

SEQ ID NO: 1590209 - RNA, 19 nt, Homo sapiens
  misc_RNA (1)...(19): siRNA sense strand
gaggaugauuucucucuuc

SEQ ID NO: 1590210 - RNA, 19 nt, Homo sapiens
  misc_RNA (1)...(19): siRNA sense strand
gauagcagcaagaagaauu

SEQ ID NO: 1590211 - RNA, 19 nt, Homo sapiens
  misc_RNA (1)...(19): siRNA sense strand
gcaaggcagugaccaagag

SEQ ID NO: 1590212 - RNA, 19 nt, Homo sapiens
  misc_RNA (1)...(19): siRNA sense strand
caaauggaaccaagcguuu

SEQ ID NO: 1590213 - RNA, 19 nt, Homo sapiens
  misc_RNA (1)...(19): siRNA sense strand
ggacuggugucaacaacuc

SEQ ID NO: 1590214 - RNA, 19 nt, Homo sapiens
  misc_RNA (1)...(19): siRNA sense strand
ccauuucgccucccauuaa

SEQ ID NO: 1590215 - RNA, 19 nt, Homo sapiens
  misc_RNA (1)...(19): siRNA sense strand
ccugaaaugucacaagaga

SEQ ID NO: 1590216 - RNA, 19 nt, Homo sapiens
  misc_RNA (1)...(19): siRNA sense strand
caagauaugccugaaaugu

SEQ ID NO: 1590217 - RNA, 19 nt, Homo sapiens
  misc_RNA (1)...(19): siRNA sense strand
ugauuucucucuucuuguu

SEQ ID NO: 1590218 - RNA, 19 nt, Homo sapiens
  misc_RNA (1)...(19): siRNA sense strand
agauaugccugaaauguca

SEQ ID NO: 1590219 - RNA, 19 nt, Homo sapiens
  misc_RNA (1)...(19): siRNA sense strand
gcuaagaggaauaagaaga

SEQ ID NO: 1590220 - RNA, 19 nt, Homo sapiens
  misc_RNA (1)...(19): siRNA sense strand
ggaggaugauuucucucuu

SEQ ID NO: 1590221 - RNA, 19 nt, Homo sapiens
  misc_RNA (1)...(19): siRNA sense strand
acgcaaauauggaacaaau

SEQ ID NO: 1590222 - RNA, 19 nt, Homo sapiens
  misc_RNA (1)...(19): siRNA sense strand
gagaaguuaugagaugaau

SEQ ID NO: 1590223 - RNA, 19 nt, Homo sapiens
  misc_RNA (1)...(19): siRNA sense strand
ggucaucuacuucaaacaa

SEQ ID NO: 1590224 - RNA, 19 nt, Homo sapiens
  misc_RNA (1)...(19): siRNA sense strand
caauccaggucaucuacuu

SEQ ID NO: 1590225 - RNA, 19 nt, Homo sapiens
  misc_RNA (1)...(19): siRNA sense strand
gugcuaagaggaauaagaa

SEQ ID NO: 1590226 - RNA, 19 nt, Homo sapiens
  misc_RNA (1)...(19): siRNA sense strand
cagaagagaccaauacagu

SEQ ID NO: 1590227 - RNA, 19 nt, Homo sapiens
  misc_RNA (1)...(19): siRNA sense strand
gagcagaagagaccaauac

SEQ ID NO: 1590228 - RNA, 19 nt, Homo sapiens
  misc_RNA (1)...(19): siRNA sense strand
cagagaaguuaugagauga

SEQ ID NO: 1590229 - RNA, 19 nt, Homo sapiens
  misc_RNA (1)...(19): siRNA sense strand
uaaagaugacgcaaauaug

SEQ ID NO: 1590230 - RNA, 19 nt, Homo sapiens
  misc_RNA (1)...(19): siRNA sense strand
gaacaacggcaagauaugc

SEQ ID NO: 1590231 - RNA, 19 nt, Homo sapiens
  misc_RNA (1)...(19): siRNA sense strand
caauuuacagcuccacaaa

SEQ ID NO: 1590232 - RNA, 19 nt, Homo sapiens
  misc_RNA (1)...(19): siRNA sense strand
uaagaggaauaagaagaug

SEQ ID NO: 1590233 - RNA, 19 nt, Homo sapiens
  misc_RNA (1)...(19): siRNA sense strand
cuaaggcuuugaauucaug

SEQ ID NO: 1590234 - RNA, 19 nt, Homo sapiens
  misc_RNA (1)...(19): siRNA sense strand
ccaauacagucgaagugau

SEQ ID NO: 1590235 - RNA, 19 nt, Homo sapiens
  misc_RNA (1)...(19): siRNA sense strand
gaguacuaauggcaagaaa

SEQ ID NO: 1590236 - RNA, 19 nt, Homo sapiens
  misc_RNA (1)...(19): siRNA sense strand
cuuguuaccugccugcauu

SEQ ID NO: 1590237 - RNA, 19 nt, Homo sapiens
  misc_RNA (1)...(19): siRNA sense strand
ccaagcguuucuucaacuu

SEQ ID NO: 1590238 - RNA, 19 nt, Homo sapiens
  misc_RNA (1)...(19): siRNA sense strand
aguuaaagaugacgcaaau

SEQ ID NO: 1590239 - RNA, 19 nt, Homo sapiens
  misc_RNA (1)...(19): siRNA sense strand
gcaauuuacagcuccacaa

SEQ ID NO: 1590240 - RNA, 19 nt, Homo sapiens
  misc_RNA (1)...(19): siRNA sense strand
gaugaggaaagugugauuu

SEQ ID NO: 1590241 - RNA, 19 nt, Homo sapiens
  misc_RNA (1)...(19): siRNA sense strand
aaagaugacgcaaauaugg

SEQ ID NO: 1590242 - RNA, 19 nt, Homo sapiens
  misc_RNA (1)...(19): siRNA sense strand
gucaucuacuucaaacaaa

SEQ ID NO: 1590243 - RNA, 19 nt, Homo sapiens
  misc_RNA (1)...(19): siRNA sense strand
gcagugaccaagagagcaa

SEQ ID NO: 1590244 - RNA, 19 nt, Homo sapiens
  misc_RNA (1)...(19): siRNA sense strand
ccugaacaacggcaagaua

SEQ ID NO: 1590245 - RNA, 19 nt, Homo sapiens
  misc_RNA (1)...(19): siRNA sense strand
ggguacgccugcaguuuca

SEQ ID NO: 1590246 - RNA, 19 nt, Homo sapiens
  misc_RNA (1)...(19): siRNA sense strand
gaugaugaggaaaguguga

SEQ ID NO: 1590247 - RNA, 19 nt, Homo sapiens
  misc_RNA (1)...(19): siRNA sense strand
acaggaggaugauuucucu

SEQ ID NO: 1590248 - RNA, 19 nt, Homo sapiens
  misc_RNA (1)...(19): siRNA sense strand
ugaaugagagagcagaaga

SEQ ID NO: 1590249 - RNA, 19 nt, Homo sapiens
  misc_RNA (1)...(19): siRNA sense strand
ugccugaaaugucacaaga

SEQ ID NO: 1590250 - RNA, 19 nt, Homo sapiens
  misc_RNA (1)...(19): siRNA sense strand
ggaaccaagcguuucuuca

SEQ ID NO: 1590251 - RNA, 19 nt, Homo sapiens
  misc_RNA (1)...(19): siRNA sense strand
gaaaaucgaaguuuaucug

SEQ ID NO: 1590252 - RNA, 19 nt, Homo sapiens
  misc_RNA (1)...(19): siRNA sense strand
gcaagauaugccugaaaug

SEQ ID NO: 1590253 - RNA, 19 nt, Homo sapiens
  misc_RNA (1)...(19): siRNA sense strand
gagagcaaggcuucagaga

SEQ ID NO: 1590254 - RNA, 19 nt, Homo sapiens
  misc_RNA (1)...(19): siRNA sense strand
ucagaugcaaauuuggaua

SEQ ID NO: 1590255 - RNA, 19 nt, Homo sapiens
  misc_RNA (1)...(19): siRNA sense strand
cuaagaggaauaagaagau

SEQ ID NO: 1590256 - RNA, 19 nt, Homo sapiens
  misc_RNA (1)...(19): siRNA sense strand
ugacgcaaauauggaacaa

SEQ ID NO: 1590257 - RNA, 19 nt, Homo sapiens
  misc_RNA (1)...(19): siRNA sense strand
cauguuccauucccguuuc

SEQ ID NO: 1590258 - RNA, 19 nt, Homo sapiens
  misc_RNA (1)...(19): siRNA sense strand
gucacaagagaccagauua

SEQ ID NO: 1590259 - RNA, 19 nt, Homo sapiens
  misc_RNA (1)...(19): siRNA sense strand
ccaggucaucuacuucaaa

SEQ ID NO: 1590260 - RNA, 19 nt, Homo sapiens
  misc_RNA (1)...(19): siRNA sense strand
cgacugugcuaagaggaau

SEQ ID NO: 1590261 - RNA, 19 nt, Homo sapiens
  misc_RNA (1)...(19): siRNA sense strand
acucacaggaggaugauuu

SEQ ID NO: 1590262 - RNA, 19 nt, Homo sapiens
  misc_RNA (1)...(19): siRNA sense strand
gaccaauacagucgaagug

SEQ ID NO: 1590263 - RNA, 19 nt, Homo sapiens
  misc_RNA (1)...(19): siRNA sense strand
caacuucugaugucaaacu

SEQ ID NO: 1590264 - RNA, 19 nt, Homo sapiens
  misc_RNA (1)...(19): siRNA sense strand
gauuaaugacaguagagaa

SEQ ID NO: 1590265 - RNA, 19 nt, Homo sapiens
  misc_RNA (1)...(19): siRNA sense strand
agacuucucucggcagaca

SEQ ID NO: 1590266 - RNA, 19 nt, Homo sapiens
  misc_RNA (1)...(19): siRNA sense strand
ccauucccguuucuguuga

SEQ ID NO: 1590267 - RNA, 19 nt, Homo sapiens
  misc_RNA (1)...(19): siRNA sense strand
gaccauuucgccucccauu

SEQ ID NO: 1590268 - RNA, 19 nt, Homo sapiens
  misc_RNA (1)...(19): siRNA sense strand
gaugcaaauuuggauagca

SEQ ID NO: 1590269 - RNA, 19 nt, Homo sapiens
  misc_RNA (1)...(19): siRNA sense strand
uuucgccucccauuaauaa

SEQ ID NO: 1590270 - RNA, 19 nt, Homo sapiens
  misc_RNA (1)...(19): siRNA sense strand
gaggaaagugugauuuuga

SEQ ID NO: 1590271 - RNA, 19 nt, Homo sapiens
  misc_RNA (1)...(19): siRNA sense strand
agagaccaauacagucgaa

SEQ ID NO: 1590272 - RNA, 19 nt, Homo sapiens
  misc_RNA (1)...(19): siRNA sense strand
ucaaacuggagaagccuaa

SEQ ID NO: 1590273 - RNA, 19 nt, Homo sapiens
  misc_RNA (1)...(19): siRNA sense strand
guuuaucugaggcuucaua

SEQ ID NO: 1590274 - RNA, 19 nt, Homo sapiens
  misc_RNA (1)...(19): siRNA sense strand
cauuucgccucccauuaau

SEQ ID NO: 1590275 - RNA, 19 nt, Homo sapiens
  misc_RNA (1)...(19): siRNA sense strand
aaagcuagaugcaaaauac

SEQ ID NO: 1590276 - RNA, 19 nt, Homo sapiens
  misc_RNA (1)...(19): siRNA sense strand
caaauauggaacaaaugga

SEQ ID NO: 1590277 - RNA, 19 nt, Homo sapiens
  misc_RNA (1)...(19): siRNA sense strand
ccaggcauagaagauaaua

SEQ ID NO: 1590278 - RNA, 19 nt, Homo sapiens
  misc_RNA (1)...(19): siRNA sense strand
gauuucucucuucuuguua

SEQ ID NO: 1590279 - RNA, 19 nt, Homo sapiens
  misc_RNA (1)...(19): siRNA sense strand
gcaucaugggcaagaauug

SEQ ID NO: 1590280 - RNA, 19 nt, Homo sapiens
  misc_RNA (1)...(19): siRNA sense strand
uuggauagcagcaagaaga

SEQ ID NO: 1590281 - RNA, 19 nt, Homo sapiens
  misc_RNA (1)...(19): siRNA sense strand
gcagaagagaccaauacag

SEQ ID NO: 1590282 - RNA, 19 nt, Homo sapiens
  misc_RNA (1)...(19): siRNA sense strand
agagcaaggcuucagagaa

SEQ ID NO: 1590283 - RNA, 19 nt, Homo sapiens
  misc_RNA (1)...(19): siRNA sense strand
caggucaucuacuucaaac

SEQ ID NO: 1590284 - RNA, 19 nt, Homo sapiens
  misc_RNA (1)...(19): siRNA sense strand
ccuaaggcuuugaauucau

SEQ ID NO: 1590285 - RNA, 19 nt, Homo sapiens
  misc_RNA (1)...(19): siRNA sense strand
gaugaaugagagagcagaa

SEQ ID NO: 1590286 - RNA, 19 nt, Homo sapiens
  misc_RNA (1)...(19): siRNA sense strand
cugaacaacggcaagauau

SEQ ID NO: 1590287 - RNA, 19 nt, Homo sapiens
  misc_RNA (1)...(19): siRNA sense strand
ggugucaacaacucgguuu

SEQ ID NO: 1590288 - RNA, 19 nt, Homo sapiens
  misc_RNA (1)...(19): siRNA sense strand
guacuaauggcaagaaaau

SEQ ID NO: 1590289 - RNA, 19 nt, Homo sapiens
  misc_RNA (1)...(19): siRNA sense strand
uagaugaugaggaaagugu

SEQ ID NO: 1590290 - RNA, 19 nt, Homo sapiens
  misc_RNA (1)...(19): siRNA sense strand
cacaagagaccagauuaca

SEQ ID NO: 1590291 - RNA, 19 nt, Homo sapiens
  misc_RNA (1)...(19): siRNA sense strand
ugaacaacggcaagauaug

SEQ ID NO: 1590292 - RNA, 19 nt, Homo sapiens
  misc_RNA (1)...(19): siRNA sense strand
aaacuggagaagccuaaga

SEQ ID NO: 1590293 - RNA, 19 nt, Homo sapiens
  misc_RNA (1)...(19): siRNA sense strand
uucaacuucugaugucaaa

SEQ ID NO: 1590294 - RNA, 19 nt, Homo sapiens
  misc_RNA (1)...(19): siRNA sense strand
gaaugagagagcagaagag

SEQ ID NO: 1590295 - RNA, 19 nt, Homo sapiens
  misc_RNA (1)...(19): siRNA sense strand
uaggcaugcuuacccugaa

SEQ ID NO: 1590296 - RNA, 19 nt, Homo sapiens
  misc_RNA (1)...(19): siRNA sense strand
gcacaucuuucauggauuc

SEQ ID NO: 1590297 - RNA, 19 nt, Homo sapiens
  misc_RNA (1)...(19): siRNA sense strand
ucaaagugguggcaaauau

SEQ ID NO: 1590298 - RNA, 19 nt, Homo sapiens
  misc_RNA (1)...(19): siRNA sense strand
gagaaagccucgugaaacu

SEQ ID NO: 1590299 - RNA, 19 nt, Homo sapiens
  misc_RNA (1)...(19): siRNA sense strand
gcaaauaucaagagugaau

SEQ ID NO: 1590300 - RNA, 19 nt, Homo sapiens
  misc_RNA (1)...(19): siRNA sense strand
uggcaaauaucaagaguga

SEQ ID NO: 1590301 - RNA, 19 nt, Homo sapiens
  misc_RNA (1)...(19): siRNA sense strand
gaaagccucgugaaacuga

SEQ ID NO: 1590302 - RNA, 19 nt, Homo sapiens
  misc_RNA (1)...(19): siRNA sense strand
gcaaaugcugcacaucuuu

SEQ ID NO: 1590303 - RNA, 19 nt, Homo sapiens
  misc_RNA (1)...(19): siRNA sense strand
caaaguacaugacuaucuc

SEQ ID NO: 1590304 - RNA, 19 nt, Homo sapiens
  misc_RNA (1)...(19): siRNA sense strand
gaggugaaauucggacauu

SEQ ID NO: 1590305 - RNA, 19 nt, Homo sapiens
  misc_RNA (1)...(19): siRNA sense strand
gaagagaaagccucgugaa

SEQ ID NO: 1590306 - RNA, 19 nt, Homo sapiens
  misc_RNA (1)...(19): siRNA sense strand
ugacaagcuuccaccauga

SEQ ID NO: 1590307 - RNA, 19 nt, Homo sapiens
  misc_RNA (1)...(19): siRNA sense strand
ggaucaaagugguggcaaa

SEQ ID NO: 1590308 - RNA, 19 nt, Homo sapiens
  misc_RNA (1)...(19): siRNA sense strand
gauauguuauggccaaagu

SEQ ID NO: 1590309 - RNA, 19 nt, Homo sapiens
  misc_RNA (1)...(19): siRNA sense strand
gaugcagacugacaagcuu

SEQ ID NO: 1590310 - RNA, 19 nt, Homo sapiens
  misc_RNA (1)...(19): siRNA sense strand
gagcugagaggugaaauuc

SEQ ID NO: 1590311 - RNA, 19 nt, Homo sapiens
  misc_RNA (1)...(19): siRNA sense strand
aaugaaaguuggaucaaag

SEQ ID NO: 1590312 - RNA, 19 nt, Homo sapiens
  misc_RNA (1)...(19): siRNA sense strand
aagagugucccacgucaua

SEQ ID NO: 1590313 - RNA, 19 nt, Homo sapiens
  misc_RNA (1)...(19): siRNA sense strand
caucugcaaccacaaacua

SEQ ID NO: 1590314 - RNA, 19 nt, Homo sapiens
  misc_RNA (1)...(19): siRNA sense strand
cugcacaucuuucauggau

SEQ ID NO: 1590315 - RNA, 19 nt, Homo sapiens
  misc_RNA (1)...(19): siRNA sense strand
ggccaaaguacaugacuau

SEQ ID NO: 1590316 - RNA, 19 nt, Homo sapiens
  misc_RNA (1)...(19): siRNA sense strand
gaucaaagugguggcaaau

SEQ ID NO: 1590317 - RNA, 19 nt, Homo sapiens
  misc_RNA (1)...(19): siRNA sense strand
ggagcugagaggugaaauu

SEQ ID NO: 1590318 - RNA, 19 nt, Homo sapiens
  misc_RNA (1)...(19): siRNA sense strand
gaaaauggagcaaaucagu

SEQ ID NO: 1590319 - RNA, 19 nt, Homo sapiens
  misc_RNA (1)...(19): siRNA sense strand
ccaaaguacaugacuaucu

SEQ ID NO: 1590320 - RNA, 19 nt, Homo sapiens
  misc_RNA (1)...(19): siRNA sense strand
aagagaaagccucgugaaa

SEQ ID NO: 1590321 - RNA, 19 nt, Homo sapiens
  misc_RNA (1)...(19): siRNA sense strand
caaagugguggcaaauauc

SEQ ID NO: 1590322 - RNA, 19 nt, Homo sapiens
  misc_RNA (1)...(19): siRNA sense strand
caaaugcugcacaucuuuc

SEQ ID NO: 1590323 - RNA, 19 nt, Homo sapiens
  misc_RNA (1)...(19): siRNA sense strand
gacaagcuuccaccaugaa

SEQ ID NO: 1590324 - RNA, 19 nt, Homo sapiens
  misc_RNA (1)...(19): siRNA sense strand
aaauggagcaaaucaguca

SEQ ID NO: 1590325 - RNA, 19 nt, Homo sapiens
  misc_RNA (1)...(19): siRNA sense strand
gucaccagcucgucauaca

SEQ ID NO: 1590326 - RNA, 19 nt, Homo sapiens
  misc_RNA (1)...(19): siRNA sense strand
acaugacuaucuccaagga

SEQ ID NO: 1590327 - RNA, 19 nt, Homo sapiens
  misc_RNA (1)...(19): siRNA sense strand
gguggcaaauaucaagagu

SEQ ID NO: 1590328 - RNA, 19 nt, Homo sapiens
  misc_RNA (1)...(19): siRNA sense strand
uggccaaaguacaugacua

SEQ ID NO: 1590329 - RNA, 19 nt, Homo sapiens
  misc_RNA (1)...(19): siRNA sense strand
aaagugguggcaaauauca

SEQ ID NO: 1590330 - RNA, 19 nt, Homo sapiens
  misc_RNA (1)...(19): siRNA sense strand
caccagcucgucauacaga

SEQ ID NO: 1590331 - RNA, 19 nt, Homo sapiens
  misc_RNA (1)...(19): siRNA sense strand
agagaaagccucgugaaac

SEQ ID NO: 1590332 - RNA, 19 nt, Homo sapiens
  misc_RNA (1)...(19): siRNA sense strand
caaaaugaaaguuggauca

SEQ ID NO: 1590333 - RNA, 19 nt, Homo sapiens
  misc_RNA (1)...(19): siRNA sense strand
aagcaucugcaaccacaaa

SEQ ID NO: 1590334 - RNA, 19 nt, Homo sapiens
  misc_RNA (1)...(19): siRNA sense strand
ggaugcagacugacaagcu

SEQ ID NO: 1590335 - RNA, 19 nt, Homo sapiens
  misc_RNA (1)...(19): siRNA sense strand
gaagagugucccacgucau

SEQ ID NO: 1590336 - RNA, 19 nt, Homo sapiens
  misc_RNA (1)...(19): siRNA sense strand
guugucauuugccauagca

SEQ ID NO: 1590337 - RNA, 19 nt, Homo sapiens
  misc_RNA (1)...(19): siRNA sense strand
ugagaagcaucugcaacca

SEQ ID NO: 1590338 - RNA, 19 nt, Homo sapiens
  misc_RNA (1)...(19): siRNA sense strand
cagcucgucauacagaaga

SEQ ID NO: 1590339 - RNA, 19 nt, Homo sapiens
  misc_RNA (1)...(19): siRNA sense strand
gaacugcuguccaucauuu

SEQ ID NO: 1590340 - RNA, 19 nt, Homo sapiens
  misc_RNA (1)...(19): siRNA sense strand
uaacgaagcuuauccuugu

SEQ ID NO: 1590341 - RNA, 19 nt, Homo sapiens
  misc_RNA (1)...(19): siRNA sense strand
gaaagaacacugcaaaguu

SEQ ID NO: 1590342 - RNA, 19 nt, Homo sapiens
  misc_RNA (1)...(19): siRNA sense strand
aaagaacacugcaaaguug

SEQ ID NO: 1590343 - RNA, 19 nt, Homo sapiens
  misc_RNA (1)...(19): siRNA sense strand
ugaaguaucugaaacaaca

SEQ ID NO: 1590344 - RNA, 19 nt, Homo sapiens
  misc_RNA (1)...(19): siRNA sense strand
gacaugaucucaggaaaug

SEQ ID NO: 1590345 - RNA, 19 nt, Homo sapiens
  misc_RNA (1)...(19): siRNA sense strand
caaggauucugaagacauu

SEQ ID NO: 1590346 - RNA, 19 nt, Homo sapiens
  misc_RNA (1)...(19): siRNA sense strand
gaugaaauacucagaauuc

SEQ ID NO: 1590347 - RNA, 19 nt, Homo sapiens
  misc_RNA (1)...(19): siRNA sense strand
ggaaauggauacacaacca

SEQ ID NO: 1590348 - RNA, 19 nt, Homo sapiens
  misc_RNA (1)...(19): siRNA sense strand
ucagugcuaucuugaagua

SEQ ID NO: 1590349 - RNA, 19 nt, Homo sapiens
  misc_RNA (1)...(19): siRNA sense strand
gaucagugcuaucuugaag

SEQ ID NO: 1590350 - RNA, 19 nt, Homo sapiens
  misc_RNA (1)...(19): siRNA sense strand
uugaguggcugaacaagua

SEQ ID NO: 1590351 - RNA, 19 nt, Homo sapiens
  misc_RNA (1)...(19): siRNA sense strand
ggacguaucuuugcugacu

SEQ ID NO: 1590352 - RNA, 19 nt, Homo sapiens
  misc_RNA (1)...(19): siRNA sense strand
gcaaagcugugauugucau

SEQ ID NO: 1590353 - RNA, 19 nt, Homo sapiens
  misc_RNA (1)...(19): siRNA sense strand
gcagacaagcccuacauug

SEQ ID NO: 1590354 - RNA, 19 nt, Homo sapiens
  misc_RNA (1)...(19): siRNA sense strand
auauauagcugacaugauc

SEQ ID NO: 1590355 - RNA, 19 nt, Homo sapiens
  misc_RNA (1)...(19): siRNA sense strand
cagacaagcccuacauuga

SEQ ID NO: 1590356 - RNA, 19 nt, Homo sapiens
  misc_RNA (1)...(19): siRNA sense strand
caagaaaugcccagaagau

SEQ ID NO: 1590357 - RNA, 19 nt, Homo sapiens
  misc_RNA (1)...(19): siRNA sense strand
gugauugucauucaagaua

SEQ ID NO: 1590358 - RNA, 19 nt, Homo sapiens
  misc_RNA (1)...(19): siRNA sense strand
ucgagcacaucaaggcuua

SEQ ID NO: 1590359 - RNA, 19 nt, Homo sapiens
  misc_RNA (1)...(19): siRNA sense strand
gaaaugcccagaagaucga

SEQ ID NO: 1590360 - RNA, 19 nt, Homo sapiens
  misc_RNA (1)...(19): siRNA sense strand
cccagaagaucgauagaga

SEQ ID NO: 1590361 - RNA, 19 nt, Homo sapiens
  misc_RNA (1)...(19): siRNA sense strand
gacauuggccacagacuug

SEQ ID NO: 1590362 - RNA, 19 nt, Homo sapiens
  misc_RNA (1)...(19): siRNA sense strand
ccagauauauagcugacau

SEQ ID NO: 1590363 - RNA, 19 nt, Homo sapiens
  misc_RNA (1)...(19): siRNA sense strand
ccacagacuugaguaugga

SEQ ID NO: 1590364 - RNA, 19 nt, Homo sapiens
  misc_RNA (1)...(19): siRNA sense strand
gcccaauaccagauauaua

SEQ ID NO: 1590365 - RNA, 19 nt, Homo sapiens
  misc_RNA (1)...(19): siRNA sense strand
ugacucagaaguugaaaga

SEQ ID NO: 1590366 - RNA, 19 nt, Homo sapiens
  misc_RNA (1)...(19): siRNA sense strand
gaugaugaaauacucagaa

SEQ ID NO: 1590367 - RNA, 19 nt, Homo sapiens
  misc_RNA (1)...(19): siRNA sense strand
guuccagacuucuuuguag

SEQ ID NO: 1590368 - RNA, 19 nt, Homo sapiens
  misc_RNA (1)...(19): siRNA sense strand
cagaagaucgauagagaga

SEQ ID NO: 1590369 - RNA, 19 nt, Homo sapiens
  misc_RNA (1)...(19): siRNA sense strand
gauagagagaucagugcua

SEQ ID NO: 1590370 - RNA, 19 nt, Homo sapiens
  misc_RNA (1)...(19): siRNA sense strand
gaggccagaaggaauuuaa

SEQ ID NO: 1590371 - RNA, 19 nt, Homo sapiens
  misc_RNA (1)...(19): siRNA sense strand
guugaaagaacacugcaaa

SEQ ID NO: 1590372 - RNA, 19 nt, Homo sapiens
  misc_RNA (1)...(19): siRNA sense strand
cccaauaccagauauauag

SEQ ID NO: 1590373 - RNA, 19 nt, Homo sapiens
  misc_RNA (1)...(19): siRNA sense strand
gccacagacuugaguaugg

SEQ ID NO: 1590374 - RNA, 19 nt, Homo sapiens
  misc_RNA (1)...(19): siRNA sense strand
ugaaagaacacugcaaagu

SEQ ID NO: 1590375 - RNA, 19 nt, Homo sapiens
  misc_RNA (1)...(19): siRNA sense strand
caaggcuuaugucaccaaa

SEQ ID NO: 1590376 - RNA, 19 nt, Homo sapiens
  misc_RNA (1)...(19): siRNA sense strand
aaacaagaaaugcccagaa

SEQ ID NO: 1590377 - RNA, 19 nt, Homo sapiens
  misc_RNA (1)...(19): siRNA sense strand
caaccauuguuccagacuu

SEQ ID NO: 1590378 - RNA, 19 nt, Homo sapiens
  misc_RNA (1)...(19): siRNA sense strand
aggcuuaugucaccaaauc

SEQ ID NO: 1590379 - RNA, 19 nt, Homo sapiens
  misc_RNA (1)...(19): siRNA sense strand
gacgaggccagaaggaauu

SEQ ID NO: 1590380 - RNA, 19 nt, Homo sapiens
  misc_RNA (1)...(19): siRNA sense strand
aaauuggcaucgugggauu

SEQ ID NO: 1590381 - RNA, 19 nt, Homo sapiens
  misc_RNA (1)...(19): siRNA sense strand
uuaauugaguggcugaaca

SEQ ID NO: 1590382 - RNA, 19 nt, Homo sapiens
  misc_RNA (1)...(19): siRNA sense strand
aggcaaagcugugauuguc

SEQ ID NO: 1590383 - RNA, 19 nt, Homo sapiens
  misc_RNA (1)...(19): siRNA sense strand
gaacacugcaaaguugaau

SEQ ID NO: 1590384 - RNA, 19 nt, Homo sapiens
  misc_RNA (1)...(19): siRNA sense strand
ucuauggcauugucaagga

SEQ ID NO: 1590385 - RNA, 19 nt, Homo sapiens
  misc_RNA (1)...(19): siRNA sense strand
aagcugugauugucauuca

SEQ ID NO: 1590386 - RNA, 19 nt, Homo sapiens
  misc_RNA (1)...(19): siRNA sense strand
ugucaaggauucugaagac

SEQ ID NO: 1590387 - RNA, 19 nt, Homo sapiens
  misc_RNA (1)...(19): siRNA sense strand
aacaagaaaugcccagaag

SEQ ID NO: 1590388 - RNA, 19 nt, Homo sapiens
  misc_RNA (1)...(19): siRNA sense strand
acacugcaaaguugaauau

SEQ ID NO: 1590389 - RNA, 19 nt, Homo sapiens
  misc_RNA (1)...(19): siRNA sense strand
acucagaaguugaaagaac

SEQ ID NO: 1590390 - RNA, 19 nt, Homo sapiens
  misc_RNA (1)...(19): siRNA sense strand
ugacaugaucucaggaaau

SEQ ID NO: 1590391 - RNA, 19 nt, Homo sapiens
  misc_RNA (1)...(19): siRNA sense strand
acugcaaaguugaauauca

SEQ ID NO: 1590392 - RNA, 19 nt, Homo sapiens
  misc_RNA (1)...(19): siRNA sense strand
ggaacugcuguccaucauu

SEQ ID NO: 1590393 - RNA, 19 nt, Homo sapiens
  misc_RNA (1)...(19): siRNA sense strand
gggcuaggccgugaaguuc

SEQ ID NO: 1590394 - RNA, 19 nt, Homo sapiens
  misc_RNA (1)...(19): siRNA sense strand
acagugucaugcccagaaa

SEQ ID NO: 1590395 - RNA, 19 nt, Homo sapiens
  misc_RNA (1)...(19): siRNA sense strand
gauauauagcugacaugau

SEQ ID NO: 1590396 - RNA, 19 nt, Homo sapiens
  misc_RNA (1)...(19): siRNA sense strand
uaauugaguggcugaacaa

SEQ ID NO: 1590397 - RNA, 19 nt, Homo sapiens
  misc_RNA (1)...(19): siRNA sense strand
ugacauuggccacagacuu

SEQ ID NO: 1590398 - RNA, 19 nt, Homo sapiens
  misc_RNA (1)...(19): siRNA sense strand
gagcacaucaaggcuuaug

SEQ ID NO: 1590399 - RNA, 19 nt, Homo sapiens
  misc_RNA (1)...(19): siRNA sense strand
ugacgaggccagaaggaau

SEQ ID NO: 1590400 - RNA, 19 nt, Homo sapiens
  misc_RNA (1)...(19): siRNA sense strand
gauguugugauuccacuca

SEQ ID NO: 1590401 - RNA, 19 nt, Homo sapiens
  misc_RNA (1)...(19): siRNA sense strand
caugaucucaggaaaugga

SEQ ID NO: 1590402 - RNA, 19 nt, Homo sapiens
  misc_RNA (1)...(19): siRNA sense strand
gcugaacaaguacauguag

SEQ ID NO: 1590403 - RNA, 19 nt, Homo sapiens
  misc_RNA (1)...(19): siRNA sense strand
guucgugcaucggaagaga

SEQ ID NO: 1590404 - RNA, 19 nt, Homo sapiens
  misc_RNA (1)...(19): siRNA sense strand
gcaggcaaagcugugauug

SEQ ID NO: 1590405 - RNA, 19 nt, Homo sapiens
  misc_RNA (1)...(19): siRNA sense strand
ucaaggacguaucuuugcu

SEQ ID NO: 1590406 - RNA, 19 nt, Homo sapiens
  misc_RNA (1)...(19): siRNA sense strand
acucaaggacguaucuuug

SEQ ID NO: 1590407 - RNA, 19 nt, Homo sapiens
  misc_RNA (1)...(19): siRNA sense strand
gaucucaggaaauggauac

SEQ ID NO: 1590408 - RNA, 19 nt, Homo sapiens
  misc_RNA (1)...(19): siRNA sense strand
cucagaaguugaaagaaca

SEQ ID NO: 1590409 - RNA, 19 nt, Homo sapiens
  misc_RNA (1)...(19): siRNA sense strand
gcauugucaaggauucuga

SEQ ID NO: 1590410 - RNA, 19 nt, Homo sapiens
  misc_RNA (1)...(19): siRNA sense strand
guucaagucgagcacauca

SEQ ID NO: 1590411 - RNA, 19 nt, Homo sapiens
  misc_RNA (1)...(19): siRNA sense strand
caucggaagagagaagauu

SEQ ID NO: 1590412 - RNA, 19 nt, Homo sapiens
  misc_RNA (1)...(19): siRNA sense strand
cucaggaaauggauacaca

SEQ ID NO: 1590413 - RNA, 19 nt, Homo sapiens
  misc_RNA (1)...(19): siRNA sense strand
cuugaaguaucugaaacaa

SEQ ID NO: 1590414 - RNA, 19 nt, Homo sapiens
  misc_RNA (1)...(19): siRNA sense strand
aaccauuguuccagacuuc

SEQ ID NO: 1590415 - RNA, 19 nt, Homo sapiens
  misc_RNA (1)...(19): siRNA sense strand
acaagaaaugcccagaaga

SEQ ID NO: 1590416 - RNA, 19 nt, Homo sapiens
  misc_RNA (1)...(19): siRNA sense strand
ucaagucgagcacaucaag

SEQ ID NO: 1590417 - RNA, 19 nt, Homo sapiens
  misc_RNA (1)...(19): siRNA sense strand
gugcuaucuugaaguaucu

SEQ ID NO: 1590418 - RNA, 19 nt, Homo sapiens
  misc_RNA (1)...(19): siRNA sense strand
agugcuaucuugaaguauc

SEQ ID NO: 1590419 - RNA, 19 nt, Homo sapiens
  misc_RNA (1)...(19): siRNA sense strand
ggcugaacaaguacaugua

SEQ ID NO: 1590420 - RNA, 19 nt, Homo sapiens
  misc_RNA (1)...(19): siRNA sense strand
gcuaacgaagcuuauccuu

SEQ ID NO: 1590421 - RNA, 19 nt, Homo sapiens
  misc_RNA (1)...(19): siRNA sense strand
ucaaggauucugaagacau

SEQ ID NO: 1590422 - RNA, 19 nt, Homo sapiens
  misc_RNA (1)...(19): siRNA sense strand
gaacagaugugaaggauau

SEQ ID NO: 1590423 - RNA, 19 nt, Homo sapiens
  misc_RNA (1)...(19): siRNA sense strand
gaaagaagaccaagaguuu

SEQ ID NO: 1590424 - RNA, 19 nt, Homo sapiens
  misc_RNA (1)...(19): siRNA sense strand
gcaacuaguuccugaauau

SEQ ID NO: 1590425 - RNA, 19 nt, Homo sapiens
  misc_RNA (1)...(19): siRNA sense strand
gagaagcacagaaguaaua

SEQ ID NO: 1590426 - RNA, 19 nt, Homo sapiens
  misc_RNA (1)...(19): siRNA sense strand
gaagagccacuacuugaua

SEQ ID NO: 1590427 - RNA, 19 nt, Homo sapiens
  misc_RNA (1)...(19): siRNA sense strand
gaacuuaacagaacgagaa

SEQ ID NO: 1590428 - RNA, 19 nt, Homo sapiens
  misc_RNA (1)...(19): siRNA sense strand
gcagagguuuggugaaauu

SEQ ID NO: 1590429 - RNA, 19 nt, Homo sapiens
  misc_RNA (1)...(19): siRNA sense strand
ggaaugauacucuccauga

SEQ ID NO: 1590430 - RNA, 19 nt, Homo sapiens
  misc_RNA (1)...(19): siRNA sense strand
uaaagagguugaagaagaa

SEQ ID NO: 1590431 - RNA, 19 nt, Homo sapiens
  misc_RNA (1)...(19): siRNA sense strand
ugacagaacaucagaagua

SEQ ID NO: 1590432 - RNA, 19 nt, Homo sapiens
  misc_RNA (1)...(19): siRNA sense strand
gaagagcaagaaagacuua

SEQ ID NO: 1590433 - RNA, 19 nt, Homo sapiens
  misc_RNA (1)...(19): siRNA sense strand
gaacccagucucaacaaua

SEQ ID NO: 1590434 - RNA, 19 nt, Homo sapiens
  misc_RNA (1)...(19): siRNA sense strand
cgacaaugauaacaaacua

SEQ ID NO: 1590435 - RNA, 19 nt, Homo sapiens
  misc_RNA (1)...(19): siRNA sense strand
gaagagcauucagcaacua

SEQ ID NO: 1590436 - RNA, 19 nt, Homo sapiens
  misc_RNA (1)...(19): siRNA sense strand
gaaguaauagcacagaauu

SEQ ID NO: 1590437 - RNA, 19 nt, Homo sapiens
  misc_RNA (1)...(19): siRNA sense strand
auaaagagguugaagaaga

SEQ ID NO: 1590438 - RNA, 19 nt, Homo sapiens
  misc_RNA (1)...(19): siRNA sense strand
gacaguggcaguacaaaua

SEQ ID NO: 1590439 - RNA, 19 nt, Homo sapiens
  misc_RNA (1)...(19): siRNA sense strand
gaacaaggcaaauuagagu

SEQ ID NO: 1590440 - RNA, 19 nt, Homo sapiens
  misc_RNA (1)...(19): siRNA sense strand
gauugaacaaggcaaauua

SEQ ID NO: 1590441 - RNA, 19 nt, Homo sapiens
  misc_RNA (1)...(19): siRNA sense strand
caagaaagacuuaaaggau

SEQ ID NO: 1590442 - RNA, 19 nt, Homo sapiens
  misc_RNA (1)...(19): siRNA sense strand
guacuacuguuggcaauga

SEQ ID NO: 1590443 - RNA, 19 nt, Homo sapiens
  misc_RNA (1)...(19): siRNA sense strand
uaaauuagacugcgacaau

SEQ ID NO: 1590444 - RNA, 19 nt, Homo sapiens
  misc_RNA (1)...(19): siRNA sense strand
ccaaagaacugggacagau

SEQ ID NO: 1590445 - RNA, 19 nt, Homo sapiens
  misc_RNA (1)...(19): siRNA sense strand
aagaagaguuccuggcuuu

SEQ ID NO: 1590446 - RNA, 19 nt, Homo sapiens
  misc_RNA (1)...(19): siRNA sense strand
gagguuuggugaaauuuau

SEQ ID NO: 1590447 - RNA, 19 nt, Homo sapiens
  misc_RNA (1)...(19): siRNA sense strand
gcaagaaagacuuaaagga

SEQ ID NO: 1590448 - RNA, 19 nt, Homo sapiens
  misc_RNA (1)...(19): siRNA sense strand
ugaagagcaugacagguaa

SEQ ID NO: 1590449 - RNA, 19 nt, Homo sapiens
  misc_RNA (1)...(19): siRNA sense strand
uaucauccauccauacuau

SEQ ID NO: 1590450 - RNA, 19 nt, Homo sapiens
  misc_RNA (1)...(19): siRNA sense strand
guacuucucucagggaaug

SEQ ID NO: 1590451 - RNA, 19 nt, Homo sapiens
  misc_RNA (1)...(19): siRNA sense strand
ggucaacacauuagaagaa

SEQ ID NO: 1590452 - RNA, 19 nt, Homo sapiens
  misc_RNA (1)...(19): siRNA sense strand
guacagauaacaacuuuca

SEQ ID NO: 1590453 - RNA, 19 nt, Homo sapiens
  misc_RNA (1)...(19): siRNA sense strand
cuucuaagcuucauuuaca

SEQ ID NO: 1590454 - RNA, 19 nt, Homo sapiens
  misc_RNA (1)...(19): siRNA sense strand
gaacauguuugccagucau

SEQ ID NO: 1590455 - RNA, 19 nt, Homo sapiens
  misc_RNA (1)...(19): siRNA sense strand
gaggaaauguggauugaac

SEQ ID NO: 1590456 - RNA, 19 nt, Homo sapiens
  misc_RNA (1)...(19): siRNA sense strand
aaacaaagagagcaaagaa

SEQ ID NO: 1590457 - RNA, 19 nt, Homo sapiens
  misc_RNA (1)...(19): siRNA sense strand
ucugaaaguuggugauaaa

SEQ ID NO: 1590458 - RNA, 19 nt, Homo sapiens
  misc_RNA (1)...(19): siRNA sense strand
gacagaacaucagaaguau

SEQ ID NO: 1590459 - RNA, 19 nt, Homo sapiens
  misc_RNA (1)...(19): siRNA sense strand
gcacuaagaaagcaaggaa

SEQ ID NO: 1590460 - RNA, 19 nt, Homo sapiens
  misc_RNA (1)...(19): siRNA sense strand
ggauauucccuuuaauuug

SEQ ID NO: 1590461 - RNA, 19 nt, Homo sapiens
  misc_RNA (1)...(19): siRNA sense strand
aagcagagguuuggugaaa

SEQ ID NO: 1590462 - RNA, 19 nt, Homo sapiens
  misc_RNA (1)...(19): siRNA sense strand
cagaugaacuuaacagaac

SEQ ID NO: 1590463 - RNA, 19 nt, Homo sapiens
  misc_RNA (1)...(19): siRNA sense strand
cagauuggcauccuacuaa

SEQ ID NO: 1590464 - RNA, 19 nt, Homo sapiens
  misc_RNA (1)...(19): siRNA sense strand
cagaacaucagaaguauau

SEQ ID NO: 1590465 - RNA, 19 nt, Homo sapiens
  misc_RNA (1)...(19): siRNA sense strand
ccagucaucuucuaagcuu

SEQ ID NO: 1590466 - RNA, 19 nt, Homo sapiens
  misc_RNA (1)...(19): siRNA sense strand
gaugagacuugucagagau

SEQ ID NO: 1590467 - RNA, 19 nt, Homo sapiens
  misc_RNA (1)...(19): siRNA sense strand
ugucagagauccaagaauc

SEQ ID NO: 1590468 - RNA, 19 nt, Homo sapiens
  misc_RNA (1)...(19): siRNA sense strand
gaaagucuuccucaaaaua

SEQ ID NO: 1590469 - RNA, 19 nt, Homo sapiens
  misc_RNA (1)...(19): siRNA sense strand
caaugaugaugauggacua

SEQ ID NO: 1590470 - RNA, 19 nt, Homo sapiens
  misc_RNA (1)...(19): siRNA sense strand
acaaauaacauaccugguu

SEQ ID NO: 1590471 - RNA, 19 nt, Homo sapiens
  misc_RNA (1)...(19): siRNA sense strand
ccuacuaauuugacccuua

SEQ ID NO: 1590472 - RNA, 19 nt, Homo sapiens
  misc_RNA (1)...(19): siRNA sense strand
aaacuaggcauuggacaua

SEQ ID NO: 1590473 - RNA, 19 nt, Homo sapiens
  misc_RNA (1)...(19): siRNA sense strand
gaagaguuccuggcuuuga

SEQ ID NO: 1590474 - RNA, 19 nt, Homo sapiens
  misc_RNA (1)...(19): siRNA sense strand
gaacaucagaaguauaucu

SEQ ID NO: 1590475 - RNA, 19 nt, Homo sapiens
  misc_RNA (1)...(19): siRNA sense strand
cagaagugguuacgguuga

SEQ ID NO: 1590476 - RNA, 19 nt, Homo sapiens
  misc_RNA (1)...(19): siRNA sense strand
gaaaguuggugauaaaagu

SEQ ID NO: 1590477 - RNA, 19 nt, Homo sapiens
  misc_RNA (1)...(19): siRNA sense strand
acaauaucauccauccaua

SEQ ID NO: 1590478 - RNA, 19 nt, Homo sapiens
  misc_RNA (1)...(19): siRNA sense strand
acaaagagagcaaagaaga

SEQ ID NO: 1590479 - RNA, 19 nt, Homo sapiens
  misc_RNA (1)...(19): siRNA sense strand
cgagacauuuccugaacaa

SEQ ID NO: 1590480 - RNA, 19 nt, Homo sapiens
  misc_RNA (1)...(19): siRNA sense strand
gcaaagaagaacaagacuu

SEQ ID NO: 1590481 - RNA, 19 nt, Homo sapiens
  misc_RNA (1)...(19): siRNA sense strand
aauggacacuggaguugua

SEQ ID NO: 1590482 - RNA, 19 nt, Homo sapiens
  misc_RNA (1)...(19): siRNA sense strand
aagaagaaauggagaagca

SEQ ID NO: 1590483 - RNA, 19 nt, Homo sapiens
  misc_RNA (1)...(19): siRNA sense strand
gauaacaaacuaggcauug

SEQ ID NO: 1590484 - RNA, 19 nt, Homo sapiens
  misc_RNA (1)...(19): siRNA sense strand
agaaauggcuaaggauugu

SEQ ID NO: 1590485 - RNA, 19 nt, Homo sapiens
  misc_RNA (1)...(19): siRNA sense strand
caaagagagcaaagaagaa

SEQ ID NO: 1590486 - RNA, 19 nt, Homo sapiens
  misc_RNA (1)...(19): siRNA sense strand
guuccuggcuuugaagaaa

SEQ ID NO: 1590487 - RNA, 19 nt, Homo sapiens
  misc_RNA (1)...(19): siRNA sense strand
ucagaaguauaucuacaug

SEQ ID NO: 1590488 - RNA, 19 nt, Homo sapiens
  misc_RNA (1)...(19): siRNA sense strand
caucagaaguauaucuaca

SEQ ID NO: 1590489 - RNA, 19 nt, Homo sapiens
  misc_RNA (1)...(19): siRNA sense strand
ggaacauguuugccaguca

SEQ ID NO: 1590490 - RNA, 19 nt, Homo sapiens
  misc_RNA (1)...(19): siRNA sense strand
ggaaauguggauugaacaa

SEQ ID NO: 1590491 - RNA, 19 nt, Homo sapiens
  misc_RNA (1)...(19): siRNA sense strand
gaagaagagcauucagcaa

SEQ ID NO: 1590492 - RNA, 19 nt, Homo sapiens
  misc_RNA (1)...(19): siRNA sense strand
ucauaaagagguugaagaa

SEQ ID NO: 1590493 - RNA, 19 nt, Homo sapiens
  misc_RNA (1)...(19): siRNA sense strand
ccaagaguuugauuugcaa

SEQ ID NO: 1590494 - RNA, 19 nt, Homo sapiens
  misc_RNA (1)...(19): siRNA sense strand
caacuaguuccugaauaua

SEQ ID NO: 1590495 - RNA, 19 nt, Homo sapiens
  misc_RNA (1)...(19): siRNA sense strand
ugaugagacuugucagaga

SEQ ID NO: 1590496 - RNA, 19 nt, Homo sapiens
  misc_RNA (1)...(19): siRNA sense strand
gguuacgguugaaaugaaa

SEQ ID NO: 1590497 - RNA, 19 nt, Homo sapiens
  misc_RNA (1)...(19): siRNA sense strand
gaggaagagccacuacuug

SEQ ID NO: 1590498 - RNA, 19 nt, Homo sapiens
  misc_RNA (1)...(19): siRNA sense strand
gaaaacgucucaagaacca

SEQ ID NO: 1590499 - RNA, 19 nt, Homo sapiens
  misc_RNA (1)...(19): siRNA sense strand
gagcaaagaagaacaagac

SEQ ID NO: 1590500 - RNA, 19 nt, Homo sapiens
  misc_RNA (1)...(19): siRNA sense strand
aaccagaaauggcuaagga

SEQ ID NO: 1590501 - RNA, 19 nt, Homo sapiens
  misc_RNA (1)...(19): siRNA sense strand
gaaauggagaagcacagaa

SEQ ID NO: 1590502 - RNA, 19 nt, Homo sapiens
  misc_RNA (1)...(19): siRNA sense strand
ugaaagaagaccaagaguu

SEQ ID NO: 1590503 - RNA, 19 nt, Homo sapiens
  misc_RNA (1)...(19): siRNA sense strand
ggcuaaggauugugauaga

SEQ ID NO: 1590504 - RNA, 19 nt, Homo sapiens
  misc_RNA (1)...(19): siRNA sense strand
gauccaagaaucugaaagu

SEQ ID NO: 1590505 - RNA, 19 nt, Homo sapiens
  misc_RNA (1)...(19): siRNA sense strand
gaagaccaagaguuugauu

SEQ ID NO: 1590506 - RNA, 19 nt, Homo sapiens
  misc_RNA (1)...(19): siRNA sense strand
aagagccacuacuugauaa

SEQ ID NO: 1590507 - RNA, 19 nt, Homo sapiens
  misc_RNA (1)...(19): siRNA sense strand
gagcaagaaagacuuaaag

SEQ ID NO: 1590508 - RNA, 19 nt, Homo sapiens
  misc_RNA (1)...(19): siRNA sense strand
uaacugaugguacuacugu

SEQ ID NO: 1590509 - RNA, 19 nt, Homo sapiens
  misc_RNA (1)...(19): siRNA sense strand
gaaagcaaggaacccagaa

SEQ ID NO: 1590510 - RNA, 19 nt, Homo sapiens
  misc_RNA (1)...(19): siRNA sense strand
ggaagagccacuacuugau

SEQ ID NO: 1590511 - RNA, 19 nt, Homo sapiens
  misc_RNA (1)...(19): siRNA sense strand
gauaaaaguccaucuguau

SEQ ID NO: 1590512 - RNA, 19 nt, Homo sapiens
  misc_RNA (1)...(19): siRNA sense strand
gacaagagggauaggaaga

SEQ ID NO: 1590513 - RNA, 19 nt, Homo sapiens
  misc_RNA (1)...(19): siRNA sense strand
cagaaauggcuaaggauug

SEQ ID NO: 1590514 - RNA, 19 nt, Homo sapiens
  misc_RNA (1)...(19): siRNA sense strand
ccagaaauggcuaaggauu

SEQ ID NO: 1590515 - RNA, 19 nt, Homo sapiens
  misc_RNA (1)...(19): siRNA sense strand
gaaaauaagcagccacaga

SEQ ID NO: 1590516 - RNA, 19 nt, Homo sapiens
  misc_RNA (1)...(19): siRNA sense strand
uauaaaagccugaaaccua

SEQ ID NO: 1590517 - RNA, 19 nt, Homo sapiens
  misc_RNA (1)...(19): siRNA sense strand
gaacugggacagaugaacu

SEQ ID NO: 1590518 - RNA, 19 nt, Homo sapiens
  misc_RNA (1)...(19): siRNA sense strand
gaaggaaaaugaagagcau

SEQ ID NO: 1590519 - RNA, 19 nt, Homo sapiens
  misc_RNA (1)...(19): siRNA sense strand
cugcgacaaugauaacaaa

SEQ ID NO: 1590520 - RNA, 19 nt, Homo sapiens
  misc_RNA (1)...(19): siRNA sense strand
caucuucuaagcuucauuu

SEQ ID NO: 1590521 - RNA, 19 nt, Homo sapiens
  misc_RNA (1)...(19): siRNA sense strand
ggauugaacaaggcaaauu

SEQ ID NO: 1590522 - RNA, 19 nt, Homo sapiens
  misc_RNA (1)...(19): siRNA sense strand
ggagagauguggaauaaca

SEQ ID NO: 1590523 - RNA, 19 nt, Homo sapiens
  misc_RNA (1)...(19): siRNA sense strand
ggaggaagaugaagaagau

SEQ ID NO: 1590524 - RNA, 19 nt, Homo sapiens
  misc_RNA (1)...(19): siRNA sense strand
ggacaaggcccguuaugaa

SEQ ID NO: 1590525 - RNA, 19 nt, Homo sapiens
  misc_RNA (1)...(19): siRNA sense strand
ugaagaagaugaagaugaa

SEQ ID NO: 1590526 - RNA, 19 nt, Homo sapiens
  misc_RNA (1)...(19): siRNA sense strand
ggaggaagaugaggaagau

SEQ ID NO: 1590527 - RNA, 19 nt, Homo sapiens
  misc_RNA (1)...(19): siRNA sense strand
gggaggagcauaagaagaa

SEQ ID NO: 1590528 - RNA, 19 nt, Homo sapiens
  misc_RNA (1)...(19): siRNA sense strand
gaccaugucugcuaaagag

SEQ ID NO: 1590529 - RNA, 19 nt, Homo sapiens
  misc_RNA (1)...(19): siRNA sense strand
agaagaagaugaugaugau

SEQ ID NO: 1590530 - RNA, 19 nt, Homo sapiens
  misc_RNA (1)...(19): siRNA sense strand
agaugaagaugaagaagaa

SEQ ID NO: 1590531 - RNA, 19 nt, Homo sapiens
  misc_RNA (1)...(19): siRNA sense strand
ugggagagauguggaauaa

SEQ ID NO: 1590532 - RNA, 19 nt, Homo sapiens
  misc_RNA (1)...(19): siRNA sense strand
gacaaggcccguuaugaaa

SEQ ID NO: 1590533 - RNA, 19 nt, Homo sapiens
  misc_RNA (1)...(19): siRNA sense strand
ucuaagaagugcucagaga

SEQ ID NO: 1590534 - RNA, 19 nt, Homo sapiens
  misc_RNA (1)...(19): siRNA sense strand
ugaggaagaugaagaggau

SEQ ID NO: 1590535 - RNA, 19 nt, Homo sapiens
  misc_RNA (1)...(19): siRNA sense strand
gaagaaacugggagagaug

SEQ ID NO: 1590536 - RNA, 19 nt, Homo sapiens
  misc_RNA (1)...(19): siRNA sense strand
cgaagaaacugggagagau

SEQ ID NO: 1590537 - RNA, 19 nt, Homo sapiens
  misc_RNA (1)...(19): siRNA sense strand
caaggcccguuaugaaaga

SEQ ID NO: 1590538 - RNA, 19 nt, Homo sapiens
  misc_RNA (1)...(19): siRNA sense strand
aaaaggauauugcugcaua

SEQ ID NO: 1590539 - RNA, 19 nt, Homo sapiens
  misc_RNA (1)...(19): siRNA sense strand
ggaggaggaagaugaagaa

SEQ ID NO: 1590540 - RNA, 19 nt, Homo sapiens
  misc_RNA (1)...(19): siRNA sense strand
gacaagcagccuuaugaaa

SEQ ID NO: 1590541 - RNA, 19 nt, Homo sapiens
  misc_RNA (1)...(19): siRNA sense strand
agaagaugaugaugaugaa

SEQ ID NO: 1590542 - RNA, 19 nt, Homo sapiens
  misc_RNA (1)...(19): siRNA sense strand
gcauaucgagcuaaaggaa

SEQ ID NO: 1590543 - RNA, 19 nt, Homo sapiens
  misc_RNA (1)...(19): siRNA sense strand
cagaugacaagcagccuua

SEQ ID NO: 1590544 - RNA, 19 nt, Homo sapiens
  misc_RNA (1)...(19): siRNA sense strand
ggaagaugaagaagaugaa

SEQ ID NO: 1590545 - RNA, 19 nt, Homo sapiens
  misc_RNA (1)...(19): siRNA sense strand
ucagucaacuucucagagu

SEQ ID NO: 1590546 - RNA, 19 nt, Homo sapiens
  misc_RNA (1)...(19): siRNA sense strand
gaaggaagaggaggaagau

SEQ ID NO: 1590547 - RNA, 19 nt, Homo sapiens
  misc_RNA (1)...(19): siRNA sense strand
guucaaggaucccaaugca

SEQ ID NO: 1590548 - RNA, 19 nt, Homo sapiens
  misc_RNA (1)...(19): siRNA sense strand
ggaagaugaggaagaugaa

SEQ ID NO: 1590549 - RNA, 19 nt, Homo sapiens
  misc_RNA (1)...(19): siRNA sense strand
gaaagccugaugcagcaaa

SEQ ID NO: 1590550 - RNA, 19 nt, Homo sapiens
  misc_RNA (1)...(19): siRNA sense strand
ggaggaggaggaagaugaa

SEQ ID NO: 1590551 - RNA, 19 nt, Homo sapiens
  misc_RNA (1)...(19): siRNA sense strand
aagaagaagaugaugauga

SEQ ID NO: 1590552 - RNA, 19 nt, Homo sapiens
  misc_RNA (1)...(19): siRNA sense strand
aagaagaugaugaugauga

SEQ ID NO: 1590553 - RNA, 19 nt, Homo sapiens
  misc_RNA (1)...(19): siRNA sense strand
caugucugcuaaagagaaa

SEQ ID NO: 1590554 - RNA, 19 nt, Homo sapiens
  misc_RNA (1)...(19): siRNA sense strand
cauccuggccuguccauug

SEQ ID NO: 1590555 - RNA, 19 nt, Homo sapiens
  misc_RNA (1)...(19): siRNA sense strand
ugaagaagaagaugaugau

SEQ ID NO: 1590556 - RNA, 19 nt, Homo sapiens
  misc_RNA (1)...(19): siRNA sense strand
gaaguucaaggaucccaau

SEQ ID NO: 1590557 - RNA, 19 nt, Homo sapiens
  misc_RNA (1)...(19): siRNA sense strand
gcgaagaaacugggagaga

SEQ ID NO: 1590558 - RNA, 19 nt, Homo sapiens
  misc_RNA (1)...(19): siRNA sense strand
ggcaaaaugucaucauaug

SEQ ID NO: 1590559 - RNA, 19 nt, Homo sapiens
  misc_RNA (1)...(19): siRNA sense strand
cugcgaagcugaaggaaaa

SEQ ID NO: 1590560 - RNA, 19 nt, Homo sapiens
  misc_RNA (1)...(19): siRNA sense strand
gaagaagaagaugaugaug

SEQ ID NO: 1590561 - RNA, 19 nt, Homo sapiens
  misc_RNA (1)...(19): siRNA sense strand
gaagaugaagaagaagaug

SEQ ID NO: 1590562 - RNA, 19 nt, Homo sapiens
  misc_RNA (1)...(19): siRNA sense strand
ugacaagcagccuuaugaa

SEQ ID NO: 1590563 - RNA, 19 nt, Homo sapiens
  misc_RNA (1)...(19): siRNA sense strand
ggaagaggaggaagaugag

SEQ ID NO: 1590564 - RNA, 19 nt, Homo sapiens
  misc_RNA (1)...(19): siRNA sense strand
uuggugauguugcgaagaa

SEQ ID NO: 1590565 - RNA, 19 nt, Homo sapiens
  misc_RNA (1)...(19): siRNA sense strand
aggaagaggaggaagauga

SEQ ID NO: 1590566 - RNA, 19 nt, Homo sapiens
  misc_RNA (1)...(19): siRNA sense strand
gcuaaaggaaagccugaug

SEQ ID NO: 1590567 - RNA, 19 nt, Homo sapiens
  misc_RNA (1)...(19): siRNA sense strand
gaugacaagcagccuuaug

SEQ ID NO: 1590568 - RNA, 19 nt, Homo sapiens
  misc_RNA (1)...(19): siRNA sense strand
ggaggagcauaagaagaag

SEQ ID NO: 1590569 - RNA, 19 nt, Homo sapiens
  misc_RNA (1)...(19): siRNA sense strand
ggaguugucaaggcugaaa

SEQ ID NO: 1590570 - RNA, 19 nt, Homo sapiens
  misc_RNA (1)...(19): siRNA sense strand
uaaaggaaagccugaugca

SEQ ID NO: 1590571 - RNA, 19 nt, Homo sapiens
  misc_RNA (1)...(19): siRNA sense strand
agaagaugaagaugaagaa

SEQ ID NO: 1590572 - RNA, 19 nt, Homo sapiens
  misc_RNA (1)...(19): siRNA sense strand
acaagcagccuuaugaaaa

SEQ ID NO: 1590573 - RNA, 19 nt, Homo sapiens
  misc_RNA (1)...(19): siRNA sense strand
caagcagccuuaugaaaag

SEQ ID NO: 1590574 - RNA, 19 nt, Homo sapiens
  misc_RNA (1)...(19): siRNA sense strand
aggaagaugaggaagauga

SEQ ID NO: 1590575 - RNA, 19 nt, Homo sapiens
  misc_RNA (1)...(19): siRNA sense strand
agaaggaagaggaggaaga

SEQ ID NO: 1590576 - RNA, 19 nt, Homo sapiens
  misc_RNA (1)...(19): siRNA sense strand
aagaugaagaugaagaaga

SEQ ID NO: 1590577 - RNA, 19 nt, Homo sapiens
  misc_RNA (1)...(19): siRNA sense strand
gaagaagaugaugaugaug

SEQ ID NO: 1590578 - RNA, 19 nt, Homo sapiens
  misc_RNA (1)...(19): siRNA sense strand
gcugcgaagcugaaggaaa

SEQ ID NO: 1590579 - RNA, 19 nt, Homo sapiens
  misc_RNA (1)...(19): siRNA sense strand
gaagaugaugaugaugaau

SEQ ID NO: 1590580 - RNA, 19 nt, Homo sapiens
  misc_RNA (1)...(19): siRNA sense strand
gaagaugaagaugaagaag

SEQ ID NO: 1590581 - RNA, 19 nt, Homo sapiens
  misc_RNA (1)...(19): siRNA sense strand
gaagaugaagaagaugaag

SEQ ID NO: 1590582 - RNA, 19 nt, Homo sapiens
  misc_RNA (1)...(19): siRNA sense strand
cauaucgagcuaaaggaaa

SEQ ID NO: 1590583 - RNA, 19 nt, Homo sapiens
  misc_RNA (1)...(19): siRNA sense strand
augacaagcagccuuauga

SEQ ID NO: 1590584 - RNA, 19 nt, Homo sapiens
  misc_RNA (1)...(19): siRNA sense strand
ugaagaugaagaagaagau

SEQ ID NO: 1590585 - RNA, 19 nt, Homo sapiens
  misc_RNA (1)...(19): siRNA sense strand
aagaagaugaagaugaaga

SEQ ID NO: 1590586 - RNA, 19 nt, Homo sapiens
  misc_RNA (1)...(19): siRNA sense strand
ccaugucugcuaaagagaa

SEQ ID NO: 1590587 - RNA, 19 nt, Homo sapiens
  misc_RNA (1)...(19): siRNA sense strand
uaagaagaagcacccagau

SEQ ID NO: 1590588 - RNA, 19 nt, Homo sapiens
  misc_RNA (1)...(19): siRNA sense strand
ggcccguuaugaaagagaa

SEQ ID NO: 1590589 - RNA, 19 nt, Homo sapiens
  misc_RNA (1)...(19): siRNA sense strand
aagaugaagaagaagauga

SEQ ID NO: 1590590 - RNA, 19 nt, Homo sapiens
  misc_RNA (1)...(19): siRNA sense strand
aagaagaagcacccagaug

SEQ ID NO: 1590591 - RNA, 19 nt, Homo sapiens
  misc_RNA (1)...(19): siRNA sense strand
cggacaaggcccguuauga

SEQ ID NO: 1590592 - RNA, 19 nt, Homo sapiens
  misc_RNA (1)...(19): siRNA sense strand
aaagaaggaagaggaggaa

SEQ ID NO: 1590593 - RNA, 19 nt, Homo sapiens
  misc_RNA (1)...(19): siRNA sense strand
gaagaugaggaagaugaag

SEQ ID NO: 1590594 - RNA, 19 nt, Homo sapiens
  misc_RNA (1)...(19): siRNA sense strand
gaaaugaaaaccuauaucc

SEQ ID NO: 1590595 - RNA, 19 nt, Homo sapiens
  misc_RNA (1)...(19): siRNA sense strand
augaagaagaugaagauga

SEQ ID NO: 1590596 - RNA, 19 nt, Homo sapiens
  misc_RNA (1)...(19): siRNA sense strand
agaugaagaagaugaagau

SEQ ID NO: 1590597 - RNA, 19 nt, Homo sapiens
  misc_RNA (1)...(19): siRNA sense strand
aggaggaggaggaagauga

SEQ ID NO: 1590598 - RNA, 19 nt, Homo sapiens
  misc_RNA (1)...(19): siRNA sense strand
aagaugaggaagaugaaga

SEQ ID NO: 1590599 - RNA, 19 nt, Homo sapiens
  misc_RNA (1)...(19): siRNA sense strand
auaucgagcuaaaggaaag

SEQ ID NO: 1590600 - RNA, 19 nt, Homo sapiens
  misc_RNA (1)...(19): siRNA sense strand
ggacauggauggugauggu

SEQ ID NO: 1590601 - RNA, 19 nt, Homo sapiens
  misc_RNA (1)...(19): siRNA sense strand
gcaccgacuuugauacugu

SEQ ID NO: 1590602 - RNA, 19 nt, Homo sapiens
  misc_RNA (1)...(19): siRNA sense strand
gcgagcaccuguccaugaa

SEQ ID NO: 1590603 - RNA, 19 nt, Homo sapiens
  misc_RNA (1)...(19): siRNA sense strand
ggacauagagaacaucauc

SEQ ID NO: 1590604 - RNA, 19 nt, Homo sapiens
  misc_RNA (1)...(19): siRNA sense strand
gcaauggcuucaucuccaa

SEQ ID NO: 1590605 - RNA, 19 nt, Homo sapiens
  misc_RNA (1)...(19): siRNA sense strand
ccucagggaucccagagaa

SEQ ID NO: 1590606 - RNA, 19 nt, Homo sapiens
  misc_RNA (1)...(19): siRNA sense strand
ggauggugauggucaagug

SEQ ID NO: 1590607 - RNA, 19 nt, Homo sapiens
  misc_RNA (1)...(19): siRNA sense strand
ugaagcggcugcucuacga

SEQ ID NO: 1590608 - RNA, 19 nt, Homo sapiens
  misc_RNA (1)...(19): siRNA sense strand
cgacuuugauacugucuuc

SEQ ID NO: 1590609 - RNA, 19 nt, Homo sapiens
  misc_RNA (1)...(19): siRNA sense strand
ugaaggacauagagaacau

SEQ ID NO: 1590610 - RNA, 19 nt, Homo sapiens
  misc_RNA (1)...(19): siRNA sense strand
cagcagauccgccagacuu

SEQ ID NO: 1590611 - RNA, 19 nt, Homo sapiens
  misc_RNA (1)...(19): siRNA sense strand
ggaagugcgacaugcagaa

SEQ ID NO: 1590612 - RNA, 19 nt, Homo sapiens
  misc_RNA (1)...(19): siRNA sense strand
gccaucgccuucaucauca

SEQ ID NO: 1590613 - RNA, 19 nt, Homo sapiens
  misc_RNA (1)...(19): siRNA sense strand
ugacggcaauggcuucauc

SEQ ID NO: 1590614 - RNA, 19 nt, Homo sapiens
  misc_RNA (1)...(19): siRNA sense strand
gcacagccaugcgcucacu

SEQ ID NO: 1590615 - RNA, 19 nt, Homo sapiens
  misc_RNA (1)...(19): siRNA sense strand
ccaugaaggacauagagaa

SEQ ID NO: 1590616 - RNA, 19 nt, Homo sapiens
  misc_RNA (1)...(19): siRNA sense strand
cauggcaccgacuuugaua

SEQ ID NO: 1590617 - RNA, 19 nt, Homo sapiens
  misc_RNA (1)...(19): siRNA sense strand
cgaggagugucccguggau

SEQ ID NO: 1590618 - RNA, 19 nt, Homo sapiens
  misc_RNA (1)...(19): siRNA sense strand
aggacgagcuggaggagau

SEQ ID NO: 1590619 - RNA, 19 nt, Homo sapiens
  misc_RNA (1)...(19): siRNA sense strand
gauccgagaggccuucaag

SEQ ID NO: 1590620 - RNA, 19 nt, Homo sapiens
  misc_RNA (1)...(19): siRNA sense strand
uugauacugucuucuggaa

SEQ ID NO: 1590621 - RNA, 19 nt, Homo sapiens
  misc_RNA (1)...(19): siRNA sense strand
gaagugcgacaugcagaag

SEQ ID NO: 1590622 - RNA, 19 nt, Homo sapiens
  misc_RNA (1)...(19): siRNA sense strand
cgccaucgccuucaucauc

SEQ ID NO: 1590623 - RNA, 19 nt, Homo sapiens
  misc_RNA (1)...(19): siRNA sense strand
cauagagaacaucaucaug

SEQ ID NO: 1590624 - RNA, 19 nt, Homo sapiens
  misc_RNA (1)...(19): siRNA sense strand
cauggauggugauggucaa

SEQ ID NO: 1590625 - RNA, 19 nt, Homo sapiens
  misc_RNA (1)...(19): siRNA sense strand
gacgguggaugagcugaag

SEQ ID NO: 1590626 - RNA, 19 nt, Homo sapiens
  misc_RNA (1)...(19): siRNA sense strand
ggagcuggaggucaucauc

SEQ ID NO: 1590627 - RNA, 19 nt, Homo sapiens
  misc_RNA (1)...(19): siRNA sense strand
ggacuuugaggaguuugug

SEQ ID NO: 1590628 - RNA, 19 nt, Homo sapiens
  misc_RNA (1)...(19): siRNA sense strand
ggaggacucugaugaacaa

SEQ ID NO: 1590629 - RNA, 19 nt, Homo sapiens
  misc_RNA (1)...(19): siRNA sense strand
ggaaacccuucuaguaguu

SEQ ID NO: 1590630 - RNA, 19 nt, Homo sapiens
  misc_RNA (1)...(19): siRNA sense strand
guauagaacuuccaaaugc

SEQ ID NO: 1590631 - RNA, 19 nt, Homo sapiens
  misc_RNA (1)...(19): siRNA sense strand
ucacaggucuauaugagaa

SEQ ID NO: 1590632 - RNA, 19 nt, Homo sapiens
  misc_RNA (1)...(19): siRNA sense strand
gaaccaagcuucaaaacug

SEQ ID NO: 1590633 - RNA, 19 nt, Homo sapiens
  misc_RNA (1)...(19): siRNA sense strand
aagagacccucaacagaua

SEQ ID NO: 1590634 - RNA, 19 nt, Homo sapiens
  misc_RNA (1)...(19): siRNA sense strand
gcaagagacccucaacaga

SEQ ID NO: 1590635 - RNA, 19 nt, Homo sapiens
  misc_RNA (1)...(19): siRNA sense strand
acaggaaacccuucuagua

SEQ ID NO: 1590636 - RNA, 19 nt, Homo sapiens
  misc_RNA (1)...(19): siRNA sense strand
caagagacccucaacagau

SEQ ID NO: 1590637 - RNA, 19 nt, Homo sapiens
  misc_RNA (1)...(19): siRNA sense strand
gcagggaccuacagauguc

SEQ ID NO: 1590638 - RNA, 19 nt, Homo sapiens
  misc_RNA (1)...(19): siRNA sense strand
gagagaacgugaccuuguc

SEQ ID NO: 1590639 - RNA, 19 nt, Homo sapiens
  misc_RNA (1)...(19): siRNA sense strand
uaugagaaaccuucgcuua

SEQ ID NO: 1590640 - RNA, 19 nt, Homo sapiens
  misc_RNA (1)...(19): siRNA sense strand
ggucacaggucuauaugag

SEQ ID NO: 1590641 - RNA, 19 nt, Homo sapiens
  misc_RNA (1)...(19): siRNA sense strand
ggagagaccuacagaugcu

SEQ ID NO: 1590642 - RNA, 19 nt, Homo sapiens
  misc_RNA (1)...(19): siRNA sense strand
ggagagaacgugaccuugu

SEQ ID NO: 1590643 - RNA, 19 nt, Homo sapiens
  misc_RNA (1)...(19): siRNA sense strand
ugagaaaccuucgcuuaca

SEQ ID NO: 1590644 - RNA, 19 nt, Homo sapiens
  misc_RNA (1)...(19): siRNA sense strand
gaacagggaggacucugau

SEQ ID NO: 1590645 - RNA, 19 nt, Homo sapiens
  misc_RNA (1)...(19): siRNA sense strand
ucccagagcuccuuugaca

SEQ ID NO: 1590646 - RNA, 19 nt, Homo sapiens
  misc_RNA (1)...(19): siRNA sense strand
gaacauuccaggccgacuu

SEQ ID NO: 1590647 - RNA, 19 nt, Homo sapiens
  misc_RNA (1)...(19): siRNA sense strand
caggaaacccuucuaguag

SEQ ID NO: 1590648 - RNA, 19 nt, Homo sapiens
  misc_RNA (1)...(19): siRNA sense strand
ucacuaucgucguggguuu

SEQ ID NO: 1590649 - RNA, 19 nt, Homo sapiens
  misc_RNA (1)...(19): siRNA sense strand
gaauauucuggaacaguuu

SEQ ID NO: 1590650 - RNA, 19 nt, Homo sapiens
  misc_RNA (1)...(19): siRNA sense strand
gagaaaccuucgcuuacag

SEQ ID NO: 1590651 - RNA, 19 nt, Homo sapiens
  misc_RNA (1)...(19): siRNA sense strand
cuacagaugucgagguuuu

SEQ ID NO: 1590652 - RNA, 19 nt, Homo sapiens
  misc_RNA (1)...(19): siRNA sense strand
ggaggacacgugacucuuc

SEQ ID NO: 1590653 - RNA, 19 nt, Homo sapiens
  misc_RNA (1)...(19): siRNA sense strand
ggacucugaugaacaagac

SEQ ID NO: 1590654 - RNA, 19 nt, Homo sapiens
  misc_RNA (1)...(19): siRNA sense strand
ggaagcccaugaacuuagg

SEQ ID NO: 1590655 - RNA, 19 nt, Homo sapiens
  misc_RNA (1)...(19): siRNA sense strand
ccugagcucuacaacagaa

SEQ ID NO: 1590656 - RNA, 19 nt, Homo sapiens
  misc_RNA (1)...(19): siRNA sense strand
gcagugcccagcaucaaug

SEQ ID NO: 1590657 - RNA, 19 nt, Homo sapiens
  misc_RNA (1)...(19): siRNA sense strand
acaccugcaugcugugauu

SEQ ID NO: 1590658 - RNA, 19 nt, Homo sapiens
  misc_RNA (1)...(19): siRNA sense strand
ccagagcuccuuugacauc

SEQ ID NO: 1590659 - RNA, 19 nt, Homo sapiens
  misc_RNA (1)...(19): siRNA sense strand
cagcguguguauagaacuu

SEQ ID NO: 1590660 - RNA, 19 nt, Homo sapiens
  misc_RNA (1)...(19): siRNA sense strand
ggugacauacgcacaguug

SEQ ID NO: 1590661 - RNA, 19 nt, Homo sapiens
  misc_RNA (1)...(19): siRNA sense strand
ggacacagaacagugaaca

SEQ ID NO: 1590662 - RNA, 19 nt, Homo sapiens
  misc_RNA (1)...(19): siRNA sense strand
gaucauggucacaggucua

SEQ ID NO: 1590663 - RNA, 19 nt, Homo sapiens
  misc_RNA (1)...(19): siRNA sense strand
gcucuacaacagaauauuc

SEQ ID NO: 1590664 - RNA, 19 nt, Homo sapiens
  misc_RNA (1)...(19): siRNA sense strand
cgucguggguuuaacaucu

SEQ ID NO: 1590665 - RNA, 19 nt, Homo sapiens
  misc_RNA (1)...(19): siRNA sense strand
ugcaugcugugauuaggua

SEQ ID NO: 1590666 - RNA, 19 nt, Homo sapiens
  misc_RNA (1)...(19): siRNA sense strand
cauggucacaggucuauau

SEQ ID NO: 1590667 - RNA, 19 nt, Homo sapiens
  misc_RNA (1)...(19): siRNA sense strand
acagaugcuucggcucuuu

SEQ ID NO: 1590668 - RNA, 19 nt, Homo sapiens
  misc_RNA (1)...(19): siRNA sense strand
ccacggagagaccuacaga

SEQ ID NO: 1590669 - RNA, 19 nt, Homo sapiens
  misc_RNA (1)...(19): siRNA sense strand
uuugacaucuaccaucuau

SEQ ID NO: 1590670 - RNA, 19 nt, Homo sapiens
  misc_RNA (1)...(19): siRNA sense strand
gagcuccuuugacaucuac

SEQ ID NO: 1590671 - RNA, 19 nt, Homo sapiens
  misc_RNA (1)...(19): siRNA sense strand
ugacauacgcacaguugga

SEQ ID NO: 1590672 - RNA, 19 nt, Homo sapiens
  misc_RNA (1)...(19): siRNA sense strand
ucccugagcucuacaacag

SEQ ID NO: 1590673 - RNA, 19 nt, Homo sapiens
  misc_RNA (1)...(19): siRNA sense strand
acagggaggacucugauga

SEQ ID NO: 1590674 - RNA, 19 nt, Homo sapiens
  misc_RNA (1)...(19): siRNA sense strand
gggaagcccaugaacuuag

SEQ ID NO: 1590675 - RNA, 19 nt, Homo sapiens
  misc_RNA (1)...(19): siRNA sense strand
aggaaacccuucuaguagu

SEQ ID NO: 1590676 - RNA, 19 nt, Homo sapiens
  misc_RNA (1)...(19): siRNA sense strand
gagcaagagacccucaaca

SEQ ID NO: 1590677 - RNA, 19 nt, Homo sapiens
  misc_RNA (1)...(19): siRNA sense strand
gcgggacacagaacaguga

SEQ ID NO: 1590678 - RNA, 19 nt, Homo sapiens
  misc_RNA (1)...(19): siRNA sense strand
cuucggcucuuuccaugga

SEQ ID NO: 1590679 - RNA, 19 nt, Homo sapiens
  misc_RNA (1)...(19): siRNA sense strand
uggcaugucuuggguucuu

SEQ ID NO: 1590680 - RNA, 19 nt, Homo sapiens
  misc_RNA (1)...(19): siRNA sense strand
guguauagaacuuccaaau

SEQ ID NO: 1590681 - RNA, 19 nt, Homo sapiens
  misc_RNA (1)...(19): siRNA sense strand
gagcucuacaacagaauau

SEQ ID NO: 1590682 - RNA, 19 nt, Homo sapiens
  misc_RNA (1)...(19): siRNA sense strand
uguauagaacuuccaaaug

SEQ ID NO: 1590683 - RNA, 19 nt, Homo sapiens
  misc_RNA (1)...(19): siRNA sense strand
gaaacccuucuaguaguug

SEQ ID NO: 1590684 - RNA, 19 nt, Homo sapiens
  misc_RNA (1)...(19): siRNA sense strand
caggagagaacgugaccuu

SEQ ID NO: 1590685 - RNA, 19 nt, Homo sapiens
  misc_RNA (1)...(19): siRNA sense strand
gaacaguuuccucauuagc

SEQ ID NO: 1590686 - RNA, 19 nt, Homo sapiens
  misc_RNA (1)...(19): siRNA sense strand
acagauaccagcgugugua

SEQ ID NO: 1590687 - RNA, 19 nt, Homo sapiens
  misc_RNA (1)...(19): siRNA sense strand
gaggugacauacgcacagu

SEQ ID NO: 1590688 - RNA, 19 nt, Homo sapiens
  misc_RNA (1)...(19): siRNA sense strand
ucacaggaaacccuucuag

SEQ ID NO: 1590689 - RNA, 19 nt, Homo sapiens
  misc_RNA (1)...(19): siRNA sense strand
ugagcucuacaacagaaua

SEQ ID NO: 1590690 - RNA, 19 nt, Homo sapiens
  misc_RNA (1)...(19): siRNA sense strand
cagggaggacucugaugaa

SEQ ID NO: 1590691 - RNA, 19 nt, Homo sapiens
  misc_RNA (1)...(19): siRNA sense strand
ugaacagggaggacucuga

SEQ ID NO: 1590692 - RNA, 19 nt, Homo sapiens
  misc_RNA (1)...(19): siRNA sense strand
gggaggacucugaugaaca

SEQ ID NO: 1590693 - RNA, 19 nt, Homo sapiens
  misc_RNA (1)...(19): siRNA sense strand
guacucaguggccaucauc

SEQ ID NO: 1590694 - RNA, 19 nt, Homo sapiens
  misc_RNA (1)...(19): siRNA sense strand
uauagaacuuccaaaugcu

SEQ ID NO: 1590695 - RNA, 19 nt, Homo sapiens
  misc_RNA (1)...(19): siRNA sense strand
agagcuccuuugacaucua

SEQ ID NO: 1590696 - RNA, 19 nt, Homo sapiens
  misc_RNA (1)...(19): siRNA sense strand
gguacucaguggccaucau

SEQ ID NO: 1590697 - RNA, 19 nt, Homo sapiens
  misc_RNA (1)...(19): siRNA sense strand
acggagagaccuacagaug

SEQ ID NO: 1590698 - RNA, 19 nt, Homo sapiens
  misc_RNA (1)...(19): siRNA sense strand
gugcccagcaucaauggaa

SEQ ID NO: 1590699 - RNA, 19 nt, Homo sapiens
  misc_RNA (1)...(19): siRNA sense strand
ugacaucuaccaucuaucc

SEQ ID NO: 1590700 - RNA, 19 nt, Homo sapiens
  misc_RNA (1)...(19): siRNA sense strand
ccuuugacaucuaccaucu

SEQ ID NO: 1590701 - RNA, 19 nt, Homo sapiens
  misc_RNA (1)...(19): siRNA sense strand
acucuucggugucacuauc

SEQ ID NO: 1590702 - RNA, 19 nt, Homo sapiens
  misc_RNA (1)...(19): siRNA sense strand
uaccagcguguguauagaa

SEQ ID NO: 1590703 - RNA, 19 nt, Homo sapiens
  misc_RNA (1)...(19): siRNA sense strand
gugacccacugccuguuuc

SEQ ID NO: 1590704 - RNA, 19 nt, Homo sapiens
  misc_RNA (1)...(19): siRNA sense strand
gaaagugguugauccauuu

SEQ ID NO: 1590705 - RNA, 19 nt, Homo sapiens
  misc_RNA (1)...(19): siRNA sense strand
ugaaagaaguggucaauaa

SEQ ID NO: 1590706 - RNA, 19 nt, Homo sapiens
  misc_RNA (1)...(19): siRNA sense strand
gaaagaaguggucaauaaa

SEQ ID NO: 1590707 - RNA, 19 nt, Homo sapiens
  misc_RNA (1)...(19): siRNA sense strand
ugaacgagcugauggauau

SEQ ID NO: 1590708 - RNA, 19 nt, Homo sapiens
  misc_RNA (1)...(19): siRNA sense strand
cgagacaggugcuaaaguu

SEQ ID NO: 1590709 - RNA, 19 nt, Homo sapiens
  misc_RNA (1)...(19): siRNA sense strand
ugaagaagcccaaguuuga

SEQ ID NO: 1590710 - RNA, 19 nt, Homo sapiens
  misc_RNA (1)...(19): siRNA sense strand
gaacaagcgccuuacgaaa

SEQ ID NO: 1590711 - RNA, 19 nt, Homo sapiens
  misc_RNA (1)...(19): siRNA sense strand
gauugaagcucacguugau

SEQ ID NO: 1590712 - RNA, 19 nt, Homo sapiens
  misc_RNA (1)...(19): siRNA sense strand
ucucaagggucguguguuu

SEQ ID NO: 1590713 - RNA, 19 nt, Homo sapiens
  misc_RNA (1)...(19): siRNA sense strand
ccugcuauguucaauauaa

SEQ ID NO: 1590714 - RNA, 19 nt, Homo sapiens
  misc_RNA (1)...(19): siRNA sense strand
gaagugagucuugcugauu

SEQ ID NO: 1590715 - RNA, 19 nt, Homo sapiens
  misc_RNA (1)...(19): siRNA sense strand
gcagaaugaugaaguugca

SEQ ID NO: 1590716 - RNA, 19 nt, Homo sapiens
  misc_RNA (1)...(19): siRNA sense strand
caugaugucuucguuagaa

SEQ ID NO: 1590717 - RNA, 19 nt, Homo sapiens
  misc_RNA (1)...(19): siRNA sense strand
agaaagugguugauccauu

SEQ ID NO: 1590718 - RNA, 19 nt, Homo sapiens
  misc_RNA (1)...(19): siRNA sense strand
gaaaaggcuugccaaucua

SEQ ID NO: 1590719 - RNA, 19 nt, Homo sapiens
  misc_RNA (1)...(19): siRNA sense strand
aauucaagcugauuacuga

SEQ ID NO: 1590720 - RNA, 19 nt, Homo sapiens
  misc_RNA (1)...(19): siRNA sense strand
gacaggugcuaaaguugaa

SEQ ID NO: 1590721 - RNA, 19 nt, Homo sapiens
  misc_RNA (1)...(19): siRNA sense strand
caccugcuauguucaauau

SEQ ID NO: 1590722 - RNA, 19 nt, Homo sapiens
  misc_RNA (1)...(19): siRNA sense strand
ggacgagacaggugcuaaa

SEQ ID NO: 1590723 - RNA, 19 nt, Homo sapiens
  misc_RNA (1)...(19): siRNA sense strand
ucaagacuaccgaugguua

SEQ ID NO: 1590724 - RNA, 19 nt, Homo sapiens
  misc_RNA (1)...(19): siRNA sense strand
ugaugaaguugcauuuaga

SEQ ID NO: 1590725 - RNA, 19 nt, Homo sapiens
  misc_RNA (1)...(19): siRNA sense strand
gaagaagcccaaguuugaa

SEQ ID NO: 1590726 - RNA, 19 nt, Homo sapiens
  misc_RNA (1)...(19): siRNA sense strand
ggcaagaacaagcgccuua

SEQ ID NO: 1590727 - RNA, 19 nt, Homo sapiens
  misc_RNA (1)...(19): siRNA sense strand
ggucguguguuugaaguga

SEQ ID NO: 1590728 - RNA, 19 nt, Homo sapiens
  misc_RNA (1)...(19): siRNA sense strand
gacuaccgaugguuacuug

SEQ ID NO: 1590729 - RNA, 19 nt, Homo sapiens
  misc_RNA (1)...(19): siRNA sense strand
aagugagucuugcugauuu

SEQ ID NO: 1590730 - RNA, 19 nt, Homo sapiens
  misc_RNA (1)...(19): siRNA sense strand
gcaccugcuauguucaaua

SEQ ID NO: 1590731 - RNA, 19 nt, Homo sapiens
  misc_RNA (1)...(19): siRNA sense strand
gaaggcaguaguucuggaa

SEQ ID NO: 1590732 - RNA, 19 nt, Homo sapiens
  misc_RNA (1)...(19): siRNA sense strand
ucaagcugauuacugaaga

SEQ ID NO: 1590733 - RNA, 19 nt, Homo sapiens
  misc_RNA (1)...(19): siRNA sense strand
cuauuuauccucuccauga

SEQ ID NO: 1590734 - RNA, 19 nt, Homo sapiens
  misc_RNA (1)...(19): siRNA sense strand
gaagaaagugguugaucca

SEQ ID NO: 1590735 - RNA, 19 nt, Homo sapiens
  misc_RNA (1)...(19): siRNA sense strand
agauugguaugaugugaaa

SEQ ID NO: 1590736 - RNA, 19 nt, Homo sapiens
  misc_RNA (1)...(19): siRNA sense strand
ccaagaagaaagugguuga

SEQ ID NO: 1590737 - RNA, 19 nt, Homo sapiens
  misc_RNA (1)...(19): siRNA sense strand
aagaaagauugguaugaug

SEQ ID NO: 1590738 - RNA, 19 nt, Homo sapiens
  misc_RNA (1)...(19): siRNA sense strand
gaugaaguugcauuuagaa

SEQ ID NO: 1590739 - RNA, 19 nt, Homo sapiens
  misc_RNA (1)...(19): siRNA sense strand
uugcugauuugcagaauga

SEQ ID NO: 1590740 - RNA, 19 nt, Homo sapiens
  misc_RNA (1)...(19): siRNA sense strand
aaagauugguaugauguga

SEQ ID NO: 1590741 - RNA, 19 nt, Homo sapiens
  misc_RNA (1)...(19): siRNA sense strand
aaagggagccaagaagaaa

SEQ ID NO: 1590742 - RNA, 19 nt, Homo sapiens
  misc_RNA (1)...(19): siRNA sense strand
gaagcccaaguuugaauug

SEQ ID NO: 1590743 - RNA, 19 nt, Homo sapiens
  misc_RNA (1)...(19): siRNA sense strand
gaaagauugguaugaugug

SEQ ID NO: 1590744 - RNA, 19 nt, Homo sapiens
  misc_RNA (1)...(19): siRNA sense strand
gcugaagaagcccaaguuu

SEQ ID NO: 1590745 - RNA, 19 nt, Homo sapiens
  misc_RNA (1)...(19): siRNA sense strand
caacagguccgccaaaucc

SEQ ID NO: 1590746 - RNA, 19 nt, Homo sapiens
  misc_RNA (1)...(19): siRNA sense strand
agaaaaggcuugccaaucu

SEQ ID NO: 1590747 - RNA, 19 nt, Homo sapiens
  misc_RNA (1)...(19): siRNA sense strand
agaacaagcgccuuacgaa

SEQ ID NO: 1590748 - RNA, 19 nt, Homo sapiens
  misc_RNA (1)...(19): siRNA sense strand
cuaagaaagauugguauga

SEQ ID NO: 1590749 - RNA, 19 nt, Homo sapiens
  misc_RNA (1)...(19): siRNA sense strand
agacaggugcuaaaguuga

SEQ ID NO: 1590750 - RNA, 19 nt, Homo sapiens
  misc_RNA (1)...(19): siRNA sense strand
ugaagugagucuugcugau

SEQ ID NO: 1590751 - RNA, 19 nt, Homo sapiens
  misc_RNA (1)...(19): siRNA sense strand
gagacaggugcuaaaguug

SEQ ID NO: 1590752 - RNA, 19 nt, Homo sapiens
  misc_RNA (1)...(19): siRNA sense strand
agaaagauugguaugaugu

SEQ ID NO: 1590753 - RNA, 19 nt, Homo sapiens
  misc_RNA (1)...(19): siRNA sense strand
caagggucguguguuugaa

SEQ ID NO: 1590754 - RNA, 19 nt, Homo sapiens
  misc_RNA (1)...(19): siRNA sense strand
gaagcucacguugauguca

SEQ ID NO: 1590755 - RNA, 19 nt, Homo sapiens
  misc_RNA (1)...(19): siRNA sense strand
ggaucuuacccgugacaaa

SEQ ID NO: 1590756 - RNA, 19 nt, Homo sapiens
  misc_RNA (1)...(19): siRNA sense strand
augaugaaguugcauuuag

SEQ ID NO: 1590757 - RNA, 19 nt, Homo sapiens
  misc_RNA (1)...(19): siRNA sense strand
guugauccauuuucuaaga

SEQ ID NO: 1590758 - RNA, 19 nt, Homo sapiens
  misc_RNA (1)...(19): siRNA sense strand
aguccaagaaucuguuuaa

SEQ ID NO: 1590759 - RNA, 19 nt, Homo sapiens
  misc_RNA (1)...(19): siRNA sense strand
ggugaaggcaguaguucug

SEQ ID NO: 1590760 - RNA, 19 nt, Homo sapiens
  misc_RNA (1)...(19): siRNA sense strand
aaaacugccugacuaacuu

SEQ ID NO: 1590761 - RNA, 19 nt, Homo sapiens
  misc_RNA (1)...(19): siRNA sense strand
aggcuugccaaucuauuua

SEQ ID NO: 1590762 - RNA, 19 nt, Homo sapiens
  misc_RNA (1)...(19): siRNA sense strand
ugauugaagcucacguuga

SEQ ID NO: 1590763 - RNA, 19 nt, Homo sapiens
  misc_RNA (1)...(19): siRNA sense strand
cugaagaagcccaaguuug

SEQ ID NO: 1590764 - RNA, 19 nt, Homo sapiens
  misc_RNA (1)...(19): siRNA sense strand
uuuauccucuccaugaugu

SEQ ID NO: 1590765 - RNA, 19 nt, Homo sapiens
  misc_RNA (1)...(19): siRNA sense strand
uccaugaugucuucguuag

SEQ ID NO: 1590766 - RNA, 19 nt, Homo sapiens
  misc_RNA (1)...(19): siRNA sense strand
ugucaagacuaccgauggu

SEQ ID NO: 1590767 - RNA, 19 nt, Homo sapiens
  misc_RNA (1)...(19): siRNA sense strand
gcuugccaaucuauuuauc

SEQ ID NO: 1590768 - RNA, 19 nt, Homo sapiens
  misc_RNA (1)...(19): siRNA sense strand
aacaagcgccuuacgaaag

SEQ ID NO: 1590769 - RNA, 19 nt, Homo sapiens
  misc_RNA (1)...(19): siRNA sense strand
uaccgaugguuacuugcuu

SEQ ID NO: 1590770 - RNA, 19 nt, Homo sapiens
  misc_RNA (1)...(19): siRNA sense strand
cugauuugcagaaugauga

SEQ ID NO: 1590771 - RNA, 19 nt, Homo sapiens
  misc_RNA (1)...(19): siRNA sense strand
gggacgagacaggugcuaa

SEQ ID NO: 1590772 - RNA, 19 nt, Homo sapiens
  misc_RNA (1)...(19): siRNA sense strand
ucuccaugaugucuucguu

SEQ ID NO: 1590773 - RNA, 19 nt, Homo sapiens
  misc_RNA (1)...(19): siRNA sense strand
aaacgcaacaaucagauac

SEQ ID NO: 1590774 - RNA, 19 nt, Homo sapiens
  misc_RNA (1)...(19): siRNA sense strand
ccaacagguccgccaaauc

SEQ ID NO: 1590775 - RNA, 19 nt, Homo sapiens
  misc_RNA (1)...(19): siRNA sense strand
gaaagugguugauccauuu

SEQ ID NO: 1590776 - RNA, 19 nt, Homo sapiens
  misc_RNA (1)...(19): siRNA sense strand
ugaaagaaguggucaauaa

SEQ ID NO: 1590777 - RNA, 19 nt, Homo sapiens
  misc_RNA (1)...(19): siRNA sense strand
gaaagaaguggucaauaaa

SEQ ID NO: 1590778 - RNA, 19 nt, Homo sapiens
  misc_RNA (1)...(19): siRNA sense strand
ugaacgagcugauggauau

SEQ ID NO: 1590779 - RNA, 19 nt, Homo sapiens
  misc_RNA (1)...(19): siRNA sense strand
cgagacaggugcuaaaguu

SEQ ID NO: 1590780 - RNA, 19 nt, Homo sapiens
  misc_RNA (1)...(19): siRNA sense strand
ugaagaagcccaaguuuga

SEQ ID NO: 1590781 - RNA, 19 nt, Homo sapiens
  misc_RNA (1)...(19): siRNA sense strand
gaacaagcgccuuacgaaa

SEQ ID NO: 1590782 - RNA, 19 nt, Homo sapiens
  misc_RNA (1)...(19): siRNA sense strand
gauugaagcucacguugau

SEQ ID NO: 1590783 - RNA, 19 nt, Homo sapiens
  misc_RNA (1)...(19): siRNA sense strand
ucucaagggucguguguuu

SEQ ID NO: 1590784 - RNA, 19 nt, Homo sapiens
  misc_RNA (1)...(19): siRNA sense strand
ccugcuauguucaauauaa

SEQ ID NO: 1590785 - RNA, 19 nt, Homo sapiens
  misc_RNA (1)...(19): siRNA sense strand
gaagugagucuugcugauu

SEQ ID NO: 1590786 - RNA, 19 nt, Homo sapiens
  misc_RNA (1)...(19): siRNA sense strand
gcagaaugaugaaguugca

SEQ ID NO: 1590787 - RNA, 19 nt, Homo sapiens
  misc_RNA (1)...(19): siRNA sense strand
caugaugucuucguuagaa

SEQ ID NO: 1590788 - RNA, 19 nt, Homo sapiens
  misc_RNA (1)...(19): siRNA sense strand
agaaagugguugauccauu

SEQ ID NO: 1590789 - RNA, 19 nt, Homo sapiens
  misc_RNA (1)...(19): siRNA sense strand
gaaaaggcuugccaaucua

SEQ ID NO: 1590790 - RNA, 19 nt, Homo sapiens
  misc_RNA (1)...(19): siRNA sense strand
aauucaagcugauuacuga

SEQ ID NO: 1590791 - RNA, 19 nt, Homo sapiens
  misc_RNA (1)...(19): siRNA sense strand
gacaggugcuaaaguugaa

SEQ ID NO: 1590792 - RNA, 19 nt, Homo sapiens
  misc_RNA (1)...(19): siRNA sense strand
caccugcuauguucaauau

SEQ ID NO: 1590793 - RNA, 19 nt, Homo sapiens
  misc_RNA (1)...(19): siRNA sense strand
ggacgagacaggugcuaaa

SEQ ID NO: 1590794 - RNA, 19 nt, Homo sapiens
  misc_RNA (1)...(19): siRNA sense strand
ucaagacuaccgaugguua

SEQ ID NO: 1590795 - RNA, 19 nt, Homo sapiens
  misc_RNA (1)...(19): siRNA sense strand
ugaugaaguugcauuuaga

SEQ ID NO: 1590796 - RNA, 19 nt, Homo sapiens
  misc_RNA (1)...(19): siRNA sense strand
gaagaagcccaaguuugaa

SEQ ID NO: 1590797 - RNA, 19 nt, Homo sapiens
  misc_RNA (1)...(19): siRNA sense strand
ggcaagaacaagcgccuua

SEQ ID NO: 1590798 - RNA, 19 nt, Homo sapiens
  misc_RNA (1)...(19): siRNA sense strand
ggucguguguuugaaguga

SEQ ID NO: 1590799 - RNA, 19 nt, Homo sapiens
  misc_RNA (1)...(19): siRNA sense strand
gacuaccgaugguuacuug

SEQ ID NO: 1590800 - RNA, 19 nt, Homo sapiens
  misc_RNA (1)...(19): siRNA sense strand
aagugagucuugcugauuu

SEQ ID NO: 1590801 - RNA, 19 nt, Homo sapiens
  misc_RNA (1)...(19): siRNA sense strand
gcaccugcuauguucaaua

SEQ ID NO: 1590802 - RNA, 19 nt, Homo sapiens
  misc_RNA (1)...(19): siRNA sense strand
gaaggcaguaguucuggaa

SEQ ID NO: 1590803 - RNA, 19 nt, Homo sapiens
  misc_RNA (1)...(19): siRNA sense strand
ucaagcugauuacugaaga

SEQ ID NO: 1590804 - RNA, 19 nt, Homo sapiens
  misc_RNA (1)...(19): siRNA sense strand
cuauuuauccucuccauga

SEQ ID NO: 1590805 - RNA, 19 nt, Homo sapiens
  misc_RNA (1)...(19): siRNA sense strand
gaagaaagugguugaucca

SEQ ID NO: 1590806 - RNA, 19 nt, Homo sapiens
  misc_RNA (1)...(19): siRNA sense strand
agauugguaugaugugaaa

SEQ ID NO: 1590807 - RNA, 19 nt, Homo sapiens
  misc_RNA (1)...(19): siRNA sense strand
ccaagaagaaagugguuga

SEQ ID NO: 1590808 - RNA, 19 nt, Homo sapiens
  misc_RNA (1)...(19): siRNA sense strand
aagaaagauugguaugaug

SEQ ID NO: 1590809 - RNA, 19 nt, Homo sapiens
  misc_RNA (1)...(19): siRNA sense strand
gaugaaguugcauuuagaa

SEQ ID NO: 1590810 - RNA, 19 nt, Homo sapiens
  misc_RNA (1)...(19): siRNA sense strand
uugcugauuugcagaauga

SEQ ID NO: 1590811 - RNA, 19 nt, Homo sapiens
  misc_RNA (1)...(19): siRNA sense strand
aaagauugguaugauguga

SEQ ID NO: 1590812 - RNA, 19 nt, Homo sapiens
  misc_RNA (1)...(19): siRNA sense strand
aaagggagccaagaagaaa

SEQ ID NO: 1590813 - RNA, 19 nt, Homo sapiens
  misc_RNA (1)...(19): siRNA sense strand
gaagcccaaguuugaauug

SEQ ID NO: 1590814 - RNA, 19 nt, Homo sapiens
  misc_RNA (1)...(19): siRNA sense strand
gaaagauugguaugaugug

SEQ ID NO: 1590815 - RNA, 19 nt, Homo sapiens
  misc_RNA (1)...(19): siRNA sense strand
gcugaagaagcccaaguuu

SEQ ID NO: 1590816 - RNA, 19 nt, Homo sapiens
  misc_RNA (1)...(19): siRNA sense strand
caacagguccgccaaaucc

SEQ ID NO: 1590817 - RNA, 19 nt, Homo sapiens
  misc_RNA (1)...(19): siRNA sense strand
agaaaaggcuugccaaucu

SEQ ID NO: 1590818 - RNA, 19 nt, Homo sapiens
  misc_RNA (1)...(19): siRNA sense strand
agaacaagcgccuuacgaa

SEQ ID NO: 1590819 - RNA, 19 nt, Homo sapiens
  misc_RNA (1)...(19): siRNA sense strand
cuaagaaagauugguauga

SEQ ID NO: 1590820 - RNA, 19 nt, Homo sapiens
  misc_RNA (1)...(19): siRNA sense strand
agacaggugcuaaaguuga

SEQ ID NO: 1590821 - RNA, 19 nt, Homo sapiens
  misc_RNA (1)...(19): siRNA sense strand
ugaagugagucuugcugau

SEQ ID NO: 1590822 - RNA, 19 nt, Homo sapiens
  misc_RNA (1)...(19): siRNA sense strand
gagacaggugcuaaaguug

SEQ ID NO: 1590823 - RNA, 19 nt, Homo sapiens
  misc_RNA (1)...(19): siRNA sense strand
agaaagauugguaugaugu

SEQ ID NO: 1590824 - RNA, 19 nt, Homo sapiens
  misc_RNA (1)...(19): siRNA sense strand
caagggucguguguuugaa

SEQ ID NO: 1590825 - RNA, 19 nt, Homo sapiens
  misc_RNA (1)...(19): siRNA sense strand
gaagcucacguugauguca

SEQ ID NO: 1590826 - RNA, 19 nt, Homo sapiens
  misc_RNA (1)...(19): siRNA sense strand
ggaucuuacccgugacaaa

SEQ ID NO: 1590827 - RNA, 19 nt, Homo sapiens
  misc_RNA (1)...(19): siRNA sense strand
augaugaaguugcauuuag

SEQ ID NO: 1590828 - RNA, 19 nt, Homo sapiens
  misc_RNA (1)...(19): siRNA sense strand
guugauccauuuucuaaga

SEQ ID NO: 1590829 - RNA, 19 nt, Homo sapiens
  misc_RNA (1)...(19): siRNA sense strand
aguccaagaaucuguuuaa

SEQ ID NO: 1590830 - RNA, 19 nt, Homo sapiens
  misc_RNA (1)...(19): siRNA sense strand
ggugaaggcaguaguucug

SEQ ID NO: 1590831 - RNA, 19 nt, Homo sapiens
  misc_RNA (1)...(19): siRNA sense strand
aaaacugccugacuaacuu

SEQ ID NO: 1590832 - RNA, 19 nt, Homo sapiens
  misc_RNA (1)...(19): siRNA sense strand
aggcuugccaaucuauuua

SEQ ID NO: 1590833 - RNA, 19 nt, Homo sapiens
  misc_RNA (1)...(19): siRNA sense strand
ugauugaagcucacguuga

SEQ ID NO: 1590834 - RNA, 19 nt, Homo sapiens
  misc_RNA (1)...(19): siRNA sense strand
cugaagaagcccaaguuug

SEQ ID NO: 1590835 - RNA, 19 nt, Homo sapiens
  misc_RNA (1)...(19): siRNA sense strand
uuuauccucuccaugaugu

SEQ ID NO: 1590836 - RNA, 19 nt, Homo sapiens
  misc_RNA (1)...(19): siRNA sense strand
uccaugaugucuucguuag

SEQ ID NO: 1590837 - RNA, 19 nt, Homo sapiens
  misc_RNA (1)...(19): siRNA sense strand
ugucaagacuaccgauggu

SEQ ID NO: 1590838 - RNA, 19 nt, Homo sapiens
  misc_RNA (1)...(19): siRNA sense strand
gcuugccaaucuauuuauc

SEQ ID NO: 1590839 - RNA, 19 nt, Homo sapiens
  misc_RNA (1)...(19): siRNA sense strand
aacaagcgccuuacgaaag

SEQ ID NO: 1590840 - RNA, 19 nt, Homo sapiens
  misc_RNA (1)...(19): siRNA sense strand
uaccgaugguuacuugcuu

SEQ ID NO: 1590841 - RNA, 19 nt, Homo sapiens
  misc_RNA (1)...(19): siRNA sense strand
cugauuugcagaaugauga

SEQ ID NO: 1590842 - RNA, 19 nt, Homo sapiens
  misc_RNA (1)...(19): siRNA sense strand
gggacgagacaggugcuaa

SEQ ID NO: 1590843 - RNA, 19 nt, Homo sapiens
  misc_RNA (1)...(19): siRNA sense strand
ucuccaugaugucuucguu

SEQ ID NO: 1590844 - RNA, 19 nt, Homo sapiens
  misc_RNA (1)...(19): siRNA sense strand
aaacgcaacaaucagauac

SEQ ID NO: 1590845 - RNA, 19 nt, Homo sapiens
  misc_RNA (1)...(19): siRNA sense strand
ccaacagguccgccaaauc

SEQ ID NO: 1590846 - RNA, 19 nt, Homo sapiens
  misc_RNA (1)...(19): siRNA sense strand
gaggagaaaccacuacuua

SEQ ID NO: 1590847 - RNA, 19 nt, Homo sapiens
  misc_RNA (1)...(19): siRNA sense strand
agaagcagcugaaguuuga

SEQ ID NO: 1590848 - RNA, 19 nt, Homo sapiens
  misc_RNA (1)...(19): siRNA sense strand
ggagaaaccacuacuuaga

SEQ ID NO: 1590849 - RNA, 19 nt, Homo sapiens
  misc_RNA (1)...(19): siRNA sense strand
ccaagaagcagcugaaguu

SEQ ID NO: 1590850 - RNA, 19 nt, Homo sapiens
  misc_RNA (1)...(19): siRNA sense strand
ggaagaggaggacgacuuu

SEQ ID NO: 1590851 - RNA, 19 nt, Homo sapiens
  misc_RNA (1)...(19): siRNA sense strand
gcaagaugcugcggguaaa

SEQ ID NO: 1590852 - RNA, 19 nt, Homo sapiens
  misc_RNA (1)...(19): siRNA sense strand
gagaggacaucaccagcuu

SEQ ID NO: 1590853 - RNA, 19 nt, Homo sapiens
  misc_RNA (1)...(19): siRNA sense strand
aaacuacacgucccaauuu

SEQ ID NO: 1590854 - RNA, 19 nt, Homo sapiens
  misc_RNA (1)...(19): siRNA sense strand
agaagaagauggagagagu

SEQ ID NO: 1590855 - RNA, 19 nt, Homo sapiens
  misc_RNA (1)...(19): siRNA sense strand
ggagcguccuugucaauca

SEQ ID NO: 1590856 - RNA, 19 nt, Homo sapiens
  misc_RNA (1)...(19): siRNA sense strand
gagaaaccacuacuuagau

SEQ ID NO: 1590857 - RNA, 19 nt, Homo sapiens
  misc_RNA (1)...(19): siRNA sense strand
gagaugagaagaagaugga

SEQ ID NO: 1590858 - RNA, 19 nt, Homo sapiens
  misc_RNA (1)...(19): siRNA sense strand
gagaacaucgagaggagaa

SEQ ID NO: 1590859 - RNA, 19 nt, Homo sapiens
  misc_RNA (1)...(19): siRNA sense strand
ggacgacuuucggcuggaa

SEQ ID NO: 1590860 - RNA, 19 nt, Homo sapiens
  misc_RNA (1)...(19): siRNA sense strand
ggaccuucacccuguauga

SEQ ID NO: 1590861 - RNA, 19 nt, Homo sapiens
  misc_RNA (1)...(19): siRNA sense strand
agaaaccacuacuuagauc

SEQ ID NO: 1590862 - RNA, 19 nt, Homo sapiens
  misc_RNA (1)...(19): siRNA sense strand
uguaugacuuugacaacaa

SEQ ID NO: 1590863 - RNA, 19 nt, Homo sapiens
  misc_RNA (1)...(19): siRNA sense strand
caagaagcagcugaaguuu

SEQ ID NO: 1590864 - RNA, 19 nt, Homo sapiens
  misc_RNA (1)...(19): siRNA sense strand
cagcggagaugagaagaag

SEQ ID NO: 1590865 - RNA, 19 nt, Homo sapiens
  misc_RNA (1)...(19): siRNA sense strand
gugguggacuccucuguca

SEQ ID NO: 1590866 - RNA, 19 nt, Homo sapiens
  misc_RNA (1)...(19): siRNA sense strand
gcaccaccaccaccaugaa

SEQ ID NO: 1590867 - RNA, 19 nt, Homo sapiens
  misc_RNA (1)...(19): siRNA sense strand
gaacaucaccaccauuacc

SEQ ID NO: 1590868 - RNA, 19 nt, Homo sapiens
  misc_RNA (1)...(19): siRNA sense strand
cugcggagcugggagaaga

SEQ ID NO: 1590869 - RNA, 19 nt, Homo sapiens
  misc_RNA (1)...(19): siRNA sense strand
augaacaucaccaccauua

SEQ ID NO: 1590870 - RNA, 19 nt, Homo sapiens
  misc_RNA (1)...(19): siRNA sense strand
ggacgggagcaagcacuuu

SEQ ID NO: 1590871 - RNA, 19 nt, Homo sapiens
  misc_RNA (1)...(19): siRNA sense strand
ccgccuuggugguguauga

SEQ ID NO: 1590872 - RNA, 19 nt, Homo sapiens
  misc_RNA (1)...(19): siRNA sense strand
gcggagaugagaagaagau

SEQ ID NO: 1590873 - RNA, 19 nt, Homo sapiens
  misc_RNA (1)...(19): siRNA sense strand
ccaugaacaucaccaccau

SEQ ID NO: 1590874 - RNA, 19 nt, Homo sapiens
  misc_RNA (1)...(19): siRNA sense strand
ccacaucccacaccgaaag

SEQ ID NO: 1590875 - RNA, 19 nt, Homo sapiens
  misc_RNA (1)...(19): siRNA sense strand
cggcaggaguggaccuuca

SEQ ID NO: 1590876 - RNA, 19 nt, Homo sapiens
  misc_RNA (1)...(19): siRNA sense strand
gcagcggagaugagaagaa

SEQ ID NO: 1590877 - RNA, 19 nt, Homo sapiens
  misc_RNA (1)...(19): siRNA sense strand
gggagcaagcacuuuguga

SEQ ID NO: 1590878 - RNA, 19 nt, Homo sapiens
  misc_RNA (1)...(19): siRNA sense strand
gacgggagcaagcacuuug

SEQ ID NO: 1590879 - RNA, 19 nt, Homo sapiens
  misc_RNA (1)...(19): siRNA sense strand
gaacaucgagaggagaaac

SEQ ID NO: 1590880 - RNA, 19 nt, Homo sapiens
  misc_RNA (1)...(19): siRNA sense strand
gaaaccacuacuuagaucu

SEQ ID NO: 1590881 - RNA, 19 nt, Homo sapiens
  misc_RNA (1)...(19): siRNA sense strand
aagaagcagcugaaguuug

SEQ ID NO: 1590882 - RNA, 19 nt, Homo sapiens
  misc_RNA (1)...(19): siRNA sense strand
aagaagauggagagaguga

SEQ ID NO: 1590883 - RNA, 19 nt, Homo sapiens
  misc_RNA (1)...(19): siRNA sense strand
gagcguccuugucaaucag

SEQ ID NO: 1590884 - RNA, 19 nt, Homo sapiens
  misc_RNA (1)...(19): siRNA sense strand
gcuccaagaagcagcugaa

SEQ ID NO: 1590885 - RNA, 19 nt, Homo sapiens
  misc_RNA (1)...(19): siRNA sense strand
ggucucagagcuccagcaa

SEQ ID NO: 1590886 - RNA, 19 nt, Homo sapiens
  misc_RNA (1)...(19): siRNA sense strand
gggcagcggagaugagaag

SEQ ID NO: 1590887 - RNA, 19 nt, Homo sapiens
  misc_RNA (1)...(19): siRNA sense strand
guaugacuuugacaacaac

SEQ ID NO: 1590888 - RNA, 19 nt, Homo sapiens
  misc_RNA (1)...(19): siRNA sense strand
aacuacacgucccaauuug

SEQ ID NO: 1590889 - RNA, 19 nt, Homo sapiens
  misc_RNA (1)...(19): siRNA sense strand
cagagaccaagcccacuga

SEQ ID NO: 1590890 - RNA, 19 nt, Homo sapiens
  misc_RNA (1)...(19): siRNA sense strand
ccacuucuaccagacauag

SEQ ID NO: 1590891 - RNA, 19 nt, Homo sapiens
  misc_RNA (1)...(19): siRNA sense strand
gccggaagccauccacauc

SEQ ID NO: 1590892 - RNA, 19 nt, Homo sapiens
  misc_RNA (1)...(19): siRNA sense strand
ggagcugggagaagaagca

SEQ ID NO: 1590893 - RNA, 19 nt, Homo sapiens
  misc_RNA (1)...(19): siRNA sense strand
gagagaacaucaucaccua

SEQ ID NO: 1590894 - RNA, 19 nt, Homo sapiens
  misc_RNA (1)...(19): siRNA sense strand
gcaagaagcacugauggua

SEQ ID NO: 1590895 - RNA, 19 nt, Homo sapiens
  misc_RNA (1)...(19): siRNA sense strand
caacgacaauccacccauu

SEQ ID NO: 1590896 - RNA, 19 nt, Homo sapiens
  misc_RNA (1)...(19): siRNA sense strand
caucagaguucaucaucaa

SEQ ID NO: 1590897 - RNA, 19 nt, Homo sapiens
  misc_RNA (1)...(19): siRNA sense strand
gaggaaggcaccauccaua

SEQ ID NO: 1590898 - RNA, 19 nt, Homo sapiens
  misc_RNA (1)...(19): siRNA sense strand
gagacgggcuccucacugu

SEQ ID NO: 1590899 - RNA, 19 nt, Homo sapiens
  misc_RNA (1)...(19): siRNA sense strand
cuacuugguucccauagaa

SEQ ID NO: 1590900 - RNA, 19 nt, Homo sapiens
  misc_RNA (1)...(19): siRNA sense strand
ucaaggauguggccucugu

SEQ ID NO: 1590901 - RNA, 19 nt, Homo sapiens
  misc_RNA (1)...(19): siRNA sense strand
gcaggcaccguauuuguga

SEQ ID NO: 1590902 - RNA, 19 nt, Homo sapiens
  misc_RNA (1)...(19): siRNA sense strand
gaagcaagaagcacugaug

SEQ ID NO: 1590903 - RNA, 19 nt, Homo sapiens
  misc_RNA (1)...(19): siRNA sense strand
acaacgcccugauggcaua

SEQ ID NO: 1590904 - RNA, 19 nt, Homo sapiens
  misc_RNA (1)...(19): siRNA sense strand
gcaccguauuugugauuga

SEQ ID NO: 1590905 - RNA, 19 nt, Homo sapiens
  misc_RNA (1)...(19): siRNA sense strand
gagcguugcuucucuaucc

SEQ ID NO: 1590906 - RNA, 19 nt, Homo sapiens
  misc_RNA (1)...(19): siRNA sense strand
gguguacacuguucuggau

SEQ ID NO: 1590907 - RNA, 19 nt, Homo sapiens
  misc_RNA (1)...(19): siRNA sense strand
ugacagugccugagaacaa

SEQ ID NO: 1590908 - RNA, 19 nt, Homo sapiens
  misc_RNA (1)...(19): siRNA sense strand
gcaauauucauguuaccaa

SEQ ID NO: 1590909 - RNA, 19 nt, Homo sapiens
  misc_RNA (1)...(19): siRNA sense strand
gaugaggccacaggcaaua

SEQ ID NO: 1590910 - RNA, 19 nt, Homo sapiens
  misc_RNA (1)...(19): siRNA sense strand
caguagccaugucuccuuu

SEQ ID NO: 1590911 - RNA, 19 nt, Homo sapiens
  misc_RNA (1)...(19): siRNA sense strand
ccaccaacacgcucauuga

SEQ ID NO: 1590912 - RNA, 19 nt, Homo sapiens
  misc_RNA (1)...(19): siRNA sense strand
ggaaggcaccauccauaca

SEQ ID NO: 1590913 - RNA, 19 nt, Homo sapiens
  misc_RNA (1)...(19): siRNA sense strand
guagccaugucuccuuuca

SEQ ID NO: 1590914 - RNA, 19 nt, Homo sapiens
  misc_RNA (1)...(19): siRNA sense strand
uccagagccuguucucauu

SEQ ID NO: 1590915 - RNA, 19 nt, Homo sapiens
  misc_RNA (1)...(19): siRNA sense strand
ccaagcugguguacacugu

SEQ ID NO: 1590916 - RNA, 19 nt, Homo sapiens
  misc_RNA (1)...(19): siRNA sense strand
gaggaggacguccgagaga

SEQ ID NO: 1590917 - RNA, 19 nt, Homo sapiens
  misc_RNA (1)...(19): siRNA sense strand
gggcccugaugccaacuuu

SEQ ID NO: 1590918 - RNA, 19 nt, Homo sapiens
  misc_RNA (1)...(19): siRNA sense strand
cacagagccuauaccaguu

SEQ ID NO: 1590919 - RNA, 19 nt, Homo sapiens
  misc_RNA (1)...(19): siRNA sense strand
ccacaggcaauauucaugu

SEQ ID NO: 1590920 - RNA, 19 nt, Homo sapiens
  misc_RNA (1)...(19): siRNA sense strand
gcugagcccuacgauacuu

SEQ ID NO: 1590921 - RNA, 19 nt, Homo sapiens
  misc_RNA (1)...(19): siRNA sense strand
gcaagccccuagacuuuga

SEQ ID NO: 1590922 - RNA, 19 nt, Homo sapiens
  misc_RNA (1)...(19): siRNA sense strand
ugcaagacaucaacgacaa

SEQ ID NO: 1590923 - RNA, 19 nt, Homo sapiens
  misc_RNA (1)...(19): siRNA sense strand
cagaguucaucaucaaagu

SEQ ID NO: 1590924 - RNA, 19 nt, Homo sapiens
  misc_RNA (1)...(19): siRNA sense strand
ggaaaaggcgcaauaugug

SEQ ID NO: 1590925 - RNA, 19 nt, Homo sapiens
  misc_RNA (1)...(19): siRNA sense strand
gacagugccugagaacaag

SEQ ID NO: 1590926 - RNA, 19 nt, Homo sapiens
  misc_RNA (1)...(19): siRNA sense strand
uggauggacugccuuucuu

SEQ ID NO: 1590927 - RNA, 19 nt, Homo sapiens
  misc_RNA (1)...(19): siRNA sense strand
aagcugcacucggauguug

SEQ ID NO: 1590928 - RNA, 19 nt, Homo sapiens
  misc_RNA (1)...(19): siRNA sense strand
gaaggcaccauccauacag

SEQ ID NO: 1590929 - RNA, 19 nt, Homo sapiens
  misc_RNA (1)...(19): siRNA sense strand
caacauggaccgggagaca

SEQ ID NO: 1590930 - RNA, 19 nt, Homo sapiens
  misc_RNA (1)...(19): siRNA sense strand
caucaaagugcaagacauc

SEQ ID NO: 1590931 - RNA, 19 nt, Homo sapiens
  misc_RNA (1)...(19): siRNA sense strand
gcucauugacccagccuau

SEQ ID NO: 1590932 - RNA, 19 nt, Homo sapiens
  misc_RNA (1)...(19): siRNA sense strand
gcaagacaucaacgacaau

SEQ ID NO: 1590933 - RNA, 19 nt, Homo sapiens
  misc_RNA (1)...(19): siRNA sense strand
gcaagcugcacucggaugu

SEQ ID NO: 1590934 - RNA, 19 nt, Homo sapiens
  misc_RNA (1)...(19): siRNA sense strand
gggcaggcaccguauuugu

SEQ ID NO: 1590935 - RNA, 19 nt, Homo sapiens
  misc_RNA (1)...(19): siRNA sense strand
gugccaagcugguguacac

SEQ ID NO: 1590936 - RNA, 19 nt, Homo sapiens
  misc_RNA (1)...(19): siRNA sense strand
cacaggcaauauucauguu

SEQ ID NO: 1590937 - RNA, 19 nt, Homo sapiens
  misc_RNA (1)...(19): siRNA sense strand
acaggcaauauucauguua

SEQ ID NO: 1590938 - RNA, 19 nt, Homo sapiens
  misc_RNA (1)...(19): siRNA sense strand
ccaucagaguucaucauca

SEQ ID NO: 1590939 - RNA, 19 nt, Homo sapiens
  misc_RNA (1)...(19): siRNA sense strand
ggaugagaaugacaaugcu

SEQ ID NO: 1590940 - RNA, 19 nt, Homo sapiens
  misc_RNA (1)...(19): siRNA sense strand
ccguauuugugauugauga

SEQ ID NO: 1590941 - RNA, 19 nt, Homo sapiens
  misc_RNA (1)...(19): siRNA sense strand
gggagacacaggaggaguu

SEQ ID NO: 1590942 - RNA, 19 nt, Homo sapiens
  misc_RNA (1)...(19): siRNA sense strand
ugcccgagauguccaaugu

SEQ ID NO: 1590943 - RNA, 19 nt, Homo sapiens
  misc_RNA (1)...(19): siRNA sense strand
gaaggagcugggucuggaa

SEQ ID NO: 1590944 - RNA, 19 nt, Homo sapiens
  misc_RNA (1)...(19): siRNA sense strand
cagcaucagcacagacuug

SEQ ID NO: 1590945 - RNA, 19 nt, Homo sapiens
  misc_RNA (1)...(19): siRNA sense strand
aagaagcacugaugguacu

SEQ ID NO: 1590946 - RNA, 19 nt, Homo sapiens
  misc_RNA (1)...(19): siRNA sense strand
aaccaguucuuugucauug

SEQ ID NO: 1590947 - RNA, 19 nt, Homo sapiens
  misc_RNA (1)...(19): siRNA sense strand
ccggagcguugcuucucua

SEQ ID NO: 1590948 - RNA, 19 nt, Homo sapiens
  misc_RNA (1)...(19): siRNA sense strand
ucuuugucauugaggaaua

SEQ ID NO: 1590949 - RNA, 19 nt, Homo sapiens
  misc_RNA (1)...(19): siRNA sense strand
caggcaauauucauguuac

SEQ ID NO: 1590950 - RNA, 19 nt, Homo sapiens
  misc_RNA (1)...(19): siRNA sense strand
ucaaagugcaagacaucaa

SEQ ID NO: 1590951 - RNA, 19 nt, Homo sapiens
  misc_RNA (1)...(19): siRNA sense strand
gcucugcugcggacucgaa

SEQ ID NO: 1590952 - RNA, 19 nt, Homo sapiens
  misc_RNA (1)...(19): siRNA sense strand
guacacuguucuggaugga

SEQ ID NO: 1590953 - RNA, 19 nt, Homo sapiens
  misc_RNA (1)...(19): siRNA sense strand
gcagcacuacggugacugu

SEQ ID NO: 1590954 - RNA, 19 nt, Homo sapiens
  misc_RNA (1)...(19): siRNA sense strand
ccaguucuuugucauugag

SEQ ID NO: 1590955 - RNA, 19 nt, Homo sapiens
  misc_RNA (1)...(19): siRNA sense strand
ccuacuugguucccauaga

SEQ ID NO: 1590956 - RNA, 19 nt, Homo sapiens
  misc_RNA (1)...(19): siRNA sense strand
gcuccuggccagcugauuc

SEQ ID NO: 1590957 - RNA, 19 nt, Homo sapiens
  misc_RNA (1)...(19): siRNA sense strand
ggagcugggucuggaacca

SEQ ID NO: 1590958 - RNA, 19 nt, Homo sapiens
  misc_RNA (1)...(19): siRNA sense strand
agccaugucuccuuucaag

SEQ ID NO: 1590959 - RNA, 19 nt, Homo sapiens
  misc_RNA (1)...(19): siRNA sense strand
ccagagccuguucucauug

SEQ ID NO: 1590960 - RNA, 19 nt, Homo sapiens
  misc_RNA (1)...(19): siRNA sense strand
guccagagccuguucucau

SEQ ID NO: 1590961 - RNA, 19 nt, Homo sapiens
  misc_RNA (1)...(19): siRNA sense strand
agacacaggaggaguucuu

SEQ ID NO: 1590962 - RNA, 19 nt, Homo sapiens
  misc_RNA (1)...(19): siRNA sense strand
ggagacacaggaggaguuc

SEQ ID NO: 1590963 - RNA, 19 nt, Homo sapiens
  misc_RNA (1)...(19): siRNA sense strand
guacagccauccccaacau

SEQ ID NO: 1590964 - RNA, 19 nt, Homo sapiens
  misc_RNA (1)...(19): siRNA sense strand
ggauggacugccuuucuuc

SEQ ID NO: 1590965 - RNA, 19 nt, Homo sapiens
  misc_RNA (1)...(19): siRNA sense strand
aagcugguguacacuguuc

SEQ ID NO: 1590966 - RNA, 19 nt, Homo sapiens
  misc_RNA (1)...(19): siRNA sense strand
cagagccuguucucauugg

SEQ ID NO: 1590967 - RNA, 19 nt, Homo sapiens
  misc_RNA (1)...(19): siRNA sense strand
caaagugcaagacaucaac

SEQ ID NO: 1590968 - RNA, 19 nt, Homo sapiens
  misc_RNA (1)...(19): siRNA sense strand
acgacucggugcaggugua

SEQ ID NO: 1590969 - RNA, 19 nt, Homo sapiens
  misc_RNA (1)...(19): siRNA sense strand
gauccaggccaaggacaug

SEQ ID NO: 1590970 - RNA, 19 nt, Homo sapiens
  misc_RNA (1)...(19): siRNA sense strand
ggcaggcaccguauuugug

SEQ ID NO: 1590971 - RNA, 19 nt, Homo sapiens
  misc_RNA (1)...(19): siRNA sense strand
caccgaggccuucgacauc

SEQ ID NO: 1590972 - RNA, 19 nt, Homo sapiens
  misc_RNA (1)...(19): siRNA sense strand
ucaucaaagugcaagacau

SEQ ID NO: 1590973 - RNA, 19 nt, Homo sapiens
  misc_RNA (1)...(19): siRNA sense strand
gcccugaugccaacuuuac

SEQ ID NO: 1590974 - RNA, 19 nt, Homo sapiens
  misc_RNA (1)...(19): siRNA sense strand
uggacugccuuucuucucu

SEQ ID NO: 1590975 - RNA, 19 nt, Homo sapiens
  misc_RNA (1)...(19): siRNA sense strand
gagagaacaucaucaccua

SEQ ID NO: 1590976 - RNA, 19 nt, Homo sapiens
  misc_RNA (1)...(19): siRNA sense strand
gcaagaagcacugauggua

SEQ ID NO: 1590977 - RNA, 19 nt, Homo sapiens
  misc_RNA (1)...(19): siRNA sense strand
caacgacaauccacccauu

SEQ ID NO: 1590978 - RNA, 19 nt, Homo sapiens
  misc_RNA (1)...(19): siRNA sense strand
caucagaguucaucaucaa

SEQ ID NO: 1590979 - RNA, 19 nt, Homo sapiens
  misc_RNA (1)...(19): siRNA sense strand
gaggaaggcaccauccaua

SEQ ID NO: 1590980 - RNA, 19 nt, Homo sapiens
  misc_RNA (1)...(19): siRNA sense strand
gagacgggcuccucacugu

SEQ ID NO: 1590981 - RNA, 19 nt, Homo sapiens
  misc_RNA (1)...(19): siRNA sense strand
cuacuugguucccauagaa

SEQ ID NO: 1590982 - RNA, 19 nt, Homo sapiens
  misc_RNA (1)...(19): siRNA sense strand
ucaaggauguggccucugu

SEQ ID NO: 1590983 - RNA, 19 nt, Homo sapiens
  misc_RNA (1)...(19): siRNA sense strand
gcaggcaccguauuuguga

SEQ ID NO: 1590984 - RNA, 19 nt, Homo sapiens
  misc_RNA (1)...(19): siRNA sense strand
gaagcaagaagcacugaug

SEQ ID NO: 1590985 - RNA, 19 nt, Homo sapiens
  misc_RNA (1)...(19): siRNA sense strand
acaacgcccugauggcaua

SEQ ID NO: 1590986 - RNA, 19 nt, Homo sapiens
  misc_RNA (1)...(19): siRNA sense strand
gcaccguauuugugauuga

SEQ ID NO: 1590987 - RNA, 19 nt, Homo sapiens
  misc_RNA (1)...(19): siRNA sense strand
gagcguugcuucucuaucc

SEQ ID NO: 1590988 - RNA, 19 nt, Homo sapiens
  misc_RNA (1)...(19): siRNA sense strand
gguguacacuguucuggau

SEQ ID NO: 1590989 - RNA, 19 nt, Homo sapiens
  misc_RNA (1)...(19): siRNA sense strand
ugacagugccugagaacaa

SEQ ID NO: 1590990 - RNA, 19 nt, Homo sapiens
  misc_RNA (1)...(19): siRNA sense strand
gcaauauucauguuaccaa

SEQ ID NO: 1590991 - RNA, 19 nt, Homo sapiens
  misc_RNA (1)...(19): siRNA sense strand
gaugaggccacaggcaaua

SEQ ID NO: 1590992 - RNA, 19 nt, Homo sapiens
  misc_RNA (1)...(19): siRNA sense strand
caguagccaugucuccuuu

SEQ ID NO: 1590993 - RNA, 19 nt, Homo sapiens
  misc_RNA (1)...(19): siRNA sense strand
ccaccaacacgcucauuga

SEQ ID NO: 1590994 - RNA, 19 nt, Homo sapiens
  misc_RNA (1)...(19): siRNA sense strand
ggaaggcaccauccauaca

SEQ ID NO: 1590995 - RNA, 19 nt, Homo sapiens
  misc_RNA (1)...(19): siRNA sense strand
guagccaugucuccuuuca

SEQ ID NO: 1590996 - RNA, 19 nt, Homo sapiens
  misc_RNA (1)...(19): siRNA sense strand
uccagagccuguucucauu

SEQ ID NO: 1590997 - RNA, 19 nt, Homo sapiens
  misc_RNA (1)...(19): siRNA sense strand
ccaagcugguguacacugu

SEQ ID NO: 1590998 - RNA, 19 nt, Homo sapiens
  misc_RNA (1)...(19): siRNA sense strand
gaggaggacguccgagaga

SEQ ID NO: 1590999 - RNA, 19 nt, Homo sapiens
  misc_RNA (1)...(19): siRNA sense strand
gggcccugaugccaacuuu

SEQ ID NO: 1591000 - RNA, 19 nt, Homo sapiens
  misc_RNA (1)...(19): siRNA sense strand
cacagagccuauaccaguu

SEQ ID NO: 1591001 - RNA, 19 nt, Homo sapiens
  misc_RNA (1)...(19): siRNA sense strand
ccacaggcaauauucaugu

SEQ ID NO: 1591002 - RNA, 19 nt, Homo sapiens
  misc_RNA (1)...(19): siRNA sense strand
gcugagcccuacgauacuu

SEQ ID NO: 1591003 - RNA, 19 nt, Homo sapiens
  misc_RNA (1)...(19): siRNA sense strand
gcaagccccuagacuuuga

SEQ ID NO: 1591004 - RNA, 19 nt, Homo sapiens
  misc_RNA (1)...(19): siRNA sense strand
ugcaagacaucaacgacaa

SEQ ID NO: 1591005 - RNA, 19 nt, Homo sapiens
  misc_RNA (1)...(19): siRNA sense strand
cagaguucaucaucaaagu

SEQ ID NO: 1591006 - RNA, 19 nt, Homo sapiens
  misc_RNA (1)...(19): siRNA sense strand
ggaaaaggcgcaauaugug

SEQ ID NO: 1591007 - RNA, 19 nt, Homo sapiens
  misc_RNA (1)...(19): siRNA sense strand
gacagugccugagaacaag

SEQ ID NO: 1591008 - RNA, 19 nt, Homo sapiens
  misc_RNA (1)...(19): siRNA sense strand
uggauggacugccuuucuu

SEQ ID NO: 1591009 - RNA, 19 nt, Homo sapiens
  misc_RNA (1)...(19): siRNA sense strand
aagcugcacucggauguug

SEQ ID NO: 1591010 - RNA, 19 nt, Homo sapiens
  misc_RNA (1)...(19): siRNA sense strand
gaaggcaccauccauacag

SEQ ID NO: 1591011 - RNA, 19 nt, Homo sapiens
  misc_RNA (1)...(19): siRNA sense strand
caacauggaccgggagaca

SEQ ID NO: 1591012 - RNA, 19 nt, Homo sapiens
  misc_RNA (1)...(19): siRNA sense strand
caucaaagugcaagacauc

SEQ ID NO: 1591013 - RNA, 19 nt, Homo sapiens
  misc_RNA (1)...(19): siRNA sense strand
gcucauugacccagccuau

SEQ ID NO: 1591014 - RNA, 19 nt, Homo sapiens
  misc_RNA (1)...(19): siRNA sense strand
gcaagacaucaacgacaau

SEQ ID NO: 1591015 - RNA, 19 nt, Homo sapiens
  misc_RNA (1)...(19): siRNA sense strand
gcaagcugcacucggaugu

SEQ ID NO: 1591016 - RNA, 19 nt, Homo sapiens
  misc_RNA (1)...(19): siRNA sense strand
gggcaggcaccguauuugu

SEQ ID NO: 1591017 - RNA, 19 nt, Homo sapiens
  misc_RNA (1)...(19): siRNA sense strand
gugccaagcugguguacac

SEQ ID NO: 1591018 - RNA, 19 nt, Homo sapiens
  misc_RNA (1)...(19): siRNA sense strand
cacaggcaauauucauguu

SEQ ID NO: 1591019 - RNA, 19 nt, Homo sapiens
  misc_RNA (1)...(19): siRNA sense strand
acaggcaauauucauguua

SEQ ID NO: 1591020 - RNA, 19 nt, Homo sapiens
  misc_RNA (1)...(19): siRNA sense strand
ccaucagaguucaucauca

SEQ ID NO: 1591021 - RNA, 19 nt, Homo sapiens
  misc_RNA (1)...(19): siRNA sense strand
ggaugagaaugacaaugcu

SEQ ID NO: 1591022 - RNA, 19 nt, Homo sapiens
  misc_RNA (1)...(19): siRNA sense strand
ccguauuugugauugauga

SEQ ID NO: 1591023 - RNA, 19 nt, Homo sapiens
  misc_RNA (1)...(19): siRNA sense strand
gggagacacaggaggaguu

SEQ ID NO: 1591024 - RNA, 19 nt, Homo sapiens
  misc_RNA (1)...(19): siRNA sense strand
ugcccgagauguccaaugu

SEQ ID NO: 1591025 - RNA, 19 nt, Homo sapiens
  misc_RNA (1)...(19): siRNA sense strand
gaaggagcugggucuggaa

SEQ ID NO: 1591026 - RNA, 19 nt, Homo sapiens
  misc_RNA (1)...(19): siRNA sense strand
cagcaucagcacagacuug

SEQ ID NO: 1591027 - RNA, 19 nt, Homo sapiens
  misc_RNA (1)...(19): siRNA sense strand
aagaagcacugaugguacu

SEQ ID NO: 1591028 - RNA, 19 nt, Homo sapiens
  misc_RNA (1)...(19): siRNA sense strand
aaccaguucuuugucauug

SEQ ID NO: 1591029 - RNA, 19 nt, Homo sapiens
  misc_RNA (1)...(19): siRNA sense strand
ccggagcguugcuucucua

SEQ ID NO: 1591030 - RNA, 19 nt, Homo sapiens
  misc_RNA (1)...(19): siRNA sense strand
ucuuugucauugaggaaua

SEQ ID NO: 1591031 - RNA, 19 nt, Homo sapiens
  misc_RNA (1)...(19): siRNA sense strand
caggcaauauucauguuac

SEQ ID NO: 1591032 - RNA, 19 nt, Homo sapiens
  misc_RNA (1)...(19): siRNA sense strand
ucaaagugcaagacaucaa

SEQ ID NO: 1591033 - RNA, 19 nt, Homo sapiens
  misc_RNA (1)...(19): siRNA sense strand
gcucugcugcggacucgaa

SEQ ID NO: 1591034 - RNA, 19 nt, Homo sapiens
  misc_RNA (1)...(19): siRNA sense strand
guacacuguucuggaugga

SEQ ID NO: 1591035 - RNA, 19 nt, Homo sapiens
  misc_RNA (1)...(19): siRNA sense strand
gcagcacuacggugacugu

SEQ ID NO: 1591036 - RNA, 19 nt, Homo sapiens
  misc_RNA (1)...(19): siRNA sense strand
ccaguucuuugucauugag

SEQ ID NO: 1591037 - RNA, 19 nt, Homo sapiens
  misc_RNA (1)...(19): siRNA sense strand
ccuacuugguucccauaga

SEQ ID NO: 1591038 - RNA, 19 nt, Homo sapiens
  misc_RNA (1)...(19): siRNA sense strand
gcuccuggccagcugauuc

SEQ ID NO: 1591039 - RNA, 19 nt, Homo sapiens
  misc_RNA (1)...(19): siRNA sense strand
ggagcugggucuggaacca

SEQ ID NO: 1591040 - RNA, 19 nt, Homo sapiens
  misc_RNA (1)...(19): siRNA sense strand
agccaugucuccuuucaag

SEQ ID NO: 1591041 - RNA, 19 nt, Homo sapiens
  misc_RNA (1)...(19): siRNA sense strand
ccagagccuguucucauug

SEQ ID NO: 1591042 - RNA, 19 nt, Homo sapiens
  misc_RNA (1)...(19): siRNA sense strand
guccagagccuguucucau

SEQ ID NO: 1591043 - RNA, 19 nt, Homo sapiens
  misc_RNA (1)...(19): siRNA sense strand
agacacaggaggaguucuu

SEQ ID NO: 1591044 - RNA, 19 nt, Homo sapiens
  misc_RNA (1)...(19): siRNA sense strand
ggagacacaggaggaguuc

SEQ ID NO: 1591045 - RNA, 19 nt, Homo sapiens
  misc_RNA (1)...(19): siRNA sense strand
guacagccauccccaacau

SEQ ID NO: 1591046 - RNA, 19 nt, Homo sapiens
  misc_RNA (1)...(19): siRNA sense strand
ggauggacugccuuucuuc

SEQ ID NO: 1591047 - RNA, 19 nt, Homo sapiens
  misc_RNA (1)...(19): siRNA sense strand
aagcugguguacacuguuc

SEQ ID NO: 1591048 - RNA, 19 nt, Homo sapiens
  misc_RNA (1)...(19): siRNA sense strand
cagagccuguucucauugg

SEQ ID NO: 1591049 - RNA, 19 nt, Homo sapiens
  misc_RNA (1)...(19): siRNA sense strand
caaagugcaagacaucaac

SEQ ID NO: 1591050 - RNA, 19 nt, Homo sapiens
  misc_RNA (1)...(19): siRNA sense strand
acgacucggugcaggugua

SEQ ID NO: 1591051 - RNA, 19 nt, Homo sapiens
  misc_RNA (1)...(19): siRNA sense strand
gauccaggccaaggacaug

SEQ ID NO: 1591052 - RNA, 19 nt, Homo sapiens
  misc_RNA (1)...(19): siRNA sense strand
ggcaggcaccguauuugug

SEQ ID NO: 1591053 - RNA, 19 nt, Homo sapiens
  misc_RNA (1)...(19): siRNA sense strand
caccgaggccuucgacauc

SEQ ID NO: 1591054 - RNA, 19 nt, Homo sapiens
  misc_RNA (1)...(19): siRNA sense strand
ucaucaaagugcaagacau

SEQ ID NO: 1591055 - RNA, 19 nt, Homo sapiens
  misc_RNA (1)...(19): siRNA sense strand
gcccugaugccaacuuuac

SEQ ID NO: 1591056 - RNA, 19 nt, Homo sapiens
  misc_RNA (1)...(19): siRNA sense strand
uggacugccuuucuucucu

SEQ ID NO: 1591057 - RNA, 19 nt, Homo sapiens
  misc_RNA (1)...(19): siRNA sense strand
ggacaaacaugaaugcuuu

SEQ ID NO: 1591058 - RNA, 19 nt, Homo sapiens
  misc_RNA (1)...(19): siRNA sense strand
gaaaugagauucuuaagag

SEQ ID NO: 1591059 - RNA, 19 nt, Homo sapiens
  misc_RNA (1)...(19): siRNA sense strand
ggaaacagcuguaaaauuu

SEQ ID NO: 1591060 - RNA, 19 nt, Homo sapiens
  misc_RNA (1)...(19): siRNA sense strand
ggaaauccuuuguuuggaa

SEQ ID NO: 1591061 - RNA, 19 nt, Homo sapiens
  misc_RNA (1)...(19): siRNA sense strand
aaacuucgcuccaggauau

SEQ ID NO: 1591062 - RNA, 19 nt, Homo sapiens
  misc_RNA (1)...(19): siRNA sense strand
gcagugggcuggcauugaa

SEQ ID NO: 1591063 - RNA, 19 nt, Homo sapiens
  misc_RNA (1)...(19): siRNA sense strand
uagaggaccuuccagauuu

SEQ ID NO: 1591064 - RNA, 19 nt, Homo sapiens
  misc_RNA (1)...(19): siRNA sense strand
agagauggauugacagaua

SEQ ID NO: 1591065 - RNA, 19 nt, Homo sapiens
  misc_RNA (1)...(19): siRNA sense strand
acagaagguugguacauua

SEQ ID NO: 1591066 - RNA, 19 nt, Homo sapiens
  misc_RNA (1)...(19): siRNA sense strand
uaagagagguugcaaugug

SEQ ID NO: 1591067 - RNA, 19 nt, Homo sapiens
  misc_RNA (1)...(19): siRNA sense strand
caacaucuacagcaaauaa

SEQ ID NO: 1591068 - RNA, 19 nt, Homo sapiens
  misc_RNA (1)...(19): siRNA sense strand
gaagguugguacauuaaga

SEQ ID NO: 1591069 - RNA, 19 nt, Homo sapiens
  misc_RNA (1)...(19): siRNA sense strand
ggaagauacccauuuauau

SEQ ID NO: 1591070 - RNA, 19 nt, Homo sapiens
  misc_RNA (1)...(19): siRNA sense strand
gagauuaacagaagaaaug

SEQ ID NO: 1591071 - RNA, 19 nt, Homo sapiens
  misc_RNA (1)...(19): siRNA sense strand
ggaacagcuuugcauauug

SEQ ID NO: 1591072 - RNA, 19 nt, Homo sapiens
  misc_RNA (1)...(19): siRNA sense strand
ggaaaugagauucuuaaga

SEQ ID NO: 1591073 - RNA, 19 nt, Homo sapiens
  misc_RNA (1)...(19): siRNA sense strand
caagaaugaugguucaguu

SEQ ID NO: 1591074 - RNA, 19 nt, Homo sapiens
  misc_RNA (1)...(19): siRNA sense strand
gcaaucagcaguaacaaga

SEQ ID NO: 1591075 - RNA, 19 nt, Homo sapiens
  misc_RNA (1)...(19): siRNA sense strand
caaauaaacagaaccauuc

SEQ ID NO: 1591076 - RNA, 19 nt, Homo sapiens
  misc_RNA (1)...(19): siRNA sense strand
gacagaagguugguacauu

SEQ ID NO: 1591077 - RNA, 19 nt, Homo sapiens
  misc_RNA (1)...(19): siRNA sense strand
ugaugucccugaacuuaua

SEQ ID NO: 1591078 - RNA, 19 nt, Homo sapiens
  misc_RNA (1)...(19): siRNA sense strand
gccgaaccauggagucuua

SEQ ID NO: 1591079 - RNA, 19 nt, Homo sapiens
  misc_RNA (1)...(19): siRNA sense strand
gaacagcuuugcauauugc

SEQ ID NO: 1591080 - RNA, 19 nt, Homo sapiens
  misc_RNA (1)...(19): siRNA sense strand
gaaggaagaauauaacaca

SEQ ID NO: 1591081 - RNA, 19 nt, Homo sapiens
  misc_RNA (1)...(19): siRNA sense strand
ggucaaaacuuguggauga

SEQ ID NO: 1591082 - RNA, 19 nt, Homo sapiens
  misc_RNA (1)...(19): siRNA sense strand
caaaggccaugcucccaaa

SEQ ID NO: 1591083 - RNA, 19 nt, Homo sapiens
  misc_RNA (1)...(19): siRNA sense strand
ccaguuaucuuuuccauuu

SEQ ID NO: 1591084 - RNA, 19 nt, Homo sapiens
  misc_RNA (1)...(19): siRNA sense strand
ggacagaucccugcugaug

SEQ ID NO: 1591085 - RNA, 19 nt, Homo sapiens
  misc_RNA (1)...(19): siRNA sense strand
gagauggauugacagauau

SEQ ID NO: 1591086 - RNA, 19 nt, Homo sapiens
  misc_RNA (1)...(19): siRNA sense strand
ggucgaaggaagaauauaa

SEQ ID NO: 1591087 - RNA, 19 nt, Homo sapiens
  misc_RNA (1)...(19): siRNA sense strand
gaaagauguugcccugcuu

SEQ ID NO: 1591088 - RNA, 19 nt, Homo sapiens
  misc_RNA (1)...(19): siRNA sense strand
ccaaugagauggguacugu

SEQ ID NO: 1591089 - RNA, 19 nt, Homo sapiens
  misc_RNA (1)...(19): siRNA sense strand
ugauagagauggauugaca

SEQ ID NO: 1591090 - RNA, 19 nt, Homo sapiens
  misc_RNA (1)...(19): siRNA sense strand
uggaacagcuuugcauauu

SEQ ID NO: 1591091 - RNA, 19 nt, Homo sapiens
  misc_RNA (1)...(19): siRNA sense strand
uggaagauacccauuuaua

SEQ ID NO: 1591092 - RNA, 19 nt, Homo sapiens
  misc_RNA (1)...(19): siRNA sense strand
guaacagauucccuggaua

SEQ ID NO: 1591093 - RNA, 19 nt, Homo sapiens
  misc_RNA (1)...(19): siRNA sense strand
gaaugaugguucaguugga

SEQ ID NO: 1591094 - RNA, 19 nt, Homo sapiens
  misc_RNA (1)...(19): siRNA sense strand
guagauaugccguuagaga

SEQ ID NO: 1591095 - RNA, 19 nt, Homo sapiens
  misc_RNA (1)...(19): siRNA sense strand
gugcaaagaguaacagauu

SEQ ID NO: 1591096 - RNA, 19 nt, Homo sapiens
  misc_RNA (1)...(19): siRNA sense strand
acagaucccugcugauguu

SEQ ID NO: 1591097 - RNA, 19 nt, Homo sapiens
  misc_RNA (1)...(19): siRNA sense strand
uuuggaagauacccauuua

SEQ ID NO: 1591098 - RNA, 19 nt, Homo sapiens
  misc_RNA (1)...(19): siRNA sense strand
aggccaugcucccaaauua

SEQ ID NO: 1591099 - RNA, 19 nt, Homo sapiens
  misc_RNA (1)...(19): siRNA sense strand
ugacagauaugacucuuuu

SEQ ID NO: 1591100 - RNA, 19 nt, Homo sapiens
  misc_RNA (1)...(19): siRNA sense strand
gauggguacuguuagguau

SEQ ID NO: 1591101 - RNA, 19 nt, Homo sapiens
  misc_RNA (1)...(19): siRNA sense strand
cuaaggaaaucaagcagau

SEQ ID NO: 1591102 - RNA, 19 nt, Homo sapiens
  misc_RNA (1)...(19): siRNA sense strand
gcacaacuucugcuucuuc

SEQ ID NO: 1591103 - RNA, 19 nt, Homo sapiens
  misc_RNA (1)...(19): siRNA sense strand
cggagucgcuggacaaaca

SEQ ID NO: 1591104 - RNA, 19 nt, Homo sapiens
  misc_RNA (1)...(19): siRNA sense strand
cauuauaccugcaaaucug

SEQ ID NO: 1591105 - RNA, 19 nt, Homo sapiens
  misc_RNA (1)...(19): siRNA sense strand
agaaugcaaucagcaguaa

SEQ ID NO: 1591106 - RNA, 19 nt, Homo sapiens
  misc_RNA (1)...(19): siRNA sense strand
uagcucaugugacgucaaa

SEQ ID NO: 1591107 - RNA, 19 nt, Homo sapiens
  misc_RNA (1)...(19): siRNA sense strand
caguagauaugccguuaga

SEQ ID NO: 1591108 - RNA, 19 nt, Homo sapiens
  misc_RNA (1)...(19): siRNA sense strand
gaucccugcugauguuguu

SEQ ID NO: 1591109 - RNA, 19 nt, Homo sapiens
  misc_RNA (1)...(19): siRNA sense strand
gcaaugugaaugauagaga

SEQ ID NO: 1591110 - RNA, 19 nt, Homo sapiens
  misc_RNA (1)...(19): siRNA sense strand
gaaccauggagucuuaguu

SEQ ID NO: 1591111 - RNA, 19 nt, Homo sapiens
  misc_RNA (1)...(19): siRNA sense strand
uagcuguucuccaagauau

SEQ ID NO: 1591112 - RNA, 19 nt, Homo sapiens
  misc_RNA (1)...(19): siRNA sense strand
gguaugguauagagcuuga

SEQ ID NO: 1591113 - RNA, 19 nt, Homo sapiens
  misc_RNA (1)...(19): siRNA sense strand
gcaguaacaagaagacaau

SEQ ID NO: 1591114 - RNA, 19 nt, Homo sapiens
  misc_RNA (1)...(19): siRNA sense strand
gugaagaacuuaaaacugu

SEQ ID NO: 1591115 - RNA, 19 nt, Homo sapiens
  misc_RNA (1)...(19): siRNA sense strand
aaaggucgaaggaagaaua

SEQ ID NO: 1591116 - RNA, 19 nt, Homo sapiens
  misc_RNA (1)...(19): siRNA sense strand
aaugagauggguacuguua

SEQ ID NO: 1591117 - RNA, 19 nt, Homo sapiens
  misc_RNA (1)...(19): siRNA sense strand
ugacuuugcuucagguauc

SEQ ID NO: 1591118 - RNA, 19 nt, Homo sapiens
  misc_RNA (1)...(19): siRNA sense strand
caaugugaaugauagagau

SEQ ID NO: 1591119 - RNA, 19 nt, Homo sapiens
  misc_RNA (1)...(19): siRNA sense strand
ccaagaaacagaaugcaau

SEQ ID NO: 1591120 - RNA, 19 nt, Homo sapiens
  misc_RNA (1)...(19): siRNA sense strand
aagagagguugcaauguga

SEQ ID NO: 1591121 - RNA, 19 nt, Homo sapiens
  misc_RNA (1)...(19): siRNA sense strand
agauagugcuucugaguca

SEQ ID NO: 1591122 - RNA, 19 nt, Homo sapiens
  misc_RNA (1)...(19): siRNA sense strand
ggauauugguaugguauag

SEQ ID NO: 1591123 - RNA, 19 nt, Homo sapiens
  misc_RNA (1)...(19): siRNA sense strand
gagguugcaaugugaauga

SEQ ID NO: 1591124 - RNA, 19 nt, Homo sapiens
  misc_RNA (1)...(19): siRNA sense strand
uuggaggugugcaguauuu

SEQ ID NO: 1591125 - RNA, 19 nt, Homo sapiens
  misc_RNA (1)...(19): siRNA sense strand
cagcaccaaugccuucaga

SEQ ID NO: 1591126 - RNA, 19 nt, Homo sapiens
  misc_RNA (1)...(19): siRNA sense strand
cccaguagauaugccguua

SEQ ID NO: 1591127 - RNA, 19 nt, Homo sapiens
  misc_RNA (1)...(19): siRNA sense strand
ccaggauauugguauggua

SEQ ID NO: 1591128 - RNA, 19 nt, Homo sapiens
  misc_RNA (1)...(19): siRNA sense strand
ccucggagagagaguguua

SEQ ID NO: 1591129 - RNA, 19 nt, Homo sapiens
  misc_RNA (1)...(19): siRNA sense strand
gcuucugagucaacacuuu

SEQ ID NO: 1591130 - RNA, 19 nt, Homo sapiens
  misc_RNA (1)...(19): siRNA sense strand
uggaacaacugaauuugca

SEQ ID NO: 1591131 - RNA, 19 nt, Homo sapiens
  misc_RNA (1)...(19): siRNA sense strand
gcaaugcuuacgucacuug

SEQ ID NO: 1591132 - RNA, 19 nt, Homo sapiens
  misc_RNA (1)...(19): siRNA sense strand
gaccugggagcagacauua

SEQ ID NO: 1591133 - RNA, 19 nt, Homo sapiens
  misc_RNA (1)...(19): siRNA sense strand
uaacagauucccuggauac

SEQ ID NO: 1591134 - RNA, 19 nt, Homo sapiens
  misc_RNA (1)...(19): siRNA sense strand
cagagacugggcaccauua

SEQ ID NO: 1591135 - RNA, 19 nt, Homo sapiens
  misc_RNA (1)...(19): siRNA sense strand
agagagaguguuaguggua

SEQ ID NO: 1591136 - RNA, 19 nt, Homo sapiens
  misc_RNA (1)...(19): siRNA sense strand
cagaaugcaaucagcagua

SEQ ID NO: 1591137 - RNA, 19 nt, Homo sapiens
  misc_RNA (1)...(19): siRNA sense strand
uaacacacacuccuucuac

SEQ ID NO: 1591138 - RNA, 19 nt, Homo sapiens
  misc_RNA (1)...(19): siRNA sense strand
guaucuggcuuggacuuga

SEQ ID NO: 1591139 - RNA, 19 nt, Homo sapiens
  misc_RNA (1)...(19): siRNA sense strand
aaaaggagauuaacagaag

SEQ ID NO: 1591140 - RNA, 19 nt, Homo sapiens
  misc_RNA (1)...(19): siRNA sense strand
agacagagcuaccccaaga

SEQ ID NO: 1591141 - RNA, 19 nt, Homo sapiens
  misc_RNA (1)...(19): siRNA sense strand
ucccugaacuuauaagagu

SEQ ID NO: 1591142 - RNA, 19 nt, Homo sapiens
  misc_RNA (1)...(19): siRNA sense strand
ucagcaacaucuacagcaa

SEQ ID NO: 1591143 - RNA, 19 nt, Homo sapiens
  misc_RNA (1)...(19): siRNA sense strand
caugugacgucaaaaguaa

SEQ ID NO: 1591144 - RNA, 19 nt, Homo sapiens
  misc_RNA (1)...(19): siRNA sense strand
guccaguacuuuaaaugug

SEQ ID NO: 1591145 - RNA, 19 nt, Homo sapiens
  misc_RNA (1)...(19): siRNA sense strand
guugcaaugugaaugauag

SEQ ID NO: 1591146 - RNA, 19 nt, Homo sapiens
  misc_RNA (1)...(19): siRNA sense strand
ugagucaacacuuucauug

SEQ ID NO: 1591147 - RNA, 19 nt, Homo sapiens
  misc_RNA (1)...(19): siRNA sense strand
cagaagguugguacauuaa

SEQ ID NO: 1591148 - RNA, 19 nt, Homo sapiens
  misc_RNA (1)...(19): siRNA sense strand
ggacagaagguugguacau

SEQ ID NO: 1591149 - RNA, 19 nt, Homo sapiens
  misc_RNA (1)...(19): siRNA sense strand
aaauugacguagcucaugu

SEQ ID NO: 1591150 - RNA, 19 nt, Homo sapiens
  misc_RNA (1)...(19): siRNA sense strand
caagaaacagaaugcaauc

SEQ ID NO: 1591151 - RNA, 19 nt, Homo sapiens
  misc_RNA (1)...(19): siRNA sense strand
uaauggaaguguuggaaaa

SEQ ID NO: 1591152 - RNA, 19 nt, Homo sapiens
  misc_RNA (1)...(19): siRNA sense strand
ggagauuaacagaagaaau

SEQ ID NO: 1591153 - RNA, 19 nt, Homo sapiens
  misc_RNA (1)...(19): siRNA sense strand
aguaacagauucccuggau

SEQ ID NO: 1591154 - RNA, 19 nt, Homo sapiens
  misc_RNA (1)...(19): siRNA sense strand
gcuccaggauauugguaug

SEQ ID NO: 1591155 - RNA, 19 nt, Homo sapiens
  misc_RNA (1)...(19): siRNA sense strand
uggcaagaaugaugguuca

SEQ ID NO: 1591156 - RNA, 19 nt, Homo sapiens
  misc_RNA (1)...(19): siRNA sense strand
aaaggagauuaacagaaga

SEQ ID NO: 1591157 - RNA, 19 nt, Homo sapiens
  misc_RNA (1)...(19): siRNA sense strand
ggaaaugucccaaucagaa

SEQ ID NO: 1591158 - RNA, 19 nt, Homo sapiens
  misc_RNA (1)...(19): siRNA sense strand
aaacauggaaccucacaaa

SEQ ID NO: 1591159 - RNA, 19 nt, Homo sapiens
  misc_RNA (1)...(19): siRNA sense strand
uagaaucuguuuccucuca

SEQ ID NO: 1591160 - RNA, 19 nt, Homo sapiens
  misc_RNA (1)...(19): siRNA sense strand
cauggaaccucacaaaguc

SEQ ID NO: 1591161 - RNA, 19 nt, Homo sapiens
  misc_RNA (1)...(19): siRNA sense strand
ccacaguguuggccguaaa

SEQ ID NO: 1591162 - RNA, 19 nt, Homo sapiens
  misc_RNA (1)...(19): siRNA sense strand
ccugagggcugccuagaau

SEQ ID NO: 1591163 - RNA, 19 nt, Homo sapiens
  misc_RNA (1)...(19): siRNA sense strand
gaaaugucccaaucagaag

SEQ ID NO: 1591164 - RNA, 19 nt, Homo sapiens
  misc_RNA (1)...(19): siRNA sense strand
aaugugaauuuggcaagua

SEQ ID NO: 1591165 - RNA, 19 nt, Homo sapiens
  misc_RNA (1)...(19): siRNA sense strand
ucagcaaggugagauuaug

SEQ ID NO: 1591166 - RNA, 19 nt, Homo sapiens
  misc_RNA (1)...(19): siRNA sense strand
ggcaguuucuucucagcaa

SEQ ID NO: 1591167 - RNA, 19 nt, Homo sapiens
  misc_RNA (1)...(19): siRNA sense strand
gcaaggugagauuauggaa

SEQ ID NO: 1591168 - RNA, 19 nt, Homo sapiens
  misc_RNA (1)...(19): siRNA sense strand
cucacaaaguccacuguaa

SEQ ID NO: 1591169 - RNA, 19 nt, Homo sapiens
  misc_RNA (1)...(19): siRNA sense strand
ucacaaaguccacuguaac

SEQ ID NO: 1591170 - RNA, 19 nt, Homo sapiens
  misc_RNA (1)...(19): siRNA sense strand
cacaaaguccacuguaaca

SEQ ID NO: 1591171 - RNA, 19 nt, Homo sapiens
  misc_RNA (1)...(19): siRNA sense strand
gaaucuguuuccucucacu

SEQ ID NO: 1591172 - RNA, 19 nt, Homo sapiens
  misc_RNA (1)...(19): siRNA sense strand
acauggaaccucacaaagu

SEQ ID NO: 1591173 - RNA, 19 nt, Homo sapiens
  misc_RNA (1)...(19): siRNA sense strand
caaggugagauuauggaau

SEQ ID NO: 1591174 - RNA, 19 nt, Homo sapiens
  misc_RNA (1)...(19): siRNA sense strand
ccucacaaaguccacugua

SEQ ID NO: 1591175 - RNA, 19 nt, Homo sapiens
  misc_RNA (1)...(19): siRNA sense strand
gcuuuauauuugugaagug

SEQ ID NO: 1591176 - RNA, 19 nt, Homo sapiens
  misc_RNA (1)...(19): siRNA sense strand
ucugggacacugauacuga

SEQ ID NO: 1591177 - RNA, 19 nt, Homo sapiens
  misc_RNA (1)...(19): siRNA sense strand
ccucucacucugaauuauu

SEQ ID NO: 1591178 - RNA, 19 nt, Homo sapiens
  misc_RNA (1)...(19): siRNA sense strand
augugaauuuggcaaguaa

SEQ ID NO: 1591179 - RNA, 19 nt, Homo sapiens
  misc_RNA (1)...(19): siRNA sense strand
ggaugaaacugaccgauuu

SEQ ID NO: 1591180 - RNA, 19 nt, Homo sapiens
  misc_RNA (1)...(19): siRNA sense strand
gcaaagggcugaugaccaa

SEQ ID NO: 1591181 - RNA, 19 nt, Homo sapiens
  misc_RNA (1)...(19): siRNA sense strand
gaaccaaggucccggaaga

SEQ ID NO: 1591182 - RNA, 19 nt, Homo sapiens
  misc_RNA (1)...(19): siRNA sense strand
ggagaaacuugaacgcaaa

SEQ ID NO: 1591183 - RNA, 19 nt, Homo sapiens
  misc_RNA (1)...(19): siRNA sense strand
gaagucaucaggaauauug

SEQ ID NO: 1591184 - RNA, 19 nt, Homo sapiens
  misc_RNA (1)...(19): siRNA sense strand
gaagugaggccaaugaaga

SEQ ID NO: 1591185 - RNA, 19 nt, Homo sapiens
  misc_RNA (1)...(19): siRNA sense strand
gaccaacacugucuccaaa

SEQ ID NO: 1591186 - RNA, 19 nt, Homo sapiens
  misc_RNA (1)...(19): siRNA sense strand
caacagagaccggaugaaa

SEQ ID NO: 1591187 - RNA, 19 nt, Homo sapiens
  misc_RNA (1)...(19): siRNA sense strand
gaagaaggacguugugauc

SEQ ID NO: 1591188 - RNA, 19 nt, Homo sapiens
  misc_RNA (1)...(19): siRNA sense strand
guugauggcugguuuaagu

SEQ ID NO: 1591189 - RNA, 19 nt, Homo sapiens
  misc_RNA (1)...(19): siRNA sense strand
uaucaaagagcaugcauuu

SEQ ID NO: 1591190 - RNA, 19 nt, Homo sapiens
  misc_RNA (1)...(19): siRNA sense strand
ugacaacaauggcaacaga

SEQ ID NO: 1591191 - RNA, 19 nt, Homo sapiens
  misc_RNA (1)...(19): siRNA sense strand
ccaacacugucuccaaauu

SEQ ID NO: 1591192 - RNA, 19 nt, Homo sapiens
  misc_RNA (1)...(19): siRNA sense strand
gcaaggucaugcuuucaga

SEQ ID NO: 1591193 - RNA, 19 nt, Homo sapiens
  misc_RNA (1)...(19): siRNA sense strand
gaaagaaucggacaaagac

SEQ ID NO: 1591194 - RNA, 19 nt, Homo sapiens
  misc_RNA (1)...(19): siRNA sense strand
ccaagucuauguccaagga

SEQ ID NO: 1591195 - RNA, 19 nt, Homo sapiens
  misc_RNA (1)...(19): siRNA sense strand
ggauuccagugccaaguuu

SEQ ID NO: 1591196 - RNA, 19 nt, Homo sapiens
  misc_RNA (1)...(19): siRNA sense strand
agaguaagggcaucauuua

SEQ ID NO: 1591197 - RNA, 19 nt, Homo sapiens
  misc_RNA (1)...(19): siRNA sense strand
gaugagcucuaugcuguga

SEQ ID NO: 1591198 - RNA, 19 nt, Homo sapiens
  misc_RNA (1)...(19): siRNA sense strand
caacacugucuccaaauuu

SEQ ID NO: 1591199 - RNA, 19 nt, Homo sapiens
  misc_RNA (1)...(19): siRNA sense strand
gccaugaauuugucacauu

SEQ ID NO: 1591200 - RNA, 19 nt, Homo sapiens
  misc_RNA (1)...(19): siRNA sense strand
caugggaucuuuguccuuu

SEQ ID NO: 1591201 - RNA, 19 nt, Homo sapiens
  misc_RNA (1)...(19): siRNA sense strand
cgacagggacguccucauu

SEQ ID NO: 1591202 - RNA, 19 nt, Homo sapiens
  misc_RNA (1)...(19): siRNA sense strand
acaucaagauugccgauuu

SEQ ID NO: 1591203 - RNA, 19 nt, Homo sapiens
  misc_RNA (1)...(19): siRNA sense strand
gaugaacucuuccaaucca

SEQ ID NO: 1591204 - RNA, 19 nt, Homo sapiens
  misc_RNA (1)...(19): siRNA sense strand
cacaagcgcugcgugauga

SEQ ID NO: 1591205 - RNA, 19 nt, Homo sapiens
  misc_RNA (1)...(19): siRNA sense strand
gaacgugcaugaggucaag

SEQ ID NO: 1591206 - RNA, 19 nt, Homo sapiens
  misc_RNA (1)...(19): siRNA sense strand
ugaaagaaucggacaaaga

SEQ ID NO: 1591207 - RNA, 19 nt, Homo sapiens
  misc_RNA (1)...(19): siRNA sense strand
gcacaagcgcugcgugaug

SEQ ID NO: 1591208 - RNA, 19 nt, Homo sapiens
  misc_RNA (1)...(19): siRNA sense strand
gaaggacguugugauccaa

SEQ ID NO: 1591209 - RNA, 19 nt, Homo sapiens
  misc_RNA (1)...(19): siRNA sense strand
caguagagauuugggauug

SEQ ID NO: 1591210 - RNA, 19 nt, Homo sapiens
  misc_RNA (1)...(19): siRNA sense strand
ggucaagaaccacaaauuc

SEQ ID NO: 1591211 - RNA, 19 nt, Homo sapiens
  misc_RNA (1)...(19): siRNA sense strand
ugugacaccugcaugauga

SEQ ID NO: 1591212 - RNA, 19 nt, Homo sapiens
  misc_RNA (1)...(19): siRNA sense strand
caucauggaacacaacgua

SEQ ID NO: 1591213 - RNA, 19 nt, Homo sapiens
  misc_RNA (1)...(19): siRNA sense strand
caggaagucaucaggaaua

SEQ ID NO: 1591214 - RNA, 19 nt, Homo sapiens
  misc_RNA (1)...(19): siRNA sense strand
gugccaaguuugcugcuuu

SEQ ID NO: 1591215 - RNA, 19 nt, Homo sapiens
  misc_RNA (1)...(19): siRNA sense strand
guauauugauugggagaaa

SEQ ID NO: 1591216 - RNA, 19 nt, Homo sapiens
  misc_RNA (1)...(19): siRNA sense strand
gcacagaugagcucuaugc

SEQ ID NO: 1591217 - RNA, 19 nt, Homo sapiens
  misc_RNA (1)...(19): siRNA sense strand
gaccaaacacccaggcaaa

SEQ ID NO: 1591218 - RNA, 19 nt, Homo sapiens
  misc_RNA (1)...(19): siRNA sense strand
ccugucagaucccuacgua

SEQ ID NO: 1591219 - RNA, 19 nt, Homo sapiens
  misc_RNA (1)...(19): siRNA sense strand
gauuugggauugggauuug

SEQ ID NO: 1591220 - RNA, 19 nt, Homo sapiens
  misc_RNA (1)...(19): siRNA sense strand
caagcggugccaugaauuu

SEQ ID NO: 1591221 - RNA, 19 nt, Homo sapiens
  misc_RNA (1)...(19): siRNA sense strand
cacaagcggugccaugaau

SEQ ID NO: 1591222 - RNA, 19 nt, Homo sapiens
  misc_RNA (1)...(19): siRNA sense strand
ggucaugcuuucagaacga

SEQ ID NO: 1591223 - RNA, 19 nt, Homo sapiens
  misc_RNA (1)...(19): siRNA sense strand
gaaauugccaucggucugu

SEQ ID NO: 1591224 - RNA, 19 nt, Homo sapiens
  misc_RNA (1)...(19): siRNA sense strand
aggcgaacgugauaucaaa

SEQ ID NO: 1591225 - RNA, 19 nt, Homo sapiens
  misc_RNA (1)...(19): siRNA sense strand
cagaguaagggcaucauuu

SEQ ID NO: 1591226 - RNA, 19 nt, Homo sapiens
  misc_RNA (1)...(19): siRNA sense strand
ugucagaucccuacguaaa

SEQ ID NO: 1591227 - RNA, 19 nt, Homo sapiens
  misc_RNA (1)...(19): siRNA sense strand
caucaggaauauugaccaa

SEQ ID NO: 1591228 - RNA, 19 nt, Homo sapiens
  misc_RNA (1)...(19): siRNA sense strand
aguuuaagauccacacgua

SEQ ID NO: 1591229 - RNA, 19 nt, Homo sapiens
  misc_RNA (1)...(19): siRNA sense strand
gaacacaacguagccuauc

SEQ ID NO: 1591230 - RNA, 19 nt, Homo sapiens
  misc_RNA (1)...(19): siRNA sense strand
gagggacacaucaagauug

SEQ ID NO: 1591231 - RNA, 19 nt, Homo sapiens
  misc_RNA (1)...(19): siRNA sense strand
aaagugagagcaaacagaa

SEQ ID NO: 1591232 - RNA, 19 nt, Homo sapiens
  misc_RNA (1)...(19): siRNA sense strand
gcgaaaugcugaaaacuuc

SEQ ID NO: 1591233 - RNA, 19 nt, Homo sapiens
  misc_RNA (1)...(19): siRNA sense strand
ggaguccugcuguaugaaa

SEQ ID NO: 1591234 - RNA, 19 nt, Homo sapiens
  misc_RNA (1)...(19): siRNA sense strand
ccaaucagaauucgaagga

SEQ ID NO: 1591235 - RNA, 19 nt, Homo sapiens
  misc_RNA (1)...(19): siRNA sense strand
gaacucuuccaauccauca

SEQ ID NO: 1591236 - RNA, 19 nt, Homo sapiens
  misc_RNA (1)...(19): siRNA sense strand
gcugaaagaaucggacaaa

SEQ ID NO: 1591237 - RNA, 19 nt, Homo sapiens
  misc_RNA (1)...(19): siRNA sense strand
gcucuaugcugugaagauc

SEQ ID NO: 1591238 - RNA, 19 nt, Homo sapiens
  misc_RNA (1)...(19): siRNA sense strand
gauuuuaacuuccuaaugg

SEQ ID NO: 1591239 - RNA, 19 nt, Homo sapiens
  misc_RNA (1)...(19): siRNA sense strand
acaccugcaugaugaaugu

SEQ ID NO: 1591240 - RNA, 19 nt, Homo sapiens
  misc_RNA (1)...(19): siRNA sense strand
ugaccaaucagaauucgaa

SEQ ID NO: 1591241 - RNA, 19 nt, Homo sapiens
  misc_RNA (1)...(19): siRNA sense strand
aaacuugaacgcaaagaga

SEQ ID NO: 1591242 - RNA, 19 nt, Homo sapiens
  misc_RNA (1)...(19): siRNA sense strand
ggaacacaacguagccuau

SEQ ID NO: 1591243 - RNA, 19 nt, Homo sapiens
  misc_RNA (1)...(19): siRNA sense strand
ggcagaagaacgugcauga

SEQ ID NO: 1591244 - RNA, 19 nt, Homo sapiens
  misc_RNA (1)...(19): siRNA sense strand
acagggacguccucauugu

SEQ ID NO: 1591245 - RNA, 19 nt, Homo sapiens
  misc_RNA (1)...(19): siRNA sense strand
cugugaagauccugaagaa

SEQ ID NO: 1591246 - RNA, 19 nt, Homo sapiens
  misc_RNA (1)...(19): siRNA sense strand
uagccuaucccaagucuau

SEQ ID NO: 1591247 - RNA, 19 nt, Homo sapiens
  misc_RNA (1)...(19): siRNA sense strand
gacagggacguccucauug

SEQ ID NO: 1591248 - RNA, 19 nt, Homo sapiens
  misc_RNA (1)...(19): siRNA sense strand
gucaagaaccacaaauuca

SEQ ID NO: 1591249 - RNA, 19 nt, Homo sapiens
  misc_RNA (1)...(19): siRNA sense strand
gaccgccuguacuuuguga

SEQ ID NO: 1591250 - RNA, 19 nt, Homo sapiens
  misc_RNA (1)...(19): siRNA sense strand
gugggucacugcuguaugg

SEQ ID NO: 1591251 - RNA, 19 nt, Homo sapiens
  misc_RNA (1)...(19): siRNA sense strand
aacacugucuccaaauuug

SEQ ID NO: 1591252 - RNA, 19 nt, Homo sapiens
  misc_RNA (1)...(19): siRNA sense strand
gauuugaccagcaggaaug

SEQ ID NO: 1591253 - RNA, 19 nt, Homo sapiens
  misc_RNA (1)...(19): siRNA sense strand
ccacugcaccgacuucauc

SEQ ID NO: 1591254 - RNA, 19 nt, Homo sapiens
  misc_RNA (1)...(19): siRNA sense strand
ccugaaggcgaacgugaua

SEQ ID NO: 1591255 - RNA, 19 nt, Homo sapiens
  misc_RNA (1)...(19): siRNA sense strand
ucauuguccucguaagaga

SEQ ID NO: 1591256 - RNA, 19 nt, Homo sapiens
  misc_RNA (1)...(19): siRNA sense strand
gacguggagugcacuaugg

SEQ ID NO: 1591257 - RNA, 19 nt, Homo sapiens
  misc_RNA (1)...(19): siRNA sense strand
ugauggcugguuuaaguua

SEQ ID NO: 1591258 - RNA, 19 nt, Homo sapiens
  misc_RNA (1)...(19): siRNA sense strand
caucaagauugccgauuuu

SEQ ID NO: 1591259 - RNA, 19 nt, Homo sapiens
  misc_RNA (1)...(19): siRNA sense strand
gcgaacgugauaucaaaga

SEQ ID NO: 1591260 - RNA, 19 nt, Homo sapiens
  misc_RNA (1)...(19): siRNA sense strand
gaaggcgaacgugauauca

SEQ ID NO: 1591261 - RNA, 19 nt, Homo sapiens
  misc_RNA (1)...(19): siRNA sense strand
uuggaguccugcuguauga

SEQ ID NO: 1591262 - RNA, 19 nt, Homo sapiens
  misc_RNA (1)...(19): siRNA sense strand
gagcaaacagaagaccaaa

SEQ ID NO: 1591263 - RNA, 19 nt, Homo sapiens
  misc_RNA (1)...(19): siRNA sense strand
cauuuggaguccugcugua

SEQ ID NO: 1591264 - RNA, 19 nt, Homo sapiens
  misc_RNA (1)...(19): siRNA sense strand
gaacgaaaaggcacagaug

SEQ ID NO: 1591265 - RNA, 19 nt, Homo sapiens
  misc_RNA (1)...(19): siRNA sense strand
caguguugauggcugguuu

SEQ ID NO: 1591266 - RNA, 19 nt, Homo sapiens
  misc_RNA (1)...(19): siRNA sense strand
ggaagugaggccaaugaag

SEQ ID NO: 1591267 - RNA, 19 nt, Homo sapiens
  misc_RNA (1)...(19): siRNA sense strand
gaaacuugaacgcaaagag

SEQ ID NO: 1591268 - RNA, 19 nt, Homo sapiens
  misc_RNA (1)...(19): siRNA sense strand
ugagggacacaucaagauu

SEQ ID NO: 1591269 - RNA, 19 nt, Homo sapiens
  misc_RNA (1)...(19): siRNA sense strand
ccaucggucuguucuucuu

SEQ ID NO: 1591270 - RNA, 19 nt, Homo sapiens
  misc_RNA (1)...(19): siRNA sense strand
agaaggacguugugaucca

SEQ ID NO: 1591271 - RNA, 19 nt, Homo sapiens
  misc_RNA (1)...(19): siRNA sense strand
aggcacagaugagcucuau

SEQ ID NO: 1591272 - RNA, 19 nt, Homo sapiens
  misc_RNA (1)...(19): siRNA sense strand
cuccaaauuugacaacaau

SEQ ID NO: 1591273 - RNA, 19 nt, Homo sapiens
  misc_RNA (1)...(19): siRNA sense strand
ucuccaaauuugacaacaa

SEQ ID NO: 1591274 - RNA, 19 nt, Homo sapiens
  misc_RNA (1)...(19): siRNA sense strand
caucauuuaccgugaccua

SEQ ID NO: 1591275 - RNA, 19 nt, Homo sapiens
  misc_RNA (1)...(19): siRNA sense strand
ggaagucaucaggaauauu

SEQ ID NO: 1591276 - RNA, 19 nt, Homo sapiens
  misc_RNA (1)...(19): siRNA sense strand
ccugcuguaugaaauguug

SEQ ID NO: 1591277 - RNA, 19 nt, Homo sapiens
  misc_RNA (1)...(19): siRNA sense strand
gaguccugcuguaugaaau

SEQ ID NO: 1591278 - RNA, 19 nt, Homo sapiens
  misc_RNA (1)...(19): siRNA sense strand
acaacgugaugcucgauuc

SEQ ID NO: 1591279 - RNA, 19 nt, Homo sapiens
  misc_RNA (1)...(19): siRNA sense strand
caaagugcaugcaggagaa

SEQ ID NO: 1591280 - RNA, 19 nt, Homo sapiens
  misc_RNA (1)...(19): siRNA sense strand
ucgaggagcugucaaagug

SEQ ID NO: 1591281 - RNA, 19 nt, Homo sapiens
  misc_RNA (1)...(19): siRNA sense strand
gggcagaaccgaccacuca

SEQ ID NO: 1591282 - RNA, 19 nt, Homo sapiens
  misc_RNA (1)...(19): siRNA sense strand
acuacaagcugcacaaugu

SEQ ID NO: 1591283 - RNA, 19 nt, Homo sapiens
  misc_RNA (1)...(19): siRNA sense strand
gaagagccggcaccuguug

SEQ ID NO: 1591284 - RNA, 19 nt, Homo sapiens
  misc_RNA (1)...(19): siRNA sense strand
gcccaggccuagcuacuau

SEQ ID NO: 1591285 - RNA, 19 nt, Homo sapiens
  misc_RNA (1)...(19): siRNA sense strand
gaaccgaccacucaucaag

SEQ ID NO: 1591286 - RNA, 19 nt, Homo sapiens
  misc_RNA (1)...(19): siRNA sense strand
gcaaggcucguuccuguuc

SEQ ID NO: 1591287 - RNA, 19 nt, Homo sapiens
  misc_RNA (1)...(19): siRNA sense strand
gacgacaaccaccaccuua

SEQ ID NO: 1591288 - RNA, 19 nt, Homo sapiens
  misc_RNA (1)...(19): siRNA sense strand
cggaagauguccaacaagu

SEQ ID NO: 1591289 - RNA, 19 nt, Homo sapiens
  misc_RNA (1)...(19): siRNA sense strand
gcacccagccugcuacaca

SEQ ID NO: 1591290 - RNA, 19 nt, Homo sapiens
  misc_RNA (1)...(19): siRNA sense strand
gaggcccacucucugugua

SEQ ID NO: 1591291 - RNA, 19 nt, Homo sapiens
  misc_RNA (1)...(19): siRNA sense strand
cgacaaccaccaccuuaug

SEQ ID NO: 1591292 - RNA, 19 nt, Homo sapiens
  misc_RNA (1)...(19): siRNA sense strand
gcucguuccuguucagaag

SEQ ID NO: 1591293 - RNA, 19 nt, Homo sapiens
  misc_RNA (1)...(19): siRNA sense strand
ccuguggccucuacuacaa

SEQ ID NO: 1591294 - RNA, 19 nt, Homo sapiens
  misc_RNA (1)...(19): siRNA sense strand
ccaagaagagcaagaaagg

SEQ ID NO: 1591295 - RNA, 19 nt, Homo sapiens
  misc_RNA (1)...(19): siRNA sense strand
uacaagcugcacaauguua

SEQ ID NO: 1591296 - RNA, 19 nt, Homo sapiens
  misc_RNA (1)...(19): siRNA sense strand
ugacggagagcaugaagau

SEQ ID NO: 1591297 - RNA, 19 nt, Homo sapiens
  misc_RNA (1)...(19): siRNA sense strand
guggacgucuucuucaauc

SEQ ID NO: 1591298 - RNA, 19 nt, Homo sapiens
  misc_RNA (1)...(19): siRNA sense strand
caacgccuguggccucuac

SEQ ID NO: 1591299 - RNA, 19 nt, Homo sapiens
  misc_RNA (1)...(19): siRNA sense strand
caagaugaaugggcagaac

SEQ ID NO: 1591300 - RNA, 19 nt, Homo sapiens
  misc_RNA (1)...(19): siRNA sense strand
uccaacaaguccaagaaga

SEQ ID NO: 1591301 - RNA, 19 nt, Homo sapiens
  misc_RNA (1)...(19): siRNA sense strand
ggaagauguccaacaaguc

SEQ ID NO: 1591302 - RNA, 19 nt, Homo sapiens
  misc_RNA (1)...(19): siRNA sense strand
acaggccacugaccaugaa

SEQ ID NO: 1591303 - RNA, 19 nt, Homo sapiens
  misc_RNA (1)...(19): siRNA sense strand
cgagguggacgucuucuuc

SEQ ID NO: 1591304 - RNA, 19 nt, Homo sapiens
  misc_RNA (1)...(19): siRNA sense strand
gaaggaagggauccagacu

SEQ ID NO: 1591305 - RNA, 19 nt, Homo sapiens
  misc_RNA (1)...(19): siRNA sense strand
gcagaaccgaccacucauc

SEQ ID NO: 1591306 - RNA, 19 nt, Homo sapiens
  misc_RNA (1)...(19): siRNA sense strand
cagaaccgaccacucauca

SEQ ID NO: 1591307 - RNA, 19 nt, Homo sapiens
  misc_RNA (1)...(19): siRNA sense strand
cggagagcaugaagaugga

SEQ ID NO: 1591308 - RNA, 19 nt, Homo sapiens
  misc_RNA (1)...(19): siRNA sense strand
cacucuggcucccaccuuu

SEQ ID NO: 1591309 - RNA, 19 nt, Homo sapiens
  misc_RNA (1)...(19): siRNA sense strand
aauguuaacaggccacuga

SEQ ID NO: 1591310 - RNA, 19 nt, Homo sapiens
  misc_RNA (1)...(19): siRNA sense strand
cuacagcagcggacucuuc

SEQ ID NO: 1591311 - RNA, 19 nt, Homo sapiens
  misc_RNA (1)...(19): siRNA sense strand
ucacugacggagagcauga

SEQ ID NO: 1591312 - RNA, 19 nt, Homo sapiens
  misc_RNA (1)...(19): siRNA sense strand
ccaacaaguccaagaagag

SEQ ID NO: 1591313 - RNA, 19 nt, Homo sapiens
  misc_RNA (1)...(19): siRNA sense strand
gagagcaugaagauggaaa

SEQ ID NO: 1591314 - RNA, 19 nt, Homo sapiens
  misc_RNA (1)...(19): siRNA sense strand
gagguggacgucuucuuca

SEQ ID NO: 1591315 - RNA, 19 nt, Homo sapiens
  misc_RNA (1)...(19): siRNA sense strand
accggaagauguccaacaa

SEQ ID NO: 1591316 - RNA, 19 nt, Homo sapiens
  misc_RNA (1)...(19): siRNA sense strand
acaagcugcacaauguuaa

SEQ ID NO: 1591317 - RNA, 19 nt, Homo sapiens
  misc_RNA (1)...(19): siRNA sense strand
gacaaccaccaccuuaugg

SEQ ID NO: 1591318 - RNA, 19 nt, Homo sapiens
  misc_RNA (1)...(19): siRNA sense strand
gccacuaccugugcaaugc

SEQ ID NO: 1591319 - RNA, 19 nt, Homo sapiens
  misc_RNA (1)...(19): siRNA sense strand
gcaugcaggagaagucauc

SEQ ID NO: 1591320 - RNA, 19 nt, Homo sapiens
  misc_RNA (1)...(19): siRNA sense strand
ucaaguaccaggugucacu

SEQ ID NO: 1591321 - RNA, 19 nt, Homo sapiens
  misc_RNA (1)...(19): siRNA sense strand
ggaaccggaagauguccaa

SEQ ID NO: 1591322 - RNA, 19 nt, Homo sapiens
  misc_RNA (1)...(19): siRNA sense strand
ggccacugaccaugaagaa

SEQ ID NO: 1591323 - RNA, 19 nt, Homo sapiens
  misc_RNA (1)...(19): siRNA sense strand
caccuguugugcaaauugu

SEQ ID NO: 1591324 - RNA, 19 nt, Homo sapiens
  misc_RNA (1)...(19): siRNA sense strand
caaggcucguuccuguuca

SEQ ID NO: 1591325 - RNA, 19 nt, Homo sapiens
  misc_RNA (1)...(19): siRNA sense strand
gguggacgucuucuucaau

SEQ ID NO: 1591326 - RNA, 19 nt, Homo sapiens
  misc_RNA (1)...(19): siRNA sense strand
ugcccuggcuggacacaug

SEQ ID NO: 1591327 - RNA, 19 nt, Homo sapiens
  misc_RNA (1)...(19): siRNA sense strand
ccacgccacccaaagaagu

SEQ ID NO: 1591328 - RNA, 19 nt, Homo sapiens
  misc_RNA (1)...(19): siRNA sense strand
ggaggcccacucucugugu

SEQ ID NO: 1591329 - RNA, 19 nt, Homo sapiens
  misc_RNA (1)...(19): siRNA sense strand
ccgggagugugucaacugu

SEQ ID NO: 1591330 - RNA, 19 nt, Homo sapiens
  misc_RNA (1)...(19): siRNA sense strand
acucggaaccggaagaugu

SEQ ID NO: 1591331 - RNA, 19 nt, Homo sapiens
  misc_RNA (1)...(19): siRNA sense strand
caaugccuguggccucuac

SEQ ID NO: 1591332 - RNA, 19 nt, Homo sapiens
  misc_RNA (1)...(19): siRNA sense strand
gcuucgaggagcugucaaa

SEQ ID NO: 1591333 - RNA, 19 nt, Homo sapiens
  misc_RNA (1)...(19): siRNA sense strand
caucaagcccaagcgaaga

SEQ ID NO: 1591334 - RNA, 19 nt, Homo sapiens
  misc_RNA (1)...(19): siRNA sense strand
agaagaaucugcugaagaa

SEQ ID NO: 1591335 - RNA, 19 nt, Homo sapiens
  misc_RNA (1)...(19): siRNA sense strand
gaacuggagucucaauauc

SEQ ID NO: 1591336 - RNA, 19 nt, Homo sapiens
  misc_RNA (1)...(19): siRNA sense strand
uauaggagaucacaaauca

SEQ ID NO: 1591337 - RNA, 19 nt, Homo sapiens
  misc_RNA (1)...(19): siRNA sense strand
gacaguaaauuaucaggaa

SEQ ID NO: 1591338 - RNA, 19 nt, Homo sapiens
  misc_RNA (1)...(19): siRNA sense strand
gaaagaagaaucugcugaa

SEQ ID NO: 1591339 - RNA, 19 nt, Homo sapiens
  misc_RNA (1)...(19): siRNA sense strand
uaaauccagugguucauaa

SEQ ID NO: 1591340 - RNA, 19 nt, Homo sapiens
  misc_RNA (1)...(19): siRNA sense strand
gaacauacuggucgucuug

SEQ ID NO: 1591341 - RNA, 19 nt, Homo sapiens
  misc_RNA (1)...(19): siRNA sense strand
gaagauaucggcgacauug

SEQ ID NO: 1591342 - RNA, 19 nt, Homo sapiens
  misc_RNA (1)...(19): siRNA sense strand
cagcagacuuggguaauga

SEQ ID NO: 1591343 - RNA, 19 nt, Homo sapiens
  misc_RNA (1)...(19): siRNA sense strand
gaucacaaaucaacaucuc

SEQ ID NO: 1591344 - RNA, 19 nt, Homo sapiens
  misc_RNA (1)...(19): siRNA sense strand
gcagcagacuuggguaaug

SEQ ID NO: 1591345 - RNA, 19 nt, Homo sapiens
  misc_RNA (1)...(19): siRNA sense strand
caaaucaacaucucacuuc

SEQ ID NO: 1591346 - RNA, 19 nt, Homo sapiens
  misc_RNA (1)...(19): siRNA sense strand
ggaaagaaagaacauacug

SEQ ID NO: 1591347 - RNA, 19 nt, Homo sapiens
  misc_RNA (1)...(19): siRNA sense strand
caaaguauggacaguaaau

SEQ ID NO: 1591348 - RNA, 19 nt, Homo sapiens
  misc_RNA (1)...(19): siRNA sense strand
gaugaugauucaccugauc

SEQ ID NO: 1591349 - RNA, 19 nt, Homo sapiens
  misc_RNA (1)...(19): siRNA sense strand
augaagaacuggagucuca

SEQ ID NO: 1591350 - RNA, 19 nt, Homo sapiens
  misc_RNA (1)...(19): siRNA sense strand
gcaggaaagaaagaacaua

SEQ ID NO: 1591351 - RNA, 19 nt, Homo sapiens
  misc_RNA (1)...(19): siRNA sense strand
ugaugacgaugaugauuca

SEQ ID NO: 1591352 - RNA, 19 nt, Homo sapiens
  misc_RNA (1)...(19): siRNA sense strand
cauacuggucgucuuguua

SEQ ID NO: 1591353 - RNA, 19 nt, Homo sapiens
  misc_RNA (1)...(19): siRNA sense strand
agcaaaguauggacaguaa

SEQ ID NO: 1591354 - RNA, 19 nt, Homo sapiens
  misc_RNA (1)...(19): siRNA sense strand
gaagaacuggagucucaau

SEQ ID NO: 1591355 - RNA, 19 nt, Homo sapiens
  misc_RNA (1)...(19): siRNA sense strand
ugauguggcuggagaugau

SEQ ID NO: 1591356 - RNA, 19 nt, Homo sapiens
  misc_RNA (1)...(19): siRNA sense strand
ggagaucacaaaucaacau

SEQ ID NO: 1591357 - RNA, 19 nt, Homo sapiens
  misc_RNA (1)...(19): siRNA sense strand
ugagcacccugaugaagug

SEQ ID NO: 1591358 - RNA, 19 nt, Homo sapiens
  misc_RNA (1)...(19): siRNA sense strand
ggaagaagacaagaaaauu

SEQ ID NO: 1591359 - RNA, 19 nt, Homo sapiens
  misc_RNA (1)...(19): siRNA sense strand
gcaaaguauggacaguaaa

SEQ ID NO: 1591360 - RNA, 19 nt, Homo sapiens
  misc_RNA (1)...(19): siRNA sense strand
ggaagauaucggcgacauu

SEQ ID NO: 1591361 - RNA, 19 nt, Homo sapiens
  misc_RNA (1)...(19): siRNA sense strand
cagcaaaguauggacagua

SEQ ID NO: 1591362 - RNA, 19 nt, Homo sapiens
  misc_RNA (1)...(19): siRNA sense strand
gaagagagaaaacaaaagu

SEQ ID NO: 1591363 - RNA, 19 nt, Homo sapiens
  misc_RNA (1)...(19): siRNA sense strand
agacuuggguaaugaagag

SEQ ID NO: 1591364 - RNA, 19 nt, Homo sapiens
  misc_RNA (1)...(19): siRNA sense strand
ggcuggagaugaugaugau

SEQ ID NO: 1591365 - RNA, 19 nt, Homo sapiens
  misc_RNA (1)...(19): siRNA sense strand
aaagaagaaucugcugaag

SEQ ID NO: 1591366 - RNA, 19 nt, Homo sapiens
  misc_RNA (1)...(19): siRNA sense strand
gaugaugacgaugaugauu

SEQ ID NO: 1591367 - RNA, 19 nt, Homo sapiens
  misc_RNA (1)...(19): siRNA sense strand
ugaaguggaggaucccaaa

SEQ ID NO: 1591368 - RNA, 19 nt, Homo sapiens
  misc_RNA (1)...(19): siRNA sense strand
uuuguuaaauccagugguu

SEQ ID NO: 1591369 - RNA, 19 nt, Homo sapiens
  misc_RNA (1)...(19): siRNA sense strand
uuaaauccagugguucaua

SEQ ID NO: 1591370 - RNA, 19 nt, Homo sapiens
  misc_RNA (1)...(19): siRNA sense strand
agaacuggagucucaauau

SEQ ID NO: 1591371 - RNA, 19 nt, Homo sapiens
  misc_RNA (1)...(19): siRNA sense strand
agaaucugcugaagaacuc

SEQ ID NO: 1591372 - RNA, 19 nt, Homo sapiens
  misc_RNA (1)...(19): siRNA sense strand
aagaagaaucugcugaaga

SEQ ID NO: 1591373 - RNA, 19 nt, Homo sapiens
  misc_RNA (1)...(19): siRNA sense strand
cgauucagagucagagaaa

SEQ ID NO: 1591374 - RNA, 19 nt, Homo sapiens
  misc_RNA (1)...(19): siRNA sense strand
cucaauaucagcaaaguau

SEQ ID NO: 1591375 - RNA, 19 nt, Homo sapiens
  misc_RNA (1)...(19): siRNA sense strand
gagucucaauaucagcaaa

SEQ ID NO: 1591376 - RNA, 19 nt, Homo sapiens
  misc_RNA (1)...(19): siRNA sense strand
uguuauaggagaucacaaa

SEQ ID NO: 1591377 - RNA, 19 nt, Homo sapiens
  misc_RNA (1)...(19): siRNA sense strand
caauaucagcaaaguaugg

SEQ ID NO: 1591378 - RNA, 19 nt, Homo sapiens
  misc_RNA (1)...(19): siRNA sense strand
guauggacaguaaauuauc

SEQ ID NO: 1591379 - RNA, 19 nt, Homo sapiens
  misc_RNA (1)...(19): siRNA sense strand
gcgauucagagucagagaa

SEQ ID NO: 1591380 - RNA, 19 nt, Homo sapiens
  misc_RNA (1)...(19): siRNA sense strand
acaaaucaacaucucacuu

SEQ ID NO: 1591381 - RNA, 19 nt, Homo sapiens
  misc_RNA (1)...(19): siRNA sense strand
ucugggaucuagcaauugg

SEQ ID NO: 1591382 - RNA, 19 nt, Homo sapiens
  misc_RNA (1)...(19): siRNA sense strand
ccugaaaguccagaugauu

SEQ ID NO: 1591383 - RNA, 19 nt, Homo sapiens
  misc_RNA (1)...(19): siRNA sense strand
ugagguagaagaccaugau

SEQ ID NO: 1591384 - RNA, 19 nt, Homo sapiens
  misc_RNA (1)...(19): siRNA sense strand
uggcuucagugagguagaa

SEQ ID NO: 1591385 - RNA, 19 nt, Homo sapiens
  misc_RNA (1)...(19): siRNA sense strand
aagaacuggagucucaaua

SEQ ID NO: 1591386 - RNA, 19 nt, Homo sapiens
  misc_RNA (1)...(19): siRNA sense strand
gauccugaaaguccagaug

SEQ ID NO: 1591387 - RNA, 19 nt, Homo sapiens
  misc_RNA (1)...(19): siRNA sense strand
ugaugaugaugacgaugau

SEQ ID NO: 1591388 - RNA, 19 nt, Homo sapiens
  misc_RNA (1)...(19): siRNA sense strand
caggaaagaaagaacauac

SEQ ID NO: 1591389 - RNA, 19 nt, Homo sapiens
  misc_RNA (1)...(19): siRNA sense strand
gagaucacaaaucaacauc

SEQ ID NO: 1591390 - RNA, 19 nt, Homo sapiens
  misc_RNA (1)...(19): siRNA sense strand
cagagucagagaaagaaga

SEQ ID NO: 1591391 - RNA, 19 nt, Homo sapiens
  misc_RNA (1)...(19): siRNA sense strand
acauacuggucgucuuguu

SEQ ID NO: 1591392 - RNA, 19 nt, Homo sapiens
  misc_RNA (1)...(19): siRNA sense strand
uaggagaucacaaaucaac

SEQ ID NO: 1591393 - RNA, 19 nt, Homo sapiens
  misc_RNA (1)...(19): siRNA sense strand
uaugggugcaggaaagaaa

SEQ ID NO: 1591394 - RNA, 19 nt, Homo sapiens
  misc_RNA (1)...(19): siRNA sense strand
agaacauacuggucgucuu

SEQ ID NO: 1591395 - RNA, 19 nt, Homo sapiens
  misc_RNA (1)...(19): siRNA sense strand
ugaaaguccagaugauucu

SEQ ID NO: 1591396 - RNA, 19 nt, Homo sapiens
  misc_RNA (1)...(19): siRNA sense strand
cgaugaugauucaccugau

SEQ ID NO: 1591397 - RNA, 19 nt, Homo sapiens
  misc_RNA (1)...(19): siRNA sense strand
gaaaacaaaaguucuugag

SEQ ID NO: 1591398 - RNA, 19 nt, Homo sapiens
  misc_RNA (1)...(19): siRNA sense strand
gggaagaagacaagaaaau

SEQ ID NO: 1591399 - RNA, 19 nt, Homo sapiens
  misc_RNA (1)...(19): siRNA sense strand
uacuggucgucuuguuaua

SEQ ID NO: 1591400 - RNA, 19 nt, Homo sapiens
  misc_RNA (1)...(19): siRNA sense strand
cuggagaugaugaugauga

SEQ ID NO: 1591401 - RNA, 19 nt, Homo sapiens
  misc_RNA (1)...(19): siRNA sense strand
agagucagagaaagaagaa

SEQ ID NO: 1591402 - RNA, 19 nt, Homo sapiens
  misc_RNA (1)...(19): siRNA sense strand
cugaaaguccagaugauuc

SEQ ID NO: 1591403 - RNA, 19 nt, Homo sapiens
  misc_RNA (1)...(19): siRNA sense strand
gagagaacaucaucaccua

SEQ ID NO: 1591404 - RNA, 19 nt, Homo sapiens
  misc_RNA (1)...(19): siRNA sense strand
gcaagaagcacugauggua

SEQ ID NO: 1591405 - RNA, 19 nt, Homo sapiens
  misc_RNA (1)...(19): siRNA sense strand
caacgacaauccacccauu

SEQ ID NO: 1591406 - RNA, 19 nt, Homo sapiens
  misc_RNA (1)...(19): siRNA sense strand
caucagaguucaucaucaa

SEQ ID NO: 1591407 - RNA, 19 nt, Homo sapiens
  misc_RNA (1)...(19): siRNA sense strand
gaggaaggcaccauccaua

SEQ ID NO: 1591408 - RNA, 19 nt, Homo sapiens
  misc_RNA (1)...(19): siRNA sense strand
gagacgggcuccucacugu

SEQ ID NO: 1591409 - RNA, 19 nt, Homo sapiens
  misc_RNA (1)...(19): siRNA sense strand
cuacuugguucccauagaa

SEQ ID NO: 1591410 - RNA, 19 nt, Homo sapiens
  misc_RNA (1)...(19): siRNA sense strand
ucaaggauguggccucugu

SEQ ID NO: 1591411 - RNA, 19 nt, Homo sapiens
  misc_RNA (1)...(19): siRNA sense strand
gcaggcaccguauuuguga

SEQ ID NO: 1591412 - RNA, 19 nt, Homo sapiens
  misc_RNA (1)...(19): siRNA sense strand
gaagcaagaagcacugaug

SEQ ID NO: 1591413 - RNA, 19 nt, Homo sapiens
  misc_RNA (1)...(19): siRNA sense strand
acaacgcccugauggcaua

SEQ ID NO: 1591414 - RNA, 19 nt, Homo sapiens
  misc_RNA (1)...(19): siRNA sense strand
gcaccguauuugugauuga

SEQ ID NO: 1591415 - RNA, 19 nt, Homo sapiens
  misc_RNA (1)...(19): siRNA sense strand
gagcguugcuucucuaucc

SEQ ID NO: 1591416 - RNA, 19 nt, Homo sapiens
  misc_RNA (1)...(19): siRNA sense strand
gguguacacuguucuggau

SEQ ID NO: 1591417 - RNA, 19 nt, Homo sapiens
  misc_RNA (1)...(19): siRNA sense strand
ugacagugccugagaacaa

SEQ ID NO: 1591418 - RNA, 19 nt, Homo sapiens
  misc_RNA (1)...(19): siRNA sense strand
gcaauauucauguuaccaa

SEQ ID NO: 1591419 - RNA, 19 nt, Homo sapiens
  misc_RNA (1)...(19): siRNA sense strand
gaugaggccacaggcaaua

SEQ ID NO: 1591420 - RNA, 19 nt, Homo sapiens
  misc_RNA (1)...(19): siRNA sense strand
caguagccaugucuccuuu

SEQ ID NO: 1591421 - RNA, 19 nt, Homo sapiens
  misc_RNA (1)...(19): siRNA sense strand
ccaccaacacgcucauuga

SEQ ID NO: 1591422 - RNA, 19 nt, Homo sapiens
  misc_RNA (1)...(19): siRNA sense strand
ggaaggcaccauccauaca

SEQ ID NO: 1591423 - RNA, 19 nt, Homo sapiens
  misc_RNA (1)...(19): siRNA sense strand
guagccaugucuccuuuca

SEQ ID NO: 1591424 - RNA, 19 nt, Homo sapiens
  misc_RNA (1)...(19): siRNA sense strand
uccagagccuguucucauu

SEQ ID NO: 1591425 - RNA, 19 nt, Homo sapiens
  misc_RNA (1)...(19): siRNA sense strand
ccaagcugguguacacugu

SEQ ID NO: 1591426 - RNA, 19 nt, Homo sapiens
  misc_RNA (1)...(19): siRNA sense strand
gaggaggacguccgagaga

SEQ ID NO: 1591427 - RNA, 19 nt, Homo sapiens
  misc_RNA (1)...(19): siRNA sense strand
gggcccugaugccaacuuu

SEQ ID NO: 1591428 - RNA, 19 nt, Homo sapiens
  misc_RNA (1)...(19): siRNA sense strand
cacagagccuauaccaguu

SEQ ID NO: 1591429 - RNA, 19 nt, Homo sapiens
  misc_RNA (1)...(19): siRNA sense strand
ccacaggcaauauucaugu

SEQ ID NO: 1591430 - RNA, 19 nt, Homo sapiens
  misc_RNA (1)...(19): siRNA sense strand
gcugagcccuacgauacuu

SEQ ID NO: 1591431 - RNA, 19 nt, Homo sapiens
  misc_RNA (1)...(19): siRNA sense strand
gcaagccccuagacuuuga

SEQ ID NO: 1591432 - RNA, 19 nt, Homo sapiens
  misc_RNA (1)...(19): siRNA sense strand
ugcaagacaucaacgacaa

SEQ ID NO: 1591433 - RNA, 19 nt, Homo sapiens
  misc_RNA (1)...(19): siRNA sense strand
cagaguucaucaucaaagu

SEQ ID NO: 1591434 - RNA, 19 nt, Homo sapiens
  misc_RNA (1)...(19): siRNA sense strand
ggaaaaggcgcaauaugug

SEQ ID NO: 1591435 - RNA, 19 nt, Homo sapiens
  misc_RNA (1)...(19): siRNA sense strand
gacagugccugagaacaag

SEQ ID NO: 1591436 - RNA, 19 nt, Homo sapiens
  misc_RNA (1)...(19): siRNA sense strand
uggauggacugccuuucuu

SEQ ID NO: 1591437 - RNA, 19 nt, Homo sapiens
  misc_RNA (1)...(19): siRNA sense strand
aagcugcacucggauguug

SEQ ID NO: 1591438 - RNA, 19 nt, Homo sapiens
  misc_RNA (1)...(19): siRNA sense strand
gaaggcaccauccauacag

SEQ ID NO: 1591439 - RNA, 19 nt, Homo sapiens
  misc_RNA (1)...(19): siRNA sense strand
caacauggaccgggagaca

SEQ ID NO: 1591440 - RNA, 19 nt, Homo sapiens
  misc_RNA (1)...(19): siRNA sense strand
caucaaagugcaagacauc

SEQ ID NO: 1591441 - RNA, 19 nt, Homo sapiens
  misc_RNA (1)...(19): siRNA sense strand
gcucauugacccagccuau

SEQ ID NO: 1591442 - RNA, 19 nt, Homo sapiens
  misc_RNA (1)...(19): siRNA sense strand
gcaagacaucaacgacaau

SEQ ID NO: 1591443 - RNA, 19 nt, Homo sapiens
  misc_RNA (1)...(19): siRNA sense strand
gcaagcugcacucggaugu

SEQ ID NO: 1591444 - RNA, 19 nt, Homo sapiens
  misc_RNA (1)...(19): siRNA sense strand
gggcaggcaccguauuugu

SEQ ID NO: 1591445 - RNA, 19 nt, Homo sapiens
  misc_RNA (1)...(19): siRNA sense strand
gugccaagcugguguacac

SEQ ID NO: 1591446 - RNA, 19 nt, Homo sapiens
  misc_RNA (1)...(19): siRNA sense strand
cacaggcaauauucauguu

SEQ ID NO: 1591447 - RNA, 19 nt, Homo sapiens
  misc_RNA (1)...(19): siRNA sense strand
acaggcaauauucauguua

SEQ ID NO: 1591448 - RNA, 19 nt, Homo sapiens
  misc_RNA (1)...(19): siRNA sense strand
ccaucagaguucaucauca

SEQ ID NO: 1591449 - RNA, 19 nt, Homo sapiens
  misc_RNA (1)...(19): siRNA sense strand
ggaugagaaugacaaugcu

SEQ ID NO: 1591450 - RNA, 19 nt, Homo sapiens
  misc_RNA (1)...(19): siRNA sense strand
ccguauuugugauugauga

SEQ ID NO: 1591451 - RNA, 19 nt, Homo sapiens
  misc_RNA (1)...(19): siRNA sense strand
gggagacacaggaggaguu

SEQ ID NO: 1591452 - RNA, 19 nt, Homo sapiens
  misc_RNA (1)...(19): siRNA sense strand
ugcccgagauguccaaugu

SEQ ID NO: 1591453 - RNA, 19 nt, Homo sapiens
  misc_RNA (1)...(19): siRNA sense strand
gaaggagcugggucuggaa

SEQ ID NO: 1591454 - RNA, 19 nt, Homo sapiens
  misc_RNA (1)...(19): siRNA sense strand
cagcaucagcacagacuug

SEQ ID NO: 1591455 - RNA, 19 nt, Homo sapiens
  misc_RNA (1)...(19): siRNA sense strand
aagaagcacugaugguacu

SEQ ID NO: 1591456 - RNA, 19 nt, Homo sapiens
  misc_RNA (1)...(19): siRNA sense strand
aaccaguucuuugucauug

SEQ ID NO: 1591457 - RNA, 19 nt, Homo sapiens
  misc_RNA (1)...(19): siRNA sense strand
ccggagcguugcuucucua

SEQ ID NO: 1591458 - RNA, 19 nt, Homo sapiens
  misc_RNA (1)...(19): siRNA sense strand
ucuuugucauugaggaaua

SEQ ID NO: 1591459 - RNA, 19 nt, Homo sapiens
  misc_RNA (1)...(19): siRNA sense strand
caggcaauauucauguuac

SEQ ID NO: 1591460 - RNA, 19 nt, Homo sapiens
  misc_RNA (1)...(19): siRNA sense strand
ucaaagugcaagacaucaa

SEQ ID NO: 1591461 - RNA, 19 nt, Homo sapiens
  misc_RNA (1)...(19): siRNA sense strand
gcucugcugcggacucgaa

SEQ ID NO: 1591462 - RNA, 19 nt, Homo sapiens
  misc_RNA (1)...(19): siRNA sense strand
guacacuguucuggaugga

SEQ ID NO: 1591463 - RNA, 19 nt, Homo sapiens
  misc_RNA (1)...(19): siRNA sense strand
gcagcacuacggugacugu

SEQ ID NO: 1591464 - RNA, 19 nt, Homo sapiens
  misc_RNA (1)...(19): siRNA sense strand
ccaguucuuugucauugag

SEQ ID NO: 1591465 - RNA, 19 nt, Homo sapiens
  misc_RNA (1)...(19): siRNA sense strand
ccuacuugguucccauaga

SEQ ID NO: 1591466 - RNA, 19 nt, Homo sapiens
  misc_RNA (1)...(19): siRNA sense strand
gcuccuggccagcugauuc

SEQ ID NO: 1591467 - RNA, 19 nt, Homo sapiens
  misc_RNA (1)...(19): siRNA sense strand
ggagcugggucuggaacca

SEQ ID NO: 1591468 - RNA, 19 nt, Homo sapiens
  misc_RNA (1)...(19): siRNA sense strand
agccaugucuccuuucaag

SEQ ID NO: 1591469 - RNA, 19 nt, Homo sapiens
  misc_RNA (1)...(19): siRNA sense strand
ccagagccuguucucauug

SEQ ID NO: 1591470 - RNA, 19 nt, Homo sapiens
  misc_RNA (1)...(19): siRNA sense strand
guccagagccuguucucau

SEQ ID NO: 1591471 - RNA, 19 nt, Homo sapiens
  misc_RNA (1)...(19): siRNA sense strand
agacacaggaggaguucuu

SEQ ID NO: 1591472 - RNA, 19 nt, Homo sapiens
  misc_RNA (1)...(19): siRNA sense strand
ggagacacaggaggaguuc

SEQ ID NO: 1591473 - RNA, 19 nt, Homo sapiens
  misc_RNA (1)...(19): siRNA sense strand
guacagccauccccaacau

SEQ ID NO: 1591474 - RNA, 19 nt, Homo sapiens
  misc_RNA (1)...(19): siRNA sense strand
ggauggacugccuuucuuc

SEQ ID NO: 1591475 - RNA, 19 nt, Homo sapiens
  misc_RNA (1)...(19): siRNA sense strand
aagcugguguacacuguuc

SEQ ID NO: 1591476 - RNA, 19 nt, Homo sapiens
  misc_RNA (1)...(19): siRNA sense strand
cagagccuguucucauugg

SEQ ID NO: 1591477 - RNA, 19 nt, Homo sapiens
  misc_RNA (1)...(19): siRNA sense strand
caaagugcaagacaucaac

SEQ ID NO: 1591478 - RNA, 19 nt, Homo sapiens
  misc_RNA (1)...(19): siRNA sense strand
acgacucggugcaggugua

SEQ ID NO: 1591479 - RNA, 19 nt, Homo sapiens
  misc_RNA (1)...(19): siRNA sense strand
gauccaggccaaggacaug

SEQ ID NO: 1591480 - RNA, 19 nt, Homo sapiens
  misc_RNA (1)...(19): siRNA sense strand
ggcaggcaccguauuugug

SEQ ID NO: 1591481 - RNA, 19 nt, Homo sapiens
  misc_RNA (1)...(19): siRNA sense strand
caccgaggccuucgacauc

SEQ ID NO: 1591482 - RNA, 19 nt, Homo sapiens
  misc_RNA (1)...(19): siRNA sense strand
ucaucaaagugcaagacau

SEQ ID NO: 1591483 - RNA, 19 nt, Homo sapiens
  misc_RNA (1)...(19): siRNA sense strand
gcccugaugccaacuuuac

SEQ ID NO: 1591484 - RNA, 19 nt, Homo sapiens
  misc_RNA (1)...(19): siRNA sense strand
uggacugccuuucuucucu

SEQ ID NO: 1591485 - RNA, 19 nt, Homo sapiens
  misc_RNA (1)...(19): siRNA sense strand
gagagaacaucaucaccua

SEQ ID NO: 1591486 - RNA, 19 nt, Homo sapiens
  misc_RNA (1)...(19): siRNA sense strand
gcaagaagcacugauggua

SEQ ID NO: 1591487 - RNA, 19 nt, Homo sapiens
  misc_RNA (1)...(19): siRNA sense strand
caacgacaauccacccauu

SEQ ID NO: 1591488 - RNA, 19 nt, Homo sapiens
  misc_RNA (1)...(19): siRNA sense strand
caucagaguucaucaucaa

SEQ ID NO: 1591489 - RNA, 19 nt, Homo sapiens
  misc_RNA (1)...(19): siRNA sense strand
gaggaaggcaccauccaua

SEQ ID NO: 1591490 - RNA, 19 nt, Homo sapiens
  misc_RNA (1)...(19): siRNA sense strand
gagacgggcuccucacugu

SEQ ID NO: 1591491 - RNA, 19 nt, Homo sapiens
  misc_RNA (1)...(19): siRNA sense strand
cuacuugguucccauagaa

SEQ ID NO: 1591492 - RNA, 19 nt, Homo sapiens
  misc_RNA (1)...(19): siRNA sense strand
ucaaggauguggccucugu

SEQ ID NO: 1591493 - RNA, 19 nt, Homo sapiens
  misc_RNA (1)...(19): siRNA sense strand
gcaggcaccguauuuguga

SEQ ID NO: 1591494 - RNA, 19 nt, Homo sapiens
  misc_RNA (1)...(19): siRNA sense strand
gaagcaagaagcacugaug

SEQ ID NO: 1591495 - RNA, 19 nt, Homo sapiens
  misc_RNA (1)...(19): siRNA sense strand
acaacgcccugauggcaua

SEQ ID NO: 1591496 - RNA, 19 nt, Homo sapiens
  misc_RNA (1)...(19): siRNA sense strand
gcaccguauuugugauuga

SEQ ID NO: 1591497 - RNA, 19 nt, Homo sapiens
  misc_RNA (1)...(19): siRNA sense strand
gagcguugcuucucuaucc

SEQ ID NO: 1591498 - RNA, 19 nt, Homo sapiens
  misc_RNA (1)...(19): siRNA sense strand
gguguacacuguucuggau

SEQ ID NO: 1591499 - RNA, 19 nt, Homo sapiens
  misc_RNA (1)...(19): siRNA sense strand
ugacagugccugagaacaa

SEQ ID NO: 1591500 - RNA, 19 nt, Homo sapiens
  misc_RNA (1)...(19): siRNA sense strand
gcaauauucauguuaccaa

SEQ ID NO: 1591501 - RNA, 19 nt, Homo sapiens
  misc_RNA (1)...(19): siRNA sense strand
gaugaggccacaggcaaua

SEQ ID NO: 1591502 - RNA, 19 nt, Homo sapiens
  misc_RNA (1)...(19): siRNA sense strand
caguagccaugucuccuuu

SEQ ID NO: 1591503 - RNA, 19 nt, Homo sapiens
  misc_RNA (1)...(19): siRNA sense strand
ccaccaacacgcucauuga

SEQ ID NO: 1591504 - RNA, 19 nt, Homo sapiens
  misc_RNA (1)...(19): siRNA sense strand
ggaaggcaccauccauaca

SEQ ID NO: 1591505 - RNA, 19 nt, Homo sapiens
  misc_RNA (1)...(19): siRNA sense strand
guagccaugucuccuuuca

SEQ ID NO: 1591506 - RNA, 19 nt, Homo sapiens
  misc_RNA (1)...(19): siRNA sense strand
uccagagccuguucucauu

SEQ ID NO: 1591507 - RNA, 19 nt, Homo sapiens
  misc_RNA (1)...(19): siRNA sense strand
ccaagcugguguacacugu

SEQ ID NO: 1591508 - RNA, 19 nt, Homo sapiens
  misc_RNA (1)...(19): siRNA sense strand
gaggaggacguccgagaga

SEQ ID NO: 1591509 - RNA, 19 nt, Homo sapiens
  misc_RNA (1)...(19): siRNA sense strand
gggcccugaugccaacuuu

SEQ ID NO: 1591510 - RNA, 19 nt, Homo sapiens
  misc_RNA (1)...(19): siRNA sense strand
cacagagccuauaccaguu

SEQ ID NO: 1591511 - RNA, 19 nt, Homo sapiens
  misc_RNA (1)...(19): siRNA sense strand
ccacaggcaauauucaugu

SEQ ID NO: 1591512 - RNA, 19 nt, Homo sapiens
  misc_RNA (1)...(19): siRNA sense strand
gcugagcccuacgauacuu

SEQ ID NO: 1591513 - RNA, 19 nt, Homo sapiens
  misc_RNA (1)...(19): siRNA sense strand
gcaagccccuagacuuuga

SEQ ID NO: 1591514 - RNA, 19 nt, Homo sapiens
  misc_RNA (1)...(19): siRNA sense strand
ugcaagacaucaacgacaa

SEQ ID NO: 1591515 - RNA, 19 nt, Homo sapiens
  misc_RNA (1)...(19): siRNA sense strand
cagaguucaucaucaaagu

SEQ ID NO: 1591516 - RNA, 19 nt, Homo sapiens
  misc_RNA (1)...(19): siRNA sense strand
ggaaaaggcgcaauaugug

SEQ ID NO: 1591517 - RNA, 19 nt, Homo sapiens
  misc_RNA (1)...(19): siRNA sense strand
gacagugccugagaacaag

SEQ ID NO: 1591518 - RNA, 19 nt, Homo sapiens
  misc_RNA (1)...(19): siRNA sense strand
uggauggacugccuuucuu

SEQ ID NO: 1591519 - RNA, 19 nt, Homo sapiens
  misc_RNA (1)...(19): siRNA sense strand
aagcugcacucggauguug

SEQ ID NO: 1591520 - RNA, 19 nt, Homo sapiens
  misc_RNA (1)...(19): siRNA sense strand
gaaggcaccauccauacag

SEQ ID NO: 1591521 - RNA, 19 nt, Homo sapiens
  misc_RNA (1)...(19): siRNA sense strand
caacauggaccgggagaca

SEQ ID NO: 1591522 - RNA, 19 nt, Homo sapiens
  misc_RNA (1)...(19): siRNA sense strand
caucaaagugcaagacauc

SEQ ID NO: 1591523 - RNA, 19 nt, Homo sapiens
  misc_RNA (1)...(19): siRNA sense strand
gcucauugacccagccuau

SEQ ID NO: 1591524 - RNA, 19 nt, Homo sapiens
  misc_RNA (1)...(19): siRNA sense strand
gcaagacaucaacgacaau

SEQ ID NO: 1591525 - RNA, 19 nt, Homo sapiens
  misc_RNA (1)...(19): siRNA sense strand
gcaagcugcacucggaugu

SEQ ID NO: 1591526 - RNA, 19 nt, Homo sapiens
  misc_RNA (1)...(19): siRNA sense strand
gggcaggcaccguauuugu

SEQ ID NO: 1591527 - RNA, 19 nt, Homo sapiens
  misc_RNA (1)...(19): siRNA sense strand
gugccaagcugguguacac

SEQ ID NO: 1591528 - RNA, 19 nt, Homo sapiens
  misc_RNA (1)...(19): siRNA sense strand
cacaggcaauauucauguu

SEQ ID NO: 1591529 - RNA, 19 nt, Homo sapiens
  misc_RNA (1)...(19): siRNA sense strand
acaggcaauauucauguua

SEQ ID NO: 1591530 - RNA, 19 nt, Homo sapiens
  misc_RNA (1)...(19): siRNA sense strand
ccaucagaguucaucauca

SEQ ID NO: 1591531 - RNA, 19 nt, Homo sapiens
  misc_RNA (1)...(19): siRNA sense strand
ggaugagaaugacaaugcu

SEQ ID NO: 1591532 - RNA, 19 nt, Homo sapiens
  misc_RNA (1)...(19): siRNA sense strand
ccguauuugugauugauga

SEQ ID NO: 1591533 - RNA, 19 nt, Homo sapiens
  misc_RNA (1)...(19): siRNA sense strand
gggagacacaggaggaguu

SEQ ID NO: 1591534 - RNA, 19 nt, Homo sapiens
  misc_RNA (1)...(19): siRNA sense strand
ugcccgagauguccaaugu

SEQ ID NO: 1591535 - RNA, 19 nt, Homo sapiens
  misc_RNA (1)...(19): siRNA sense strand
gaaggagcugggucuggaa

SEQ ID NO: 1591536 - RNA, 19 nt, Homo sapiens
  misc_RNA (1)...(19): siRNA sense strand
cagcaucagcacagacuug

SEQ ID NO: 1591537 - RNA, 19 nt, Homo sapiens
  misc_RNA (1)...(19): siRNA sense strand
aagaagcacugaugguacu

SEQ ID NO: 1591538 - RNA, 19 nt, Homo sapiens
  misc_RNA (1)...(19): siRNA sense strand
aaccaguucuuugucauug

SEQ ID NO: 1591539 - RNA, 19 nt, Homo sapiens
  misc_RNA (1)...(19): siRNA sense strand
ccggagcguugcuucucua

SEQ ID NO: 1591540 - RNA, 19 nt, Homo sapiens
  misc_RNA (1)...(19): siRNA sense strand
ucuuugucauugaggaaua

SEQ ID NO: 1591541 - RNA, 19 nt, Homo sapiens
  misc_RNA (1)...(19): siRNA sense strand
caggcaauauucauguuac

SEQ ID NO: 1591542 - RNA, 19 nt, Homo sapiens
  misc_RNA (1)...(19): siRNA sense strand
ucaaagugcaagacaucaa

SEQ ID NO: 1591543 - RNA, 19 nt, Homo sapiens
  misc_RNA (1)...(19): siRNA sense strand
gcucugcugcggacucgaa

SEQ ID NO: 1591544 - RNA, 19 nt, Homo sapiens
  misc_RNA (1)...(19): siRNA sense strand
guacacuguucuggaugga

SEQ ID NO: 1591545 - RNA, 19 nt, Homo sapiens
  misc_RNA (1)...(19): siRNA sense strand
gcagcacuacggugacugu

SEQ ID NO: 1591546 - RNA, 19 nt, Homo sapiens
  misc_RNA (1)...(19): siRNA sense strand
ccaguucuuugucauugag

SEQ ID NO: 1591547 - RNA, 19 nt, Homo sapiens
  misc_RNA (1)...(19): siRNA sense strand
ccuacuugguucccauaga

SEQ ID NO: 1591548 - RNA, 19 nt, Homo sapiens
  misc_RNA (1)...(19): siRNA sense strand
gcuccuggccagcugauuc

SEQ ID NO: 1591549 - RNA, 19 nt, Homo sapiens
  misc_RNA (1)...(19): siRNA sense strand
ggagcugggucuggaacca

SEQ ID NO: 1591550 - RNA, 19 nt, Homo sapiens
  misc_RNA (1)...(19): siRNA sense strand
agccaugucuccuuucaag

SEQ ID NO: 1591551 - RNA, 19 nt, Homo sapiens
  misc_RNA (1)...(19): siRNA sense strand
ccagagccuguucucauug

SEQ ID NO: 1591552 - RNA, 19 nt, Homo sapiens
  misc_RNA (1)...(19): siRNA sense strand
guccagagccuguucucau

SEQ ID NO: 1591553 - RNA, 19 nt, Homo sapiens
  misc_RNA (1)...(19): siRNA sense strand
agacacaggaggaguucuu

SEQ ID NO: 1591554 - RNA, 19 nt, Homo sapiens
  misc_RNA (1)...(19): siRNA sense strand
ggagacacaggaggaguuc

SEQ ID NO: 1591555 - RNA, 19 nt, Homo sapiens
  misc_RNA (1)...(19): siRNA sense strand
guacagccauccccaacau

SEQ ID NO: 1591556 - RNA, 19 nt, Homo sapiens
  misc_RNA (1)...(19): siRNA sense strand
ggauggacugccuuucuuc

SEQ ID NO: 1591557 - RNA, 19 nt, Homo sapiens
  misc_RNA (1)...(19): siRNA sense strand
aagcugguguacacuguuc

SEQ ID NO: 1591558 - RNA, 19 nt, Homo sapiens
  misc_RNA (1)...(19): siRNA sense strand
cagagccuguucucauugg

SEQ ID NO: 1591559 - RNA, 19 nt, Homo sapiens
  misc_RNA (1)...(19): siRNA sense strand
caaagugcaagacaucaac

SEQ ID NO: 1591560 - RNA, 19 nt, Homo sapiens
  misc_RNA (1)...(19): siRNA sense strand
acgacucggugcaggugua

SEQ ID NO: 1591561 - RNA, 19 nt, Homo sapiens
  misc_RNA (1)...(19): siRNA sense strand
gauccaggccaaggacaug

SEQ ID NO: 1591562 - RNA, 19 nt, Homo sapiens
  misc_RNA (1)...(19): siRNA sense strand
ggcaggcaccguauuugug

SEQ ID NO: 1591563 - RNA, 19 nt, Homo sapiens
  misc_RNA (1)...(19): siRNA sense strand
caccgaggccuucgacauc

SEQ ID NO: 1591564 - RNA, 19 nt, Homo sapiens
  misc_RNA (1)...(19): siRNA sense strand
ucaucaaagugcaagacau

SEQ ID NO: 1591565 - RNA, 19 nt, Homo sapiens
  misc_RNA (1)...(19): siRNA sense strand
gcccugaugccaacuuuac

SEQ ID NO: 1591566 - RNA, 19 nt, Homo sapiens
  misc_RNA (1)...(19): siRNA sense strand
uggacugccuuucuucucu

SEQ ID NO: 1591567 - RNA, 19 nt, Homo sapiens
  misc_RNA (1)...(19): siRNA sense strand
ggagggagaugauuuccua

SEQ ID NO: 1591568 - RNA, 19 nt, Homo sapiens
  misc_RNA (1)...(19): siRNA sense strand
gagaugauuuccuagacua

SEQ ID NO: 1591569 - RNA, 19 nt, Homo sapiens
  misc_RNA (1)...(19): siRNA sense strand
gaccaaaccuaaagaguca

SEQ ID NO: 1591570 - RNA, 19 nt, Homo sapiens
  misc_RNA (1)...(19): siRNA sense strand
ggcacaagaucucguauug

SEQ ID NO: 1591571 - RNA, 19 nt, Homo sapiens
  misc_RNA (1)...(19): siRNA sense strand
cagaauccaucaucaucua

SEQ ID NO: 1591572 - RNA, 19 nt, Homo sapiens
  misc_RNA (1)...(19): siRNA sense strand
agaaagagcugcaggaacu

SEQ ID NO: 1591573 - RNA, 19 nt, Homo sapiens
  misc_RNA (1)...(19): siRNA sense strand
gaacugaccaaaccuaaag

SEQ ID NO: 1591574 - RNA, 19 nt, Homo sapiens
  misc_RNA (1)...(19): siRNA sense strand
gaaagagucacgcccagaa

SEQ ID NO: 1591575 - RNA, 19 nt, Homo sapiens
  misc_RNA (1)...(19): siRNA sense strand
caagcacucucuccaacaa

SEQ ID NO: 1591576 - RNA, 19 nt, Homo sapiens
  misc_RNA (1)...(19): siRNA sense strand
ggaagagccaacagcagua

SEQ ID NO: 1591577 - RNA, 19 nt, Homo sapiens
  misc_RNA (1)...(19): siRNA sense strand
caacaucuuccucguguau

SEQ ID NO: 1591578 - RNA, 19 nt, Homo sapiens
  misc_RNA (1)...(19): siRNA sense strand
guauugcccuugccucguu

SEQ ID NO: 1591579 - RNA, 19 nt, Homo sapiens
  misc_RNA (1)...(19): siRNA sense strand
ggaaacgacgccugaagga

SEQ ID NO: 1591580 - RNA, 19 nt, Homo sapiens
  misc_RNA (1)...(19): siRNA sense strand
ggagaugauuuccuagacu

SEQ ID NO: 1591581 - RNA, 19 nt, Homo sapiens
  misc_RNA (1)...(19): siRNA sense strand
aaagagucaucaagggaaa

SEQ ID NO: 1591582 - RNA, 19 nt, Homo sapiens
  misc_RNA (1)...(19): siRNA sense strand
ggaacugaccaaaccuaaa

SEQ ID NO: 1591583 - RNA, 19 nt, Homo sapiens
  misc_RNA (1)...(19): siRNA sense strand
gaaacgacgccugaaggaa

SEQ ID NO: 1591584 - RNA, 19 nt, Homo sapiens
  misc_RNA (1)...(19): siRNA sense strand
guggagaucagccuaaaga

SEQ ID NO: 1591585 - RNA, 19 nt, Homo sapiens
  misc_RNA (1)...(19): siRNA sense strand
ggaggagggagaugauuuc

SEQ ID NO: 1591586 - RNA, 19 nt, Homo sapiens
  misc_RNA (1)...(19): siRNA sense strand
acaucuuccucguguauaa

SEQ ID NO: 1591587 - RNA, 19 nt, Homo sapiens
  misc_RNA (1)...(19): siRNA sense strand
ucacauugacagagaaaga

SEQ ID NO: 1591588 - RNA, 19 nt, Homo sapiens
  misc_RNA (1)...(19): siRNA sense strand
cuacagcauuguggaguug

SEQ ID NO: 1591589 - RNA, 19 nt, Homo sapiens
  misc_RNA (1)...(19): siRNA sense strand
gcccuugccucguucucuu

SEQ ID NO: 1591590 - RNA, 19 nt, Homo sapiens
  misc_RNA (1)...(19): siRNA sense strand
gggagaugauuuccuagac

SEQ ID NO: 1591591 - RNA, 19 nt, Homo sapiens
  misc_RNA (1)...(19): siRNA sense strand
ugaggagcccggagaauca

SEQ ID NO: 1591592 - RNA, 19 nt, Homo sapiens
  misc_RNA (1)...(19): siRNA sense strand
gcuugaauccgacaauauc

SEQ ID NO: 1591593 - RNA, 19 nt, Homo sapiens
  misc_RNA (1)...(19): siRNA sense strand
gaagagccaacagcaguag

SEQ ID NO: 1591594 - RNA, 19 nt, Homo sapiens
  misc_RNA (1)...(19): siRNA sense strand
acuaucaccugguacaaca

SEQ ID NO: 1591595 - RNA, 19 nt, Homo sapiens
  misc_RNA (1)...(19): siRNA sense strand
cagccgcuacgucaccuua

SEQ ID NO: 1591596 - RNA, 19 nt, Homo sapiens
  misc_RNA (1)...(19): siRNA sense strand
uugcuugaauccgacaaua

SEQ ID NO: 1591597 - RNA, 19 nt, Homo sapiens
  misc_RNA (1)...(19): siRNA sense strand
ccuacagcauuguggaguu

SEQ ID NO: 1591598 - RNA, 19 nt, Homo sapiens
  misc_RNA (1)...(19): siRNA sense strand
gcacuaucaccugguacaa

SEQ ID NO: 1591599 - RNA, 19 nt, Homo sapiens
  misc_RNA (1)...(19): siRNA sense strand
ugaauccgacaauaucuca

SEQ ID NO: 1591600 - RNA, 19 nt, Homo sapiens
  misc_RNA (1)...(19): siRNA sense strand
gaggaggagggagaugauu

SEQ ID NO: 1591601 - RNA, 19 nt, Homo sapiens
  misc_RNA (1)...(19): siRNA sense strand
agaaaccuccacggucuaa

SEQ ID NO: 1591602 - RNA, 19 nt, Homo sapiens
  misc_RNA (1)...(19): siRNA sense strand
caacaaggaccccauccaa

SEQ ID NO: 1591603 - RNA, 19 nt, Homo sapiens
  misc_RNA (1)...(19): siRNA sense strand
caucuaccgcucagacaau

SEQ ID NO: 1591604 - RNA, 19 nt, Homo sapiens
  misc_RNA (1)...(19): siRNA sense strand
gcauuguggaguugcuuga

SEQ ID NO: 1591605 - RNA, 19 nt, Homo sapiens
  misc_RNA (1)...(19): siRNA sense strand
agagaaagagcugcaggaa

SEQ ID NO: 1591606 - RNA, 19 nt, Homo sapiens
  misc_RNA (1)...(19): siRNA sense strand
aacgacgccugaaggaaga

SEQ ID NO: 1591607 - RNA, 19 nt, Homo sapiens
  misc_RNA (1)...(19): siRNA sense strand
caggaacugaccaaaccua

SEQ ID NO: 1591608 - RNA, 19 nt, Homo sapiens
  misc_RNA (1)...(19): siRNA sense strand
gaggacuguucucccuaca

SEQ ID NO: 1591609 - RNA, 19 nt, Homo sapiens
  misc_RNA (1)...(19): siRNA sense strand
aggaggagggagaugauuu

SEQ ID NO: 1591610 - RNA, 19 nt, Homo sapiens
  misc_RNA (1)...(19): siRNA sense strand
gcacaagaucucguauugc

SEQ ID NO: 1591611 - RNA, 19 nt, Homo sapiens
  misc_RNA (1)...(19): siRNA sense strand
uguugucucuuucuacuac

SEQ ID NO: 1591612 - RNA, 19 nt, Homo sapiens
  misc_RNA (1)...(19): siRNA sense strand
uggaugaugauauguggaa

SEQ ID NO: 1591613 - RNA, 19 nt, Homo sapiens
  misc_RNA (1)...(19): siRNA sense strand
gaaccaaacucaggaaaca

SEQ ID NO: 1591614 - RNA, 19 nt, Homo sapiens
  misc_RNA (1)...(19): siRNA sense strand
gaaggaaaccucccagaug

SEQ ID NO: 1591615 - RNA, 19 nt, Homo sapiens
  misc_RNA (1)...(19): siRNA sense strand
caaaaggacuuaucguuaa

SEQ ID NO: 1591616 - RNA, 19 nt, Homo sapiens
  misc_RNA (1)...(19): siRNA sense strand
ggaaggacgugucaaagcu

SEQ ID NO: 1591617 - RNA, 19 nt, Homo sapiens
  misc_RNA (1)...(19): siRNA sense strand
ggaggaaggacgugucaaa

SEQ ID NO: 1591618 - RNA, 19 nt, Homo sapiens
  misc_RNA (1)...(19): siRNA sense strand
caucaggucugccaaaugc

SEQ ID NO: 1591619 - RNA, 19 nt, Homo sapiens
  misc_RNA (1)...(19): siRNA sense strand
gggaagacaugcugguucu

SEQ ID NO: 1591620 - RNA, 19 nt, Homo sapiens
  misc_RNA (1)...(19): siRNA sense strand
ccaaaaggacuuaucguua

SEQ ID NO: 1591621 - RNA, 19 nt, Homo sapiens
  misc_RNA (1)...(19): siRNA sense strand
ccagaugcuucuccacuca

SEQ ID NO: 1591622 - RNA, 19 nt, Homo sapiens
  misc_RNA (1)...(19): siRNA sense strand
aaucagagaaggccaaaug

SEQ ID NO: 1591623 - RNA, 19 nt, Homo sapiens
  misc_RNA (1)...(19): siRNA sense strand
ggaaaccucccagaugcuu

SEQ ID NO: 1591624 - RNA, 19 nt, Homo sapiens
  misc_RNA (1)...(19): siRNA sense strand
gaaggacgugucaaagcuu

SEQ ID NO: 1591625 - RNA, 19 nt, Homo sapiens
  misc_RNA (1)...(19): siRNA sense strand
gaggaugcgcugcccuaaa

SEQ ID NO: 1591626 - RNA, 19 nt, Homo sapiens
  misc_RNA (1)...(19): siRNA sense strand
gaagacaugcugguucucu

SEQ ID NO: 1591627 - RNA, 19 nt, Homo sapiens
  misc_RNA (1)...(19): siRNA sense strand
ugaaggaaaccucccagau

SEQ ID NO: 1591628 - RNA, 19 nt, Homo sapiens
  misc_RNA (1)...(19): siRNA sense strand
cagagguccuggugggaau

SEQ ID NO: 1591629 - RNA, 19 nt, Homo sapiens
  misc_RNA (1)...(19): siRNA sense strand
caggcuucaucacccauuu

SEQ ID NO: 1591630 - RNA, 19 nt, Homo sapiens
  misc_RNA (1)...(19): siRNA sense strand
ggaggaugcgcugcccuaa

SEQ ID NO: 1591631 - RNA, 19 nt, Homo sapiens
  misc_RNA (1)...(19): siRNA sense strand
aggaugcgcugcccuaaac

SEQ ID NO: 1591632 - RNA, 19 nt, Homo sapiens
  misc_RNA (1)...(19): siRNA sense strand
gcaucaggucugccaaaug

SEQ ID NO: 1591633 - RNA, 19 nt, Homo sapiens
  misc_RNA (1)...(19): siRNA sense strand
caacuccagaccaaucaga

SEQ ID NO: 1591634 - RNA, 19 nt, Homo sapiens
  misc_RNA (1)...(19): siRNA sense strand
ggaaccaaacucaggaaac

SEQ ID NO: 1591635 - RNA, 19 nt, Homo sapiens
  misc_RNA (1)...(19): siRNA sense strand
gggaaccaaacucaggaaa

SEQ ID NO: 1591636 - RNA, 19 nt, Homo sapiens
  misc_RNA (1)...(19): siRNA sense strand
gaggaaggacgugucaaag

SEQ ID NO: 1591637 - RNA, 19 nt, Homo sapiens
  misc_RNA (1)...(19): siRNA sense strand
agacaugcugguucucuga

SEQ ID NO: 1591638 - RNA, 19 nt, Homo sapiens
  misc_RNA (1)...(19): siRNA sense strand
cuccagcgcugaaggaaac

SEQ ID NO: 1591639 - RNA, 19 nt, Homo sapiens
  misc_RNA (1)...(19): siRNA sense strand
ccacucacccaccgaagca

SEQ ID NO: 1591640 - RNA, 19 nt, Homo sapiens
  misc_RNA (1)...(19): siRNA sense strand
ggacgugucaaagcuugga

SEQ ID NO: 1591641 - RNA, 19 nt, Homo sapiens
  misc_RNA (1)...(19): siRNA sense strand
caaaugaggcggaggaaua

SEQ ID NO: 1591642 - RNA, 19 nt, Homo sapiens
  misc_RNA (1)...(19): siRNA sense strand
acagauagcuugugaugaa

SEQ ID NO: 1591643 - RNA, 19 nt, Homo sapiens
  misc_RNA (1)...(19): siRNA sense strand
aaacagagccauugaacua

SEQ ID NO: 1591644 - RNA, 19 nt, Homo sapiens
  misc_RNA (1)...(19): siRNA sense strand
gaaauuugaugggaagaau

SEQ ID NO: 1591645 - RNA, 19 nt, Homo sapiens
  misc_RNA (1)...(19): siRNA sense strand
guugaaauguuccuucuug

SEQ ID NO: 1591646 - RNA, 19 nt, Homo sapiens
  misc_RNA (1)...(19): siRNA sense strand
caggacagcuucugaggaa

SEQ ID NO: 1591647 - RNA, 19 nt, Homo sapiens
  misc_RNA (1)...(19): siRNA sense strand
guacaacacggaagaauuc

SEQ ID NO: 1591648 - RNA, 19 nt, Homo sapiens
  misc_RNA (1)...(19): siRNA sense strand
acagagccauugaacuaua

SEQ ID NO: 1591649 - RNA, 19 nt, Homo sapiens
  misc_RNA (1)...(19): siRNA sense strand
aaacuuggacugaaauuug

SEQ ID NO: 1591650 - RNA, 19 nt, Homo sapiens
  misc_RNA (1)...(19): siRNA sense strand
gauagcuugugaugaacua

SEQ ID NO: 1591651 - RNA, 19 nt, Homo sapiens
  misc_RNA (1)...(19): siRNA sense strand
gaaacuuggacugaaauuu

SEQ ID NO: 1591652 - RNA, 19 nt, Homo sapiens
  misc_RNA (1)...(19): siRNA sense strand
augaggaccugguugauaa

SEQ ID NO: 1591653 - RNA, 19 nt, Homo sapiens
  misc_RNA (1)...(19): siRNA sense strand
gaaaggaaaggaaguacca

SEQ ID NO: 1591654 - RNA, 19 nt, Homo sapiens
  misc_RNA (1)...(19): siRNA sense strand
gaagaaugaggaccugguu

SEQ ID NO: 1591655 - RNA, 19 nt, Homo sapiens
  misc_RNA (1)...(19): siRNA sense strand
gaaaugagaacugcugaag

SEQ ID NO: 1591656 - RNA, 19 nt, Homo sapiens
  misc_RNA (1)...(19): siRNA sense strand
ggaccugguugauaaaauu

SEQ ID NO: 1591657 - RNA, 19 nt, Homo sapiens
  misc_RNA (1)...(19): siRNA sense strand
gcaaauacaacuggaucaa

SEQ ID NO: 1591658 - RNA, 19 nt, Homo sapiens
  misc_RNA (1)...(19): siRNA sense strand
aggcuuggcugaaaugaga

SEQ ID NO: 1591659 - RNA, 19 nt, Homo sapiens
  misc_RNA (1)...(19): siRNA sense strand
acaacuggaucaagcaaug

SEQ ID NO: 1591660 - RNA, 19 nt, Homo sapiens
  misc_RNA (1)...(19): siRNA sense strand
uguaccggcucuccaagua

SEQ ID NO: 1591661 - RNA, 19 nt, Homo sapiens
  misc_RNA (1)...(19): siRNA sense strand
gaagaauucaucacagucu

SEQ ID NO: 1591662 - RNA, 19 nt, Homo sapiens
  misc_RNA (1)...(19): siRNA sense strand
gggcaggcuuggcugaaau

SEQ ID NO: 1591663 - RNA, 19 nt, Homo sapiens
  misc_RNA (1)...(19): siRNA sense strand
cagagccauugaacuauau

SEQ ID NO: 1591664 - RNA, 19 nt, Homo sapiens
  misc_RNA (1)...(19): siRNA sense strand
ggaaaggaaguaccauuuu

SEQ ID NO: 1591665 - RNA, 19 nt, Homo sapiens
  misc_RNA (1)...(19): siRNA sense strand
cggaagaauucaucacagu

SEQ ID NO: 1591666 - RNA, 19 nt, Homo sapiens
  misc_RNA (1)...(19): siRNA sense strand
uaaagagaaaggaaaggaa

SEQ ID NO: 1591667 - RNA, 19 nt, Homo sapiens
  misc_RNA (1)...(19): siRNA sense strand
caacacggaagaauucauc

SEQ ID NO: 1591668 - RNA, 19 nt, Homo sapiens
  misc_RNA (1)...(19): siRNA sense strand
ccaaguacaacacggaaga

SEQ ID NO: 1591669 - RNA, 19 nt, Homo sapiens
  misc_RNA (1)...(19): siRNA sense strand
gcucgggacacaucaaaug

SEQ ID NO: 1591670 - RNA, 19 nt, Homo sapiens
  misc_RNA (1)...(19): siRNA sense strand
ggaaacuuggacugaaauu

SEQ ID NO: 1591671 - RNA, 19 nt, Homo sapiens
  misc_RNA (1)...(19): siRNA sense strand
acacacugguggucuugaa

SEQ ID NO: 1591672 - RNA, 19 nt, Homo sapiens
  misc_RNA (1)...(19): siRNA sense strand
agacagauagcuugugaug

SEQ ID NO: 1591673 - RNA, 19 nt, Homo sapiens
  misc_RNA (1)...(19): siRNA sense strand
uagccucuaugaagcugua

SEQ ID NO: 1591674 - RNA, 19 nt, Homo sapiens
  misc_RNA (1)...(19): siRNA sense strand
ugaggacgaucggcacuau

SEQ ID NO: 1591675 - RNA, 19 nt, Homo sapiens
  misc_RNA (1)...(19): siRNA sense strand
gcuaaacagagccauugaa

SEQ ID NO: 1591676 - RNA, 19 nt, Homo sapiens
  misc_RNA (1)...(19): siRNA sense strand
agaaugaggaccugguuga

SEQ ID NO: 1591677 - RNA, 19 nt, Homo sapiens
  misc_RNA (1)...(19): siRNA sense strand
aagaauucaucacagucua

SEQ ID NO: 1591678 - RNA, 19 nt, Homo sapiens
  misc_RNA (1)...(19): siRNA sense strand
caauggaaacuuggacuga

SEQ ID NO: 1591679 - RNA, 19 nt, Homo sapiens
  misc_RNA (1)...(19): siRNA sense strand
gggacacacugguggucuu

SEQ ID NO: 1591680 - RNA, 19 nt, Homo sapiens
  misc_RNA (1)...(19): siRNA sense strand
agagaaaggaaaggaagua

SEQ ID NO: 1591681 - RNA, 19 nt, Homo sapiens
  misc_RNA (1)...(19): siRNA sense strand
aggaaaggaaguaccauuu

SEQ ID NO: 1591682 - RNA, 19 nt, Homo sapiens
  misc_RNA (1)...(19): siRNA sense strand
uuacucugcugaggaagaa

SEQ ID NO: 1591683 - RNA, 19 nt, Homo sapiens
  misc_RNA (1)...(19): siRNA sense strand
aacuuggacugaaauuuga

SEQ ID NO: 1591684 - RNA, 19 nt, Homo sapiens
  misc_RNA (1)...(19): siRNA sense strand
aauggaaacuuggacugaa

SEQ ID NO: 1591685 - RNA, 19 nt, Homo sapiens
  misc_RNA (1)...(19): siRNA sense strand
gaucaagcaauggaaacuu

SEQ ID NO: 1591686 - RNA, 19 nt, Homo sapiens
  misc_RNA (1)...(19): siRNA sense strand
acccggagcucaugcuguu

SEQ ID NO: 1591687 - RNA, 19 nt, Homo sapiens
  misc_RNA (1)...(19): siRNA sense strand
aaugaggaccugguugaua

SEQ ID NO: 1591688 - RNA, 19 nt, Homo sapiens
  misc_RNA (1)...(19): siRNA sense strand
gagccauugaacuauauaa

SEQ ID NO: 1591689 - RNA, 19 nt, Homo sapiens
  misc_RNA (1)...(19): siRNA sense strand
gaggacgaucggcacuaua

SEQ ID NO: 1591690 - RNA, 19 nt, Homo sapiens
  misc_RNA (1)...(19): siRNA sense strand
ggacacacugguggucuug

SEQ ID NO: 1591691 - RNA, 19 nt, Homo sapiens
  misc_RNA (1)...(19): siRNA sense strand
aggacgaucggcacuauaa

SEQ ID NO: 1591692 - RNA, 19 nt, Homo sapiens
  misc_RNA (1)...(19): siRNA sense strand
gacgaucggcacuauaaca

SEQ ID NO: 1591693 - RNA, 19 nt, Homo sapiens
  misc_RNA (1)...(19): siRNA sense strand
auggaaacuuggacugaaa

SEQ ID NO: 1591694 - RNA, 19 nt, Homo sapiens
  misc_RNA (1)...(19): siRNA sense strand
caaauacaacuggaucaag

SEQ ID NO: 1591695 - RNA, 19 nt, Homo sapiens
  misc_RNA (1)...(19): siRNA sense strand
cucaugcuguuaccagaaa

SEQ ID NO: 1591696 - RNA, 19 nt, Homo sapiens
  misc_RNA (1)...(19): siRNA sense strand
gcucaugcuguuaccagaa

SEQ ID NO: 1591697 - RNA, 19 nt, Homo sapiens
  misc_RNA (1)...(19): siRNA sense strand
gaaugaggaccugguugau

SEQ ID NO: 1591698 - RNA, 19 nt, Homo sapiens
  misc_RNA (1)...(19): siRNA sense strand
aaaugaggcggaggaauau

SEQ ID NO: 1591699 - RNA, 19 nt, Homo sapiens
  misc_RNA (1)...(19): siRNA sense strand
ccagugguaacgcucauug

SEQ ID NO: 1591700 - RNA, 19 nt, Homo sapiens
  misc_RNA (1)...(19): siRNA sense strand
gcuguaaaauuucuaaugc

SEQ ID NO: 1591701 - RNA, 19 nt, Homo sapiens
  misc_RNA (1)...(19): siRNA sense strand
gacccaggacagcuucuga

SEQ ID NO: 1591702 - RNA, 19 nt, Homo sapiens
  misc_RNA (1)...(19): siRNA sense strand
caaguacaacacggaagaa

SEQ ID NO: 1591703 - RNA, 19 nt, Homo sapiens
  misc_RNA (1)...(19): siRNA sense strand
gcugaagcaagacagauag

SEQ ID NO: 1591704 - RNA, 19 nt, Homo sapiens
  misc_RNA (1)...(19): siRNA sense strand
uaccggcucuccaaguaca

SEQ ID NO: 1591705 - RNA, 19 nt, Homo sapiens
  misc_RNA (1)...(19): siRNA sense strand
ucucugugcuucuguuugc

SEQ ID NO: 1591706 - RNA, 19 nt, Homo sapiens
  misc_RNA (1)...(19): siRNA sense strand
cuaaacagagccauugaac

SEQ ID NO: 1591707 - RNA, 19 nt, Homo sapiens
  misc_RNA (1)...(19): siRNA sense strand
aauuugaugggaagaauga

SEQ ID NO: 1591708 - RNA, 19 nt, Homo sapiens
  misc_RNA (1)...(19): siRNA sense strand
ugauaaagagaaaggaaag

SEQ ID NO: 1591709 - RNA, 19 nt, Homo sapiens
  misc_RNA (1)...(19): siRNA sense strand
ggucuugaacagguugaaa

SEQ ID NO: 1591710 - RNA, 19 nt, Homo sapiens
  misc_RNA (1)...(19): siRNA sense strand
ugggcaggcuuggcugaaa

SEQ ID NO: 1591711 - RNA, 19 nt, Homo sapiens
  misc_RNA (1)...(19): siRNA sense strand
aaggaaaggaaguaccauu

SEQ ID NO: 1591712 - RNA, 19 nt, Homo sapiens
  misc_RNA (1)...(19): siRNA sense strand
caacaaagcuuagggauuu

SEQ ID NO: 1591713 - RNA, 19 nt, Homo sapiens
  misc_RNA (1)...(19): siRNA sense strand
aaacaucucugaucucaaa

SEQ ID NO: 1591714 - RNA, 19 nt, Homo sapiens
  misc_RNA (1)...(19): siRNA sense strand
gaacugauacgcuagaauu

SEQ ID NO: 1591715 - RNA, 19 nt, Homo sapiens
  misc_RNA (1)...(19): siRNA sense strand
caaacuggaugucucauuu

SEQ ID NO: 1591716 - RNA, 19 nt, Homo sapiens
  misc_RNA (1)...(19): siRNA sense strand
gaauuggacugccauauca

SEQ ID NO: 1591717 - RNA, 19 nt, Homo sapiens
  misc_RNA (1)...(19): siRNA sense strand
guaaacaucucugaucuca

SEQ ID NO: 1591718 - RNA, 19 nt, Homo sapiens
  misc_RNA (1)...(19): siRNA sense strand
uaagaagguuucagaguug

SEQ ID NO: 1591719 - RNA, 19 nt, Homo sapiens
  misc_RNA (1)...(19): siRNA sense strand
caacaacaaugugcugauu

SEQ ID NO: 1591720 - RNA, 19 nt, Homo sapiens
  misc_RNA (1)...(19): siRNA sense strand
cccaaugccuucuauuaua

SEQ ID NO: 1591721 - RNA, 19 nt, Homo sapiens
  misc_RNA (1)...(19): siRNA sense strand
gcauucaaguguauauuug

SEQ ID NO: 1591722 - RNA, 19 nt, Homo sapiens
  misc_RNA (1)...(19): siRNA sense strand
acaaugugcugauuaagaa

SEQ ID NO: 1591723 - RNA, 19 nt, Homo sapiens
  misc_RNA (1)...(19): siRNA sense strand
uaacaucgauaucaaaguc

SEQ ID NO: 1591724 - RNA, 19 nt, Homo sapiens
  misc_RNA (1)...(19): siRNA sense strand
uuaagaagguuucagaguu

SEQ ID NO: 1591725 - RNA, 19 nt, Homo sapiens
  misc_RNA (1)...(19): siRNA sense strand
acaacaaugugcugauuaa

SEQ ID NO: 1591726 - RNA, 19 nt, Homo sapiens
  misc_RNA (1)...(19): siRNA sense strand
ucugaucucuuacuaauga

SEQ ID NO: 1591727 - RNA, 19 nt, Homo sapiens
  misc_RNA (1)...(19): siRNA sense strand
acugugagcucccaccuua

SEQ ID NO: 1591728 - RNA, 19 nt, Homo sapiens
  misc_RNA (1)...(19): siRNA sense strand
gaaaagugcuacaaagaga

SEQ ID NO: 1591729 - RNA, 19 nt, Homo sapiens
  misc_RNA (1)...(19): siRNA sense strand
aagcagcgauuccucagua

SEQ ID NO: 1591730 - RNA, 19 nt, Homo sapiens
  misc_RNA (1)...(19): siRNA sense strand
gauacuuggugaccucauu

SEQ ID NO: 1591731 - RNA, 19 nt, Homo sapiens
  misc_RNA (1)...(19): siRNA sense strand
ucaaagagcaugccagugu

SEQ ID NO: 1591732 - RNA, 19 nt, Homo sapiens
  misc_RNA (1)...(19): siRNA sense strand
gaggaaagcuuuguuugac

SEQ ID NO: 1591733 - RNA, 19 nt, Homo sapiens
  misc_RNA (1)...(19): siRNA sense strand
gaagcgguauaaucgagaa

SEQ ID NO: 1591734 - RNA, 19 nt, Homo sapiens
  misc_RNA (1)...(19): siRNA sense strand
ggagaaaauuuggagaaua

SEQ ID NO: 1591735 - RNA, 19 nt, Homo sapiens
  misc_RNA (1)...(19): siRNA sense strand
caacguguccugcucauuc

SEQ ID NO: 1591736 - RNA, 19 nt, Homo sapiens
  misc_RNA (1)...(19): siRNA sense strand
ucucugaucucaaauacug

SEQ ID NO: 1591737 - RNA, 19 nt, Homo sapiens
  misc_RNA (1)...(19): siRNA sense strand
cuggaugucucauuucaaa

SEQ ID NO: 1591738 - RNA, 19 nt, Homo sapiens
  misc_RNA (1)...(19): siRNA sense strand
ccauuaacaucgauaucaa

SEQ ID NO: 1591739 - RNA, 19 nt, Homo sapiens
  misc_RNA (1)...(19): siRNA sense strand
ggaugucucauuucaaaga

SEQ ID NO: 1591740 - RNA, 19 nt, Homo sapiens
  misc_RNA (1)...(19): siRNA sense strand
ccaaugccuucuauuauac

SEQ ID NO: 1591741 - RNA, 19 nt, Homo sapiens
  misc_RNA (1)...(19): siRNA sense strand
cacaaaagaugaacaaguu

SEQ ID NO: 1591742 - RNA, 19 nt, Homo sapiens
  misc_RNA (1)...(19): siRNA sense strand
gcaaacuggaugucucauu

SEQ ID NO: 1591743 - RNA, 19 nt, Homo sapiens
  misc_RNA (1)...(19): siRNA sense strand
gaaaucccaaugccuucua

SEQ ID NO: 1591744 - RNA, 19 nt, Homo sapiens
  misc_RNA (1)...(19): siRNA sense strand
uaaccgaauuccauuacug

SEQ ID NO: 1591745 - RNA, 19 nt, Homo sapiens
  misc_RNA (1)...(19): siRNA sense strand
caacuggggucaauguaaa

SEQ ID NO: 1591746 - RNA, 19 nt, Homo sapiens
  misc_RNA (1)...(19): siRNA sense strand
gaugacagacuauccaaca

SEQ ID NO: 1591747 - RNA, 19 nt, Homo sapiens
  misc_RNA (1)...(19): siRNA sense strand
gaacaagaauacaaaagag

SEQ ID NO: 1591748 - RNA, 19 nt, Homo sapiens
  misc_RNA (1)...(19): siRNA sense strand
gagaaaauuuggagaauac

SEQ ID NO: 1591749 - RNA, 19 nt, Homo sapiens
  misc_RNA (1)...(19): siRNA sense strand
ugaggaaagcuuuguuuga

SEQ ID NO: 1591750 - RNA, 19 nt, Homo sapiens
  misc_RNA (1)...(19): siRNA sense strand
ccacacaccauguccagaa

SEQ ID NO: 1591751 - RNA, 19 nt, Homo sapiens
  misc_RNA (1)...(19): siRNA sense strand
aaagauaaccgaauuccau

SEQ ID NO: 1591752 - RNA, 19 nt, Homo sapiens
  misc_RNA (1)...(19): siRNA sense strand
ggcauucaaguguauauuu

SEQ ID NO: 1591753 - RNA, 19 nt, Homo sapiens
  misc_RNA (1)...(19): siRNA sense strand
gacagacuauccaacaaag

SEQ ID NO: 1591754 - RNA, 19 nt, Homo sapiens
  misc_RNA (1)...(19): siRNA sense strand
gaauacaauggcagccuuu

SEQ ID NO: 1591755 - RNA, 19 nt, Homo sapiens
  misc_RNA (1)...(19): siRNA sense strand
ugacagacuauccaacaaa

SEQ ID NO: 1591756 - RNA, 19 nt, Homo sapiens
  misc_RNA (1)...(19): siRNA sense strand
guauaaucgagaacacuua

SEQ ID NO: 1591757 - RNA, 19 nt, Homo sapiens
  misc_RNA (1)...(19): siRNA sense strand
ccuauacucuucagucuac

SEQ ID NO: 1591758 - RNA, 19 nt, Homo sapiens
  misc_RNA (1)...(19): siRNA sense strand
ggacugccauaucacaaaa

SEQ ID NO: 1591759 - RNA, 19 nt, Homo sapiens
  misc_RNA (1)...(19): siRNA sense strand
caacuggggugaugacaga

SEQ ID NO: 1591760 - RNA, 19 nt, Homo sapiens
  misc_RNA (1)...(19): siRNA sense strand
ccuaacugcucgaggcauu

SEQ ID NO: 1591761 - RNA, 19 nt, Homo sapiens
  misc_RNA (1)...(19): siRNA sense strand
ugaugagaaucuaaagaga

SEQ ID NO: 1591762 - RNA, 19 nt, Homo sapiens
  misc_RNA (1)...(19): siRNA sense strand
guuaaaaucggaacugaua

SEQ ID NO: 1591763 - RNA, 19 nt, Homo sapiens
  misc_RNA (1)...(19): siRNA sense strand
ccaacaaagcuuagggauu

SEQ ID NO: 1591764 - RNA, 19 nt, Homo sapiens
  misc_RNA (1)...(19): siRNA sense strand
ucaguaaacacaucucuca

SEQ ID NO: 1591765 - RNA, 19 nt, Homo sapiens
  misc_RNA (1)...(19): siRNA sense strand
gcucgaggcauucaagugu

SEQ ID NO: 1591766 - RNA, 19 nt, Homo sapiens
  misc_RNA (1)...(19): siRNA sense strand
guccagaagucaaaaguuu

SEQ ID NO: 1591767 - RNA, 19 nt, Homo sapiens
  misc_RNA (1)...(19): siRNA sense strand
gaauuccauuacugaagga

SEQ ID NO: 1591768 - RNA, 19 nt, Homo sapiens
  misc_RNA (1)...(19): siRNA sense strand
ucucuacgcuaggaggaua

SEQ ID NO: 1591769 - RNA, 19 nt, Homo sapiens
  misc_RNA (1)...(19): siRNA sense strand
gcuuucugaucucuuacua

SEQ ID NO: 1591770 - RNA, 19 nt, Homo sapiens
  misc_RNA (1)...(19): siRNA sense strand
uuucuucacuggccucuug

SEQ ID NO: 1591771 - RNA, 19 nt, Homo sapiens
  misc_RNA (1)...(19): siRNA sense strand
ccucauucuuguugcuuaa

SEQ ID NO: 1591772 - RNA, 19 nt, Homo sapiens
  misc_RNA (1)...(19): siRNA sense strand
guuguagugucacaugaug

SEQ ID NO: 1591773 - RNA, 19 nt, Homo sapiens
  misc_RNA (1)...(19): siRNA sense strand
gacuauccaacaaagcuua

SEQ ID NO: 1591774 - RNA, 19 nt, Homo sapiens
  misc_RNA (1)...(19): siRNA sense strand
agagaaagaagcagcgauu

SEQ ID NO: 1591775 - RNA, 19 nt, Homo sapiens
  misc_RNA (1)...(19): siRNA sense strand
gguauaaucgagaacacuu

SEQ ID NO: 1591776 - RNA, 19 nt, Homo sapiens
  misc_RNA (1)...(19): siRNA sense strand
caucucugaucucaaauac

SEQ ID NO: 1591777 - RNA, 19 nt, Homo sapiens
  misc_RNA (1)...(19): siRNA sense strand
gcagcgauuccucaguaaa

SEQ ID NO: 1591778 - RNA, 19 nt, Homo sapiens
  misc_RNA (1)...(19): siRNA sense strand
cuggcuuucugaucucuua

SEQ ID NO: 1591779 - RNA, 19 nt, Homo sapiens
  misc_RNA (1)...(19): siRNA sense strand
gauaucaaagucaacaaca

SEQ ID NO: 1591780 - RNA, 19 nt, Homo sapiens
  misc_RNA (1)...(19): siRNA sense strand
gauaaccgaauuccauuac

SEQ ID NO: 1591781 - RNA, 19 nt, Homo sapiens
  misc_RNA (1)...(19): siRNA sense strand
cugauacgcuagaauugga

SEQ ID NO: 1591782 - RNA, 19 nt, Homo sapiens
  misc_RNA (1)...(19): siRNA sense strand
gaaagaagcagcgauuccu

SEQ ID NO: 1591783 - RNA, 19 nt, Homo sapiens
  misc_RNA (1)...(19): siRNA sense strand
cuacaaagagaauucagau

SEQ ID NO: 1591784 - RNA, 19 nt, Homo sapiens
  misc_RNA (1)...(19): siRNA sense strand
caaagucaacaacaaugug

SEQ ID NO: 1591785 - RNA, 19 nt, Homo sapiens
  misc_RNA (1)...(19): siRNA sense strand
ucacaugaugagaaucuaa

SEQ ID NO: 1591786 - RNA, 19 nt, Homo sapiens
  misc_RNA (1)...(19): siRNA sense strand
uuuccuaacacucccauua

SEQ ID NO: 1591787 - RNA, 19 nt, Homo sapiens
  misc_RNA (1)...(19): siRNA sense strand
ggugaccucauucuuguug

SEQ ID NO: 1591788 - RNA, 19 nt, Homo sapiens
  misc_RNA (1)...(19): siRNA sense strand
caaguuguagugucacaug

SEQ ID NO: 1591789 - RNA, 19 nt, Homo sapiens
  misc_RNA (1)...(19): siRNA sense strand
ucaucuggcuuucugaucu

SEQ ID NO: 1591790 - RNA, 19 nt, Homo sapiens
  misc_RNA (1)...(19): siRNA sense strand
gcuacaaagagaauucaga

SEQ ID NO: 1591791 - RNA, 19 nt, Homo sapiens
  misc_RNA (1)...(19): siRNA sense strand
ugauuaagaagguuucaga

SEQ ID NO: 1591792 - RNA, 19 nt, Homo sapiens
  misc_RNA (1)...(19): siRNA sense strand
uuugaggccuuuccuaaca

SEQ ID NO: 1591793 - RNA, 19 nt, Homo sapiens
  misc_RNA (1)...(19): siRNA sense strand
gagaaucuaaagagagcaa

SEQ ID NO: 1591794 - RNA, 19 nt, Homo sapiens
  misc_RNA (1)...(19): siRNA sense strand
agauauuccuauacucuuc

SEQ ID NO: 1591795 - RNA, 19 nt, Homo sapiens
  misc_RNA (1)...(19): siRNA sense strand
caccuuaccuuggcaaacu

SEQ ID NO: 1591796 - RNA, 19 nt, Homo sapiens
  misc_RNA (1)...(19): siRNA sense strand
ucaaagucaacaacaaugu

SEQ ID NO: 1591797 - RNA, 19 nt, Homo sapiens
  misc_RNA (1)...(19): siRNA sense strand
agaauuggacugccauauc

SEQ ID NO: 1591798 - RNA, 19 nt, Homo sapiens
  misc_RNA (1)...(19): siRNA sense strand
ucgaggcauucaaguguau

SEQ ID NO: 1591799 - RNA, 19 nt, Homo sapiens
  misc_RNA (1)...(19): siRNA sense strand
ucagauauuccuauacucu

SEQ ID NO: 1591800 - RNA, 19 nt, Homo sapiens
  misc_RNA (1)...(19): siRNA sense strand
aacaaugugcugauuaaga

SEQ ID NO: 1591801 - RNA, 19 nt, Homo sapiens
  misc_RNA (1)...(19): siRNA sense strand
aacaacaaugugcugauua

SEQ ID NO: 1591802 - RNA, 19 nt, Homo sapiens
  misc_RNA (1)...(19): siRNA sense strand
agauaaccgaauuccauua

SEQ ID NO: 1591803 - RNA, 19 nt, Homo sapiens
  misc_RNA (1)...(19): siRNA sense strand
gagaaagaagcagcgauuc

SEQ ID NO: 1591804 - RNA, 19 nt, Homo sapiens
  misc_RNA (1)...(19): siRNA sense strand
cacaugaugagaaucuaaa

SEQ ID NO: 1591805 - RNA, 19 nt, Homo sapiens
  misc_RNA (1)...(19): siRNA sense strand
aaugaggaaagcuuuguuu

SEQ ID NO: 1591806 - RNA, 19 nt, Homo sapiens
  misc_RNA (1)...(19): siRNA sense strand
uaaucgagaacacuuaaca

SEQ ID NO: 1591807 - RNA, 19 nt, Homo sapiens
  misc_RNA (1)...(19): siRNA sense strand
aggaaaagauaaccgaauu

SEQ ID NO: 1591808 - RNA, 19 nt, Homo sapiens
  misc_RNA (1)...(19): siRNA sense strand
gcaugccagugugaaggaa

SEQ ID NO: 1591809 - RNA, 19 nt, Homo sapiens
  misc_RNA (1)...(19): siRNA sense strand
gaugucucauuucaaagag

SEQ ID NO: 1591810 - RNA, 19 nt, Homo sapiens
  misc_RNA (1)...(19): siRNA sense strand
gcaacuggggucaauguaa

SEQ ID NO: 1591811 - RNA, 19 nt, Homo sapiens
  misc_RNA (1)...(19): siRNA sense strand
ucccaaugccuucuauuau

SEQ ID NO: 1591812 - RNA, 19 nt, Homo sapiens
  misc_RNA (1)...(19): siRNA sense strand
ggagacaccugggaaauga

SEQ ID NO: 1591813 - RNA, 19 nt, Homo sapiens
  misc_RNA (1)...(19): siRNA sense strand
gcaaggcaguugugagcaa

SEQ ID NO: 1591814 - RNA, 19 nt, Homo sapiens
  misc_RNA (1)...(19): siRNA sense strand
ucagagauauuuacaagca

SEQ ID NO: 1591815 - RNA, 19 nt, Homo sapiens
  misc_RNA (1)...(19): siRNA sense strand
caaaccaacugacauuuac

SEQ ID NO: 1591816 - RNA, 19 nt, Homo sapiens
  misc_RNA (1)...(19): siRNA sense strand
ucaaaccaacugacauuua

SEQ ID NO: 1591817 - RNA, 19 nt, Homo sapiens
  misc_RNA (1)...(19): siRNA sense strand
ucccagagcugacauuuca

SEQ ID NO: 1591818 - RNA, 19 nt, Homo sapiens
  misc_RNA (1)...(19): siRNA sense strand
gagacugugugaggauaua

SEQ ID NO: 1591819 - RNA, 19 nt, Homo sapiens
  misc_RNA (1)...(19): siRNA sense strand
gcagccaucucucuugaca

SEQ ID NO: 1591820 - RNA, 19 nt, Homo sapiens
  misc_RNA (1)...(19): siRNA sense strand
acaccucaauuucuuggua

SEQ ID NO: 1591821 - RNA, 19 nt, Homo sapiens
  misc_RNA (1)...(19): siRNA sense strand
ugucagagauauuuacaag

SEQ ID NO: 1591822 - RNA, 19 nt, Homo sapiens
  misc_RNA (1)...(19): siRNA sense strand
gaaaugaaggcacuagacu

SEQ ID NO: 1591823 - RNA, 19 nt, Homo sapiens
  misc_RNA (1)...(19): siRNA sense strand
uaacucuacaccucaauuu

SEQ ID NO: 1591824 - RNA, 19 nt, Homo sapiens
  misc_RNA (1)...(19): siRNA sense strand
guucaaaccaacugacauu

SEQ ID NO: 1591825 - RNA, 19 nt, Homo sapiens
  misc_RNA (1)...(19): siRNA sense strand
cacccaacaucccaacaaa

SEQ ID NO: 1591826 - RNA, 19 nt, Homo sapiens
  misc_RNA (1)...(19): siRNA sense strand
aagcagccaucucucuuga

SEQ ID NO: 1591827 - RNA, 19 nt, Homo sapiens
  misc_RNA (1)...(19): siRNA sense strand
gugcagccguucaaaccaa

SEQ ID NO: 1591828 - RNA, 19 nt, Homo sapiens
  misc_RNA (1)...(19): siRNA sense strand
acugagggcugcuuuguca

SEQ ID NO: 1591829 - RNA, 19 nt, Homo sapiens
  misc_RNA (1)...(19): siRNA sense strand
ucaggucccucucuacagu

SEQ ID NO: 1591830 - RNA, 19 nt, Homo sapiens
  misc_RNA (1)...(19): siRNA sense strand
ucaauuucuugguauggaa

SEQ ID NO: 1591831 - RNA, 19 nt, Homo sapiens
  misc_RNA (1)...(19): siRNA sense strand
caacacacacauacacaca

SEQ ID NO: 1591832 - RNA, 19 nt, Homo sapiens
  misc_RNA (1)...(19): siRNA sense strand
ccagaggccuugggucauc

SEQ ID NO: 1591833 - RNA, 19 nt, Homo sapiens
  misc_RNA (1)...(19): siRNA sense strand
caaagugagaccugucaga

SEQ ID NO: 1591834 - RNA, 19 nt, Homo sapiens
  misc_RNA (1)...(19): siRNA sense strand
agugagaccugucagagau

SEQ ID NO: 1591835 - RNA, 19 nt, Homo sapiens
  misc_RNA (1)...(19): siRNA sense strand
acacacacauacacacaca

SEQ ID NO: 1591836 - RNA, 19 nt, Homo sapiens
  misc_RNA (1)...(19): siRNA sense strand
ggaugguuguggagacugu

SEQ ID NO: 1591837 - RNA, 19 nt, Homo sapiens
  misc_RNA (1)...(19): siRNA sense strand
ggaaaugaaggcacuagac

SEQ ID NO: 1591838 - RNA, 19 nt, Homo sapiens
  misc_RNA (1)...(19): siRNA sense strand
gcaguugugagcaaguuau

SEQ ID NO: 1591839 - RNA, 19 nt, Homo sapiens
  misc_RNA (1)...(19): siRNA sense strand
gaugugugccaaagugaga

SEQ ID NO: 1591840 - RNA, 19 nt, Homo sapiens
  misc_RNA (1)...(19): siRNA sense strand
ccaguucugcucugacuug

SEQ ID NO: 1591841 - RNA, 19 nt, Homo sapiens
  misc_RNA (1)...(19): siRNA sense strand
ucauaacucuacaccucaa

SEQ ID NO: 1591842 - RNA, 19 nt, Homo sapiens
  misc_RNA (1)...(19): siRNA sense strand
ugagaccugucagagauau

SEQ ID NO: 1591843 - RNA, 19 nt, Homo sapiens
  misc_RNA (1)...(19): siRNA sense strand
gaccugucagagauauuua

SEQ ID NO: 1591844 - RNA, 19 nt, Homo sapiens
  misc_RNA (1)...(19): siRNA sense strand
guugugagcaaguuauuca

SEQ ID NO: 1591845 - RNA, 19 nt, Homo sapiens
  misc_RNA (1)...(19): siRNA sense strand
caccucaauuucuugguau

SEQ ID NO: 1591846 - RNA, 19 nt, Homo sapiens
  misc_RNA (1)...(19): siRNA sense strand
ugugagcaaguuauucaua

SEQ ID NO: 1591847 - RNA, 19 nt, Homo sapiens
  misc_RNA (1)...(19): siRNA sense strand
uggagacugugugaggaua

SEQ ID NO: 1591848 - RNA, 19 nt, Homo sapiens
  misc_RNA (1)...(19): siRNA sense strand
agaccugucagagauauuu

SEQ ID NO: 1591849 - RNA, 19 nt, Homo sapiens
  misc_RNA (1)...(19): siRNA sense strand
agccaucucucuugacauc

SEQ ID NO: 1591850 - RNA, 19 nt, Homo sapiens
  misc_RNA (1)...(19): siRNA sense strand
ccacccaacaucccaacaa

SEQ ID NO: 1591851 - RNA, 19 nt, Homo sapiens
  misc_RNA (1)...(19): siRNA sense strand
acugugcacuggcaucaug

SEQ ID NO: 1591852 - RNA, 19 nt, Homo sapiens
  misc_RNA (1)...(19): siRNA sense strand
ggagacugugugaggauau

SEQ ID NO: 1591853 - RNA, 19 nt, Homo sapiens
  misc_RNA (1)...(19): siRNA sense strand
gaagauggggauaaugaga

SEQ ID NO: 1591854 - RNA, 19 nt, Homo sapiens
  misc_RNA (1)...(19): siRNA sense strand
cuccagcucuccugauaca

SEQ ID NO: 1591855 - RNA, 19 nt, Homo sapiens
  misc_RNA (1)...(19): siRNA sense strand
gggaaaugaaggcacuaga

SEQ ID NO: 1591856 - RNA, 19 nt, Homo sapiens
  misc_RNA (1)...(19): siRNA sense strand
gugagaccugucagagaua

SEQ ID NO: 1591857 - RNA, 19 nt, Homo sapiens
  misc_RNA (1)...(19): siRNA sense strand
caucgcuguaucccaaaua

SEQ ID NO: 1591858 - RNA, 19 nt, Homo sapiens
  misc_RNA (1)...(19): siRNA sense strand
accuccagcucuccugaua

SEQ ID NO: 1591859 - RNA, 19 nt, Homo sapiens
  misc_RNA (1)...(19): siRNA sense strand
acacauacacacacaucug

SEQ ID NO: 1591860 - RNA, 19 nt, Homo sapiens
  misc_RNA (1)...(19): siRNA sense strand
ucucuacaguauacuccaa

SEQ ID NO: 1591861 - RNA, 19 nt, Homo sapiens
  misc_RNA (1)...(19): siRNA sense strand
acaagcagccaucucucuu

SEQ ID NO: 1591862 - RNA, 19 nt, Homo sapiens
  misc_RNA (1)...(19): siRNA sense strand
gcuguaucccaaauaaauc

SEQ ID NO: 1591863 - RNA, 19 nt, Homo sapiens
  misc_RNA (1)...(19): siRNA sense strand
cgcuguaucccaaauaaau

SEQ ID NO: 1591864 - RNA, 19 nt, Homo sapiens
  misc_RNA (1)...(19): siRNA sense strand
ggauuuaccuggagaguua

SEQ ID NO: 1591865 - RNA, 19 nt, Homo sapiens
  misc_RNA (1)...(19): siRNA sense strand
gaacaaugaugaucgagua

SEQ ID NO: 1591866 - RNA, 19 nt, Homo sapiens
  misc_RNA (1)...(19): siRNA sense strand
gcagaaaacugaacauuua

SEQ ID NO: 1591867 - RNA, 19 nt, Homo sapiens
  misc_RNA (1)...(19): siRNA sense strand
gaacagcacggauguauuu

SEQ ID NO: 1591868 - RNA, 19 nt, Homo sapiens
  misc_RNA (1)...(19): siRNA sense strand
gaaaucagaucauacagau

SEQ ID NO: 1591869 - RNA, 19 nt, Homo sapiens
  misc_RNA (1)...(19): siRNA sense strand
gaaauugacuuagaagaug

SEQ ID NO: 1591870 - RNA, 19 nt, Homo sapiens
  misc_RNA (1)...(19): siRNA sense strand
gauuauaacuccaacaaga

SEQ ID NO: 1591871 - RNA, 19 nt, Homo sapiens
  misc_RNA (1)...(19): siRNA sense strand
caacagaaguaccagguuu

SEQ ID NO: 1591872 - RNA, 19 nt, Homo sapiens
  misc_RNA (1)...(19): siRNA sense strand
gaaagagaauaccuggaaa

SEQ ID NO: 1591873 - RNA, 19 nt, Homo sapiens
  misc_RNA (1)...(19): siRNA sense strand
gaagacaugcucaacuaua

SEQ ID NO: 1591874 - RNA, 19 nt, Homo sapiens
  misc_RNA (1)...(19): siRNA sense strand
ugaaagaacucaagaaagg

SEQ ID NO: 1591875 - RNA, 19 nt, Homo sapiens
  misc_RNA (1)...(19): siRNA sense strand
gaagaagcauuuauauguc

SEQ ID NO: 1591876 - RNA, 19 nt, Homo sapiens
  misc_RNA (1)...(19): siRNA sense strand
caaagaagcaucauauuca

SEQ ID NO: 1591877 - RNA, 19 nt, Homo sapiens
  misc_RNA (1)...(19): siRNA sense strand
gugaagacaugcucaacua

SEQ ID NO: 1591878 - RNA, 19 nt, Homo sapiens
  misc_RNA (1)...(19): siRNA sense strand
gaacagguuuaucuucaau

SEQ ID NO: 1591879 - RNA, 19 nt, Homo sapiens
  misc_RNA (1)...(19): siRNA sense strand
agaauugagugcagaguua

SEQ ID NO: 1591880 - RNA, 19 nt, Homo sapiens
  misc_RNA (1)...(19): siRNA sense strand
ccagaaacuuguagaagaa

SEQ ID NO: 1591881 - RNA, 19 nt, Homo sapiens
  misc_RNA (1)...(19): siRNA sense strand
ggauguauuucaaagauug

SEQ ID NO: 1591882 - RNA, 19 nt, Homo sapiens
  misc_RNA (1)...(19): siRNA sense strand
caaagaauccugugggaaa

SEQ ID NO: 1591883 - RNA, 19 nt, Homo sapiens
  misc_RNA (1)...(19): siRNA sense strand
gaaauugacacucucagaa

SEQ ID NO: 1591884 - RNA, 19 nt, Homo sapiens
  misc_RNA (1)...(19): siRNA sense strand
caagaaaucuggucuaucc

SEQ ID NO: 1591885 - RNA, 19 nt, Homo sapiens
  misc_RNA (1)...(19): siRNA sense strand
ccagugaugugaaaccuaa

SEQ ID NO: 1591886 - RNA, 19 nt, Homo sapiens
  misc_RNA (1)...(19): siRNA sense strand
gcagaguccuucuucaaau

SEQ ID NO: 1591887 - RNA, 19 nt, Homo sapiens
  misc_RNA (1)...(19): siRNA sense strand
gaugaaagaacucaagaaa

SEQ ID NO: 1591888 - RNA, 19 nt, Homo sapiens
  misc_RNA (1)...(19): siRNA sense strand
ggagacagaagaucaguuu

SEQ ID NO: 1591889 - RNA, 19 nt, Homo sapiens
  misc_RNA (1)...(19): siRNA sense strand
uaagaucaguuucaucaga

SEQ ID NO: 1591890 - RNA, 19 nt, Homo sapiens
  misc_RNA (1)...(19): siRNA sense strand
caaauuuacugcccaggaa

SEQ ID NO: 1591891 - RNA, 19 nt, Homo sapiens
  misc_RNA (1)...(19): siRNA sense strand
gagagaagaugaaagaacu

SEQ ID NO: 1591892 - RNA, 19 nt, Homo sapiens
  misc_RNA (1)...(19): siRNA sense strand
ccaaagaccuauuaaacuc

SEQ ID NO: 1591893 - RNA, 19 nt, Homo sapiens
  misc_RNA (1)...(19): siRNA sense strand
ccaacaagauaauuaagga

SEQ ID NO: 1591894 - RNA, 19 nt, Homo sapiens
  misc_RNA (1)...(19): siRNA sense strand
caaugcaucuguuuauaug

SEQ ID NO: 1591895 - RNA, 19 nt, Homo sapiens
  misc_RNA (1)...(19): siRNA sense strand
gaaggaauucaaaggauuu

SEQ ID NO: 1591896 - RNA, 19 nt, Homo sapiens
  misc_RNA (1)...(19): siRNA sense strand
gaaguuuguuacaugcuuu

SEQ ID NO: 1591897 - RNA, 19 nt, Homo sapiens
  misc_RNA (1)...(19): siRNA sense strand
aaacaacacccuugaaaga

SEQ ID NO: 1591898 - RNA, 19 nt, Homo sapiens
  misc_RNA (1)...(19): siRNA sense strand
gcacggauguauuucaaag

SEQ ID NO: 1591899 - RNA, 19 nt, Homo sapiens
  misc_RNA (1)...(19): siRNA sense strand
guaaacaaccuccuucaga

SEQ ID NO: 1591900 - RNA, 19 nt, Homo sapiens
  misc_RNA (1)...(19): siRNA sense strand
ggaugcagaucaagagaug

SEQ ID NO: 1591901 - RNA, 19 nt, Homo sapiens
  misc_RNA (1)...(19): siRNA sense strand
guacaaggucaaauuauga

SEQ ID NO: 1591902 - RNA, 19 nt, Homo sapiens
  misc_RNA (1)...(19): siRNA sense strand
ggaaauugacuuagaagau

SEQ ID NO: 1591903 - RNA, 19 nt, Homo sapiens
  misc_RNA (1)...(19): siRNA sense strand
gcucccagguuucauuaaa

SEQ ID NO: 1591904 - RNA, 19 nt, Homo sapiens
  misc_RNA (1)...(19): siRNA sense strand
gcaaugcaucuguuuauau

SEQ ID NO: 1591905 - RNA, 19 nt, Homo sapiens
  misc_RNA (1)...(19): siRNA sense strand
gcagaguuauuacgcuuau

SEQ ID NO: 1591906 - RNA, 19 nt, Homo sapiens
  misc_RNA (1)...(19): siRNA sense strand
guacauuccuccucugcaa

SEQ ID NO: 1591907 - RNA, 19 nt, Homo sapiens
  misc_RNA (1)...(19): siRNA sense strand
guauggaaauugacuuaga

SEQ ID NO: 1591908 - RNA, 19 nt, Homo sapiens
  misc_RNA (1)...(19): siRNA sense strand
gaaaggaagaaacaguaaa

SEQ ID NO: 1591909 - RNA, 19 nt, Homo sapiens
  misc_RNA (1)...(19): siRNA sense strand
ggaacagguuuaucuucaa

SEQ ID NO: 1591910 - RNA, 19 nt, Homo sapiens
  misc_RNA (1)...(19): siRNA sense strand
guccuaagauugccaguga

SEQ ID NO: 1591911 - RNA, 19 nt, Homo sapiens
  misc_RNA (1)...(19): siRNA sense strand
ugaagucacucaguaaaga

SEQ ID NO: 1591912 - RNA, 19 nt, Homo sapiens
  misc_RNA (1)...(19): siRNA sense strand
caaugaugaucgaguacua

SEQ ID NO: 1591913 - RNA, 19 nt, Homo sapiens
  misc_RNA (1)...(19): siRNA sense strand
ugacuuagaagaugaugua

SEQ ID NO: 1591914 - RNA, 19 nt, Homo sapiens
  misc_RNA (1)...(19): siRNA sense strand
uuagagaaauggaagagaa

SEQ ID NO: 1591915 - RNA, 19 nt, Homo sapiens
  misc_RNA (1)...(19): siRNA sense strand
gagaguguuuggauuacaa

SEQ ID NO: 1591916 - RNA, 19 nt, Homo sapiens
  misc_RNA (1)...(19): siRNA sense strand
cuagagaguguuuggauua

SEQ ID NO: 1591917 - RNA, 19 nt, Homo sapiens
  misc_RNA (1)...(19): siRNA sense strand
ccacagaccuuugcucaag

SEQ ID NO: 1591918 - RNA, 19 nt, Homo sapiens
  misc_RNA (1)...(19): siRNA sense strand
cauggacucuacuacauuu

SEQ ID NO: 1591919 - RNA, 19 nt, Homo sapiens
  misc_RNA (1)...(19): siRNA sense strand
cauuguaucugaucuugaa

SEQ ID NO: 1591920 - RNA, 19 nt, Homo sapiens
  misc_RNA (1)...(19): siRNA sense strand
ggaggaaucuacaaguucu

SEQ ID NO: 1591921 - RNA, 19 nt, Homo sapiens
  misc_RNA (1)...(19): siRNA sense strand
ccagcaaguucuacuaguu

SEQ ID NO: 1591922 - RNA, 19 nt, Homo sapiens
  misc_RNA (1)...(19): siRNA sense strand
uugcagaggucaagacaaa

SEQ ID NO: 1591923 - RNA, 19 nt, Homo sapiens
  misc_RNA (1)...(19): siRNA sense strand
uuauuacgcuuaucucuga

SEQ ID NO: 1591924 - RNA, 19 nt, Homo sapiens
  misc_RNA (1)...(19): siRNA sense strand
gaagaucaguuucaaaauc

SEQ ID NO: 1591925 - RNA, 19 nt, Homo sapiens
  misc_RNA (1)...(19): siRNA sense strand
ugacacaaauauucugaug

SEQ ID NO: 1591926 - RNA, 19 nt, Homo sapiens
  misc_RNA (1)...(19): siRNA sense strand
ugaaagagagcuauaagga

SEQ ID NO: 1591927 - RNA, 19 nt, Homo sapiens
  misc_RNA (1)...(19): siRNA sense strand
gacagaagaucaguuucaa

SEQ ID NO: 1591928 - RNA, 19 nt, Homo sapiens
  misc_RNA (1)...(19): siRNA sense strand
gcucugacuacuucaaaua

SEQ ID NO: 1591929 - RNA, 19 nt, Homo sapiens
  misc_RNA (1)...(19): siRNA sense strand
gaguauggaaauugacuua

SEQ ID NO: 1591930 - RNA, 19 nt, Homo sapiens
  misc_RNA (1)...(19): siRNA sense strand
gaagcaucauauucaaaug

SEQ ID NO: 1591931 - RNA, 19 nt, Homo sapiens
  misc_RNA (1)...(19): siRNA sense strand
ccaggaaauuuaugauugu

SEQ ID NO: 1591932 - RNA, 19 nt, Homo sapiens
  misc_RNA (1)...(19): siRNA sense strand
cuaauaaggcaguggauuu

SEQ ID NO: 1591933 - RNA, 19 nt, Homo sapiens
  misc_RNA (1)...(19): siRNA sense strand
gcagaaacaacacccuuga

SEQ ID NO: 1591934 - RNA, 19 nt, Homo sapiens
  misc_RNA (1)...(19): siRNA sense strand
gauaaguggugugaaguca

SEQ ID NO: 1591935 - RNA, 19 nt, Homo sapiens
  misc_RNA (1)...(19): siRNA sense strand
guucaugaguggaaacgaa

SEQ ID NO: 1591936 - RNA, 19 nt, Homo sapiens
  misc_RNA (1)...(19): siRNA sense strand
ucaaagaagcaucauauuc

SEQ ID NO: 1591937 - RNA, 19 nt, Homo sapiens
  misc_RNA (1)...(19): siRNA sense strand
cagcaggcaucaagaaauc

SEQ ID NO: 1591938 - RNA, 19 nt, Homo sapiens
  misc_RNA (1)...(19): siRNA sense strand
ucaguacaaggucaaauua

SEQ ID NO: 1591939 - RNA, 19 nt, Homo sapiens
  misc_RNA (1)...(19): siRNA sense strand
gaaacaacacccuugaaag

SEQ ID NO: 1591940 - RNA, 19 nt, Homo sapiens
  misc_RNA (1)...(19): siRNA sense strand
gcaaauaauacuucagaca

SEQ ID NO: 1591941 - RNA, 19 nt, Homo sapiens
  misc_RNA (1)...(19): siRNA sense strand
gacaaggacugaaaagauu

SEQ ID NO: 1591942 - RNA, 19 nt, Homo sapiens
  misc_RNA (1)...(19): siRNA sense strand
gaaaacacagugacuaaaa

SEQ ID NO: 1591943 - RNA, 19 nt, Homo sapiens
  misc_RNA (1)...(19): siRNA sense strand
agacaaaacuuaagccaaa

SEQ ID NO: 1591944 - RNA, 19 nt, Homo sapiens
  misc_RNA (1)...(19): siRNA sense strand
caucagccuuguauuccua

SEQ ID NO: 1591945 - RNA, 19 nt, Homo sapiens
  misc_RNA (1)...(19): siRNA sense strand
gagcaagcuugaccaugga

SEQ ID NO: 1591946 - RNA, 19 nt, Homo sapiens
  misc_RNA (1)...(19): siRNA sense strand
cccaggaaauuuaugauug

SEQ ID NO: 1591947 - RNA, 19 nt, Homo sapiens
  misc_RNA (1)...(19): siRNA sense strand
gaccuuugcucaaguaaac

SEQ ID NO: 1591948 - RNA, 19 nt, Homo sapiens
  misc_RNA (1)...(19): siRNA sense strand
aaacauugguuggcuguau

SEQ ID NO: 1591949 - RNA, 19 nt, Homo sapiens
  misc_RNA (1)...(19): siRNA sense strand
cauuauggauugagugaug

SEQ ID NO: 1591950 - RNA, 19 nt, Homo sapiens
  misc_RNA (1)...(19): siRNA sense strand
guguagacuuuaaaccuaa

SEQ ID NO: 1591951 - RNA, 19 nt, Homo sapiens
  misc_RNA (1)...(19): siRNA sense strand
gggauggugugaagacaug

SEQ ID NO: 1591952 - RNA, 19 nt, Homo sapiens
  misc_RNA (1)...(19): siRNA sense strand
uuacugcccaggaaauuua

SEQ ID NO: 1591953 - RNA, 19 nt, Homo sapiens
  misc_RNA (1)...(19): siRNA sense strand
ucuagaaguuuguuacaug

SEQ ID NO: 1591954 - RNA, 19 nt, Homo sapiens
  misc_RNA (1)...(19): siRNA sense strand
auaauucccugggucguua

SEQ ID NO: 1591955 - RNA, 19 nt, Homo sapiens
  misc_RNA (1)...(19): siRNA sense strand
gaagacaacagaaguacca

SEQ ID NO: 1591956 - RNA, 19 nt, Homo sapiens
  misc_RNA (1)...(19): siRNA sense strand
uccagaaacuuguagaaga

SEQ ID NO: 1591957 - RNA, 19 nt, Homo sapiens
  misc_RNA (1)...(19): siRNA sense strand
cagcacggauguauuucaa

SEQ ID NO: 1591958 - RNA, 19 nt, Homo sapiens
  misc_RNA (1)...(19): siRNA sense strand
gauugaguguagaaauuga

SEQ ID NO: 1591959 - RNA, 19 nt, Homo sapiens
  misc_RNA (1)...(19): siRNA sense strand
ugcaagagcuagaucguau

SEQ ID NO: 1591960 - RNA, 19 nt, Homo sapiens
  misc_RNA (1)...(19): siRNA sense strand
gcagauaguagaagagcuu

SEQ ID NO: 1591961 - RNA, 19 nt, Homo sapiens
  misc_RNA (1)...(19): siRNA sense strand
agaaagagaauaccuggaa

SEQ ID NO: 1591962 - RNA, 19 nt, Homo sapiens
  misc_RNA (1)...(19): siRNA sense strand
acaacacccuugaaagaga

SEQ ID NO: 1591963 - RNA, 19 nt, Homo sapiens
  misc_RNA (1)...(19): siRNA sense strand
caaccuccuucagacauuu

SEQ ID NO: 1591964 - RNA, 19 nt, Homo sapiens
  misc_RNA (1)...(19): siRNA sense strand
gaauaugucuggagaaaca

SEQ ID NO: 1591965 - RNA, 19 nt, Homo sapiens
  misc_RNA (1)...(19): siRNA sense strand
ggagaaacaucauccuuau

SEQ ID NO: 1591966 - RNA, 19 nt, Homo sapiens
  misc_RNA (1)...(19): siRNA sense strand
gauaugcuguggugcuuaa

SEQ ID NO: 1591967 - RNA, 19 nt, Homo sapiens
  misc_RNA (1)...(19): siRNA sense strand
gagauaaguuggagacgau

SEQ ID NO: 1591968 - RNA, 19 nt, Homo sapiens
  misc_RNA (1)...(19): siRNA sense strand
gaauggaggagauaaguug

SEQ ID NO: 1591969 - RNA, 19 nt, Homo sapiens
  misc_RNA (1)...(19): siRNA sense strand
agaaugaugucuaugaaug

SEQ ID NO: 1591970 - RNA, 19 nt, Homo sapiens
  misc_RNA (1)...(19): siRNA sense strand
gacauucgcccugauauaa

SEQ ID NO: 1591971 - RNA, 19 nt, Homo sapiens
  misc_RNA (1)...(19): siRNA sense strand
ccagaaugaugucuaugaa

SEQ ID NO: 1591972 - RNA, 19 nt, Homo sapiens
  misc_RNA (1)...(19): siRNA sense strand
ggaguacgcuagacuuguc

SEQ ID NO: 1591973 - RNA, 19 nt, Homo sapiens
  misc_RNA (1)...(19): siRNA sense strand
ccacauucuucauugauug

SEQ ID NO: 1591974 - RNA, 19 nt, Homo sapiens
  misc_RNA (1)...(19): siRNA sense strand
gggagaauauccugguuuc

SEQ ID NO: 1591975 - RNA, 19 nt, Homo sapiens
  misc_RNA (1)...(19): siRNA sense strand
cuacggcucuuucugauca

SEQ ID NO: 1591976 - RNA, 19 nt, Homo sapiens
  misc_RNA (1)...(19): siRNA sense strand
gaguaccgcuggcacauca

SEQ ID NO: 1591977 - RNA, 19 nt, Homo sapiens
  misc_RNA (1)...(19): siRNA sense strand
caacuaccaccacuccuuu

SEQ ID NO: 1591978 - RNA, 19 nt, Homo sapiens
  misc_RNA (1)...(19): siRNA sense strand
cugagaaacuggugauguu

SEQ ID NO: 1591979 - RNA, 19 nt, Homo sapiens
  misc_RNA (1)...(19): siRNA sense strand
cgacauucgcccugauaua

SEQ ID NO: 1591980 - RNA, 19 nt, Homo sapiens
  misc_RNA (1)...(19): siRNA sense strand
caacuucaccacauucuuc

SEQ ID NO: 1591981 - RNA, 19 nt, Homo sapiens
  misc_RNA (1)...(19): siRNA sense strand
uggagaaacaucauccuua

SEQ ID NO: 1591982 - RNA, 19 nt, Homo sapiens
  misc_RNA (1)...(19): siRNA sense strand
ggugagggcuuccacaacu

SEQ ID NO: 1591983 - RNA, 19 nt, Homo sapiens
  misc_RNA (1)...(19): siRNA sense strand
cgauaucucuagcuccuau

SEQ ID NO: 1591984 - RNA, 19 nt, Homo sapiens
  misc_RNA (1)...(19): siRNA sense strand
ccuagaagcugagaaacug

SEQ ID NO: 1591985 - RNA, 19 nt, Homo sapiens
  misc_RNA (1)...(19): siRNA sense strand
ggagauggaaacuacaaga

SEQ ID NO: 1591986 - RNA, 19 nt, Homo sapiens
  misc_RNA (1)...(19): siRNA sense strand
gcaaacacccagcugucaa

SEQ ID NO: 1591987 - RNA, 19 nt, Homo sapiens
  misc_RNA (1)...(19): siRNA sense strand
caaacacccagcugucaaa

SEQ ID NO: 1591988 - RNA, 19 nt, Homo sapiens
  misc_RNA (1)...(19): siRNA sense strand
gauaucguccuuaugacaa

SEQ ID NO: 1591989 - RNA, 19 nt, Homo sapiens
  misc_RNA (1)...(19): siRNA sense strand
ucaccacauucuucauuga

SEQ ID NO: 1591990 - RNA, 19 nt, Homo sapiens
  misc_RNA (1)...(19): siRNA sense strand
ucggauaucguccuuauga

SEQ ID NO: 1591991 - RNA, 19 nt, Homo sapiens
  misc_RNA (1)...(19): siRNA sense strand
uugaauaugucuggagaaa

SEQ ID NO: 1591992 - RNA, 19 nt, Homo sapiens
  misc_RNA (1)...(19): siRNA sense strand
gugagggcuuccacaacua

SEQ ID NO: 1591993 - RNA, 19 nt, Homo sapiens
  misc_RNA (1)...(19): siRNA sense strand
ugaccuagaagcugagaaa

SEQ ID NO: 1591994 - RNA, 19 nt, Homo sapiens
  misc_RNA (1)...(19): siRNA sense strand
acacccagcugucaaagag

SEQ ID NO: 1591995 - RNA, 19 nt, Homo sapiens
  misc_RNA (1)...(19): siRNA sense strand
cagaggagguacuacaaac

SEQ ID NO: 1591996 - RNA, 19 nt, Homo sapiens
  misc_RNA (1)...(19): siRNA sense strand
gacgacauucgcccugaua

SEQ ID NO: 1591997 - RNA, 19 nt, Homo sapiens
  misc_RNA (1)...(19): siRNA sense strand
gaaccggagauggaaacua

SEQ ID NO: 1591998 - RNA, 19 nt, Homo sapiens
  misc_RNA (1)...(19): siRNA sense strand
ggauaucguccuuaugaca

SEQ ID NO: 1591999 - RNA, 19 nt, Homo sapiens
  misc_RNA (1)...(19): siRNA sense strand
gcgauaugcuguggugcuu

SEQ ID NO: 1592000 - RNA, 19 nt, Homo sapiens
  misc_RNA (1)...(19): siRNA sense strand
gagaaacaucauccuuaug

SEQ ID NO: 1592001 - RNA, 19 nt, Homo sapiens
  misc_RNA (1)...(19): siRNA sense strand
cuucggauaucguccuuau

SEQ ID NO: 1592002 - RNA, 19 nt, Homo sapiens
  misc_RNA (1)...(19): siRNA sense strand
ccacgcuugugcccuggua

SEQ ID NO: 1592003 - RNA, 19 nt, Homo sapiens
  misc_RNA (1)...(19): siRNA sense strand
ccagaggagguacuacaaa

SEQ ID NO: 1592004 - RNA, 19 nt, Homo sapiens
  misc_RNA (1)...(19): siRNA sense strand
cuacuuggaagacgacauu

SEQ ID NO: 1592005 - RNA, 19 nt, Homo sapiens
  misc_RNA (1)...(19): siRNA sense strand
ccaccgcucuuacaaagcu

SEQ ID NO: 1592006 - RNA, 19 nt, Homo sapiens
  misc_RNA (1)...(19): siRNA sense strand
ccuuaugacaagaacauua

SEQ ID NO: 1592007 - RNA, 19 nt, Homo sapiens
  misc_RNA (1)...(19): siRNA sense strand
uaaaagaaccggagaugga

SEQ ID NO: 1592008 - RNA, 19 nt, Homo sapiens
  misc_RNA (1)...(19): siRNA sense strand
gaaugaugucuaugaaugg

SEQ ID NO: 1592009 - RNA, 19 nt, Homo sapiens
  misc_RNA (1)...(19): siRNA sense strand
cacaucaacuucaccacau

SEQ ID NO: 1592010 - RNA, 19 nt, Homo sapiens
  misc_RNA (1)...(19): siRNA sense strand
cugcccaccucuucggaua

SEQ ID NO: 1592011 - RNA, 19 nt, Homo sapiens
  misc_RNA (1)...(19): siRNA sense strand
ccaccacuccuuucccuau

SEQ ID NO: 1592012 - RNA, 19 nt, Homo sapiens
  misc_RNA (1)...(19): siRNA sense strand
aaccggagauggaaacuac

SEQ ID NO: 1592013 - RNA, 19 nt, Homo sapiens
  misc_RNA (1)...(19): siRNA sense strand
caucuuggccaggauuaaa

SEQ ID NO: 1592014 - RNA, 19 nt, Homo sapiens
  misc_RNA (1)...(19): siRNA sense strand
ucacguggguuggcugcuu

SEQ ID NO: 1592015 - RNA, 19 nt, Homo sapiens
  misc_RNA (1)...(19): siRNA sense strand
gccacuuucuugcgauaug

SEQ ID NO: 1592016 - RNA, 19 nt, Homo sapiens
  misc_RNA (1)...(19): siRNA sense strand
uuaugucucugcuacacuu

SEQ ID NO: 1592017 - RNA, 19 nt, Homo sapiens
  misc_RNA (1)...(19): siRNA sense strand
ccaccuacaaggauaagga

SEQ ID NO: 1592018 - RNA, 19 nt, Homo sapiens
  misc_RNA (1)...(19): siRNA sense strand
gagaauauccugguuucac

SEQ ID NO: 1592019 - RNA, 19 nt, Homo sapiens
  misc_RNA (1)...(19): siRNA sense strand
gcagaauggaggagauaag

SEQ ID NO: 1592020 - RNA, 19 nt, Homo sapiens
  misc_RNA (1)...(19): siRNA sense strand
augcugauccucauaauuc

SEQ ID NO: 1592021 - RNA, 19 nt, Homo sapiens
  misc_RNA (1)...(19): siRNA sense strand
ccuaugaccggaagaaagu

SEQ ID NO: 1592022 - RNA, 19 nt, Homo sapiens
  misc_RNA (1)...(19): siRNA sense strand
acaucaacuucaccacauu

SEQ ID NO: 1592023 - RNA, 19 nt, Homo sapiens
  misc_RNA (1)...(19): siRNA sense strand
guucguugccacuuucuug

SEQ ID NO: 1592024 - RNA, 19 nt, Homo sapiens
  misc_RNA (1)...(19): siRNA sense strand
gcccugauauaaaagauga

SEQ ID NO: 1592025 - RNA, 19 nt, Homo sapiens
  misc_RNA (1)...(19): siRNA sense strand
gcugagaaacuggugaugu

SEQ ID NO: 1592026 - RNA, 19 nt, Homo sapiens
  misc_RNA (1)...(19): siRNA sense strand
gagauggaaacuacaagag

SEQ ID NO: 1592027 - RNA, 19 nt, Homo sapiens
  misc_RNA (1)...(19): siRNA sense strand
gccccaagguugaauaugu

SEQ ID NO: 1592028 - RNA, 19 nt, Homo sapiens
  misc_RNA (1)...(19): siRNA sense strand
guguguucguugccacuuu

SEQ ID NO: 1592029 - RNA, 19 nt, Homo sapiens
  misc_RNA (1)...(19): siRNA sense strand
cacaugcugauccucauaa

SEQ ID NO: 1592030 - RNA, 19 nt, Homo sapiens
  misc_RNA (1)...(19): siRNA sense strand
acacaugcugauccucaua

SEQ ID NO: 1592031 - RNA, 19 nt, Homo sapiens
  misc_RNA (1)...(19): siRNA sense strand
acacuugggagcccuguau

SEQ ID NO: 1592032 - RNA, 19 nt, Homo sapiens
  misc_RNA (1)...(19): siRNA sense strand
gcccaccucuucggauauc

SEQ ID NO: 1592033 - RNA, 19 nt, Homo sapiens
  misc_RNA (1)...(19): siRNA sense strand
acccagcugucaaagagaa

SEQ ID NO: 1592034 - RNA, 19 nt, Homo sapiens
  misc_RNA (1)...(19): siRNA sense strand
uccagaaugaugucuauga

SEQ ID NO: 1592035 - RNA, 19 nt, Homo sapiens
  misc_RNA (1)...(19): siRNA sense strand
caccacuccuuucccuaug

SEQ ID NO: 1592036 - RNA, 19 nt, Homo sapiens
  misc_RNA (1)...(19): siRNA sense strand
cagaaugaugucuaugaau

SEQ ID NO: 1592037 - RNA, 19 nt, Homo sapiens
  misc_RNA (1)...(19): siRNA sense strand
cauaacagcaggagcucau

SEQ ID NO: 1592038 - RNA, 19 nt, Homo sapiens
  misc_RNA (1)...(19): siRNA sense strand
agaaacacaugcugauccu

SEQ ID NO: 1592039 - RNA, 19 nt, Homo sapiens
  misc_RNA (1)...(19): siRNA sense strand
cagaauggaggagauaagu

SEQ ID NO: 1592040 - RNA, 19 nt, Homo sapiens
  misc_RNA (1)...(19): siRNA sense strand
agccaccgcucuuacaaag

SEQ ID NO: 1592041 - RNA, 19 nt, Homo sapiens
  misc_RNA (1)...(19): siRNA sense strand
cuucaccacauucuucauu

SEQ ID NO: 1592042 - RNA, 19 nt, Homo sapiens
  misc_RNA (1)...(19): siRNA sense strand
gaccccaccuacaaggaua

SEQ ID NO: 1592043 - RNA, 19 nt, Homo sapiens
  misc_RNA (1)...(19): siRNA sense strand
gggaaacgcuucaaucaga

SEQ ID NO: 1592044 - RNA, 19 nt, Homo sapiens
  misc_RNA (1)...(19): siRNA sense strand
ggaaagacccuauaagugu

SEQ ID NO: 1592045 - RNA, 19 nt, Homo sapiens
  misc_RNA (1)...(19): siRNA sense strand
ggagacaguuuccaucauu

SEQ ID NO: 1592046 - RNA, 19 nt, Homo sapiens
  misc_RNA (1)...(19): siRNA sense strand
gcucugaccucuuuaaaca

SEQ ID NO: 1592047 - RNA, 19 nt, Homo sapiens
  misc_RNA (1)...(19): siRNA sense strand
ggaaagauuuagacaaagu

SEQ ID NO: 1592048 - RNA, 19 nt, Homo sapiens
  misc_RNA (1)...(19): siRNA sense strand
ggaaaagccuuacaaaugu

SEQ ID NO: 1592049 - RNA, 19 nt, Homo sapiens
  misc_RNA (1)...(19): siRNA sense strand
gcacaguuccgccgaguuu

SEQ ID NO: 1592050 - RNA, 19 nt, Homo sapiens
  misc_RNA (1)...(19): siRNA sense strand
ggggaaaccugucauauuu

SEQ ID NO: 1592051 - RNA, 19 nt, Homo sapiens
  misc_RNA (1)...(19): siRNA sense strand
gcucugaccucuuuagaca

SEQ ID NO: 1592052 - RNA, 19 nt, Homo sapiens
  misc_RNA (1)...(19): siRNA sense strand
ucucagaugucaauaagaa

SEQ ID NO: 1592053 - RNA, 19 nt, Homo sapiens
  misc_RNA (1)...(19): siRNA sense strand
gggaacaagugcaagcaaa

SEQ ID NO: 1592054 - RNA, 19 nt, Homo sapiens
  misc_RNA (1)...(19): siRNA sense strand
gugcaacccucauuaaaca

SEQ ID NO: 1592055 - RNA, 19 nt, Homo sapiens
  misc_RNA (1)...(19): siRNA sense strand
gaaagaccuuauaaaugug

SEQ ID NO: 1592056 - RNA, 19 nt, Homo sapiens
  misc_RNA (1)...(19): siRNA sense strand
gcugaaaccucacaagucu

SEQ ID NO: 1592057 - RNA, 19 nt, Homo sapiens
  misc_RNA (1)...(19): siRNA sense strand
acaaagaguugauuccaau

SEQ ID NO: 1592058 - RNA, 19 nt, Homo sapiens
  misc_RNA (1)...(19): siRNA sense strand
gaaaguggaggaagacuca

SEQ ID NO: 1592059 - RNA, 19 nt, Homo sapiens
  misc_RNA (1)...(19): siRNA sense strand
gcagcuccaugaagaaaga

SEQ ID NO: 1592060 - RNA, 19 nt, Homo sapiens
  misc_RNA (1)...(19): siRNA sense strand
cgagagcacugcccagaga

SEQ ID NO: 1592061 - RNA, 19 nt, Homo sapiens
  misc_RNA (1)...(19): siRNA sense strand
caagcaaaguuuccacaug

SEQ ID NO: 1592062 - RNA, 19 nt, Homo sapiens
  misc_RNA (1)...(19): siRNA sense strand
gcagagagagugcgcagaa

SEQ ID NO: 1592063 - RNA, 19 nt, Homo sapiens
  misc_RNA (1)...(19): siRNA sense strand
acaacgcucugaccucuuu

SEQ ID NO: 1592064 - RNA, 19 nt, Homo sapiens
  misc_RNA (1)...(19): siRNA sense strand
agacaaaguacacaccuua

SEQ ID NO: 1592065 - RNA, 19 nt, Homo sapiens
  misc_RNA (1)...(19): siRNA sense strand
ggagaagcccuauggaugu

SEQ ID NO: 1592066 - RNA, 19 nt, Homo sapiens
  misc_RNA (1)...(19): siRNA sense strand
ugucauauuuccaaccuuu

SEQ ID NO: 1592067 - RNA, 19 nt, Homo sapiens
  misc_RNA (1)...(19): siRNA sense strand
caucagagacuacauaaag

SEQ ID NO: 1592068 - RNA, 19 nt, Homo sapiens
  misc_RNA (1)...(19): siRNA sense strand
gagaagcccuauggauguu

SEQ ID NO: 1592069 - RNA, 19 nt, Homo sapiens
  misc_RNA (1)...(19): siRNA sense strand
ggggaaagauuuagacaaa

SEQ ID NO: 1592070 - RNA, 19 nt, Homo sapiens
  misc_RNA (1)...(19): siRNA sense strand
gcagagaggcccacugaca

SEQ ID NO: 1592071 - RNA, 19 nt, Homo sapiens
  misc_RNA (1)...(19): siRNA sense strand
agaggcagcuccaugaaga

SEQ ID NO: 1592072 - RNA, 19 nt, Homo sapiens
  misc_RNA (1)...(19): siRNA sense strand
gggaaagacccuauaagug

SEQ ID NO: 1592073 - RNA, 19 nt, Homo sapiens
  misc_RNA (1)...(19): siRNA sense strand
gggaaaagccuuacaaaug

SEQ ID NO: 1592074 - RNA, 19 nt, Homo sapiens
  misc_RNA (1)...(19): siRNA sense strand
caccaaagaauucaucaaa

SEQ ID NO: 1592075 - RNA, 19 nt, Homo sapiens
  misc_RNA (1)...(19): siRNA sense strand
guacaccugucugaaaugu

SEQ ID NO: 1592076 - RNA, 19 nt, Homo sapiens
  misc_RNA (1)...(19): siRNA sense strand
caucaaaguacccacagua

SEQ ID NO: 1592077 - RNA, 19 nt, Homo sapiens
  misc_RNA (1)...(19): siRNA sense strand
cuaaaucgucaucaaagua

SEQ ID NO: 1592078 - RNA, 19 nt, Homo sapiens
  misc_RNA (1)...(19): siRNA sense strand
gcagaauucacaccuaaau

SEQ ID NO: 1592079 - RNA, 19 nt, Homo sapiens
  misc_RNA (1)...(19): siRNA sense strand
gaacaaagaguugauucca

SEQ ID NO: 1592080 - RNA, 19 nt, Homo sapiens
  misc_RNA (1)...(19): siRNA sense strand
guuccaaccuuguucuaug

SEQ ID NO: 1592081 - RNA, 19 nt, Homo sapiens
  misc_RNA (1)...(19): siRNA sense strand
cagaaggacucaacagcau

SEQ ID NO: 1592082 - RNA, 19 nt, Homo sapiens
  misc_RNA (1)...(19): siRNA sense strand
gcagaguggagaacaaaga

SEQ ID NO: 1592083 - RNA, 19 nt, Homo sapiens
  misc_RNA (1)...(19): siRNA sense strand
caaaguacccacaguagag

SEQ ID NO: 1592084 - RNA, 19 nt, Homo sapiens
  misc_RNA (1)...(19): siRNA sense strand
acagcgcucugaccucuuu

SEQ ID NO: 1592085 - RNA, 19 nt, Homo sapiens
  misc_RNA (1)...(19): siRNA sense strand
agacaucagagacuacaua

SEQ ID NO: 1592086 - RNA, 19 nt, Homo sapiens
  misc_RNA (1)...(19): siRNA sense strand
ggagggacuucugcagaga

SEQ ID NO: 1592087 - RNA, 19 nt, Homo sapiens
  misc_RNA (1)...(19): siRNA sense strand
aggcagaauucacaccuaa

SEQ ID NO: 1592088 - RNA, 19 nt, Homo sapiens
  misc_RNA (1)...(19): siRNA sense strand
gagacaguuuccaucauuc

SEQ ID NO: 1592089 - RNA, 19 nt, Homo sapiens
  misc_RNA (1)...(19): siRNA sense strand
gagugcaacccucauuaaa

SEQ ID NO: 1592090 - RNA, 19 nt, Homo sapiens
  misc_RNA (1)...(19): siRNA sense strand
gaacaagugcaagcaaagu

SEQ ID NO: 1592091 - RNA, 19 nt, Homo sapiens
  misc_RNA (1)...(19): siRNA sense strand
gacaucagagacuacauaa

SEQ ID NO: 1592092 - RNA, 19 nt, Homo sapiens
  misc_RNA (1)...(19): siRNA sense strand
caugaagaaagaccuuaua

SEQ ID NO: 1592093 - RNA, 19 nt, Homo sapiens
  misc_RNA (1)...(19): siRNA sense strand
acaccuaaaucgucaucaa

SEQ ID NO: 1592094 - RNA, 19 nt, Homo sapiens
  misc_RNA (1)...(19): siRNA sense strand
cagagugcaacccucauua

SEQ ID NO: 1592095 - RNA, 19 nt, Homo sapiens
  misc_RNA (1)...(19): siRNA sense strand
ggagaacaaagaguugauu

SEQ ID NO: 1592096 - RNA, 19 nt, Homo sapiens
  misc_RNA (1)...(19): siRNA sense strand
ugaaaccucacaagucuga

SEQ ID NO: 1592097 - RNA, 19 nt, Homo sapiens
  misc_RNA (1)...(19): siRNA sense strand
gaaagcagaguggagaaca

SEQ ID NO: 1592098 - RNA, 19 nt, Homo sapiens
  misc_RNA (1)...(19): siRNA sense strand
caccuuauccgacaccaaa

SEQ ID NO: 1592099 - RNA, 19 nt, Homo sapiens
  misc_RNA (1)...(19): siRNA sense strand
gagaacaaagaguugauuc

SEQ ID NO: 1592100 - RNA, 19 nt, Homo sapiens
  misc_RNA (1)...(19): siRNA sense strand
ggaagacucacccggaagu

SEQ ID NO: 1592101 - RNA, 19 nt, Homo sapiens
  misc_RNA (1)...(19): siRNA sense strand
gaguggagaacaaagaguu

SEQ ID NO: 1592102 - RNA, 19 nt, Homo sapiens
  misc_RNA (1)...(19): siRNA sense strand
gagagagugcgcagaagga

SEQ ID NO: 1592103 - RNA, 19 nt, Homo sapiens
  misc_RNA (1)...(19): siRNA sense strand
aaagcagaguggagaacaa

SEQ ID NO: 1592104 - RNA, 19 nt, Homo sapiens
  misc_RNA (1)...(19): siRNA sense strand
ccuaaaucgucaucaaagu

SEQ ID NO: 1592105 - RNA, 19 nt, Homo sapiens
  misc_RNA (1)...(19): siRNA sense strand
aagcagagaggcccacuga

SEQ ID NO: 1592106 - RNA, 19 nt, Homo sapiens
  misc_RNA (1)...(19): siRNA sense strand
ccguacaccugucugaaau

SEQ ID NO: 1592107 - RNA, 19 nt, Homo sapiens
  misc_RNA (1)...(19): siRNA sense strand
aacaaagaguugauuccaa

SEQ ID NO: 1592108 - RNA, 19 nt, Homo sapiens
  misc_RNA (1)...(19): siRNA sense strand
gggaaagauuuagacaaag

SEQ ID NO: 1592109 - RNA, 19 nt, Homo sapiens
  misc_RNA (1)...(19): siRNA sense strand
cuauggauguuccgucugu

SEQ ID NO: 1592110 - RNA, 19 nt, Homo sapiens
  misc_RNA (1)...(19): siRNA sense strand
ucaaaguacccacaguaga

SEQ ID NO: 1592111 - RNA, 19 nt, Homo sapiens
  misc_RNA (1)...(19): siRNA sense strand
acaagugcaagcaaaguuu

SEQ ID NO: 1592112 - RNA, 19 nt, Homo sapiens
  misc_RNA (1)...(19): siRNA sense strand
ggaacaagugcaagcaaag

SEQ ID NO: 1592113 - RNA, 19 nt, Homo sapiens
  misc_RNA (1)...(19): siRNA sense strand
gugggaaacgcuucaauca

SEQ ID NO: 1592114 - RNA, 19 nt, Homo sapiens
  misc_RNA (1)...(19): siRNA sense strand
ccuuacaaaugucuugaau

SEQ ID NO: 1592115 - RNA, 19 nt, Homo sapiens
  misc_RNA (1)...(19): siRNA sense strand
gaaggacucaacagcaucu

SEQ ID NO: 1592116 - RNA, 19 nt, Homo sapiens
  misc_RNA (1)...(19): siRNA sense strand
uauccgacaccaaagaauu

SEQ ID NO: 1592117 - RNA, 19 nt, Homo sapiens
  misc_RNA (1)...(19): siRNA sense strand
gacaaaguacacaccuuau

SEQ ID NO: 1592118 - RNA, 19 nt, Homo sapiens
  misc_RNA (1)...(19): siRNA sense strand
gaauguggggaaagauuua

SEQ ID NO: 1592119 - RNA, 19 nt, Homo sapiens
  misc_RNA (1)...(19): siRNA sense strand
agagugcaacccucauuaa

SEQ ID NO: 1592120 - RNA, 19 nt, Homo sapiens
  misc_RNA (1)...(19): siRNA sense strand
caggcagaauucacaccua

SEQ ID NO: 1592121 - RNA, 19 nt, Homo sapiens
  misc_RNA (1)...(19): siRNA sense strand
gaggaacacgggaacaagu

SEQ ID NO: 1592122 - RNA, 19 nt, Homo sapiens
  misc_RNA (1)...(19): siRNA sense strand
ucagaugucaauaagaaug

SEQ ID NO: 1592123 - RNA, 19 nt, Homo sapiens
  misc_RNA (1)...(19): siRNA sense strand
cuauaagugugaagaaugc

SEQ ID NO: 1592124 - RNA, 19 nt, Homo sapiens
  misc_RNA (1)...(19): siRNA sense strand
caccuaaaucgucaucaaa

SEQ ID NO: 1592125 - RNA, 19 nt, Homo sapiens
  misc_RNA (1)...(19): siRNA sense strand
gccguacaccugucugaaa

SEQ ID NO: 1592126 - RNA, 19 nt, Homo sapiens
  misc_RNA (1)...(19): siRNA sense strand
ggacacacacaggcgagaa

SEQ ID NO: 1592127 - RNA, 19 nt, Homo sapiens
  misc_RNA (1)...(19): siRNA sense strand
ugugguaacugugggaaga

SEQ ID NO: 1592128 - RNA, 19 nt, Homo sapiens
  misc_RNA (1)...(19): siRNA sense strand
gcaagcaaaguuuccacau

SEQ ID NO: 1592129 - RNA, 19 nt, Homo sapiens
  misc_RNA (1)...(19): siRNA sense strand
gaaaagccuuacaaauguc

SEQ ID NO: 1592130 - RNA, 19 nt, Homo sapiens
  misc_RNA (1)...(19): siRNA sense strand
cacaguagagacaaacauu

SEQ ID NO: 1592131 - RNA, 19 nt, Homo sapiens
  misc_RNA (1)...(19): siRNA sense strand
ggacuucugcagagagagu

SEQ ID NO: 1592132 - RNA, 19 nt, Homo sapiens
  misc_RNA (1)...(19): siRNA sense strand
caaaguacacaccuuaucc

SEQ ID NO: 1592133 - RNA, 19 nt, Homo sapiens
  misc_RNA (1)...(19): siRNA sense strand
ucauuaaacaccagagaau

SEQ ID NO: 1592134 - RNA, 19 nt, Homo sapiens
  misc_RNA (1)...(19): siRNA sense strand
acaguagagacaaacauuu

SEQ ID NO: 1592135 - RNA, 19 nt, Homo sapiens
  misc_RNA (1)...(19): siRNA sense strand
uaaaucgucaucaaaguac

SEQ ID NO: 1592136 - RNA, 19 nt, Homo sapiens
  misc_RNA (1)...(19): siRNA sense strand
gagagugcgcagaaggauu

SEQ ID NO: 1592137 - RNA, 19 nt, Homo sapiens
  misc_RNA (1)...(19): siRNA sense strand
ccgugaaaguggaggaaga

SEQ ID NO: 1592138 - RNA, 19 nt, Homo sapiens
  misc_RNA (1)...(19): siRNA sense strand
uagacaaaguacacaccuu

SEQ ID NO: 1592139 - RNA, 19 nt, Homo sapiens
  misc_RNA (1)...(19): siRNA sense strand
cauuaaacaccagagaauu

SEQ ID NO: 1592140 - RNA, 19 nt, Homo sapiens
  misc_RNA (1)...(19): siRNA sense strand
aaaccugucauauuuccaa

SEQ ID NO: 1592141 - RNA, 19 nt, Homo sapiens
  misc_RNA (1)...(19): siRNA sense strand
gcgcucugaccucuuuaaa

SEQ ID NO: 1592142 - RNA, 19 nt, Homo sapiens
  misc_RNA (1)...(19): siRNA sense strand
ccuauaagugugaagaaug

SEQ ID NO: 1592143 - RNA, 19 nt, Homo sapiens
  misc_RNA (1)...(19): siRNA sense strand
cagaauggcuacccaguga

SEQ ID NO: 1592144 - RNA, 19 nt, Homo sapiens
  misc_RNA (1)...(19): siRNA sense strand
gaaaagggauuuauagcuu

SEQ ID NO: 1592145 - RNA, 19 nt, Homo sapiens
  misc_RNA (1)...(19): siRNA sense strand
gaucuugcuuccaguauau

SEQ ID NO: 1592146 - RNA, 19 nt, Homo sapiens
  misc_RNA (1)...(19): siRNA sense strand
cagagaagcugcuagcaau

SEQ ID NO: 1592147 - RNA, 19 nt, Homo sapiens
  misc_RNA (1)...(19): siRNA sense strand
gcaccaugaccaucuauuu

SEQ ID NO: 1592148 - RNA, 19 nt, Homo sapiens
  misc_RNA (1)...(19): siRNA sense strand
ggaaagggaagacaaagug

SEQ ID NO: 1592149 - RNA, 19 nt, Homo sapiens
  misc_RNA (1)...(19): siRNA sense strand
caaaguguauaacagacaa

SEQ ID NO: 1592150 - RNA, 19 nt, Homo sapiens
  misc_RNA (1)...(19): siRNA sense strand
gaagacaaagugcaucuca

SEQ ID NO: 1592151 - RNA, 19 nt, Homo sapiens
  misc_RNA (1)...(19): siRNA sense strand
ggucaaaguguauaacaga

SEQ ID NO: 1592152 - RNA, 19 nt, Homo sapiens
  misc_RNA (1)...(19): siRNA sense strand
ccagugaucucggccuuug

SEQ ID NO: 1592153 - RNA, 19 nt, Homo sapiens
  misc_RNA (1)...(19): siRNA sense strand
agacaaagugcaucucaaa

SEQ ID NO: 1592154 - RNA, 19 nt, Homo sapiens
  misc_RNA (1)...(19): siRNA sense strand
ggcaaccacuuugaucuug

SEQ ID NO: 1592155 - RNA, 19 nt, Homo sapiens
  misc_RNA (1)...(19): siRNA sense strand
ugaucuugcuuccaguaua

SEQ ID NO: 1592156 - RNA, 19 nt, Homo sapiens
  misc_RNA (1)...(19): siRNA sense strand
ggaaauacuccacauucuc

SEQ ID NO: 1592157 - RNA, 19 nt, Homo sapiens
  misc_RNA (1)...(19): siRNA sense strand
cuauuucgaccagguauua

SEQ ID NO: 1592158 - RNA, 19 nt, Homo sapiens
  misc_RNA (1)...(19): siRNA sense strand
ccagagaagcugcuagcaa

SEQ ID NO: 1592159 - RNA, 19 nt, Homo sapiens
  misc_RNA (1)...(19): siRNA sense strand
cuugguguuuccucuauaa

SEQ ID NO: 1592160 - RNA, 19 nt, Homo sapiens
  misc_RNA (1)...(19): siRNA sense strand
aaagggauuuauagcuuca

SEQ ID NO: 1592161 - RNA, 19 nt, Homo sapiens
  misc_RNA (1)...(19): siRNA sense strand
ucaguuuaaugcagaaugg

SEQ ID NO: 1592162 - RNA, 19 nt, Homo sapiens
  misc_RNA (1)...(19): siRNA sense strand
gaauggcuacccagugauc

SEQ ID NO: 1592163 - RNA, 19 nt, Homo sapiens
  misc_RNA (1)...(19): siRNA sense strand
aaauauuggcaaccacuuu

SEQ ID NO: 1592164 - RNA, 19 nt, Homo sapiens
  misc_RNA (1)...(19): siRNA sense strand
cauggaaagggaagacaaa

SEQ ID NO: 1592165 - RNA, 19 nt, Homo sapiens
  misc_RNA (1)...(19): siRNA sense strand
ccacguggucaaaguguau

SEQ ID NO: 1592166 - RNA, 19 nt, Homo sapiens
  misc_RNA (1)...(19): siRNA sense strand
gagaagcugcuagcaaugg

SEQ ID NO: 1592167 - RNA, 19 nt, Homo sapiens
  misc_RNA (1)...(19): siRNA sense strand
caccaugaccaucuauuuc

SEQ ID NO: 1592168 - RNA, 19 nt, Homo sapiens
  misc_RNA (1)...(19): siRNA sense strand
ccaugaccaucuauuucga

SEQ ID NO: 1592169 - RNA, 19 nt, Homo sapiens
  misc_RNA (1)...(19): siRNA sense strand
ucgaccagguauuaguaaa

SEQ ID NO: 1592170 - RNA, 19 nt, Homo sapiens
  misc_RNA (1)...(19): siRNA sense strand
aagacaaagugcaucucaa

SEQ ID NO: 1592171 - RNA, 19 nt, Homo sapiens
  misc_RNA (1)...(19): siRNA sense strand
cgaccagguauuaguaaau

SEQ ID NO: 1592172 - RNA, 19 nt, Homo sapiens
  misc_RNA (1)...(19): siRNA sense strand
aaccauccaggucaguuua

SEQ ID NO: 1592173 - RNA, 19 nt, Homo sapiens
  misc_RNA (1)...(19): siRNA sense strand
cacauucucgggcuucuug

SEQ ID NO: 1592174 - RNA, 19 nt, Homo sapiens
  misc_RNA (1)...(19): siRNA sense strand
acaaagugcaucucaaacu

SEQ ID NO: 1592175 - RNA, 19 nt, Homo sapiens
  misc_RNA (1)...(19): siRNA sense strand
gcaggagaccaggauguca

SEQ ID NO: 1592176 - RNA, 19 nt, Homo sapiens
  misc_RNA (1)...(19): siRNA sense strand
accaggaugucaccagaga

SEQ ID NO: 1592177 - RNA, 19 nt, Homo sapiens
  misc_RNA (1)...(19): siRNA sense strand
caaccacuuugaucuugcu

SEQ ID NO: 1592178 - RNA, 19 nt, Homo sapiens
  misc_RNA (1)...(19): siRNA sense strand
caaaccauccaggucaguu

SEQ ID NO: 1592179 - RNA, 19 nt, Homo sapiens
  misc_RNA (1)...(19): siRNA sense strand
ccauccaggucaguuuaau

SEQ ID NO: 1592180 - RNA, 19 nt, Homo sapiens
  misc_RNA (1)...(19): siRNA sense strand
gggaagacaaagugcaucu

SEQ ID NO: 1592181 - RNA, 19 nt, Homo sapiens
  misc_RNA (1)...(19): siRNA sense strand
gugcugcugcucauggaaa

SEQ ID NO: 1592182 - RNA, 19 nt, Homo sapiens
  misc_RNA (1)...(19): siRNA sense strand
aauauuggcaaccacuuug

SEQ ID NO: 1592183 - RNA, 19 nt, Homo sapiens
  misc_RNA (1)...(19): siRNA sense strand
cacgagccguccgagauga

SEQ ID NO: 1592184 - RNA, 19 nt, Homo sapiens
  misc_RNA (1)...(19): siRNA sense strand
uaaauauuggcaaccacuu

SEQ ID NO: 1592185 - RNA, 19 nt, Homo sapiens
  misc_RNA (1)...(19): siRNA sense strand
caucuauuucgaccaggua

SEQ ID NO: 1592186 - RNA, 19 nt, Homo sapiens
  misc_RNA (1)...(19): siRNA sense strand
ggagaaaccagaacaugaa

SEQ ID NO: 1592187 - RNA, 19 nt, Homo sapiens
  misc_RNA (1)...(19): siRNA sense strand
gacaucgucuuucuagcua

SEQ ID NO: 1592188 - RNA, 19 nt, Homo sapiens
  misc_RNA (1)...(19): siRNA sense strand
caagcaagccgagaacuuu

SEQ ID NO: 1592189 - RNA, 19 nt, Homo sapiens
  misc_RNA (1)...(19): siRNA sense strand
gcaguccuguuucccugua

SEQ ID NO: 1592190 - RNA, 19 nt, Homo sapiens
  misc_RNA (1)...(19): siRNA sense strand
gaaccuggcuauggagaag

SEQ ID NO: 1592191 - RNA, 19 nt, Homo sapiens
  misc_RNA (1)...(19): siRNA sense strand
accagaacaugaagacaua

SEQ ID NO: 1592192 - RNA, 19 nt, Homo sapiens
  misc_RNA (1)...(19): siRNA sense strand
cgagaacuuugccuacaga

SEQ ID NO: 1592193 - RNA, 19 nt, Homo sapiens
  misc_RNA (1)...(19): siRNA sense strand
gcaagcaagccgagaacuu

SEQ ID NO: 1592194 - RNA, 19 nt, Homo sapiens
  misc_RNA (1)...(19): siRNA sense strand
gaaacaagagaaguacgaa

SEQ ID NO: 1592195 - RNA, 19 nt, Homo sapiens
  misc_RNA (1)...(19): siRNA sense strand
gauaaugggaaccuuggaa

SEQ ID NO: 1592196 - RNA, 19 nt, Homo sapiens
  misc_RNA (1)...(19): siRNA sense strand
ccuacagacuggaguugaa

SEQ ID NO: 1592197 - RNA, 19 nt, Homo sapiens
  misc_RNA (1)...(19): siRNA sense strand
cggagaaaccagaacauga

SEQ ID NO: 1592198 - RNA, 19 nt, Homo sapiens
  misc_RNA (1)...(19): siRNA sense strand
gaagacauaugugaauacc

SEQ ID NO: 1592199 - RNA, 19 nt, Homo sapiens
  misc_RNA (1)...(19): siRNA sense strand
uggagaaacaagagaagua

SEQ ID NO: 1592200 - RNA, 19 nt, Homo sapiens
  misc_RNA (1)...(19): siRNA sense strand
aaccuuggaaucaauguua

SEQ ID NO: 1592201 - RNA, 19 nt, Homo sapiens
  misc_RNA (1)...(19): siRNA sense strand
gaaaccagaacaugaagac

SEQ ID NO: 1592202 - RNA, 19 nt, Homo sapiens
  misc_RNA (1)...(19): siRNA sense strand
cgacacagccauagcacau

SEQ ID NO: 1592203 - RNA, 19 nt, Homo sapiens
  misc_RNA (1)...(19): siRNA sense strand
caugaagacauaugugaau

SEQ ID NO: 1592204 - RNA, 19 nt, Homo sapiens
  misc_RNA (1)...(19): siRNA sense strand
gacuauguccugccuccua

SEQ ID NO: 1592205 - RNA, 19 nt, Homo sapiens
  misc_RNA (1)...(19): siRNA sense strand
gcugucgacugggugauga

SEQ ID NO: 1592206 - RNA, 19 nt, Homo sapiens
  misc_RNA (1)...(19): siRNA sense strand
gaaccuuggaaucaauguu

SEQ ID NO: 1592207 - RNA, 19 nt, Homo sapiens
  misc_RNA (1)...(19): siRNA sense strand
ggagaaacaagagaaguac

SEQ ID NO: 1592208 - RNA, 19 nt, Homo sapiens
  misc_RNA (1)...(19): siRNA sense strand
gccgagaacuuugccuaca

SEQ ID NO: 1592209 - RNA, 19 nt, Homo sapiens
  misc_RNA (1)...(19): siRNA sense strand
cuuucuagcuacagacauu

SEQ ID NO: 1592210 - RNA, 19 nt, Homo sapiens
  misc_RNA (1)...(19): siRNA sense strand
ggucugcuuugacuauguc

SEQ ID NO: 1592211 - RNA, 19 nt, Homo sapiens
  misc_RNA (1)...(19): siRNA sense strand
cuaauaaacccugcagcaa

SEQ ID NO: 1592212 - RNA, 19 nt, Homo sapiens
  misc_RNA (1)...(19): siRNA sense strand
cgaaggccaccagcaguuu

SEQ ID NO: 1592213 - RNA, 19 nt, Homo sapiens
  misc_RNA (1)...(19): siRNA sense strand
ggccucggcaguccuguuu

SEQ ID NO: 1592214 - RNA, 19 nt, Homo sapiens
  misc_RNA (1)...(19): siRNA sense strand
acacagccauagcacaucu

SEQ ID NO: 1592215 - RNA, 19 nt, Homo sapiens
  misc_RNA (1)...(19): siRNA sense strand
ucccugacccugcaccaua

SEQ ID NO: 1592216 - RNA, 19 nt, Homo sapiens
  misc_RNA (1)...(19): siRNA sense strand
ggaaccuggcuauggagaa

SEQ ID NO: 1592217 - RNA, 19 nt, Homo sapiens
  misc_RNA (1)...(19): siRNA sense strand
gugaauaccgucccuacuc

SEQ ID NO: 1592218 - RNA, 19 nt, Homo sapiens
  misc_RNA (1)...(19): siRNA sense strand
gccaucguccugcucauug

SEQ ID NO: 1592219 - RNA, 19 nt, Homo sapiens
  misc_RNA (1)...(19): siRNA sense strand
gagaaaccagaacaugaag

SEQ ID NO: 1592220 - RNA, 19 nt, Homo sapiens
  misc_RNA (1)...(19): siRNA sense strand
caaugccgccagaaguuga

SEQ ID NO: 1592221 - RNA, 19 nt, Homo sapiens
  misc_RNA (1)...(19): siRNA sense strand
uaaccaaugccgccagaag

SEQ ID NO: 1592222 - RNA, 19 nt, Homo sapiens
  misc_RNA (1)...(19): siRNA sense strand
caucgucuuucuagcuaca

SEQ ID NO: 1592223 - RNA, 19 nt, Homo sapiens
  misc_RNA (1)...(19): siRNA sense strand
ccaaugccgccagaaguug

SEQ ID NO: 1592224 - RNA, 19 nt, Homo sapiens
  misc_RNA (1)...(19): siRNA sense strand
agaaacaagagaaguacga

SEQ ID NO: 1592225 - RNA, 19 nt, Homo sapiens
  misc_RNA (1)...(19): siRNA sense strand
cagaacaugaagacauaug

SEQ ID NO: 1592226 - RNA, 19 nt, Homo sapiens
  misc_RNA (1)...(19): siRNA sense strand
ugggaaccuuggaaucaau

SEQ ID NO: 1592227 - RNA, 19 nt, Homo sapiens
  misc_RNA (1)...(19): siRNA sense strand
aaugggaaccuuggaauca

SEQ ID NO: 1592228 - RNA, 19 nt, Homo sapiens
  misc_RNA (1)...(19): siRNA sense strand
acuauguccugccuccuau

SEQ ID NO: 1592229 - RNA, 19 nt, Homo sapiens
  misc_RNA (1)...(19): siRNA sense strand
cgaguguccggucugcuuu

SEQ ID NO: 1592230 - RNA, 19 nt, Homo sapiens
  misc_RNA (1)...(19): siRNA sense strand
gaucagaccucaugaaaug

SEQ ID NO: 1592231 - RNA, 19 nt, Homo sapiens
  misc_RNA (1)...(19): siRNA sense strand
gaagagaaguacccugaua

SEQ ID NO: 1592232 - RNA, 19 nt, Homo sapiens
  misc_RNA (1)...(19): siRNA sense strand
gagaagaaaucgauuaaga

SEQ ID NO: 1592233 - RNA, 19 nt, Homo sapiens
  misc_RNA (1)...(19): siRNA sense strand
gcucaaaccuucggauuua

SEQ ID NO: 1592234 - RNA, 19 nt, Homo sapiens
  misc_RNA (1)...(19): siRNA sense strand
caucagaacuuuacaagaa

SEQ ID NO: 1592235 - RNA, 19 nt, Homo sapiens
  misc_RNA (1)...(19): siRNA sense strand
aaacaacgcuacuucauuu

SEQ ID NO: 1592236 - RNA, 19 nt, Homo sapiens
  misc_RNA (1)...(19): siRNA sense strand
gaagagaagaaaucgauua

SEQ ID NO: 1592237 - RNA, 19 nt, Homo sapiens
  misc_RNA (1)...(19): siRNA sense strand
gaacuuguauugcuaaugg

SEQ ID NO: 1592238 - RNA, 19 nt, Homo sapiens
  misc_RNA (1)...(19): siRNA sense strand
caucaaaccugacaucaug

SEQ ID NO: 1592239 - RNA, 19 nt, Homo sapiens
  misc_RNA (1)...(19): siRNA sense strand
ugaaagagauauugccaaa

SEQ ID NO: 1592240 - RNA, 19 nt, Homo sapiens
  misc_RNA (1)...(19): siRNA sense strand
gagugaauauagcaacuua

SEQ ID NO: 1592241 - RNA, 19 nt, Homo sapiens
  misc_RNA (1)...(19): siRNA sense strand
gcucagugcuauucucuuu

SEQ ID NO: 1592242 - RNA, 19 nt, Homo sapiens
  misc_RNA (1)...(19): siRNA sense strand
gaagaaagcauccuugaag

SEQ ID NO: 1592243 - RNA, 19 nt, Homo sapiens
  misc_RNA (1)...(19): siRNA sense strand
gcauagagauggaauggau

SEQ ID NO: 1592244 - RNA, 19 nt, Homo sapiens
  misc_RNA (1)...(19): siRNA sense strand
uaaagcaucuuccugauca

SEQ ID NO: 1592245 - RNA, 19 nt, Homo sapiens
  misc_RNA (1)...(19): siRNA sense strand
gaaaucagcaugagaagau

SEQ ID NO: 1592246 - RNA, 19 nt, Homo sapiens
  misc_RNA (1)...(19): siRNA sense strand
gaagagaagaggaagauau

SEQ ID NO: 1592247 - RNA, 19 nt, Homo sapiens
  misc_RNA (1)...(19): siRNA sense strand
agacaaagcuaguaaaguc

SEQ ID NO: 1592248 - RNA, 19 nt, Homo sapiens
  misc_RNA (1)...(19): siRNA sense strand
gaagaagauuuguuugagu

SEQ ID NO: 1592249 - RNA, 19 nt, Homo sapiens
  misc_RNA (1)...(19): siRNA sense strand
gaugacagaugugguuaaa

SEQ ID NO: 1592250 - RNA, 19 nt, Homo sapiens
  misc_RNA (1)...(19): siRNA sense strand
agacaggagugauggauaa

SEQ ID NO: 1592251 - RNA, 19 nt, Homo sapiens
  misc_RNA (1)...(19): siRNA sense strand
gcagagggauauuuuauuu

SEQ ID NO: 1592252 - RNA, 19 nt, Homo sapiens
  misc_RNA (1)...(19): siRNA sense strand
gcauaaagaagaagauuug

SEQ ID NO: 1592253 - RNA, 19 nt, Homo sapiens
  misc_RNA (1)...(19): siRNA sense strand
uuacugaccugaauaacuu

SEQ ID NO: 1592254 - RNA, 19 nt, Homo sapiens
  misc_RNA (1)...(19): siRNA sense strand
uagaagaguuugaagagaa

SEQ ID NO: 1592255 - RNA, 19 nt, Homo sapiens
  misc_RNA (1)...(19): siRNA sense strand
guagaaauaugugaagaga

SEQ ID NO: 1592256 - RNA, 19 nt, Homo sapiens
  misc_RNA (1)...(19): siRNA sense strand
gagaagaggaagauauuga

SEQ ID NO: 1592257 - RNA, 19 nt, Homo sapiens
  misc_RNA (1)...(19): siRNA sense strand
gcgaagagauaaagaagag

SEQ ID NO: 1592258 - RNA, 19 nt, Homo sapiens
  misc_RNA (1)...(19): siRNA sense strand
ucagugcuauucucuuuaa

SEQ ID NO: 1592259 - RNA, 19 nt, Homo sapiens
  misc_RNA (1)...(19): siRNA sense strand
gaauauagcaacuuaugug

SEQ ID NO: 1592260 - RNA, 19 nt, Homo sapiens
  misc_RNA (1)...(19): siRNA sense strand
gagaagauugaauugguua

SEQ ID NO: 1592261 - RNA, 19 nt, Homo sapiens
  misc_RNA (1)...(19): siRNA sense strand
agaaauaugugaagagaag

SEQ ID NO: 1592262 - RNA, 19 nt, Homo sapiens
  misc_RNA (1)...(19): siRNA sense strand
aaccuuagcucucucugua

SEQ ID NO: 1592263 - RNA, 19 nt, Homo sapiens
  misc_RNA (1)...(19): siRNA sense strand
ugacagaugugguuaaacu

SEQ ID NO: 1592264 - RNA, 19 nt, Homo sapiens
  misc_RNA (1)...(19): siRNA sense strand
gaugaagcauaugauguuu

SEQ ID NO: 1592265 - RNA, 19 nt, Homo sapiens
  misc_RNA (1)...(19): siRNA sense strand
ucuuuaagcuucaguuuga

SEQ ID NO: 1592266 - RNA, 19 nt, Homo sapiens
  misc_RNA (1)...(19): siRNA sense strand
gcucaucaaugcccugguu

SEQ ID NO: 1592267 - RNA, 19 nt, Homo sapiens
  misc_RNA (1)...(19): siRNA sense strand
gcaauaaaggagaauauca

SEQ ID NO: 1592268 - RNA, 19 nt, Homo sapiens
  misc_RNA (1)...(19): siRNA sense strand
uauuagagcugaacuugau

SEQ ID NO: 1592269 - RNA, 19 nt, Homo sapiens
  misc_RNA (1)...(19): siRNA sense strand
gauccagacuucacauauc

SEQ ID NO: 1592270 - RNA, 19 nt, Homo sapiens
  misc_RNA (1)...(19): siRNA sense strand
ccaauaugaugacagaugu

SEQ ID NO: 1592271 - RNA, 19 nt, Homo sapiens
  misc_RNA (1)...(19): siRNA sense strand
ggaagaaagcauccuugaa

SEQ ID NO: 1592272 - RNA, 19 nt, Homo sapiens
  misc_RNA (1)...(19): siRNA sense strand
gaaaaguuauaccagagua

SEQ ID NO: 1592273 - RNA, 19 nt, Homo sapiens
  misc_RNA (1)...(19): siRNA sense strand
uaaagucucuguagaaacg

SEQ ID NO: 1592274 - RNA, 19 nt, Homo sapiens
  misc_RNA (1)...(19): siRNA sense strand
gaaggccuccggcacaauu

SEQ ID NO: 1592275 - RNA, 19 nt, Homo sapiens
  misc_RNA (1)...(19): siRNA sense strand
gaagaaggugucuguggaa

SEQ ID NO: 1592276 - RNA, 19 nt, Homo sapiens
  misc_RNA (1)...(19): siRNA sense strand
gcuggaacuuguauugcua

SEQ ID NO: 1592277 - RNA, 19 nt, Homo sapiens
  misc_RNA (1)...(19): siRNA sense strand
cagagucuaugauucagaa

SEQ ID NO: 1592278 - RNA, 19 nt, Homo sapiens
  misc_RNA (1)...(19): siRNA sense strand
aggaagauauugaagagaa

SEQ ID NO: 1592279 - RNA, 19 nt, Homo sapiens
  misc_RNA (1)...(19): siRNA sense strand
ucaaugcccugguuacauc

SEQ ID NO: 1592280 - RNA, 19 nt, Homo sapiens
  misc_RNA (1)...(19): siRNA sense strand
guaugcagcucaucaaugc

SEQ ID NO: 1592281 - RNA, 19 nt, Homo sapiens
  misc_RNA (1)...(19): siRNA sense strand
ggacaccgaugccaaaaga

SEQ ID NO: 1592282 - RNA, 19 nt, Homo sapiens
  misc_RNA (1)...(19): siRNA sense strand
ggauuugcuuuguaaacuu

SEQ ID NO: 1592283 - RNA, 19 nt, Homo sapiens
  misc_RNA (1)...(19): siRNA sense strand
gauauuagagcugaacuug

SEQ ID NO: 1592284 - RNA, 19 nt, Homo sapiens
  misc_RNA (1)...(19): siRNA sense strand
gauauuggaaguagaugaa

SEQ ID NO: 1592285 - RNA, 19 nt, Homo sapiens
  misc_RNA (1)...(19): siRNA sense strand
gaacaauaugagacacuuu

SEQ ID NO: 1592286 - RNA, 19 nt, Homo sapiens
  misc_RNA (1)...(19): siRNA sense strand
gaugagcaaugugaagaga

SEQ ID NO: 1592287 - RNA, 19 nt, Homo sapiens
  misc_RNA (1)...(19): siRNA sense strand
gaaacacgguuggcagagu

SEQ ID NO: 1592288 - RNA, 19 nt, Homo sapiens
  misc_RNA (1)...(19): siRNA sense strand
gaguguguaucccagauug

SEQ ID NO: 1592289 - RNA, 19 nt, Homo sapiens
  misc_RNA (1)...(19): siRNA sense strand
uagaaacgcuggaaaagaa

SEQ ID NO: 1592290 - RNA, 19 nt, Homo sapiens
  misc_RNA (1)...(19): siRNA sense strand
gaaagcauccuugaagaag

SEQ ID NO: 1592291 - RNA, 19 nt, Homo sapiens
  misc_RNA (1)...(19): siRNA sense strand
ccagaaccuuucaaucuuc

SEQ ID NO: 1592292 - RNA, 19 nt, Homo sapiens
  misc_RNA (1)...(19): siRNA sense strand
gauuugcuuuguaaacuug

SEQ ID NO: 1592293 - RNA, 19 nt, Homo sapiens
  misc_RNA (1)...(19): siRNA sense strand
agagaaagcaucagaacuu

SEQ ID NO: 1592294 - RNA, 19 nt, Homo sapiens
  misc_RNA (1)...(19): siRNA sense strand
agaagaguuugaagagaaa

SEQ ID NO: 1592295 - RNA, 19 nt, Homo sapiens
  misc_RNA (1)...(19): siRNA sense strand
guagacauuugcauagauc

SEQ ID NO: 1592296 - RNA, 19 nt, Homo sapiens
  misc_RNA (1)...(19): siRNA sense strand
ugagaagauugaauugguu

SEQ ID NO: 1592297 - RNA, 19 nt, Homo sapiens
  misc_RNA (1)...(19): siRNA sense strand
ucagaaugaugauauugga

SEQ ID NO: 1592298 - RNA, 19 nt, Homo sapiens
  misc_RNA (1)...(19): siRNA sense strand
gaauuuaugcguuguggau

SEQ ID NO: 1592299 - RNA, 19 nt, Homo sapiens
  misc_RNA (1)...(19): siRNA sense strand
caucauggcugucaguacu

SEQ ID NO: 1592300 - RNA, 19 nt, Homo sapiens
  misc_RNA (1)...(19): siRNA sense strand
aaacuucucucugcgguau

SEQ ID NO: 1592301 - RNA, 19 nt, Homo sapiens
  misc_RNA (1)...(19): siRNA sense strand
aagaaagcauccuugaaga

SEQ ID NO: 1592302 - RNA, 19 nt, Homo sapiens
  misc_RNA (1)...(19): siRNA sense strand
aaacguggauuugcuuugu

SEQ ID NO: 1592303 - RNA, 19 nt, Homo sapiens
  misc_RNA (1)...(19): siRNA sense strand
gaagagaaagcaucagaac

SEQ ID NO: 1592304 - RNA, 19 nt, Homo sapiens
  misc_RNA (1)...(19): siRNA sense strand
ugaacuugaugaagcauau

SEQ ID NO: 1592305 - RNA, 19 nt, Homo sapiens
  misc_RNA (1)...(19): siRNA sense strand
uaagaaugauggccuggau

SEQ ID NO: 1592306 - RNA, 19 nt, Homo sapiens
  misc_RNA (1)...(19): siRNA sense strand
cuaguaaagucucuguaga

SEQ ID NO: 1592307 - RNA, 19 nt, Homo sapiens
  misc_RNA (1)...(19): siRNA sense strand
gaaugaugauauuggaagu

SEQ ID NO: 1592308 - RNA, 19 nt, Homo sapiens
  misc_RNA (1)...(19): siRNA sense strand
gcccagaaccuuucaaucu

SEQ ID NO: 1592309 - RNA, 19 nt, Homo sapiens
  misc_RNA (1)...(19): siRNA sense strand
ugaagcauaugauguuuac

SEQ ID NO: 1592310 - RNA, 19 nt, Homo sapiens
  misc_RNA (1)...(19): siRNA sense strand
ggaagauauugaagagaag

SEQ ID NO: 1592311 - RNA, 19 nt, Homo sapiens
  misc_RNA (1)...(19): siRNA sense strand
gaaaguuuguaaccauggu

SEQ ID NO: 1592312 - RNA, 19 nt, Homo sapiens
  misc_RNA (1)...(19): siRNA sense strand
aguaaagucucuguagaaa

SEQ ID NO: 1592313 - RNA, 19 nt, Homo sapiens
  misc_RNA (1)...(19): siRNA sense strand
agagaaguacccugauaua

SEQ ID NO: 1592314 - RNA, 19 nt, Homo sapiens
  misc_RNA (1)...(19): siRNA sense strand
uuaaagaucagaccucaug

SEQ ID NO: 1592315 - RNA, 19 nt, Homo sapiens
  misc_RNA (1)...(19): siRNA sense strand
ccacauucaugcaagcaau

SEQ ID NO: 1592316 - RNA, 19 nt, Homo sapiens
  misc_RNA (1)...(19): siRNA sense strand
gauacuaugccauugaugu

SEQ ID NO: 1592317 - RNA, 19 nt, Homo sapiens
  misc_RNA (1)...(19): siRNA sense strand
uggaugauuuggaaccuuu

SEQ ID NO: 1592318 - RNA, 19 nt, Homo sapiens
  misc_RNA (1)...(19): siRNA sense strand
gcuacuucauuuccuggua

SEQ ID NO: 1592319 - RNA, 19 nt, Homo sapiens
  misc_RNA (1)...(19): siRNA sense strand
gggaagaaagcauccuuga

SEQ ID NO: 1592320 - RNA, 19 nt, Homo sapiens
  misc_RNA (1)...(19): siRNA sense strand
gagaagagaagaggaagau

SEQ ID NO: 1592321 - RNA, 19 nt, Homo sapiens
  misc_RNA (1)...(19): siRNA sense strand
ugaaaugacugaaaacugu

SEQ ID NO: 1592322 - RNA, 19 nt, Homo sapiens
  misc_RNA (1)...(19): siRNA sense strand
gagacaggagugauggaua

SEQ ID NO: 1592323 - RNA, 19 nt, Homo sapiens
  misc_RNA (1)...(19): siRNA sense strand
aaacgugucagaauagcua

SEQ ID NO: 1592324 - RNA, 19 nt, Homo sapiens
  misc_RNA (1)...(19): siRNA sense strand
gauuuaaccuuagcucucu

SEQ ID NO: 1592325 - RNA, 19 nt, Homo sapiens
  misc_RNA (1)...(19): siRNA sense strand
gcaggugaacaacaucaaa

SEQ ID NO: 1592326 - RNA, 19 nt, Homo sapiens
  misc_RNA (1)...(19): siRNA sense strand
gaagagcaggugaacaaca

SEQ ID NO: 1592327 - RNA, 19 nt, Homo sapiens
  misc_RNA (1)...(19): siRNA sense strand
aagcauccuugaagaaguu

SEQ ID NO: 1592328 - RNA, 19 nt, Homo sapiens
  misc_RNA (1)...(19): siRNA sense strand
cccagaaccuuucaaucuu

SEQ ID NO: 1592329 - RNA, 19 nt, Homo sapiens
  misc_RNA (1)...(19): siRNA sense strand
acccugauauacugaauuu

SEQ ID NO: 1592330 - RNA, 19 nt, Homo sapiens
  misc_RNA (1)...(19): siRNA sense strand
gaaaugagaucaccuuuac

SEQ ID NO: 1592331 - RNA, 19 nt, Homo sapiens
  misc_RNA (1)...(19): siRNA sense strand
ugacagaugugcuuuauca

SEQ ID NO: 1592332 - RNA, 19 nt, Homo sapiens
  misc_RNA (1)...(19): siRNA sense strand
ggaaagcagugacagaugu

SEQ ID NO: 1592333 - RNA, 19 nt, Homo sapiens
  misc_RNA (1)...(19): siRNA sense strand
gaaauuggaugcauauucg

SEQ ID NO: 1592334 - RNA, 19 nt, Homo sapiens
  misc_RNA (1)...(19): siRNA sense strand
ggaaaugagaucaccuuua

SEQ ID NO: 1592335 - RNA, 19 nt, Homo sapiens
  misc_RNA (1)...(19): siRNA sense strand
ggacuuggaucaacaccuu

SEQ ID NO: 1592336 - RNA, 19 nt, Homo sapiens
  misc_RNA (1)...(19): siRNA sense strand
gaagacagccaaacauuuc

SEQ ID NO: 1592337 - RNA, 19 nt, Homo sapiens
  misc_RNA (1)...(19): siRNA sense strand
ccacaaccucgaucaauua

SEQ ID NO: 1592338 - RNA, 19 nt, Homo sapiens
  misc_RNA (1)...(19): siRNA sense strand
ggaaguacuccuaggauuu

SEQ ID NO: 1592339 - RNA, 19 nt, Homo sapiens
  misc_RNA (1)...(19): siRNA sense strand
gaucaacaccuuuaacuuc

SEQ ID NO: 1592340 - RNA, 19 nt, Homo sapiens
  misc_RNA (1)...(19): siRNA sense strand
caaccucgaucaauuagug

SEQ ID NO: 1592341 - RNA, 19 nt, Homo sapiens
  misc_RNA (1)...(19): siRNA sense strand
guuaggaucugaaccaaug

SEQ ID NO: 1592342 - RNA, 19 nt, Homo sapiens
  misc_RNA (1)...(19): siRNA sense strand
gcaauggaguacauguuug

SEQ ID NO: 1592343 - RNA, 19 nt, Homo sapiens
  misc_RNA (1)...(19): siRNA sense strand
gggaauaucuuaaaacaug

SEQ ID NO: 1592344 - RNA, 19 nt, Homo sapiens
  misc_RNA (1)...(19): siRNA sense strand
gagaucaccuuuacuugca

SEQ ID NO: 1592345 - RNA, 19 nt, Homo sapiens
  misc_RNA (1)...(19): siRNA sense strand
ggaaauuggaugcauauuc

SEQ ID NO: 1592346 - RNA, 19 nt, Homo sapiens
  misc_RNA (1)...(19): siRNA sense strand
gagauucuuugacuucaga

SEQ ID NO: 1592347 - RNA, 19 nt, Homo sapiens
  misc_RNA (1)...(19): siRNA sense strand
ggaaagccuuaagcaaaga

SEQ ID NO: 1592348 - RNA, 19 nt, Homo sapiens
  misc_RNA (1)...(19): siRNA sense strand
ccaaagcaauggaguacau

SEQ ID NO: 1592349 - RNA, 19 nt, Homo sapiens
  misc_RNA (1)...(19): siRNA sense strand
cagaagaucaccucgauga

SEQ ID NO: 1592350 - RNA, 19 nt, Homo sapiens
  misc_RNA (1)...(19): siRNA sense strand
acaggaaauuggaugcaua

SEQ ID NO: 1592351 - RNA, 19 nt, Homo sapiens
  misc_RNA (1)...(19): siRNA sense strand
gcauauucguuaucaaucu

SEQ ID NO: 1592352 - RNA, 19 nt, Homo sapiens
  misc_RNA (1)...(19): siRNA sense strand
caugagaccucuugcuaca

SEQ ID NO: 1592353 - RNA, 19 nt, Homo sapiens
  misc_RNA (1)...(19): siRNA sense strand
gaaguacuccuaggauuuc

SEQ ID NO: 1592354 - RNA, 19 nt, Homo sapiens
  misc_RNA (1)...(19): siRNA sense strand
uacaaagccucuacuagug

SEQ ID NO: 1592355 - RNA, 19 nt, Homo sapiens
  misc_RNA (1)...(19): siRNA sense strand
ggaugcauauucguuauca

SEQ ID NO: 1592356 - RNA, 19 nt, Homo sapiens
  misc_RNA (1)...(19): siRNA sense strand
ccuaggauuucuaccauga

SEQ ID NO: 1592357 - RNA, 19 nt, Homo sapiens
  misc_RNA (1)...(19): siRNA sense strand
cagccaaacauuucaguaa

SEQ ID NO: 1592358 - RNA, 19 nt, Homo sapiens
  misc_RNA (1)...(19): siRNA sense strand
aagcaaagaugggaggauu

SEQ ID NO: 1592359 - RNA, 19 nt, Homo sapiens
  misc_RNA (1)...(19): siRNA sense strand
ccaguuagaaguauauaug

SEQ ID NO: 1592360 - RNA, 19 nt, Homo sapiens
  misc_RNA (1)...(19): siRNA sense strand
gcauacaaagccucuacua

SEQ ID NO: 1592361 - RNA, 19 nt, Homo sapiens
  misc_RNA (1)...(19): siRNA sense strand
ugacaaaaguguuauggaa

SEQ ID NO: 1592362 - RNA, 19 nt, Homo sapiens
  misc_RNA (1)...(19): siRNA sense strand
cggaaagccuuaagcaaag

SEQ ID NO: 1592363 - RNA, 19 nt, Homo sapiens
  misc_RNA (1)...(19): siRNA sense strand
caaggagauucuuugacuu

SEQ ID NO: 1592364 - RNA, 19 nt, Homo sapiens
  misc_RNA (1)...(19): siRNA sense strand
ugaaagucuuguauccaaa

SEQ ID NO: 1592365 - RNA, 19 nt, Homo sapiens
  misc_RNA (1)...(19): siRNA sense strand
ucggaaagccuuaagcaaa

SEQ ID NO: 1592366 - RNA, 19 nt, Homo sapiens
  misc_RNA (1)...(19): siRNA sense strand
ggaacagggcaaaguaugu

SEQ ID NO: 1592367 - RNA, 19 nt, Homo sapiens
  misc_RNA (1)...(19): siRNA sense strand
guauuuggguuuccucaag

SEQ ID NO: 1592368 - RNA, 19 nt, Homo sapiens
  misc_RNA (1)...(19): siRNA sense strand
uguaccagcucauaaagau

SEQ ID NO: 1592369 - RNA, 19 nt, Homo sapiens
  misc_RNA (1)...(19): siRNA sense strand
ccacgaaagacgacauuau

SEQ ID NO: 1592370 - RNA, 19 nt, Homo sapiens
  misc_RNA (1)...(19): siRNA sense strand
agaagacagccaaacauuu

SEQ ID NO: 1592371 - RNA, 19 nt, Homo sapiens
  misc_RNA (1)...(19): siRNA sense strand
uaccagcucauaaagauaa

SEQ ID NO: 1592372 - RNA, 19 nt, Homo sapiens
  misc_RNA (1)...(19): siRNA sense strand
uccacaaccucgaucaauu

SEQ ID NO: 1592373 - RNA, 19 nt, Homo sapiens
  misc_RNA (1)...(19): siRNA sense strand
caaagccucuacuagugau

SEQ ID NO: 1592374 - RNA, 19 nt, Homo sapiens
  misc_RNA (1)...(19): siRNA sense strand
uggaaguacuccuaggauu

SEQ ID NO: 1592375 - RNA, 19 nt, Homo sapiens
  misc_RNA (1)...(19): siRNA sense strand
ucaagaagacagccaaaca

SEQ ID NO: 1592376 - RNA, 19 nt, Homo sapiens
  misc_RNA (1)...(19): siRNA sense strand
auacaaagccucuacuagu

SEQ ID NO: 1592377 - RNA, 19 nt, Homo sapiens
  misc_RNA (1)...(19): siRNA sense strand
caacacaaccuggaaguac

SEQ ID NO: 1592378 - RNA, 19 nt, Homo sapiens
  misc_RNA (1)...(19): siRNA sense strand
gcaucugcuuccuacauau

SEQ ID NO: 1592379 - RNA, 19 nt, Homo sapiens
  misc_RNA (1)...(19): siRNA sense strand
ggaucaacaccuuuaacuu

SEQ ID NO: 1592380 - RNA, 19 nt, Homo sapiens
  misc_RNA (1)...(19): siRNA sense strand
gaaagucuuguauccaaag

SEQ ID NO: 1592381 - RNA, 19 nt, Homo sapiens
  misc_RNA (1)...(19): siRNA sense strand
caaccuggaaguacuccua

SEQ ID NO: 1592382 - RNA, 19 nt, Homo sapiens
  misc_RNA (1)...(19): siRNA sense strand
guaaaaccauguauugaca

SEQ ID NO: 1592383 - RNA, 19 nt, Homo sapiens
  misc_RNA (1)...(19): siRNA sense strand
gggcaaaguauguuuaguc

SEQ ID NO: 1592384 - RNA, 19 nt, Homo sapiens
  misc_RNA (1)...(19): siRNA sense strand
caagaagacagccaaacau

SEQ ID NO: 1592385 - RNA, 19 nt, Homo sapiens
  misc_RNA (1)...(19): siRNA sense strand
caacaccuuuaacuucaag

SEQ ID NO: 1592386 - RNA, 19 nt, Homo sapiens
  misc_RNA (1)...(19): siRNA sense strand
gaagaucaccucgaugacu

SEQ ID NO: 1592387 - RNA, 19 nt, Homo sapiens
  misc_RNA (1)...(19): siRNA sense strand
caugugaugucuaauacag

SEQ ID NO: 1592388 - RNA, 19 nt, Homo sapiens
  misc_RNA (1)...(19): siRNA sense strand
caucaugauugguguaaaa

SEQ ID NO: 1592389 - RNA, 19 nt, Homo sapiens
  misc_RNA (1)...(19): siRNA sense strand
aagaagacagccaaacauu

SEQ ID NO: 1592390 - RNA, 19 nt, Homo sapiens
  misc_RNA (1)...(19): siRNA sense strand
augaaagucuuguauccaa

SEQ ID NO: 1592391 - RNA, 19 nt, Homo sapiens
  misc_RNA (1)...(19): siRNA sense strand
acucuugggugacuguauu

SEQ ID NO: 1592392 - RNA, 19 nt, Homo sapiens
  misc_RNA (1)...(19): siRNA sense strand
guaccagcucauaaagaua

SEQ ID NO: 1592393 - RNA, 19 nt, Homo sapiens
  misc_RNA (1)...(19): siRNA sense strand
uaggauuucuaccaugaga

SEQ ID NO: 1592394 - RNA, 19 nt, Homo sapiens
  misc_RNA (1)...(19): siRNA sense strand
gaaagcagugacagaugug

SEQ ID NO: 1592395 - RNA, 19 nt, Homo sapiens
  misc_RNA (1)...(19): siRNA sense strand
aaugagaucaccuuuacuu

SEQ ID NO: 1592396 - RNA, 19 nt, Homo sapiens
  misc_RNA (1)...(19): siRNA sense strand
acaaagccucuacuaguga

SEQ ID NO: 1592397 - RNA, 19 nt, Homo sapiens
  misc_RNA (1)...(19): siRNA sense strand
gcuccaccaguuagaagua

SEQ ID NO: 1592398 - RNA, 19 nt, Homo sapiens
  misc_RNA (1)...(19): siRNA sense strand
gcaaagaugggaggauuuu

SEQ ID NO: 1592399 - RNA, 19 nt, Homo sapiens
  misc_RNA (1)...(19): siRNA sense strand
ccaguuguaccagcucaua

SEQ ID NO: 1592400 - RNA, 19 nt, Homo sapiens
  misc_RNA (1)...(19): siRNA sense strand
ggaguaauggaaaugagau

SEQ ID NO: 1592401 - RNA, 19 nt, Homo sapiens
  misc_RNA (1)...(19): siRNA sense strand
ucaacaccuuuaacuucaa

SEQ ID NO: 1592402 - RNA, 19 nt, Homo sapiens
  misc_RNA (1)...(19): siRNA sense strand
agccaaacauuucaguaau

SEQ ID NO: 1592403 - RNA, 19 nt, Homo sapiens
  misc_RNA (1)...(19): siRNA sense strand
cacgaaagacgacauuauc

SEQ ID NO: 1592404 - RNA, 19 nt, Homo sapiens
  misc_RNA (1)...(19): siRNA sense strand
ucaguaggaguaauggaaa

SEQ ID NO: 1592405 - RNA, 19 nt, Homo sapiens
  misc_RNA (1)...(19): siRNA sense strand
ccaacacaaccuggaagua

SEQ ID NO: 1592406 - RNA, 19 nt, Homo sapiens
  misc_RNA (1)...(19): siRNA sense strand
guaggaguaauggaaauga

SEQ ID NO: 1592407 - RNA, 19 nt, Homo sapiens
  misc_RNA (1)...(19): siRNA sense strand
uaguggcccuucaguagga

SEQ ID NO: 1592408 - RNA, 19 nt, Homo sapiens
  misc_RNA (1)...(19): siRNA sense strand
acagggcaaaguauguuua

SEQ ID NO: 1592409 - RNA, 19 nt, Homo sapiens
  misc_RNA (1)...(19): siRNA sense strand
gaucugaaccaaugaugcu

SEQ ID NO: 1592410 - RNA, 19 nt, Homo sapiens
  misc_RNA (1)...(19): siRNA sense strand
ggagauucuuugacuucag

SEQ ID NO: 1592411 - RNA, 19 nt, Homo sapiens
  misc_RNA (1)...(19): siRNA sense strand
gaguuaaugcccaguucuu

SEQ ID NO: 1592412 - RNA, 19 nt, Homo sapiens
  misc_RNA (1)...(19): siRNA sense strand
gcagugacagaugugcuuu

SEQ ID NO: 1592413 - RNA, 19 nt, Homo sapiens
  misc_RNA (1)...(19): siRNA sense strand
ccaaagccaggaguuaaug

SEQ ID NO: 1592414 - RNA, 19 nt, Homo sapiens
  misc_RNA (1)...(19): siRNA sense strand
caggaaauuggaugcauau

SEQ ID NO: 1592415 - RNA, 19 nt, Homo sapiens
  misc_RNA (1)...(19): siRNA sense strand
caucugcuuccuacauauu

SEQ ID NO: 1592416 - RNA, 19 nt, Homo sapiens
  misc_RNA (1)...(19): siRNA sense strand
cgaaagacgacauuaucuc

SEQ ID NO: 1592417 - RNA, 19 nt, Homo sapiens
  misc_RNA (1)...(19): siRNA sense strand
agugacagaugugcuuuau

SEQ ID NO: 1592418 - RNA, 19 nt, Homo sapiens
  misc_RNA (1)...(19): siRNA sense strand
acaguaugggaauaucuua

SEQ ID NO: 1592419 - RNA, 19 nt, Homo sapiens
  misc_RNA (1)...(19): siRNA sense strand
gcacaguaugggaauaucu

SEQ ID NO: 1592420 - RNA, 19 nt, Homo sapiens
  misc_RNA (1)...(19): siRNA sense strand
acuacaauuugcacaguau

SEQ ID NO: 1592421 - RNA, 19 nt, Homo sapiens
  misc_RNA (1)...(19): siRNA sense strand
caguaggaguaauggaaau

SEQ ID NO: 1592422 - RNA, 19 nt, Homo sapiens
  misc_RNA (1)...(19): siRNA sense strand
cauuaucuccugcccaguu

SEQ ID NO: 1592423 - RNA, 19 nt, Homo sapiens
  misc_RNA (1)...(19): siRNA sense strand
cauacaaagccucuacuag

SEQ ID NO: 1592424 - RNA, 19 nt, Homo sapiens
  misc_RNA (1)...(19): siRNA sense strand
gaugucuaauacaggaaau

SEQ ID NO: 1592425 - RNA, 19 nt, Homo sapiens
  misc_RNA (1)...(19): siRNA sense strand
aaucaaaacucuagguaca

SEQ ID NO: 1592426 - RNA, 19 nt, Homo sapiens
  misc_RNA (1)...(19): siRNA sense strand
ucuaauacaggaaauugga

SEQ ID NO: 1592427 - RNA, 19 nt, Homo sapiens
  misc_RNA (1)...(19): siRNA sense strand
agucuuguauccaaagcaa

SEQ ID NO: 1592428 - RNA, 19 nt, Homo sapiens
  misc_RNA (1)...(19): siRNA sense strand
gguguaaaaccauguauug

SEQ ID NO: 1592429 - RNA, 19 nt, Homo sapiens
  misc_RNA (1)...(19): siRNA sense strand
gcucggaaagccuuaagca

SEQ ID NO: 1592430 - RNA, 19 nt, Homo sapiens
  misc_RNA (1)...(19): siRNA sense strand
gaggaacucuuuacuauga

SEQ ID NO: 1592431 - RNA, 19 nt, Homo sapiens
  misc_RNA (1)...(19): siRNA sense strand
caaaguaaauccagaugaa

SEQ ID NO: 1592432 - RNA, 19 nt, Homo sapiens
  misc_RNA (1)...(19): siRNA sense strand
cgucggagaucuuauauug

SEQ ID NO: 1592433 - RNA, 19 nt, Homo sapiens
  misc_RNA (1)...(19): siRNA sense strand
gcuaagaaguuaaaggaau

SEQ ID NO: 1592434 - RNA, 19 nt, Homo sapiens
  misc_RNA (1)...(19): siRNA sense strand
uaaagauggugguguuauu

SEQ ID NO: 1592435 - RNA, 19 nt, Homo sapiens
  misc_RNA (1)...(19): siRNA sense strand
ggaaagucaucaggagaaa

SEQ ID NO: 1592436 - RNA, 19 nt, Homo sapiens
  misc_RNA (1)...(19): siRNA sense strand
gucaaaggcuggaaaguca

SEQ ID NO: 1592437 - RNA, 19 nt, Homo sapiens
  misc_RNA (1)...(19): siRNA sense strand
ggaauucgagauauugauu

SEQ ID NO: 1592438 - RNA, 19 nt, Homo sapiens
  misc_RNA (1)...(19): siRNA sense strand
ggucucaccauuacagaua

SEQ ID NO: 1592439 - RNA, 19 nt, Homo sapiens
  misc_RNA (1)...(19): siRNA sense strand
caaacgaagaggauuauga

SEQ ID NO: 1592440 - RNA, 19 nt, Homo sapiens
  misc_RNA (1)...(19): siRNA sense strand
aggaggaacucuuuacuau

SEQ ID NO: 1592441 - RNA, 19 nt, Homo sapiens
  misc_RNA (1)...(19): siRNA sense strand
ggaagaagaaggccaaguc

SEQ ID NO: 1592442 - RNA, 19 nt, Homo sapiens
  misc_RNA (1)...(19): siRNA sense strand
gcacuugacgaaacucuug

SEQ ID NO: 1592443 - RNA, 19 nt, Homo sapiens
  misc_RNA (1)...(19): siRNA sense strand
acuaugauguugcuaagaa

SEQ ID NO: 1592444 - RNA, 19 nt, Homo sapiens
  misc_RNA (1)...(19): siRNA sense strand
caugggaauucgagauauu

SEQ ID NO: 1592445 - RNA, 19 nt, Homo sapiens
  misc_RNA (1)...(19): siRNA sense strand
cgaaacucuuggagacuuu

SEQ ID NO: 1592446 - RNA, 19 nt, Homo sapiens
  misc_RNA (1)...(19): siRNA sense strand
cauauuugcccaugugaaa

SEQ ID NO: 1592447 - RNA, 19 nt, Homo sapiens
  misc_RNA (1)...(19): siRNA sense strand
ugauguugcuaagaaguua

SEQ ID NO: 1592448 - RNA, 19 nt, Homo sapiens
  misc_RNA (1)...(19): siRNA sense strand
ggacaaaguaaauccagau

SEQ ID NO: 1592449 - RNA, 19 nt, Homo sapiens
  misc_RNA (1)...(19): siRNA sense strand
ggacuagaagauuucauau

SEQ ID NO: 1592450 - RNA, 19 nt, Homo sapiens
  misc_RNA (1)...(19): siRNA sense strand
ccaaagcaaaggcaauuga

SEQ ID NO: 1592451 - RNA, 19 nt, Homo sapiens
  misc_RNA (1)...(19): siRNA sense strand
gcacuuuaaacacaccuaa

SEQ ID NO: 1592452 - RNA, 19 nt, Homo sapiens
  misc_RNA (1)...(19): siRNA sense strand
aauuaaagauggugguguu

SEQ ID NO: 1592453 - RNA, 19 nt, Homo sapiens
  misc_RNA (1)...(19): siRNA sense strand
gaaaugccuucugaaacca

SEQ ID NO: 1592454 - RNA, 19 nt, Homo sapiens
  misc_RNA (1)...(19): siRNA sense strand
ucggagaucuuauauugca

SEQ ID NO: 1592455 - RNA, 19 nt, Homo sapiens
  misc_RNA (1)...(19): siRNA sense strand
ggaaaggacaaaguaaauc

SEQ ID NO: 1592456 - RNA, 19 nt, Homo sapiens
  misc_RNA (1)...(19): siRNA sense strand
caaagcaaaggcaauugaa

SEQ ID NO: 1592457 - RNA, 19 nt, Homo sapiens
  misc_RNA (1)...(19): siRNA sense strand
ccuaagaaggcauuugaaa

SEQ ID NO: 1592458 - RNA, 19 nt, Homo sapiens
  misc_RNA (1)...(19): siRNA sense strand
ggaggaacucuuuacuaug

SEQ ID NO: 1592459 - RNA, 19 nt, Homo sapiens
  misc_RNA (1)...(19): siRNA sense strand
guuaauagaaccuaagaag

SEQ ID NO: 1592460 - RNA, 19 nt, Homo sapiens
  misc_RNA (1)...(19): siRNA sense strand
gguguuauugacucaguua

SEQ ID NO: 1592461 - RNA, 19 nt, Homo sapiens
  misc_RNA (1)...(19): siRNA sense strand
ugaauuugcuguggcacuu

SEQ ID NO: 1592462 - RNA, 19 nt, Homo sapiens
  misc_RNA (1)...(19): siRNA sense strand
uugaugauguucuugaguu

SEQ ID NO: 1592463 - RNA, 19 nt, Homo sapiens
  misc_RNA (1)...(19): siRNA sense strand
caaaggcaauugaaaagau

SEQ ID NO: 1592464 - RNA, 19 nt, Homo sapiens
  misc_RNA (1)...(19): siRNA sense strand
ggaacucuuuacuaugaag

SEQ ID NO: 1592465 - RNA, 19 nt, Homo sapiens
  misc_RNA (1)...(19): siRNA sense strand
gaaaggacaaaguaaaucc

SEQ ID NO: 1592466 - RNA, 19 nt, Homo sapiens
  misc_RNA (1)...(19): siRNA sense strand
gguguuggcuaugcuuuua

SEQ ID NO: 1592467 - RNA, 19 nt, Homo sapiens
  misc_RNA (1)...(19): siRNA sense strand
agaagaaggccaaguccaa

SEQ ID NO: 1592468 - RNA, 19 nt, Homo sapiens
  misc_RNA (1)...(19): siRNA sense strand
acacuucgccugagaucaa

SEQ ID NO: 1592469 - RNA, 19 nt, Homo sapiens
  misc_RNA (1)...(19): siRNA sense strand
ggcaacacuucgccugaga

SEQ ID NO: 1592470 - RNA, 19 nt, Homo sapiens
  misc_RNA (1)...(19): siRNA sense strand
ggucaaaggcuggaaaguc

SEQ ID NO: 1592471 - RNA, 19 nt, Homo sapiens
  misc_RNA (1)...(19): siRNA sense strand
gaaguuaauagaaccuaag

SEQ ID NO: 1592472 - RNA, 19 nt, Homo sapiens
  misc_RNA (1)...(19): siRNA sense strand
gaaccuaagaaggcauuug

SEQ ID NO: 1592473 - RNA, 19 nt, Homo sapiens
  misc_RNA (1)...(19): siRNA sense strand
gugaauguguauaaaucug

SEQ ID NO: 1592474 - RNA, 19 nt, Homo sapiens
  misc_RNA (1)...(19): siRNA sense strand
gcuggaaaggacaaaguaa

SEQ ID NO: 1592475 - RNA, 19 nt, Homo sapiens
  misc_RNA (1)...(19): siRNA sense strand
ugauuuagccaccacaaug

SEQ ID NO: 1592476 - RNA, 19 nt, Homo sapiens
  misc_RNA (1)...(19): siRNA sense strand
ucacuaugauguugcuaag

SEQ ID NO: 1592477 - RNA, 19 nt, Homo sapiens
  misc_RNA (1)...(19): siRNA sense strand
agauaaugguguuggcuau

SEQ ID NO: 1592478 - RNA, 19 nt, Homo sapiens
  misc_RNA (1)...(19): siRNA sense strand
cgaauuugucuuugauguu

SEQ ID NO: 1592479 - RNA, 19 nt, Homo sapiens
  misc_RNA (1)...(19): siRNA sense strand
aaauugacauggaaagacu

SEQ ID NO: 1592480 - RNA, 19 nt, Homo sapiens
  misc_RNA (1)...(19): siRNA sense strand
uacaugggaauucgagaua

SEQ ID NO: 1592481 - RNA, 19 nt, Homo sapiens
  misc_RNA (1)...(19): siRNA sense strand
aggacuagaagauuucaua

SEQ ID NO: 1592482 - RNA, 19 nt, Homo sapiens
  misc_RNA (1)...(19): siRNA sense strand
gauuuagccaccacaaugu

SEQ ID NO: 1592483 - RNA, 19 nt, Homo sapiens
  misc_RNA (1)...(19): siRNA sense strand
guacaugggaauucgagau

SEQ ID NO: 1592484 - RNA, 19 nt, Homo sapiens
  misc_RNA (1)...(19): siRNA sense strand
augauguucuugaguugua

SEQ ID NO: 1592485 - RNA, 19 nt, Homo sapiens
  misc_RNA (1)...(19): siRNA sense strand
ugaugauguucuugaguug

SEQ ID NO: 1592486 - RNA, 19 nt, Homo sapiens
  misc_RNA (1)...(19): siRNA sense strand
aaagcaaaggcaauugaaa

SEQ ID NO: 1592487 - RNA, 19 nt, Homo sapiens
  misc_RNA (1)...(19): siRNA sense strand
gagaucuuauauugcacuu

SEQ ID NO: 1592488 - RNA, 19 nt, Homo sapiens
  misc_RNA (1)...(19): siRNA sense strand
aaggaggaacucuuuacua

SEQ ID NO: 1592489 - RNA, 19 nt, Homo sapiens
  misc_RNA (1)...(19): siRNA sense strand
uggaaaggacaaaguaaau

SEQ ID NO: 1592490 - RNA, 19 nt, Homo sapiens
  misc_RNA (1)...(19): siRNA sense strand
aaagauggugguguuauug

SEQ ID NO: 1592491 - RNA, 19 nt, Homo sapiens
  misc_RNA (1)...(19): siRNA sense strand
acucuuaggaggacaacua

SEQ ID NO: 1592492 - RNA, 19 nt, Homo sapiens
  misc_RNA (1)...(19): siRNA sense strand
gauugaugauguucuugag

SEQ ID NO: 1592493 - RNA, 19 nt, Homo sapiens
  misc_RNA (1)...(19): siRNA sense strand
uuucauauuugcccaugug

SEQ ID NO: 1592494 - RNA, 19 nt, Homo sapiens
  misc_RNA (1)...(19): siRNA sense strand
ugccaaacgaagaggauua

SEQ ID NO: 1592495 - RNA, 19 nt, Homo sapiens
  misc_RNA (1)...(19): siRNA sense strand
acaaaguaaauccagauga

SEQ ID NO: 1592496 - RNA, 19 nt, Homo sapiens
  misc_RNA (1)...(19): siRNA sense strand
caugugaaaggaaucgaaa

SEQ ID NO: 1592497 - RNA, 19 nt, Homo sapiens
  misc_RNA (1)...(19): siRNA sense strand
aaccuaagaaggcauuuga

SEQ ID NO: 1592498 - RNA, 19 nt, Homo sapiens
  misc_RNA (1)...(19): siRNA sense strand
acgaauuugucuuugaugu

SEQ ID NO: 1592499 - RNA, 19 nt, Homo sapiens
  misc_RNA (1)...(19): siRNA sense strand
gacaaaguaaauccagaug

SEQ ID NO: 1592500 - RNA, 19 nt, Homo sapiens
  misc_RNA (1)...(19): siRNA sense strand
uggaaagucaucaggagaa

SEQ ID NO: 1592501 - RNA, 19 nt, Homo sapiens
  misc_RNA (1)...(19): siRNA sense strand
acgaaacucuuggagacuu

SEQ ID NO: 1592502 - RNA, 19 nt, Homo sapiens
  misc_RNA (1)...(19): siRNA sense strand
uggcgucacuaugauguug

SEQ ID NO: 1592503 - RNA, 19 nt, Homo sapiens
  misc_RNA (1)...(19): siRNA sense strand
cuucugaaaccaaagcaaa

SEQ ID NO: 1592504 - RNA, 19 nt, Homo sapiens
  misc_RNA (1)...(19): siRNA sense strand
gucucaccauuacagauaa

SEQ ID NO: 1592505 - RNA, 19 nt, Homo sapiens
  misc_RNA (1)...(19): siRNA sense strand
gauaaugguguuggcuaug

SEQ ID NO: 1592506 - RNA, 19 nt, Homo sapiens
  misc_RNA (1)...(19): siRNA sense strand
cuggaaaggacaaaguaaa

SEQ ID NO: 1592507 - RNA, 19 nt, Homo sapiens
  misc_RNA (1)...(19): siRNA sense strand
caacacuucgccugagauc

SEQ ID NO: 1592508 - RNA, 19 nt, Homo sapiens
  misc_RNA (1)...(19): siRNA sense strand
gccaaacgaagaggauuau

SEQ ID NO: 1592509 - RNA, 19 nt, Homo sapiens
  misc_RNA (1)...(19): siRNA sense strand
gauguugcuaagaaguuaa

SEQ ID NO: 1592510 - RNA, 19 nt, Homo sapiens
  misc_RNA (1)...(19): siRNA sense strand
gaaacucuuggagacuuug

SEQ ID NO: 1592511 - RNA, 19 nt, Homo sapiens
  misc_RNA (1)...(19): siRNA sense strand
cgccgucggagaucuuaua

SEQ ID NO: 1592512 - RNA, 19 nt, Homo sapiens
  misc_RNA (1)...(19): siRNA sense strand
uugcuaagaaguuaaagga

SEQ ID NO: 1592513 - RNA, 19 nt, Homo sapiens
  misc_RNA (1)...(19): siRNA sense strand
aaccaaagcaaaggcaauu

SEQ ID NO: 1592514 - RNA, 19 nt, Homo sapiens
  misc_RNA (1)...(19): siRNA sense strand
caaaggcuggaaagucauc

SEQ ID NO: 1592515 - RNA, 19 nt, Homo sapiens
  misc_RNA (1)...(19): siRNA sense strand
acaugggaauucgagauau

SEQ ID NO: 1592516 - RNA, 19 nt, Homo sapiens
  misc_RNA (1)...(19): siRNA sense strand
gcaaaggcaauugaaaaga

SEQ ID NO: 1592517 - RNA, 19 nt, Homo sapiens
  misc_RNA (1)...(19): siRNA sense strand
uuaaagauggugguguuau

SEQ ID NO: 1592518 - RNA, 19 nt, Homo sapiens
  misc_RNA (1)...(19): siRNA sense strand
gcaacacuucgccugagau

SEQ ID NO: 1592519 - RNA, 19 nt, Homo sapiens
  misc_RNA (1)...(19): siRNA sense strand
gcacauaaguguccguuug

SEQ ID NO: 1592520 - RNA, 19 nt, Homo sapiens
  misc_RNA (1)...(19): siRNA sense strand
aaagagggcugcaagaaga

SEQ ID NO: 1592521 - RNA, 19 nt, Homo sapiens
  misc_RNA (1)...(19): siRNA sense strand
gaugguaugugcccaaugu

SEQ ID NO: 1592522 - RNA, 19 nt, Homo sapiens
  misc_RNA (1)...(19): siRNA sense strand
caagauuucuguaaagauc

SEQ ID NO: 1592523 - RNA, 19 nt, Homo sapiens
  misc_RNA (1)...(19): siRNA sense strand
agaaagagaugcugcagau

SEQ ID NO: 1592524 - RNA, 19 nt, Homo sapiens
  misc_RNA (1)...(19): siRNA sense strand
gggaagcauuguucagaaa

SEQ ID NO: 1592525 - RNA, 19 nt, Homo sapiens
  misc_RNA (1)...(19): siRNA sense strand
ggaagaagaaagagaagau

SEQ ID NO: 1592526 - RNA, 19 nt, Homo sapiens
  misc_RNA (1)...(19): siRNA sense strand
gaagaagaaagagaagauu

SEQ ID NO: 1592527 - RNA, 19 nt, Homo sapiens
  misc_RNA (1)...(19): siRNA sense strand
ggugguuggugaucacauu

SEQ ID NO: 1592528 - RNA, 19 nt, Homo sapiens
  misc_RNA (1)...(19): siRNA sense strand
gugaucacauugacagaga

SEQ ID NO: 1592529 - RNA, 19 nt, Homo sapiens
  misc_RNA (1)...(19): siRNA sense strand
gcaagcagcuagauuuucu

SEQ ID NO: 1592530 - RNA, 19 nt, Homo sapiens
  misc_RNA (1)...(19): siRNA sense strand
guaugcccacucuguaaua

SEQ ID NO: 1592531 - RNA, 19 nt, Homo sapiens
  misc_RNA (1)...(19): siRNA sense strand
uuacauaccguugcucaaa

SEQ ID NO: 1592532 - RNA, 19 nt, Homo sapiens
  misc_RNA (1)...(19): siRNA sense strand
ccaguaugcccacucugua

SEQ ID NO: 1592533 - RNA, 19 nt, Homo sapiens
  misc_RNA (1)...(19): siRNA sense strand
caguaugcccacucuguaa

SEQ ID NO: 1592534 - RNA, 19 nt, Homo sapiens
  misc_RNA (1)...(19): siRNA sense strand
uccauacgcugcacauaag

SEQ ID NO: 1592535 - RNA, 19 nt, Homo sapiens
  misc_RNA (1)...(19): siRNA sense strand
auaaguguccguuugcauu

SEQ ID NO: 1592536 - RNA, 19 nt, Homo sapiens
  misc_RNA (1)...(19): siRNA sense strand
gcaagaagaaagagaugcu

SEQ ID NO: 1592537 - RNA, 19 nt, Homo sapiens
  misc_RNA (1)...(19): siRNA sense strand
gagaugcugcagaugguau

SEQ ID NO: 1592538 - RNA, 19 nt, Homo sapiens
  misc_RNA (1)...(19): siRNA sense strand
gaaagagaugcugcagaug

SEQ ID NO: 1592539 - RNA, 19 nt, Homo sapiens
  misc_RNA (1)...(19): siRNA sense strand
cuugcaagcagcuagauuu

SEQ ID NO: 1592540 - RNA, 19 nt, Homo sapiens
  misc_RNA (1)...(19): siRNA sense strand
caaaagagggcugcaagaa

SEQ ID NO: 1592541 - RNA, 19 nt, Homo sapiens
  misc_RNA (1)...(19): siRNA sense strand
ugugaugcauguaaacaag

SEQ ID NO: 1592542 - RNA, 19 nt, Homo sapiens
  misc_RNA (1)...(19): siRNA sense strand
ugaugcauguaaacaagau

SEQ ID NO: 1592543 - RNA, 19 nt, Homo sapiens
  misc_RNA (1)...(19): siRNA sense strand
uuccauacgcugcacauaa

SEQ ID NO: 1592544 - RNA, 19 nt, Homo sapiens
  misc_RNA (1)...(19): siRNA sense strand
uaaguguccguuugcauuc

SEQ ID NO: 1592545 - RNA, 19 nt, Homo sapiens
  misc_RNA (1)...(19): siRNA sense strand
aagagaugcugcagauggu

SEQ ID NO: 1592546 - RNA, 19 nt, Homo sapiens
  misc_RNA (1)...(19): siRNA sense strand
ggggaagcauuguucagaa

SEQ ID NO: 1592547 - RNA, 19 nt, Homo sapiens
  misc_RNA (1)...(19): siRNA sense strand
gcagcuagauuuucuucca

SEQ ID NO: 1592548 - RNA, 19 nt, Homo sapiens
  misc_RNA (1)...(19): siRNA sense strand
gggaagaagaaagagaaga

SEQ ID NO: 1592549 - RNA, 19 nt, Homo sapiens
  misc_RNA (1)...(19): siRNA sense strand
cagaugguaugugcccaau

SEQ ID NO: 1592550 - RNA, 19 nt, Homo sapiens
  misc_RNA (1)...(19): siRNA sense strand
ccaaugucacggcaacuuc

SEQ ID NO: 1592551 - RNA, 19 nt, Homo sapiens
  misc_RNA (1)...(19): siRNA sense strand
gaagcauuguucagaaaag

SEQ ID NO: 1592552 - RNA, 19 nt, Homo sapiens
  misc_RNA (1)...(19): siRNA sense strand
ggaagaggagcgaaggaaa

SEQ ID NO: 1592553 - RNA, 19 nt, Homo sapiens
  misc_RNA (1)...(19): siRNA sense strand
gagcugaagacccagauug

SEQ ID NO: 1592554 - RNA, 19 nt, Homo sapiens
  misc_RNA (1)...(19): siRNA sense strand
agaaggagcgcacggaguu

SEQ ID NO: 1592555 - RNA, 19 nt, Homo sapiens
  misc_RNA (1)...(19): siRNA sense strand
ggcagcagcucauccugau

SEQ ID NO: 1592556 - RNA, 19 nt, Homo sapiens
  misc_RNA (1)...(19): siRNA sense strand
gagcugaaauacgcugaca

SEQ ID NO: 1592557 - RNA, 19 nt, Homo sapiens
  misc_RNA (1)...(19): siRNA sense strand
gcugaaauacgcugacauc

SEQ ID NO: 1592558 - RNA, 19 nt, Homo sapiens
  misc_RNA (1)...(19): siRNA sense strand
gaagaggagcgaaggaaaa

SEQ ID NO: 1592559 - RNA, 19 nt, Homo sapiens
  misc_RNA (1)...(19): siRNA sense strand
gaaggagcgcacggaguuu

SEQ ID NO: 1592560 - RNA, 19 nt, Homo sapiens
  misc_RNA (1)...(19): siRNA sense strand
gaggugaaacugggcaaga

SEQ ID NO: 1592561 - RNA, 19 nt, Homo sapiens
  misc_RNA (1)...(19): siRNA sense strand
ugagcuagaugaggaagag

SEQ ID NO: 1592562 - RNA, 19 nt, Homo sapiens
  misc_RNA (1)...(19): siRNA sense strand
gagcggcuggaacucauga

SEQ ID NO: 1592563 - RNA, 19 nt, Homo sapiens
  misc_RNA (1)...(19): siRNA sense strand
gcacuuccuggaggugaaa

SEQ ID NO: 1592564 - RNA, 19 nt, Homo sapiens
  misc_RNA (1)...(19): siRNA sense strand
cuguggaggagcugaaaua

SEQ ID NO: 1592565 - RNA, 19 nt, Homo sapiens
  misc_RNA (1)...(19): siRNA sense strand
gaugccggaacaagaagaa

SEQ ID NO: 1592566 - RNA, 19 nt, Homo sapiens
  misc_RNA (1)...(19): siRNA sense strand
ggaauccgagcggcuggaa

SEQ ID NO: 1592567 - RNA, 19 nt, Homo sapiens
  misc_RNA (1)...(19): siRNA sense strand
gaagagaccucaguuuauu

SEQ ID NO: 1592568 - RNA, 19 nt, Homo sapiens
  misc_RNA (1)...(19): siRNA sense strand
gaacugugauccuaacauu

SEQ ID NO: 1592569 - RNA, 19 nt, Homo sapiens
  misc_RNA (1)...(19): siRNA sense strand
agaaagaucuuccucagaa

SEQ ID NO: 1592570 - RNA, 19 nt, Homo sapiens
  misc_RNA (1)...(19): siRNA sense strand
uaaaugcacucuuucgaaa

SEQ ID NO: 1592571 - RNA, 19 nt, Homo sapiens
  misc_RNA (1)...(19): siRNA sense strand
gaaugugucugaugagaau

SEQ ID NO: 1592572 - RNA, 19 nt, Homo sapiens
  misc_RNA (1)...(19): siRNA sense strand
gaccaaguauaguauguaa

SEQ ID NO: 1592573 - RNA, 19 nt, Homo sapiens
  misc_RNA (1)...(19): siRNA sense strand
ccaaaugaaucaagcagaa

SEQ ID NO: 1592574 - RNA, 19 nt, Homo sapiens
  misc_RNA (1)...(19): siRNA sense strand
gcaaggggauggaguguua

SEQ ID NO: 1592575 - RNA, 19 nt, Homo sapiens
  misc_RNA (1)...(19): siRNA sense strand
cagaggagcuaucaucuca

SEQ ID NO: 1592576 - RNA, 19 nt, Homo sapiens
  misc_RNA (1)...(19): siRNA sense strand
cuaacgagcuguacaguuc

SEQ ID NO: 1592577 - RNA, 19 nt, Homo sapiens
  misc_RNA (1)...(19): siRNA sense strand
ccuaguugcucaggaauua

SEQ ID NO: 1592578 - RNA, 19 nt, Homo sapiens
  misc_RNA (1)...(19): siRNA sense strand
guccaacacugauaagauu

SEQ ID NO: 1592579 - RNA, 19 nt, Homo sapiens
  misc_RNA (1)...(19): siRNA sense strand
gaagagucauccauaugug

SEQ ID NO: 1592580 - RNA, 19 nt, Homo sapiens
  misc_RNA (1)...(19): siRNA sense strand
gagaagcagucagugauug

SEQ ID NO: 1592581 - RNA, 19 nt, Homo sapiens
  misc_RNA (1)...(19): siRNA sense strand
uuaccuaaaugcacucuuu

SEQ ID NO: 1592582 - RNA, 19 nt, Homo sapiens
  misc_RNA (1)...(19): siRNA sense strand
gaauggaaucugaauuuga

SEQ ID NO: 1592583 - RNA, 19 nt, Homo sapiens
  misc_RNA (1)...(19): siRNA sense strand
ccucagaacugugauccua

SEQ ID NO: 1592584 - RNA, 19 nt, Homo sapiens
  misc_RNA (1)...(19): siRNA sense strand
caacagaggagcuaucauc

SEQ ID NO: 1592585 - RNA, 19 nt, Homo sapiens
  misc_RNA (1)...(19): siRNA sense strand
gaugagaaacugaaugugu

SEQ ID NO: 1592586 - RNA, 19 nt, Homo sapiens
  misc_RNA (1)...(19): siRNA sense strand
uaccaucucuugauucuuc

SEQ ID NO: 1592587 - RNA, 19 nt, Homo sapiens
  misc_RNA (1)...(19): siRNA sense strand
ggcgggaacucgacucuug

SEQ ID NO: 1592588 - RNA, 19 nt, Homo sapiens
  misc_RNA (1)...(19): siRNA sense strand
acgaagagaccucaguuua

SEQ ID NO: 1592589 - RNA, 19 nt, Homo sapiens
  misc_RNA (1)...(19): siRNA sense strand
cauaaaaucugaagaguca

SEQ ID NO: 1592590 - RNA, 19 nt, Homo sapiens
  misc_RNA (1)...(19): siRNA sense strand
ugaagacugugaaccagaa

SEQ ID NO: 1592591 - RNA, 19 nt, Homo sapiens
  misc_RNA (1)...(19): siRNA sense strand
cgaagagaccucaguuuau

SEQ ID NO: 1592592 - RNA, 19 nt, Homo sapiens
  misc_RNA (1)...(19): siRNA sense strand
ugaauggaaucugaauuug

SEQ ID NO: 1592593 - RNA, 19 nt, Homo sapiens
  misc_RNA (1)...(19): siRNA sense strand
ggacaagggaagagagaga

SEQ ID NO: 1592594 - RNA, 19 nt, Homo sapiens
  misc_RNA (1)...(19): siRNA sense strand
gaccucaguuuauuugaag

SEQ ID NO: 1592595 - RNA, 19 nt, Homo sapiens
  misc_RNA (1)...(19): siRNA sense strand
uaugugauccuucuucuga

SEQ ID NO: 1592596 - RNA, 19 nt, Homo sapiens
  misc_RNA (1)...(19): siRNA sense strand
uagaaaugguucaauugga

SEQ ID NO: 1592597 - RNA, 19 nt, Homo sapiens
  misc_RNA (1)...(19): siRNA sense strand
gcucaggaauuaaugaaaa

SEQ ID NO: 1592598 - RNA, 19 nt, Homo sapiens
  misc_RNA (1)...(19): siRNA sense strand
gcagaaaauuaccuaaaug

SEQ ID NO: 1592599 - RNA, 19 nt, Homo sapiens
  misc_RNA (1)...(19): siRNA sense strand
gauuguauaccaucucuug

SEQ ID NO: 1592600 - RNA, 19 nt, Homo sapiens
  misc_RNA (1)...(19): siRNA sense strand
gagagaagcagucagugau

SEQ ID NO: 1592601 - RNA, 19 nt, Homo sapiens
  misc_RNA (1)...(19): siRNA sense strand
caagagaauagaaaugguu

SEQ ID NO: 1592602 - RNA, 19 nt, Homo sapiens
  misc_RNA (1)...(19): siRNA sense strand
uguauaccaucucuugauu

SEQ ID NO: 1592603 - RNA, 19 nt, Homo sapiens
  misc_RNA (1)...(19): siRNA sense strand
ggaccaaguauaguaugua

SEQ ID NO: 1592604 - RNA, 19 nt, Homo sapiens
  misc_RNA (1)...(19): siRNA sense strand
caacacugauaagauugaa

SEQ ID NO: 1592605 - RNA, 19 nt, Homo sapiens
  misc_RNA (1)...(19): siRNA sense strand
gaaacugaaugugucugau

SEQ ID NO: 1592606 - RNA, 19 nt, Homo sapiens
  misc_RNA (1)...(19): siRNA sense strand
gaaagaucuuccucagaac

SEQ ID NO: 1592607 - RNA, 19 nt, Homo sapiens
  misc_RNA (1)...(19): siRNA sense strand
gaagcagucagugauugua

SEQ ID NO: 1592608 - RNA, 19 nt, Homo sapiens
  misc_RNA (1)...(19): siRNA sense strand
agaccucaguuuauuugaa

SEQ ID NO: 1592609 - RNA, 19 nt, Homo sapiens
  misc_RNA (1)...(19): siRNA sense strand
cuaaaugcacucuuucgaa

SEQ ID NO: 1592610 - RNA, 19 nt, Homo sapiens
  misc_RNA (1)...(19): siRNA sense strand
ugaagagucauccauaugu

SEQ ID NO: 1592611 - RNA, 19 nt, Homo sapiens
  misc_RNA (1)...(19): siRNA sense strand
gggauggaguguuagaucu

SEQ ID NO: 1592612 - RNA, 19 nt, Homo sapiens
  misc_RNA (1)...(19): siRNA sense strand
gaccacggcuacgaagaga

SEQ ID NO: 1592613 - RNA, 19 nt, Homo sapiens
  misc_RNA (1)...(19): siRNA sense strand
ucugaagagucauccauau

SEQ ID NO: 1592614 - RNA, 19 nt, Homo sapiens
  misc_RNA (1)...(19): siRNA sense strand
ugacuggucuauggaugaa

SEQ ID NO: 1592615 - RNA, 19 nt, Homo sapiens
  misc_RNA (1)...(19): siRNA sense strand
aagaugauacgucaauuug

SEQ ID NO: 1592616 - RNA, 19 nt, Homo sapiens
  misc_RNA (1)...(19): siRNA sense strand
gauugaaugccaagcagaa

SEQ ID NO: 1592617 - RNA, 19 nt, Homo sapiens
  misc_RNA (1)...(19): siRNA sense strand
gaaucugaauuugacaaca

SEQ ID NO: 1592618 - RNA, 19 nt, Homo sapiens
  misc_RNA (1)...(19): siRNA sense strand
caaaugaaucaagcagaaa

SEQ ID NO: 1592619 - RNA, 19 nt, Homo sapiens
  misc_RNA (1)...(19): siRNA sense strand
gagaauagaaaugguucaa

SEQ ID NO: 1592620 - RNA, 19 nt, Homo sapiens
  misc_RNA (1)...(19): siRNA sense strand
ugaaucgaaugcaagaaca

SEQ ID NO: 1592621 - RNA, 19 nt, Homo sapiens
  misc_RNA (1)...(19): siRNA sense strand
uauaccaucucuugauucu

SEQ ID NO: 1592622 - RNA, 19 nt, Homo sapiens
  misc_RNA (1)...(19): siRNA sense strand
aaacugaugagaaacugaa

SEQ ID NO: 1592623 - RNA, 19 nt, Homo sapiens
  misc_RNA (1)...(19): siRNA sense strand
ugugauccuucuucugaaa

SEQ ID NO: 1592624 - RNA, 19 nt, Homo sapiens
  misc_RNA (1)...(19): siRNA sense strand
acacugauaagauugaaug

SEQ ID NO: 1592625 - RNA, 19 nt, Homo sapiens
  misc_RNA (1)...(19): siRNA sense strand
gcuguacaguucauaacca

SEQ ID NO: 1592626 - RNA, 19 nt, Homo sapiens
  misc_RNA (1)...(19): siRNA sense strand
agagagaagcagucaguga

SEQ ID NO: 1592627 - RNA, 19 nt, Homo sapiens
  misc_RNA (1)...(19): siRNA sense strand
gacaacagcaucucuaacg

SEQ ID NO: 1592628 - RNA, 19 nt, Homo sapiens
  misc_RNA (1)...(19): siRNA sense strand
gaugagaauacagcaaguu

SEQ ID NO: 1592629 - RNA, 19 nt, Homo sapiens
  misc_RNA (1)...(19): siRNA sense strand
agugaaaacugaugagaaa

SEQ ID NO: 1592630 - RNA, 19 nt, Homo sapiens
  misc_RNA (1)...(19): siRNA sense strand
agaucucucuacaaagaaa

SEQ ID NO: 1592631 - RNA, 19 nt, Homo sapiens
  misc_RNA (1)...(19): siRNA sense strand
ggaccacggcuacgaagag

SEQ ID NO: 1592632 - RNA, 19 nt, Homo sapiens
  misc_RNA (1)...(19): siRNA sense strand
agcagucagugauuguaua

SEQ ID NO: 1592633 - RNA, 19 nt, Homo sapiens
  misc_RNA (1)...(19): siRNA sense strand
aauggaaucugaauuugac

SEQ ID NO: 1592634 - RNA, 19 nt, Homo sapiens
  misc_RNA (1)...(19): siRNA sense strand
aaacugaaugugucugaug

SEQ ID NO: 1592635 - RNA, 19 nt, Homo sapiens
  misc_RNA (1)...(19): siRNA sense strand
gcuggcaugcuacaaguga

SEQ ID NO: 1592636 - RNA, 19 nt, Homo sapiens
  misc_RNA (1)...(19): siRNA sense strand
uucaguggcuggcaugcua

SEQ ID NO: 1592637 - RNA, 19 nt, Homo sapiens
  misc_RNA (1)...(19): siRNA sense strand
gaaucgaaugcaagaacaa

SEQ ID NO: 1592638 - RNA, 19 nt, Homo sapiens
  misc_RNA (1)...(19): siRNA sense strand
ucaagagaauagaaauggu

SEQ ID NO: 1592639 - RNA, 19 nt, Homo sapiens
  misc_RNA (1)...(19): siRNA sense strand
ccaacacugauaagauuga

SEQ ID NO: 1592640 - RNA, 19 nt, Homo sapiens
  misc_RNA (1)...(19): siRNA sense strand
gauggaguguuagaucucu

SEQ ID NO: 1592641 - RNA, 19 nt, Homo sapiens
  misc_RNA (1)...(19): siRNA sense strand
acaacagcaucucuaacga

SEQ ID NO: 1592642 - RNA, 19 nt, Homo sapiens
  misc_RNA (1)...(19): siRNA sense strand
cauaugugauccuucuucu

SEQ ID NO: 1592643 - RNA, 19 nt, Homo sapiens
  misc_RNA (1)...(19): siRNA sense strand
gaaaacugaugagaaacug

SEQ ID NO: 1592644 - RNA, 19 nt, Homo sapiens
  misc_RNA (1)...(19): siRNA sense strand
aacugaaugugucugauga

SEQ ID NO: 1592645 - RNA, 19 nt, Homo sapiens
  misc_RNA (1)...(19): siRNA sense strand
agagaccucaguuuauuug

SEQ ID NO: 1592646 - RNA, 19 nt, Homo sapiens
  misc_RNA (1)...(19): siRNA sense strand
gaauuugacaacagcaucu

SEQ ID NO: 1592647 - RNA, 19 nt, Homo sapiens
  misc_RNA (1)...(19): siRNA sense strand
ucagaacugugauccuaac

SEQ ID NO: 1592648 - RNA, 19 nt, Homo sapiens
  misc_RNA (1)...(19): siRNA sense strand
cuacgaagagaccucaguu

SEQ ID NO: 1592649 - RNA, 19 nt, Homo sapiens
  misc_RNA (1)...(19): siRNA sense strand
gacaagggaagagagagaa

SEQ ID NO: 1592650 - RNA, 19 nt, Homo sapiens
  misc_RNA (1)...(19): siRNA sense strand
gugauuguauaccaucucu

SEQ ID NO: 1592651 - RNA, 19 nt, Homo sapiens
  misc_RNA (1)...(19): siRNA sense strand
cgagcuguacaguucauaa

SEQ ID NO: 1592652 - RNA, 19 nt, Homo sapiens
  misc_RNA (1)...(19): siRNA sense strand
aaucugaauuugacaacag

SEQ ID NO: 1592653 - RNA, 19 nt, Homo sapiens
  misc_RNA (1)...(19): siRNA sense strand
gccuuaaucgucccauuga

SEQ ID NO: 1592654 - RNA, 19 nt, Homo sapiens
  misc_RNA (1)...(19): siRNA sense strand
caaagaaaaccagcauaaa

SEQ ID NO: 1592655 - RNA, 19 nt, Homo sapiens
  misc_RNA (1)...(19): siRNA sense strand
acaaagaaaaccagcauaa

SEQ ID NO: 1592656 - RNA, 19 nt, Homo sapiens
  misc_RNA (1)...(19): siRNA sense strand
gcagucagugauuguauac

SEQ ID NO: 1592657 - RNA, 19 nt, Homo sapiens
  misc_RNA (1)...(19): siRNA sense strand
guacaguucauaaccaaaa

SEQ ID NO: 1592658 - RNA, 19 nt, Homo sapiens
  misc_RNA (1)...(19): siRNA sense strand
ugaaugugucugaugagaa

SEQ ID NO: 1592659 - RNA, 19 nt, Homo sapiens
  misc_RNA (1)...(19): siRNA sense strand
cugaaugugucugaugaga

SEQ ID NO: 1592660 - RNA, 19 nt, Homo sapiens
  misc_RNA (1)...(19): siRNA sense strand
agagaagcagucagugauu

SEQ ID NO: 1592661 - RNA, 19 nt, Homo sapiens
  misc_RNA (1)...(19): siRNA sense strand
uaagauugaaugccaagca

SEQ ID NO: 1592662 - RNA, 19 nt, Homo sapiens
  misc_RNA (1)...(19): siRNA sense strand
acagagagaagcagucagu

SEQ ID NO: 1592663 - RNA, 19 nt, Homo sapiens
  misc_RNA (1)...(19): siRNA sense strand
agaaacugaaugugucuga

SEQ ID NO: 1592664 - RNA, 19 nt, Homo sapiens
  misc_RNA (1)...(19): siRNA sense strand
caagggaagagagagaaug

SEQ ID NO: 1592665 - RNA, 19 nt, Homo sapiens
  misc_RNA (1)...(19): siRNA sense strand
guaaaacucaagagaauag

SEQ ID NO: 1592666 - RNA, 19 nt, Homo sapiens
  misc_RNA (1)...(19): siRNA sense strand
aagagaccucaguuuauuu

SEQ ID NO: 1592667 - RNA, 19 nt, Homo sapiens
  misc_RNA (1)...(19): siRNA sense strand
gaacauagaugggaaaguu

SEQ ID NO: 1592668 - RNA, 19 nt, Homo sapiens
  misc_RNA (1)...(19): siRNA sense strand
gaagaaggcaucaacaaua

SEQ ID NO: 1592669 - RNA, 19 nt, Homo sapiens
  misc_RNA (1)...(19): siRNA sense strand
ugaagaagcugccgaguaa

SEQ ID NO: 1592670 - RNA, 19 nt, Homo sapiens
  misc_RNA (1)...(19): siRNA sense strand
gaagggcccuggagaauga

SEQ ID NO: 1592671 - RNA, 19 nt, Homo sapiens
  misc_RNA (1)...(19): siRNA sense strand
gaaauaaccaagcuuguaa

SEQ ID NO: 1592672 - RNA, 19 nt, Homo sapiens
  misc_RNA (1)...(19): siRNA sense strand
ugaaggaccuggaguauga

SEQ ID NO: 1592673 - RNA, 19 nt, Homo sapiens
  misc_RNA (1)...(19): siRNA sense strand
gcagggagcucgcagaaau

SEQ ID NO: 1592674 - RNA, 19 nt, Homo sapiens
  misc_RNA (1)...(19): siRNA sense strand
gaaguacgagggagaaaua

SEQ ID NO: 1592675 - RNA, 19 nt, Homo sapiens
  misc_RNA (1)...(19): siRNA sense strand
gcaauaugaugcugaguug

SEQ ID NO: 1592676 - RNA, 19 nt, Homo sapiens
  misc_RNA (1)...(19): siRNA sense strand
ggagagagcugcgagacaa

SEQ ID NO: 1592677 - RNA, 19 nt, Homo sapiens
  misc_RNA (1)...(19): siRNA sense strand
gagcaacacuucagagcaa

SEQ ID NO: 1592678 - RNA, 19 nt, Homo sapiens
  misc_RNA (1)...(19): siRNA sense strand
ggagaacagugaagaacuu

SEQ ID NO: 1592679 - RNA, 19 nt, Homo sapiens
  misc_RNA (1)...(19): siRNA sense strand
aggaaacgcugaagaagua

SEQ ID NO: 1592680 - RNA, 19 nt, Homo sapiens
  misc_RNA (1)...(19): siRNA sense strand
ggaaauaaccaagcuugua

SEQ ID NO: 1592681 - RNA, 19 nt, Homo sapiens
  misc_RNA (1)...(19): siRNA sense strand
ggagacagcuaagcagauu

SEQ ID NO: 1592682 - RNA, 19 nt, Homo sapiens
  misc_RNA (1)...(19): siRNA sense strand
gaacuucagcuuccagaaa

SEQ ID NO: 1592683 - RNA, 19 nt, Homo sapiens
  misc_RNA (1)...(19): siRNA sense strand
gaacuggacgggauauuga

SEQ ID NO: 1592684 - RNA, 19 nt, Homo sapiens
  misc_RNA (1)...(19): siRNA sense strand
aagaaggcaucaacaauaa

SEQ ID NO: 1592685 - RNA, 19 nt, Homo sapiens
  misc_RNA (1)...(19): siRNA sense strand
uaaauaaccugccucuaca

SEQ ID NO: 1592686 - RNA, 19 nt, Homo sapiens
  misc_RNA (1)...(19): siRNA sense strand
ccagagagcucaggaugaa

SEQ ID NO: 1592687 - RNA, 19 nt, Homo sapiens
  misc_RNA (1)...(19): siRNA sense strand
agaacgagauggagaauga

SEQ ID NO: 1592688 - RNA, 19 nt, Homo sapiens
  misc_RNA (1)...(19): siRNA sense strand
gaagagagagagaggauga

SEQ ID NO: 1592689 - RNA, 19 nt, Homo sapiens
  misc_RNA (1)...(19): siRNA sense strand
ucaaagaucuauuggaaca

SEQ ID NO: 1592690 - RNA, 19 nt, Homo sapiens
  misc_RNA (1)...(19): siRNA sense strand
cggaguaccugauugaauu

SEQ ID NO: 1592691 - RNA, 19 nt, Homo sapiens
  misc_RNA (1)...(19): siRNA sense strand
gaaggaagcacugauaaug

SEQ ID NO: 1592692 - RNA, 19 nt, Homo sapiens
  misc_RNA (1)...(19): siRNA sense strand
caacgucaaucgucaugaa

SEQ ID NO: 1592693 - RNA, 19 nt, Homo sapiens
  misc_RNA (1)...(19): siRNA sense strand
gggaacagauggagcaguu

SEQ ID NO: 1592694 - RNA, 19 nt, Homo sapiens
  misc_RNA (1)...(19): siRNA sense strand
gaagggagcucugauugag

SEQ ID NO: 1592695 - RNA, 19 nt, Homo sapiens
  misc_RNA (1)...(19): siRNA sense strand
aagaaggacuuaagacuga

SEQ ID NO: 1592696 - RNA, 19 nt, Homo sapiens
  misc_RNA (1)...(19): siRNA sense strand
cgaguaaagugcuggauga

SEQ ID NO: 1592697 - RNA, 19 nt, Homo sapiens
  misc_RNA (1)...(19): siRNA sense strand
gggaagcgaaacagaauua

SEQ ID NO: 1592698 - RNA, 19 nt, Homo sapiens
  misc_RNA (1)...(19): siRNA sense strand
ugugacagcuauucguuua

SEQ ID NO: 1592699 - RNA, 19 nt, Homo sapiens
  misc_RNA (1)...(19): siRNA sense strand
agaaccagcuggaugagua

SEQ ID NO: 1592700 - RNA, 19 nt, Homo sapiens
  misc_RNA (1)...(19): siRNA sense strand
caacagaacauuaaagaag

SEQ ID NO: 1592701 - RNA, 19 nt, Homo sapiens
  misc_RNA (1)...(19): siRNA sense strand
gaugagagcaaaccuagaa

SEQ ID NO: 1592702 - RNA, 19 nt, Homo sapiens
  misc_RNA (1)...(19): siRNA sense strand
agucaaagaucuauuggaa

SEQ ID NO: 1592703 - RNA, 19 nt, Homo sapiens
  misc_RNA (1)...(19): siRNA sense strand
guaaagugcuggaugacau

SEQ ID NO: 1592704 - RNA, 19 nt, Homo sapiens
  misc_RNA (1)...(19): siRNA sense strand
gagaaacaacucagauuug

SEQ ID NO: 1592705 - RNA, 19 nt, Homo sapiens
  misc_RNA (1)...(19): siRNA sense strand
ggagauggcagacauuguu

SEQ ID NO: 1592706 - RNA, 19 nt, Homo sapiens
  misc_RNA (1)...(19): siRNA sense strand
ggaagaagcaaccaagaau

SEQ ID NO: 1592707 - RNA, 19 nt, Homo sapiens
  misc_RNA (1)...(19): siRNA sense strand
ggccaaaucuggugugaca

SEQ ID NO: 1592708 - RNA, 19 nt, Homo sapiens
  misc_RNA (1)...(19): siRNA sense strand
ggaggaggcugaggaggaa

SEQ ID NO: 1592709 - RNA, 19 nt, Homo sapiens
  misc_RNA (1)...(19): siRNA sense strand
ugaaggagcuggugaugca

SEQ ID NO: 1592710 - RNA, 19 nt, Homo sapiens
  misc_RNA (1)...(19): siRNA sense strand
gaacagauggagcaguuga

SEQ ID NO: 1592711 - RNA, 19 nt, Homo sapiens
  misc_RNA (1)...(19): siRNA sense strand
cuaagcagauucucuacaa

SEQ ID NO: 1592712 - RNA, 19 nt, Homo sapiens
  misc_RNA (1)...(19): siRNA sense strand
ggaaaucgacagacuggaa

SEQ ID NO: 1592713 - RNA, 19 nt, Homo sapiens
  misc_RNA (1)...(19): siRNA sense strand
ucucagaaaugcacgauga

SEQ ID NO: 1592714 - RNA, 19 nt, Homo sapiens
  misc_RNA (1)...(19): siRNA sense strand
guggaucaguuaauugaaa

SEQ ID NO: 1592715 - RNA, 19 nt, Homo sapiens
  misc_RNA (1)...(19): siRNA sense strand
cagcucaacuccaugaaga

SEQ ID NO: 1592716 - RNA, 19 nt, Homo sapiens
  misc_RNA (1)...(19): siRNA sense strand
aaagacaguugaaggagaa

SEQ ID NO: 1592717 - RNA, 19 nt, Homo sapiens
  misc_RNA (1)...(19): siRNA sense strand
gaaaugcaaagacaguuga

SEQ ID NO: 1592718 - RNA, 19 nt, Homo sapiens
  misc_RNA (1)...(19): siRNA sense strand
ggacugaaaugcgcgugaa

SEQ ID NO: 1592719 - RNA, 19 nt, Homo sapiens
  misc_RNA (1)...(19): siRNA sense strand
caacuuggucuuugagaaa

SEQ ID NO: 1592720 - RNA, 19 nt, Homo sapiens
  misc_RNA (1)...(19): siRNA sense strand
gaagguagucaggaaagua

SEQ ID NO: 1592721 - RNA, 19 nt, Homo sapiens
  misc_RNA (1)...(19): siRNA sense strand
gaaggcaucaacaauaaga

SEQ ID NO: 1592722 - RNA, 19 nt, Homo sapiens
  misc_RNA (1)...(19): siRNA sense strand
agagucaccucaaagauga

SEQ ID NO: 1592723 - RNA, 19 nt, Homo sapiens
  misc_RNA (1)...(19): siRNA sense strand
uaagaagguugaagaacga

SEQ ID NO: 1592724 - RNA, 19 nt, Homo sapiens
  misc_RNA (1)...(19): siRNA sense strand
gcagaucgaggaccugaaa

SEQ ID NO: 1592725 - RNA, 19 nt, Homo sapiens
  misc_RNA (1)...(19): siRNA sense strand
gagagaggaugagagcaaa

SEQ ID NO: 1592726 - RNA, 19 nt, Homo sapiens
  misc_RNA (1)...(19): siRNA sense strand
gaacauuaaagaagagaga

SEQ ID NO: 1592727 - RNA, 19 nt, Homo sapiens
  misc_RNA (1)...(19): siRNA sense strand
uaaccaagcuuguaauucc

SEQ ID NO: 1592728 - RNA, 19 nt, Homo sapiens
  misc_RNA (1)...(19): siRNA sense strand
uaaugacgaugcuacuaaa

SEQ ID NO: 1592729 - RNA, 19 nt, Homo sapiens
  misc_RNA (1)...(19): siRNA sense strand
caucucaccugcugaacuu

SEQ ID NO: 1592730 - RNA, 19 nt, Homo sapiens
  misc_RNA (1)...(19): siRNA sense strand
ugacauggaugacgacgau

SEQ ID NO: 1592731 - RNA, 19 nt, Homo sapiens
  misc_RNA (1)...(19): siRNA sense strand
gaaaucgacagacuggaaa

SEQ ID NO: 1592732 - RNA, 19 nt, Homo sapiens
  misc_RNA (1)...(19): siRNA sense strand
gagagaaacaacucagauu

SEQ ID NO: 1592733 - RNA, 19 nt, Homo sapiens
  misc_RNA (1)...(19): siRNA sense strand
ccaaagaggagcaagaaga

SEQ ID NO: 1592734 - RNA, 19 nt, Homo sapiens
  misc_RNA (1)...(19): siRNA sense strand
ccaaugaggagacagcuaa

SEQ ID NO: 1592735 - RNA, 19 nt, Homo sapiens
  misc_RNA (1)...(19): siRNA sense strand
ggagaaauacgacaguuag

SEQ ID NO: 1592736 - RNA, 19 nt, Homo sapiens
  misc_RNA (1)...(19): siRNA sense strand
gagaagggagcucugauug

SEQ ID NO: 1592737 - RNA, 19 nt, Homo sapiens
  misc_RNA (1)...(19): siRNA sense strand
ggagaagggagcucugauu

SEQ ID NO: 1592738 - RNA, 19 nt, Homo sapiens
  misc_RNA (1)...(19): siRNA sense strand
aaagaaggaagcacugaua

SEQ ID NO: 1592739 - RNA, 19 nt, Homo sapiens
  misc_RNA (1)...(19): siRNA sense strand
cagccuagcccaauaagaa

SEQ ID NO: 1592740 - RNA, 19 nt, Homo sapiens
  misc_RNA (1)...(19): siRNA sense strand
cgaaggaaacgcugaagaa

SEQ ID NO: 1592741 - RNA, 19 nt, Homo sapiens
  misc_RNA (1)...(19): siRNA sense strand
gaagaagcaaccaagaaug

SEQ ID NO: 1592742 - RNA, 19 nt, Homo sapiens
  misc_RNA (1)...(19): siRNA sense strand
gaaaacagaagguauauuc

SEQ ID NO: 1592743 - RNA, 19 nt, Homo sapiens
  misc_RNA (1)...(19): siRNA sense strand
gggagaaauacgacaguua

SEQ ID NO: 1592744 - RNA, 19 nt, Homo sapiens
  misc_RNA (1)...(19): siRNA sense strand
agcagauucucuacaauua

SEQ ID NO: 1592745 - RNA, 19 nt, Homo sapiens
  misc_RNA (1)...(19): siRNA sense strand
ggccacaccggaucucuua

SEQ ID NO: 1592746 - RNA, 19 nt, Homo sapiens
  misc_RNA (1)...(19): siRNA sense strand
caccuccagugauaaauaa

SEQ ID NO: 1592747 - RNA, 19 nt, Homo sapiens
  misc_RNA (1)...(19): siRNA sense strand
ucaagcagauggaggacaa

SEQ ID NO: 1592748 - RNA, 19 nt, Homo sapiens
  misc_RNA (1)...(19): siRNA sense strand
ggacaugaaugagcaucug

SEQ ID NO: 1592749 - RNA, 19 nt, Homo sapiens
  misc_RNA (1)...(19): siRNA sense strand
gcggagaguugcucagcuu

SEQ ID NO: 1592750 - RNA, 19 nt, Homo sapiens
  misc_RNA (1)...(19): siRNA sense strand
caacucagauuugcugucu

SEQ ID NO: 1592751 - RNA, 19 nt, Homo sapiens
  misc_RNA (1)...(19): siRNA sense strand
agauggaacuggaagaaga

SEQ ID NO: 1592752 - RNA, 19 nt, Homo sapiens
  misc_RNA (1)...(19): siRNA sense strand
aaagcaaguugaccauaga

SEQ ID NO: 1592753 - RNA, 19 nt, Homo sapiens
  misc_RNA (1)...(19): siRNA sense strand
ugacagcuauucguuuaug

SEQ ID NO: 1592754 - RNA, 19 nt, Homo sapiens
  misc_RNA (1)...(19): siRNA sense strand
ugaugcagguggaugauga

SEQ ID NO: 1592755 - RNA, 19 nt, Homo sapiens
  misc_RNA (1)...(19): siRNA sense strand
gagaguugcucagcuucaa

SEQ ID NO: 1592756 - RNA, 19 nt, Homo sapiens
  misc_RNA (1)...(19): siRNA sense strand
cagcuaagcagauucucua

SEQ ID NO: 1592757 - RNA, 19 nt, Homo sapiens
  misc_RNA (1)...(19): siRNA sense strand
ucacucagcaaaccaauga

SEQ ID NO: 1592758 - RNA, 19 nt, Homo sapiens
  misc_RNA (1)...(19): siRNA sense strand
caagagcucacucagcaaa

SEQ ID NO: 1592759 - RNA, 19 nt, Homo sapiens
  misc_RNA (1)...(19): siRNA sense strand
aaauuuccgugaagacauu

SEQ ID NO: 1592760 - RNA, 19 nt, Homo sapiens
  misc_RNA (1)...(19): siRNA sense strand
ucucuacaauuaccucaaa

SEQ ID NO: 1592761 - RNA, 19 nt, Homo sapiens
  misc_RNA (1)...(19): siRNA sense strand
ggagagggaucgggccaau

SEQ ID NO: 1592762 - RNA, 19 nt, Homo sapiens
  misc_RNA (1)...(19): siRNA sense strand
agagaaacaacucagauuu

SEQ ID NO: 1592763 - RNA, 19 nt, Homo sapiens
  misc_RNA (1)...(19): siRNA sense strand
gagcagaaggagcagcuaa

SEQ ID NO: 1592764 - RNA, 19 nt, Homo sapiens
  misc_RNA (1)...(19): siRNA sense strand
agaagcaguugucugagaa

SEQ ID NO: 1592765 - RNA, 19 nt, Homo sapiens
  misc_RNA (1)...(19): siRNA sense strand
gaagaaguacgagggagaa

SEQ ID NO: 1592766 - RNA, 19 nt, Homo sapiens
  misc_RNA (1)...(19): siRNA sense strand
aaagaucuauuggaacaga

SEQ ID NO: 1592767 - RNA, 19 nt, Homo sapiens
  misc_RNA (1)...(19): siRNA sense strand
ucaagaagcugaucuacgu

SEQ ID NO: 1592768 - RNA, 19 nt, Homo sapiens
  misc_RNA (1)...(19): siRNA sense strand
ggagaagaagcauaaauga

SEQ ID NO: 1592769 - RNA, 19 nt, Homo sapiens
  misc_RNA (1)...(19): siRNA sense strand
cuacguacaucuggucaua

SEQ ID NO: 1592770 - RNA, 19 nt, Homo sapiens
  misc_RNA (1)...(19): siRNA sense strand
ggccuaccguuuccucuuu

SEQ ID NO: 1592771 - RNA, 19 nt, Homo sapiens
  misc_RNA (1)...(19): siRNA sense strand
gccaugcacuaccagauga

SEQ ID NO: 1592772 - RNA, 19 nt, Homo sapiens
  misc_RNA (1)...(19): siRNA sense strand
gcacacaggagaagaagca

SEQ ID NO: 1592773 - RNA, 19 nt, Homo sapiens
  misc_RNA (1)...(19): siRNA sense strand
gugugacccucaaguauga

SEQ ID NO: 1592774 - RNA, 19 nt, Homo sapiens
  misc_RNA (1)...(19): siRNA sense strand
gaucagcaugggacucuuu

SEQ ID NO: 1592775 - RNA, 19 nt, Homo sapiens
  misc_RNA (1)...(19): siRNA sense strand
uuccaucgcuccacucauu

SEQ ID NO: 1592776 - RNA, 19 nt, Homo sapiens
  misc_RNA (1)...(19): siRNA sense strand
cacaggagaagaagcauaa

SEQ ID NO: 1592777 - RNA, 19 nt, Homo sapiens
  misc_RNA (1)...(19): siRNA sense strand
ccucaaguaugaaaucaag

SEQ ID NO: 1592778 - RNA, 19 nt, Homo sapiens
  misc_RNA (1)...(19): siRNA sense strand
gagugugacccucaaguau

SEQ ID NO: 1592779 - RNA, 19 nt, Homo sapiens
  misc_RNA (1)...(19): siRNA sense strand
cugaggcucuugucacaug

SEQ ID NO: 1592780 - RNA, 19 nt, Homo sapiens
  misc_RNA (1)...(19): siRNA sense strand
ucauguaccugguguuggu

SEQ ID NO: 1592781 - RNA, 19 nt, Homo sapiens
  misc_RNA (1)...(19): siRNA sense strand
gcaacaacauuagcuaccu

SEQ ID NO: 1592782 - RNA, 19 nt, Homo sapiens
  misc_RNA (1)...(19): siRNA sense strand
ccaucgcuccacucauuua

SEQ ID NO: 1592783 - RNA, 19 nt, Homo sapiens
  misc_RNA (1)...(19): siRNA sense strand
caagaagcugaucuacgua

SEQ ID NO: 1592784 - RNA, 19 nt, Homo sapiens
  misc_RNA (1)...(19): siRNA sense strand
gcugcugguugcuaagaug

SEQ ID NO: 1592785 - RNA, 19 nt, Homo sapiens
  misc_RNA (1)...(19): siRNA sense strand
ucgcuccacucauuuaugg

SEQ ID NO: 1592786 - RNA, 19 nt, Homo sapiens
  misc_RNA (1)...(19): siRNA sense strand
agaagcuccuagacucuug

SEQ ID NO: 1592787 - RNA, 19 nt, Homo sapiens
  misc_RNA (1)...(19): siRNA sense strand
acguacaucuggucauaug

SEQ ID NO: 1592788 - RNA, 19 nt, Homo sapiens
  misc_RNA (1)...(19): siRNA sense strand
aggagaagaagcauaaaug

SEQ ID NO: 1592789 - RNA, 19 nt, Homo sapiens
  misc_RNA (1)...(19): siRNA sense strand
caucauguaccugguguug

SEQ ID NO: 1592790 - RNA, 19 nt, Homo sapiens
  misc_RNA (1)...(19): siRNA sense strand
uggcaaggccuaccguuuc

SEQ ID NO: 1592791 - RNA, 19 nt, Homo sapiens
  misc_RNA (1)...(19): siRNA sense strand
acacaggagaagaagcaua

SEQ ID NO: 1592792 - RNA, 19 nt, Homo sapiens
  misc_RNA (1)...(19): siRNA sense strand
aagcugaucuacguacauc

SEQ ID NO: 1592793 - RNA, 19 nt, Homo sapiens
  misc_RNA (1)...(19): siRNA sense strand
caggagaagaagcauaaau

SEQ ID NO: 1592794 - RNA, 19 nt, Homo sapiens
  misc_RNA (1)...(19): siRNA sense strand
cuggugcucuccaugauca

SEQ ID NO: 1592795 - RNA, 19 nt, Homo sapiens
  misc_RNA (1)...(19): siRNA sense strand
ggcugcugcugguugcuaa

SEQ ID NO: 1592796 - RNA, 19 nt, Homo sapiens
  misc_RNA (1)...(19): siRNA sense strand
aguaugaaaucaagaagcu

SEQ ID NO: 1592797 - RNA, 19 nt, Homo sapiens
  misc_RNA (1)...(19): siRNA sense strand
gaagcugaucuacguacau

SEQ ID NO: 1592798 - RNA, 19 nt, Homo sapiens
  misc_RNA (1)...(19): siRNA sense strand
ccagcacacaggagaagaa

SEQ ID NO: 1592799 - RNA, 19 nt, Homo sapiens
  misc_RNA (1)...(19): siRNA sense strand
ggacaccugaggcucuugu

SEQ ID NO: 1592800 - RNA, 19 nt, Homo sapiens
  misc_RNA (1)...(19): siRNA sense strand
caagaagcuccuagacucu

SEQ ID NO: 1592801 - RNA, 19 nt, Homo sapiens
  misc_RNA (1)...(19): siRNA sense strand
caccgacggcagcgacuuu

SEQ ID NO: 1592802 - RNA, 19 nt, Homo sapiens
  misc_RNA (1)...(19): siRNA sense strand
gcugaucuacguacaucug

SEQ ID NO: 1592803 - RNA, 19 nt, Homo sapiens
  misc_RNA (1)...(19): siRNA sense strand
cuccuagacucuugguuca

SEQ ID NO: 1592804 - RNA, 19 nt, Homo sapiens
  misc_RNA (1)...(19): siRNA sense strand
gccuaccguuuccucuuug

SEQ ID NO: 1592805 - RNA, 19 nt, Homo sapiens
  misc_RNA (1)...(19): siRNA sense strand
ggagagaacccugaaauca

SEQ ID NO: 1592806 - RNA, 19 nt, Homo sapiens
  misc_RNA (1)...(19): siRNA sense strand
gacaagcucccacacauuu

SEQ ID NO: 1592807 - RNA, 19 nt, Homo sapiens
  misc_RNA (1)...(19): siRNA sense strand
ggagaugccaagacagaua

SEQ ID NO: 1592808 - RNA, 19 nt, Homo sapiens
  misc_RNA (1)...(19): siRNA sense strand
gagagaacccugaaaucaa

SEQ ID NO: 1592809 - RNA, 19 nt, Homo sapiens
  misc_RNA (1)...(19): siRNA sense strand
ggacaagcucccacacauu

SEQ ID NO: 1592810 - RNA, 19 nt, Homo sapiens
  misc_RNA (1)...(19): siRNA sense strand
gagaugccaagacagauaa

SEQ ID NO: 1592811 - RNA, 19 nt, Homo sapiens
  misc_RNA (1)...(19): siRNA sense strand
caacagcaccucccacaag

SEQ ID NO: 1592812 - RNA, 19 nt, Homo sapiens
  misc_RNA (1)...(19): siRNA sense strand
agagaacccugaaaucaag

SEQ ID NO: 1592813 - RNA, 19 nt, Homo sapiens
  misc_RNA (1)...(19): siRNA sense strand
caaccgggacgucaucauu

SEQ ID NO: 1592814 - RNA, 19 nt, Homo sapiens
  misc_RNA (1)...(19): siRNA sense strand
acaagauccuggugucaga

SEQ ID NO: 1592815 - RNA, 19 nt, Homo sapiens
  misc_RNA (1)...(19): siRNA sense strand
gcccgaagccucuauugga

SEQ ID NO: 1592816 - RNA, 19 nt, Homo sapiens
  misc_RNA (1)...(19): siRNA sense strand
gcgcagacgcugaucaaca

SEQ ID NO: 1592817 - RNA, 19 nt, Homo sapiens
  misc_RNA (1)...(19): siRNA sense strand
cacaggcacugaacacauc

SEQ ID NO: 1592818 - RNA, 19 nt, Homo sapiens
  misc_RNA (1)...(19): siRNA sense strand
gcaucaagcggguacacaa

SEQ ID NO: 1592819 - RNA, 19 nt, Homo sapiens
  misc_RNA (1)...(19): siRNA sense strand
gcagccaccugugcuucuu

SEQ ID NO: 1592820 - RNA, 19 nt, Homo sapiens
  misc_RNA (1)...(19): siRNA sense strand
aacagcaccucccacaaga

SEQ ID NO: 1592821 - RNA, 19 nt, Homo sapiens
  misc_RNA (1)...(19): siRNA sense strand
gggccucacguacuggaua

SEQ ID NO: 1592822 - RNA, 19 nt, Homo sapiens
  misc_RNA (1)...(19): siRNA sense strand
gagaugggccucacguacu

SEQ ID NO: 1592823 - RNA, 19 nt, Homo sapiens
  misc_RNA (1)...(19): siRNA sense strand
gggagagaacccugaaauc

SEQ ID NO: 1592824 - RNA, 19 nt, Homo sapiens
  misc_RNA (1)...(19): siRNA sense strand
gggcgcagacgcugaucaa

SEQ ID NO: 1592825 - RNA, 19 nt, Homo sapiens
  misc_RNA (1)...(19): siRNA sense strand
aggacaagcucccacacau

SEQ ID NO: 1592826 - RNA, 19 nt, Homo sapiens
  misc_RNA (1)...(19): siRNA sense strand
ucaagcggguacacaaggu

SEQ ID NO: 1592827 - RNA, 19 nt, Homo sapiens
  misc_RNA (1)...(19): siRNA sense strand
ggccucacguacuggauag

SEQ ID NO: 1592828 - RNA, 19 nt, Homo sapiens
  misc_RNA (1)...(19): siRNA sense strand
agacgcugaucaacaccaa

SEQ ID NO: 1592829 - RNA, 19 nt, Homo sapiens
  misc_RNA (1)...(19): siRNA sense strand
cagcaccucccacaagauc

SEQ ID NO: 1592830 - RNA, 19 nt, Homo sapiens
  misc_RNA (1)...(19): siRNA sense strand
agaugggccucacguacug

SEQ ID NO: 1592831 - RNA, 19 nt, Homo sapiens
  misc_RNA (1)...(19): siRNA sense strand
accgggacgucaucauuga

SEQ ID NO: 1592832 - RNA, 19 nt, Homo sapiens
  misc_RNA (1)...(19): siRNA sense strand
ggcgaucagugucgaugag

SEQ ID NO: 1592833 - RNA, 19 nt, Homo sapiens
  misc_RNA (1)...(19): siRNA sense strand
ccacacauuuucagguuca

SEQ ID NO: 1592834 - RNA, 19 nt, Homo sapiens
  misc_RNA (1)...(19): siRNA sense strand
gcaagcugcuccaggacau

SEQ ID NO: 1592835 - RNA, 19 nt, Homo sapiens
  misc_RNA (1)...(19): siRNA sense strand
gaacaaaagcaaauggaau

SEQ ID NO: 1592836 - RNA, 19 nt, Homo sapiens
  misc_RNA (1)...(19): siRNA sense strand
uggguguucuucuuuguga

SEQ ID NO: 1592837 - RNA, 19 nt, Homo sapiens
  misc_RNA (1)...(19): siRNA sense strand
gcagggagagagcaaccaa

SEQ ID NO: 1592838 - RNA, 19 nt, Homo sapiens
  misc_RNA (1)...(19): siRNA sense strand
cagcaugugggcagaacaa

SEQ ID NO: 1592839 - RNA, 19 nt, Homo sapiens
  misc_RNA (1)...(19): siRNA sense strand
aaaagcaaauggaauugga

SEQ ID NO: 1592840 - RNA, 19 nt, Homo sapiens
  misc_RNA (1)...(19): siRNA sense strand
aaauggaauuggagagcau

SEQ ID NO: 1592841 - RNA, 19 nt, Homo sapiens
  misc_RNA (1)...(19): siRNA sense strand
guauauagcuggaggcauu

SEQ ID NO: 1592842 - RNA, 19 nt, Homo sapiens
  misc_RNA (1)...(19): siRNA sense strand
ggaacucucuauuguguuu

SEQ ID NO: 1592843 - RNA, 19 nt, Homo sapiens
  misc_RNA (1)...(19): siRNA sense strand
ggagagagguuccggaagu

SEQ ID NO: 1592844 - RNA, 19 nt, Homo sapiens
  misc_RNA (1)...(19): siRNA sense strand
uagcagcucuuccugaauu

SEQ ID NO: 1592845 - RNA, 19 nt, Homo sapiens
  misc_RNA (1)...(19): siRNA sense strand
gcuagcagcucuuccugaa

SEQ ID NO: 1592846 - RNA, 19 nt, Homo sapiens
  misc_RNA (1)...(19): siRNA sense strand
gagagagguuccggaagua

SEQ ID NO: 1592847 - RNA, 19 nt, Homo sapiens
  misc_RNA (1)...(19): siRNA sense strand
gaagaguuguuugaagaga

SEQ ID NO: 1592848 - RNA, 19 nt, Homo sapiens
  misc_RNA (1)...(19): siRNA sense strand
gaaagaaccagcucugucu

SEQ ID NO: 1592849 - RNA, 19 nt, Homo sapiens
  misc_RNA (1)...(19): siRNA sense strand
gaucuacgccuuuguugga

SEQ ID NO: 1592850 - RNA, 19 nt, Homo sapiens
  misc_RNA (1)...(19): siRNA sense strand
gcaugaacccggugaucua

SEQ ID NO: 1592851 - RNA, 19 nt, Homo sapiens
  misc_RNA (1)...(19): siRNA sense strand
gugagaagcuggaaagaac

SEQ ID NO: 1592852 - RNA, 19 nt, Homo sapiens
  misc_RNA (1)...(19): siRNA sense strand
cugaagaguuguuugaaga

SEQ ID NO: 1592853 - RNA, 19 nt, Homo sapiens
  misc_RNA (1)...(19): siRNA sense strand
gaaugaccaucuucugucu

SEQ ID NO: 1592854 - RNA, 19 nt, Homo sapiens
  misc_RNA (1)...(19): siRNA sense strand
gaauuaugaccaacaucua

SEQ ID NO: 1592855 - RNA, 19 nt, Homo sapiens
  misc_RNA (1)...(19): siRNA sense strand
gcaauguggugguggugau

SEQ ID NO: 1592856 - RNA, 19 nt, Homo sapiens
  misc_RNA (1)...(19): siRNA sense strand
gcagauacaucccauuccu

SEQ ID NO: 1592857 - RNA, 19 nt, Homo sapiens
  misc_RNA (1)...(19): siRNA sense strand
caaccucacuagauacagu

SEQ ID NO: 1592858 - RNA, 19 nt, Homo sapiens
  misc_RNA (1)...(19): siRNA sense strand
cuaugagacugaagaguug

SEQ ID NO: 1592859 - RNA, 19 nt, Homo sapiens
  misc_RNA (1)...(19): siRNA sense strand
ccggaacucucuauugugu

SEQ ID NO: 1592860 - RNA, 19 nt, Homo sapiens
  misc_RNA (1)...(19): siRNA sense strand
cauuguccaugcuguguuu

SEQ ID NO: 1592861 - RNA, 19 nt, Homo sapiens
  misc_RNA (1)...(19): siRNA sense strand
ucaugcaccugggcagaua

SEQ ID NO: 1592862 - RNA, 19 nt, Homo sapiens
  misc_RNA (1)...(19): siRNA sense strand
gagccggaacucucuauug

SEQ ID NO: 1592863 - RNA, 19 nt, Homo sapiens
  misc_RNA (1)...(19): siRNA sense strand
ucauaauccugcugacaau

SEQ ID NO: 1592864 - RNA, 19 nt, Homo sapiens
  misc_RNA (1)...(19): siRNA sense strand
guaccacauccuacuauga

SEQ ID NO: 1592865 - RNA, 19 nt, Homo sapiens
  misc_RNA (1)...(19): siRNA sense strand
gggcagauacaucccauuc

SEQ ID NO: 1592866 - RNA, 19 nt, Homo sapiens
  misc_RNA (1)...(19): siRNA sense strand
ggaggcauuuccacacucu

SEQ ID NO: 1592867 - RNA, 19 nt, Homo sapiens
  misc_RNA (1)...(19): siRNA sense strand
gagcccggacugucacuuu

SEQ ID NO: 1592868 - RNA, 19 nt, Homo sapiens
  misc_RNA (1)...(19): siRNA sense strand
uagauacaguugagaccuu

SEQ ID NO: 1592869 - RNA, 19 nt, Homo sapiens
  misc_RNA (1)...(19): siRNA sense strand
agacugaagaguuguuuga

SEQ ID NO: 1592870 - RNA, 19 nt, Homo sapiens
  misc_RNA (1)...(19): siRNA sense strand
gcagcucuuccugaauuua

SEQ ID NO: 1592871 - RNA, 19 nt, Homo sapiens
  misc_RNA (1)...(19): siRNA sense strand
cuacacaggaaucaucaaa

SEQ ID NO: 1592872 - RNA, 19 nt, Homo sapiens
  misc_RNA (1)...(19): siRNA sense strand
gcugauaccagagcacuga

SEQ ID NO: 1592873 - RNA, 19 nt, Homo sapiens
  misc_RNA (1)...(19): siRNA sense strand
ucuaugagacugaagaguu

SEQ ID NO: 1592874 - RNA, 19 nt, Homo sapiens
  misc_RNA (1)...(19): siRNA sense strand
gguaccacauccuacuaug

SEQ ID NO: 1592875 - RNA, 19 nt, Homo sapiens
  misc_RNA (1)...(19): siRNA sense strand
ucccauuccuuccuaguga

SEQ ID NO: 1592876 - RNA, 19 nt, Homo sapiens
  misc_RNA (1)...(19): siRNA sense strand
caauguggcuauccuucuc

SEQ ID NO: 1592877 - RNA, 19 nt, Homo sapiens
  misc_RNA (1)...(19): siRNA sense strand
guugagaccuuugguacca

SEQ ID NO: 1592878 - RNA, 19 nt, Homo sapiens
  misc_RNA (1)...(19): siRNA sense strand
cauucuggauccacuaugu

SEQ ID NO: 1592879 - RNA, 19 nt, Homo sapiens
  misc_RNA (1)...(19): siRNA sense strand
ggugaucuacgccuuuguu

SEQ ID NO: 1592880 - RNA, 19 nt, Homo sapiens
  misc_RNA (1)...(19): siRNA sense strand
cgaauuaugaccaacaucu

SEQ ID NO: 1592881 - RNA, 19 nt, Homo sapiens
  misc_RNA (1)...(19): siRNA sense strand
agccggaacucucuauugu

SEQ ID NO: 1592882 - RNA, 19 nt, Homo sapiens
  misc_RNA (1)...(19): siRNA sense strand
agauacaguugagaccuuu

SEQ ID NO: 1592883 - RNA, 19 nt, Homo sapiens
  misc_RNA (1)...(19): siRNA sense strand
gaccaucuucugucucguu

SEQ ID NO: 1592884 - RNA, 19 nt, Homo sapiens
  misc_RNA (1)...(19): siRNA sense strand
uggcuauccuucucucuuc

SEQ ID NO: 1592885 - RNA, 19 nt, Homo sapiens
  misc_RNA (1)...(19): siRNA sense strand
gccaucugcuacacaggaa

SEQ ID NO: 1592886 - RNA, 19 nt, Homo sapiens
  misc_RNA (1)...(19): siRNA sense strand
uaucuucuaugagacugaa

SEQ ID NO: 1592887 - RNA, 19 nt, Homo sapiens
  misc_RNA (1)...(19): siRNA sense strand
gcaccugggcagauacauc

SEQ ID NO: 1592888 - RNA, 19 nt, Homo sapiens
  misc_RNA (1)...(19): siRNA sense strand
gacaaccucacuagauaca

SEQ ID NO: 1592889 - RNA, 19 nt, Homo sapiens
  misc_RNA (1)...(19): siRNA sense strand
uacaucccauuccuuccua

SEQ ID NO: 1592890 - RNA, 19 nt, Homo sapiens
  misc_RNA (1)...(19): siRNA sense strand
gcauuuccacacucugaga

SEQ ID NO: 1592891 - RNA, 19 nt, Homo sapiens
  misc_RNA (1)...(19): siRNA sense strand
ccacaggcacuugcucaug

SEQ ID NO: 1592892 - RNA, 19 nt, Homo sapiens
  misc_RNA (1)...(19): siRNA sense strand
guaccugcgccacuucuuc

SEQ ID NO: 1592893 - RNA, 19 nt, Homo sapiens
  misc_RNA (1)...(19): siRNA sense strand
caucuucugucucguucuc

SEQ ID NO: 1592894 - RNA, 19 nt, Homo sapiens
  misc_RNA (1)...(19): siRNA sense strand
ccucgucacccuuccauuc

SEQ ID NO: 1592895 - RNA, 19 nt, Homo sapiens
  misc_RNA (1)...(19): siRNA sense strand
uaccacauccuacuaugau

SEQ ID NO: 1592896 - RNA, 19 nt, Homo sapiens
  misc_RNA (1)...(19): siRNA sense strand
ccuaucaauccaucuuauu

SEQ ID NO: 1592897 - RNA, 19 nt, Homo sapiens
  misc_RNA (1)...(19): siRNA sense strand
uuacccagaggauacagua

SEQ ID NO: 1592898 - RNA, 19 nt, Homo sapiens
  misc_RNA (1)...(19): siRNA sense strand
cagcucuuccugaauuuau

SEQ ID NO: 1592899 - RNA, 19 nt, Homo sapiens
  misc_RNA (1)...(19): siRNA sense strand
cagaggugaucgccuacuc

SEQ ID NO: 1592900 - RNA, 19 nt, Homo sapiens
  misc_RNA (1)...(19): siRNA sense strand
caacaucuaccugcucaac

SEQ ID NO: 1592901 - RNA, 19 nt, Homo sapiens
  misc_RNA (1)...(19): siRNA sense strand
guaccuggccauuguccau

SEQ ID NO: 1592902 - RNA, 19 nt, Homo sapiens
  misc_RNA (1)...(19): siRNA sense strand
ccggugaucuacgccuuug

SEQ ID NO: 1592903 - RNA, 19 nt, Homo sapiens
  misc_RNA (1)...(19): siRNA sense strand
acaguugagaccuuuggua

SEQ ID NO: 1592904 - RNA, 19 nt, Homo sapiens
  misc_RNA (1)...(19): siRNA sense strand
acugaagaguuguuugaag

SEQ ID NO: 1592905 - RNA, 19 nt, Homo sapiens
  misc_RNA (1)...(19): siRNA sense strand
guauauagcuggaggcauu

SEQ ID NO: 1592906 - RNA, 19 nt, Homo sapiens
  misc_RNA (1)...(19): siRNA sense strand
ggaacucucuauuguguuu

SEQ ID NO: 1592907 - RNA, 19 nt, Homo sapiens
  misc_RNA (1)...(19): siRNA sense strand
ggagagagguuccggaagu

SEQ ID NO: 1592908 - RNA, 19 nt, Homo sapiens
  misc_RNA (1)...(19): siRNA sense strand
uagcagcucuuccugaauu

SEQ ID NO: 1592909 - RNA, 19 nt, Homo sapiens
  misc_RNA (1)...(19): siRNA sense strand
gcuagcagcucuuccugaa

SEQ ID NO: 1592910 - RNA, 19 nt, Homo sapiens
  misc_RNA (1)...(19): siRNA sense strand
gagagagguuccggaagua

SEQ ID NO: 1592911 - RNA, 19 nt, Homo sapiens
  misc_RNA (1)...(19): siRNA sense strand
gaagaguuguuugaagaga

SEQ ID NO: 1592912 - RNA, 19 nt, Homo sapiens
  misc_RNA (1)...(19): siRNA sense strand
gaaagaaccagcucugucu

SEQ ID NO: 1592913 - RNA, 19 nt, Homo sapiens
  misc_RNA (1)...(19): siRNA sense strand
gaucuacgccuuuguugga

SEQ ID NO: 1592914 - RNA, 19 nt, Homo sapiens
  misc_RNA (1)...(19): siRNA sense strand
gcaugaacccggugaucua

SEQ ID NO: 1592915 - RNA, 19 nt, Homo sapiens
  misc_RNA (1)...(19): siRNA sense strand
gugagaagcuggaaagaac

SEQ ID NO: 1592916 - RNA, 19 nt, Homo sapiens
  misc_RNA (1)...(19): siRNA sense strand
cugaagaguuguuugaaga

SEQ ID NO: 1592917 - RNA, 19 nt, Homo sapiens
  misc_RNA (1)...(19): siRNA sense strand
gaaugaccaucuucugucu

SEQ ID NO: 1592918 - RNA, 19 nt, Homo sapiens
  misc_RNA (1)...(19): siRNA sense strand
gaauuaugaccaacaucua

SEQ ID NO: 1592919 - RNA, 19 nt, Homo sapiens
  misc_RNA (1)...(19): siRNA sense strand
gcaauguggugguggugau

SEQ ID NO: 1592920 - RNA, 19 nt, Homo sapiens
  misc_RNA (1)...(19): siRNA sense strand
gcagauacaucccauuccu

SEQ ID NO: 1592921 - RNA, 19 nt, Homo sapiens
  misc_RNA (1)...(19): siRNA sense strand
caaccucacuagauacagu

SEQ ID NO: 1592922 - RNA, 19 nt, Homo sapiens
  misc_RNA (1)...(19): siRNA sense strand
cuaugagacugaagaguug

SEQ ID NO: 1592923 - RNA, 19 nt, Homo sapiens
  misc_RNA (1)...(19): siRNA sense strand
ccggaacucucuauugugu

SEQ ID NO: 1592924 - RNA, 19 nt, Homo sapiens
  misc_RNA (1)...(19): siRNA sense strand
cauuguccaugcuguguuu

SEQ ID NO: 1592925 - RNA, 19 nt, Homo sapiens
  misc_RNA (1)...(19): siRNA sense strand
ucaugcaccugggcagaua

SEQ ID NO: 1592926 - RNA, 19 nt, Homo sapiens
  misc_RNA (1)...(19): siRNA sense strand
gagccggaacucucuauug

SEQ ID NO: 1592927 - RNA, 19 nt, Homo sapiens
  misc_RNA (1)...(19): siRNA sense strand
ucauaauccugcugacaau

SEQ ID NO: 1592928 - RNA, 19 nt, Homo sapiens
  misc_RNA (1)...(19): siRNA sense strand
guaccacauccuacuauga

SEQ ID NO: 1592929 - RNA, 19 nt, Homo sapiens
  misc_RNA (1)...(19): siRNA sense strand
gggcagauacaucccauuc

SEQ ID NO: 1592930 - RNA, 19 nt, Homo sapiens
  misc_RNA (1)...(19): siRNA sense strand
ggaggcauuuccacacucu

SEQ ID NO: 1592931 - RNA, 19 nt, Homo sapiens
  misc_RNA (1)...(19): siRNA sense strand
gagcccggacugucacuuu

SEQ ID NO: 1592932 - RNA, 19 nt, Homo sapiens
  misc_RNA (1)...(19): siRNA sense strand
uagauacaguugagaccuu

SEQ ID NO: 1592933 - RNA, 19 nt, Homo sapiens
  misc_RNA (1)...(19): siRNA sense strand
agacugaagaguuguuuga

SEQ ID NO: 1592934 - RNA, 19 nt, Homo sapiens
  misc_RNA (1)...(19): siRNA sense strand
gcagcucuuccugaauuua

SEQ ID NO: 1592935 - RNA, 19 nt, Homo sapiens
  misc_RNA (1)...(19): siRNA sense strand
cuacacaggaaucaucaaa

SEQ ID NO: 1592936 - RNA, 19 nt, Homo sapiens
  misc_RNA (1)...(19): siRNA sense strand
gcugauaccagagcacuga

SEQ ID NO: 1592937 - RNA, 19 nt, Homo sapiens
  misc_RNA (1)...(19): siRNA sense strand
ucuaugagacugaagaguu

SEQ ID NO: 1592938 - RNA, 19 nt, Homo sapiens
  misc_RNA (1)...(19): siRNA sense strand
gguaccacauccuacuaug

SEQ ID NO: 1592939 - RNA, 19 nt, Homo sapiens
  misc_RNA (1)...(19): siRNA sense strand
ucccauuccuuccuaguga

SEQ ID NO: 1592940 - RNA, 19 nt, Homo sapiens
  misc_RNA (1)...(19): siRNA sense strand
caauguggcuauccuucuc

SEQ ID NO: 1592941 - RNA, 19 nt, Homo sapiens
  misc_RNA (1)...(19): siRNA sense strand
guugagaccuuugguacca

SEQ ID NO: 1592942 - RNA, 19 nt, Homo sapiens
  misc_RNA (1)...(19): siRNA sense strand
cauucuggauccacuaugu

SEQ ID NO: 1592943 - RNA, 19 nt, Homo sapiens
  misc_RNA (1)...(19): siRNA sense strand
ggugaucuacgccuuuguu

SEQ ID NO: 1592944 - RNA, 19 nt, Homo sapiens
  misc_RNA (1)...(19): siRNA sense strand
cgaauuaugaccaacaucu

SEQ ID NO: 1592945 - RNA, 19 nt, Homo sapiens
  misc_RNA (1)...(19): siRNA sense strand
agccggaacucucuauugu

SEQ ID NO: 1592946 - RNA, 19 nt, Homo sapiens
  misc_RNA (1)...(19): siRNA sense strand
agauacaguugagaccuuu

SEQ ID NO: 1592947 - RNA, 19 nt, Homo sapiens
  misc_RNA (1)...(19): siRNA sense strand
gaccaucuucugucucguu

SEQ ID NO: 1592948 - RNA, 19 nt, Homo sapiens
  misc_RNA (1)...(19): siRNA sense strand
uggcuauccuucucucuuc

SEQ ID NO: 1592949 - RNA, 19 nt, Homo sapiens
  misc_RNA (1)...(19): siRNA sense strand
gccaucugcuacacaggaa

SEQ ID NO: 1592950 - RNA, 19 nt, Homo sapiens
  misc_RNA (1)...(19): siRNA sense strand
uaucuucuaugagacugaa

SEQ ID NO: 1592951 - RNA, 19 nt, Homo sapiens
  misc_RNA (1)...(19): siRNA sense strand
gcaccugggcagauacauc

SEQ ID NO: 1592952 - RNA, 19 nt, Homo sapiens
  misc_RNA (1)...(19): siRNA sense strand
gacaaccucacuagauaca

SEQ ID NO: 1592953 - RNA, 19 nt, Homo sapiens
  misc_RNA (1)...(19): siRNA sense strand
uacaucccauuccuuccua

SEQ ID NO: 1592954 - RNA, 19 nt, Homo sapiens
  misc_RNA (1)...(19): siRNA sense strand
gcauuuccacacucugaga

SEQ ID NO: 1592955 - RNA, 19 nt, Homo sapiens
  misc_RNA (1)...(19): siRNA sense strand
ccacaggcacuugcucaug

SEQ ID NO: 1592956 - RNA, 19 nt, Homo sapiens
  misc_RNA (1)...(19): siRNA sense strand
guaccugcgccacuucuuc

SEQ ID NO: 1592957 - RNA, 19 nt, Homo sapiens
  misc_RNA (1)...(19): siRNA sense strand
caucuucugucucguucuc

SEQ ID NO: 1592958 - RNA, 19 nt, Homo sapiens
  misc_RNA (1)...(19): siRNA sense strand
ccucgucacccuuccauuc

SEQ ID NO: 1592959 - RNA, 19 nt, Homo sapiens
  misc_RNA (1)...(19): siRNA sense strand
uaccacauccuacuaugau

SEQ ID NO: 1592960 - RNA, 19 nt, Homo sapiens
  misc_RNA (1)...(19): siRNA sense strand
ccuaucaauccaucuuauu

SEQ ID NO: 1592961 - RNA, 19 nt, Homo sapiens
  misc_RNA (1)...(19): siRNA sense strand
uuacccagaggauacagua

SEQ ID NO: 1592962 - RNA, 19 nt, Homo sapiens
  misc_RNA (1)...(19): siRNA sense strand
cagcucuuccugaauuuau

SEQ ID NO: 1592963 - RNA, 19 nt, Homo sapiens
  misc_RNA (1)...(19): siRNA sense strand
cagaggugaucgccuacuc

SEQ ID NO: 1592964 - RNA, 19 nt, Homo sapiens
  misc_RNA (1)...(19): siRNA sense strand
caacaucuaccugcucaac

SEQ ID NO: 1592965 - RNA, 19 nt, Homo sapiens
  misc_RNA (1)...(19): siRNA sense strand
guaccuggccauuguccau

SEQ ID NO: 1592966 - RNA, 19 nt, Homo sapiens
  misc_RNA (1)...(19): siRNA sense strand
ccggugaucuacgccuuug

SEQ ID NO: 1592967 - RNA, 19 nt, Homo sapiens
  misc_RNA (1)...(19): siRNA sense strand
acaguugagaccuuuggua

SEQ ID NO: 1592968 - RNA, 19 nt, Homo sapiens
  misc_RNA (1)...(19): siRNA sense strand
acugaagaguuguuugaag

SEQ ID NO: 1592969 - RNA, 19 nt, Homo sapiens
  misc_RNA (1)...(19): siRNA sense strand
uagcaucucuaaagaagua

SEQ ID NO: 1592970 - RNA, 19 nt, Homo sapiens
  misc_RNA (1)...(19): siRNA sense strand
aagaagaacugauugaaga

SEQ ID NO: 1592971 - RNA, 19 nt, Homo sapiens
  misc_RNA (1)...(19): siRNA sense strand
guauaaacuucgccucauu

SEQ ID NO: 1592972 - RNA, 19 nt, Homo sapiens
  misc_RNA (1)...(19): siRNA sense strand
aaacuucgccucauuuaau

SEQ ID NO: 1592973 - RNA, 19 nt, Homo sapiens
  misc_RNA (1)...(19): siRNA sense strand
aaacuguggugaauggaaa

SEQ ID NO: 1592974 - RNA, 19 nt, Homo sapiens
  misc_RNA (1)...(19): siRNA sense strand
gguuaaggcagcagcuuua

SEQ ID NO: 1592975 - RNA, 19 nt, Homo sapiens
  misc_RNA (1)...(19): siRNA sense strand
gaucuuacagucaaggaaa

SEQ ID NO: 1592976 - RNA, 19 nt, Homo sapiens
  misc_RNA (1)...(19): siRNA sense strand
uuucuuggauuguuggaua

SEQ ID NO: 1592977 - RNA, 19 nt, Homo sapiens
  misc_RNA (1)...(19): siRNA sense strand
gcuccugcuuaccaucuua

SEQ ID NO: 1592978 - RNA, 19 nt, Homo sapiens
  misc_RNA (1)...(19): siRNA sense strand
ggcagcagcuuuagcaucu

SEQ ID NO: 1592979 - RNA, 19 nt, Homo sapiens
  misc_RNA (1)...(19): siRNA sense strand
uggauaaucagacuucuuu

SEQ ID NO: 1592980 - RNA, 19 nt, Homo sapiens
  misc_RNA (1)...(19): siRNA sense strand
caaauuacaagaacgaucu

SEQ ID NO: 1592981 - RNA, 19 nt, Homo sapiens
  misc_RNA (1)...(19): siRNA sense strand
gcaaccagaaccucuuguu

SEQ ID NO: 1592982 - RNA, 19 nt, Homo sapiens
  misc_RNA (1)...(19): siRNA sense strand
uauaaacuucgccucauuu

SEQ ID NO: 1592983 - RNA, 19 nt, Homo sapiens
  misc_RNA (1)...(19): siRNA sense strand
caacuacaacaucguuuca

SEQ ID NO: 1592984 - RNA, 19 nt, Homo sapiens
  misc_RNA (1)...(19): siRNA sense strand
uuacgaggcuccugcuuac

SEQ ID NO: 1592985 - RNA, 19 nt, Homo sapiens
  misc_RNA (1)...(19): siRNA sense strand
gaagaacugauugaagagu

SEQ ID NO: 1592986 - RNA, 19 nt, Homo sapiens
  misc_RNA (1)...(19): siRNA sense strand
uaaggcagcagcuuuagca

SEQ ID NO: 1592987 - RNA, 19 nt, Homo sapiens
  misc_RNA (1)...(19): siRNA sense strand
ucagacuucuuuucucuaa

SEQ ID NO: 1592988 - RNA, 19 nt, Homo sapiens
  misc_RNA (1)...(19): siRNA sense strand
aaagaagaacugauugaag

SEQ ID NO: 1592989 - RNA, 19 nt, Homo sapiens
  misc_RNA (1)...(19): siRNA sense strand
ggguuaaggcagcagcuuu

SEQ ID NO: 1592990 - RNA, 19 nt, Homo sapiens
  misc_RNA (1)...(19): siRNA sense strand
uuuacgaggcuccugcuua

SEQ ID NO: 1592991 - RNA, 19 nt, Homo sapiens
  misc_RNA (1)...(19): siRNA sense strand
gaagaguggcaaccagaac

SEQ ID NO: 1592992 - RNA, 19 nt, Homo sapiens
  misc_RNA (1)...(19): siRNA sense strand
aacuucgccucauuuaauu

SEQ ID NO: 1592993 - RNA, 19 nt, Homo sapiens
  misc_RNA (1)...(19): siRNA sense strand
ugaagaguggcaaccagaa

SEQ ID NO: 1592994 - RNA, 19 nt, Homo sapiens
  misc_RNA (1)...(19): siRNA sense strand
cagcagcuuuagcaucucu

SEQ ID NO: 1592995 - RNA, 19 nt, Homo sapiens
  misc_RNA (1)...(19): siRNA sense strand
gagaugguacaggcgcuuu

SEQ ID NO: 1592996 - RNA, 19 nt, Homo sapiens
  misc_RNA (1)...(19): siRNA sense strand
acaaaacuguggugaaugg

SEQ ID NO: 1592997 - RNA, 19 nt, Homo sapiens
  misc_RNA (1)...(19): siRNA sense strand
ucaacuacaacaucguuuc

SEQ ID NO: 1592998 - RNA, 19 nt, Homo sapiens
  misc_RNA (1)...(19): siRNA sense strand
uguauaaacuucgccucau

SEQ ID NO: 1592999 - RNA, 19 nt, Homo sapiens
  misc_RNA (1)...(19): siRNA sense strand
uagcaucucuaaagaagua

SEQ ID NO: 1593000 - RNA, 19 nt, Homo sapiens
  misc_RNA (1)...(19): siRNA sense strand
aagaagaacugauugaaga

SEQ ID NO: 1593001 - RNA, 19 nt, Homo sapiens
  misc_RNA (1)...(19): siRNA sense strand
guauaaacuucgccucauu

SEQ ID NO: 1593002 - RNA, 19 nt, Homo sapiens
  misc_RNA (1)...(19): siRNA sense strand
aaacuucgccucauuuaau

SEQ ID NO: 1593003 - RNA, 19 nt, Homo sapiens
  misc_RNA (1)...(19): siRNA sense strand
aaacuguggugaauggaaa

SEQ ID NO: 1593004 - RNA, 19 nt, Homo sapiens
  misc_RNA (1)...(19): siRNA sense strand
gguuaaggcagcagcuuua

SEQ ID NO: 1593005 - RNA, 19 nt, Homo sapiens
  misc_RNA (1)...(19): siRNA sense strand
gaucuuacagucaaggaaa

SEQ ID NO: 1593006 - RNA, 19 nt, Homo sapiens
  misc_RNA (1)...(19): siRNA sense strand
uuucuuggauuguuggaua

SEQ ID NO: 1593007 - RNA, 19 nt, Homo sapiens
  misc_RNA (1)...(19): siRNA sense strand
gcuccugcuuaccaucuua

SEQ ID NO: 1593008 - RNA, 19 nt, Homo sapiens
  misc_RNA (1)...(19): siRNA sense strand
ggcagcagcuuuagcaucu

SEQ ID NO: 1593009 - RNA, 19 nt, Homo sapiens
  misc_RNA (1)...(19): siRNA sense strand
uggauaaucagacuucuuu

SEQ ID NO: 1593010 - RNA, 19 nt, Homo sapiens
  misc_RNA (1)...(19): siRNA sense strand
caaauuacaagaacgaucu

SEQ ID NO: 1593011 - RNA, 19 nt, Homo sapiens
  misc_RNA (1)...(19): siRNA sense strand
gcaaccagaaccucuuguu

SEQ ID NO: 1593012 - RNA, 19 nt, Homo sapiens
  misc_RNA (1)...(19): siRNA sense strand
uauaaacuucgccucauuu

SEQ ID NO: 1593013 - RNA, 19 nt, Homo sapiens
  misc_RNA (1)...(19): siRNA sense strand
caacuacaacaucguuuca

SEQ ID NO: 1593014 - RNA, 19 nt, Homo sapiens
  misc_RNA (1)...(19): siRNA sense strand
uuacgaggcuccugcuuac

SEQ ID NO: 1593015 - RNA, 19 nt, Homo sapiens
  misc_RNA (1)...(19): siRNA sense strand
gaagaacugauugaagagu

SEQ ID NO: 1593016 - RNA, 19 nt, Homo sapiens
  misc_RNA (1)...(19): siRNA sense strand
uaaggcagcagcuuuagca

SEQ ID NO: 1593017 - RNA, 19 nt, Homo sapiens
  misc_RNA (1)...(19): siRNA sense strand
ucagacuucuuuucucuaa

SEQ ID NO: 1593018 - RNA, 19 nt, Homo sapiens
  misc_RNA (1)...(19): siRNA sense strand
aaagaagaacugauugaag

SEQ ID NO: 1593019 - RNA, 19 nt, Homo sapiens
  misc_RNA (1)...(19): siRNA sense strand
ggguuaaggcagcagcuuu

SEQ ID NO: 1593020 - RNA, 19 nt, Homo sapiens
  misc_RNA (1)...(19): siRNA sense strand
uuuacgaggcuccugcuua

SEQ ID NO: 1593021 - RNA, 19 nt, Homo sapiens
  misc_RNA (1)...(19): siRNA sense strand
gaagaguggcaaccagaac

SEQ ID NO: 1593022 - RNA, 19 nt, Homo sapiens
  misc_RNA (1)...(19): siRNA sense strand
aacuucgccucauuuaauu

SEQ ID NO: 1593023 - RNA, 19 nt, Homo sapiens
  misc_RNA (1)...(19): siRNA sense strand
ugaagaguggcaaccagaa

SEQ ID NO: 1593024 - RNA, 19 nt, Homo sapiens
  misc_RNA (1)...(19): siRNA sense strand
cagcagcuuuagcaucucu

SEQ ID NO: 1593025 - RNA, 19 nt, Homo sapiens
  misc_RNA (1)...(19): siRNA sense strand
gagaugguacaggcgcuuu

SEQ ID NO: 1593026 - RNA, 19 nt, Homo sapiens
  misc_RNA (1)...(19): siRNA sense strand
acaaaacuguggugaaugg

SEQ ID NO: 1593027 - RNA, 19 nt, Homo sapiens
  misc_RNA (1)...(19): siRNA sense strand
ucaacuacaacaucguuuc

SEQ ID NO: 1593028 - RNA, 19 nt, Homo sapiens
  misc_RNA (1)...(19): siRNA sense strand
uguauaaacuucgccucau

SEQ ID NO: 1593029 - RNA, 19 nt, Homo sapiens
  misc_RNA (1)...(19): siRNA sense strand
gacgagaucuugucugaug

SEQ ID NO: 1593030 - RNA, 19 nt, Homo sapiens
  misc_RNA (1)...(19): siRNA sense strand
gauuggagguggacacaaa

SEQ ID NO: 1593031 - RNA, 19 nt, Homo sapiens
  misc_RNA (1)...(19): siRNA sense strand
caacagcgcccacuacuuc

SEQ ID NO: 1593032 - RNA, 19 nt, Homo sapiens
  misc_RNA (1)...(19): siRNA sense strand
gcaucuagacuuugguuua

SEQ ID NO: 1593033 - RNA, 19 nt, Homo sapiens
  misc_RNA (1)...(19): siRNA sense strand
cuacgacacucuccgguuu

SEQ ID NO: 1593034 - RNA, 19 nt, Homo sapiens
  misc_RNA (1)...(19): siRNA sense strand
gaagaugaagacuuugaaa

SEQ ID NO: 1593035 - RNA, 19 nt, Homo sapiens
  misc_RNA (1)...(19): siRNA sense strand
gagcugaggucaccaacag

SEQ ID NO: 1593036 - RNA, 19 nt, Homo sapiens
  misc_RNA (1)...(19): siRNA sense strand
cucagaagaugaagacuuu

SEQ ID NO: 1593037 - RNA, 19 nt, Homo sapiens
  misc_RNA (1)...(19): siRNA sense strand
gaggugcccugcccauguu

SEQ ID NO: 1593038 - RNA, 19 nt, Homo sapiens
  misc_RNA (1)...(19): siRNA sense strand
uugcugaguuugaagauuu

SEQ ID NO: 1593039 - RNA, 19 nt, Homo sapiens
  misc_RNA (1)...(19): siRNA sense strand
ggacaguuacuacuccauu

SEQ ID NO: 1593040 - RNA, 19 nt, Homo sapiens
  misc_RNA (1)...(19): siRNA sense strand
uagagcgacuggaaagauu

SEQ ID NO: 1593041 - RNA, 19 nt, Homo sapiens
  misc_RNA (1)...(19): siRNA sense strand
cagcuacucugaccuacga

SEQ ID NO: 1593042 - RNA, 19 nt, Homo sapiens
  misc_RNA (1)...(19): siRNA sense strand
gaggaaaucagaagguugu

SEQ ID NO: 1593043 - RNA, 19 nt, Homo sapiens
  misc_RNA (1)...(19): siRNA sense strand
cuacuccauucaccagaua

SEQ ID NO: 1593044 - RNA, 19 nt, Homo sapiens
  misc_RNA (1)...(19): siRNA sense strand
gaugaagacuuugaaaucc

SEQ ID NO: 1593045 - RNA, 19 nt, Homo sapiens
  misc_RNA (1)...(19): siRNA sense strand
gacaguuacuacuccauuc

SEQ ID NO: 1593046 - RNA, 19 nt, Homo sapiens
  misc_RNA (1)...(19): siRNA sense strand
aggacgagaucuugucuga

SEQ ID NO: 1593047 - RNA, 19 nt, Homo sapiens
  misc_RNA (1)...(19): siRNA sense strand
gcaccuaggccgagauugg

SEQ ID NO: 1593048 - RNA, 19 nt, Homo sapiens
  misc_RNA (1)...(19): siRNA sense strand
ccucagagcccguuuggau

SEQ ID NO: 1593049 - RNA, 19 nt, Homo sapiens
  misc_RNA (1)...(19): siRNA sense strand
ggagguggacacaaaggaa

SEQ ID NO: 1593050 - RNA, 19 nt, Homo sapiens
  misc_RNA (1)...(19): siRNA sense strand
agacuuugguuuacauaca

SEQ ID NO: 1593051 - RNA, 19 nt, Homo sapiens
  misc_RNA (1)...(19): siRNA sense strand
ggaaggacaguuacuacuc

SEQ ID NO: 1593052 - RNA, 19 nt, Homo sapiens
  misc_RNA (1)...(19): siRNA sense strand
cagaagaugaagacuuuga

SEQ ID NO: 1593053 - RNA, 19 nt, Homo sapiens
  misc_RNA (1)...(19): siRNA sense strand
caucuagacuuugguuuac

SEQ ID NO: 1593054 - RNA, 19 nt, Homo sapiens
  misc_RNA (1)...(19): siRNA sense strand
ucuguaagacugaagauga

SEQ ID NO: 1593055 - RNA, 19 nt, Homo sapiens
  misc_RNA (1)...(19): siRNA sense strand
gauguagagcgacuggaaa

SEQ ID NO: 1593056 - RNA, 19 nt, Homo sapiens
  misc_RNA (1)...(19): siRNA sense strand
uuugaaauccugucccuuu

SEQ ID NO: 1593057 - RNA, 19 nt, Homo sapiens
  misc_RNA (1)...(19): siRNA sense strand
agaugaagacuuugaaauc

SEQ ID NO: 1593058 - RNA, 19 nt, Homo sapiens
  misc_RNA (1)...(19): siRNA sense strand
guagagcgacuggaaagau

SEQ ID NO: 1593059 - RNA, 19 nt, Homo sapiens
  misc_RNA (1)...(19): siRNA sense strand
ugaaauccugucccuuuga

SEQ ID NO: 1593060 - RNA, 19 nt, Homo sapiens
  misc_RNA (1)...(19): siRNA sense strand
uggaggaaaucagaagguu

SEQ ID NO: 1593061 - RNA, 19 nt, Homo sapiens
  misc_RNA (1)...(19): siRNA sense strand
uugaaauccugucccuuug

SEQ ID NO: 1593062 - RNA, 19 nt, Homo sapiens
  misc_RNA (1)...(19): siRNA sense strand
gcagccagacagcuacuuc

SEQ ID NO: 1593063 - RNA, 19 nt, Homo sapiens
  misc_RNA (1)...(19): siRNA sense strand
gcugcgguguggacagaug

SEQ ID NO: 1593064 - RNA, 19 nt, Homo sapiens
  misc_RNA (1)...(19): siRNA sense strand
ucgacaggaaggacaguua

SEQ ID NO: 1593065 - RNA, 19 nt, Homo sapiens
  misc_RNA (1)...(19): siRNA sense strand
ucuccgguuugcugaguuu

SEQ ID NO: 1593066 - RNA, 19 nt, Homo sapiens
  misc_RNA (1)...(19): siRNA sense strand
acaggaaggacaguuacua

SEQ ID NO: 1593067 - RNA, 19 nt, Homo sapiens
  misc_RNA (1)...(19): siRNA sense strand
gaaaaggacgagaucuugu

SEQ ID NO: 1593068 - RNA, 19 nt, Homo sapiens
  misc_RNA (1)...(19): siRNA sense strand
ugauguagagcgacuggaa

SEQ ID NO: 1593069 - RNA, 19 nt, Homo sapiens
  misc_RNA (1)...(19): siRNA sense strand
agaggcagccagacagcua

SEQ ID NO: 1593070 - RNA, 19 nt, Homo sapiens
  misc_RNA (1)...(19): siRNA sense strand
ccgguuugcugaguuugaa

SEQ ID NO: 1593071 - RNA, 19 nt, Homo sapiens
  misc_RNA (1)...(19): siRNA sense strand
gacuuugguuuacauacag

SEQ ID NO: 1593072 - RNA, 19 nt, Homo sapiens
  misc_RNA (1)...(19): siRNA sense strand
gauacuggguagaaaauac

SEQ ID NO: 1593073 - RNA, 19 nt, Homo sapiens
  misc_RNA (1)...(19): siRNA sense strand
acgcauucaucgacaggaa

SEQ ID NO: 1593074 - RNA, 19 nt, Homo sapiens
  misc_RNA (1)...(19): siRNA sense strand
caccagauagcgcaaaugg

SEQ ID NO: 1593075 - RNA, 19 nt, Homo sapiens
  misc_RNA (1)...(19): siRNA sense strand
agaagaugaagacuuugaa

SEQ ID NO: 1593076 - RNA, 19 nt, Homo sapiens
  misc_RNA (1)...(19): siRNA sense strand
guaagacugaagaugacuu

SEQ ID NO: 1593077 - RNA, 19 nt, Homo sapiens
  misc_RNA (1)...(19): siRNA sense strand
ucuagacuuugguuuacau

SEQ ID NO: 1593078 - RNA, 19 nt, Homo sapiens
  misc_RNA (1)...(19): siRNA sense strand
cgacucagaagaugaagac

SEQ ID NO: 1593079 - RNA, 19 nt, Homo sapiens
  misc_RNA (1)...(19): siRNA sense strand
ucagagcccguuuggauac

SEQ ID NO: 1593080 - RNA, 19 nt, Homo sapiens
  misc_RNA (1)...(19): siRNA sense strand
ccaacagcgcccacuacuu

SEQ ID NO: 1593081 - RNA, 19 nt, Homo sapiens
  misc_RNA (1)...(19): siRNA sense strand
gacgagaucuugucugaug

SEQ ID NO: 1593082 - RNA, 19 nt, Homo sapiens
  misc_RNA (1)...(19): siRNA sense strand
gauuggagguggacacaaa

SEQ ID NO: 1593083 - RNA, 19 nt, Homo sapiens
  misc_RNA (1)...(19): siRNA sense strand
caacagcgcccacuacuuc

SEQ ID NO: 1593084 - RNA, 19 nt, Homo sapiens
  misc_RNA (1)...(19): siRNA sense strand
gcaucuagacuuugguuua

SEQ ID NO: 1593085 - RNA, 19 nt, Homo sapiens
  misc_RNA (1)...(19): siRNA sense strand
cuacgacacucuccgguuu

SEQ ID NO: 1593086 - RNA, 19 nt, Homo sapiens
  misc_RNA (1)...(19): siRNA sense strand
gagcugaggucaccaacag

SEQ ID NO: 1593087 - RNA, 19 nt, Homo sapiens
  misc_RNA (1)...(19): siRNA sense strand
gaggugcccugcccauguu

SEQ ID NO: 1593088 - RNA, 19 nt, Homo sapiens
  misc_RNA (1)...(19): siRNA sense strand
uugcugaguuugaagauuu

SEQ ID NO: 1593089 - RNA, 19 nt, Homo sapiens
  misc_RNA (1)...(19): siRNA sense strand
ggacaguuacuacuccauu

SEQ ID NO: 1593090 - RNA, 19 nt, Homo sapiens
  misc_RNA (1)...(19): siRNA sense strand
cagcuacucugaccuacga

SEQ ID NO: 1593091 - RNA, 19 nt, Homo sapiens
  misc_RNA (1)...(19): siRNA sense strand
gaggaaaucagaagguugu

SEQ ID NO: 1593092 - RNA, 19 nt, Homo sapiens
  misc_RNA (1)...(19): siRNA sense strand
cuacuccauucaccagaua

SEQ ID NO: 1593093 - RNA, 19 nt, Homo sapiens
  misc_RNA (1)...(19): siRNA sense strand
gacaguuacuacuccauuc

SEQ ID NO: 1593094 - RNA, 19 nt, Homo sapiens
  misc_RNA (1)...(19): siRNA sense strand
aggacgagaucuugucuga

SEQ ID NO: 1593095 - RNA, 19 nt, Homo sapiens
  misc_RNA (1)...(19): siRNA sense strand
gcaccuaggccgagauugg

SEQ ID NO: 1593096 - RNA, 19 nt, Homo sapiens
  misc_RNA (1)...(19): siRNA sense strand
ccucagagcccguuuggau

SEQ ID NO: 1593097 - RNA, 19 nt, Homo sapiens
  misc_RNA (1)...(19): siRNA sense strand
ggagguggacacaaaggaa

SEQ ID NO: 1593098 - RNA, 19 nt, Homo sapiens
  misc_RNA (1)...(19): siRNA sense strand
agacuuugguuuacauaca

SEQ ID NO: 1593099 - RNA, 19 nt, Homo sapiens
  misc_RNA (1)...(19): siRNA sense strand
ggaaggacaguuacuacuc

SEQ ID NO: 1593100 - RNA, 19 nt, Homo sapiens
  misc_RNA (1)...(19): siRNA sense strand
caucuagacuuugguuuac

SEQ ID NO: 1593101 - RNA, 19 nt, Homo sapiens
  misc_RNA (1)...(19): siRNA sense strand
ucuguaagacugaagauga

SEQ ID NO: 1593102 - RNA, 19 nt, Homo sapiens
  misc_RNA (1)...(19): siRNA sense strand
uggaggaaaucagaagguu

SEQ ID NO: 1593103 - RNA, 19 nt, Homo sapiens
  misc_RNA (1)...(19): siRNA sense strand
gcagccagacagcuacuuc

SEQ ID NO: 1593104 - RNA, 19 nt, Homo sapiens
  misc_RNA (1)...(19): siRNA sense strand
gcugcgguguggacagaug

SEQ ID NO: 1593105 - RNA, 19 nt, Homo sapiens
  misc_RNA (1)...(19): siRNA sense strand
ucgacaggaaggacaguua

SEQ ID NO: 1593106 - RNA, 19 nt, Homo sapiens
  misc_RNA (1)...(19): siRNA sense strand
ucuccgguuugcugaguuu

SEQ ID NO: 1593107 - RNA, 19 nt, Homo sapiens
  misc_RNA (1)...(19): siRNA sense strand
acaggaaggacaguuacua

SEQ ID NO: 1593108 - RNA, 19 nt, Homo sapiens
  misc_RNA (1)...(19): siRNA sense strand
gaaaaggacgagaucuugu

SEQ ID NO: 1593109 - RNA, 19 nt, Homo sapiens
  misc_RNA (1)...(19): siRNA sense strand
ccgguuugcugaguuugaa

SEQ ID NO: 1593110 - RNA, 19 nt, Homo sapiens
  misc_RNA (1)...(19): siRNA sense strand
agaggcagccagacagcua

SEQ ID NO: 1593111 - RNA, 19 nt, Homo sapiens
  misc_RNA (1)...(19): siRNA sense strand
gauacuggguagaaaauac

SEQ ID NO: 1593112 - RNA, 19 nt, Homo sapiens
  misc_RNA (1)...(19): siRNA sense strand
acgcauucaucgacaggaa

SEQ ID NO: 1593113 - RNA, 19 nt, Homo sapiens
  misc_RNA (1)...(19): siRNA sense strand
gacuuugguuuacauacag

SEQ ID NO: 1593114 - RNA, 19 nt, Homo sapiens
  misc_RNA (1)...(19): siRNA sense strand
caccagauagcgcaaaugg

SEQ ID NO: 1593115 - RNA, 19 nt, Homo sapiens
  misc_RNA (1)...(19): siRNA sense strand
guaagacugaagaugacuu

SEQ ID NO: 1593116 - RNA, 19 nt, Homo sapiens
  misc_RNA (1)...(19): siRNA sense strand
ucagagcccguuuggauac

SEQ ID NO: 1593117 - RNA, 19 nt, Homo sapiens
  misc_RNA (1)...(19): siRNA sense strand
ccaacagcgcccacuacuu

SEQ ID NO: 1593118 - RNA, 19 nt, Homo sapiens
  misc_RNA (1)...(19): siRNA sense strand
ucuagacuuugguuuacau

SEQ ID NO: 1593119 - RNA, 19 nt, Homo sapiens
  misc_RNA (1)...(19): siRNA sense strand
gagaaacauugaccaggaa

SEQ ID NO: 1593120 - RNA, 19 nt, Homo sapiens
  misc_RNA (1)...(19): siRNA sense strand
gcgggauccugcucaauaa

SEQ ID NO: 1593121 - RNA, 19 nt, Homo sapiens
  misc_RNA (1)...(19): siRNA sense strand
ggaaccugcuggcuacuga

SEQ ID NO: 1593122 - RNA, 19 nt, Homo sapiens
  misc_RNA (1)...(19): siRNA sense strand
ggauccugcucaauaauga

SEQ ID NO: 1593123 - RNA, 19 nt, Homo sapiens
  misc_RNA (1)...(19): siRNA sense strand
ucacgacaguggagagaaa

SEQ ID NO: 1593124 - RNA, 19 nt, Homo sapiens
  misc_RNA (1)...(19): siRNA sense strand
ccacucacccgaucuccua

SEQ ID NO: 1593125 - RNA, 19 nt, Homo sapiens
  misc_RNA (1)...(19): siRNA sense strand
gcacugcucaccugucugu

SEQ ID NO: 1593126 - RNA, 19 nt, Homo sapiens
  misc_RNA (1)...(19): siRNA sense strand
ccacugcacuggccaucau

SEQ ID NO: 1593127 - RNA, 19 nt, Homo sapiens
  misc_RNA (1)...(19): siRNA sense strand
caccaucaaccucuacuuu

SEQ ID NO: 1593128 - RNA, 19 nt, Homo sapiens
  misc_RNA (1)...(19): siRNA sense strand
ccaucaaccucuacuuugg

SEQ ID NO: 1593129 - RNA, 19 nt, Homo sapiens
  misc_RNA (1)...(19): siRNA sense strand
gggcacugcucaccugucu

SEQ ID NO: 1593130 - RNA, 19 nt, Homo sapiens
  misc_RNA (1)...(19): siRNA sense strand
gcacuggccaucaucuaca

SEQ ID NO: 1593131 - RNA, 19 nt, Homo sapiens
  misc_RNA (1)...(19): siRNA sense strand
cagccgcucucguccaugu

SEQ ID NO: 1593132 - RNA, 19 nt, Homo sapiens
  misc_RNA (1)...(19): siRNA sense strand
ccagcaccaucaaccucua

SEQ ID NO: 1593133 - RNA, 19 nt, Homo sapiens
  misc_RNA (1)...(19): siRNA sense strand
gacaguggagagaaacauu

SEQ ID NO: 1593134 - RNA, 19 nt, Homo sapiens
  misc_RNA (1)...(19): siRNA sense strand
gggauccugcucaauaaug

SEQ ID NO: 1593135 - RNA, 19 nt, Homo sapiens
  misc_RNA (1)...(19): siRNA sense strand
acuacaagcccgaguucua

SEQ ID NO: 1593136 - RNA, 19 nt, Homo sapiens
  misc_RNA (1)...(19): siRNA sense strand
guucggcuaugacgugaag

SEQ ID NO: 1593137 - RNA, 19 nt, Homo sapiens
  misc_RNA (1)...(19): siRNA sense strand
cacccgaucuccuacuaca

SEQ ID NO: 1593138 - RNA, 19 nt, Homo sapiens
  misc_RNA (1)...(19): siRNA sense strand
aaacauugaccaggaagug

SEQ ID NO: 1593139 - RNA, 19 nt, Homo sapiens
  misc_RNA (1)...(19): siRNA sense strand
agcgggauccugcucaaua

SEQ ID NO: 1593140 - RNA, 19 nt, Homo sapiens
  misc_RNA (1)...(19): siRNA sense strand
caccaucacacccagauca

SEQ ID NO: 1593141 - RNA, 19 nt, Homo sapiens
  misc_RNA (1)...(19): siRNA sense strand
ccugcucaauaaugaaaug

SEQ ID NO: 1593142 - RNA, 19 nt, Homo sapiens
  misc_RNA (1)...(19): siRNA sense strand
gaaacauugaccaggaagu

SEQ ID NO: 1593143 - RNA, 19 nt, Homo sapiens
  misc_RNA (1)...(19): siRNA sense strand
ucagcgggauccugcucaa

SEQ ID NO: 1593144 - RNA, 19 nt, Homo sapiens
  misc_RNA (1)...(19): siRNA sense strand
gcaccaucaaccucuacuu

SEQ ID NO: 1593145 - RNA, 19 nt, Homo sapiens
  misc_RNA (1)...(19): siRNA sense strand
caguggagagaaacauuga

SEQ ID NO: 1593146 - RNA, 19 nt, Homo sapiens
  misc_RNA (1)...(19): siRNA sense strand
gagaaacauugaccaggaa

SEQ ID NO: 1593147 - RNA, 19 nt, Homo sapiens
  misc_RNA (1)...(19): siRNA sense strand
gcgggauccugcucaauaa

SEQ ID NO: 1593148 - RNA, 19 nt, Homo sapiens
  misc_RNA (1)...(19): siRNA sense strand
ggaaccugcuggcuacuga

SEQ ID NO: 1593149 - RNA, 19 nt, Homo sapiens
  misc_RNA (1)...(19): siRNA sense strand
ggauccugcucaauaauga

SEQ ID NO: 1593150 - RNA, 19 nt, Homo sapiens
  misc_RNA (1)...(19): siRNA sense strand
ucacgacaguggagagaaa

SEQ ID NO: 1593151 - RNA, 19 nt, Homo sapiens
  misc_RNA (1)...(19): siRNA sense strand
ccacucacccgaucuccua

SEQ ID NO: 1593152 - RNA, 19 nt, Homo sapiens
  misc_RNA (1)...(19): siRNA sense strand
gcacugcucaccugucugu

SEQ ID NO: 1593153 - RNA, 19 nt, Homo sapiens
  misc_RNA (1)...(19): siRNA sense strand
ccacugcacuggccaucau

SEQ ID NO: 1593154 - RNA, 19 nt, Homo sapiens
  misc_RNA (1)...(19): siRNA sense strand
caccaucaaccucuacuuu

SEQ ID NO: 1593155 - RNA, 19 nt, Homo sapiens
  misc_RNA (1)...(19): siRNA sense strand
ccaucaaccucuacuuugg

SEQ ID NO: 1593156 - RNA, 19 nt, Homo sapiens
  misc_RNA (1)...(19): siRNA sense strand
gggcacugcucaccugucu

SEQ ID NO: 1593157 - RNA, 19 nt, Homo sapiens
  misc_RNA (1)...(19): siRNA sense strand
gcacuggccaucaucuaca

SEQ ID NO: 1593158 - RNA, 19 nt, Homo sapiens
  misc_RNA (1)...(19): siRNA sense strand
cagccgcucucguccaugu

SEQ ID NO: 1593159 - RNA, 19 nt, Homo sapiens
  misc_RNA (1)...(19): siRNA sense strand
ccagcaccaucaaccucua

SEQ ID NO: 1593160 - RNA, 19 nt, Homo sapiens
  misc_RNA (1)...(19): siRNA sense strand
gacaguggagagaaacauu

SEQ ID NO: 1593161 - RNA, 19 nt, Homo sapiens
  misc_RNA (1)...(19): siRNA sense strand
gggauccugcucaauaaug

SEQ ID NO: 1593162 - RNA, 19 nt, Homo sapiens
  misc_RNA (1)...(19): siRNA sense strand
acuacaagcccgaguucua

SEQ ID NO: 1593163 - RNA, 19 nt, Homo sapiens
  misc_RNA (1)...(19): siRNA sense strand
guucggcuaugacgugaag

SEQ ID NO: 1593164 - RNA, 19 nt, Homo sapiens
  misc_RNA (1)...(19): siRNA sense strand
cacccgaucuccuacuaca

SEQ ID NO: 1593165 - RNA, 19 nt, Homo sapiens
  misc_RNA (1)...(19): siRNA sense strand
aaacauugaccaggaagug

SEQ ID NO: 1593166 - RNA, 19 nt, Homo sapiens
  misc_RNA (1)...(19): siRNA sense strand
agcgggauccugcucaaua

SEQ ID NO: 1593167 - RNA, 19 nt, Homo sapiens
  misc_RNA (1)...(19): siRNA sense strand
caccaucacacccagauca

SEQ ID NO: 1593168 - RNA, 19 nt, Homo sapiens
  misc_RNA (1)...(19): siRNA sense strand
ccugcucaauaaugaaaug

SEQ ID NO: 1593169 - RNA, 19 nt, Homo sapiens
  misc_RNA (1)...(19): siRNA sense strand
gaaacauugaccaggaagu

SEQ ID NO: 1593170 - RNA, 19 nt, Homo sapiens
  misc_RNA (1)...(19): siRNA sense strand
ucagcgggauccugcucaa

SEQ ID NO: 1593171 - RNA, 19 nt, Homo sapiens
  misc_RNA (1)...(19): siRNA sense strand
gcaccaucaaccucuacuu

SEQ ID NO: 1593172 - RNA, 19 nt, Homo sapiens
  misc_RNA (1)...(19): siRNA sense strand
caguggagagaaacauuga

SEQ ID NO: 1593173 - RNA, 19 nt, Homo sapiens
  misc_RNA (1)...(19): siRNA sense strand
gagaaacauugaccaggaa

SEQ ID NO: 1593174 - RNA, 19 nt, Homo sapiens
  misc_RNA (1)...(19): siRNA sense strand
gcgggauccugcucaauaa

SEQ ID NO: 1593175 - RNA, 19 nt, Homo sapiens
  misc_RNA (1)...(19): siRNA sense strand
ggaaccugcuggcuacuga

SEQ ID NO: 1593176 - RNA, 19 nt, Homo sapiens
  misc_RNA (1)...(19): siRNA sense strand
ggauccugcucaauaauga

SEQ ID NO: 1593177 - RNA, 19 nt, Homo sapiens
  misc_RNA (1)...(19): siRNA sense strand
ucacgacaguggagagaaa

SEQ ID NO: 1593178 - RNA, 19 nt, Homo sapiens
  misc_RNA (1)...(19): siRNA sense strand
ccacucacccgaucuccua

SEQ ID NO: 1593179 - RNA, 19 nt, Homo sapiens
  misc_RNA (1)...(19): siRNA sense strand
gcacugcucaccugucugu

SEQ ID NO: 1593180 - RNA, 19 nt, Homo sapiens
  misc_RNA (1)...(19): siRNA sense strand
ccacugcacuggccaucau

SEQ ID NO: 1593181 - RNA, 19 nt, Homo sapiens
  misc_RNA (1)...(19): siRNA sense strand
caccaucaaccucuacuuu

SEQ ID NO: 1593182 - RNA, 19 nt, Homo sapiens
  misc_RNA (1)...(19): siRNA sense strand
ccaucaaccucuacuuugg

SEQ ID NO: 1593183 - RNA, 19 nt, Homo sapiens
  misc_RNA (1)...(19): siRNA sense strand
gggcacugcucaccugucu

SEQ ID NO: 1593184 - RNA, 19 nt, Homo sapiens
  misc_RNA (1)...(19): siRNA sense strand
gcacuggccaucaucuaca

SEQ ID NO: 1593185 - RNA, 19 nt, Homo sapiens
  misc_RNA (1)...(19): siRNA sense strand
cagccgcucucguccaugu

SEQ ID NO: 1593186 - RNA, 19 nt, Homo sapiens
  misc_RNA (1)...(19): siRNA sense strand
ccagcaccaucaaccucua

SEQ ID NO: 1593187 - RNA, 19 nt, Homo sapiens
  misc_RNA (1)...(19): siRNA sense strand
gacaguggagagaaacauu

SEQ ID NO: 1593188 - RNA, 19 nt, Homo sapiens
  misc_RNA (1)...(19): siRNA sense strand
gggauccugcucaauaaug

SEQ ID NO: 1593189 - RNA, 19 nt, Homo sapiens
  misc_RNA (1)...(19): siRNA sense strand
acuacaagcccgaguucua

SEQ ID NO: 1593190 - RNA, 19 nt, Homo sapiens
  misc_RNA (1)...(19): siRNA sense strand
guucggcuaugacgugaag

SEQ ID NO: 1593191 - RNA, 19 nt, Homo sapiens
  misc_RNA (1)...(19): siRNA sense strand
cacccgaucuccuacuaca

SEQ ID NO: 1593192 - RNA, 19 nt, Homo sapiens
  misc_RNA (1)...(19): siRNA sense strand
aaacauugaccaggaagug

SEQ ID NO: 1593193 - RNA, 19 nt, Homo sapiens
  misc_RNA (1)...(19): siRNA sense strand
agcgggauccugcucaaua

SEQ ID NO: 1593194 - RNA, 19 nt, Homo sapiens
  misc_RNA (1)...(19): siRNA sense strand
caccaucacacccagauca

SEQ ID NO: 1593195 - RNA, 19 nt, Homo sapiens
  misc_RNA (1)...(19): siRNA sense strand
ccugcucaauaaugaaaug

SEQ ID NO: 1593196 - RNA, 19 nt, Homo sapiens
  misc_RNA (1)...(19): siRNA sense strand
gaaacauugaccaggaagu

SEQ ID NO: 1593197 - RNA, 19 nt, Homo sapiens
  misc_RNA (1)...(19): siRNA sense strand
ucagcgggauccugcucaa

SEQ ID NO: 1593198 - RNA, 19 nt, Homo sapiens
  misc_RNA (1)...(19): siRNA sense strand
gcaccaucaaccucuacuu

SEQ ID NO: 1593199 - RNA, 19 nt, Homo sapiens
  misc_RNA (1)...(19): siRNA sense strand
caguggagagaaacauuga

SEQ ID NO: 1593200 - RNA, 19 nt, Homo sapiens
  misc_RNA (1)...(19): siRNA sense strand
ugaccaagcccucgaagaa

SEQ ID NO: 1593201 - RNA, 19 nt, Homo sapiens
  misc_RNA (1)...(19): siRNA sense strand
acccugcccuucucaacaa

SEQ ID NO: 1593202 - RNA, 19 nt, Homo sapiens
  misc_RNA (1)...(19): siRNA sense strand
ggucccugguccugugaga

SEQ ID NO: 1593203 - RNA, 19 nt, Homo sapiens
  misc_RNA (1)...(19): siRNA sense strand
gaccaagcccucgaagaag

SEQ ID NO: 1593204 - RNA, 19 nt, Homo sapiens
  misc_RNA (1)...(19): siRNA sense strand
gcagccauagcccugauuc

SEQ ID NO: 1593205 - RNA, 19 nt, Homo sapiens
  misc_RNA (1)...(19): siRNA sense strand
gcaagauccucucuaauaa

SEQ ID NO: 1593206 - RNA, 19 nt, Homo sapiens
  misc_RNA (1)...(19): siRNA sense strand
caaagaagcuggcaagauc

SEQ ID NO: 1593207 - RNA, 19 nt, Homo sapiens
  misc_RNA (1)...(19): siRNA sense strand
ggcaagauccucucuaaua

SEQ ID NO: 1593208 - RNA, 19 nt, Homo sapiens
  misc_RNA (1)...(19): siRNA sense strand
cgacgaacauuugaagaua

SEQ ID NO: 1593209 - RNA, 19 nt, Homo sapiens
  misc_RNA (1)...(19): siRNA sense strand
ugaaacagaucgaaaucaa

SEQ ID NO: 1593210 - RNA, 19 nt, Homo sapiens
  misc_RNA (1)...(19): siRNA sense strand
ggaaauugcugugguuuac

SEQ ID NO: 1593211 - RNA, 19 nt, Homo sapiens
  misc_RNA (1)...(19): siRNA sense strand
caccaucucugccagcuuu

SEQ ID NO: 1593212 - RNA, 19 nt, Homo sapiens
  misc_RNA (1)...(19): siRNA sense strand
gggagccucuugcaggaua

SEQ ID NO: 1593213 - RNA, 19 nt, Homo sapiens
  misc_RNA (1)...(19): siRNA sense strand
gcaccgacauguucucagu

SEQ ID NO: 1593214 - RNA, 19 nt, Homo sapiens
  misc_RNA (1)...(19): siRNA sense strand
gacgaacauuugaagauau

SEQ ID NO: 1593215 - RNA, 19 nt, Homo sapiens
  misc_RNA (1)...(19): siRNA sense strand
ggacuggcccugggaauug

SEQ ID NO: 1593216 - RNA, 19 nt, Homo sapiens
  misc_RNA (1)...(19): siRNA sense strand
gagaaggaaagaaacauau

SEQ ID NO: 1593217 - RNA, 19 nt, Homo sapiens
  misc_RNA (1)...(19): siRNA sense strand
gaagauaucucugaaaagg

SEQ ID NO: 1593218 - RNA, 19 nt, Homo sapiens
  misc_RNA (1)...(19): siRNA sense strand
cuacaugccucgucaguac

SEQ ID NO: 1593219 - RNA, 19 nt, Homo sapiens
  misc_RNA (1)...(19): siRNA sense strand
ccaggaaauugcugugguu

SEQ ID NO: 1593220 - RNA, 19 nt, Homo sapiens
  misc_RNA (1)...(19): siRNA sense strand
gcaucuacuucgaaccaaa

SEQ ID NO: 1593221 - RNA, 19 nt, Homo sapiens
  misc_RNA (1)...(19): siRNA sense strand
ggaaagaaacauauuugac

SEQ ID NO: 1593222 - RNA, 19 nt, Homo sapiens
  misc_RNA (1)...(19): siRNA sense strand
gaaaagacacucgugauga

SEQ ID NO: 1593223 - RNA, 19 nt, Homo sapiens
  misc_RNA (1)...(19): siRNA sense strand
aaacagaucgaaaucaaca

SEQ ID NO: 1593224 - RNA, 19 nt, Homo sapiens
  misc_RNA (1)...(19): siRNA sense strand
gaucgaaccugagccuuuu

SEQ ID NO: 1593225 - RNA, 19 nt, Homo sapiens
  misc_RNA (1)...(19): siRNA sense strand
ucaguacagucuacagaau

SEQ ID NO: 1593226 - RNA, 19 nt, Homo sapiens
  misc_RNA (1)...(19): siRNA sense strand
cuggcaagauccucucuaa

SEQ ID NO: 1593227 - RNA, 19 nt, Homo sapiens
  misc_RNA (1)...(19): siRNA sense strand
aagauccucucuaauaauc

SEQ ID NO: 1593228 - RNA, 19 nt, Homo sapiens
  misc_RNA (1)...(19): siRNA sense strand
caagagaaggaaagaaaca

SEQ ID NO: 1593229 - RNA, 19 nt, Homo sapiens
  misc_RNA (1)...(19): siRNA sense strand
aaauugcugugguuuacuu

SEQ ID NO: 1593230 - RNA, 19 nt, Homo sapiens
  misc_RNA (1)...(19): siRNA sense strand
cuuuaccgcucgucucuuu

SEQ ID NO: 1593231 - RNA, 19 nt, Homo sapiens
  misc_RNA (1)...(19): siRNA sense strand
caacccauacccuguguga

SEQ ID NO: 1593232 - RNA, 19 nt, Homo sapiens
  misc_RNA (1)...(19): siRNA sense strand
cgagugguccagugcauuu

SEQ ID NO: 1593233 - RNA, 19 nt, Homo sapiens
  misc_RNA (1)...(19): siRNA sense strand
gagagaggguggagguaac

SEQ ID NO: 1593234 - RNA, 19 nt, Homo sapiens
  misc_RNA (1)...(19): siRNA sense strand
agagaaggaaagaaacaua

SEQ ID NO: 1593235 - RNA, 19 nt, Homo sapiens
  misc_RNA (1)...(19): siRNA sense strand
caagauccucucuaauaau

SEQ ID NO: 1593236 - RNA, 19 nt, Homo sapiens
  misc_RNA (1)...(19): siRNA sense strand
gaauugggaagcacgucua

SEQ ID NO: 1593237 - RNA, 19 nt, Homo sapiens
  misc_RNA (1)...(19): siRNA sense strand
ccaaugcucuggugcuacu

SEQ ID NO: 1593238 - RNA, 19 nt, Homo sapiens
  misc_RNA (1)...(19): siRNA sense strand
aaaagacacucgugaugaa

SEQ ID NO: 1593239 - RNA, 19 nt, Homo sapiens
  misc_RNA (1)...(19): siRNA sense strand
gcucuggugcuacugauug

SEQ ID NO: 1593240 - RNA, 19 nt, Homo sapiens
  misc_RNA (1)...(19): siRNA sense strand
ccaaagaagcuggcaagau

SEQ ID NO: 1593241 - RNA, 19 nt, Homo sapiens
  misc_RNA (1)...(19): siRNA sense strand
ggucacaugcugccaagug

SEQ ID NO: 1593242 - RNA, 19 nt, Homo sapiens
  misc_RNA (1)...(19): siRNA sense strand
uuucagagcugggcaucuu

SEQ ID NO: 1593243 - RNA, 19 nt, Homo sapiens
  misc_RNA (1)...(19): siRNA sense strand
aguacagucuacagaauug

SEQ ID NO: 1593244 - RNA, 19 nt, Homo sapiens
  misc_RNA (1)...(19): siRNA sense strand
ggacuucaaccugcuagug

SEQ ID NO: 1593245 - RNA, 19 nt, Homo sapiens
  misc_RNA (1)...(19): siRNA sense strand
gaaucgcucagacuacaug

SEQ ID NO: 1593246 - RNA, 19 nt, Homo sapiens
  misc_RNA (1)...(19): siRNA sense strand
ucaaacaggaugacuuuac

SEQ ID NO: 1593247 - RNA, 19 nt, Homo sapiens
  misc_RNA (1)...(19): siRNA sense strand
gacaacccauacccugugu

SEQ ID NO: 1593248 - RNA, 19 nt, Homo sapiens
  misc_RNA (1)...(19): siRNA sense strand
ggagccucuugcaggauaa

SEQ ID NO: 1593249 - RNA, 19 nt, Homo sapiens
  misc_RNA (1)...(19): siRNA sense strand
caaacaggaugacuuuacc

SEQ ID NO: 1593250 - RNA, 19 nt, Homo sapiens
  misc_RNA (1)...(19): siRNA sense strand
caagaccgaaggcuguuug

SEQ ID NO: 1593251 - RNA, 19 nt, Homo sapiens
  misc_RNA (1)...(19): siRNA sense strand
agacacucgugaugaacaa

SEQ ID NO: 1593252 - RNA, 19 nt, Homo sapiens
  misc_RNA (1)...(19): siRNA sense strand
ggaaaagacacucgugaug

SEQ ID NO: 1593253 - RNA, 19 nt, Homo sapiens
  misc_RNA (1)...(19): siRNA sense strand
gcugugcaccgacauguuc

SEQ ID NO: 1593254 - RNA, 19 nt, Homo sapiens
  misc_RNA (1)...(19): siRNA sense strand
guuuguggauggccaggaa

SEQ ID NO: 1593255 - RNA, 19 nt, Homo sapiens
  misc_RNA (1)...(19): siRNA sense strand
gaaacagaucgaaaucaac

SEQ ID NO: 1593256 - RNA, 19 nt, Homo sapiens
  misc_RNA (1)...(19): siRNA sense strand
cucaagagaaggaaagaaa

SEQ ID NO: 1593257 - RNA, 19 nt, Homo sapiens
  misc_RNA (1)...(19): siRNA sense strand
ccuccuacauccucaugga

SEQ ID NO: 1593258 - RNA, 19 nt, Homo sapiens
  misc_RNA (1)...(19): siRNA sense strand
ccuaugcugugcagaugga

SEQ ID NO: 1593259 - RNA, 19 nt, Homo sapiens
  misc_RNA (1)...(19): siRNA sense strand
caguacagucuacagaauu

SEQ ID NO: 1593260 - RNA, 19 nt, Homo sapiens
  misc_RNA (1)...(19): siRNA sense strand
guggauggccaggaaauug

SEQ ID NO: 1593261 - RNA, 19 nt, Homo sapiens
  misc_RNA (1)...(19): siRNA sense strand
cauagagaaugagcuacug

SEQ ID NO: 1593262 - RNA, 19 nt, Homo sapiens
  misc_RNA (1)...(19): siRNA sense strand
ccuacauccucauggagaa

SEQ ID NO: 1593263 - RNA, 19 nt, Homo sapiens
  misc_RNA (1)...(19): siRNA sense strand
caccuuugcuggccucuac

SEQ ID NO: 1593264 - RNA, 19 nt, Homo sapiens
  misc_RNA (1)...(19): siRNA sense strand
gaaggugcagcaggagcua

SEQ ID NO: 1593265 - RNA, 19 nt, Homo sapiens
  misc_RNA (1)...(19): siRNA sense strand
gugauccgacgaacauuug

SEQ ID NO: 1593266 - RNA, 19 nt, Homo sapiens
  misc_RNA (1)...(19): siRNA sense strand
gggacuggcccugggaauu

SEQ ID NO: 1593267 - RNA, 19 nt, Homo sapiens
  misc_RNA (1)...(19): siRNA sense strand
gccaagugcccagacauug

SEQ ID NO: 1593268 - RNA, 19 nt, Homo sapiens
  misc_RNA (1)...(19): siRNA sense strand
cauuugaagauaucucuga

SEQ ID NO: 1593269 - RNA, 19 nt, Homo sapiens
  misc_RNA (1)...(19): siRNA sense strand
gaccagcgugccauagaga

SEQ ID NO: 1593270 - RNA, 19 nt, Homo sapiens
  misc_RNA (1)...(19): siRNA sense strand
gcucuacggcucacccaau

SEQ ID NO: 1593271 - RNA, 19 nt, Homo sapiens
  misc_RNA (1)...(19): siRNA sense strand
acaagcaaguccuaaaaga

SEQ ID NO: 1593272 - RNA, 19 nt, Homo sapiens
  misc_RNA (1)...(19): siRNA sense strand
agagagaggguggagguaa

SEQ ID NO: 1593273 - RNA, 19 nt, Homo sapiens
  misc_RNA (1)...(19): siRNA sense strand
gcuacaugccucgucagua

SEQ ID NO: 1593274 - RNA, 19 nt, Homo sapiens
  misc_RNA (1)...(19): siRNA sense strand
gauccgacgaacauuugaa

SEQ ID NO: 1593275 - RNA, 19 nt, Homo sapiens
  misc_RNA (1)...(19): siRNA sense strand
acugauugcucaagagaag

SEQ ID NO: 1593276 - RNA, 19 nt, Homo sapiens
  misc_RNA (1)...(19): siRNA sense strand
cgaaaucaacaccaucucu

SEQ ID NO: 1593277 - RNA, 19 nt, Homo sapiens
  misc_RNA (1)...(19): siRNA sense strand
gcauugcccagacuguguu

SEQ ID NO: 1593278 - RNA, 19 nt, Homo sapiens
  misc_RNA (1)...(19): siRNA sense strand
gcccugaaacagaucgaaa

SEQ ID NO: 1593279 - RNA, 19 nt, Homo sapiens
  misc_RNA (1)...(19): siRNA sense strand
aggaaauugcugugguuua

SEQ ID NO: 1593280 - RNA, 19 nt, Homo sapiens
  misc_RNA (1)...(19): siRNA sense strand
gaacauuugaagauaucuc

SEQ ID NO: 1593281 - RNA, 19 nt, Homo sapiens
  misc_RNA (1)...(19): siRNA sense strand
acgaacauuugaagauauc

SEQ ID NO: 1593282 - RNA, 19 nt, Homo sapiens
  misc_RNA (1)...(19): siRNA sense strand
gcuacugauugcucaagag

SEQ ID NO: 1593283 - RNA, 19 nt, Homo sapiens
  misc_RNA (1)...(19): siRNA sense strand
gggcaucuacuucgaacca

SEQ ID NO: 1593284 - RNA, 19 nt, Homo sapiens
  misc_RNA (1)...(19): siRNA sense strand
agaucgaaccugagccuuu

SEQ ID NO: 1593285 - RNA, 19 nt, Homo sapiens
  misc_RNA (1)...(19): siRNA sense strand
cuacugauugcucaagaga

SEQ ID NO: 1593286 - RNA, 19 nt, Homo sapiens
  misc_RNA (1)...(19): siRNA sense strand
ugaccagcgugccauagag

SEQ ID NO: 1593287 - RNA, 19 nt, Homo sapiens
  misc_RNA (1)...(19): siRNA sense strand
ccacaagcaaguccuaaaa

SEQ ID NO: 1593288 - RNA, 19 nt, Homo sapiens
  misc_RNA (1)...(19): siRNA sense strand
ucgcucagacuacauguuc

SEQ ID NO: 1593289 - RNA, 19 nt, Homo sapiens
  misc_RNA (1)...(19): siRNA sense strand
gaaccugagccuuuugaga

SEQ ID NO: 1593290 - RNA, 19 nt, Homo sapiens
  misc_RNA (1)...(19): siRNA sense strand
caaccuauauggggaggaa

SEQ ID NO: 1593291 - RNA, 19 nt, Homo sapiens
  misc_RNA (1)...(19): siRNA sense strand
cgggcaugcuggagauguu

SEQ ID NO: 1593292 - RNA, 19 nt, Homo sapiens
  misc_RNA (1)...(19): siRNA sense strand
gagcuacuggccaggaaca

SEQ ID NO: 1593293 - RNA, 19 nt, Homo sapiens
  misc_RNA (1)...(19): siRNA sense strand
cuuccgggauggcuacaug

SEQ ID NO: 1593294 - RNA, 19 nt, Homo sapiens
  misc_RNA (1)...(19): siRNA sense strand
ggauaaacagcagcuagag

SEQ ID NO: 1593295 - RNA, 19 nt, Homo sapiens
  misc_RNA (1)...(19): siRNA sense strand
ccgacgaacauuugaagau

SEQ ID NO: 1593296 - RNA, 19 nt, Homo sapiens
  misc_RNA (1)...(19): siRNA sense strand
gagaaacauugaccaggaa

SEQ ID NO: 1593297 - RNA, 19 nt, Homo sapiens
  misc_RNA (1)...(19): siRNA sense strand
gcgggauccugcucaauaa

SEQ ID NO: 1593298 - RNA, 19 nt, Homo sapiens
  misc_RNA (1)...(19): siRNA sense strand
ggaaccugcuggcuacuga

SEQ ID NO: 1593299 - RNA, 19 nt, Homo sapiens
  misc_RNA (1)...(19): siRNA sense strand
ggauccugcucaauaauga

SEQ ID NO: 1593300 - RNA, 19 nt, Homo sapiens
  misc_RNA (1)...(19): siRNA sense strand
ucacgacaguggagagaaa

SEQ ID NO: 1593301 - RNA, 19 nt, Homo sapiens
  misc_RNA (1)...(19): siRNA sense strand
ccacucacccgaucuccua

SEQ ID NO: 1593302 - RNA, 19 nt, Homo sapiens
  misc_RNA (1)...(19): siRNA sense strand
gcacugcucaccugucugu

SEQ ID NO: 1593303 - RNA, 19 nt, Homo sapiens
  misc_RNA (1)...(19): siRNA sense strand
ccacugcacuggccaucau

SEQ ID NO: 1593304 - RNA, 19 nt, Homo sapiens
  misc_RNA (1)...(19): siRNA sense strand
caccaucaaccucuacuuu

SEQ ID NO: 1593305 - RNA, 19 nt, Homo sapiens
  misc_RNA (1)...(19): siRNA sense strand
ccaucaaccucuacuuugg

SEQ ID NO: 1593306 - RNA, 19 nt, Homo sapiens
  misc_RNA (1)...(19): siRNA sense strand
gggcacugcucaccugucu

SEQ ID NO: 1593307 - RNA, 19 nt, Homo sapiens
  misc_RNA (1)...(19): siRNA sense strand
gcacuggccaucaucuaca

SEQ ID NO: 1593308 - RNA, 19 nt, Homo sapiens
  misc_RNA (1)...(19): siRNA sense strand
cagccgcucucguccaugu

SEQ ID NO: 1593309 - RNA, 19 nt, Homo sapiens
  misc_RNA (1)...(19): siRNA sense strand
ccagcaccaucaaccucua

SEQ ID NO: 1593310 - RNA, 19 nt, Homo sapiens
  misc_RNA (1)...(19): siRNA sense strand
gacaguggagagaaacauu

SEQ ID NO: 1593311 - RNA, 19 nt, Homo sapiens
  misc_RNA (1)...(19): siRNA sense strand
gggauccugcucaauaaug

SEQ ID NO: 1593312 - RNA, 19 nt, Homo sapiens
  misc_RNA (1)...(19): siRNA sense strand
acuacaagcccgaguucua

SEQ ID NO: 1593313 - RNA, 19 nt, Homo sapiens
  misc_RNA (1)...(19): siRNA sense strand
guucggcuaugacgugaag

SEQ ID NO: 1593314 - RNA, 19 nt, Homo sapiens
  misc_RNA (1)...(19): siRNA sense strand
cacccgaucuccuacuaca

SEQ ID NO: 1593315 - RNA, 19 nt, Homo sapiens
  misc_RNA (1)...(19): siRNA sense strand
aaacauugaccaggaagug

SEQ ID NO: 1593316 - RNA, 19 nt, Homo sapiens
  misc_RNA (1)...(19): siRNA sense strand
agcgggauccugcucaaua

SEQ ID NO: 1593317 - RNA, 19 nt, Homo sapiens
  misc_RNA (1)...(19): siRNA sense strand
caccaucacacccagauca

SEQ ID NO: 1593318 - RNA, 19 nt, Homo sapiens
  misc_RNA (1)...(19): siRNA sense strand
ccugcucaauaaugaaaug

SEQ ID NO: 1593319 - RNA, 19 nt, Homo sapiens
  misc_RNA (1)...(19): siRNA sense strand
gaaacauugaccaggaagu

SEQ ID NO: 1593320 - RNA, 19 nt, Homo sapiens
  misc_RNA (1)...(19): siRNA sense strand
ucagcgggauccugcucaa

SEQ ID NO: 1593321 - RNA, 19 nt, Homo sapiens
  misc_RNA (1)...(19): siRNA sense strand
gcaccaucaaccucuacuu

SEQ ID NO: 1593322 - RNA, 19 nt, Homo sapiens
  misc_RNA (1)...(19): siRNA sense strand
caguggagagaaacauuga

SEQ ID NO: 1593323 - RNA, 19 nt, Homo sapiens
  misc_RNA (1)...(19): siRNA sense strand
gagaaacauugaccaggaa

SEQ ID NO: 1593324 - RNA, 19 nt, Homo sapiens
  misc_RNA (1)...(19): siRNA sense strand
gcgggauccugcucaauaa

SEQ ID NO: 1593325 - RNA, 19 nt, Homo sapiens
  misc_RNA (1)...(19): siRNA sense strand
ggaaccugcuggcuacuga

SEQ ID NO: 1593326 - RNA, 19 nt, Homo sapiens
  misc_RNA (1)...(19): siRNA sense strand
ggauccugcucaauaauga

SEQ ID NO: 1593327 - RNA, 19 nt, Homo sapiens
  misc_RNA (1)...(19): siRNA sense strand
ucacgacaguggagagaaa

SEQ ID NO: 1593328 - RNA, 19 nt, Homo sapiens
  misc_RNA (1)...(19): siRNA sense strand
ccacucacccgaucuccua

SEQ ID NO: 1593329 - RNA, 19 nt, Homo sapiens
  misc_RNA (1)...(19): siRNA sense strand
gcacugcucaccugucugu

SEQ ID NO: 1593330 - RNA, 19 nt, Homo sapiens
  misc_RNA (1)...(19): siRNA sense strand
ccacugcacuggccaucau

SEQ ID NO: 1593331 - RNA, 19 nt, Homo sapiens
  misc_RNA (1)...(19): siRNA sense strand
caccaucaaccucuacuuu

SEQ ID NO: 1593332 - RNA, 19 nt, Homo sapiens
  misc_RNA (1)...(19): siRNA sense strand
ccaucaaccucuacuuugg

SEQ ID NO: 1593333 - RNA, 19 nt, Homo sapiens
  misc_RNA (1)...(19): siRNA sense strand
gggcacugcucaccugucu

SEQ ID NO: 1593334 - RNA, 19 nt, Homo sapiens
  misc_RNA (1)...(19): siRNA sense strand
gcacuggccaucaucuaca

SEQ ID NO: 1593335 - RNA, 19 nt, Homo sapiens
  misc_RNA (1)...(19): siRNA sense strand
cagccgcucucguccaugu

SEQ ID NO: 1593336 - RNA, 19 nt, Homo sapiens
  misc_RNA (1)...(19): siRNA sense strand
ccagcaccaucaaccucua

SEQ ID NO: 1593337 - RNA, 19 nt, Homo sapiens
  misc_RNA (1)...(19): siRNA sense strand
gacaguggagagaaacauu

SEQ ID NO: 1593338 - RNA, 19 nt, Homo sapiens
  misc_RNA (1)...(19): siRNA sense strand
gggauccugcucaauaaug

SEQ ID NO: 1593339 - RNA, 19 nt, Homo sapiens
  misc_RNA (1)...(19): siRNA sense strand
acuacaagcccgaguucua

SEQ ID NO: 1593340 - RNA, 19 nt, Homo sapiens
  misc_RNA (1)...(19): siRNA sense strand
guucggcuaugacgugaag

SEQ ID NO: 1593341 - RNA, 19 nt, Homo sapiens
  misc_RNA (1)...(19): siRNA sense strand
cacccgaucuccuacuaca

SEQ ID NO: 1593342 - RNA, 19 nt, Homo sapiens
  misc_RNA (1)...(19): siRNA sense strand
aaacauugaccaggaagug

SEQ ID NO: 1593343 - RNA, 19 nt, Homo sapiens
  misc_RNA (1)...(19): siRNA sense strand
agcgggauccugcucaaua

SEQ ID NO: 1593344 - RNA, 19 nt, Homo sapiens
  misc_RNA (1)...(19): siRNA sense strand
caccaucacacccagauca

SEQ ID NO: 1593345 - RNA, 19 nt, Homo sapiens
  misc_RNA (1)...(19): siRNA sense strand
ccugcucaauaaugaaaug

SEQ ID NO: 1593346 - RNA, 19 nt, Homo sapiens
  misc_RNA (1)...(19): siRNA sense strand
gaaacauugaccaggaagu

SEQ ID NO: 1593347 - RNA, 19 nt, Homo sapiens
  misc_RNA (1)...(19): siRNA sense strand
ucagcgggauccugcucaa

SEQ ID NO: 1593348 - RNA, 19 nt, Homo sapiens
  misc_RNA (1)...(19): siRNA sense strand
gcaccaucaaccucuacuu

SEQ ID NO: 1593349 - RNA, 19 nt, Homo sapiens
  misc_RNA (1)...(19): siRNA sense strand
caguggagagaaacauuga

SEQ ID NO: 1593350 - RNA, 19 nt, Homo sapiens
  misc_RNA (1)...(19): siRNA sense strand
gagaaacauugaccaggaa

SEQ ID NO: 1593351 - RNA, 19 nt, Homo sapiens
  misc_RNA (1)...(19): siRNA sense strand
gcgggauccugcucaauaa

SEQ ID NO: 1593352 - RNA, 19 nt, Homo sapiens
  misc_RNA (1)...(19): siRNA sense strand
ggaaccugcuggcuacuga

SEQ ID NO: 1593353 - RNA, 19 nt, Homo sapiens
  misc_RNA (1)...(19): siRNA sense strand
ggauccugcucaauaauga

SEQ ID NO: 1593354 - RNA, 19 nt, Homo sapiens
  misc_RNA (1)...(19): siRNA sense strand
ucacgacaguggagagaaa

SEQ ID NO: 1593355 - RNA, 19 nt, Homo sapiens
  misc_RNA (1)...(19): siRNA sense strand
ccacucacccgaucuccua

SEQ ID NO: 1593356 - RNA, 19 nt, Homo sapiens
  misc_RNA (1)...(19): siRNA sense strand
gcacugcucaccugucugu

SEQ ID NO: 1593357 - RNA, 19 nt, Homo sapiens
  misc_RNA (1)...(19): siRNA sense strand
ccacugcacuggccaucau

SEQ ID NO: 1593358 - RNA, 19 nt, Homo sapiens
  misc_RNA (1)...(19): siRNA sense strand
caccaucaaccucuacuuu

SEQ ID NO: 1593359 - RNA, 19 nt, Homo sapiens
  misc_RNA (1)...(19): siRNA sense strand
ccaucaaccucuacuuugg

SEQ ID NO: 1593360 - RNA, 19 nt, Homo sapiens
  misc_RNA (1)...(19): siRNA sense strand
gggcacugcucaccugucu

SEQ ID NO: 1593361 - RNA, 19 nt, Homo sapiens
  misc_RNA (1)...(19): siRNA sense strand
gcacuggccaucaucuaca

SEQ ID NO: 1593362 - RNA, 19 nt, Homo sapiens
  misc_RNA (1)...(19): siRNA sense strand
cagccgcucucguccaugu

SEQ ID NO: 1593363 - RNA, 19 nt, Homo sapiens
  misc_RNA (1)...(19): siRNA sense strand
ccagcaccaucaaccucua

SEQ ID NO: 1593364 - RNA, 19 nt, Homo sapiens
  misc_RNA (1)...(19): siRNA sense strand
gacaguggagagaaacauu

SEQ ID NO: 1593365 - RNA, 19 nt, Homo sapiens
  misc_RNA (1)...(19): siRNA sense strand
gggauccugcucaauaaug

SEQ ID NO: 1593366 - RNA, 19 nt, Homo sapiens
  misc_RNA (1)...(19): siRNA sense strand
acuacaagcccgaguucua

SEQ ID NO: 1593367 - RNA, 19 nt, Homo sapiens
  misc_RNA (1)...(19): siRNA sense strand
guucggcuaugacgugaag

SEQ ID NO: 1593368 - RNA, 19 nt, Homo sapiens
  misc_RNA (1)...(19): siRNA sense strand
cacccgaucuccuacuaca

SEQ ID NO: 1593369 - RNA, 19 nt, Homo sapiens
  misc_RNA (1)...(19): siRNA sense strand
aaacauugaccaggaagug

SEQ ID NO: 1593370 - RNA, 19 nt, Homo sapiens
  misc_RNA (1)...(19): siRNA sense strand
agcgggauccugcucaaua

SEQ ID NO: 1593371 - RNA, 19 nt, Homo sapiens
  misc_RNA (1)...(19): siRNA sense strand
caccaucacacccagauca

SEQ ID NO: 1593372 - RNA, 19 nt, Homo sapiens
  misc_RNA (1)...(19): siRNA sense strand
ccugcucaauaaugaaaug

SEQ ID NO: 1593373 - RNA, 19 nt, Homo sapiens
  misc_RNA (1)...(19): siRNA sense strand
gaaacauugaccaggaagu

SEQ ID NO: 1593374 - RNA, 19 nt, Homo sapiens
  misc_RNA (1)...(19): siRNA sense strand
ucagcgggauccugcucaa

SEQ ID NO: 1593375 - RNA, 19 nt, Homo sapiens
  misc_RNA (1)...(19): siRNA sense strand
gcaccaucaaccucuacuu

SEQ ID NO: 1593376 - RNA, 19 nt, Homo sapiens
  misc_RNA (1)...(19): siRNA sense strand
caguggagagaaacauuga

SEQ ID NO: 1593377 - RNA, 19 nt, Homo sapiens
  misc_RNA (1)...(19): siRNA sense strand
guauauagcuggaggcauu

SEQ ID NO: 1593378 - RNA, 19 nt, Homo sapiens
  misc_RNA (1)...(19): siRNA sense strand
ggaacucucuauuguguuu

SEQ ID NO: 1593379 - RNA, 19 nt, Homo sapiens
  misc_RNA (1)...(19): siRNA sense strand
ggagagagguuccggaagu

SEQ ID NO: 1593380 - RNA, 19 nt, Homo sapiens
  misc_RNA (1)...(19): siRNA sense strand
uagcagcucuuccugaauu

SEQ ID NO: 1593381 - RNA, 19 nt, Homo sapiens
  misc_RNA (1)...(19): siRNA sense strand
gcuagcagcucuuccugaa

SEQ ID NO: 1593382 - RNA, 19 nt, Homo sapiens
  misc_RNA (1)...(19): siRNA sense strand
gagagagguuccggaagua

SEQ ID NO: 1593383 - RNA, 19 nt, Homo sapiens
  misc_RNA (1)...(19): siRNA sense strand
gaagaguuguuugaagaga

SEQ ID NO: 1593384 - RNA, 19 nt, Homo sapiens
  misc_RNA (1)...(19): siRNA sense strand
gaaagaaccagcucugucu

SEQ ID NO: 1593385 - RNA, 19 nt, Homo sapiens
  misc_RNA (1)...(19): siRNA sense strand
gaucuacgccuuuguugga

SEQ ID NO: 1593386 - RNA, 19 nt, Homo sapiens
  misc_RNA (1)...(19): siRNA sense strand
gcaugaacccggugaucua

SEQ ID NO: 1593387 - RNA, 19 nt, Homo sapiens
  misc_RNA (1)...(19): siRNA sense strand
gugagaagcuggaaagaac

SEQ ID NO: 1593388 - RNA, 19 nt, Homo sapiens
  misc_RNA (1)...(19): siRNA sense strand
cugaagaguuguuugaaga

SEQ ID NO: 1593389 - RNA, 19 nt, Homo sapiens
  misc_RNA (1)...(19): siRNA sense strand
gaaugaccaucuucugucu

SEQ ID NO: 1593390 - RNA, 19 nt, Homo sapiens
  misc_RNA (1)...(19): siRNA sense strand
gaauuaugaccaacaucua

SEQ ID NO: 1593391 - RNA, 19 nt, Homo sapiens
  misc_RNA (1)...(19): siRNA sense strand
gcaauguggugguggugau

SEQ ID NO: 1593392 - RNA, 19 nt, Homo sapiens
  misc_RNA (1)...(19): siRNA sense strand
gcagauacaucccauuccu

SEQ ID NO: 1593393 - RNA, 19 nt, Homo sapiens
  misc_RNA (1)...(19): siRNA sense strand
caaccucacuagauacagu

SEQ ID NO: 1593394 - RNA, 19 nt, Homo sapiens
  misc_RNA (1)...(19): siRNA sense strand
cuaugagacugaagaguug

SEQ ID NO: 1593395 - RNA, 19 nt, Homo sapiens
  misc_RNA (1)...(19): siRNA sense strand
ccggaacucucuauugugu

SEQ ID NO: 1593396 - RNA, 19 nt, Homo sapiens
  misc_RNA (1)...(19): siRNA sense strand
cauuguccaugcuguguuu

SEQ ID NO: 1593397 - RNA, 19 nt, Homo sapiens
  misc_RNA (1)...(19): siRNA sense strand
ucaugcaccugggcagaua

SEQ ID NO: 1593398 - RNA, 19 nt, Homo sapiens
  misc_RNA (1)...(19): siRNA sense strand
gagccggaacucucuauug

SEQ ID NO: 1593399 - RNA, 19 nt, Homo sapiens
  misc_RNA (1)...(19): siRNA sense strand
ucauaauccugcugacaau

SEQ ID NO: 1593400 - RNA, 19 nt, Homo sapiens
  misc_RNA (1)...(19): siRNA sense strand
guaccacauccuacuauga

SEQ ID NO: 1593401 - RNA, 19 nt, Homo sapiens
  misc_RNA (1)...(19): siRNA sense strand
gggcagauacaucccauuc

SEQ ID NO: 1593402 - RNA, 19 nt, Homo sapiens
  misc_RNA (1)...(19): siRNA sense strand
ggaggcauuuccacacucu

SEQ ID NO: 1593403 - RNA, 19 nt, Homo sapiens
  misc_RNA (1)...(19): siRNA sense strand
gagcccggacugucacuuu

SEQ ID NO: 1593404 - RNA, 19 nt, Homo sapiens
  misc_RNA (1)...(19): siRNA sense strand
uagauacaguugagaccuu

SEQ ID NO: 1593405 - RNA, 19 nt, Homo sapiens
  misc_RNA (1)...(19): siRNA sense strand
agacugaagaguuguuuga

SEQ ID NO: 1593406 - RNA, 19 nt, Homo sapiens
  misc_RNA (1)...(19): siRNA sense strand
gcagcucuuccugaauuua

SEQ ID NO: 1593407 - RNA, 19 nt, Homo sapiens
  misc_RNA (1)...(19): siRNA sense strand
cuacacaggaaucaucaaa

SEQ ID NO: 1593408 - RNA, 19 nt, Homo sapiens
  misc_RNA (1)...(19): siRNA sense strand
gcugauaccagagcacuga

SEQ ID NO: 1593409 - RNA, 19 nt, Homo sapiens
  misc_RNA (1)...(19): siRNA sense strand
ucuaugagacugaagaguu

SEQ ID NO: 1593410 - RNA, 19 nt, Homo sapiens
  misc_RNA (1)...(19): siRNA sense strand
gguaccacauccuacuaug

SEQ ID NO: 1593411 - RNA, 19 nt, Homo sapiens
  misc_RNA (1)...(19): siRNA sense strand
ucccauuccuuccuaguga

SEQ ID NO: 1593412 - RNA, 19 nt, Homo sapiens
  misc_RNA (1)...(19): siRNA sense strand
caauguggcuauccuucuc

SEQ ID NO: 1593413 - RNA, 19 nt, Homo sapiens
  misc_RNA (1)...(19): siRNA sense strand
guugagaccuuugguacca

SEQ ID NO: 1593414 - RNA, 19 nt, Homo sapiens
  misc_RNA (1)...(19): siRNA sense strand
cauucuggauccacuaugu

SEQ ID NO: 1593415 - RNA, 19 nt, Homo sapiens
  misc_RNA (1)...(19): siRNA sense strand
ggugaucuacgccuuuguu

SEQ ID NO: 1593416 - RNA, 19 nt, Homo sapiens
  misc_RNA (1)...(19): siRNA sense strand
cgaauuaugaccaacaucu

SEQ ID NO: 1593417 - RNA, 19 nt, Homo sapiens
  misc_RNA (1)...(19): siRNA sense strand
agccggaacucucuauugu

SEQ ID NO: 1593418 - RNA, 19 nt, Homo sapiens
  misc_RNA (1)...(19): siRNA sense strand
agauacaguugagaccuuu

SEQ ID NO: 1593419 - RNA, 19 nt, Homo sapiens
  misc_RNA (1)...(19): siRNA sense strand
gaccaucuucugucucguu

SEQ ID NO: 1593420 - RNA, 19 nt, Homo sapiens
  misc_RNA (1)...(19): siRNA sense strand
uggcuauccuucucucuuc

SEQ ID NO: 1593421 - RNA, 19 nt, Homo sapiens
  misc_RNA (1)...(19): siRNA sense strand
gccaucugcuacacaggaa

SEQ ID NO: 1593422 - RNA, 19 nt, Homo sapiens
  misc_RNA (1)...(19): siRNA sense strand
uaucuucuaugagacugaa

SEQ ID NO: 1593423 - RNA, 19 nt, Homo sapiens
  misc_RNA (1)...(19): siRNA sense strand
gcaccugggcagauacauc

SEQ ID NO: 1593424 - RNA, 19 nt, Homo sapiens
  misc_RNA (1)...(19): siRNA sense strand
gacaaccucacuagauaca

SEQ ID NO: 1593425 - RNA, 19 nt, Homo sapiens
  misc_RNA (1)...(19): siRNA sense strand
uacaucccauuccuuccua

SEQ ID NO: 1593426 - RNA, 19 nt, Homo sapiens
  misc_RNA (1)...(19): siRNA sense strand
gcauuuccacacucugaga

SEQ ID NO: 1593427 - RNA, 19 nt, Homo sapiens
  misc_RNA (1)...(19): siRNA sense strand
ccacaggcacuugcucaug

SEQ ID NO: 1593428 - RNA, 19 nt, Homo sapiens
  misc_RNA (1)...(19): siRNA sense strand
guaccugcgccacuucuuc

SEQ ID NO: 1593429 - RNA, 19 nt, Homo sapiens
  misc_RNA (1)...(19): siRNA sense strand
caucuucugucucguucuc

SEQ ID NO: 1593430 - RNA, 19 nt, Homo sapiens
  misc_RNA (1)...(19): siRNA sense strand
ccucgucacccuuccauuc

SEQ ID NO: 1593431 - RNA, 19 nt, Homo sapiens
  misc_RNA (1)...(19): siRNA sense strand
uaccacauccuacuaugau

SEQ ID NO: 1593432 - RNA, 19 nt, Homo sapiens
  misc_RNA (1)...(19): siRNA sense strand
ccuaucaauccaucuuauu

SEQ ID NO: 1593433 - RNA, 19 nt, Homo sapiens
  misc_RNA (1)...(19): siRNA sense strand
uuacccagaggauacagua

SEQ ID NO: 1593434 - RNA, 19 nt, Homo sapiens
  misc_RNA (1)...(19): siRNA sense strand
cagcucuuccugaauuuau

SEQ ID NO: 1593435 - RNA, 19 nt, Homo sapiens
  misc_RNA (1)...(19): siRNA sense strand
cagaggugaucgccuacuc

SEQ ID NO: 1593436 - RNA, 19 nt, Homo sapiens
  misc_RNA (1)...(19): siRNA sense strand
caacaucuaccugcucaac

SEQ ID NO: 1593437 - RNA, 19 nt, Homo sapiens
  misc_RNA (1)...(19): siRNA sense strand
guaccuggccauuguccau

SEQ ID NO: 1593438 - RNA, 19 nt, Homo sapiens
  misc_RNA (1)...(19): siRNA sense strand
ccggugaucuacgccuuug

SEQ ID NO: 1593439 - RNA, 19 nt, Homo sapiens
  misc_RNA (1)...(19): siRNA sense strand
acaguugagaccuuuggua

SEQ ID NO: 1593440 - RNA, 19 nt, Homo sapiens
  misc_RNA (1)...(19): siRNA sense strand
acugaagaguuguuugaag

SEQ ID NO: 1593441 - RNA, 19 nt, Homo sapiens
  misc_RNA (1)...(19): siRNA sense strand
guauauagcuggaggcauu

SEQ ID NO: 1593442 - RNA, 19 nt, Homo sapiens
  misc_RNA (1)...(19): siRNA sense strand
ggaacucucuauuguguuu

SEQ ID NO: 1593443 - RNA, 19 nt, Homo sapiens
  misc_RNA (1)...(19): siRNA sense strand
ggagagagguuccggaagu

SEQ ID NO: 1593444 - RNA, 19 nt, Homo sapiens
  misc_RNA (1)...(19): siRNA sense strand
uagcagcucuuccugaauu

SEQ ID NO: 1593445 - RNA, 19 nt, Homo sapiens
  misc_RNA (1)...(19): siRNA sense strand
gcuagcagcucuuccugaa

SEQ ID NO: 1593446 - RNA, 19 nt, Homo sapiens
  misc_RNA (1)...(19): siRNA sense strand
gagagagguuccggaagua

SEQ ID NO: 1593447 - RNA, 19 nt, Homo sapiens
  misc_RNA (1)...(19): siRNA sense strand
gaagaguuguuugaagaga

SEQ ID NO: 1593448 - RNA, 19 nt, Homo sapiens
  misc_RNA (1)...(19): siRNA sense strand
gaaagaaccagcucugucu

SEQ ID NO: 1593449 - RNA, 19 nt, Homo sapiens
  misc_RNA (1)...(19): siRNA sense strand
gaucuacgccuuuguugga

SEQ ID NO: 1593450 - RNA, 19 nt, Homo sapiens
  misc_RNA (1)...(19): siRNA sense strand
gcaugaacccggugaucua

SEQ ID NO: 1593451 - RNA, 19 nt, Homo sapiens
  misc_RNA (1)...(19): siRNA sense strand
gugagaagcuggaaagaac

SEQ ID NO: 1593452 - RNA, 19 nt, Homo sapiens
  misc_RNA (1)...(19): siRNA sense strand
cugaagaguuguuugaaga

SEQ ID NO: 1593453 - RNA, 19 nt, Homo sapiens
  misc_RNA (1)...(19): siRNA sense strand
gaaugaccaucuucugucu

SEQ ID NO: 1593454 - RNA, 19 nt, Homo sapiens
  misc_RNA (1)...(19): siRNA sense strand
gaauuaugaccaacaucua

SEQ ID NO: 1593455 - RNA, 19 nt, Homo sapiens
  misc_RNA (1)...(19): siRNA sense strand
gcaauguggugguggugau

SEQ ID NO: 1593456 - RNA, 19 nt, Homo sapiens
  misc_RNA (1)...(19): siRNA sense strand
gcagauacaucccauuccu

SEQ ID NO: 1593457 - RNA, 19 nt, Homo sapiens
  misc_RNA (1)...(19): siRNA sense strand
caaccucacuagauacagu

SEQ ID NO: 1593458 - RNA, 19 nt, Homo sapiens
  misc_RNA (1)...(19): siRNA sense strand
cuaugagacugaagaguug

SEQ ID NO: 1593459 - RNA, 19 nt, Homo sapiens
  misc_RNA (1)...(19): siRNA sense strand
ccggaacucucuauugugu

SEQ ID NO: 1593460 - RNA, 19 nt, Homo sapiens
  misc_RNA (1)...(19): siRNA sense strand
cauuguccaugcuguguuu

SEQ ID NO: 1593461 - RNA, 19 nt, Homo sapiens
  misc_RNA (1)...(19): siRNA sense strand
ucaugcaccugggcagaua

SEQ ID NO: 1593462 - RNA, 19 nt, Homo sapiens
  misc_RNA (1)...(19): siRNA sense strand
gagccggaacucucuauug

SEQ ID NO: 1593463 - RNA, 19 nt, Homo sapiens
  misc_RNA (1)...(19): siRNA sense strand
ucauaauccugcugacaau

SEQ ID NO: 1593464 - RNA, 19 nt, Homo sapiens
  misc_RNA (1)...(19): siRNA sense strand
guaccacauccuacuauga

SEQ ID NO: 1593465 - RNA, 19 nt, Homo sapiens
  misc_RNA (1)...(19): siRNA sense strand
gggcagauacaucccauuc

SEQ ID NO: 1593466 - RNA, 19 nt, Homo sapiens
  misc_RNA (1)...(19): siRNA sense strand
ggaggcauuuccacacucu

SEQ ID NO: 1593467 - RNA, 19 nt, Homo sapiens
  misc_RNA (1)...(19): siRNA sense strand
gagcccggacugucacuuu

SEQ ID NO: 1593468 - RNA, 19 nt, Homo sapiens
  misc_RNA (1)...(19): siRNA sense strand
uagauacaguugagaccuu

SEQ ID NO: 1593469 - RNA, 19 nt, Homo sapiens
  misc_RNA (1)...(19): siRNA sense strand
agacugaagaguuguuuga

SEQ ID NO: 1593470 - RNA, 19 nt, Homo sapiens
  misc_RNA (1)...(19): siRNA sense strand
gcagcucuuccugaauuua

SEQ ID NO: 1593471 - RNA, 19 nt, Homo sapiens
  misc_RNA (1)...(19): siRNA sense strand
cuacacaggaaucaucaaa

SEQ ID NO: 1593472 - RNA, 19 nt, Homo sapiens
  misc_RNA (1)...(19): siRNA sense strand
gcugauaccagagcacuga

SEQ ID NO: 1593473 - RNA, 19 nt, Homo sapiens
  misc_RNA (1)...(19): siRNA sense strand
ucuaugagacugaagaguu

SEQ ID NO: 1593474 - RNA, 19 nt, Homo sapiens
  misc_RNA (1)...(19): siRNA sense strand
gguaccacauccuacuaug

SEQ ID NO: 1593475 - RNA, 19 nt, Homo sapiens
  misc_RNA (1)...(19): siRNA sense strand
ucccauuccuuccuaguga

SEQ ID NO: 1593476 - RNA, 19 nt, Homo sapiens
  misc_RNA (1)...(19): siRNA sense strand
caauguggcuauccuucuc

SEQ ID NO: 1593477 - RNA, 19 nt, Homo sapiens
  misc_RNA (1)...(19): siRNA sense strand
guugagaccuuugguacca

SEQ ID NO: 1593478 - RNA, 19 nt, Homo sapiens
  misc_RNA (1)...(19): siRNA sense strand
cauucuggauccacuaugu

SEQ ID NO: 1593479 - RNA, 19 nt, Homo sapiens
  misc_RNA (1)...(19): siRNA sense strand
ggugaucuacgccuuuguu

SEQ ID NO: 1593480 - RNA, 19 nt, Homo sapiens
  misc_RNA (1)...(19): siRNA sense strand
cgaauuaugaccaacaucu

SEQ ID NO: 1593481 - RNA, 19 nt, Homo sapiens
  misc_RNA (1)...(19): siRNA sense strand
agccggaacucucuauugu

SEQ ID NO: 1593482 - RNA, 19 nt, Homo sapiens
  misc_RNA (1)...(19): siRNA sense strand
agauacaguugagaccuuu

SEQ ID NO: 1593483 - RNA, 19 nt, Homo sapiens
  misc_RNA (1)...(19): siRNA sense strand
gaccaucuucugucucguu

SEQ ID NO: 1593484 - RNA, 19 nt, Homo sapiens
  misc_RNA (1)...(19): siRNA sense strand
uggcuauccuucucucuuc

SEQ ID NO: 1593485 - RNA, 19 nt, Homo sapiens
  misc_RNA (1)...(19): siRNA sense strand
gccaucugcuacacaggaa

SEQ ID NO: 1593486 - RNA, 19 nt, Homo sapiens
  misc_RNA (1)...(19): siRNA sense strand
uaucuucuaugagacugaa

SEQ ID NO: 1593487 - RNA, 19 nt, Homo sapiens
  misc_RNA (1)...(19): siRNA sense strand
gcaccugggcagauacauc

SEQ ID NO: 1593488 - RNA, 19 nt, Homo sapiens
  misc_RNA (1)...(19): siRNA sense strand
gacaaccucacuagauaca

SEQ ID NO: 1593489 - RNA, 19 nt, Homo sapiens
  misc_RNA (1)...(19): siRNA sense strand
uacaucccauuccuuccua

SEQ ID NO: 1593490 - RNA, 19 nt, Homo sapiens
  misc_RNA (1)...(19): siRNA sense strand
gcauuuccacacucugaga

SEQ ID NO: 1593491 - RNA, 19 nt, Homo sapiens
  misc_RNA (1)...(19): siRNA sense strand
ccacaggcacuugcucaug

SEQ ID NO: 1593492 - RNA, 19 nt, Homo sapiens
  misc_RNA (1)...(19): siRNA sense strand
guaccugcgccacuucuuc

SEQ ID NO: 1593493 - RNA, 19 nt, Homo sapiens
  misc_RNA (1)...(19): siRNA sense strand
caucuucugucucguucuc

SEQ ID NO: 1593494 - RNA, 19 nt, Homo sapiens
  misc_RNA (1)...(19): siRNA sense strand
ccucgucacccuuccauuc

SEQ ID NO: 1593495 - RNA, 19 nt, Homo sapiens
  misc_RNA (1)...(19): siRNA sense strand
uaccacauccuacuaugau

SEQ ID NO: 1593496 - RNA, 19 nt, Homo sapiens
  misc_RNA (1)...(19): siRNA sense strand
ccuaucaauccaucuuauu

SEQ ID NO: 1593497 - RNA, 19 nt, Homo sapiens
  misc_RNA (1)...(19): siRNA sense strand
uuacccagaggauacagua

SEQ ID NO: 1593498 - RNA, 19 nt, Homo sapiens
  misc_RNA (1)...(19): siRNA sense strand
cagcucuuccugaauuuau

SEQ ID NO: 1593499 - RNA, 19 nt, Homo sapiens
  misc_RNA (1)...(19): siRNA sense strand
cagaggugaucgccuacuc

SEQ ID NO: 1593500 - RNA, 19 nt, Homo sapiens
  misc_RNA (1)...(19): siRNA sense strand
caacaucuaccugcucaac

SEQ ID NO: 1593501 - RNA, 19 nt, Homo sapiens
  misc_RNA (1)...(19): siRNA sense strand
guaccuggccauuguccau

SEQ ID NO: 1593502 - RNA, 19 nt, Homo sapiens
  misc_RNA (1)...(19): siRNA sense strand
ccggugaucuacgccuuug

SEQ ID NO: 1593503 - RNA, 19 nt, Homo sapiens
  misc_RNA (1)...(19): siRNA sense strand
acaguugagaccuuuggua

SEQ ID NO: 1593504 - RNA, 19 nt, Homo sapiens
  misc_RNA (1)...(19): siRNA sense strand
acugaagaguuguuugaag

SEQ ID NO: 1593505 - RNA, 19 nt, Homo sapiens
  misc_RNA (1)...(19): siRNA sense strand
gaccaaagcccuugucuua

SEQ ID NO: 1593506 - RNA, 19 nt, Homo sapiens
  misc_RNA (1)...(19): siRNA sense strand
gcacuuagccucaauaaca

SEQ ID NO: 1593507 - RNA, 19 nt, Homo sapiens
  misc_RNA (1)...(19): siRNA sense strand
gagaagaaaugggaucuga

SEQ ID NO: 1593508 - RNA, 19 nt, Homo sapiens
  misc_RNA (1)...(19): siRNA sense strand
ccaaagcccuugucuuaga

SEQ ID NO: 1593509 - RNA, 19 nt, Homo sapiens
  misc_RNA (1)...(19): siRNA sense strand
gggaauuucugaaugauga

SEQ ID NO: 1593510 - RNA, 19 nt, Homo sapiens
  misc_RNA (1)...(19): siRNA sense strand
ggacagcaauauugacuuc

SEQ ID NO: 1593511 - RNA, 19 nt, Homo sapiens
  misc_RNA (1)...(19): siRNA sense strand
ggcaugagcugcacuuugu

SEQ ID NO: 1593512 - RNA, 19 nt, Homo sapiens
  misc_RNA (1)...(19): siRNA sense strand
gaagaacucccgccuagug

SEQ ID NO: 1593513 - RNA, 19 nt, Homo sapiens
  misc_RNA (1)...(19): siRNA sense strand
gagcaugugucccaucuca

SEQ ID NO: 1593514 - RNA, 19 nt, Homo sapiens
  misc_RNA (1)...(19): siRNA sense strand
gcgaggaggucacgaaauc

SEQ ID NO: 1593515 - RNA, 19 nt, Homo sapiens
  misc_RNA (1)...(19): siRNA sense strand
gaaccugccuccagacaag

SEQ ID NO: 1593516 - RNA, 19 nt, Homo sapiens
  misc_RNA (1)...(19): siRNA sense strand
uugagaagcugauggagua

SEQ ID NO: 1593517 - RNA, 19 nt, Homo sapiens
  misc_RNA (1)...(19): siRNA sense strand
ccaguguucugucauguuu

SEQ ID NO: 1593518 - RNA, 19 nt, Homo sapiens
  misc_RNA (1)...(19): siRNA sense strand
ucagcgaacuugaugauga

SEQ ID NO: 1593519 - RNA, 19 nt, Homo sapiens
  misc_RNA (1)...(19): siRNA sense strand
ucagagccaucaugaacua

SEQ ID NO: 1593520 - RNA, 19 nt, Homo sapiens
  misc_RNA (1)...(19): siRNA sense strand
ccacagaggcugagguaaa

SEQ ID NO: 1593521 - RNA, 19 nt, Homo sapiens
  misc_RNA (1)...(19): siRNA sense strand
ggaaugaggacagcaauau

SEQ ID NO: 1593522 - RNA, 19 nt, Homo sapiens
  misc_RNA (1)...(19): siRNA sense strand
gcagggccauucauacguu

SEQ ID NO: 1593523 - RNA, 19 nt, Homo sapiens
  misc_RNA (1)...(19): siRNA sense strand
ggaccuggaucuugauaag

SEQ ID NO: 1593524 - RNA, 19 nt, Homo sapiens
  misc_RNA (1)...(19): siRNA sense strand
gaaugaagcccgcaagaag

SEQ ID NO: 1593525 - RNA, 19 nt, Homo sapiens
  misc_RNA (1)...(19): siRNA sense strand
gagcugcacuuuguugaga

SEQ ID NO: 1593526 - RNA, 19 nt, Homo sapiens
  misc_RNA (1)...(19): siRNA sense strand
ggagucaaccaaaguacua

SEQ ID NO: 1593527 - RNA, 19 nt, Homo sapiens
  misc_RNA (1)...(19): siRNA sense strand
uaaagcugcugcggcaaua

SEQ ID NO: 1593528 - RNA, 19 nt, Homo sapiens
  misc_RNA (1)...(19): siRNA sense strand
aaacaaaggccuggaugua

SEQ ID NO: 1593529 - RNA, 19 nt, Homo sapiens
  misc_RNA (1)...(19): siRNA sense strand
uggauguacugguggauua

SEQ ID NO: 1593530 - RNA, 19 nt, Homo sapiens
  misc_RNA (1)...(19): siRNA sense strand
ggaaaguggugacgauggu

SEQ ID NO: 1593531 - RNA, 19 nt, Homo sapiens
  misc_RNA (1)...(19): siRNA sense strand
cacagaagcugaagcagau

SEQ ID NO: 1593532 - RNA, 19 nt, Homo sapiens
  misc_RNA (1)...(19): siRNA sense strand
ucaaagagguaugcaagga

SEQ ID NO: 1593533 - RNA, 19 nt, Homo sapiens
  misc_RNA (1)...(19): siRNA sense strand
uaagggagcuggagaucuc

SEQ ID NO: 1593534 - RNA, 19 nt, Homo sapiens
  misc_RNA (1)...(19): siRNA sense strand
ugacagugaaggagaaaua

SEQ ID NO: 1593535 - RNA, 19 nt, Homo sapiens
  misc_RNA (1)...(19): siRNA sense strand
agaagcugauggaguauuu

SEQ ID NO: 1593536 - RNA, 19 nt, Homo sapiens
  misc_RNA (1)...(19): siRNA sense strand
caacuggacagcacugaaa

SEQ ID NO: 1593537 - RNA, 19 nt, Homo sapiens
  misc_RNA (1)...(19): siRNA sense strand
caaggugacucuguuggaa

SEQ ID NO: 1593538 - RNA, 19 nt, Homo sapiens
  misc_RNA (1)...(19): siRNA sense strand
gcaggagucaaccaaagua

SEQ ID NO: 1593539 - RNA, 19 nt, Homo sapiens
  misc_RNA (1)...(19): siRNA sense strand
gaaugaggacagcaauauu

SEQ ID NO: 1593540 - RNA, 19 nt, Homo sapiens
  misc_RNA (1)...(19): siRNA sense strand
ggagacauaugagaacaca

SEQ ID NO: 1593541 - RNA, 19 nt, Homo sapiens
  misc_RNA (1)...(19): siRNA sense strand
gcaucaaggagacauauga

SEQ ID NO: 1593542 - RNA, 19 nt, Homo sapiens
  misc_RNA (1)...(19): siRNA sense strand
ugaagcagauguuggagau

SEQ ID NO: 1593543 - RNA, 19 nt, Homo sapiens
  misc_RNA (1)...(19): siRNA sense strand
uggaggaccuggaucuuga

SEQ ID NO: 1593544 - RNA, 19 nt, Homo sapiens
  misc_RNA (1)...(19): siRNA sense strand
acacuuacauucagaaacu

SEQ ID NO: 1593545 - RNA, 19 nt, Homo sapiens
  misc_RNA (1)...(19): siRNA sense strand
guccacgucuguauccuuu

SEQ ID NO: 1593546 - RNA, 19 nt, Homo sapiens
  misc_RNA (1)...(19): siRNA sense strand
gagcugcaccgcuuugaga

SEQ ID NO: 1593547 - RNA, 19 nt, Homo sapiens
  misc_RNA (1)...(19): siRNA sense strand
gagccaucaugaacuauca

SEQ ID NO: 1593548 - RNA, 19 nt, Homo sapiens
  misc_RNA (1)...(19): siRNA sense strand
ccagcaaggugacucuguu

SEQ ID NO: 1593549 - RNA, 19 nt, Homo sapiens
  misc_RNA (1)...(19): siRNA sense strand
uggagaagguggaggaguu

SEQ ID NO: 1593550 - RNA, 19 nt, Homo sapiens
  misc_RNA (1)...(19): siRNA sense strand
gauggaguauuuccggaau

SEQ ID NO: 1593551 - RNA, 19 nt, Homo sapiens
  misc_RNA (1)...(19): siRNA sense strand
ucaaggagacauaugagaa

SEQ ID NO: 1593552 - RNA, 19 nt, Homo sapiens
  misc_RNA (1)...(19): siRNA sense strand
gcaugcaguucaucaacau

SEQ ID NO: 1593553 - RNA, 19 nt, Homo sapiens
  misc_RNA (1)...(19): siRNA sense strand
gacacuaccuguggacuuc

SEQ ID NO: 1593554 - RNA, 19 nt, Homo sapiens
  misc_RNA (1)...(19): siRNA sense strand
ggaggcucauuaaagagaa

SEQ ID NO: 1593555 - RNA, 19 nt, Homo sapiens
  misc_RNA (1)...(19): siRNA sense strand
gaauguagcccuggagaag

SEQ ID NO: 1593556 - RNA, 19 nt, Homo sapiens
  misc_RNA (1)...(19): siRNA sense strand
guaugacaaugagaagaaa

SEQ ID NO: 1593557 - RNA, 19 nt, Homo sapiens
  misc_RNA (1)...(19): siRNA sense strand
aagcagaacaagagaauga

SEQ ID NO: 1593558 - RNA, 19 nt, Homo sapiens
  misc_RNA (1)...(19): siRNA sense strand
ugucagccauucgaauuaa

SEQ ID NO: 1593559 - RNA, 19 nt, Homo sapiens
  misc_RNA (1)...(19): siRNA sense strand
ggguccaccugcaguauga

SEQ ID NO: 1593560 - RNA, 19 nt, Homo sapiens
  misc_RNA (1)...(19): siRNA sense strand
ccugugagcuggaggaaag

SEQ ID NO: 1593561 - RNA, 19 nt, Homo sapiens
  misc_RNA (1)...(19): siRNA sense strand
gaacuaucaguacggauuc

SEQ ID NO: 1593562 - RNA, 19 nt, Homo sapiens
  misc_RNA (1)...(19): siRNA sense strand
ugacacugcuucauuucau

SEQ ID NO: 1593563 - RNA, 19 nt, Homo sapiens
  misc_RNA (1)...(19): siRNA sense strand
gugcgggaauuucugaaug

SEQ ID NO: 1593564 - RNA, 19 nt, Homo sapiens
  misc_RNA (1)...(19): siRNA sense strand
cgaauuaagaaaccuauca

SEQ ID NO: 1593565 - RNA, 19 nt, Homo sapiens
  misc_RNA (1)...(19): siRNA sense strand
cagcgucgaugucauuugg

SEQ ID NO: 1593566 - RNA, 19 nt, Homo sapiens
  misc_RNA (1)...(19): siRNA sense strand
uggcagaacuagagaagca

SEQ ID NO: 1593567 - RNA, 19 nt, Homo sapiens
  misc_RNA (1)...(19): siRNA sense strand
aaucauccuugcugccuuu

SEQ ID NO: 1593568 - RNA, 19 nt, Homo sapiens
  misc_RNA (1)...(19): siRNA sense strand
ccacgucuguauccuuugu

SEQ ID NO: 1593569 - RNA, 19 nt, Homo sapiens
  misc_RNA (1)...(19): siRNA sense strand
agaaaccuaucaagaccaa

SEQ ID NO: 1593570 - RNA, 19 nt, Homo sapiens
  misc_RNA (1)...(19): siRNA sense strand
gcaguugugcgcuacuuug

SEQ ID NO: 1593571 - RNA, 19 nt, Homo sapiens
  misc_RNA (1)...(19): siRNA sense strand
gcagauguuggagaucaua

SEQ ID NO: 1593572 - RNA, 19 nt, Homo sapiens
  misc_RNA (1)...(19): siRNA sense strand
gauucaaccuggucauguc

SEQ ID NO: 1593573 - RNA, 19 nt, Homo sapiens
  misc_RNA (1)...(19): siRNA sense strand
gagaaugaagcccgcaaga

SEQ ID NO: 1593574 - RNA, 19 nt, Homo sapiens
  misc_RNA (1)...(19): siRNA sense strand
guauuuguccgauucauuc

SEQ ID NO: 1593575 - RNA, 19 nt, Homo sapiens
  misc_RNA (1)...(19): siRNA sense strand
ccaagaaccuggccaucac

SEQ ID NO: 1593576 - RNA, 19 nt, Homo sapiens
  misc_RNA (1)...(19): siRNA sense strand
gcaaggugacucuguugga

SEQ ID NO: 1593577 - RNA, 19 nt, Homo sapiens
  misc_RNA (1)...(19): siRNA sense strand
ugcggaggcucauuaaaga

SEQ ID NO: 1593578 - RNA, 19 nt, Homo sapiens
  misc_RNA (1)...(19): siRNA sense strand
agaaggaacuagagagcau

SEQ ID NO: 1593579 - RNA, 19 nt, Homo sapiens
  misc_RNA (1)...(19): siRNA sense strand
gaaacuccagagcuucuug

SEQ ID NO: 1593580 - RNA, 19 nt, Homo sapiens
  misc_RNA (1)...(19): siRNA sense strand
aagcagauguuggagauca

SEQ ID NO: 1593581 - RNA, 19 nt, Homo sapiens
  misc_RNA (1)...(19): siRNA sense strand
gaccucaucugcuccaaaa

SEQ ID NO: 1593582 - RNA, 19 nt, Homo sapiens
  misc_RNA (1)...(19): siRNA sense strand
cagcaauauugacuucaug

SEQ ID NO: 1593583 - RNA, 19 nt, Homo sapiens
  misc_RNA (1)...(19): siRNA sense strand
ugaacuaucaguacggauu

SEQ ID NO: 1593584 - RNA, 19 nt, Homo sapiens
  misc_RNA (1)...(19): siRNA sense strand
acaagaagcagaacaagag

SEQ ID NO: 1593585 - RNA, 19 nt, Homo sapiens
  misc_RNA (1)...(19): siRNA sense strand
gcucacaccgcaacucaau

SEQ ID NO: 1593586 - RNA, 19 nt, Homo sapiens
  misc_RNA (1)...(19): siRNA sense strand
aggcauaucuggacaacgu

SEQ ID NO: 1593587 - RNA, 19 nt, Homo sapiens
  misc_RNA (1)...(19): siRNA sense strand
gugcaggagucaaccaaag

SEQ ID NO: 1593588 - RNA, 19 nt, Homo sapiens
  misc_RNA (1)...(19): siRNA sense strand
acaaaggccuggauguacu

SEQ ID NO: 1593589 - RNA, 19 nt, Homo sapiens
  misc_RNA (1)...(19): siRNA sense strand
ccaaugaaggcaaacuaga

SEQ ID NO: 1593590 - RNA, 19 nt, Homo sapiens
  misc_RNA (1)...(19): siRNA sense strand
gaacgauuccaggugaaga

SEQ ID NO: 1593591 - RNA, 19 nt, Homo sapiens
  misc_RNA (1)...(19): siRNA sense strand
guaaagcugcugcggcaau

SEQ ID NO: 1593592 - RNA, 19 nt, Homo sapiens
  misc_RNA (1)...(19): siRNA sense strand
cgaacuugaugaugagaag

SEQ ID NO: 1593593 - RNA, 19 nt, Homo sapiens
  misc_RNA (1)...(19): siRNA sense strand
uugcugccuuugacaauuu

SEQ ID NO: 1593594 - RNA, 19 nt, Homo sapiens
  misc_RNA (1)...(19): siRNA sense strand
uggauuaccuguccuuugc

SEQ ID NO: 1593595 - RNA, 19 nt, Homo sapiens
  misc_RNA (1)...(19): siRNA sense strand
cacagaggcugagguaaag

SEQ ID NO: 1593596 - RNA, 19 nt, Homo sapiens
  misc_RNA (1)...(19): siRNA sense strand
gcccacagaggcugaggua

SEQ ID NO: 1593597 - RNA, 19 nt, Homo sapiens
  misc_RNA (1)...(19): siRNA sense strand
gcacacagagagcgagaag

SEQ ID NO: 1593598 - RNA, 19 nt, Homo sapiens
  misc_RNA (1)...(19): siRNA sense strand
aaugaggacagcaauauug

SEQ ID NO: 1593599 - RNA, 19 nt, Homo sapiens
  misc_RNA (1)...(19): siRNA sense strand
uggaguauuuccggaauga

SEQ ID NO: 1593600 - RNA, 19 nt, Homo sapiens
  misc_RNA (1)...(19): siRNA sense strand
caaagcccuugucuuagag

SEQ ID NO: 1593601 - RNA, 19 nt, Homo sapiens
  misc_RNA (1)...(19): siRNA sense strand
ggaccaaagcccuugucuu

SEQ ID NO: 1593602 - RNA, 19 nt, Homo sapiens
  misc_RNA (1)...(19): siRNA sense strand
cacuuagccucaauaacaa

SEQ ID NO: 1593603 - RNA, 19 nt, Homo sapiens
  misc_RNA (1)...(19): siRNA sense strand
uggugacgauggugcauuu

SEQ ID NO: 1593604 - RNA, 19 nt, Homo sapiens
  misc_RNA (1)...(19): siRNA sense strand
gaacuuccucaguaccaau

SEQ ID NO: 1593605 - RNA, 19 nt, Homo sapiens
  misc_RNA (1)...(19): siRNA sense strand
uaaggaagcucaagauaua

SEQ ID NO: 1593606 - RNA, 19 nt, Homo sapiens
  misc_RNA (1)...(19): siRNA sense strand
gcugagaagucgauuacua

SEQ ID NO: 1593607 - RNA, 19 nt, Homo sapiens
  misc_RNA (1)...(19): siRNA sense strand
gcagaaaccaugugauuug

SEQ ID NO: 1593608 - RNA, 19 nt, Homo sapiens
  misc_RNA (1)...(19): siRNA sense strand
cgaaauaucccgccucauu

SEQ ID NO: 1593609 - RNA, 19 nt, Homo sapiens
  misc_RNA (1)...(19): siRNA sense strand
gaacgcacuauuacaguua

SEQ ID NO: 1593610 - RNA, 19 nt, Homo sapiens
  misc_RNA (1)...(19): siRNA sense strand
gggaggugcuggauaguuu

SEQ ID NO: 1593611 - RNA, 19 nt, Homo sapiens
  misc_RNA (1)...(19): siRNA sense strand
ggaccaagcuagacaagca

SEQ ID NO: 1593612 - RNA, 19 nt, Homo sapiens
  misc_RNA (1)...(19): siRNA sense strand
caaaauaacuggucacuuc

SEQ ID NO: 1593613 - RNA, 19 nt, Homo sapiens
  misc_RNA (1)...(19): siRNA sense strand
aagaagaggugaaacuuga

SEQ ID NO: 1593614 - RNA, 19 nt, Homo sapiens
  misc_RNA (1)...(19): siRNA sense strand
ggagacuguucaucuguuu

SEQ ID NO: 1593615 - RNA, 19 nt, Homo sapiens
  misc_RNA (1)...(19): siRNA sense strand
ggaaacccauagaaguuga

SEQ ID NO: 1593616 - RNA, 19 nt, Homo sapiens
  misc_RNA (1)...(19): siRNA sense strand
ccagacaccugaugagaau

SEQ ID NO: 1593617 - RNA, 19 nt, Homo sapiens
  misc_RNA (1)...(19): siRNA sense strand
uagacaaacugaauggauu

SEQ ID NO: 1593618 - RNA, 19 nt, Homo sapiens
  misc_RNA (1)...(19): siRNA sense strand
gcaaaggauucggaaacuu

SEQ ID NO: 1593619 - RNA, 19 nt, Homo sapiens
  misc_RNA (1)...(19): siRNA sense strand
gaagaaaacuuuguuaguc

SEQ ID NO: 1593620 - RNA, 19 nt, Homo sapiens
  misc_RNA (1)...(19): siRNA sense strand
cuauaucccugaugaaaug

SEQ ID NO: 1593621 - RNA, 19 nt, Homo sapiens
  misc_RNA (1)...(19): siRNA sense strand
gcaagacacagacacuaaa

SEQ ID NO: 1593622 - RNA, 19 nt, Homo sapiens
  misc_RNA (1)...(19): siRNA sense strand
gaauugacgcuguauaauc

SEQ ID NO: 1593623 - RNA, 19 nt, Homo sapiens
  misc_RNA (1)...(19): siRNA sense strand
uagaaaguaucuucaagga

SEQ ID NO: 1593624 - RNA, 19 nt, Homo sapiens
  misc_RNA (1)...(19): siRNA sense strand
ucgaggcgcuuucagguaa

SEQ ID NO: 1593625 - RNA, 19 nt, Homo sapiens
  misc_RNA (1)...(19): siRNA sense strand
guaagucuauucuggagau

SEQ ID NO: 1593626 - RNA, 19 nt, Homo sapiens
  misc_RNA (1)...(19): siRNA sense strand
aauguaaccuauuccagua

SEQ ID NO: 1593627 - RNA, 19 nt, Homo sapiens
  misc_RNA (1)...(19): siRNA sense strand
uaaaggcaauguugagaca

SEQ ID NO: 1593628 - RNA, 19 nt, Homo sapiens
  misc_RNA (1)...(19): siRNA sense strand
ccaagugguugucaaaaua

SEQ ID NO: 1593629 - RNA, 19 nt, Homo sapiens
  misc_RNA (1)...(19): siRNA sense strand
ggauuucaguuagagaauu

SEQ ID NO: 1593630 - RNA, 19 nt, Homo sapiens
  misc_RNA (1)...(19): siRNA sense strand
guucaaggcucagggaaga

SEQ ID NO: 1593631 - RNA, 19 nt, Homo sapiens
  misc_RNA (1)...(19): siRNA sense strand
gauauugcuucuaugaauc

SEQ ID NO: 1593632 - RNA, 19 nt, Homo sapiens
  misc_RNA (1)...(19): siRNA sense strand
aggaggagaucaugaagaa

SEQ ID NO: 1593633 - RNA, 19 nt, Homo sapiens
  misc_RNA (1)...(19): siRNA sense strand
gaagagauccccuugaaga

SEQ ID NO: 1593634 - RNA, 19 nt, Homo sapiens
  misc_RNA (1)...(19): siRNA sense strand
ccucggaccuagaaaguau

SEQ ID NO: 1593635 - RNA, 19 nt, Homo sapiens
  misc_RNA (1)...(19): siRNA sense strand
ggagagcugugagcaagug

SEQ ID NO: 1593636 - RNA, 19 nt, Homo sapiens
  misc_RNA (1)...(19): siRNA sense strand
gacaagcacuagacaaacu

SEQ ID NO: 1593637 - RNA, 19 nt, Homo sapiens
  misc_RNA (1)...(19): siRNA sense strand
aaagugaggauggugauua

SEQ ID NO: 1593638 - RNA, 19 nt, Homo sapiens
  misc_RNA (1)...(19): siRNA sense strand
cauaaggaagcucaagaua

SEQ ID NO: 1593639 - RNA, 19 nt, Homo sapiens
  misc_RNA (1)...(19): siRNA sense strand
gcaccucugcggcuuguaa

SEQ ID NO: 1593640 - RNA, 19 nt, Homo sapiens
  misc_RNA (1)...(19): siRNA sense strand
uagccuauaucccugauga

SEQ ID NO: 1593641 - RNA, 19 nt, Homo sapiens
  misc_RNA (1)...(19): siRNA sense strand
caaaggauucggaaacuuc

SEQ ID NO: 1593642 - RNA, 19 nt, Homo sapiens
  misc_RNA (1)...(19): siRNA sense strand
uuagagaauuucaccuuga

SEQ ID NO: 1593643 - RNA, 19 nt, Homo sapiens
  misc_RNA (1)...(19): siRNA sense strand
gagauccccuugaagauuu

SEQ ID NO: 1593644 - RNA, 19 nt, Homo sapiens
  misc_RNA (1)...(19): siRNA sense strand
gggaagaauuuauggaaaa

SEQ ID NO: 1593645 - RNA, 19 nt, Homo sapiens
  misc_RNA (1)...(19): siRNA sense strand
gcacgggaaacccauagaa

SEQ ID NO: 1593646 - RNA, 19 nt, Homo sapiens
  misc_RNA (1)...(19): siRNA sense strand
gcacuagacaaacugaaug

SEQ ID NO: 1593647 - RNA, 19 nt, Homo sapiens
  misc_RNA (1)...(19): siRNA sense strand
ggaaacuucagauacgaaa

SEQ ID NO: 1593648 - RNA, 19 nt, Homo sapiens
  misc_RNA (1)...(19): siRNA sense strand
gcuggagcuucaauuaaga

SEQ ID NO: 1593649 - RNA, 19 nt, Homo sapiens
  misc_RNA (1)...(19): siRNA sense strand
ggaccuagaaaguaucuuc

SEQ ID NO: 1593650 - RNA, 19 nt, Homo sapiens
  misc_RNA (1)...(19): siRNA sense strand
gauguccaccguaaagaaa

SEQ ID NO: 1593651 - RNA, 19 nt, Homo sapiens
  misc_RNA (1)...(19): siRNA sense strand
ggaggugcuggauaguuua

SEQ ID NO: 1593652 - RNA, 19 nt, Homo sapiens
  misc_RNA (1)...(19): siRNA sense strand
uaaagcagcaccaacaaca

SEQ ID NO: 1593653 - RNA, 19 nt, Homo sapiens
  misc_RNA (1)...(19): siRNA sense strand
acuugaagcucauaucaga

SEQ ID NO: 1593654 - RNA, 19 nt, Homo sapiens
  misc_RNA (1)...(19): siRNA sense strand
gcucagggaagaauuuaug

SEQ ID NO: 1593655 - RNA, 19 nt, Homo sapiens
  misc_RNA (1)...(19): siRNA sense strand
aaaucgauguccaccguaa

SEQ ID NO: 1593656 - RNA, 19 nt, Homo sapiens
  misc_RNA (1)...(19): siRNA sense strand
aagcagaaaccaugugauu

SEQ ID NO: 1593657 - RNA, 19 nt, Homo sapiens
  misc_RNA (1)...(19): siRNA sense strand
gaauggauuucaguuagag

SEQ ID NO: 1593658 - RNA, 19 nt, Homo sapiens
  misc_RNA (1)...(19): siRNA sense strand
uagacaagcacuagacaaa

SEQ ID NO: 1593659 - RNA, 19 nt, Homo sapiens
  misc_RNA (1)...(19): siRNA sense strand
cagaagagauccccuugaa

SEQ ID NO: 1593660 - RNA, 19 nt, Homo sapiens
  misc_RNA (1)...(19): siRNA sense strand
uaaagaagaggugaaacuu

SEQ ID NO: 1593661 - RNA, 19 nt, Homo sapiens
  misc_RNA (1)...(19): siRNA sense strand
gaaucuucaagcacauuua

SEQ ID NO: 1593662 - RNA, 19 nt, Homo sapiens
  misc_RNA (1)...(19): siRNA sense strand
gagcaagacacagacacua

SEQ ID NO: 1593663 - RNA, 19 nt, Homo sapiens
  misc_RNA (1)...(19): siRNA sense strand
cuucagaauuugucaagug

SEQ ID NO: 1593664 - RNA, 19 nt, Homo sapiens
  misc_RNA (1)...(19): siRNA sense strand
gcaaaacggugaaugaacu

SEQ ID NO: 1593665 - RNA, 19 nt, Homo sapiens
  misc_RNA (1)...(19): siRNA sense strand
aaacggagacuguucaucu

SEQ ID NO: 1593666 - RNA, 19 nt, Homo sapiens
  misc_RNA (1)...(19): siRNA sense strand
ggaauugacgcuguauaau

SEQ ID NO: 1593667 - RNA, 19 nt, Homo sapiens
  misc_RNA (1)...(19): siRNA sense strand
gcauaaggaagcucaagau

SEQ ID NO: 1593668 - RNA, 19 nt, Homo sapiens
  misc_RNA (1)...(19): siRNA sense strand
gaauuugucaagugcagaa

SEQ ID NO: 1593669 - RNA, 19 nt, Homo sapiens
  misc_RNA (1)...(19): siRNA sense strand
gcucauaauaacuuuguug

SEQ ID NO: 1593670 - RNA, 19 nt, Homo sapiens
  misc_RNA (1)...(19): siRNA sense strand
aauaacuggucacuucuau

SEQ ID NO: 1593671 - RNA, 19 nt, Homo sapiens
  misc_RNA (1)...(19): siRNA sense strand
uaucagagugccauccuuu

SEQ ID NO: 1593672 - RNA, 19 nt, Homo sapiens
  misc_RNA (1)...(19): siRNA sense strand
agaacgcacuauuacaguu

SEQ ID NO: 1593673 - RNA, 19 nt, Homo sapiens
  misc_RNA (1)...(19): siRNA sense strand
aauccagaacgcacuauua

SEQ ID NO: 1593674 - RNA, 19 nt, Homo sapiens
  misc_RNA (1)...(19): siRNA sense strand
gguaaagaaggaagaaauc

SEQ ID NO: 1593675 - RNA, 19 nt, Homo sapiens
  misc_RNA (1)...(19): siRNA sense strand
aaacuugaagcucauauca

SEQ ID NO: 1593676 - RNA, 19 nt, Homo sapiens
  misc_RNA (1)...(19): siRNA sense strand
agacaaacugaauggauuu

SEQ ID NO: 1593677 - RNA, 19 nt, Homo sapiens
  misc_RNA (1)...(19): siRNA sense strand
gggaaacccauagaaguug

SEQ ID NO: 1593678 - RNA, 19 nt, Homo sapiens
  misc_RNA (1)...(19): siRNA sense strand
gaacuucagaauuugucaa

SEQ ID NO: 1593679 - RNA, 19 nt, Homo sapiens
  misc_RNA (1)...(19): siRNA sense strand
aaagaagaggugaaacuug

SEQ ID NO: 1593680 - RNA, 19 nt, Homo sapiens
  misc_RNA (1)...(19): siRNA sense strand
gcaguuugagcaaucagaa

SEQ ID NO: 1593681 - RNA, 19 nt, Homo sapiens
  misc_RNA (1)...(19): siRNA sense strand
gaggagaucaugaagaaaa

SEQ ID NO: 1593682 - RNA, 19 nt, Homo sapiens
  misc_RNA (1)...(19): siRNA sense strand
aggaauugacgcuguauaa

SEQ ID NO: 1593683 - RNA, 19 nt, Homo sapiens
  misc_RNA (1)...(19): siRNA sense strand
uaacuuuguuggacgucuu

SEQ ID NO: 1593684 - RNA, 19 nt, Homo sapiens
  misc_RNA (1)...(19): siRNA sense strand
cgggaaacccauagaaguu

SEQ ID NO: 1593685 - RNA, 19 nt, Homo sapiens
  misc_RNA (1)...(19): siRNA sense strand
gaaacuugaagcucauauc

SEQ ID NO: 1593686 - RNA, 19 nt, Homo sapiens
  misc_RNA (1)...(19): siRNA sense strand
cagggaagaauuuauggaa

SEQ ID NO: 1593687 - RNA, 19 nt, Homo sapiens
  misc_RNA (1)...(19): siRNA sense strand
gagacuguucaucuguuua

SEQ ID NO: 1593688 - RNA, 19 nt, Homo sapiens
  misc_RNA (1)...(19): siRNA sense strand
ucggaaaccucagcgagaa

SEQ ID NO: 1593689 - RNA, 19 nt, Homo sapiens
  misc_RNA (1)...(19): siRNA sense strand
guaaggaccaagcuagaca

SEQ ID NO: 1593690 - RNA, 19 nt, Homo sapiens
  misc_RNA (1)...(19): siRNA sense strand
cuucuaugcuugccagguu

SEQ ID NO: 1593691 - RNA, 19 nt, Homo sapiens
  misc_RNA (1)...(19): siRNA sense strand
agggaagaauuuauggaaa

SEQ ID NO: 1593692 - RNA, 19 nt, Homo sapiens
  misc_RNA (1)...(19): siRNA sense strand
gcacauuuaauuccuggau

SEQ ID NO: 1593693 - RNA, 19 nt, Homo sapiens
  misc_RNA (1)...(19): siRNA sense strand
uuggacgucuuauugguaa

SEQ ID NO: 1593694 - RNA, 19 nt, Homo sapiens
  misc_RNA (1)...(19): siRNA sense strand
auaaggaagcucaagauau

SEQ ID NO: 1593695 - RNA, 19 nt, Homo sapiens
  misc_RNA (1)...(19): siRNA sense strand
agucuauucuggagauuau

SEQ ID NO: 1593696 - RNA, 19 nt, Homo sapiens
  misc_RNA (1)...(19): siRNA sense strand
ccaagcagaaaccauguga

SEQ ID NO: 1593697 - RNA, 19 nt, Homo sapiens
  misc_RNA (1)...(19): siRNA sense strand
ccuugaaaguagccuauau

SEQ ID NO: 1593698 - RNA, 19 nt, Homo sapiens
  misc_RNA (1)...(19): siRNA sense strand
gaggaggagaucaugaaga

SEQ ID NO: 1593699 - RNA, 19 nt, Homo sapiens
  misc_RNA (1)...(19): siRNA sense strand
gguaaagcagcaccaacaa

SEQ ID NO: 1593700 - RNA, 19 nt, Homo sapiens
  misc_RNA (1)...(19): siRNA sense strand
ugaugagaaugaccaagug

SEQ ID NO: 1593701 - RNA, 19 nt, Homo sapiens
  misc_RNA (1)...(19): siRNA sense strand
gaccagacaccugaugaga

SEQ ID NO: 1593702 - RNA, 19 nt, Homo sapiens
  misc_RNA (1)...(19): siRNA sense strand
gaagaggugaaacuugaag

SEQ ID NO: 1593703 - RNA, 19 nt, Homo sapiens
  misc_RNA (1)...(19): siRNA sense strand
ccuagaaaguaucuucaag

SEQ ID NO: 1593704 - RNA, 19 nt, Homo sapiens
  misc_RNA (1)...(19): siRNA sense strand
caccagaggcucaguucaa

SEQ ID NO: 1593705 - RNA, 19 nt, Homo sapiens
  misc_RNA (1)...(19): siRNA sense strand
gaggcaagcucagcaagaa

SEQ ID NO: 1593706 - RNA, 19 nt, Homo sapiens
  misc_RNA (1)...(19): siRNA sense strand
gaagaagggcuacaaugug

SEQ ID NO: 1593707 - RNA, 19 nt, Homo sapiens
  misc_RNA (1)...(19): siRNA sense strand
aagaagggcuacaauguga

SEQ ID NO: 1593708 - RNA, 19 nt, Homo sapiens
  misc_RNA (1)...(19): siRNA sense strand
gaagaagaagggcuacaau

SEQ ID NO: 1593709 - RNA, 19 nt, Homo sapiens
  misc_RNA (1)...(19): siRNA sense strand
cgagaaagccaaggagaaa

SEQ ID NO: 1593710 - RNA, 19 nt, Homo sapiens
  misc_RNA (1)...(19): siRNA sense strand
ccaaggagaaagacaagaa

SEQ ID NO: 1593711 - RNA, 19 nt, Homo sapiens
  misc_RNA (1)...(19): siRNA sense strand
ccaaggagggcaaggagaa

SEQ ID NO: 1593712 - RNA, 19 nt, Homo sapiens
  misc_RNA (1)...(19): siRNA sense strand
agaagaagggcuacaaugu

SEQ ID NO: 1593713 - RNA, 19 nt, Homo sapiens
  misc_RNA (1)...(19): siRNA sense strand
gcagcuaauuccgaccaaa

SEQ ID NO: 1593714 - RNA, 19 nt, Homo sapiens
  misc_RNA (1)...(19): siRNA sense strand
ggaggcaagcucagcaaga

SEQ ID NO: 1593715 - RNA, 19 nt, Homo sapiens
  misc_RNA (1)...(19): siRNA sense strand
ccacggaagcgccuaguuc

SEQ ID NO: 1593716 - RNA, 19 nt, Homo sapiens
  misc_RNA (1)...(19): siRNA sense strand
caaugugaacgacgagaaa

SEQ ID NO: 1593717 - RNA, 19 nt, Homo sapiens
  misc_RNA (1)...(19): siRNA sense strand
gcaaggccgaggagaagga

SEQ ID NO: 1593718 - RNA, 19 nt, Homo sapiens
  misc_RNA (1)...(19): siRNA sense strand
ggagaaggagggcgagaag

SEQ ID NO: 1593719 - RNA, 19 nt, Homo sapiens
  misc_RNA (1)...(19): siRNA sense strand
agaaagccaaggagaaaga

SEQ ID NO: 1593720 - RNA, 19 nt, Homo sapiens
  misc_RNA (1)...(19): siRNA sense strand
ggcaagcucagcaagaaga

SEQ ID NO: 1593721 - RNA, 19 nt, Homo sapiens
  misc_RNA (1)...(19): siRNA sense strand
agaaggagggcgagaagga

SEQ ID NO: 1593722 - RNA, 19 nt, Homo sapiens
  misc_RNA (1)...(19): siRNA sense strand
gcaagcucagcaagaagaa

SEQ ID NO: 1593723 - RNA, 19 nt, Homo sapiens
  misc_RNA (1)...(19): siRNA sense strand
aagaagaagggcuacaaug

SEQ ID NO: 1593724 - RNA, 19 nt, Homo sapiens
  misc_RNA (1)...(19): siRNA sense strand
gaagggcuacaaugugaac

SEQ ID NO: 1593725 - RNA, 19 nt, Homo sapiens
  misc_RNA (1)...(19): siRNA sense strand
agaagaagaagggcuacaa

SEQ ID NO: 1593726 - RNA, 19 nt, Homo sapiens
  misc_RNA (1)...(19): siRNA sense strand
ccaaaccguaaccgugaaa

SEQ ID NO: 1593727 - RNA, 19 nt, Homo sapiens
  misc_RNA (1)...(19): siRNA sense strand
caaggagaaagacaagaag

SEQ ID NO: 1593728 - RNA, 19 nt, Homo sapiens
  misc_RNA (1)...(19): siRNA sense strand
ggaggaaggggaacccaaa

SEQ ID NO: 1593729 - RNA, 19 nt, Homo sapiens
  misc_RNA (1)...(19): siRNA sense strand
aaaccguaaccgugaaaga

SEQ ID NO: 1593730 - RNA, 19 nt, Homo sapiens
  misc_RNA (1)...(19): siRNA sense strand
cccauggccucccaaguga

SEQ ID NO: 1593731 - RNA, 19 nt, Homo sapiens
  misc_RNA (1)...(19): siRNA sense strand
gcccaguggucccuucaca

SEQ ID NO: 1593732 - RNA, 19 nt, Homo sapiens
  misc_RNA (1)...(19): siRNA sense strand
gcugcugacugcccaccuu

SEQ ID NO: 1593733 - RNA, 19 nt, Homo sapiens
  misc_RNA (1)...(19): siRNA sense strand
gcugguacccuggaggaaa

SEQ ID NO: 1593734 - RNA, 19 nt, Homo sapiens
  misc_RNA (1)...(19): siRNA sense strand
aguggucccuucacaggaa

SEQ ID NO: 1593735 - RNA, 19 nt, Homo sapiens
  misc_RNA (1)...(19): siRNA sense strand
ccgccauccuccaauaaag

SEQ ID NO: 1593736 - RNA, 19 nt, Homo sapiens
  misc_RNA (1)...(19): siRNA sense strand
cccauggccucccaaguga

SEQ ID NO: 1593737 - RNA, 19 nt, Homo sapiens
  misc_RNA (1)...(19): siRNA sense strand
gcccaguggucccuucaca

SEQ ID NO: 1593738 - RNA, 19 nt, Homo sapiens
  misc_RNA (1)...(19): siRNA sense strand
gcugcugacugcccaccuu

SEQ ID NO: 1593739 - RNA, 19 nt, Homo sapiens
  misc_RNA (1)...(19): siRNA sense strand
gcugguacccuggaggaaa

SEQ ID NO: 1593740 - RNA, 19 nt, Homo sapiens
  misc_RNA (1)...(19): siRNA sense strand
aguggucccuucacaggaa

SEQ ID NO: 1593741 - RNA, 19 nt, Homo sapiens
  misc_RNA (1)...(19): siRNA sense strand
ccgccauccuccaauaaag

SEQ ID NO: 1593742 - RNA, 19 nt, Homo sapiens
  misc_RNA (1)...(19): siRNA sense strand
cccauggccucccaaguga

SEQ ID NO: 1593743 - RNA, 19 nt, Homo sapiens
  misc_RNA (1)...(19): siRNA sense strand
gcccaguggucccuucaca

SEQ ID NO: 1593744 - RNA, 19 nt, Homo sapiens
  misc_RNA (1)...(19): siRNA sense strand
gcugcugacugcccaccuu

SEQ ID NO: 1593745 - RNA, 19 nt, Homo sapiens
  misc_RNA (1)...(19): siRNA sense strand
gcugguacccuggaggaaa

SEQ ID NO: 1593746 - RNA, 19 nt, Homo sapiens
  misc_RNA (1)...(19): siRNA sense strand
aguggucccuucacaggaa

SEQ ID NO: 1593747 - RNA, 19 nt, Homo sapiens
  misc_RNA (1)...(19): siRNA sense strand
ccgccauccuccaauaaag

SEQ ID NO: 1593748 - RNA, 19 nt, Homo sapiens
  misc_RNA (1)...(19): siRNA sense strand
cccauggccucccaaguga

SEQ ID NO: 1593749 - RNA, 19 nt, Homo sapiens
  misc_RNA (1)...(19): siRNA sense strand
gcccaguggucccuucaca

SEQ ID NO: 1593750 - RNA, 19 nt, Homo sapiens
  misc_RNA (1)...(19): siRNA sense strand
gcugcugacugcccaccuu

SEQ ID NO: 1593751 - RNA, 19 nt, Homo sapiens
  misc_RNA (1)...(19): siRNA sense strand
gcugguacccuggaggaaa

SEQ ID NO: 1593752 - RNA, 19 nt, Homo sapiens
  misc_RNA (1)...(19): siRNA sense strand
aguggucccuucacaggaa

SEQ ID NO: 1593753 - RNA, 19 nt, Homo sapiens
  misc_RNA (1)...(19): siRNA sense strand
ccgccauccuccaauaaag

SEQ ID NO: 1593754 - RNA, 19 nt, Homo sapiens
  misc_RNA (1)...(19): siRNA sense strand
cccauggccucccaaguga

SEQ ID NO: 1593755 - RNA, 19 nt, Homo sapiens
  misc_RNA (1)...(19): siRNA sense strand
gcccaguggucccuucaca

SEQ ID NO: 1593756 - RNA, 19 nt, Homo sapiens
  misc_RNA (1)...(19): siRNA sense strand
gcugcugacugcccaccuu

SEQ ID NO: 1593757 - RNA, 19 nt, Homo sapiens
  misc_RNA (1)...(19): siRNA sense strand
gcugguacccuggaggaaa

SEQ ID NO: 1593758 - RNA, 19 nt, Homo sapiens
  misc_RNA (1)...(19): siRNA sense strand
aguggucccuucacaggaa

SEQ ID NO: 1593759 - RNA, 19 nt, Homo sapiens
  misc_RNA (1)...(19): siRNA sense strand
ccgccauccuccaauaaag

SEQ ID NO: 1593760 - RNA, 19 nt, Homo sapiens
  misc_RNA (1)...(19): siRNA sense strand
cccauggccucccaaguga

SEQ ID NO: 1593761 - RNA, 19 nt, Homo sapiens
  misc_RNA (1)...(19): siRNA sense strand
gcccaguggucccuucaca

SEQ ID NO: 1593762 - RNA, 19 nt, Homo sapiens
  misc_RNA (1)...(19): siRNA sense strand
gcugcugacugcccaccuu

SEQ ID NO: 1593763 - RNA, 19 nt, Homo sapiens
  misc_RNA (1)...(19): siRNA sense strand
gcugguacccuggaggaaa

SEQ ID NO: 1593764 - RNA, 19 nt, Homo sapiens
  misc_RNA (1)...(19): siRNA sense strand
aguggucccuucacaggaa

SEQ ID NO: 1593765 - RNA, 19 nt, Homo sapiens
  misc_RNA (1)...(19): siRNA sense strand
ccgccauccuccaauaaag

SEQ ID NO: 1593766 - RNA, 19 nt, Homo sapiens
  misc_RNA (1)...(19): siRNA sense strand
gaaacgguccucuuuauug

SEQ ID NO: 1593767 - RNA, 19 nt, Homo sapiens
  misc_RNA (1)...(19): siRNA sense strand
cagaagagguggacuguau

SEQ ID NO: 1593768 - RNA, 19 nt, Homo sapiens
  misc_RNA (1)...(19): siRNA sense strand
cagaaacgguccucuuuau

SEQ ID NO: 1593769 - RNA, 19 nt, Homo sapiens
  misc_RNA (1)...(19): siRNA sense strand
ugaaaccacggaugaauua

SEQ ID NO: 1593770 - RNA, 19 nt, Homo sapiens
  misc_RNA (1)...(19): siRNA sense strand
ccauugccauugacagaua

SEQ ID NO: 1593771 - RNA, 19 nt, Homo sapiens
  misc_RNA (1)...(19): siRNA sense strand
aaacgguccucuuuauugu

SEQ ID NO: 1593772 - RNA, 19 nt, Homo sapiens
  misc_RNA (1)...(19): siRNA sense strand
ccuccucccucuccuuuaa

SEQ ID NO: 1593773 - RNA, 19 nt, Homo sapiens
  misc_RNA (1)...(19): siRNA sense strand
caacagaaacgguccucuu

SEQ ID NO: 1593774 - RNA, 19 nt, Homo sapiens
  misc_RNA (1)...(19): siRNA sense strand
gaacaacaccaugaaguac

SEQ ID NO: 1593775 - RNA, 19 nt, Homo sapiens
  misc_RNA (1)...(19): siRNA sense strand
ucaguuauggugauuauga

SEQ ID NO: 1593776 - RNA, 19 nt, Homo sapiens
  misc_RNA (1)...(19): siRNA sense strand
gaagagguggacuguauca

SEQ ID NO: 1593777 - RNA, 19 nt, Homo sapiens
  misc_RNA (1)...(19): siRNA sense strand
agaacaacaccaugaagua

SEQ ID NO: 1593778 - RNA, 19 nt, Homo sapiens
  misc_RNA (1)...(19): siRNA sense strand
acagaaacgguccucuuua

SEQ ID NO: 1593779 - RNA, 19 nt, Homo sapiens
  misc_RNA (1)...(19): siRNA sense strand
ggaugaggaugaggacaug

SEQ ID NO: 1593780 - RNA, 19 nt, Homo sapiens
  misc_RNA (1)...(19): siRNA sense strand
cagcagcucuacuacaagu

SEQ ID NO: 1593781 - RNA, 19 nt, Homo sapiens
  misc_RNA (1)...(19): siRNA sense strand
gauggacuacuacguggua

SEQ ID NO: 1593782 - RNA, 19 nt, Homo sapiens
  misc_RNA (1)...(19): siRNA sense strand
gaugaggacaugaccaaga

SEQ ID NO: 1593783 - RNA, 19 nt, Homo sapiens
  misc_RNA (1)...(19): siRNA sense strand
caucuuuggugucgaguuc

SEQ ID NO: 1593784 - RNA, 19 nt, Homo sapiens
  misc_RNA (1)...(19): siRNA sense strand
gggcacccuucuacgguuu

SEQ ID NO: 1593785 - RNA, 19 nt, Homo sapiens
  misc_RNA (1)...(19): siRNA sense strand
ccacuguguucgugaagga

SEQ ID NO: 1593786 - RNA, 19 nt, Homo sapiens
  misc_RNA (1)...(19): siRNA sense strand
aaccacggaugaauuauca

SEQ ID NO: 1593787 - RNA, 19 nt, Homo sapiens
  misc_RNA (1)...(19): siRNA sense strand
caccaucguucgugacuuc

SEQ ID NO: 1593788 - RNA, 19 nt, Homo sapiens
  misc_RNA (1)...(19): siRNA sense strand
gugcucaugugcauucuca

SEQ ID NO: 1593789 - RNA, 19 nt, Homo sapiens
  misc_RNA (1)...(19): siRNA sense strand
ccacggaugaauuaucaaa

SEQ ID NO: 1593790 - RNA, 19 nt, Homo sapiens
  misc_RNA (1)...(19): siRNA sense strand
gauuaugaccucccuaugg

SEQ ID NO: 1593791 - RNA, 19 nt, Homo sapiens
  misc_RNA (1)...(19): siRNA sense strand
cggcuuacuuugcaacaga

SEQ ID NO: 1593792 - RNA, 19 nt, Homo sapiens
  misc_RNA (1)...(19): siRNA sense strand
acagauaucucgccaucgu

SEQ ID NO: 1593793 - RNA, 19 nt, Homo sapiens
  misc_RNA (1)...(19): siRNA sense strand
ccuucgagauggacuacua

SEQ ID NO: 1593794 - RNA, 19 nt, Homo sapiens
  misc_RNA (1)...(19): siRNA sense strand
caagaucgucauuggcauu

SEQ ID NO: 1593795 - RNA, 19 nt, Homo sapiens
  misc_RNA (1)...(19): siRNA sense strand
acaacaccaugaaguacuu

SEQ ID NO: 1593796 - RNA, 19 nt, Homo sapiens
  misc_RNA (1)...(19): siRNA sense strand
gaucgucauuggcauugca

SEQ ID NO: 1593797 - RNA, 19 nt, Homo sapiens
  misc_RNA (1)...(19): siRNA sense strand
ucaagaacaacaccaugaa

SEQ ID NO: 1593798 - RNA, 19 nt, Homo sapiens
  misc_RNA (1)...(19): siRNA sense strand
gcaacagcaugaucaacac

SEQ ID NO: 1593799 - RNA, 19 nt, Homo sapiens
  misc_RNA (1)...(19): siRNA sense strand
gcccucacccgcuauaaga

SEQ ID NO: 1593800 - RNA, 19 nt, Homo sapiens
  misc_RNA (1)...(19): siRNA sense strand
caaguccagugcugaccuu

SEQ ID NO: 1593801 - RNA, 19 nt, Homo sapiens
  misc_RNA (1)...(19): siRNA sense strand
cuacuuccucuucaucuuu

SEQ ID NO: 1593802 - RNA, 19 nt, Homo sapiens
  misc_RNA (1)...(19): siRNA sense strand
ucgguaacuuugucuuuau

SEQ ID NO: 1593803 - RNA, 19 nt, Homo sapiens
  misc_RNA (1)...(19): siRNA sense strand
gaucagcagcucuacuaca

SEQ ID NO: 1593804 - RNA, 19 nt, Homo sapiens
  misc_RNA (1)...(19): siRNA sense strand
caucgguaacuuugucuuu

SEQ ID NO: 1593805 - RNA, 19 nt, Homo sapiens
  misc_RNA (1)...(19): siRNA sense strand
gucaagaacaacaccauga

SEQ ID NO: 1593806 - RNA, 19 nt, Homo sapiens
  misc_RNA (1)...(19): siRNA sense strand
caucguucgugacuucuuc

SEQ ID NO: 1593807 - RNA, 19 nt, Homo sapiens
  misc_RNA (1)...(19): siRNA sense strand
cuucaguuauggugauuau

SEQ ID NO: 1593808 - RNA, 19 nt, Homo sapiens
  misc_RNA (1)...(19): siRNA sense strand
caucccaucggcuuacuuu

SEQ ID NO: 1593809 - RNA, 19 nt, Homo sapiens
  misc_RNA (1)...(19): siRNA sense strand
cuaccucacugccuucuac

SEQ ID NO: 1593810 - RNA, 19 nt, Homo sapiens
  misc_RNA (1)...(19): siRNA sense strand
uggaucagcagcucuacua

SEQ ID NO: 1593811 - RNA, 19 nt, Homo sapiens
  misc_RNA (1)...(19): siRNA sense strand
agaaacgguccucuuuauu

SEQ ID NO: 1593812 - RNA, 19 nt, Homo sapiens
  misc_RNA (1)...(19): siRNA sense strand
aacagaaacgguccucuuu

SEQ ID NO: 1593813 - RNA, 19 nt, Homo sapiens
  misc_RNA (1)...(19): siRNA sense strand
auuaugaccucccuaugga

SEQ ID NO: 1593814 - RNA, 19 nt, Homo sapiens
  misc_RNA (1)...(19): siRNA sense strand
aucgguaacuuugucuuua

SEQ ID NO: 1593815 - RNA, 19 nt, Homo sapiens
  misc_RNA (1)...(19): siRNA sense strand
cggcaucgguaacuuuguc

SEQ ID NO: 1593816 - RNA, 19 nt, Homo sapiens
  misc_RNA (1)...(19): siRNA sense strand
caagaacaacaccaugaag

SEQ ID NO: 1593817 - RNA, 19 nt, Homo sapiens
  misc_RNA (1)...(19): siRNA sense strand
ucaagagccaggagaagau

SEQ ID NO: 1593818 - RNA, 19 nt, Homo sapiens
  misc_RNA (1)...(19): siRNA sense strand
cagaauggaaacaccaguu

SEQ ID NO: 1593819 - RNA, 19 nt, Homo sapiens
  misc_RNA (1)...(19): siRNA sense strand
ggccauugccauugacaga

SEQ ID NO: 1593820 - RNA, 19 nt, Homo sapiens
  misc_RNA (1)...(19): siRNA sense strand
ccucaccaaucugcucauu

SEQ ID NO: 1593821 - RNA, 19 nt, Homo sapiens
  misc_RNA (1)...(19): siRNA sense strand
aucagcagcucuacuacaa

SEQ ID NO: 1593822 - RNA, 19 nt, Homo sapiens
  misc_RNA (1)...(19): siRNA sense strand
gaaaccacggaugaauuau

SEQ ID NO: 1593823 - RNA, 19 nt, Homo sapiens
  misc_RNA (1)...(19): siRNA sense strand
guuucacacccaacuuuaa

SEQ ID NO: 1593824 - RNA, 19 nt, Homo sapiens
  misc_RNA (1)...(19): siRNA sense strand
gaccuugaccucagaacca

SEQ ID NO: 1593825 - RNA, 19 nt, Homo sapiens
  misc_RNA (1)...(19): siRNA sense strand
gucaagagccaggagaaga

SEQ ID NO: 1593826 - RNA, 19 nt, Homo sapiens
  misc_RNA (1)...(19): siRNA sense strand
gugauuaugaccucccuau

SEQ ID NO: 1593827 - RNA, 19 nt, Homo sapiens
  misc_RNA (1)...(19): siRNA sense strand
ccuacuuccucuucaucuu

SEQ ID NO: 1593828 - RNA, 19 nt, Homo sapiens
  misc_RNA (1)...(19): siRNA sense strand
uugaaaccacggaugaauu

SEQ ID NO: 1593829 - RNA, 19 nt, Homo sapiens
  misc_RNA (1)...(19): siRNA sense strand
gcacccuucuacgguuuca

SEQ ID NO: 1593830 - RNA, 19 nt, Homo sapiens
  misc_RNA (1)...(19): siRNA sense strand
aaaccacggaugaauuauc

SEQ ID NO: 1593831 - RNA, 19 nt, Homo sapiens
  misc_RNA (1)...(19): siRNA sense strand
aagaacaacaccaugaagu

SEQ ID NO: 1593832 - RNA, 19 nt, Homo sapiens
  misc_RNA (1)...(19): siRNA sense strand
cccgggagcucugguucaa

SEQ ID NO: 1593833 - RNA, 19 nt, Homo sapiens
  misc_RNA (1)...(19): siRNA sense strand
acgguccucuuuauuguca

SEQ ID NO: 1593834 - RNA, 19 nt, Homo sapiens
  misc_RNA (1)...(19): siRNA sense strand
ggcuuacuuugcaacagaa

SEQ ID NO: 1593835 - RNA, 19 nt, Homo sapiens
  misc_RNA (1)...(19): siRNA sense strand
cccaucggcuuacuuugca

SEQ ID NO: 1593836 - RNA, 19 nt, Homo sapiens
  misc_RNA (1)...(19): siRNA sense strand
uaucaaagauggcaaguuu

SEQ ID NO: 1593837 - RNA, 19 nt, Homo sapiens
  misc_RNA (1)...(19): siRNA sense strand
gcagagggcuucuacaaca

SEQ ID NO: 1593838 - RNA, 19 nt, Homo sapiens
  misc_RNA (1)...(19): siRNA sense strand
ggccggagcuuaucaaaga

SEQ ID NO: 1593839 - RNA, 19 nt, Homo sapiens
  misc_RNA (1)...(19): siRNA sense strand
ggacaaacaguacgagauu

SEQ ID NO: 1593840 - RNA, 19 nt, Homo sapiens
  misc_RNA (1)...(19): siRNA sense strand
gaacacaugguccgaaaga

SEQ ID NO: 1593841 - RNA, 19 nt, Homo sapiens
  misc_RNA (1)...(19): siRNA sense strand
gggaagcacuggucgaaga

SEQ ID NO: 1593842 - RNA, 19 nt, Homo sapiens
  misc_RNA (1)...(19): siRNA sense strand
gcagauuagugccauugga

SEQ ID NO: 1593843 - RNA, 19 nt, Homo sapiens
  misc_RNA (1)...(19): siRNA sense strand
agaaggaacuggaacacau

SEQ ID NO: 1593844 - RNA, 19 nt, Homo sapiens
  misc_RNA (1)...(19): siRNA sense strand
cgaagagugugauggacaa

SEQ ID NO: 1593845 - RNA, 19 nt, Homo sapiens
  misc_RNA (1)...(19): siRNA sense strand
gaaggaacuggaacacaug

SEQ ID NO: 1593846 - RNA, 19 nt, Homo sapiens
  misc_RNA (1)...(19): siRNA sense strand
gaaucaagcaaggaaagaa

SEQ ID NO: 1593847 - RNA, 19 nt, Homo sapiens
  misc_RNA (1)...(19): siRNA sense strand
acacaugguccgaaagauu

SEQ ID NO: 1593848 - RNA, 19 nt, Homo sapiens
  misc_RNA (1)...(19): siRNA sense strand
uggaacacaugguccgaaa

SEQ ID NO: 1593849 - RNA, 19 nt, Homo sapiens
  misc_RNA (1)...(19): siRNA sense strand
gacaaacaguacgagauuc

SEQ ID NO: 1593850 - RNA, 19 nt, Homo sapiens
  misc_RNA (1)...(19): siRNA sense strand
caagccugauuuccaccua

SEQ ID NO: 1593851 - RNA, 19 nt, Homo sapiens
  misc_RNA (1)...(19): siRNA sense strand
ggucgaagagugugaugga

SEQ ID NO: 1593852 - RNA, 19 nt, Homo sapiens
  misc_RNA (1)...(19): siRNA sense strand
gagcagauuagugccauug

SEQ ID NO: 1593853 - RNA, 19 nt, Homo sapiens
  misc_RNA (1)...(19): siRNA sense strand
aguacgagauucugugugu

SEQ ID NO: 1593854 - RNA, 19 nt, Homo sapiens
  misc_RNA (1)...(19): siRNA sense strand
cagauuagugccauuggaa

SEQ ID NO: 1593855 - RNA, 19 nt, Homo sapiens
  misc_RNA (1)...(19): siRNA sense strand
cagcagcagaggaaagaaa

SEQ ID NO: 1593856 - RNA, 19 nt, Homo sapiens
  misc_RNA (1)...(19): siRNA sense strand
agagugugauggacaaaca

SEQ ID NO: 1593857 - RNA, 19 nt, Homo sapiens
  misc_RNA (1)...(19): siRNA sense strand
acccaaagcagcugucaaa

SEQ ID NO: 1593858 - RNA, 19 nt, Homo sapiens
  misc_RNA (1)...(19): siRNA sense strand
aagaaacacuccccgaaaa

SEQ ID NO: 1593859 - RNA, 19 nt, Homo sapiens
  misc_RNA (1)...(19): siRNA sense strand
uaaaccugcguguauuuga

SEQ ID NO: 1593860 - RNA, 19 nt, Homo sapiens
  misc_RNA (1)...(19): siRNA sense strand
ggaggagagcagauuagug

SEQ ID NO: 1593861 - RNA, 19 nt, Homo sapiens
  misc_RNA (1)...(19): siRNA sense strand
gguauuucccuggaggaua

SEQ ID NO: 1593862 - RNA, 19 nt, Homo sapiens
  misc_RNA (1)...(19): siRNA sense strand
cauacaggccggagcuuau

SEQ ID NO: 1593863 - RNA, 19 nt, Homo sapiens
  misc_RNA (1)...(19): siRNA sense strand
guuggaggagagcagauua

SEQ ID NO: 1593864 - RNA, 19 nt, Homo sapiens
  misc_RNA (1)...(19): siRNA sense strand
aaucaagcaaggaaagaaa

SEQ ID NO: 1593865 - RNA, 19 nt, Homo sapiens
  misc_RNA (1)...(19): siRNA sense strand
cacaugguccgaaagauuc

SEQ ID NO: 1593866 - RNA, 19 nt, Homo sapiens
  misc_RNA (1)...(19): siRNA sense strand
ucuaaaccugcguguauuu

SEQ ID NO: 1593867 - RNA, 19 nt, Homo sapiens
  misc_RNA (1)...(19): siRNA sense strand
aaaccugcguguauuugag

SEQ ID NO: 1593868 - RNA, 19 nt, Homo sapiens
  misc_RNA (1)...(19): siRNA sense strand
ggaaggggcauaugugugu

SEQ ID NO: 1593869 - RNA, 19 nt, Homo sapiens
  misc_RNA (1)...(19): siRNA sense strand
gaagagugugauggacaaa

SEQ ID NO: 1593870 - RNA, 19 nt, Homo sapiens
  misc_RNA (1)...(19): siRNA sense strand
gaaaagaccagagcuaagg

SEQ ID NO: 1593871 - RNA, 19 nt, Homo sapiens
  misc_RNA (1)...(19): siRNA sense strand
gcaggcagagggcuucuac

SEQ ID NO: 1593872 - RNA, 19 nt, Homo sapiens
  misc_RNA (1)...(19): siRNA sense strand
auucuaaaccugcguguau

SEQ ID NO: 1593873 - RNA, 19 nt, Homo sapiens
  misc_RNA (1)...(19): siRNA sense strand
ccaaagcagcugucaaagc

SEQ ID NO: 1593874 - RNA, 19 nt, Homo sapiens
  misc_RNA (1)...(19): siRNA sense strand
acauacaggccggagcuua

SEQ ID NO: 1593875 - RNA, 19 nt, Homo sapiens
  misc_RNA (1)...(19): siRNA sense strand
gaaacacuccccgaaaaga

SEQ ID NO: 1593876 - RNA, 19 nt, Homo sapiens
  misc_RNA (1)...(19): siRNA sense strand
agggaaacaagccugauuu

SEQ ID NO: 1593877 - RNA, 19 nt, Homo sapiens
  misc_RNA (1)...(19): siRNA sense strand
cagaaugaugggccuguga

SEQ ID NO: 1593878 - RNA, 19 nt, Homo sapiens
  misc_RNA (1)...(19): siRNA sense strand
ccaguuuacccuccagugu

SEQ ID NO: 1593879 - RNA, 19 nt, Homo sapiens
  misc_RNA (1)...(19): siRNA sense strand
gaccauagagcuggaaucg

SEQ ID NO: 1593880 - RNA, 19 nt, Homo sapiens
  misc_RNA (1)...(19): siRNA sense strand
aggcagagggcuucuacaa

SEQ ID NO: 1593881 - RNA, 19 nt, Homo sapiens
  misc_RNA (1)...(19): siRNA sense strand
gaagggaaacaagccugau

SEQ ID NO: 1593882 - RNA, 19 nt, Homo sapiens
  misc_RNA (1)...(19): siRNA sense strand
uccgaaagauucuaaaccu

SEQ ID NO: 1593883 - RNA, 19 nt, Homo sapiens
  misc_RNA (1)...(19): siRNA sense strand
aaacagcagcagaggaaag

SEQ ID NO: 1593884 - RNA, 19 nt, Homo sapiens
  misc_RNA (1)...(19): siRNA sense strand
uggaggauacgcagaagga

SEQ ID NO: 1593885 - RNA, 19 nt, Homo sapiens
  misc_RNA (1)...(19): siRNA sense strand
caucaaagcucguaacuuc

SEQ ID NO: 1593886 - RNA, 19 nt, Homo sapiens
  misc_RNA (1)...(19): siRNA sense strand
gcaaugcccuugucuguga

SEQ ID NO: 1593887 - RNA, 19 nt, Homo sapiens
  misc_RNA (1)...(19): siRNA sense strand
gaggacagcucuauuugaa

SEQ ID NO: 1593888 - RNA, 19 nt, Homo sapiens
  misc_RNA (1)...(19): siRNA sense strand
gaacaaagacacaugaaga

SEQ ID NO: 1593889 - RNA, 19 nt, Homo sapiens
  misc_RNA (1)...(19): siRNA sense strand
agaaucaggugaagaaaua

SEQ ID NO: 1593890 - RNA, 19 nt, Homo sapiens
  misc_RNA (1)...(19): siRNA sense strand
ggacagcucuauuugaaga

SEQ ID NO: 1593891 - RNA, 19 nt, Homo sapiens
  misc_RNA (1)...(19): siRNA sense strand
guacaagggucgacagauu

SEQ ID NO: 1593892 - RNA, 19 nt, Homo sapiens
  misc_RNA (1)...(19): siRNA sense strand
gaagaggacacacaguuua

SEQ ID NO: 1593893 - RNA, 19 nt, Homo sapiens
  misc_RNA (1)...(19): siRNA sense strand
gaacuggccucaaagaaca

SEQ ID NO: 1593894 - RNA, 19 nt, Homo sapiens
  misc_RNA (1)...(19): siRNA sense strand
gcucguaacuuccucguuu

SEQ ID NO: 1593895 - RNA, 19 nt, Homo sapiens
  misc_RNA (1)...(19): siRNA sense strand
gagaaggacucagaauuga

SEQ ID NO: 1593896 - RNA, 19 nt, Homo sapiens
  misc_RNA (1)...(19): siRNA sense strand
ggaagaaaguagagacaga

SEQ ID NO: 1593897 - RNA, 19 nt, Homo sapiens
  misc_RNA (1)...(19): siRNA sense strand
ggagaaggacucagaauug

SEQ ID NO: 1593898 - RNA, 19 nt, Homo sapiens
  misc_RNA (1)...(19): siRNA sense strand
ggaagugaaugacaagaau

SEQ ID NO: 1593899 - RNA, 19 nt, Homo sapiens
  misc_RNA (1)...(19): siRNA sense strand
acaaggaacuggccucaaa

SEQ ID NO: 1593900 - RNA, 19 nt, Homo sapiens
  misc_RNA (1)...(19): siRNA sense strand
gaaggaggaccaagauaaa

SEQ ID NO: 1593901 - RNA, 19 nt, Homo sapiens
  misc_RNA (1)...(19): siRNA sense strand
uacaagaccugaagaauca

SEQ ID NO: 1593902 - RNA, 19 nt, Homo sapiens
  misc_RNA (1)...(19): siRNA sense strand
caacaaagugguccaacua

SEQ ID NO: 1593903 - RNA, 19 nt, Homo sapiens
  misc_RNA (1)...(19): siRNA sense strand
gggccaagcuagugauuga

SEQ ID NO: 1593904 - RNA, 19 nt, Homo sapiens
  misc_RNA (1)...(19): siRNA sense strand
caacauugaugagaucuau

SEQ ID NO: 1593905 - RNA, 19 nt, Homo sapiens
  misc_RNA (1)...(19): siRNA sense strand
agaccaagcuugaacagaa

SEQ ID NO: 1593906 - RNA, 19 nt, Homo sapiens
  misc_RNA (1)...(19): siRNA sense strand
guagacaaguugaaagaga

SEQ ID NO: 1593907 - RNA, 19 nt, Homo sapiens
  misc_RNA (1)...(19): siRNA sense strand
agaaggagaucaaggagaa

SEQ ID NO: 1593908 - RNA, 19 nt, Homo sapiens
  misc_RNA (1)...(19): siRNA sense strand
gaagagaucaagcaagaga

SEQ ID NO: 1593909 - RNA, 19 nt, Homo sapiens
  misc_RNA (1)...(19): siRNA sense strand
caagaagcguuuggaguuu

SEQ ID NO: 1593910 - RNA, 19 nt, Homo sapiens
  misc_RNA (1)...(19): siRNA sense strand
agaaugaaaucgccaagaa

SEQ ID NO: 1593911 - RNA, 19 nt, Homo sapiens
  misc_RNA (1)...(19): siRNA sense strand
gcagagauuugacguugga

SEQ ID NO: 1593912 - RNA, 19 nt, Homo sapiens
  misc_RNA (1)...(19): siRNA sense strand
ugaaagacuugaaggagaa

SEQ ID NO: 1593913 - RNA, 19 nt, Homo sapiens
  misc_RNA (1)...(19): siRNA sense strand
ucacagagaauuuccagua

SEQ ID NO: 1593914 - RNA, 19 nt, Homo sapiens
  misc_RNA (1)...(19): siRNA sense strand
uugagaaacuggaggaaua

SEQ ID NO: 1593915 - RNA, 19 nt, Homo sapiens
  misc_RNA (1)...(19): siRNA sense strand
ggaggagauucguaagaaa

SEQ ID NO: 1593916 - RNA, 19 nt, Homo sapiens
  misc_RNA (1)...(19): siRNA sense strand
ugaguacagugaggaauua

SEQ ID NO: 1593917 - RNA, 19 nt, Homo sapiens
  misc_RNA (1)...(19): siRNA sense strand
ugacaagaaucaugagaug

SEQ ID NO: 1593918 - RNA, 19 nt, Homo sapiens
  misc_RNA (1)...(19): siRNA sense strand
acaaggagaucgagaagga

SEQ ID NO: 1593919 - RNA, 19 nt, Homo sapiens
  misc_RNA (1)...(19): siRNA sense strand
gaccauggcucagcuacaa

SEQ ID NO: 1593920 - RNA, 19 nt, Homo sapiens
  misc_RNA (1)...(19): siRNA sense strand
gcaaaguccugaccuucga

SEQ ID NO: 1593921 - RNA, 19 nt, Homo sapiens
  misc_RNA (1)...(19): siRNA sense strand
gcaguaugcuuguggcaau

SEQ ID NO: 1593922 - RNA, 19 nt, Homo sapiens
  misc_RNA (1)...(19): siRNA sense strand
gcagucgacuugcaacuuc

SEQ ID NO: 1593923 - RNA, 19 nt, Homo sapiens
  misc_RNA (1)...(19): siRNA sense strand
gacauuaaguugccacugu

SEQ ID NO: 1593924 - RNA, 19 nt, Homo sapiens
  misc_RNA (1)...(19): siRNA sense strand
gguagaggaugagguguuu

SEQ ID NO: 1593925 - RNA, 19 nt, Homo sapiens
  misc_RNA (1)...(19): siRNA sense strand
gaaagcaguagacaaguug

SEQ ID NO: 1593926 - RNA, 19 nt, Homo sapiens
  misc_RNA (1)...(19): siRNA sense strand
gaaagaaggaaauggugaa

SEQ ID NO: 1593927 - RNA, 19 nt, Homo sapiens
  misc_RNA (1)...(19): siRNA sense strand
caagaagucucugcagaau

SEQ ID NO: 1593928 - RNA, 19 nt, Homo sapiens
  misc_RNA (1)...(19): siRNA sense strand
ugaaacugauugagauuga

SEQ ID NO: 1593929 - RNA, 19 nt, Homo sapiens
  misc_RNA (1)...(19): siRNA sense strand
uggaugagcuggagaagga

SEQ ID NO: 1593930 - RNA, 19 nt, Homo sapiens
  misc_RNA (1)...(19): siRNA sense strand
guaagaugcaggacauuaa

SEQ ID NO: 1593931 - RNA, 19 nt, Homo sapiens
  misc_RNA (1)...(19): siRNA sense strand
ugauugagauugagaacuu

SEQ ID NO: 1593932 - RNA, 19 nt, Homo sapiens
  misc_RNA (1)...(19): siRNA sense strand
caaaagaaguaucagauug

SEQ ID NO: 1593933 - RNA, 19 nt, Homo sapiens
  misc_RNA (1)...(19): siRNA sense strand
gagaacaccucccacaaaa

SEQ ID NO: 1593934 - RNA, 19 nt, Homo sapiens
  misc_RNA (1)...(19): siRNA sense strand
ugaaggaggaccaagauaa

SEQ ID NO: 1593935 - RNA, 19 nt, Homo sapiens
  misc_RNA (1)...(19): siRNA sense strand
gaacugaaggagaagaaga

SEQ ID NO: 1593936 - RNA, 19 nt, Homo sapiens
  misc_RNA (1)...(19): siRNA sense strand
aggaagagaucaagcaaga

SEQ ID NO: 1593937 - RNA, 19 nt, Homo sapiens
  misc_RNA (1)...(19): siRNA sense strand
gcuagugauugaugugauu

SEQ ID NO: 1593938 - RNA, 19 nt, Homo sapiens
  misc_RNA (1)...(19): siRNA sense strand
gaaauaccaccgguugaaa

SEQ ID NO: 1593939 - RNA, 19 nt, Homo sapiens
  misc_RNA (1)...(19): siRNA sense strand
caauggcucugguaaguca

SEQ ID NO: 1593940 - RNA, 19 nt, Homo sapiens
  misc_RNA (1)...(19): siRNA sense strand
uaauuaccaucgcaagaaa

SEQ ID NO: 1593941 - RNA, 19 nt, Homo sapiens
  misc_RNA (1)...(19): siRNA sense strand
ugacuacggugaucugugu

SEQ ID NO: 1593942 - RNA, 19 nt, Homo sapiens
  misc_RNA (1)...(19): siRNA sense strand
ggaggaccaagauaaagua

SEQ ID NO: 1593943 - RNA, 19 nt, Homo sapiens
  misc_RNA (1)...(19): siRNA sense strand
ugacagaggagcugaaaga

SEQ ID NO: 1593944 - RNA, 19 nt, Homo sapiens
  misc_RNA (1)...(19): siRNA sense strand
agagugagcuagccaacuu

SEQ ID NO: 1593945 - RNA, 19 nt, Homo sapiens
  misc_RNA (1)...(19): siRNA sense strand
uuggcaagguggcaaauua

SEQ ID NO: 1593946 - RNA, 19 nt, Homo sapiens
  misc_RNA (1)...(19): siRNA sense strand
aagcaaagcaggagaaaga

SEQ ID NO: 1593947 - RNA, 19 nt, Homo sapiens
  misc_RNA (1)...(19): siRNA sense strand
caagauaaaguacacaugu

SEQ ID NO: 1593948 - RNA, 19 nt, Homo sapiens
  misc_RNA (1)...(19): siRNA sense strand
agaaagcaguagacaaguu

SEQ ID NO: 1593949 - RNA, 19 nt, Homo sapiens
  misc_RNA (1)...(19): siRNA sense strand
gcguaaaggugacauggau

SEQ ID NO: 1593950 - RNA, 19 nt, Homo sapiens
  misc_RNA (1)...(19): siRNA sense strand
ucgaacagaucaagaagga

SEQ ID NO: 1593951 - RNA, 19 nt, Homo sapiens
  misc_RNA (1)...(19): siRNA sense strand
gccaagaagucggaaguga

SEQ ID NO: 1593952 - RNA, 19 nt, Homo sapiens
  misc_RNA (1)...(19): siRNA sense strand
caaagacacaugaagauca

SEQ ID NO: 1593953 - RNA, 19 nt, Homo sapiens
  misc_RNA (1)...(19): siRNA sense strand
gggccucgcauuaaugaua

SEQ ID NO: 1593954 - RNA, 19 nt, Homo sapiens
  misc_RNA (1)...(19): siRNA sense strand
gaaauugaagagaaucaga

SEQ ID NO: 1593955 - RNA, 19 nt, Homo sapiens
  misc_RNA (1)...(19): siRNA sense strand
agaaggagaugcugucagu

SEQ ID NO: 1593956 - RNA, 19 nt, Homo sapiens
  misc_RNA (1)...(19): siRNA sense strand
guaaaggugacauggauga

SEQ ID NO: 1593957 - RNA, 19 nt, Homo sapiens
  misc_RNA (1)...(19): siRNA sense strand
gagaauuuccaguaucuau

SEQ ID NO: 1593958 - RNA, 19 nt, Homo sapiens
  misc_RNA (1)...(19): siRNA sense strand
ugacagccauugagaccaa

SEQ ID NO: 1593959 - RNA, 19 nt, Homo sapiens
  misc_RNA (1)...(19): siRNA sense strand
ugagguguuugaagaguuu

SEQ ID NO: 1593960 - RNA, 19 nt, Homo sapiens
  misc_RNA (1)...(19): siRNA sense strand
gaggacacacaguuuaauu

SEQ ID NO: 1593961 - RNA, 19 nt, Homo sapiens
  misc_RNA (1)...(19): siRNA sense strand
gaagaaggagcgcuugaca

SEQ ID NO: 1593962 - RNA, 19 nt, Homo sapiens
  misc_RNA (1)...(19): siRNA sense strand
gcagcgaaaggcagagaua

SEQ ID NO: 1593963 - RNA, 19 nt, Homo sapiens
  misc_RNA (1)...(19): siRNA sense strand
gcaagcagucccuagaaga

SEQ ID NO: 1593964 - RNA, 19 nt, Homo sapiens
  misc_RNA (1)...(19): siRNA sense strand
gaagaacggaagaaaguag

SEQ ID NO: 1593965 - RNA, 19 nt, Homo sapiens
  misc_RNA (1)...(19): siRNA sense strand
ggaagaacggaagaaagua

SEQ ID NO: 1593966 - RNA, 19 nt, Homo sapiens
  misc_RNA (1)...(19): siRNA sense strand
aggaugaacugaaggagaa

SEQ ID NO: 1593967 - RNA, 19 nt, Homo sapiens
  misc_RNA (1)...(19): siRNA sense strand
ccugaaggaugagguagua

SEQ ID NO: 1593968 - RNA, 19 nt, Homo sapiens
  misc_RNA (1)...(19): siRNA sense strand
caaagcaggagaaagaaga

SEQ ID NO: 1593969 - RNA, 19 nt, Homo sapiens
  misc_RNA (1)...(19): siRNA sense strand
gagcaaagaaggccaagca

SEQ ID NO: 1593970 - RNA, 19 nt, Homo sapiens
  misc_RNA (1)...(19): siRNA sense strand
ggaccaagauaaaguacac

SEQ ID NO: 1593971 - RNA, 19 nt, Homo sapiens
  misc_RNA (1)...(19): siRNA sense strand
uagacaaguugaaagagaa

SEQ ID NO: 1593972 - RNA, 19 nt, Homo sapiens
  misc_RNA (1)...(19): siRNA sense strand
gaacaaggagaucgagaag

SEQ ID NO: 1593973 - RNA, 19 nt, Homo sapiens
  misc_RNA (1)...(19): siRNA sense strand
ccaagaagucucugcagaa

SEQ ID NO: 1593974 - RNA, 19 nt, Homo sapiens
  misc_RNA (1)...(19): siRNA sense strand
gagguucaccgccaucauu

SEQ ID NO: 1593975 - RNA, 19 nt, Homo sapiens
  misc_RNA (1)...(19): siRNA sense strand
ugaaugagcagcagagugu

SEQ ID NO: 1593976 - RNA, 19 nt, Homo sapiens
  misc_RNA (1)...(19): siRNA sense strand
caccauggaugauauuagu

SEQ ID NO: 1593977 - RNA, 19 nt, Homo sapiens
  misc_RNA (1)...(19): siRNA sense strand
uaagucaaaucucauggau

SEQ ID NO: 1593978 - RNA, 19 nt, Homo sapiens
  misc_RNA (1)...(19): siRNA sense strand
aggaugagguguuugaaga

SEQ ID NO: 1593979 - RNA, 19 nt, Homo sapiens
  misc_RNA (1)...(19): siRNA sense strand
gaaaggcagagauaaugga

SEQ ID NO: 1593980 - RNA, 19 nt, Homo sapiens
  misc_RNA (1)...(19): siRNA sense strand
gaaacuggaggaauacauc

SEQ ID NO: 1593981 - RNA, 19 nt, Homo sapiens
  misc_RNA (1)...(19): siRNA sense strand
cagagaauuuccaguaucu

SEQ ID NO: 1593982 - RNA, 19 nt, Homo sapiens
  misc_RNA (1)...(19): siRNA sense strand
caagaagucggaagugaau

SEQ ID NO: 1593983 - RNA, 19 nt, Homo sapiens
  misc_RNA (1)...(19): siRNA sense strand
ggaaaugaaagacuugaag

SEQ ID NO: 1593984 - RNA, 19 nt, Homo sapiens
  misc_RNA (1)...(19): siRNA sense strand
gaauacaucaccacuagca

SEQ ID NO: 1593985 - RNA, 19 nt, Homo sapiens
  misc_RNA (1)...(19): siRNA sense strand
ggaaagcgcuggagacaga

SEQ ID NO: 1593986 - RNA, 19 nt, Homo sapiens
  misc_RNA (1)...(19): siRNA sense strand
ggaaguacguccuggauga

SEQ ID NO: 1593987 - RNA, 19 nt, Homo sapiens
  misc_RNA (1)...(19): siRNA sense strand
guacugagaugaugaggaa

SEQ ID NO: 1593988 - RNA, 19 nt, Homo sapiens
  misc_RNA (1)...(19): siRNA sense strand
gaacagaaucuucaaguug

SEQ ID NO: 1593989 - RNA, 19 nt, Homo sapiens
  misc_RNA (1)...(19): siRNA sense strand
gcagaugaauucuuuccua

SEQ ID NO: 1593990 - RNA, 19 nt, Homo sapiens
  misc_RNA (1)...(19): siRNA sense strand
ucaaguugcugcucagaua

SEQ ID NO: 1593991 - RNA, 19 nt, Homo sapiens
  misc_RNA (1)...(19): siRNA sense strand
gggaagacguggacggaua

SEQ ID NO: 1593992 - RNA, 19 nt, Homo sapiens
  misc_RNA (1)...(19): siRNA sense strand
ucagauaagugaagauuug

SEQ ID NO: 1593993 - RNA, 19 nt, Homo sapiens
  misc_RNA (1)...(19): siRNA sense strand
uuaaacaccuacacaagua

SEQ ID NO: 1593994 - RNA, 19 nt, Homo sapiens
  misc_RNA (1)...(19): siRNA sense strand
gucaaacgcuguagacauu

SEQ ID NO: 1593995 - RNA, 19 nt, Homo sapiens
  misc_RNA (1)...(19): siRNA sense strand
ggaagacuauuucaacgau

SEQ ID NO: 1593996 - RNA, 19 nt, Homo sapiens
  misc_RNA (1)...(19): siRNA sense strand
uggccaagcugcucaagua

SEQ ID NO: 1593997 - RNA, 19 nt, Homo sapiens
  misc_RNA (1)...(19): siRNA sense strand
cagaugaauucuuuccuaa

SEQ ID NO: 1593998 - RNA, 19 nt, Homo sapiens
  misc_RNA (1)...(19): siRNA sense strand
aagcgcagcuguauaaaga

SEQ ID NO: 1593999 - RNA, 19 nt, Homo sapiens
  misc_RNA (1)...(19): siRNA sense strand
gaagagcaccugaggaauc

SEQ ID NO: 1594000 - RNA, 19 nt, Homo sapiens
  misc_RNA (1)...(19): siRNA sense strand
gcgcauacuugaccggaaa

SEQ ID NO: 1594001 - RNA, 19 nt, Homo sapiens
  misc_RNA (1)...(19): siRNA sense strand
ugaaugaauugaugacgaa

SEQ ID NO: 1594002 - RNA, 19 nt, Homo sapiens
  misc_RNA (1)...(19): siRNA sense strand
caagaaagacugggucaaa

SEQ ID NO: 1594003 - RNA, 19 nt, Homo sapiens
  misc_RNA (1)...(19): siRNA sense strand
ccucauccauggcuacuuu

SEQ ID NO: 1594004 - RNA, 19 nt, Homo sapiens
  misc_RNA (1)...(19): siRNA sense strand
gaagacuauuucaacgauu

SEQ ID NO: 1594005 - RNA, 19 nt, Homo sapiens
  misc_RNA (1)...(19): siRNA sense strand
gcaaggagggugccgagaa

SEQ ID NO: 1594006 - RNA, 19 nt, Homo sapiens
  misc_RNA (1)...(19): siRNA sense strand
uuaagaaccuccugaacau

SEQ ID NO: 1594007 - RNA, 19 nt, Homo sapiens
  misc_RNA (1)...(19): siRNA sense strand
cuaagcagauauaaagaug

SEQ ID NO: 1594008 - RNA, 19 nt, Homo sapiens
  misc_RNA (1)...(19): siRNA sense strand
ggagcaacaucugaaugaa

SEQ ID NO: 1594009 - RNA, 19 nt, Homo sapiens
  misc_RNA (1)...(19): siRNA sense strand
caaacgcuguagacauuau

SEQ ID NO: 1594010 - RNA, 19 nt, Homo sapiens
  misc_RNA (1)...(19): siRNA sense strand
gccauugucuuccagaugu

SEQ ID NO: 1594011 - RNA, 19 nt, Homo sapiens
  misc_RNA (1)...(19): siRNA sense strand
gaugaauucuuuccuaagc

SEQ ID NO: 1594012 - RNA, 19 nt, Homo sapiens
  misc_RNA (1)...(19): siRNA sense strand
ggagagaagcgcggaagaa

SEQ ID NO: 1594013 - RNA, 19 nt, Homo sapiens
  misc_RNA (1)...(19): siRNA sense strand
agcaacaucugaaugaauu

SEQ ID NO: 1594014 - RNA, 19 nt, Homo sapiens
  misc_RNA (1)...(19): siRNA sense strand
ugaaugacgucaaagacau

SEQ ID NO: 1594015 - RNA, 19 nt, Homo sapiens
  misc_RNA (1)...(19): siRNA sense strand
uggacaagguggagcagua

SEQ ID NO: 1594016 - RNA, 19 nt, Homo sapiens
  misc_RNA (1)...(19): siRNA sense strand
uguccacgcucacuucaaa

SEQ ID NO: 1594017 - RNA, 19 nt, Homo sapiens
  misc_RNA (1)...(19): siRNA sense strand
gggacgggcugauguacga

SEQ ID NO: 1594018 - RNA, 19 nt, Homo sapiens
  misc_RNA (1)...(19): siRNA sense strand
ggaauccauagucaguuua

SEQ ID NO: 1594019 - RNA, 19 nt, Homo sapiens
  misc_RNA (1)...(19): siRNA sense strand
cagcaaguauccagacauc

SEQ ID NO: 1594020 - RNA, 19 nt, Homo sapiens
  misc_RNA (1)...(19): siRNA sense strand
cugaugagcuggcuaagca

SEQ ID NO: 1594021 - RNA, 19 nt, Homo sapiens
  misc_RNA (1)...(19): siRNA sense strand
caaggagggugccgagaag

SEQ ID NO: 1594022 - RNA, 19 nt, Homo sapiens
  misc_RNA (1)...(19): siRNA sense strand
gaauccauagucaguuuaa

SEQ ID NO: 1594023 - RNA, 19 nt, Homo sapiens
  misc_RNA (1)...(19): siRNA sense strand
cuacacaaguacugagaug

SEQ ID NO: 1594024 - RNA, 19 nt, Homo sapiens
  misc_RNA (1)...(19): siRNA sense strand
gaaaacaaagguacuaguu

SEQ ID NO: 1594025 - RNA, 19 nt, Homo sapiens
  misc_RNA (1)...(19): siRNA sense strand
uggagaaccucaagaacau

SEQ ID NO: 1594026 - RNA, 19 nt, Homo sapiens
  misc_RNA (1)...(19): siRNA sense strand
aagaagagcaccugaggaa

SEQ ID NO: 1594027 - RNA, 19 nt, Homo sapiens
  misc_RNA (1)...(19): siRNA sense strand
ggagacccaggaccuaauu

SEQ ID NO: 1594028 - RNA, 19 nt, Homo sapiens
  misc_RNA (1)...(19): siRNA sense strand
ccacucuggucagcaagua

SEQ ID NO: 1594029 - RNA, 19 nt, Homo sapiens
  misc_RNA (1)...(19): siRNA sense strand
gacgaagaaguggcuauua

SEQ ID NO: 1594030 - RNA, 19 nt, Homo sapiens
  misc_RNA (1)...(19): siRNA sense strand
gagcaacaucugaaugaau

SEQ ID NO: 1594031 - RNA, 19 nt, Homo sapiens
  misc_RNA (1)...(19): siRNA sense strand
gagaaaauguucaccaucu

SEQ ID NO: 1594032 - RNA, 19 nt, Homo sapiens
  misc_RNA (1)...(19): siRNA sense strand
ggacugugaccaccagaau

SEQ ID NO: 1594033 - RNA, 19 nt, Homo sapiens
  misc_RNA (1)...(19): siRNA sense strand
acgaagaaguggcuauuag

SEQ ID NO: 1594034 - RNA, 19 nt, Homo sapiens
  misc_RNA (1)...(19): siRNA sense strand
aggaauccauagucaguuu

SEQ ID NO: 1594035 - RNA, 19 nt, Homo sapiens
  misc_RNA (1)...(19): siRNA sense strand
gaugaagcgcagcuguaua

SEQ ID NO: 1594036 - RNA, 19 nt, Homo sapiens
  misc_RNA (1)...(19): siRNA sense strand
gaaagacugggucaaagag

SEQ ID NO: 1594037 - RNA, 19 nt, Homo sapiens
  misc_RNA (1)...(19): siRNA sense strand
gcucagauaagugaagauu

SEQ ID NO: 1594038 - RNA, 19 nt, Homo sapiens
  misc_RNA (1)...(19): siRNA sense strand
caaggaauccauagucagu

SEQ ID NO: 1594039 - RNA, 19 nt, Homo sapiens
  misc_RNA (1)...(19): siRNA sense strand
gcgcagcuguauaaagaag

SEQ ID NO: 1594040 - RNA, 19 nt, Homo sapiens
  misc_RNA (1)...(19): siRNA sense strand
agaggucacuggucacugu

SEQ ID NO: 1594041 - RNA, 19 nt, Homo sapiens
  misc_RNA (1)...(19): siRNA sense strand
uaaagaaugaaguggaaga

SEQ ID NO: 1594042 - RNA, 19 nt, Homo sapiens
  misc_RNA (1)...(19): siRNA sense strand
gcaaguauccagacaucag

SEQ ID NO: 1594043 - RNA, 19 nt, Homo sapiens
  misc_RNA (1)...(19): siRNA sense strand
gaauugaugacgaagaagu

SEQ ID NO: 1594044 - RNA, 19 nt, Homo sapiens
  misc_RNA (1)...(19): siRNA sense strand
ccaccuugcuggucucagu

SEQ ID NO: 1594045 - RNA, 19 nt, Homo sapiens
  misc_RNA (1)...(19): siRNA sense strand
gaagcuggcguccgguuuc

SEQ ID NO: 1594046 - RNA, 19 nt, Homo sapiens
  misc_RNA (1)...(19): siRNA sense strand
gaagcgcagcuguauaaag

SEQ ID NO: 1594047 - RNA, 19 nt, Homo sapiens
  misc_RNA (1)...(19): siRNA sense strand
ggacaagguggagcaguau

SEQ ID NO: 1594048 - RNA, 19 nt, Homo sapiens
  misc_RNA (1)...(19): siRNA sense strand
caaguugcugcucagauaa

SEQ ID NO: 1594049 - RNA, 19 nt, Homo sapiens
  misc_RNA (1)...(19): siRNA sense strand
ggaagcuggcguccgguuu

SEQ ID NO: 1594050 - RNA, 19 nt, Homo sapiens
  misc_RNA (1)...(19): siRNA sense strand
augaagcgcagcuguauaa

SEQ ID NO: 1594051 - RNA, 19 nt, Homo sapiens
  misc_RNA (1)...(19): siRNA sense strand
guggagaaccucaagaaca

SEQ ID NO: 1594052 - RNA, 19 nt, Homo sapiens
  misc_RNA (1)...(19): siRNA sense strand
caacaucugaaugaauuga

SEQ ID NO: 1594053 - RNA, 19 nt, Homo sapiens
  misc_RNA (1)...(19): siRNA sense strand
gcagcuguauaaagaagag

SEQ ID NO: 1594054 - RNA, 19 nt, Homo sapiens
  misc_RNA (1)...(19): siRNA sense strand
agaaccuccugaacaugua

SEQ ID NO: 1594055 - RNA, 19 nt, Homo sapiens
  misc_RNA (1)...(19): siRNA sense strand
ggucaaacgcuguagacau

SEQ ID NO: 1594056 - RNA, 19 nt, Homo sapiens
  misc_RNA (1)...(19): siRNA sense strand
augaauugaugacgaagaa

SEQ ID NO: 1594057 - RNA, 19 nt, Homo sapiens
  misc_RNA (1)...(19): siRNA sense strand
agaaagacugggucaaaga

SEQ ID NO: 1594058 - RNA, 19 nt, Homo sapiens
  misc_RNA (1)...(19): siRNA sense strand
gcuggagacagacaagaaa

SEQ ID NO: 1594059 - RNA, 19 nt, Homo sapiens
  misc_RNA (1)...(19): siRNA sense strand
ucaguugucaggaucauug

SEQ ID NO: 1594060 - RNA, 19 nt, Homo sapiens
  misc_RNA (1)...(19): siRNA sense strand
gagagaagcgcggaagaag

SEQ ID NO: 1594061 - RNA, 19 nt, Homo sapiens
  misc_RNA (1)...(19): siRNA sense strand
caaagagacagagccagaa

SEQ ID NO: 1594062 - RNA, 19 nt, Homo sapiens
  misc_RNA (1)...(19): siRNA sense strand
ugacgugggucuuaaacac

SEQ ID NO: 1594063 - RNA, 19 nt, Homo sapiens
  misc_RNA (1)...(19): siRNA sense strand
cugagcugcuugacacgua

SEQ ID NO: 1594064 - RNA, 19 nt, Homo sapiens
  misc_RNA (1)...(19): siRNA sense strand
gcagagcaucaacaccauu

SEQ ID NO: 1594065 - RNA, 19 nt, Homo sapiens
  misc_RNA (1)...(19): siRNA sense strand
gaaaauguucaccaucuug

SEQ ID NO: 1594066 - RNA, 19 nt, Homo sapiens
  misc_RNA (1)...(19): siRNA sense strand
cacaaguacugagaugaug

SEQ ID NO: 1594067 - RNA, 19 nt, Homo sapiens
  misc_RNA (1)...(19): siRNA sense strand
cuaagcagcuguggauggu

SEQ ID NO: 1594068 - RNA, 19 nt, Homo sapiens
  misc_RNA (1)...(19): siRNA sense strand
gacaugaagcagaccauca

SEQ ID NO: 1594069 - RNA, 19 nt, Homo sapiens
  misc_RNA (1)...(19): siRNA sense strand
uggagcaacaucugaauga

SEQ ID NO: 1594070 - RNA, 19 nt, Homo sapiens
  misc_RNA (1)...(19): siRNA sense strand
cccaggaccuaauugaaca

SEQ ID NO: 1594071 - RNA, 19 nt, Homo sapiens
  misc_RNA (1)...(19): siRNA sense strand
caaagguacuaguuuuaug

SEQ ID NO: 1594072 - RNA, 19 nt, Homo sapiens
  misc_RNA (1)...(19): siRNA sense strand
gacccaggaccuaauugaa

SEQ ID NO: 1594073 - RNA, 19 nt, Homo sapiens
  misc_RNA (1)...(19): siRNA sense strand
aagaaagacugggucaaag

SEQ ID NO: 1594074 - RNA, 19 nt, Homo sapiens
  misc_RNA (1)...(19): siRNA sense strand
ugaccucauugucgccaaa

SEQ ID NO: 1594075 - RNA, 19 nt, Homo sapiens
  misc_RNA (1)...(19): siRNA sense strand
gaaagggaagagaaaauug

SEQ ID NO: 1594076 - RNA, 19 nt, Homo sapiens
  misc_RNA (1)...(19): siRNA sense strand
guacuaguuuuaugucuuc

SEQ ID NO: 1594077 - RNA, 19 nt, Homo sapiens
  misc_RNA (1)...(19): siRNA sense strand
uggcagacgucagcaagga

SEQ ID NO: 1594078 - RNA, 19 nt, Homo sapiens
  misc_RNA (1)...(19): siRNA sense strand
cuguagacauuaucugugu

SEQ ID NO: 1594079 - RNA, 19 nt, Homo sapiens
  misc_RNA (1)...(19): siRNA sense strand
gggaacacgcgugacauga

SEQ ID NO: 1594080 - RNA, 19 nt, Homo sapiens
  misc_RNA (1)...(19): siRNA sense strand
ccucuugacgugggucuua

SEQ ID NO: 1594081 - RNA, 19 nt, Homo sapiens
  misc_RNA (1)...(19): siRNA sense strand
ggagggugccgagaagaug

SEQ ID NO: 1594082 - RNA, 19 nt, Homo sapiens
  misc_RNA (1)...(19): siRNA sense strand
cggaccagcuggacaaggu

SEQ ID NO: 1594083 - RNA, 19 nt, Homo sapiens
  misc_RNA (1)...(19): siRNA sense strand
ggucuuaaacaccuacaca

SEQ ID NO: 1594084 - RNA, 19 nt, Homo sapiens
  misc_RNA (1)...(19): siRNA sense strand
gaaugacgucaaagacauc

SEQ ID NO: 1594085 - RNA, 19 nt, Homo sapiens
  misc_RNA (1)...(19): siRNA sense strand
gguccaagcuaccuuuaug

SEQ ID NO: 1594086 - RNA, 19 nt, Homo sapiens
  misc_RNA (1)...(19): siRNA sense strand
aaauacagaucccaagcua

SEQ ID NO: 1594087 - RNA, 19 nt, Homo sapiens
  misc_RNA (1)...(19): siRNA sense strand
gagaauaucaggaaugaag

SEQ ID NO: 1594088 - RNA, 19 nt, Homo sapiens
  misc_RNA (1)...(19): siRNA sense strand
ggaccagucuguguauuuc

SEQ ID NO: 1594089 - RNA, 19 nt, Homo sapiens
  misc_RNA (1)...(19): siRNA sense strand
gaggagccauaugagaaua

SEQ ID NO: 1594090 - RNA, 19 nt, Homo sapiens
  misc_RNA (1)...(19): siRNA sense strand
acacagaggagccauauga

SEQ ID NO: 1594091 - RNA, 19 nt, Homo sapiens
  misc_RNA (1)...(19): siRNA sense strand
ggacagagggucagaagag

SEQ ID NO: 1594092 - RNA, 19 nt, Homo sapiens
  misc_RNA (1)...(19): siRNA sense strand
ggaccaaacucuccaucac

SEQ ID NO: 1594093 - RNA, 19 nt, Homo sapiens
  misc_RNA (1)...(19): siRNA sense strand
auacagaucccaagcuaaa

SEQ ID NO: 1594094 - RNA, 19 nt, Homo sapiens
  misc_RNA (1)...(19): siRNA sense strand
cagaggagccauaugagaa

SEQ ID NO: 1594095 - RNA, 19 nt, Homo sapiens
  misc_RNA (1)...(19): siRNA sense strand
uaucaggaaugaaggacaa

SEQ ID NO: 1594096 - RNA, 19 nt, Homo sapiens
  misc_RNA (1)...(19): siRNA sense strand
gacccuguacucugucuua

SEQ ID NO: 1594097 - RNA, 19 nt, Homo sapiens
  misc_RNA (1)...(19): siRNA sense strand
ugaaccggcucuuucugaa

SEQ ID NO: 1594098 - RNA, 19 nt, Homo sapiens
  misc_RNA (1)...(19): siRNA sense strand
gaacgagacccuguacucu

SEQ ID NO: 1594099 - RNA, 19 nt, Homo sapiens
  misc_RNA (1)...(19): siRNA sense strand
ccuguacucugucuuaaag

SEQ ID NO: 1594100 - RNA, 19 nt, Homo sapiens
  misc_RNA (1)...(19): siRNA sense strand
gaauaucaggaaugaagga

SEQ ID NO: 1594101 - RNA, 19 nt, Homo sapiens
  misc_RNA (1)...(19): siRNA sense strand
guguauuucugccgaguug

SEQ ID NO: 1594102 - RNA, 19 nt, Homo sapiens
  misc_RNA (1)...(19): siRNA sense strand
gcaggaccagucuguguau

SEQ ID NO: 1594103 - RNA, 19 nt, Homo sapiens
  misc_RNA (1)...(19): siRNA sense strand
gugaaccggcucuuucuga

SEQ ID NO: 1594104 - RNA, 19 nt, Homo sapiens
  misc_RNA (1)...(19): siRNA sense strand
aaacacagaggagccauau

SEQ ID NO: 1594105 - RNA, 19 nt, Homo sapiens
  misc_RNA (1)...(19): siRNA sense strand
augagaauaucaggaauga

SEQ ID NO: 1594106 - RNA, 19 nt, Homo sapiens
  misc_RNA (1)...(19): siRNA sense strand
gaaauccccuucuccuucu

SEQ ID NO: 1594107 - RNA, 19 nt, Homo sapiens
  misc_RNA (1)...(19): siRNA sense strand
ucuccaaccugcagaagca

SEQ ID NO: 1594108 - RNA, 19 nt, Homo sapiens
  misc_RNA (1)...(19): siRNA sense strand
acgagacccuguacucugu

SEQ ID NO: 1594109 - RNA, 19 nt, Homo sapiens
  misc_RNA (1)...(19): siRNA sense strand
uaugugaaccggcucuuuc

SEQ ID NO: 1594110 - RNA, 19 nt, Homo sapiens
  misc_RNA (1)...(19): siRNA sense strand
gcagaagcaggaccagucu

SEQ ID NO: 1594111 - RNA, 19 nt, Homo sapiens
  misc_RNA (1)...(19): siRNA sense strand
ggguggcucuguggaaauc

SEQ ID NO: 1594112 - RNA, 19 nt, Homo sapiens
  misc_RNA (1)...(19): siRNA sense strand
acagaggagccauaugaga

SEQ ID NO: 1594113 - RNA, 19 nt, Homo sapiens
  misc_RNA (1)...(19): siRNA sense strand
gcucccgacgugagaauau

SEQ ID NO: 1594114 - RNA, 19 nt, Homo sapiens
  misc_RNA (1)...(19): siRNA sense strand
gaaugaaggacaaaauaca

SEQ ID NO: 1594115 - RNA, 19 nt, Homo sapiens
  misc_RNA (1)...(19): siRNA sense strand
ccacaggcaguccuucuac

SEQ ID NO: 1594116 - RNA, 19 nt, Homo sapiens
  misc_RNA (1)...(19): siRNA sense strand
gcauuucugcagccuagug

SEQ ID NO: 1594117 - RNA, 19 nt, Homo sapiens
  misc_RNA (1)...(19): siRNA sense strand
uaugagaauaucaggaaug

SEQ ID NO: 1594118 - RNA, 19 nt, Homo sapiens
  misc_RNA (1)...(19): siRNA sense strand
caggaccagucuguguauu

SEQ ID NO: 1594119 - RNA, 19 nt, Homo sapiens
  misc_RNA (1)...(19): siRNA sense strand
gaaccggcucuuucugaac

SEQ ID NO: 1594120 - RNA, 19 nt, Homo sapiens
  misc_RNA (1)...(19): siRNA sense strand
gggaccaaacucuccauca

SEQ ID NO: 1594121 - RNA, 19 nt, Homo sapiens
  misc_RNA (1)...(19): siRNA sense strand
caggaucugguccaagcua

SEQ ID NO: 1594122 - RNA, 19 nt, Homo sapiens
  misc_RNA (1)...(19): siRNA sense strand
gguccaagcuaccuuuaug

SEQ ID NO: 1594123 - RNA, 19 nt, Homo sapiens
  misc_RNA (1)...(19): siRNA sense strand
aaauacagaucccaagcua

SEQ ID NO: 1594124 - RNA, 19 nt, Homo sapiens
  misc_RNA (1)...(19): siRNA sense strand
gagaauaucaggaaugaag

SEQ ID NO: 1594125 - RNA, 19 nt, Homo sapiens
  misc_RNA (1)...(19): siRNA sense strand
ggaccagucuguguauuuc

SEQ ID NO: 1594126 - RNA, 19 nt, Homo sapiens
  misc_RNA (1)...(19): siRNA sense strand
gaggagccauaugagaaua

SEQ ID NO: 1594127 - RNA, 19 nt, Homo sapiens
  misc_RNA (1)...(19): siRNA sense strand
acacagaggagccauauga

SEQ ID NO: 1594128 - RNA, 19 nt, Homo sapiens
  misc_RNA (1)...(19): siRNA sense strand
ggacagagggucagaagag

SEQ ID NO: 1594129 - RNA, 19 nt, Homo sapiens
  misc_RNA (1)...(19): siRNA sense strand
ggaccaaacucuccaucac

SEQ ID NO: 1594130 - RNA, 19 nt, Homo sapiens
  misc_RNA (1)...(19): siRNA sense strand
auacagaucccaagcuaaa

SEQ ID NO: 1594131 - RNA, 19 nt, Homo sapiens
  misc_RNA (1)...(19): siRNA sense strand
cagaggagccauaugagaa

SEQ ID NO: 1594132 - RNA, 19 nt, Homo sapiens
  misc_RNA (1)...(19): siRNA sense strand
uaucaggaaugaaggacaa

SEQ ID NO: 1594133 - RNA, 19 nt, Homo sapiens
  misc_RNA (1)...(19): siRNA sense strand
gacccuguacucugucuua

SEQ ID NO: 1594134 - RNA, 19 nt, Homo sapiens
  misc_RNA (1)...(19): siRNA sense strand
ugaaccggcucuuucugaa

SEQ ID NO: 1594135 - RNA, 19 nt, Homo sapiens
  misc_RNA (1)...(19): siRNA sense strand
gaacgagacccuguacucu

SEQ ID NO: 1594136 - RNA, 19 nt, Homo sapiens
  misc_RNA (1)...(19): siRNA sense strand
ccuguacucugucuuaaag

SEQ ID NO: 1594137 - RNA, 19 nt, Homo sapiens
  misc_RNA (1)...(19): siRNA sense strand
gaauaucaggaaugaagga

SEQ ID NO: 1594138 - RNA, 19 nt, Homo sapiens
  misc_RNA (1)...(19): siRNA sense strand
guguauuucugccgaguug

SEQ ID NO: 1594139 - RNA, 19 nt, Homo sapiens
  misc_RNA (1)...(19): siRNA sense strand
gcaggaccagucuguguau

SEQ ID NO: 1594140 - RNA, 19 nt, Homo sapiens
  misc_RNA (1)...(19): siRNA sense strand
gugaaccggcucuuucuga

SEQ ID NO: 1594141 - RNA, 19 nt, Homo sapiens
  misc_RNA (1)...(19): siRNA sense strand
aaacacagaggagccauau

SEQ ID NO: 1594142 - RNA, 19 nt, Homo sapiens
  misc_RNA (1)...(19): siRNA sense strand
augagaauaucaggaauga

SEQ ID NO: 1594143 - RNA, 19 nt, Homo sapiens
  misc_RNA (1)...(19): siRNA sense strand
gaaauccccuucuccuucu

SEQ ID NO: 1594144 - RNA, 19 nt, Homo sapiens
  misc_RNA (1)...(19): siRNA sense strand
ucuccaaccugcagaagca

SEQ ID NO: 1594145 - RNA, 19 nt, Homo sapiens
  misc_RNA (1)...(19): siRNA sense strand
acgagacccuguacucugu

SEQ ID NO: 1594146 - RNA, 19 nt, Homo sapiens
  misc_RNA (1)...(19): siRNA sense strand
uaugugaaccggcucuuuc

SEQ ID NO: 1594147 - RNA, 19 nt, Homo sapiens
  misc_RNA (1)...(19): siRNA sense strand
gcagaagcaggaccagucu

SEQ ID NO: 1594148 - RNA, 19 nt, Homo sapiens
  misc_RNA (1)...(19): siRNA sense strand
ggguggcucuguggaaauc

SEQ ID NO: 1594149 - RNA, 19 nt, Homo sapiens
  misc_RNA (1)...(19): siRNA sense strand
acagaggagccauaugaga

SEQ ID NO: 1594150 - RNA, 19 nt, Homo sapiens
  misc_RNA (1)...(19): siRNA sense strand
gcucccgacgugagaauau

SEQ ID NO: 1594151 - RNA, 19 nt, Homo sapiens
  misc_RNA (1)...(19): siRNA sense strand
gaaugaaggacaaaauaca

SEQ ID NO: 1594152 - RNA, 19 nt, Homo sapiens
  misc_RNA (1)...(19): siRNA sense strand
ccacaggcaguccuucuac

SEQ ID NO: 1594153 - RNA, 19 nt, Homo sapiens
  misc_RNA (1)...(19): siRNA sense strand
gcauuucugcagccuagug

SEQ ID NO: 1594154 - RNA, 19 nt, Homo sapiens
  misc_RNA (1)...(19): siRNA sense strand
uaugagaauaucaggaaug

SEQ ID NO: 1594155 - RNA, 19 nt, Homo sapiens
  misc_RNA (1)...(19): siRNA sense strand
caggaccagucuguguauu

SEQ ID NO: 1594156 - RNA, 19 nt, Homo sapiens
  misc_RNA (1)...(19): siRNA sense strand
gaaccggcucuuucugaac

SEQ ID NO: 1594157 - RNA, 19 nt, Homo sapiens
  misc_RNA (1)...(19): siRNA sense strand
gggaccaaacucuccauca

SEQ ID NO: 1594158 - RNA, 19 nt, Homo sapiens
  misc_RNA (1)...(19): siRNA sense strand
caggaucugguccaagcua

SEQ ID NO: 1594159 - RNA, 19 nt, Homo sapiens
  misc_RNA (1)...(19): siRNA sense strand
gguccaagcuaccuuuaug

SEQ ID NO: 1594160 - RNA, 19 nt, Homo sapiens
  misc_RNA (1)...(19): siRNA sense strand
aaauacagaucccaagcua

SEQ ID NO: 1594161 - RNA, 19 nt, Homo sapiens
  misc_RNA (1)...(19): siRNA sense strand
gagaauaucaggaaugaag

SEQ ID NO: 1594162 - RNA, 19 nt, Homo sapiens
  misc_RNA (1)...(19): siRNA sense strand
ggaccagucuguguauuuc

SEQ ID NO: 1594163 - RNA, 19 nt, Homo sapiens
  misc_RNA (1)...(19): siRNA sense strand
gaggagccauaugagaaua

SEQ ID NO: 1594164 - RNA, 19 nt, Homo sapiens
  misc_RNA (1)...(19): siRNA sense strand
acacagaggagccauauga

SEQ ID NO: 1594165 - RNA, 19 nt, Homo sapiens
  misc_RNA (1)...(19): siRNA sense strand
ggacagagggucagaagag

SEQ ID NO: 1594166 - RNA, 19 nt, Homo sapiens
  misc_RNA (1)...(19): siRNA sense strand
ggaccaaacucuccaucac

SEQ ID NO: 1594167 - RNA, 19 nt, Homo sapiens
  misc_RNA (1)...(19): siRNA sense strand
cagaggagccauaugagaa

SEQ ID NO: 1594168 - RNA, 19 nt, Homo sapiens
  misc_RNA (1)...(19): siRNA sense strand
uaucaggaaugaaggacaa

SEQ ID NO: 1594169 - RNA, 19 nt, Homo sapiens
  misc_RNA (1)...(19): siRNA sense strand
ugaaccggcucuuucugaa

SEQ ID NO: 1594170 - RNA, 19 nt, Homo sapiens
  misc_RNA (1)...(19): siRNA sense strand
gaauaucaggaaugaagga

SEQ ID NO: 1594171 - RNA, 19 nt, Homo sapiens
  misc_RNA (1)...(19): siRNA sense strand
guguauuucugccgaguug

SEQ ID NO: 1594172 - RNA, 19 nt, Homo sapiens
  misc_RNA (1)...(19): siRNA sense strand
gcaggaccagucuguguau

SEQ ID NO: 1594173 - RNA, 19 nt, Homo sapiens
  misc_RNA (1)...(19): siRNA sense strand
gugaaccggcucuuucuga

SEQ ID NO: 1594174 - RNA, 19 nt, Homo sapiens
  misc_RNA (1)...(19): siRNA sense strand
aaacacagaggagccauau

SEQ ID NO: 1594175 - RNA, 19 nt, Homo sapiens
  misc_RNA (1)...(19): siRNA sense strand
augagaauaucaggaauga

SEQ ID NO: 1594176 - RNA, 19 nt, Homo sapiens
  misc_RNA (1)...(19): siRNA sense strand
gaaauccccuucuccuucu

SEQ ID NO: 1594177 - RNA, 19 nt, Homo sapiens
  misc_RNA (1)...(19): siRNA sense strand
ucuccaaccugcagaagca

SEQ ID NO: 1594178 - RNA, 19 nt, Homo sapiens
  misc_RNA (1)...(19): siRNA sense strand
uaugugaaccggcucuuuc

SEQ ID NO: 1594179 - RNA, 19 nt, Homo sapiens
  misc_RNA (1)...(19): siRNA sense strand
gcagaagcaggaccagucu

SEQ ID NO: 1594180 - RNA, 19 nt, Homo sapiens
  misc_RNA (1)...(19): siRNA sense strand
ggguggcucuguggaaauc

SEQ ID NO: 1594181 - RNA, 19 nt, Homo sapiens
  misc_RNA (1)...(19): siRNA sense strand
acagaggagccauaugaga

SEQ ID NO: 1594182 - RNA, 19 nt, Homo sapiens
  misc_RNA (1)...(19): siRNA sense strand
gcucccgacgugagaauau

SEQ ID NO: 1594183 - RNA, 19 nt, Homo sapiens
  misc_RNA (1)...(19): siRNA sense strand
gaaugaaggacaaaauaca

SEQ ID NO: 1594184 - RNA, 19 nt, Homo sapiens
  misc_RNA (1)...(19): siRNA sense strand
ccacaggcaguccuucuac

SEQ ID NO: 1594185 - RNA, 19 nt, Homo sapiens
  misc_RNA (1)...(19): siRNA sense strand
gcauuucugcagccuagug

SEQ ID NO: 1594186 - RNA, 19 nt, Homo sapiens
  misc_RNA (1)...(19): siRNA sense strand
uaugagaauaucaggaaug

SEQ ID NO: 1594187 - RNA, 19 nt, Homo sapiens
  misc_RNA (1)...(19): siRNA sense strand
caggaccagucuguguauu

SEQ ID NO: 1594188 - RNA, 19 nt, Homo sapiens
  misc_RNA (1)...(19): siRNA sense strand
gaaccggcucuuucugaac

SEQ ID NO: 1594189 - RNA, 19 nt, Homo sapiens
  misc_RNA (1)...(19): siRNA sense strand
gggaccaaacucuccauca

SEQ ID NO: 1594190 - RNA, 19 nt, Homo sapiens
  misc_RNA (1)...(19): siRNA sense strand
caggaucugguccaagcua

SEQ ID NO: 1594191 - RNA, 19 nt, Homo sapiens
  misc_RNA (1)...(19): siRNA sense strand
gguccaagcuaccuuuaug

SEQ ID NO: 1594192 - RNA, 19 nt, Homo sapiens
  misc_RNA (1)...(19): siRNA sense strand
aaauacagaucccaagcua

SEQ ID NO: 1594193 - RNA, 19 nt, Homo sapiens
  misc_RNA (1)...(19): siRNA sense strand
gagaauaucaggaaugaag

SEQ ID NO: 1594194 - RNA, 19 nt, Homo sapiens
  misc_RNA (1)...(19): siRNA sense strand
ggaccagucuguguauuuc

SEQ ID NO: 1594195 - RNA, 19 nt, Homo sapiens
  misc_RNA (1)...(19): siRNA sense strand
gaggagccauaugagaaua

SEQ ID NO: 1594196 - RNA, 19 nt, Homo sapiens
  misc_RNA (1)...(19): siRNA sense strand
acacagaggagccauauga

SEQ ID NO: 1594197 - RNA, 19 nt, Homo sapiens
  misc_RNA (1)...(19): siRNA sense strand
ggacagagggucagaagag

SEQ ID NO: 1594198 - RNA, 19 nt, Homo sapiens
  misc_RNA (1)...(19): siRNA sense strand
ggaccaaacucuccaucac

SEQ ID NO: 1594199 - RNA, 19 nt, Homo sapiens
  misc_RNA (1)...(19): siRNA sense strand
auacagaucccaagcuaaa

SEQ ID NO: 1594200 - RNA, 19 nt, Homo sapiens
  misc_RNA (1)...(19): siRNA sense strand
cagaggagccauaugagaa

SEQ ID NO: 1594201 - RNA, 19 nt, Homo sapiens
  misc_RNA (1)...(19): siRNA sense strand
uaucaggaaugaaggacaa

SEQ ID NO: 1594202 - RNA, 19 nt, Homo sapiens
  misc_RNA (1)...(19): siRNA sense strand
gacccuguacucugucuua

SEQ ID NO: 1594203 - RNA, 19 nt, Homo sapiens
  misc_RNA (1)...(19): siRNA sense strand
ugaaccggcucuuucugaa

SEQ ID NO: 1594204 - RNA, 19 nt, Homo sapiens
  misc_RNA (1)...(19): siRNA sense strand
gaacgagacccuguacucu

SEQ ID NO: 1594205 - RNA, 19 nt, Homo sapiens
  misc_RNA (1)...(19): siRNA sense strand
ccuguacucugucuuaaag

SEQ ID NO: 1594206 - RNA, 19 nt, Homo sapiens
  misc_RNA (1)...(19): siRNA sense strand
gaauaucaggaaugaagga

SEQ ID NO: 1594207 - RNA, 19 nt, Homo sapiens
  misc_RNA (1)...(19): siRNA sense strand
guguauuucugccgaguug

SEQ ID NO: 1594208 - RNA, 19 nt, Homo sapiens
  misc_RNA (1)...(19): siRNA sense strand
gcaggaccagucuguguau

SEQ ID NO: 1594209 - RNA, 19 nt, Homo sapiens
  misc_RNA (1)...(19): siRNA sense strand
gugaaccggcucuuucuga

SEQ ID NO: 1594210 - RNA, 19 nt, Homo sapiens
  misc_RNA (1)...(19): siRNA sense strand
aaacacagaggagccauau

SEQ ID NO: 1594211 - RNA, 19 nt, Homo sapiens
  misc_RNA (1)...(19): siRNA sense strand
augagaauaucaggaauga

SEQ ID NO: 1594212 - RNA, 19 nt, Homo sapiens
  misc_RNA (1)...(19): siRNA sense strand
gaaauccccuucuccuucu

SEQ ID NO: 1594213 - RNA, 19 nt, Homo sapiens
  misc_RNA (1)...(19): siRNA sense strand
ucuccaaccugcagaagca

SEQ ID NO: 1594214 - RNA, 19 nt, Homo sapiens
  misc_RNA (1)...(19): siRNA sense strand
acgagacccuguacucugu

SEQ ID NO: 1594215 - RNA, 19 nt, Homo sapiens
  misc_RNA (1)...(19): siRNA sense strand
uaugugaaccggcucuuuc

SEQ ID NO: 1594216 - RNA, 19 nt, Homo sapiens
  misc_RNA (1)...(19): siRNA sense strand
gcagaagcaggaccagucu

SEQ ID NO: 1594217 - RNA, 19 nt, Homo sapiens
  misc_RNA (1)...(19): siRNA sense strand
ggguggcucuguggaaauc

SEQ ID NO: 1594218 - RNA, 19 nt, Homo sapiens
  misc_RNA (1)...(19): siRNA sense strand
acagaggagccauaugaga

SEQ ID NO: 1594219 - RNA, 19 nt, Homo sapiens
  misc_RNA (1)...(19): siRNA sense strand
gcucccgacgugagaauau

SEQ ID NO: 1594220 - RNA, 19 nt, Homo sapiens
  misc_RNA (1)...(19): siRNA sense strand
gaaugaaggacaaaauaca

SEQ ID NO: 1594221 - RNA, 19 nt, Homo sapiens
  misc_RNA (1)...(19): siRNA sense strand
ccacaggcaguccuucuac

SEQ ID NO: 1594222 - RNA, 19 nt, Homo sapiens
  misc_RNA (1)...(19): siRNA sense strand
gcauuucugcagccuagug

SEQ ID NO: 1594223 - RNA, 19 nt, Homo sapiens
  misc_RNA (1)...(19): siRNA sense strand
uaugagaauaucaggaaug

SEQ ID NO: 1594224 - RNA, 19 nt, Homo sapiens
  misc_RNA (1)...(19): siRNA sense strand
caggaccagucuguguauu

SEQ ID NO: 1594225 - RNA, 19 nt, Homo sapiens
  misc_RNA (1)...(19): siRNA sense strand
gaaccggcucuuucugaac

SEQ ID NO: 1594226 - RNA, 19 nt, Homo sapiens
  misc_RNA (1)...(19): siRNA sense strand
gggaccaaacucuccauca

SEQ ID NO: 1594227 - RNA, 19 nt, Homo sapiens
  misc_RNA (1)...(19): siRNA sense strand
caggaucugguccaagcua

SEQ ID NO: 1594228 - RNA, 19 nt, Homo sapiens
  misc_RNA (1)...(19): siRNA sense strand
gguccaagcuaccuuuaug

SEQ ID NO: 1594229 - RNA, 19 nt, Homo sapiens
  misc_RNA (1)...(19): siRNA sense strand
aaauacagaucccaagcua

SEQ ID NO: 1594230 - RNA, 19 nt, Homo sapiens
  misc_RNA (1)...(19): siRNA sense strand
gagaauaucaggaaugaag

SEQ ID NO: 1594231 - RNA, 19 nt, Homo sapiens
  misc_RNA (1)...(19): siRNA sense strand
ggaccagucuguguauuuc

SEQ ID NO: 1594232 - RNA, 19 nt, Homo sapiens
  misc_RNA (1)...(19): siRNA sense strand
gaggagccauaugagaaua

SEQ ID NO: 1594233 - RNA, 19 nt, Homo sapiens
  misc_RNA (1)...(19): siRNA sense strand
acacagaggagccauauga

SEQ ID NO: 1594234 - RNA, 19 nt, Homo sapiens
  misc_RNA (1)...(19): siRNA sense strand
ggacagagggucagaagag

SEQ ID NO: 1594235 - RNA, 19 nt, Homo sapiens
  misc_RNA (1)...(19): siRNA sense strand
ggaccaaacucuccaucac

SEQ ID NO: 1594236 - RNA, 19 nt, Homo sapiens
  misc_RNA (1)...(19): siRNA sense strand
auacagaucccaagcuaaa

SEQ ID NO: 1594237 - RNA, 19 nt, Homo sapiens
  misc_RNA (1)...(19): siRNA sense strand
cagaggagccauaugagaa

SEQ ID NO: 1594238 - RNA, 19 nt, Homo sapiens
  misc_RNA (1)...(19): siRNA sense strand
uaucaggaaugaaggacaa

SEQ ID NO: 1594239 - RNA, 19 nt, Homo sapiens
  misc_RNA (1)...(19): siRNA sense strand
gacccuguacucugucuua

SEQ ID NO: 1594240 - RNA, 19 nt, Homo sapiens
  misc_RNA (1)...(19): siRNA sense strand
ugaaccggcucuuucugaa

SEQ ID NO: 1594241 - RNA, 19 nt, Homo sapiens
  misc_RNA (1)...(19): siRNA sense strand
gaacgagacccuguacucu

SEQ ID NO: 1594242 - RNA, 19 nt, Homo sapiens
  misc_RNA (1)...(19): siRNA sense strand
ccuguacucugucuuaaag

SEQ ID NO: 1594243 - RNA, 19 nt, Homo sapiens
  misc_RNA (1)...(19): siRNA sense strand
gaauaucaggaaugaagga

SEQ ID NO: 1594244 - RNA, 19 nt, Homo sapiens
  misc_RNA (1)...(19): siRNA sense strand
guguauuucugccgaguug

SEQ ID NO: 1594245 - RNA, 19 nt, Homo sapiens
  misc_RNA (1)...(19): siRNA sense strand
gcaggaccagucuguguau

SEQ ID NO: 1594246 - RNA, 19 nt, Homo sapiens
  misc_RNA (1)...(19): siRNA sense strand
gugaaccggcucuuucuga

SEQ ID NO: 1594247 - RNA, 19 nt, Homo sapiens
  misc_RNA (1)...(19): siRNA sense strand
aaacacagaggagccauau

SEQ ID NO: 1594248 - RNA, 19 nt, Homo sapiens
  misc_RNA (1)...(19): siRNA sense strand
augagaauaucaggaauga

SEQ ID NO: 1594249 - RNA, 19 nt, Homo sapiens
  misc_RNA (1)...(19): siRNA sense strand
gaaauccccuucuccuucu

SEQ ID NO: 1594250 - RNA, 19 nt, Homo sapiens
  misc_RNA (1)...(19): siRNA sense strand
ucuccaaccugcagaagca

SEQ ID NO: 1594251 - RNA, 19 nt, Homo sapiens
  misc_RNA (1)...(19): siRNA sense strand
acgagacccuguacucugu

SEQ ID NO: 1594252 - RNA, 19 nt, Homo sapiens
  misc_RNA (1)...(19): siRNA sense strand
uaugugaaccggcucuuuc

SEQ ID NO: 1594253 - RNA, 19 nt, Homo sapiens
  misc_RNA (1)...(19): siRNA sense strand
gcagaagcaggaccagucu

SEQ ID NO: 1594254 - RNA, 19 nt, Homo sapiens
  misc_RNA (1)...(19): siRNA sense strand
ggguggcucuguggaaauc

SEQ ID NO: 1594255 - RNA, 19 nt, Homo sapiens
  misc_RNA (1)...(19): siRNA sense strand
acagaggagccauaugaga

SEQ ID NO: 1594256 - RNA, 19 nt, Homo sapiens
  misc_RNA (1)...(19): siRNA sense strand
gcucccgacgugagaauau

SEQ ID NO: 1594257 - RNA, 19 nt, Homo sapiens
  misc_RNA (1)...(19): siRNA sense strand
gaaugaaggacaaaauaca

SEQ ID NO: 1594258 - RNA, 19 nt, Homo sapiens
  misc_RNA (1)...(19): siRNA sense strand
ccacaggcaguccuucuac

SEQ ID NO: 1594259 - RNA, 19 nt, Homo sapiens
  misc_RNA (1)...(19): siRNA sense strand
gcauuucugcagccuagug

SEQ ID NO: 1594260 - RNA, 19 nt, Homo sapiens
  misc_RNA (1)...(19): siRNA sense strand
uaugagaauaucaggaaug

SEQ ID NO: 1594261 - RNA, 19 nt, Homo sapiens
  misc_RNA (1)...(19): siRNA sense strand
caggaccagucuguguauu

SEQ ID NO: 1594262 - RNA, 19 nt, Homo sapiens
  misc_RNA (1)...(19): siRNA sense strand
gaaccggcucuuucugaac

SEQ ID NO: 1594263 - RNA, 19 nt, Homo sapiens
  misc_RNA (1)...(19): siRNA sense strand
gggaccaaacucuccauca

SEQ ID NO: 1594264 - RNA, 19 nt, Homo sapiens
  misc_RNA (1)...(19): siRNA sense strand
caggaucugguccaagcua

SEQ ID NO: 1594265 - RNA, 19 nt, Homo sapiens
  misc_RNA (1)...(19): siRNA sense strand
gguccaagcuaccuuuaug

SEQ ID NO: 1594266 - RNA, 19 nt, Homo sapiens
  misc_RNA (1)...(19): siRNA sense strand
aaauacagaucccaagcua

SEQ ID NO: 1594267 - RNA, 19 nt, Homo sapiens
  misc_RNA (1)...(19): siRNA sense strand
gagaauaucaggaaugaag

SEQ ID NO: 1594268 - RNA, 19 nt, Homo sapiens
  misc_RNA (1)...(19): siRNA sense strand
ggaccagucuguguauuuc

SEQ ID NO: 1594269 - RNA, 19 nt, Homo sapiens
  misc_RNA (1)...(19): siRNA sense strand
gaggagccauaugagaaua

SEQ ID NO: 1594270 - RNA, 19 nt, Homo sapiens
  misc_RNA (1)...(19): siRNA sense strand
acacagaggagccauauga

SEQ ID NO: 1594271 - RNA, 19 nt, Homo sapiens
  misc_RNA (1)...(19): siRNA sense strand
ggacagagggucagaagag

SEQ ID NO: 1594272 - RNA, 19 nt, Homo sapiens
  misc_RNA (1)...(19): siRNA sense strand
ggaccaaacucuccaucac

SEQ ID NO: 1594273 - RNA, 19 nt, Homo sapiens
  misc_RNA (1)...(19): siRNA sense strand
cagaggagccauaugagaa

SEQ ID NO: 1594274 - RNA, 19 nt, Homo sapiens
  misc_RNA (1)...(19): siRNA sense strand
uaucaggaaugaaggacaa

SEQ ID NO: 1594275 - RNA, 19 nt, Homo sapiens
  misc_RNA (1)...(19): siRNA sense strand
ugaaccggcucuuucugaa

SEQ ID NO: 1594276 - RNA, 19 nt, Homo sapiens
  misc_RNA (1)...(19): siRNA sense strand
gaauaucaggaaugaagga

SEQ ID NO: 1594277 - RNA, 19 nt, Homo sapiens
  misc_RNA (1)...(19): siRNA sense strand
guguauuucugccgaguug

SEQ ID NO: 1594278 - RNA, 19 nt, Homo sapiens
  misc_RNA (1)...(19): siRNA sense strand
gcaggaccagucuguguau

SEQ ID NO: 1594279 - RNA, 19 nt, Homo sapiens
  misc_RNA (1)...(19): siRNA sense strand
gugaaccggcucuuucuga

SEQ ID NO: 1594280 - RNA, 19 nt, Homo sapiens
  misc_RNA (1)...(19): siRNA sense strand
aaacacagaggagccauau

SEQ ID NO: 1594281 - RNA, 19 nt, Homo sapiens
  misc_RNA (1)...(19): siRNA sense strand
augagaauaucaggaauga

SEQ ID NO: 1594282 - RNA, 19 nt, Homo sapiens
  misc_RNA (1)...(19): siRNA sense strand
gaaauccccuucuccuucu

SEQ ID NO: 1594283 - RNA, 19 nt, Homo sapiens
  misc_RNA (1)...(19): siRNA sense strand
ucuccaaccugcagaagca

SEQ ID NO: 1594284 - RNA, 19 nt, Homo sapiens
  misc_RNA (1)...(19): siRNA sense strand
uaugugaaccggcucuuuc

SEQ ID NO: 1594285 - RNA, 19 nt, Homo sapiens
  misc_RNA (1)...(19): siRNA sense strand
gcagaagcaggaccagucu

SEQ ID NO: 1594286 - RNA, 19 nt, Homo sapiens
  misc_RNA (1)...(19): siRNA sense strand
ggguggcucuguggaaauc

SEQ ID NO: 1594287 - RNA, 19 nt, Homo sapiens
  misc_RNA (1)...(19): siRNA sense strand
acagaggagccauaugaga

SEQ ID NO: 1594288 - RNA, 19 nt, Homo sapiens
  misc_RNA (1)...(19): siRNA sense strand
gcucccgacgugagaauau

SEQ ID NO: 1594289 - RNA, 19 nt, Homo sapiens
  misc_RNA (1)...(19): siRNA sense strand
gaaugaaggacaaaauaca

SEQ ID NO: 1594290 - RNA, 19 nt, Homo sapiens
  misc_RNA (1)...(19): siRNA sense strand
ccacaggcaguccuucuac

SEQ ID NO: 1594291 - RNA, 19 nt, Homo sapiens
  misc_RNA (1)...(19): siRNA sense strand
gcauuucugcagccuagug

SEQ ID NO: 1594292 - RNA, 19 nt, Homo sapiens
  misc_RNA (1)...(19): siRNA sense strand
uaugagaauaucaggaaug

SEQ ID NO: 1594293 - RNA, 19 nt, Homo sapiens
  misc_RNA (1)...(19): siRNA sense strand
caggaccagucuguguauu

SEQ ID NO: 1594294 - RNA, 19 nt, Homo sapiens
  misc_RNA (1)...(19): siRNA sense strand
gaaccggcucuuucugaac

SEQ ID NO: 1594295 - RNA, 19 nt, Homo sapiens
  misc_RNA (1)...(19): siRNA sense strand
gggaccaaacucuccauca

SEQ ID NO: 1594296 - RNA, 19 nt, Homo sapiens
  misc_RNA (1)...(19): siRNA sense strand
caggaucugguccaagcua

SEQ ID NO: 1594297 - RNA, 19 nt, Homo sapiens
  misc_RNA (1)...(19): siRNA sense strand
ggaaauggacgcuggauua

SEQ ID NO: 1594298 - RNA, 19 nt, Homo sapiens
  misc_RNA (1)...(19): siRNA sense strand
gaacaaaggaagcaggaaa

SEQ ID NO: 1594299 - RNA, 19 nt, Homo sapiens
  misc_RNA (1)...(19): siRNA sense strand
gcaggaaaaugcucuuaaa

SEQ ID NO: 1594300 - RNA, 19 nt, Homo sapiens
  misc_RNA (1)...(19): siRNA sense strand
aauggacgcuggauuacaa

SEQ ID NO: 1594301 - RNA, 19 nt, Homo sapiens
  misc_RNA (1)...(19): siRNA sense strand
gaaguugcaggaagaacaa

SEQ ID NO: 1594302 - RNA, 19 nt, Homo sapiens
  misc_RNA (1)...(19): siRNA sense strand
gaaauggacgcuggauuac

SEQ ID NO: 1594303 - RNA, 19 nt, Homo sapiens
  misc_RNA (1)...(19): siRNA sense strand
uuuagggacuguucucuuc

SEQ ID NO: 1594304 - RNA, 19 nt, Homo sapiens
  misc_RNA (1)...(19): siRNA sense strand
gaguuguacugcugucaca

SEQ ID NO: 1594305 - RNA, 19 nt, Homo sapiens
  misc_RNA (1)...(19): siRNA sense strand
gcagaaguugcaggaagaa

SEQ ID NO: 1594306 - RNA, 19 nt, Homo sapiens
  misc_RNA (1)...(19): siRNA sense strand
agcagaaguugcaggaaga

SEQ ID NO: 1594307 - RNA, 19 nt, Homo sapiens
  misc_RNA (1)...(19): siRNA sense strand
gacgcuggauuacaagcau

SEQ ID NO: 1594308 - RNA, 19 nt, Homo sapiens
  misc_RNA (1)...(19): siRNA sense strand
gcucaggcagcagaaguug

SEQ ID NO: 1594309 - RNA, 19 nt, Homo sapiens
  misc_RNA (1)...(19): siRNA sense strand
uuuagggacuguucucuuc

SEQ ID NO: 1594310 - RNA, 19 nt, Homo sapiens
  misc_RNA (1)...(19): siRNA sense strand
ggaaauggacgcuggauua

SEQ ID NO: 1594311 - RNA, 19 nt, Homo sapiens
  misc_RNA (1)...(19): siRNA sense strand
gaacaaaggaagcaggaaa

SEQ ID NO: 1594312 - RNA, 19 nt, Homo sapiens
  misc_RNA (1)...(19): siRNA sense strand
gcaggaaaaugcucuuaaa

SEQ ID NO: 1594313 - RNA, 19 nt, Homo sapiens
  misc_RNA (1)...(19): siRNA sense strand
aauggacgcuggauuacaa

SEQ ID NO: 1594314 - RNA, 19 nt, Homo sapiens
  misc_RNA (1)...(19): siRNA sense strand
gaaguugcaggaagaacaa

SEQ ID NO: 1594315 - RNA, 19 nt, Homo sapiens
  misc_RNA (1)...(19): siRNA sense strand
gaaauggacgcuggauuac

SEQ ID NO: 1594316 - RNA, 19 nt, Homo sapiens
  misc_RNA (1)...(19): siRNA sense strand
uuuagggacuguucucuuc

SEQ ID NO: 1594317 - RNA, 19 nt, Homo sapiens
  misc_RNA (1)...(19): siRNA sense strand
gaguuguacugcugucaca

SEQ ID NO: 1594318 - RNA, 19 nt, Homo sapiens
  misc_RNA (1)...(19): siRNA sense strand
gcagaaguugcaggaagaa

SEQ ID NO: 1594319 - RNA, 19 nt, Homo sapiens
  misc_RNA (1)...(19): siRNA sense strand
agcagaaguugcaggaaga

SEQ ID NO: 1594320 - RNA, 19 nt, Homo sapiens
  misc_RNA (1)...(19): siRNA sense strand
gacgcuggauuacaagcau

SEQ ID NO: 1594321 - RNA, 19 nt, Homo sapiens
  misc_RNA (1)...(19): siRNA sense strand
gcucaggcagcagaaguug

SEQ ID NO: 1594322 - RNA, 19 nt, Homo sapiens
  misc_RNA (1)...(19): siRNA sense strand
ggaaauggacgcuggauua

SEQ ID NO: 1594323 - RNA, 19 nt, Homo sapiens
  misc_RNA (1)...(19): siRNA sense strand
gaacaaaggaagcaggaaa

SEQ ID NO: 1594324 - RNA, 19 nt, Homo sapiens
  misc_RNA (1)...(19): siRNA sense strand
gcaggaaaaugcucuuaaa

SEQ ID NO: 1594325 - RNA, 19 nt, Homo sapiens
  misc_RNA (1)...(19): siRNA sense strand
aauggacgcuggauuacaa

SEQ ID NO: 1594326 - RNA, 19 nt, Homo sapiens
  misc_RNA (1)...(19): siRNA sense strand
gaaguugcaggaagaacaa

SEQ ID NO: 1594327 - RNA, 19 nt, Homo sapiens
  misc_RNA (1)...(19): siRNA sense strand
gaaauggacgcuggauuac

SEQ ID NO: 1594328 - RNA, 19 nt, Homo sapiens
  misc_RNA (1)...(19): siRNA sense strand
gaguuguacugcugucaca

SEQ ID NO: 1594329 - RNA, 19 nt, Homo sapiens
  misc_RNA (1)...(19): siRNA sense strand
gcagaaguugcaggaagaa

SEQ ID NO: 1594330 - RNA, 19 nt, Homo sapiens
  misc_RNA (1)...(19): siRNA sense strand
agcagaaguugcaggaaga

SEQ ID NO: 1594331 - RNA, 19 nt, Homo sapiens
  misc_RNA (1)...(19): siRNA sense strand
gacgcuggauuacaagcau

SEQ ID NO: 1594332 - RNA, 19 nt, Homo sapiens
  misc_RNA (1)...(19): siRNA sense strand
gcucaggcagcagaaguug

SEQ ID NO: 1594333 - RNA, 19 nt, Homo sapiens
  misc_RNA (1)...(19): siRNA sense strand
ggaaauggacgcuggauua

SEQ ID NO: 1594334 - RNA, 19 nt, Homo sapiens
  misc_RNA (1)...(19): siRNA sense strand
gaacaaaggaagcaggaaa

SEQ ID NO: 1594335 - RNA, 19 nt, Homo sapiens
  misc_RNA (1)...(19): siRNA sense strand
gcaggaaaaugcucuuaaa

SEQ ID NO: 1594336 - RNA, 19 nt, Homo sapiens
  misc_RNA (1)...(19): siRNA sense strand
aauggacgcuggauuacaa

SEQ ID NO: 1594337 - RNA, 19 nt, Homo sapiens
  misc_RNA (1)...(19): siRNA sense strand
gaaguugcaggaagaacaa

SEQ ID NO: 1594338 - RNA, 19 nt, Homo sapiens
  misc_RNA (1)...(19): siRNA sense strand
gaaauggacgcuggauuac

SEQ ID NO: 1594339 - RNA, 19 nt, Homo sapiens
  misc_RNA (1)...(19): siRNA sense strand
gaguuguacugcugucaca

SEQ ID NO: 1594340 - RNA, 19 nt, Homo sapiens
  misc_RNA (1)...(19): siRNA sense strand
gcagaaguugcaggaagaa

SEQ ID NO: 1594341 - RNA, 19 nt, Homo sapiens
  misc_RNA (1)...(19): siRNA sense strand
agcagaaguugcaggaaga

SEQ ID NO: 1594342 - RNA, 19 nt, Homo sapiens
  misc_RNA (1)...(19): siRNA sense strand
gacgcuggauuacaagcau

SEQ ID NO: 1594343 - RNA, 19 nt, Homo sapiens
  misc_RNA (1)...(19): siRNA sense strand
gcucaggcagcagaaguug

SEQ ID NO: 1594344 - RNA, 19 nt, Homo sapiens
  misc_RNA (1)...(19): siRNA sense strand
ggaaauggacgcuggauua

SEQ ID NO: 1594345 - RNA, 19 nt, Homo sapiens
  misc_RNA (1)...(19): siRNA sense strand
gaacaaaggaagcaggaaa

SEQ ID NO: 1594346 - RNA, 19 nt, Homo sapiens
  misc_RNA (1)...(19): siRNA sense strand
gcaggaaaaugcucuuaaa

SEQ ID NO: 1594347 - RNA, 19 nt, Homo sapiens
  misc_RNA (1)...(19): siRNA sense strand
aauggacgcuggauuacaa

SEQ ID NO: 1594348 - RNA, 19 nt, Homo sapiens
  misc_RNA (1)...(19): siRNA sense strand
gaaguugcaggaagaacaa

SEQ ID NO: 1594349 - RNA, 19 nt, Homo sapiens
  misc_RNA (1)...(19): siRNA sense strand
gaaauggacgcuggauuac

SEQ ID NO: 1594350 - RNA, 19 nt, Homo sapiens
  misc_RNA (1)...(19): siRNA sense strand
gaguuguacugcugucaca

SEQ ID NO: 1594351 - RNA, 19 nt, Homo sapiens
  misc_RNA (1)...(19): siRNA sense strand
gcagaaguugcaggaagaa

SEQ ID NO: 1594352 - RNA, 19 nt, Homo sapiens
  misc_RNA (1)...(19): siRNA sense strand
agcagaaguugcaggaaga

SEQ ID NO: 1594353 - RNA, 19 nt, Homo sapiens
  misc_RNA (1)...(19): siRNA sense strand
gacgcuggauuacaagcau

SEQ ID NO: 1594354 - RNA, 19 nt, Homo sapiens
  misc_RNA (1)...(19): siRNA sense strand
gcucaggcagcagaaguug

SEQ ID NO: 1594355 - RNA, 19 nt, Homo sapiens
  misc_RNA (1)...(19): siRNA sense strand
ggaaauggacgcuggauua

SEQ ID NO: 1594356 - RNA, 19 nt, Homo sapiens
  misc_RNA (1)...(19): siRNA sense strand
gaacaaaggaagcaggaaa

SEQ ID NO: 1594357 - RNA, 19 nt, Homo sapiens
  misc_RNA (1)...(19): siRNA sense strand
aauggacgcuggauuacaa

SEQ ID NO: 1594358 - RNA, 19 nt, Homo sapiens
  misc_RNA (1)...(19): siRNA sense strand
gaaguugcaggaagaacaa

SEQ ID NO: 1594359 - RNA, 19 nt, Homo sapiens
  misc_RNA (1)...(19): siRNA sense strand
gaaauggacgcuggauuac

SEQ ID NO: 1594360 - RNA, 19 nt, Homo sapiens
  misc_RNA (1)...(19): siRNA sense strand
uuuagggacuguucucuuc

SEQ ID NO: 1594361 - RNA, 19 nt, Homo sapiens
  misc_RNA (1)...(19): siRNA sense strand
gaguuguacugcugucaca

SEQ ID NO: 1594362 - RNA, 19 nt, Homo sapiens
  misc_RNA (1)...(19): siRNA sense strand
gcagaaguugcaggaagaa

SEQ ID NO: 1594363 - RNA, 19 nt, Homo sapiens
  misc_RNA (1)...(19): siRNA sense strand
agcagaaguugcaggaaga

SEQ ID NO: 1594364 - RNA, 19 nt, Homo sapiens
  misc_RNA (1)...(19): siRNA sense strand
gacgcuggauuacaagcau

SEQ ID NO: 1594365 - RNA, 19 nt, Homo sapiens
  misc_RNA (1)...(19): siRNA sense strand
gcucaggcagcagaaguug

SEQ ID NO: 1594366 - RNA, 19 nt, Homo sapiens
  misc_RNA (1)...(19): siRNA sense strand
gaagaaagguccagacuga

SEQ ID NO: 1594367 - RNA, 19 nt, Homo sapiens
  misc_RNA (1)...(19): siRNA sense strand
gaaggaaguuugacuaaau

SEQ ID NO: 1594368 - RNA, 19 nt, Homo sapiens
  misc_RNA (1)...(19): siRNA sense strand
gaucacagaugaagaagaa

SEQ ID NO: 1594369 - RNA, 19 nt, Homo sapiens
  misc_RNA (1)...(19): siRNA sense strand
ucaaagggcucgauccaua

SEQ ID NO: 1594370 - RNA, 19 nt, Homo sapiens
  misc_RNA (1)...(19): siRNA sense strand
gagaagaaguuuggugaua

SEQ ID NO: 1594371 - RNA, 19 nt, Homo sapiens
  misc_RNA (1)...(19): siRNA sense strand
gcagacaaauuuaugaaga

SEQ ID NO: 1594372 - RNA, 19 nt, Homo sapiens
  misc_RNA (1)...(19): siRNA sense strand
gggaaaugcuguugacaaa

SEQ ID NO: 1594373 - RNA, 19 nt, Homo sapiens
  misc_RNA (1)...(19): siRNA sense strand
gaaauacgcagaaauggaa

SEQ ID NO: 1594374 - RNA, 19 nt, Homo sapiens
  misc_RNA (1)...(19): siRNA sense strand
gaucaacuaugcacucuau

SEQ ID NO: 1594375 - RNA, 19 nt, Homo sapiens
  misc_RNA (1)...(19): siRNA sense strand
gaucaaguaugcccgcuuu

SEQ ID NO: 1594376 - RNA, 19 nt, Homo sapiens
  misc_RNA (1)...(19): siRNA sense strand
gaucagcuuugcucaguuu

SEQ ID NO: 1594377 - RNA, 19 nt, Homo sapiens
  misc_RNA (1)...(19): siRNA sense strand
gaagaucacagaugaagaa

SEQ ID NO: 1594378 - RNA, 19 nt, Homo sapiens
  misc_RNA (1)...(19): siRNA sense strand
caaccaaccuaaccucaaa

SEQ ID NO: 1594379 - RNA, 19 nt, Homo sapiens
  misc_RNA (1)...(19): siRNA sense strand
ugagagagcuguggaauuc

SEQ ID NO: 1594380 - RNA, 19 nt, Homo sapiens
  misc_RNA (1)...(19): siRNA sense strand
acagauaacugcugaacaa

SEQ ID NO: 1594381 - RNA, 19 nt, Homo sapiens
  misc_RNA (1)...(19): siRNA sense strand
aauuguaccucauggauua

SEQ ID NO: 1594382 - RNA, 19 nt, Homo sapiens
  misc_RNA (1)...(19): siRNA sense strand
ggaauucuuuggagaugaa

SEQ ID NO: 1594383 - RNA, 19 nt, Homo sapiens
  misc_RNA (1)...(19): siRNA sense strand
gagaugaacauauggauga

SEQ ID NO: 1594384 - RNA, 19 nt, Homo sapiens
  misc_RNA (1)...(19): siRNA sense strand
guuaagaacuggaucaagu

SEQ ID NO: 1594385 - RNA, 19 nt, Homo sapiens
  misc_RNA (1)...(19): siRNA sense strand
gggaagaauacuuugauua

SEQ ID NO: 1594386 - RNA, 19 nt, Homo sapiens
  misc_RNA (1)...(19): siRNA sense strand
gaaggacacuuugggaaau

SEQ ID NO: 1594387 - RNA, 19 nt, Homo sapiens
  misc_RNA (1)...(19): siRNA sense strand
gcaaauguccaaagaacaa

SEQ ID NO: 1594388 - RNA, 19 nt, Homo sapiens
  misc_RNA (1)...(19): siRNA sense strand
ggacaagacagguguauca

SEQ ID NO: 1594389 - RNA, 19 nt, Homo sapiens
  misc_RNA (1)...(19): siRNA sense strand
gguagaaagugacgcagaa

SEQ ID NO: 1594390 - RNA, 19 nt, Homo sapiens
  misc_RNA (1)...(19): siRNA sense strand
gaacuuccauaggcaaaug

SEQ ID NO: 1594391 - RNA, 19 nt, Homo sapiens
  misc_RNA (1)...(19): siRNA sense strand
gaugagcaccuuuauguug

SEQ ID NO: 1594392 - RNA, 19 nt, Homo sapiens
  misc_RNA (1)...(19): siRNA sense strand
gaaaggguacgagugauuu

SEQ ID NO: 1594393 - RNA, 19 nt, Homo sapiens
  misc_RNA (1)...(19): siRNA sense strand
ggaagaaacagaaagaaca

SEQ ID NO: 1594394 - RNA, 19 nt, Homo sapiens
  misc_RNA (1)...(19): siRNA sense strand
gacaauccuuggugauauu

SEQ ID NO: 1594395 - RNA, 19 nt, Homo sapiens
  misc_RNA (1)...(19): siRNA sense strand
ucugaaagcuuugugguuu

SEQ ID NO: 1594396 - RNA, 19 nt, Homo sapiens
  misc_RNA (1)...(19): siRNA sense strand
ggaagaauacuuugauuac

SEQ ID NO: 1594397 - RNA, 19 nt, Homo sapiens
  misc_RNA (1)...(19): siRNA sense strand
gauuggagcuccguuccua

SEQ ID NO: 1594398 - RNA, 19 nt, Homo sapiens
  misc_RNA (1)...(19): siRNA sense strand
gcaccuuuauguugccuuu

SEQ ID NO: 1594399 - RNA, 19 nt, Homo sapiens
  misc_RNA (1)...(19): siRNA sense strand
gagacaauccuuggugaua

SEQ ID NO: 1594400 - RNA, 19 nt, Homo sapiens
  misc_RNA (1)...(19): siRNA sense strand
caauuaugaugcaugguuu

SEQ ID NO: 1594401 - RNA, 19 nt, Homo sapiens
  misc_RNA (1)...(19): siRNA sense strand
ggacagaauuucaaaacaa

SEQ ID NO: 1594402 - RNA, 19 nt, Homo sapiens
  misc_RNA (1)...(19): siRNA sense strand
gaaauacgacagaagaauc

SEQ ID NO: 1594403 - RNA, 19 nt, Homo sapiens
  misc_RNA (1)...(19): siRNA sense strand
gauuacaucuuuccagaag

SEQ ID NO: 1594404 - RNA, 19 nt, Homo sapiens
  misc_RNA (1)...(19): siRNA sense strand
gaaagguccagacugauga

SEQ ID NO: 1594405 - RNA, 19 nt, Homo sapiens
  misc_RNA (1)...(19): siRNA sense strand
caacagaagaucacagaug

SEQ ID NO: 1594406 - RNA, 19 nt, Homo sapiens
  misc_RNA (1)...(19): siRNA sense strand
ggacgucgaugagagugaa

SEQ ID NO: 1594407 - RNA, 19 nt, Homo sapiens
  misc_RNA (1)...(19): siRNA sense strand
gaaggcgaauccacacaau

SEQ ID NO: 1594408 - RNA, 19 nt, Homo sapiens
  misc_RNA (1)...(19): siRNA sense strand
caaccaugcucgaaauauc

SEQ ID NO: 1594409 - RNA, 19 nt, Homo sapiens
  misc_RNA (1)...(19): siRNA sense strand
gauaacugcugaacaacuc

SEQ ID NO: 1594410 - RNA, 19 nt, Homo sapiens
  misc_RNA (1)...(19): siRNA sense strand
gcuacagcuucgagaauuu

SEQ ID NO: 1594411 - RNA, 19 nt, Homo sapiens
  misc_RNA (1)...(19): siRNA sense strand
gaagaaguuuggugauagg

SEQ ID NO: 1594412 - RNA, 19 nt, Homo sapiens
  misc_RNA (1)...(19): siRNA sense strand
cgagcgugcuuuagaugua

SEQ ID NO: 1594413 - RNA, 19 nt, Homo sapiens
  misc_RNA (1)...(19): siRNA sense strand
aacagaagaucacagauga

SEQ ID NO: 1594414 - RNA, 19 nt, Homo sapiens
  misc_RNA (1)...(19): siRNA sense strand
aagagaggcuaaagaaaga

SEQ ID NO: 1594415 - RNA, 19 nt, Homo sapiens
  misc_RNA (1)...(19): siRNA sense strand
ggaagacuuuugaagauaa

SEQ ID NO: 1594416 - RNA, 19 nt, Homo sapiens
  misc_RNA (1)...(19): siRNA sense strand
ugagagaagucuaugaaag

SEQ ID NO: 1594417 - RNA, 19 nt, Homo sapiens
  misc_RNA (1)...(19): siRNA sense strand
gcacggaaaguguaugaga

SEQ ID NO: 1594418 - RNA, 19 nt, Homo sapiens
  misc_RNA (1)...(19): siRNA sense strand
uaugaugcaugguuugauu

SEQ ID NO: 1594419 - RNA, 19 nt, Homo sapiens
  misc_RNA (1)...(19): siRNA sense strand
gaagaagaauuuggaacag

SEQ ID NO: 1594420 - RNA, 19 nt, Homo sapiens
  misc_RNA (1)...(19): siRNA sense strand
gcaggaagaaacagaaaga

SEQ ID NO: 1594421 - RNA, 19 nt, Homo sapiens
  misc_RNA (1)...(19): siRNA sense strand
uaagagaggcuaaagaaag

SEQ ID NO: 1594422 - RNA, 19 nt, Homo sapiens
  misc_RNA (1)...(19): siRNA sense strand
gaacagcuucagauaagga

SEQ ID NO: 1594423 - RNA, 19 nt, Homo sapiens
  misc_RNA (1)...(19): siRNA sense strand
gaguuaaucaguucuggua

SEQ ID NO: 1594424 - RNA, 19 nt, Homo sapiens
  misc_RNA (1)...(19): siRNA sense strand
gaaauggaaaugaagaauc

SEQ ID NO: 1594425 - RNA, 19 nt, Homo sapiens
  misc_RNA (1)...(19): siRNA sense strand
gcugaaauacgcagaaaug

SEQ ID NO: 1594426 - RNA, 19 nt, Homo sapiens
  misc_RNA (1)...(19): siRNA sense strand
acacguacauggaggaaau

SEQ ID NO: 1594427 - RNA, 19 nt, Homo sapiens
  misc_RNA (1)...(19): siRNA sense strand
gcaaacggagauuccagua

SEQ ID NO: 1594428 - RNA, 19 nt, Homo sapiens
  misc_RNA (1)...(19): siRNA sense strand
uacgagugauuuacaagua

SEQ ID NO: 1594429 - RNA, 19 nt, Homo sapiens
  misc_RNA (1)...(19): siRNA sense strand
gcagaaauggaaaugaaga

SEQ ID NO: 1594430 - RNA, 19 nt, Homo sapiens
  misc_RNA (1)...(19): siRNA sense strand
uggaacagcuucagauaag

SEQ ID NO: 1594431 - RNA, 19 nt, Homo sapiens
  misc_RNA (1)...(19): siRNA sense strand
ggacugugauuaguaacug

SEQ ID NO: 1594432 - RNA, 19 nt, Homo sapiens
  misc_RNA (1)...(19): siRNA sense strand
gaaaaggaagagagacuua

SEQ ID NO: 1594433 - RNA, 19 nt, Homo sapiens
  misc_RNA (1)...(19): siRNA sense strand
gagcacgggcaaucuauga

SEQ ID NO: 1594434 - RNA, 19 nt, Homo sapiens
  misc_RNA (1)...(19): siRNA sense strand
caacuaugcacucuaugaa

SEQ ID NO: 1594435 - RNA, 19 nt, Homo sapiens
  misc_RNA (1)...(19): siRNA sense strand
aggcgaauccacacaauua

SEQ ID NO: 1594436 - RNA, 19 nt, Homo sapiens
  misc_RNA (1)...(19): siRNA sense strand
acgcagaaauggaaaugaa

SEQ ID NO: 1594437 - RNA, 19 nt, Homo sapiens
  misc_RNA (1)...(19): siRNA sense strand
gagaaagucaagaagagaa

SEQ ID NO: 1594438 - RNA, 19 nt, Homo sapiens
  misc_RNA (1)...(19): siRNA sense strand
cagagaaagucaagaagag

SEQ ID NO: 1594439 - RNA, 19 nt, Homo sapiens
  misc_RNA (1)...(19): siRNA sense strand
gaaauugagcaggaagaaa

SEQ ID NO: 1594440 - RNA, 19 nt, Homo sapiens
  misc_RNA (1)...(19): siRNA sense strand
ucaagccucuuuggaacua

SEQ ID NO: 1594441 - RNA, 19 nt, Homo sapiens
  misc_RNA (1)...(19): siRNA sense strand
cgaauccacacaauuauga

SEQ ID NO: 1594442 - RNA, 19 nt, Homo sapiens
  misc_RNA (1)...(19): siRNA sense strand
cauauacgagcgugcuuua

SEQ ID NO: 1594443 - RNA, 19 nt, Homo sapiens
  misc_RNA (1)...(19): siRNA sense strand
agaaggaaguuugacuaaa

SEQ ID NO: 1594444 - RNA, 19 nt, Homo sapiens
  misc_RNA (1)...(19): siRNA sense strand
gaaacagaaagaacacgaa

SEQ ID NO: 1594445 - RNA, 19 nt, Homo sapiens
  misc_RNA (1)...(19): siRNA sense strand
caaaguggccaaggugaaa

SEQ ID NO: 1594446 - RNA, 19 nt, Homo sapiens
  misc_RNA (1)...(19): siRNA sense strand
gcacuccuacaucaacuuu

SEQ ID NO: 1594447 - RNA, 19 nt, Homo sapiens
  misc_RNA (1)...(19): siRNA sense strand
guuccgagauccuguuugu

SEQ ID NO: 1594448 - RNA, 19 nt, Homo sapiens
  misc_RNA (1)...(19): siRNA sense strand
ucucagagccgauuucuag

SEQ ID NO: 1594449 - RNA, 19 nt, Homo sapiens
  misc_RNA (1)...(19): siRNA sense strand
ggacgcagcaugucaaggu

SEQ ID NO: 1594450 - RNA, 19 nt, Homo sapiens
  misc_RNA (1)...(19): siRNA sense strand
guaugcacaguuugaaaua

SEQ ID NO: 1594451 - RNA, 19 nt, Homo sapiens
  misc_RNA (1)...(19): siRNA sense strand
gaacuaauuccucacaaaa

SEQ ID NO: 1594452 - RNA, 19 nt, Homo sapiens
  misc_RNA (1)...(19): siRNA sense strand
guaucaagccucuuuggaa

SEQ ID NO: 1594453 - RNA, 19 nt, Homo sapiens
  misc_RNA (1)...(19): siRNA sense strand
gcacuggaagcgcuacauu

SEQ ID NO: 1594454 - RNA, 19 nt, Homo sapiens
  misc_RNA (1)...(19): siRNA sense strand
ggaaauguugggaaacguu

SEQ ID NO: 1594455 - RNA, 19 nt, Homo sapiens
  misc_RNA (1)...(19): siRNA sense strand
ugccagaggugcuuuggaa

SEQ ID NO: 1594456 - RNA, 19 nt, Homo sapiens
  misc_RNA (1)...(19): siRNA sense strand
agaagaaucugucauuagc

SEQ ID NO: 1594457 - RNA, 19 nt, Homo sapiens
  misc_RNA (1)...(19): siRNA sense strand
acuggaagcgcuacauuua

SEQ ID NO: 1594458 - RNA, 19 nt, Homo sapiens
  misc_RNA (1)...(19): siRNA sense strand
gggaagaaagccuaaagga

SEQ ID NO: 1594459 - RNA, 19 nt, Homo sapiens
  misc_RNA (1)...(19): siRNA sense strand
agaagaugcugccaaccaa

SEQ ID NO: 1594460 - RNA, 19 nt, Homo sapiens
  misc_RNA (1)...(19): siRNA sense strand
aaagaaggaaguuugacua

SEQ ID NO: 1594461 - RNA, 19 nt, Homo sapiens
  misc_RNA (1)...(19): siRNA sense strand
agacaauccuuggugauau

SEQ ID NO: 1594462 - RNA, 19 nt, Homo sapiens
  misc_RNA (1)...(19): siRNA sense strand
gccggaagcuuuaugaaaa

SEQ ID NO: 1594463 - RNA, 19 nt, Homo sapiens
  misc_RNA (1)...(19): siRNA sense strand
gagagaagucuaugaaagg

SEQ ID NO: 1594464 - RNA, 19 nt, Homo sapiens
  misc_RNA (1)...(19): siRNA sense strand
caaguaugcccgcuuugaa

SEQ ID NO: 1594465 - RNA, 19 nt, Homo sapiens
  misc_RNA (1)...(19): siRNA sense strand
uggaggaaauguugggaaa

SEQ ID NO: 1594466 - RNA, 19 nt, Homo sapiens
  misc_RNA (1)...(19): siRNA sense strand
cuacagugcuucuuagaua

SEQ ID NO: 1594467 - RNA, 19 nt, Homo sapiens
  misc_RNA (1)...(19): siRNA sense strand
ggaauuccuuggcuguuua

SEQ ID NO: 1594468 - RNA, 19 nt, Homo sapiens
  misc_RNA (1)...(19): siRNA sense strand
aaucuaagcuguugucuga

SEQ ID NO: 1594469 - RNA, 19 nt, Homo sapiens
  misc_RNA (1)...(19): siRNA sense strand
gaagagaauggaacgguua

SEQ ID NO: 1594470 - RNA, 19 nt, Homo sapiens
  misc_RNA (1)...(19): siRNA sense strand
gaaaucaauuggagaaugg

SEQ ID NO: 1594471 - RNA, 19 nt, Homo sapiens
  misc_RNA (1)...(19): siRNA sense strand
ggaaaucaauuggagaaug

SEQ ID NO: 1594472 - RNA, 19 nt, Homo sapiens
  misc_RNA (1)...(19): siRNA sense strand
ggaagcagcaucuccuuaa

SEQ ID NO: 1594473 - RNA, 19 nt, Homo sapiens
  misc_RNA (1)...(19): siRNA sense strand
gaagcagcaucuccuuaaa

SEQ ID NO: 1594474 - RNA, 19 nt, Homo sapiens
  misc_RNA (1)...(19): siRNA sense strand
cagaugagcugguauggau

SEQ ID NO: 1594475 - RNA, 19 nt, Homo sapiens
  misc_RNA (1)...(19): siRNA sense strand
acaaauggguguaggagaa

SEQ ID NO: 1594476 - RNA, 19 nt, Homo sapiens
  misc_RNA (1)...(19): siRNA sense strand
ggaggaagauuuugagauu

SEQ ID NO: 1594477 - RNA, 19 nt, Homo sapiens
  misc_RNA (1)...(19): siRNA sense strand
ucuaagcuguugucugaua

SEQ ID NO: 1594478 - RNA, 19 nt, Homo sapiens
  misc_RNA (1)...(19): siRNA sense strand
acacuggccucccuuugua

SEQ ID NO: 1594479 - RNA, 19 nt, Homo sapiens
  misc_RNA (1)...(19): siRNA sense strand
aagaacaacccaaagaaua

SEQ ID NO: 1594480 - RNA, 19 nt, Homo sapiens
  misc_RNA (1)...(19): siRNA sense strand
gcuguugucugauauaagu

SEQ ID NO: 1594481 - RNA, 19 nt, Homo sapiens
  misc_RNA (1)...(19): siRNA sense strand
ggagaagggaaaucaauug

SEQ ID NO: 1594482 - RNA, 19 nt, Homo sapiens
  misc_RNA (1)...(19): siRNA sense strand
gcucaagcccuuaucugua

SEQ ID NO: 1594483 - RNA, 19 nt, Homo sapiens
  misc_RNA (1)...(19): siRNA sense strand
gguguagccuuguucagaa

SEQ ID NO: 1594484 - RNA, 19 nt, Homo sapiens
  misc_RNA (1)...(19): siRNA sense strand
uauaagugcucgucuaugg

SEQ ID NO: 1594485 - RNA, 19 nt, Homo sapiens
  misc_RNA (1)...(19): siRNA sense strand
gugacgagcucaucuucuu

SEQ ID NO: 1594486 - RNA, 19 nt, Homo sapiens
  misc_RNA (1)...(19): siRNA sense strand
gauauaagugcucgucuau

SEQ ID NO: 1594487 - RNA, 19 nt, Homo sapiens
  misc_RNA (1)...(19): siRNA sense strand
aaaccuggauccuucaguu

SEQ ID NO: 1594488 - RNA, 19 nt, Homo sapiens
  misc_RNA (1)...(19): siRNA sense strand
ugauauaagugcucgucua

SEQ ID NO: 1594489 - RNA, 19 nt, Homo sapiens
  misc_RNA (1)...(19): siRNA sense strand
acacaguggucauugaaga

SEQ ID NO: 1594490 - RNA, 19 nt, Homo sapiens
  misc_RNA (1)...(19): siRNA sense strand
gagcugguauggaucuuag

SEQ ID NO: 1594491 - RNA, 19 nt, Homo sapiens
  misc_RNA (1)...(19): siRNA sense strand
gaaugaacauccuaaaccu

SEQ ID NO: 1594492 - RNA, 19 nt, Homo sapiens
  misc_RNA (1)...(19): siRNA sense strand
cugacuaccuagaagaaua

SEQ ID NO: 1594493 - RNA, 19 nt, Homo sapiens
  misc_RNA (1)...(19): siRNA sense strand
ugacaggccucccgauucu

SEQ ID NO: 1594494 - RNA, 19 nt, Homo sapiens
  misc_RNA (1)...(19): siRNA sense strand
uaacugguguagccuuguu

SEQ ID NO: 1594495 - RNA, 19 nt, Homo sapiens
  misc_RNA (1)...(19): siRNA sense strand
gggaagcagcaucuccuua

SEQ ID NO: 1594496 - RNA, 19 nt, Homo sapiens
  misc_RNA (1)...(19): siRNA sense strand
ggaguuugaucuggaggaa

SEQ ID NO: 1594497 - RNA, 19 nt, Homo sapiens
  misc_RNA (1)...(19): siRNA sense strand
cauccuacagugcuucuua

SEQ ID NO: 1594498 - RNA, 19 nt, Homo sapiens
  misc_RNA (1)...(19): siRNA sense strand
gcucgucuaugguuuacau

SEQ ID NO: 1594499 - RNA, 19 nt, Homo sapiens
  misc_RNA (1)...(19): siRNA sense strand
gagaauggaacgguuaaug

SEQ ID NO: 1594500 - RNA, 19 nt, Homo sapiens
  misc_RNA (1)...(19): siRNA sense strand
gcuacucuauccaucaaau

SEQ ID NO: 1594501 - RNA, 19 nt, Homo sapiens
  misc_RNA (1)...(19): siRNA sense strand
aaagauuguugcuacucua

SEQ ID NO: 1594502 - RNA, 19 nt, Homo sapiens
  misc_RNA (1)...(19): siRNA sense strand
gcccuuaucuguagacacu

SEQ ID NO: 1594503 - RNA, 19 nt, Homo sapiens
  misc_RNA (1)...(19): siRNA sense strand
uaacacaguggucauugaa

SEQ ID NO: 1594504 - RNA, 19 nt, Homo sapiens
  misc_RNA (1)...(19): siRNA sense strand
agaauggaacgguuaauga

SEQ ID NO: 1594505 - RNA, 19 nt, Homo sapiens
  misc_RNA (1)...(19): siRNA sense strand
agauacagaugagcuggua

SEQ ID NO: 1594506 - RNA, 19 nt, Homo sapiens
  misc_RNA (1)...(19): siRNA sense strand
caaguaugaagaucagauu

SEQ ID NO: 1594507 - RNA, 19 nt, Homo sapiens
  misc_RNA (1)...(19): siRNA sense strand
aaggagaauuuaaggaugu

SEQ ID NO: 1594508 - RNA, 19 nt, Homo sapiens
  misc_RNA (1)...(19): siRNA sense strand
uggaauuccuuggcuguuu

SEQ ID NO: 1594509 - RNA, 19 nt, Homo sapiens
  misc_RNA (1)...(19): siRNA sense strand
ggacuggagcugggagaaa

SEQ ID NO: 1594510 - RNA, 19 nt, Homo sapiens
  misc_RNA (1)...(19): siRNA sense strand
ggauaacacaguggucauu

SEQ ID NO: 1594511 - RNA, 19 nt, Homo sapiens
  misc_RNA (1)...(19): siRNA sense strand
gauaacacaguggucauug

SEQ ID NO: 1594512 - RNA, 19 nt, Homo sapiens
  misc_RNA (1)...(19): siRNA sense strand
cagaauucauugacucuac

SEQ ID NO: 1594513 - RNA, 19 nt, Homo sapiens
  misc_RNA (1)...(19): siRNA sense strand
gagaauuuaaggauguuug

SEQ ID NO: 1594514 - RNA, 19 nt, Homo sapiens
  misc_RNA (1)...(19): siRNA sense strand
aaagaacaacccaaagaau

SEQ ID NO: 1594515 - RNA, 19 nt, Homo sapiens
  misc_RNA (1)...(19): siRNA sense strand
caucaaauggcacaaaugg

SEQ ID NO: 1594516 - RNA, 19 nt, Homo sapiens
  misc_RNA (1)...(19): siRNA sense strand
aagcuguugucugauauaa

SEQ ID NO: 1594517 - RNA, 19 nt, Homo sapiens
  misc_RNA (1)...(19): siRNA sense strand
gaccuuuguugacacugaa

SEQ ID NO: 1594518 - RNA, 19 nt, Homo sapiens
  misc_RNA (1)...(19): siRNA sense strand
guaugaagaucagauuacu

SEQ ID NO: 1594519 - RNA, 19 nt, Homo sapiens
  misc_RNA (1)...(19): siRNA sense strand
uaagugcucgucuaugguu

SEQ ID NO: 1594520 - RNA, 19 nt, Homo sapiens
  misc_RNA (1)...(19): siRNA sense strand
uuccuuggcuguuuauguu

SEQ ID NO: 1594521 - RNA, 19 nt, Homo sapiens
  misc_RNA (1)...(19): siRNA sense strand
auaacacaguggucauuga

SEQ ID NO: 1594522 - RNA, 19 nt, Homo sapiens
  misc_RNA (1)...(19): siRNA sense strand
ggugacaggccucccgauu

SEQ ID NO: 1594523 - RNA, 19 nt, Homo sapiens
  misc_RNA (1)...(19): siRNA sense strand
gaauggaacgguuaaugac

SEQ ID NO: 1594524 - RNA, 19 nt, Homo sapiens
  misc_RNA (1)...(19): siRNA sense strand
cucaagcccuuaucuguag

SEQ ID NO: 1594525 - RNA, 19 nt, Homo sapiens
  misc_RNA (1)...(19): siRNA sense strand
ugaccagacuuuccauugc

SEQ ID NO: 1594526 - RNA, 19 nt, Homo sapiens
  misc_RNA (1)...(19): siRNA sense strand
gagaagggaaaucaauugg

SEQ ID NO: 1594527 - RNA, 19 nt, Homo sapiens
  misc_RNA (1)...(19): siRNA sense strand
cuaagcuguugucugauau

SEQ ID NO: 1594528 - RNA, 19 nt, Homo sapiens
  misc_RNA (1)...(19): siRNA sense strand
aguuugaucuggaggaaga

SEQ ID NO: 1594529 - RNA, 19 nt, Homo sapiens
  misc_RNA (1)...(19): siRNA sense strand
agaccuuuguugacacuga

SEQ ID NO: 1594530 - RNA, 19 nt, Homo sapiens
  misc_RNA (1)...(19): siRNA sense strand
gcagaauucauugacucua

SEQ ID NO: 1594531 - RNA, 19 nt, Homo sapiens
  misc_RNA (1)...(19): siRNA sense strand
ugacuaccuagaagaauau

SEQ ID NO: 1594532 - RNA, 19 nt, Homo sapiens
  misc_RNA (1)...(19): siRNA sense strand
cagcgaaugaacauccuaa

SEQ ID NO: 1594533 - RNA, 19 nt, Homo sapiens
  misc_RNA (1)...(19): siRNA sense strand
ccuuaucuguagacacuug

SEQ ID NO: 1594534 - RNA, 19 nt, Homo sapiens
  misc_RNA (1)...(19): siRNA sense strand
uaagcuguugucugauaua

SEQ ID NO: 1594535 - RNA, 19 nt, Homo sapiens
  misc_RNA (1)...(19): siRNA sense strand
cauacaacccagaccuuug

SEQ ID NO: 1594536 - RNA, 19 nt, Homo sapiens
  misc_RNA (1)...(19): siRNA sense strand
agaacaacccaaagaauac

SEQ ID NO: 1594537 - RNA, 19 nt, Homo sapiens
  misc_RNA (1)...(19): siRNA sense strand
ucauacaacccagaccuuu

SEQ ID NO: 1594538 - RNA, 19 nt, Homo sapiens
  misc_RNA (1)...(19): siRNA sense strand
acaggccucccgauucuuu

SEQ ID NO: 1594539 - RNA, 19 nt, Homo sapiens
  misc_RNA (1)...(19): siRNA sense strand
acaguggucauugaagaua

SEQ ID NO: 1594540 - RNA, 19 nt, Homo sapiens
  misc_RNA (1)...(19): siRNA sense strand
ucaauuggagaaugguuug

SEQ ID NO: 1594541 - RNA, 19 nt, Homo sapiens
  misc_RNA (1)...(19): siRNA sense strand
gacuggagcugggagaaac

SEQ ID NO: 1594542 - RNA, 19 nt, Homo sapiens
  misc_RNA (1)...(19): siRNA sense strand
cauugacucuacugagcaa

SEQ ID NO: 1594543 - RNA, 19 nt, Homo sapiens
  misc_RNA (1)...(19): siRNA sense strand
ucacugacuaccuagaaga

SEQ ID NO: 1594544 - RNA, 19 nt, Homo sapiens
  misc_RNA (1)...(19): siRNA sense strand
cgaaugaacauccuaaacc

SEQ ID NO: 1594545 - RNA, 19 nt, Homo sapiens
  misc_RNA (1)...(19): siRNA sense strand
uguugacacugaagagaau

SEQ ID NO: 1594546 - RNA, 19 nt, Homo sapiens
  misc_RNA (1)...(19): siRNA sense strand
gauuguugcuacucuaucc

SEQ ID NO: 1594547 - RNA, 19 nt, Homo sapiens
  misc_RNA (1)...(19): siRNA sense strand
gaauuaguucagaaacauc

SEQ ID NO: 1594548 - RNA, 19 nt, Homo sapiens
  misc_RNA (1)...(19): siRNA sense strand
ccuagaagaauauccagau

SEQ ID NO: 1594549 - RNA, 19 nt, Homo sapiens
  misc_RNA (1)...(19): siRNA sense strand
caguggucauugaagauau

SEQ ID NO: 1594550 - RNA, 19 nt, Homo sapiens
  misc_RNA (1)...(19): siRNA sense strand
ccaaguaugaagaucagau

SEQ ID NO: 1594551 - RNA, 19 nt, Homo sapiens
  misc_RNA (1)...(19): siRNA sense strand
gcgaaugaacauccuaaac

SEQ ID NO: 1594552 - RNA, 19 nt, Homo sapiens
  misc_RNA (1)...(19): siRNA sense strand
gugacaggccucccgauuc

SEQ ID NO: 1594553 - RNA, 19 nt, Homo sapiens
  misc_RNA (1)...(19): siRNA sense strand
uaggagaagggaaaucaau

SEQ ID NO: 1594554 - RNA, 19 nt, Homo sapiens
  misc_RNA (1)...(19): siRNA sense strand
ggguguaggagaagggaaa

SEQ ID NO: 1594555 - RNA, 19 nt, Homo sapiens
  misc_RNA (1)...(19): siRNA sense strand
uacagugcuucuuagauag

SEQ ID NO: 1594556 - RNA, 19 nt, Homo sapiens
  misc_RNA (1)...(19): siRNA sense strand
gaauuccuuggcuguuuau

SEQ ID NO: 1594557 - RNA, 19 nt, Homo sapiens
  misc_RNA (1)...(19): siRNA sense strand
agaauaccaacgcauccua

SEQ ID NO: 1594558 - RNA, 19 nt, Homo sapiens
  misc_RNA (1)...(19): siRNA sense strand
acccagaccuuuguugaca

SEQ ID NO: 1594559 - RNA, 19 nt, Homo sapiens
  misc_RNA (1)...(19): siRNA sense strand
cuguuuauguuucaaugga

SEQ ID NO: 1594560 - RNA, 19 nt, Homo sapiens
  misc_RNA (1)...(19): siRNA sense strand
uacaguugcacagguguua

SEQ ID NO: 1594561 - RNA, 19 nt, Homo sapiens
  misc_RNA (1)...(19): siRNA sense strand
gaugagcugguauggaucu

SEQ ID NO: 1594562 - RNA, 19 nt, Homo sapiens
  misc_RNA (1)...(19): siRNA sense strand
guaggagaagggaaaucaa

SEQ ID NO: 1594563 - RNA, 19 nt, Homo sapiens
  misc_RNA (1)...(19): siRNA sense strand
caguugcacagguguuaaa

SEQ ID NO: 1594564 - RNA, 19 nt, Homo sapiens
  misc_RNA (1)...(19): siRNA sense strand
ggagaauuuaaggauguuu

SEQ ID NO: 1594565 - RNA, 19 nt, Homo sapiens
  misc_RNA (1)...(19): siRNA sense strand
ugguuuacauacagaagga

SEQ ID NO: 1594566 - RNA, 19 nt, Homo sapiens
  misc_RNA (1)...(19): siRNA sense strand
cuacagugcuucuuagaua

SEQ ID NO: 1594567 - RNA, 19 nt, Homo sapiens
  misc_RNA (1)...(19): siRNA sense strand
ggaauuccuuggcuguuua

SEQ ID NO: 1594568 - RNA, 19 nt, Homo sapiens
  misc_RNA (1)...(19): siRNA sense strand
aaucuaagcuguugucuga

SEQ ID NO: 1594569 - RNA, 19 nt, Homo sapiens
  misc_RNA (1)...(19): siRNA sense strand
gaagagaauggaacgguua

SEQ ID NO: 1594570 - RNA, 19 nt, Homo sapiens
  misc_RNA (1)...(19): siRNA sense strand
gaaaucaauuggagaaugg

SEQ ID NO: 1594571 - RNA, 19 nt, Homo sapiens
  misc_RNA (1)...(19): siRNA sense strand
ggaaaucaauuggagaaug

SEQ ID NO: 1594572 - RNA, 19 nt, Homo sapiens
  misc_RNA (1)...(19): siRNA sense strand
ggaagcagcaucuccuuaa

SEQ ID NO: 1594573 - RNA, 19 nt, Homo sapiens
  misc_RNA (1)...(19): siRNA sense strand
gaagcagcaucuccuuaaa

SEQ ID NO: 1594574 - RNA, 19 nt, Homo sapiens
  misc_RNA (1)...(19): siRNA sense strand
cagaugagcugguauggau

SEQ ID NO: 1594575 - RNA, 19 nt, Homo sapiens
  misc_RNA (1)...(19): siRNA sense strand
acaaauggguguaggagaa

SEQ ID NO: 1594576 - RNA, 19 nt, Homo sapiens
  misc_RNA (1)...(19): siRNA sense strand
ggaggaagauuuugagauu

SEQ ID NO: 1594577 - RNA, 19 nt, Homo sapiens
  misc_RNA (1)...(19): siRNA sense strand
ucuaagcuguugucugaua

SEQ ID NO: 1594578 - RNA, 19 nt, Homo sapiens
  misc_RNA (1)...(19): siRNA sense strand
acacuggccucccuuugua

SEQ ID NO: 1594579 - RNA, 19 nt, Homo sapiens
  misc_RNA (1)...(19): siRNA sense strand
aagaacaacccaaagaaua

SEQ ID NO: 1594580 - RNA, 19 nt, Homo sapiens
  misc_RNA (1)...(19): siRNA sense strand
gcuguugucugauauaagu

SEQ ID NO: 1594581 - RNA, 19 nt, Homo sapiens
  misc_RNA (1)...(19): siRNA sense strand
ggagaagggaaaucaauug

SEQ ID NO: 1594582 - RNA, 19 nt, Homo sapiens
  misc_RNA (1)...(19): siRNA sense strand
gcucaagcccuuaucugua

SEQ ID NO: 1594583 - RNA, 19 nt, Homo sapiens
  misc_RNA (1)...(19): siRNA sense strand
gguguagccuuguucagaa

SEQ ID NO: 1594584 - RNA, 19 nt, Homo sapiens
  misc_RNA (1)...(19): siRNA sense strand
uauaagugcucgucuaugg

SEQ ID NO: 1594585 - RNA, 19 nt, Homo sapiens
  misc_RNA (1)...(19): siRNA sense strand
gugacgagcucaucuucuu

SEQ ID NO: 1594586 - RNA, 19 nt, Homo sapiens
  misc_RNA (1)...(19): siRNA sense strand
gauauaagugcucgucuau

SEQ ID NO: 1594587 - RNA, 19 nt, Homo sapiens
  misc_RNA (1)...(19): siRNA sense strand
aaaccuggauccuucaguu

SEQ ID NO: 1594588 - RNA, 19 nt, Homo sapiens
  misc_RNA (1)...(19): siRNA sense strand
ugauauaagugcucgucua

SEQ ID NO: 1594589 - RNA, 19 nt, Homo sapiens
  misc_RNA (1)...(19): siRNA sense strand
acacaguggucauugaaga

SEQ ID NO: 1594590 - RNA, 19 nt, Homo sapiens
  misc_RNA (1)...(19): siRNA sense strand
gagcugguauggaucuuag

SEQ ID NO: 1594591 - RNA, 19 nt, Homo sapiens
  misc_RNA (1)...(19): siRNA sense strand
gaaugaacauccuaaaccu

SEQ ID NO: 1594592 - RNA, 19 nt, Homo sapiens
  misc_RNA (1)...(19): siRNA sense strand
cugacuaccuagaagaaua

SEQ ID NO: 1594593 - RNA, 19 nt, Homo sapiens
  misc_RNA (1)...(19): siRNA sense strand
ugacaggccucccgauucu

SEQ ID NO: 1594594 - RNA, 19 nt, Homo sapiens
  misc_RNA (1)...(19): siRNA sense strand
uaacugguguagccuuguu

SEQ ID NO: 1594595 - RNA, 19 nt, Homo sapiens
  misc_RNA (1)...(19): siRNA sense strand
gggaagcagcaucuccuua

SEQ ID NO: 1594596 - RNA, 19 nt, Homo sapiens
  misc_RNA (1)...(19): siRNA sense strand
ggaguuugaucuggaggaa

SEQ ID NO: 1594597 - RNA, 19 nt, Homo sapiens
  misc_RNA (1)...(19): siRNA sense strand
cauccuacagugcuucuua

SEQ ID NO: 1594598 - RNA, 19 nt, Homo sapiens
  misc_RNA (1)...(19): siRNA sense strand
gcucgucuaugguuuacau

SEQ ID NO: 1594599 - RNA, 19 nt, Homo sapiens
  misc_RNA (1)...(19): siRNA sense strand
gagaauggaacgguuaaug

SEQ ID NO: 1594600 - RNA, 19 nt, Homo sapiens
  misc_RNA (1)...(19): siRNA sense strand
gcuacucuauccaucaaau

SEQ ID NO: 1594601 - RNA, 19 nt, Homo sapiens
  misc_RNA (1)...(19): siRNA sense strand
aaagauuguugcuacucua

SEQ ID NO: 1594602 - RNA, 19 nt, Homo sapiens
  misc_RNA (1)...(19): siRNA sense strand
gcccuuaucuguagacacu

SEQ ID NO: 1594603 - RNA, 19 nt, Homo sapiens
  misc_RNA (1)...(19): siRNA sense strand
uaacacaguggucauugaa

SEQ ID NO: 1594604 - RNA, 19 nt, Homo sapiens
  misc_RNA (1)...(19): siRNA sense strand
agaauggaacgguuaauga

SEQ ID NO: 1594605 - RNA, 19 nt, Homo sapiens
  misc_RNA (1)...(19): siRNA sense strand
agauacagaugagcuggua

SEQ ID NO: 1594606 - RNA, 19 nt, Homo sapiens
  misc_RNA (1)...(19): siRNA sense strand
caaguaugaagaucagauu

SEQ ID NO: 1594607 - RNA, 19 nt, Homo sapiens
  misc_RNA (1)...(19): siRNA sense strand
aaggagaauuuaaggaugu

SEQ ID NO: 1594608 - RNA, 19 nt, Homo sapiens
  misc_RNA (1)...(19): siRNA sense strand
uggaauuccuuggcuguuu

SEQ ID NO: 1594609 - RNA, 19 nt, Homo sapiens
  misc_RNA (1)...(19): siRNA sense strand
ggacuggagcugggagaaa

SEQ ID NO: 1594610 - RNA, 19 nt, Homo sapiens
  misc_RNA (1)...(19): siRNA sense strand
ggauaacacaguggucauu

SEQ ID NO: 1594611 - RNA, 19 nt, Homo sapiens
  misc_RNA (1)...(19): siRNA sense strand
gauaacacaguggucauug

SEQ ID NO: 1594612 - RNA, 19 nt, Homo sapiens
  misc_RNA (1)...(19): siRNA sense strand
cagaauucauugacucuac

SEQ ID NO: 1594613 - RNA, 19 nt, Homo sapiens
  misc_RNA (1)...(19): siRNA sense strand
gagaauuuaaggauguuug

SEQ ID NO: 1594614 - RNA, 19 nt, Homo sapiens
  misc_RNA (1)...(19): siRNA sense strand
aaagaacaacccaaagaau

SEQ ID NO: 1594615 - RNA, 19 nt, Homo sapiens
  misc_RNA (1)...(19): siRNA sense strand
caucaaauggcacaaaugg

SEQ ID NO: 1594616 - RNA, 19 nt, Homo sapiens
  misc_RNA (1)...(19): siRNA sense strand
aagcuguugucugauauaa

SEQ ID NO: 1594617 - RNA, 19 nt, Homo sapiens
  misc_RNA (1)...(19): siRNA sense strand
gaccuuuguugacacugaa

SEQ ID NO: 1594618 - RNA, 19 nt, Homo sapiens
  misc_RNA (1)...(19): siRNA sense strand
guaugaagaucagauuacu

SEQ ID NO: 1594619 - RNA, 19 nt, Homo sapiens
  misc_RNA (1)...(19): siRNA sense strand
uaagugcucgucuaugguu

SEQ ID NO: 1594620 - RNA, 19 nt, Homo sapiens
  misc_RNA (1)...(19): siRNA sense strand
uuccuuggcuguuuauguu

SEQ ID NO: 1594621 - RNA, 19 nt, Homo sapiens
  misc_RNA (1)...(19): siRNA sense strand
auaacacaguggucauuga

SEQ ID NO: 1594622 - RNA, 19 nt, Homo sapiens
  misc_RNA (1)...(19): siRNA sense strand
ggugacaggccucccgauu

SEQ ID NO: 1594623 - RNA, 19 nt, Homo sapiens
  misc_RNA (1)...(19): siRNA sense strand
gaauggaacgguuaaugac

SEQ ID NO: 1594624 - RNA, 19 nt, Homo sapiens
  misc_RNA (1)...(19): siRNA sense strand
cucaagcccuuaucuguag

SEQ ID NO: 1594625 - RNA, 19 nt, Homo sapiens
  misc_RNA (1)...(19): siRNA sense strand
ugaccagacuuuccauugc

SEQ ID NO: 1594626 - RNA, 19 nt, Homo sapiens
  misc_RNA (1)...(19): siRNA sense strand
gagaagggaaaucaauugg

SEQ ID NO: 1594627 - RNA, 19 nt, Homo sapiens
  misc_RNA (1)...(19): siRNA sense strand
cuaagcuguugucugauau

SEQ ID NO: 1594628 - RNA, 19 nt, Homo sapiens
  misc_RNA (1)...(19): siRNA sense strand
aguuugaucuggaggaaga

SEQ ID NO: 1594629 - RNA, 19 nt, Homo sapiens
  misc_RNA (1)...(19): siRNA sense strand
agaccuuuguugacacuga

SEQ ID NO: 1594630 - RNA, 19 nt, Homo sapiens
  misc_RNA (1)...(19): siRNA sense strand
gcagaauucauugacucua

SEQ ID NO: 1594631 - RNA, 19 nt, Homo sapiens
  misc_RNA (1)...(19): siRNA sense strand
ugacuaccuagaagaauau

SEQ ID NO: 1594632 - RNA, 19 nt, Homo sapiens
  misc_RNA (1)...(19): siRNA sense strand
cagcgaaugaacauccuaa

SEQ ID NO: 1594633 - RNA, 19 nt, Homo sapiens
  misc_RNA (1)...(19): siRNA sense strand
ccuuaucuguagacacuug

SEQ ID NO: 1594634 - RNA, 19 nt, Homo sapiens
  misc_RNA (1)...(19): siRNA sense strand
uaagcuguugucugauaua

SEQ ID NO: 1594635 - RNA, 19 nt, Homo sapiens
  misc_RNA (1)...(19): siRNA sense strand
cauacaacccagaccuuug

SEQ ID NO: 1594636 - RNA, 19 nt, Homo sapiens
  misc_RNA (1)...(19): siRNA sense strand
agaacaacccaaagaauac

SEQ ID NO: 1594637 - RNA, 19 nt, Homo sapiens
  misc_RNA (1)...(19): siRNA sense strand
ucauacaacccagaccuuu

SEQ ID NO: 1594638 - RNA, 19 nt, Homo sapiens
  misc_RNA (1)...(19): siRNA sense strand
acaggccucccgauucuuu

SEQ ID NO: 1594639 - RNA, 19 nt, Homo sapiens
  misc_RNA (1)...(19): siRNA sense strand
acaguggucauugaagaua

SEQ ID NO: 1594640 - RNA, 19 nt, Homo sapiens
  misc_RNA (1)...(19): siRNA sense strand
ucaauuggagaaugguuug

SEQ ID NO: 1594641 - RNA, 19 nt, Homo sapiens
  misc_RNA (1)...(19): siRNA sense strand
gacuggagcugggagaaac

SEQ ID NO: 1594642 - RNA, 19 nt, Homo sapiens
  misc_RNA (1)...(19): siRNA sense strand
cauugacucuacugagcaa

SEQ ID NO: 1594643 - RNA, 19 nt, Homo sapiens
  misc_RNA (1)...(19): siRNA sense strand
ucacugacuaccuagaaga

SEQ ID NO: 1594644 - RNA, 19 nt, Homo sapiens
  misc_RNA (1)...(19): siRNA sense strand
cgaaugaacauccuaaacc

SEQ ID NO: 1594645 - RNA, 19 nt, Homo sapiens
  misc_RNA (1)...(19): siRNA sense strand
uguugacacugaagagaau

SEQ ID NO: 1594646 - RNA, 19 nt, Homo sapiens
  misc_RNA (1)...(19): siRNA sense strand
gauuguugcuacucuaucc

SEQ ID NO: 1594647 - RNA, 19 nt, Homo sapiens
  misc_RNA (1)...(19): siRNA sense strand
gaauuaguucagaaacauc

SEQ ID NO: 1594648 - RNA, 19 nt, Homo sapiens
  misc_RNA (1)...(19): siRNA sense strand
ccuagaagaauauccagau

SEQ ID NO: 1594649 - RNA, 19 nt, Homo sapiens
  misc_RNA (1)...(19): siRNA sense strand
caguggucauugaagauau

SEQ ID NO: 1594650 - RNA, 19 nt, Homo sapiens
  misc_RNA (1)...(19): siRNA sense strand
ccaaguaugaagaucagau

SEQ ID NO: 1594651 - RNA, 19 nt, Homo sapiens
  misc_RNA (1)...(19): siRNA sense strand
gcgaaugaacauccuaaac

SEQ ID NO: 1594652 - RNA, 19 nt, Homo sapiens
  misc_RNA (1)...(19): siRNA sense strand
gugacaggccucccgauuc

SEQ ID NO: 1594653 - RNA, 19 nt, Homo sapiens
  misc_RNA (1)...(19): siRNA sense strand
uaggagaagggaaaucaau

SEQ ID NO: 1594654 - RNA, 19 nt, Homo sapiens
  misc_RNA (1)...(19): siRNA sense strand
ggguguaggagaagggaaa

SEQ ID NO: 1594655 - RNA, 19 nt, Homo sapiens
  misc_RNA (1)...(19): siRNA sense strand
uacagugcuucuuagauag

SEQ ID NO: 1594656 - RNA, 19 nt, Homo sapiens
  misc_RNA (1)...(19): siRNA sense strand
gaauuccuuggcuguuuau

SEQ ID NO: 1594657 - RNA, 19 nt, Homo sapiens
  misc_RNA (1)...(19): siRNA sense strand
agaauaccaacgcauccua

SEQ ID NO: 1594658 - RNA, 19 nt, Homo sapiens
  misc_RNA (1)...(19): siRNA sense strand
acccagaccuuuguugaca

SEQ ID NO: 1594659 - RNA, 19 nt, Homo sapiens
  misc_RNA (1)...(19): siRNA sense strand
cuguuuauguuucaaugga

SEQ ID NO: 1594660 - RNA, 19 nt, Homo sapiens
  misc_RNA (1)...(19): siRNA sense strand
uacaguugcacagguguua

SEQ ID NO: 1594661 - RNA, 19 nt, Homo sapiens
  misc_RNA (1)...(19): siRNA sense strand
gaugagcugguauggaucu

SEQ ID NO: 1594662 - RNA, 19 nt, Homo sapiens
  misc_RNA (1)...(19): siRNA sense strand
guaggagaagggaaaucaa

SEQ ID NO: 1594663 - RNA, 19 nt, Homo sapiens
  misc_RNA (1)...(19): siRNA sense strand
caguugcacagguguuaaa

SEQ ID NO: 1594664 - RNA, 19 nt, Homo sapiens
  misc_RNA (1)...(19): siRNA sense strand
ggagaauuuaaggauguuu

SEQ ID NO: 1594665 - RNA, 19 nt, Homo sapiens
  misc_RNA (1)...(19): siRNA sense strand
ugguuuacauacagaagga

SEQ ID NO: 1594666 - RNA, 19 nt, Homo sapiens
  misc_RNA (1)...(19): siRNA sense strand
cuacagugcuucuuagaua

SEQ ID NO: 1594667 - RNA, 19 nt, Homo sapiens
  misc_RNA (1)...(19): siRNA sense strand
ggaauuccuuggcuguuua

SEQ ID NO: 1594668 - RNA, 19 nt, Homo sapiens
  misc_RNA (1)...(19): siRNA sense strand
gaagagaauggaacgguua

SEQ ID NO: 1594669 - RNA, 19 nt, Homo sapiens
  misc_RNA (1)...(19): siRNA sense strand
gaaaucaauuggagaaugg

SEQ ID NO: 1594670 - RNA, 19 nt, Homo sapiens
  misc_RNA (1)...(19): siRNA sense strand
ggaaaucaauuggagaaug

SEQ ID NO: 1594671 - RNA, 19 nt, Homo sapiens
  misc_RNA (1)...(19): siRNA sense strand
acaaauggguguaggagaa

SEQ ID NO: 1594672 - RNA, 19 nt, Homo sapiens
  misc_RNA (1)...(19): siRNA sense strand
ggaggaagauuuugagauu

SEQ ID NO: 1594673 - RNA, 19 nt, Homo sapiens
  misc_RNA (1)...(19): siRNA sense strand
acacuggccucccuuugua

SEQ ID NO: 1594674 - RNA, 19 nt, Homo sapiens
  misc_RNA (1)...(19): siRNA sense strand
aagaacaacccaaagaaua

SEQ ID NO: 1594675 - RNA, 19 nt, Homo sapiens
  misc_RNA (1)...(19): siRNA sense strand
ggagaagggaaaucaauug

SEQ ID NO: 1594676 - RNA, 19 nt, Homo sapiens
  misc_RNA (1)...(19): siRNA sense strand
gcucaagcccuuaucugua

SEQ ID NO: 1594677 - RNA, 19 nt, Homo sapiens
  misc_RNA (1)...(19): siRNA sense strand
gguguagccuuguucagaa

SEQ ID NO: 1594678 - RNA, 19 nt, Homo sapiens
  misc_RNA (1)...(19): siRNA sense strand
gugacgagcucaucuucuu

SEQ ID NO: 1594679 - RNA, 19 nt, Homo sapiens
  misc_RNA (1)...(19): siRNA sense strand
aaaccuggauccuucaguu

SEQ ID NO: 1594680 - RNA, 19 nt, Homo sapiens
  misc_RNA (1)...(19): siRNA sense strand
acacaguggucauugaaga

SEQ ID NO: 1594681 - RNA, 19 nt, Homo sapiens
  misc_RNA (1)...(19): siRNA sense strand
gaaugaacauccuaaaccu

SEQ ID NO: 1594682 - RNA, 19 nt, Homo sapiens
  misc_RNA (1)...(19): siRNA sense strand
ugacaggccucccgauucu

SEQ ID NO: 1594683 - RNA, 19 nt, Homo sapiens
  misc_RNA (1)...(19): siRNA sense strand
uaacugguguagccuuguu

SEQ ID NO: 1594684 - RNA, 19 nt, Homo sapiens
  misc_RNA (1)...(19): siRNA sense strand
ggaguuugaucuggaggaa

SEQ ID NO: 1594685 - RNA, 19 nt, Homo sapiens
  misc_RNA (1)...(19): siRNA sense strand
cauccuacagugcuucuua

SEQ ID NO: 1594686 - RNA, 19 nt, Homo sapiens
  misc_RNA (1)...(19): siRNA sense strand
aaagauuguugcuacucua

SEQ ID NO: 1594687 - RNA, 19 nt, Homo sapiens
  misc_RNA (1)...(19): siRNA sense strand
gcccuuaucuguagacacu

SEQ ID NO: 1594688 - RNA, 19 nt, Homo sapiens
  misc_RNA (1)...(19): siRNA sense strand
gagaauggaacgguuaaug

SEQ ID NO: 1594689 - RNA, 19 nt, Homo sapiens
  misc_RNA (1)...(19): siRNA sense strand
gcuacucuauccaucaaau

SEQ ID NO: 1594690 - RNA, 19 nt, Homo sapiens
  misc_RNA (1)...(19): siRNA sense strand
uaacacaguggucauugaa

SEQ ID NO: 1594691 - RNA, 19 nt, Homo sapiens
  misc_RNA (1)...(19): siRNA sense strand
agaauggaacgguuaauga

SEQ ID NO: 1594692 - RNA, 19 nt, Homo sapiens
  misc_RNA (1)...(19): siRNA sense strand
uggaauuccuuggcuguuu

SEQ ID NO: 1594693 - RNA, 19 nt, Homo sapiens
  misc_RNA (1)...(19): siRNA sense strand
aaggagaauuuaaggaugu

SEQ ID NO: 1594694 - RNA, 19 nt, Homo sapiens
  misc_RNA (1)...(19): siRNA sense strand
ggauaacacaguggucauu

SEQ ID NO: 1594695 - RNA, 19 nt, Homo sapiens
  misc_RNA (1)...(19): siRNA sense strand
ggacuggagcugggagaaa

SEQ ID NO: 1594696 - RNA, 19 nt, Homo sapiens
  misc_RNA (1)...(19): siRNA sense strand
gauaacacaguggucauug

SEQ ID NO: 1594697 - RNA, 19 nt, Homo sapiens
  misc_RNA (1)...(19): siRNA sense strand
cagaauucauugacucuac

SEQ ID NO: 1594698 - RNA, 19 nt, Homo sapiens
  misc_RNA (1)...(19): siRNA sense strand
gagaauuuaaggauguuug

SEQ ID NO: 1594699 - RNA, 19 nt, Homo sapiens
  misc_RNA (1)...(19): siRNA sense strand
caucaaauggcacaaaugg

SEQ ID NO: 1594700 - RNA, 19 nt, Homo sapiens
  misc_RNA (1)...(19): siRNA sense strand
aaagaacaacccaaagaau

SEQ ID NO: 1594701 - RNA, 19 nt, Homo sapiens
  misc_RNA (1)...(19): siRNA sense strand
gaccuuuguugacacugaa

SEQ ID NO: 1594702 - RNA, 19 nt, Homo sapiens
  misc_RNA (1)...(19): siRNA sense strand
uuccuuggcuguuuauguu

SEQ ID NO: 1594703 - RNA, 19 nt, Homo sapiens
  misc_RNA (1)...(19): siRNA sense strand
auaacacaguggucauuga

SEQ ID NO: 1594704 - RNA, 19 nt, Homo sapiens
  misc_RNA (1)...(19): siRNA sense strand
ggugacaggccucccgauu

SEQ ID NO: 1594705 - RNA, 19 nt, Homo sapiens
  misc_RNA (1)...(19): siRNA sense strand
gaauggaacgguuaaugac

SEQ ID NO: 1594706 - RNA, 19 nt, Homo sapiens
  misc_RNA (1)...(19): siRNA sense strand
gagaagggaaaucaauugg

SEQ ID NO: 1594707 - RNA, 19 nt, Homo sapiens
  misc_RNA (1)...(19): siRNA sense strand
ugaccagacuuuccauugc

SEQ ID NO: 1594708 - RNA, 19 nt, Homo sapiens
  misc_RNA (1)...(19): siRNA sense strand
cucaagcccuuaucuguag

SEQ ID NO: 1594709 - RNA, 19 nt, Homo sapiens
  misc_RNA (1)...(19): siRNA sense strand
agaccuuuguugacacuga

SEQ ID NO: 1594710 - RNA, 19 nt, Homo sapiens
  misc_RNA (1)...(19): siRNA sense strand
aguuugaucuggaggaaga

SEQ ID NO: 1594711 - RNA, 19 nt, Homo sapiens
  misc_RNA (1)...(19): siRNA sense strand
gcagaauucauugacucua

SEQ ID NO: 1594712 - RNA, 19 nt, Homo sapiens
  misc_RNA (1)...(19): siRNA sense strand
cagcgaaugaacauccuaa

SEQ ID NO: 1594713 - RNA, 19 nt, Homo sapiens
  misc_RNA (1)...(19): siRNA sense strand
ccuuaucuguagacacuug

SEQ ID NO: 1594714 - RNA, 19 nt, Homo sapiens
  misc_RNA (1)...(19): siRNA sense strand
cauacaacccagaccuuug

SEQ ID NO: 1594715 - RNA, 19 nt, Homo sapiens
  misc_RNA (1)...(19): siRNA sense strand
ucaauuggagaaugguuug

SEQ ID NO: 1594716 - RNA, 19 nt, Homo sapiens
  misc_RNA (1)...(19): siRNA sense strand
agaacaacccaaagaauac

SEQ ID NO: 1594717 - RNA, 19 nt, Homo sapiens
  misc_RNA (1)...(19): siRNA sense strand
ucauacaacccagaccuuu

SEQ ID NO: 1594718 - RNA, 19 nt, Homo sapiens
  misc_RNA (1)...(19): siRNA sense strand
acaggccucccgauucuuu

SEQ ID NO: 1594719 - RNA, 19 nt, Homo sapiens
  misc_RNA (1)...(19): siRNA sense strand
acaguggucauugaagaua

SEQ ID NO: 1594720 - RNA, 19 nt, Homo sapiens
  misc_RNA (1)...(19): siRNA sense strand
gacuggagcugggagaaac

SEQ ID NO: 1594721 - RNA, 19 nt, Homo sapiens
  misc_RNA (1)...(19): siRNA sense strand
cauugacucuacugagcaa

SEQ ID NO: 1594722 - RNA, 19 nt, Homo sapiens
  misc_RNA (1)...(19): siRNA sense strand
cgaaugaacauccuaaacc

SEQ ID NO: 1594723 - RNA, 19 nt, Homo sapiens
  misc_RNA (1)...(19): siRNA sense strand
uguugacacugaagagaau

SEQ ID NO: 1594724 - RNA, 19 nt, Homo sapiens
  misc_RNA (1)...(19): siRNA sense strand
caguggucauugaagauau

SEQ ID NO: 1594725 - RNA, 19 nt, Homo sapiens
  misc_RNA (1)...(19): siRNA sense strand
gaauuaguucagaaacauc

SEQ ID NO: 1594726 - RNA, 19 nt, Homo sapiens
  misc_RNA (1)...(19): siRNA sense strand
gauuguugcuacucuaucc

SEQ ID NO: 1594727 - RNA, 19 nt, Homo sapiens
  misc_RNA (1)...(19): siRNA sense strand
uaggagaagggaaaucaau

SEQ ID NO: 1594728 - RNA, 19 nt, Homo sapiens
  misc_RNA (1)...(19): siRNA sense strand
gcgaaugaacauccuaaac

SEQ ID NO: 1594729 - RNA, 19 nt, Homo sapiens
  misc_RNA (1)...(19): siRNA sense strand
gugacaggccucccgauuc

SEQ ID NO: 1594730 - RNA, 19 nt, Homo sapiens
  misc_RNA (1)...(19): siRNA sense strand
ggguguaggagaagggaaa

SEQ ID NO: 1594731 - RNA, 19 nt, Homo sapiens
  misc_RNA (1)...(19): siRNA sense strand
gaauuccuuggcuguuuau

SEQ ID NO: 1594732 - RNA, 19 nt, Homo sapiens
  misc_RNA (1)...(19): siRNA sense strand
uacagugcuucuuagauag

SEQ ID NO: 1594733 - RNA, 19 nt, Homo sapiens
  misc_RNA (1)...(19): siRNA sense strand
uacaguugcacagguguua

SEQ ID NO: 1594734 - RNA, 19 nt, Homo sapiens
  misc_RNA (1)...(19): siRNA sense strand
acccagaccuuuguugaca

SEQ ID NO: 1594735 - RNA, 19 nt, Homo sapiens
  misc_RNA (1)...(19): siRNA sense strand
agaauaccaacgcauccua

SEQ ID NO: 1594736 - RNA, 19 nt, Homo sapiens
  misc_RNA (1)...(19): siRNA sense strand
cuguuuauguuucaaugga

SEQ ID NO: 1594737 - RNA, 19 nt, Homo sapiens
  misc_RNA (1)...(19): siRNA sense strand
guaggagaagggaaaucaa

SEQ ID NO: 1594738 - RNA, 19 nt, Homo sapiens
  misc_RNA (1)...(19): siRNA sense strand
caguugcacagguguuaaa

SEQ ID NO: 1594739 - RNA, 19 nt, Homo sapiens
  misc_RNA (1)...(19): siRNA sense strand
ggagaauuuaaggauguuu

SEQ ID NO: 1594740 - RNA, 19 nt, Homo sapiens
  misc_RNA (1)...(19): siRNA sense strand
uugcuacucuauccaucaa

SEQ ID NO: 1594741 - RNA, 19 nt, Homo sapiens
  misc_RNA (1)...(19): siRNA sense strand
gguccaagcuaccuuuaug

SEQ ID NO: 1594742 - RNA, 19 nt, Homo sapiens
  misc_RNA (1)...(19): siRNA sense strand
aaauacagaucccaagcua

SEQ ID NO: 1594743 - RNA, 19 nt, Homo sapiens
  misc_RNA (1)...(19): siRNA sense strand
gagaauaucaggaaugaag

SEQ ID NO: 1594744 - RNA, 19 nt, Homo sapiens
  misc_RNA (1)...(19): siRNA sense strand
ggaccagucuguguauuuc

SEQ ID NO: 1594745 - RNA, 19 nt, Homo sapiens
  misc_RNA (1)...(19): siRNA sense strand
gaggagccauaugagaaua

SEQ ID NO: 1594746 - RNA, 19 nt, Homo sapiens
  misc_RNA (1)...(19): siRNA sense strand
acacagaggagccauauga

SEQ ID NO: 1594747 - RNA, 19 nt, Homo sapiens
  misc_RNA (1)...(19): siRNA sense strand
ggacagagggucagaagag

SEQ ID NO: 1594748 - RNA, 19 nt, Homo sapiens
  misc_RNA (1)...(19): siRNA sense strand
ggaccaaacucuccaucac

SEQ ID NO: 1594749 - RNA, 19 nt, Homo sapiens
  misc_RNA (1)...(19): siRNA sense strand
auacagaucccaagcuaaa

SEQ ID NO: 1594750 - RNA, 19 nt, Homo sapiens
  misc_RNA (1)...(19): siRNA sense strand
cagaggagccauaugagaa

SEQ ID NO: 1594751 - RNA, 19 nt, Homo sapiens
  misc_RNA (1)...(19): siRNA sense strand
uaucaggaaugaaggacaa

SEQ ID NO: 1594752 - RNA, 19 nt, Homo sapiens
  misc_RNA (1)...(19): siRNA sense strand
gacccuguacucugucuua

SEQ ID NO: 1594753 - RNA, 19 nt, Homo sapiens
  misc_RNA (1)...(19): siRNA sense strand
ugaaccggcucuuucugaa

SEQ ID NO: 1594754 - RNA, 19 nt, Homo sapiens
  misc_RNA (1)...(19): siRNA sense strand
gaacgagacccuguacucu

SEQ ID NO: 1594755 - RNA, 19 nt, Homo sapiens
  misc_RNA (1)...(19): siRNA sense strand
ccuguacucugucuuaaag

SEQ ID NO: 1594756 - RNA, 19 nt, Homo sapiens
  misc_RNA (1)...(19): siRNA sense strand
gaauaucaggaaugaagga

SEQ ID NO: 1594757 - RNA, 19 nt, Homo sapiens
  misc_RNA (1)...(19): siRNA sense strand
guguauuucugccgaguug

SEQ ID NO: 1594758 - RNA, 19 nt, Homo sapiens
  misc_RNA (1)...(19): siRNA sense strand
gcaggaccagucuguguau

SEQ ID NO: 1594759 - RNA, 19 nt, Homo sapiens
  misc_RNA (1)...(19): siRNA sense strand
gugaaccggcucuuucuga

SEQ ID NO: 1594760 - RNA, 19 nt, Homo sapiens
  misc_RNA (1)...(19): siRNA sense strand
aaacacagaggagccauau

SEQ ID NO: 1594761 - RNA, 19 nt, Homo sapiens
  misc_RNA (1)...(19): siRNA sense strand
augagaauaucaggaauga

SEQ ID NO: 1594762 - RNA, 19 nt, Homo sapiens
  misc_RNA (1)...(19): siRNA sense strand
gaaauccccuucuccuucu

SEQ ID NO: 1594763 - RNA, 19 nt, Homo sapiens
  misc_RNA (1)...(19): siRNA sense strand
ucuccaaccugcagaagca

SEQ ID NO: 1594764 - RNA, 19 nt, Homo sapiens
  misc_RNA (1)...(19): siRNA sense strand
acgagacccuguacucugu

SEQ ID NO: 1594765 - RNA, 19 nt, Homo sapiens
  misc_RNA (1)...(19): siRNA sense strand
uaugugaaccggcucuuuc

SEQ ID NO: 1594766 - RNA, 19 nt, Homo sapiens
  misc_RNA (1)...(19): siRNA sense strand
gcagaagcaggaccagucu

SEQ ID NO: 1594767 - RNA, 19 nt, Homo sapiens
  misc_RNA (1)...(19): siRNA sense strand
ggguggcucuguggaaauc

SEQ ID NO: 1594768 - RNA, 19 nt, Homo sapiens
  misc_RNA (1)...(19): siRNA sense strand
acagaggagccauaugaga

SEQ ID NO: 1594769 - RNA, 19 nt, Homo sapiens
  misc_RNA (1)...(19): siRNA sense strand
gcucccgacgugagaauau

SEQ ID NO: 1594770 - RNA, 19 nt, Homo sapiens
  misc_RNA (1)...(19): siRNA sense strand
gaaugaaggacaaaauaca

SEQ ID NO: 1594771 - RNA, 19 nt, Homo sapiens
  misc_RNA (1)...(19): siRNA sense strand
ccacaggcaguccuucuac

SEQ ID NO: 1594772 - RNA, 19 nt, Homo sapiens
  misc_RNA (1)...(19): siRNA sense strand
gcauuucugcagccuagug

SEQ ID NO: 1594773 - RNA, 19 nt, Homo sapiens
  misc_RNA (1)...(19): siRNA sense strand
uaugagaauaucaggaaug

SEQ ID NO: 1594774 - RNA, 19 nt, Homo sapiens
  misc_RNA (1)...(19): siRNA sense strand
caggaccagucuguguauu

SEQ ID NO: 1594775 - RNA, 19 nt, Homo sapiens
  misc_RNA (1)...(19): siRNA sense strand
gaaccggcucuuucugaac

SEQ ID NO: 1594776 - RNA, 19 nt, Homo sapiens
  misc_RNA (1)...(19): siRNA sense strand
gggaccaaacucuccauca

SEQ ID NO: 1594777 - RNA, 19 nt, Homo sapiens
  misc_RNA (1)...(19): siRNA sense strand
caggaucugguccaagcua

SEQ ID NO: 1594778 - RNA, 19 nt, Homo sapiens
  misc_RNA (1)...(19): siRNA sense strand
gguccaagcuaccuuuaug

SEQ ID NO: 1594779 - RNA, 19 nt, Homo sapiens
  misc_RNA (1)...(19): siRNA sense strand
aaauacagaucccaagcua

SEQ ID NO: 1594780 - RNA, 19 nt, Homo sapiens
  misc_RNA (1)...(19): siRNA sense strand
gagaauaucaggaaugaag

SEQ ID NO: 1594781 - RNA, 19 nt, Homo sapiens
  misc_RNA (1)...(19): siRNA sense strand
ggaccagucuguguauuuc

SEQ ID NO: 1594782 - RNA, 19 nt, Homo sapiens
  misc_RNA (1)...(19): siRNA sense strand
gaggagccauaugagaaua

SEQ ID NO: 1594783 - RNA, 19 nt, Homo sapiens
  misc_RNA (1)...(19): siRNA sense strand
acacagaggagccauauga

SEQ ID NO: 1594784 - RNA, 19 nt, Homo sapiens
  misc_RNA (1)...(19): siRNA sense strand
ggacagagggucagaagag

SEQ ID NO: 1594785 - RNA, 19 nt, Homo sapiens
  misc_RNA (1)...(19): siRNA sense strand
ggaccaaacucuccaucac

SEQ ID NO: 1594786 - RNA, 19 nt, Homo sapiens
  misc_RNA (1)...(19): siRNA sense strand
auacagaucccaagcuaaa

SEQ ID NO: 1594787 - RNA, 19 nt, Homo sapiens
  misc_RNA (1)...(19): siRNA sense strand
cagaggagccauaugagaa

SEQ ID NO: 1594788 - RNA, 19 nt, Homo sapiens
  misc_RNA (1)...(19): siRNA sense strand
uaucaggaaugaaggacaa

SEQ ID NO: 1594789 - RNA, 19 nt, Homo sapiens
  misc_RNA (1)...(19): siRNA sense strand
gacccuguacucugucuua

SEQ ID NO: 1594790 - RNA, 19 nt, Homo sapiens
  misc_RNA (1)...(19): siRNA sense strand
ugaaccggcucuuucugaa

SEQ ID NO: 1594791 - RNA, 19 nt, Homo sapiens
  misc_RNA (1)...(19): siRNA sense strand
gaacgagacccuguacucu

SEQ ID NO: 1594792 - RNA, 19 nt, Homo sapiens
  misc_RNA (1)...(19): siRNA sense strand
ccuguacucugucuuaaag

SEQ ID NO: 1594793 - RNA, 19 nt, Homo sapiens
  misc_RNA (1)...(19): siRNA sense strand
gaauaucaggaaugaagga

SEQ ID NO: 1594794 - RNA, 19 nt, Homo sapiens
  misc_RNA (1)...(19): siRNA sense strand
guguauuucugccgaguug

SEQ ID NO: 1594795 - RNA, 19 nt, Homo sapiens
  misc_RNA (1)...(19): siRNA sense strand
gcaggaccagucuguguau

SEQ ID NO: 1594796 - RNA, 19 nt, Homo sapiens
  misc_RNA (1)...(19): siRNA sense strand
gugaaccggcucuuucuga

SEQ ID NO: 1594797 - RNA, 19 nt, Homo sapiens
  misc_RNA (1)...(19): siRNA sense strand
aaacacagaggagccauau

SEQ ID NO: 1594798 - RNA, 19 nt, Homo sapiens
  misc_RNA (1)...(19): siRNA sense strand
augagaauaucaggaauga

SEQ ID NO: 1594799 - RNA, 19 nt, Homo sapiens
  misc_RNA (1)...(19): siRNA sense strand
gaaauccccuucuccuucu

SEQ ID NO: 1594800 - RNA, 19 nt, Homo sapiens
  misc_RNA (1)...(19): siRNA sense strand
ucuccaaccugcagaagca

SEQ ID NO: 1594801 - RNA, 19 nt, Homo sapiens
  misc_RNA (1)...(19): siRNA sense strand
acgagacccuguacucugu

SEQ ID NO: 1594802 - RNA, 19 nt, Homo sapiens
  misc_RNA (1)...(19): siRNA sense strand
uaugugaaccggcucuuuc

SEQ ID NO: 1594803 - RNA, 19 nt, Homo sapiens
  misc_RNA (1)...(19): siRNA sense strand
gcagaagcaggaccagucu

SEQ ID NO: 1594804 - RNA, 19 nt, Homo sapiens
  misc_RNA (1)...(19): siRNA sense strand
ggguggcucuguggaaauc

SEQ ID NO: 1594805 - RNA, 19 nt, Homo sapiens
  misc_RNA (1)...(19): siRNA sense strand
acagaggagccauaugaga

SEQ ID NO: 1594806 - RNA, 19 nt, Homo sapiens
  misc_RNA (1)...(19): siRNA sense strand
gcucccgacgugagaauau

SEQ ID NO: 1594807 - RNA, 19 nt, Homo sapiens
  misc_RNA (1)...(19): siRNA sense strand
gaaugaaggacaaaauaca

SEQ ID NO: 1594808 - RNA, 19 nt, Homo sapiens
  misc_RNA (1)...(19): siRNA sense strand
ccacaggcaguccuucuac

SEQ ID NO: 1594809 - RNA, 19 nt, Homo sapiens
  misc_RNA (1)...(19): siRNA sense strand
gcauuucugcagccuagug

SEQ ID NO: 1594810 - RNA, 19 nt, Homo sapiens
  misc_RNA (1)...(19): siRNA sense strand
uaugagaauaucaggaaug

SEQ ID NO: 1594811 - RNA, 19 nt, Homo sapiens
  misc_RNA (1)...(19): siRNA sense strand
caggaccagucuguguauu

SEQ ID NO: 1594812 - RNA, 19 nt, Homo sapiens
  misc_RNA (1)...(19): siRNA sense strand
gaaccggcucuuucugaac

SEQ ID NO: 1594813 - RNA, 19 nt, Homo sapiens
  misc_RNA (1)...(19): siRNA sense strand
gggaccaaacucuccauca

SEQ ID NO: 1594814 - RNA, 19 nt, Homo sapiens
  misc_RNA (1)...(19): siRNA sense strand
caggaucugguccaagcua

SEQ ID NO: 1594815 - RNA, 19 nt, Homo sapiens
  misc_RNA (1)...(19): siRNA sense strand
gguccaagcuaccuuuaug

SEQ ID NO: 1594816 - RNA, 19 nt, Homo sapiens
  misc_RNA (1)...(19): siRNA sense strand
aaauacagaucccaagcua

SEQ ID NO: 1594817 - RNA, 19 nt, Homo sapiens
  misc_RNA (1)...(19): siRNA sense strand
gagaauaucaggaaugaag

SEQ ID NO: 1594818 - RNA, 19 nt, Homo sapiens
  misc_RNA (1)...(19): siRNA sense strand
ggaccagucuguguauuuc

SEQ ID NO: 1594819 - RNA, 19 nt, Homo sapiens
  misc_RNA (1)...(19): siRNA sense strand
gaggagccauaugagaaua

SEQ ID NO: 1594820 - RNA, 19 nt, Homo sapiens
  misc_RNA (1)...(19): siRNA sense strand
acacagaggagccauauga

SEQ ID NO: 1594821 - RNA, 19 nt, Homo sapiens
  misc_RNA (1)...(19): siRNA sense strand
ggacagagggucagaagag

SEQ ID NO: 1594822 - RNA, 19 nt, Homo sapiens
  misc_RNA (1)...(19): siRNA sense strand
ggaccaaacucuccaucac

SEQ ID NO: 1594823 - RNA, 19 nt, Homo sapiens
  misc_RNA (1)...(19): siRNA sense strand
cagaggagccauaugagaa

SEQ ID NO: 1594824 - RNA, 19 nt, Homo sapiens
  misc_RNA (1)...(19): siRNA sense strand
uaucaggaaugaaggacaa

SEQ ID NO: 1594825 - RNA, 19 nt, Homo sapiens
  misc_RNA (1)...(19): siRNA sense strand
ugaaccggcucuuucugaa

SEQ ID NO: 1594826 - RNA, 19 nt, Homo sapiens
  misc_RNA (1)...(19): siRNA sense strand
gaauaucaggaaugaagga

SEQ ID NO: 1594827 - RNA, 19 nt, Homo sapiens
  misc_RNA (1)...(19): siRNA sense strand
guguauuucugccgaguug

SEQ ID NO: 1594828 - RNA, 19 nt, Homo sapiens
  misc_RNA (1)...(19): siRNA sense strand
gcaggaccagucuguguau

SEQ ID NO: 1594829 - RNA, 19 nt, Homo sapiens
  misc_RNA (1)...(19): siRNA sense strand
gugaaccggcucuuucuga

SEQ ID NO: 1594830 - RNA, 19 nt, Homo sapiens
  misc_RNA (1)...(19): siRNA sense strand
aaacacagaggagccauau

SEQ ID NO: 1594831 - RNA, 19 nt, Homo sapiens
  misc_RNA (1)...(19): siRNA sense strand
augagaauaucaggaauga

SEQ ID NO: 1594832 - RNA, 19 nt, Homo sapiens
  misc_RNA (1)...(19): siRNA sense strand
gaaauccccuucuccuucu

SEQ ID NO: 1594833 - RNA, 19 nt, Homo sapiens
  misc_RNA (1)...(19): siRNA sense strand
ucuccaaccugcagaagca

SEQ ID NO: 1594834 - RNA, 19 nt, Homo sapiens
  misc_RNA (1)...(19): siRNA sense strand
uaugugaaccggcucuuuc

SEQ ID NO: 1594835 - RNA, 19 nt, Homo sapiens
  misc_RNA (1)...(19): siRNA sense strand
gcagaagcaggaccagucu

SEQ ID NO: 1594836 - RNA, 19 nt, Homo sapiens
  misc_RNA (1)...(19): siRNA sense strand
ggguggcucuguggaaauc

SEQ ID NO: 1594837 - RNA, 19 nt, Homo sapiens
  misc_RNA (1)...(19): siRNA sense strand
acagaggagccauaugaga

SEQ ID NO: 1594838 - RNA, 19 nt, Homo sapiens
  misc_RNA (1)...(19): siRNA sense strand
gcucccgacgugagaauau

SEQ ID NO: 1594839 - RNA, 19 nt, Homo sapiens
  misc_RNA (1)...(19): siRNA sense strand
gaaugaaggacaaaauaca

SEQ ID NO: 1594840 - RNA, 19 nt, Homo sapiens
  misc_RNA (1)...(19): siRNA sense strand
ccacaggcaguccuucuac

SEQ ID NO: 1594841 - RNA, 19 nt, Homo sapiens
  misc_RNA (1)...(19): siRNA sense strand
gcauuucugcagccuagug

SEQ ID NO: 1594842 - RNA, 19 nt, Homo sapiens
  misc_RNA (1)...(19): siRNA sense strand
uaugagaauaucaggaaug

SEQ ID NO: 1594843 - RNA, 19 nt, Homo sapiens
  misc_RNA (1)...(19): siRNA sense strand
caggaccagucuguguauu

SEQ ID NO: 1594844 - RNA, 19 nt, Homo sapiens
  misc_RNA (1)...(19): siRNA sense strand
gaaccggcucuuucugaac

SEQ ID NO: 1594845 - RNA, 19 nt, Homo sapiens
  misc_RNA (1)...(19): siRNA sense strand
gggaccaaacucuccauca

SEQ ID NO: 1594846 - RNA, 19 nt, Homo sapiens
  misc_RNA (1)...(19): siRNA sense strand
caggaucugguccaagcua

SEQ ID NO: 1594847 - RNA, 19 nt, Homo sapiens
  misc_RNA (1)...(19): siRNA sense strand
uaagugcccuccagucucu

SEQ ID NO: 1594848 - RNA, 19 nt, Homo sapiens
  misc_RNA (1)...(19): siRNA sense strand
ccaagugcccucccaagug

SEQ ID NO: 1594849 - RNA, 19 nt, Homo sapiens
  misc_RNA (1)...(19): siRNA sense strand
uaaguguccuccagucucu

SEQ ID NO: 1594850 - RNA, 19 nt, Homo sapiens
  misc_RNA (1)...(19): siRNA sense strand
ccaagugcauccccaagug

SEQ ID NO: 1594851 - RNA, 19 nt, Homo sapiens
  misc_RNA (1)...(19): siRNA sense strand
uaagugcccuccugucucu

SEQ ID NO: 1594852 - RNA, 19 nt, Homo sapiens
  misc_RNA (1)...(19): siRNA sense strand
ccaagugcccucccaagug

SEQ ID NO: 1594853 - RNA, 19 nt, Homo sapiens
  misc_RNA (1)...(19): siRNA sense strand
guaaagaucugggacauga

SEQ ID NO: 1594854 - RNA, 19 nt, Homo sapiens
  misc_RNA (1)...(19): siRNA sense strand
caacaucacugcaggaaau

SEQ ID NO: 1594855 - RNA, 19 nt, Homo sapiens
  misc_RNA (1)...(19): siRNA sense strand
gaaagugauucuugucaga

SEQ ID NO: 1594856 - RNA, 19 nt, Homo sapiens
  misc_RNA (1)...(19): siRNA sense strand
gcagcaagcgcucaaguua

SEQ ID NO: 1594857 - RNA, 19 nt, Homo sapiens
  misc_RNA (1)...(19): siRNA sense strand
uaauggagcuguaauggaa

SEQ ID NO: 1594858 - RNA, 19 nt, Homo sapiens
  misc_RNA (1)...(19): siRNA sense strand
guaauggaauuucacguuu

SEQ ID NO: 1594859 - RNA, 19 nt, Homo sapiens
  misc_RNA (1)...(19): siRNA sense strand
ggacuucucuagcgaccuu

SEQ ID NO: 1594860 - RNA, 19 nt, Homo sapiens
  misc_RNA (1)...(19): siRNA sense strand
caaaggacaugaagguagu

SEQ ID NO: 1594861 - RNA, 19 nt, Homo sapiens
  misc_RNA (1)...(19): siRNA sense strand
ggacaucggaggaaggaaa

SEQ ID NO: 1594862 - RNA, 19 nt, Homo sapiens
  misc_RNA (1)...(19): siRNA sense strand
cuucgugucugcaauauga

SEQ ID NO: 1594863 - RNA, 19 nt, Homo sapiens
  misc_RNA (1)...(19): siRNA sense strand
gagcuguaauggaauuuca

SEQ ID NO: 1594864 - RNA, 19 nt, Homo sapiens
  misc_RNA (1)...(19): siRNA sense strand
ggaccgaccgcauuguaaa

SEQ ID NO: 1594865 - RNA, 19 nt, Homo sapiens
  misc_RNA (1)...(19): siRNA sense strand
gacaacagcaucaucaugu

SEQ ID NO: 1594866 - RNA, 19 nt, Homo sapiens
  misc_RNA (1)...(19): siRNA sense strand
caucacaacccucaaagga

SEQ ID NO: 1594867 - RNA, 19 nt, Homo sapiens
  misc_RNA (1)...(19): siRNA sense strand
ggaaaggccggacgcuguu

SEQ ID NO: 1594868 - RNA, 19 nt, Homo sapiens
  misc_RNA (1)...(19): siRNA sense strand
gaaaggccggacgcuguua

SEQ ID NO: 1594869 - RNA, 19 nt, Homo sapiens
  misc_RNA (1)...(19): siRNA sense strand
uaauggaauuucacguuuc

SEQ ID NO: 1594870 - RNA, 19 nt, Homo sapiens
  misc_RNA (1)...(19): siRNA sense strand
aauaugacuuugacacuca

SEQ ID NO: 1594871 - RNA, 19 nt, Homo sapiens
  misc_RNA (1)...(19): siRNA sense strand
cagagugggugaucaguac

SEQ ID NO: 1594872 - RNA, 19 nt, Homo sapiens
  misc_RNA (1)...(19): siRNA sense strand
gccggacgcuguuacuuca

SEQ ID NO: 1594873 - RNA, 19 nt, Homo sapiens
  misc_RNA (1)...(19): siRNA sense strand
gcuccucagugguuggaaa

SEQ ID NO: 1594874 - RNA, 19 nt, Homo sapiens
  misc_RNA (1)...(19): siRNA sense strand
ugaacuuuaucaagaccua

SEQ ID NO: 1594875 - RNA, 19 nt, Homo sapiens
  misc_RNA (1)...(19): siRNA sense strand
ccaggauaauggagcugua

SEQ ID NO: 1594876 - RNA, 19 nt, Homo sapiens
  misc_RNA (1)...(19): siRNA sense strand
guuggaaagugauucuugu

SEQ ID NO: 1594877 - RNA, 19 nt, Homo sapiens
  misc_RNA (1)...(19): siRNA sense strand
gggcuucgugucugcaaua

SEQ ID NO: 1594878 - RNA, 19 nt, Homo sapiens
  misc_RNA (1)...(19): siRNA sense strand
ucacguuucugaagauuuu

SEQ ID NO: 1594879 - RNA, 19 nt, Homo sapiens
  misc_RNA (1)...(19): siRNA sense strand
gaauugcaguguggaacau

SEQ ID NO: 1594880 - RNA, 19 nt, Homo sapiens
  misc_RNA (1)...(19): siRNA sense strand
ggauaauggagcuguaaug

SEQ ID NO: 1594881 - RNA, 19 nt, Homo sapiens
  misc_RNA (1)...(19): siRNA sense strand
cuagcgaccuuucaugaag

SEQ ID NO: 1594882 - RNA, 19 nt, Homo sapiens
  misc_RNA (1)...(19): siRNA sense strand
gauaauggagcuguaaugg

SEQ ID NO: 1594883 - RNA, 19 nt, Homo sapiens
  misc_RNA (1)...(19): siRNA sense strand
ggguuugugauucuuguua

SEQ ID NO: 1594884 - RNA, 19 nt, Homo sapiens
  misc_RNA (1)...(19): siRNA sense strand
ugcugaagcuugaacagaa

SEQ ID NO: 1594885 - RNA, 19 nt, Homo sapiens
  misc_RNA (1)...(19): siRNA sense strand
gaaccgggugucugcgauu

SEQ ID NO: 1594886 - RNA, 19 nt, Homo sapiens
  misc_RNA (1)...(19): siRNA sense strand
ggaauugcaguguggaaca

SEQ ID NO: 1594887 - RNA, 19 nt, Homo sapiens
  misc_RNA (1)...(19): siRNA sense strand
gcaauaugacuuugacacu

SEQ ID NO: 1594888 - RNA, 19 nt, Homo sapiens
  misc_RNA (1)...(19): siRNA sense strand
cuacccagcucaucagaac

SEQ ID NO: 1594889 - RNA, 19 nt, Homo sapiens
  misc_RNA (1)...(19): siRNA sense strand
ucacccugcugaagcuuga

SEQ ID NO: 1594890 - RNA, 19 nt, Homo sapiens
  misc_RNA (1)...(19): siRNA sense strand
ucaguaugcuuucguuggu

SEQ ID NO: 1594891 - RNA, 19 nt, Homo sapiens
  misc_RNA (1)...(19): siRNA sense strand
caaguccggguuugugauu

SEQ ID NO: 1594892 - RNA, 19 nt, Homo sapiens
  misc_RNA (1)...(19): siRNA sense strand
gggaccgaccgcauuguaa

SEQ ID NO: 1594893 - RNA, 19 nt, Homo sapiens
  misc_RNA (1)...(19): siRNA sense strand
ggacccuauucagcgguua

SEQ ID NO: 1594894 - RNA, 19 nt, Homo sapiens
  misc_RNA (1)...(19): siRNA sense strand
ugacaacagcaucaucaug

SEQ ID NO: 1594895 - RNA, 19 nt, Homo sapiens
  misc_RNA (1)...(19): siRNA sense strand
aaccgggugucugcgauua

SEQ ID NO: 1594896 - RNA, 19 nt, Homo sapiens
  misc_RNA (1)...(19): siRNA sense strand
cgaccgcauuguaaagauc

SEQ ID NO: 1594897 - RNA, 19 nt, Homo sapiens
  misc_RNA (1)...(19): siRNA sense strand
acauaacauuucccacaug

SEQ ID NO: 1594898 - RNA, 19 nt, Homo sapiens
  misc_RNA (1)...(19): siRNA sense strand
caaggaggacggcgugauc

SEQ ID NO: 1594899 - RNA, 19 nt, Homo sapiens
  misc_RNA (1)...(19): siRNA sense strand
acaacagcaucaucaugug

SEQ ID NO: 1594900 - RNA, 19 nt, Homo sapiens
  misc_RNA (1)...(19): siRNA sense strand
gacaacaucacugcaggaa

SEQ ID NO: 1594901 - RNA, 19 nt, Homo sapiens
  misc_RNA (1)...(19): siRNA sense strand
uguaauggaauuucacguu

SEQ ID NO: 1594902 - RNA, 19 nt, Homo sapiens
  misc_RNA (1)...(19): siRNA sense strand
ucagggccaucaugacaag

SEQ ID NO: 1594903 - RNA, 19 nt, Homo sapiens
  misc_RNA (1)...(19): siRNA sense strand
gguuggaaagugauucuug

SEQ ID NO: 1594904 - RNA, 19 nt, Homo sapiens
  misc_RNA (1)...(19): siRNA sense strand
gcugaagcuugaacagaac

SEQ ID NO: 1594905 - RNA, 19 nt, Homo sapiens
  misc_RNA (1)...(19): siRNA sense strand
ccucaaaggacaugaaggu

SEQ ID NO: 1594906 - RNA, 19 nt, Homo sapiens
  misc_RNA (1)...(19): siRNA sense strand
ugacuuugacacucaguau

SEQ ID NO: 1594907 - RNA, 19 nt, Homo sapiens
  misc_RNA (1)...(19): siRNA sense strand
ccucagugguuggaaagug

SEQ ID NO: 1594908 - RNA, 19 nt, Homo sapiens
  misc_RNA (1)...(19): siRNA sense strand
ggccggacgcuguuacuuc

SEQ ID NO: 1594909 - RNA, 19 nt, Homo sapiens
  misc_RNA (1)...(19): siRNA sense strand
aacauaacauuucccacau

SEQ ID NO: 1594910 - RNA, 19 nt, Homo sapiens
  misc_RNA (1)...(19): siRNA sense strand
cucagugguuggaaaguga

SEQ ID NO: 1594911 - RNA, 19 nt, Homo sapiens
  misc_RNA (1)...(19): siRNA sense strand
uggaauuucacguuucuga

SEQ ID NO: 1594912 - RNA, 19 nt, Homo sapiens
  misc_RNA (1)...(19): siRNA sense strand
guuacgacuccaucaaaga

SEQ ID NO: 1594913 - RNA, 19 nt, Homo sapiens
  misc_RNA (1)...(19): siRNA sense strand
gggcuaagacaacaucacu

SEQ ID NO: 1594914 - RNA, 19 nt, Homo sapiens
  misc_RNA (1)...(19): siRNA sense strand
guaccggccacgacaagug

SEQ ID NO: 1594915 - RNA, 19 nt, Homo sapiens
  misc_RNA (1)...(19): siRNA sense strand
acagagugggugaucagua

SEQ ID NO: 1594916 - RNA, 19 nt, Homo sapiens
  misc_RNA (1)...(19): siRNA sense strand
gagcaucugacaacagcau

SEQ ID NO: 1594917 - RNA, 19 nt, Homo sapiens
  misc_RNA (1)...(19): siRNA sense strand
caggauaauggagcuguaa

SEQ ID NO: 1594918 - RNA, 19 nt, Homo sapiens
  misc_RNA (1)...(19): siRNA sense strand
gggcuucgaguuccaaguc

SEQ ID NO: 1594919 - RNA, 19 nt, Homo sapiens
  misc_RNA (1)...(19): siRNA sense strand
aauggaauuucacguuucu

SEQ ID NO: 1594920 - RNA, 19 nt, Homo sapiens
  misc_RNA (1)...(19): siRNA sense strand
uuacgacuccaucaaagau

SEQ ID NO: 1594921 - RNA, 19 nt, Homo sapiens
  misc_RNA (1)...(19): siRNA sense strand
agaccuacccagcucauca

SEQ ID NO: 1594922 - RNA, 19 nt, Homo sapiens
  misc_RNA (1)...(19): siRNA sense strand
gguuugugauucuuguuac

SEQ ID NO: 1594923 - RNA, 19 nt, Homo sapiens
  misc_RNA (1)...(19): siRNA sense strand
cauggauguuagcagagaa

SEQ ID NO: 1594924 - RNA, 19 nt, Homo sapiens
  misc_RNA (1)...(19): siRNA sense strand
agucaugggcuucgaguuc

SEQ ID NO: 1594925 - RNA, 19 nt, Homo sapiens
  misc_RNA (1)...(19): siRNA sense strand
guaaagaucugggacauga

SEQ ID NO: 1594926 - RNA, 19 nt, Homo sapiens
  misc_RNA (1)...(19): siRNA sense strand
caacaucacugcaggaaau

SEQ ID NO: 1594927 - RNA, 19 nt, Homo sapiens
  misc_RNA (1)...(19): siRNA sense strand
gaaagugauucuugucaga

SEQ ID NO: 1594928 - RNA, 19 nt, Homo sapiens
  misc_RNA (1)...(19): siRNA sense strand
gcagcaagcgcucaaguua

SEQ ID NO: 1594929 - RNA, 19 nt, Homo sapiens
  misc_RNA (1)...(19): siRNA sense strand
uaauggagcuguaauggaa

SEQ ID NO: 1594930 - RNA, 19 nt, Homo sapiens
  misc_RNA (1)...(19): siRNA sense strand
guaauggaauuucacguuu

SEQ ID NO: 1594931 - RNA, 19 nt, Homo sapiens
  misc_RNA (1)...(19): siRNA sense strand
ggacuucucuagcgaccuu

SEQ ID NO: 1594932 - RNA, 19 nt, Homo sapiens
  misc_RNA (1)...(19): siRNA sense strand
caaaggacaugaagguagu

SEQ ID NO: 1594933 - RNA, 19 nt, Homo sapiens
  misc_RNA (1)...(19): siRNA sense strand
ggacaucggaggaaggaaa

SEQ ID NO: 1594934 - RNA, 19 nt, Homo sapiens
  misc_RNA (1)...(19): siRNA sense strand
cuucgugucugcaauauga

SEQ ID NO: 1594935 - RNA, 19 nt, Homo sapiens
  misc_RNA (1)...(19): siRNA sense strand
gagcuguaauggaauuuca

SEQ ID NO: 1594936 - RNA, 19 nt, Homo sapiens
  misc_RNA (1)...(19): siRNA sense strand
ggaccgaccgcauuguaaa

SEQ ID NO: 1594937 - RNA, 19 nt, Homo sapiens
  misc_RNA (1)...(19): siRNA sense strand
gacaacagcaucaucaugu

SEQ ID NO: 1594938 - RNA, 19 nt, Homo sapiens
  misc_RNA (1)...(19): siRNA sense strand
caucacaacccucaaagga

SEQ ID NO: 1594939 - RNA, 19 nt, Homo sapiens
  misc_RNA (1)...(19): siRNA sense strand
ggaaaggccggacgcuguu

SEQ ID NO: 1594940 - RNA, 19 nt, Homo sapiens
  misc_RNA (1)...(19): siRNA sense strand
gaaaggccggacgcuguua

SEQ ID NO: 1594941 - RNA, 19 nt, Homo sapiens
  misc_RNA (1)...(19): siRNA sense strand
uaauggaauuucacguuuc

SEQ ID NO: 1594942 - RNA, 19 nt, Homo sapiens
  misc_RNA (1)...(19): siRNA sense strand
aauaugacuuugacacuca

SEQ ID NO: 1594943 - RNA, 19 nt, Homo sapiens
  misc_RNA (1)...(19): siRNA sense strand
cagagugggugaucaguac

SEQ ID NO: 1594944 - RNA, 19 nt, Homo sapiens
  misc_RNA (1)...(19): siRNA sense strand
gccggacgcuguuacuuca

SEQ ID NO: 1594945 - RNA, 19 nt, Homo sapiens
  misc_RNA (1)...(19): siRNA sense strand
gcuccucagugguuggaaa

SEQ ID NO: 1594946 - RNA, 19 nt, Homo sapiens
  misc_RNA (1)...(19): siRNA sense strand
ugaacuuuaucaagaccua

SEQ ID NO: 1594947 - RNA, 19 nt, Homo sapiens
  misc_RNA (1)...(19): siRNA sense strand
ccaggauaauggagcugua

SEQ ID NO: 1594948 - RNA, 19 nt, Homo sapiens
  misc_RNA (1)...(19): siRNA sense strand
guuggaaagugauucuugu

SEQ ID NO: 1594949 - RNA, 19 nt, Homo sapiens
  misc_RNA (1)...(19): siRNA sense strand
gggcuucgugucugcaaua

SEQ ID NO: 1594950 - RNA, 19 nt, Homo sapiens
  misc_RNA (1)...(19): siRNA sense strand
ucacguuucugaagauuuu

SEQ ID NO: 1594951 - RNA, 19 nt, Homo sapiens
  misc_RNA (1)...(19): siRNA sense strand
gaauugcaguguggaacau

SEQ ID NO: 1594952 - RNA, 19 nt, Homo sapiens
  misc_RNA (1)...(19): siRNA sense strand
ggauaauggagcuguaaug

SEQ ID NO: 1594953 - RNA, 19 nt, Homo sapiens
  misc_RNA (1)...(19): siRNA sense strand
cuagcgaccuuucaugaag

SEQ ID NO: 1594954 - RNA, 19 nt, Homo sapiens
  misc_RNA (1)...(19): siRNA sense strand
gauaauggagcuguaaugg

SEQ ID NO: 1594955 - RNA, 19 nt, Homo sapiens
  misc_RNA (1)...(19): siRNA sense strand
ggguuugugauucuuguua

SEQ ID NO: 1594956 - RNA, 19 nt, Homo sapiens
  misc_RNA (1)...(19): siRNA sense strand
ugcugaagcuugaacagaa

SEQ ID NO: 1594957 - RNA, 19 nt, Homo sapiens
  misc_RNA (1)...(19): siRNA sense strand
gaaccgggugucugcgauu

SEQ ID NO: 1594958 - RNA, 19 nt, Homo sapiens
  misc_RNA (1)...(19): siRNA sense strand
ggaauugcaguguggaaca

SEQ ID NO: 1594959 - RNA, 19 nt, Homo sapiens
  misc_RNA (1)...(19): siRNA sense strand
gcaauaugacuuugacacu

SEQ ID NO: 1594960 - RNA, 19 nt, Homo sapiens
  misc_RNA (1)...(19): siRNA sense strand
cuacccagcucaucagaac

SEQ ID NO: 1594961 - RNA, 19 nt, Homo sapiens
  misc_RNA (1)...(19): siRNA sense strand
ucacccugcugaagcuuga

SEQ ID NO: 1594962 - RNA, 19 nt, Homo sapiens
  misc_RNA (1)...(19): siRNA sense strand
ucaguaugcuuucguuggu

SEQ ID NO: 1594963 - RNA, 19 nt, Homo sapiens
  misc_RNA (1)...(19): siRNA sense strand
caaguccggguuugugauu

SEQ ID NO: 1594964 - RNA, 19 nt, Homo sapiens
  misc_RNA (1)...(19): siRNA sense strand
gggaccgaccgcauuguaa

SEQ ID NO: 1594965 - RNA, 19 nt, Homo sapiens
  misc_RNA (1)...(19): siRNA sense strand
ggacccuauucagcgguua

SEQ ID NO: 1594966 - RNA, 19 nt, Homo sapiens
  misc_RNA (1)...(19): siRNA sense strand
ugacaacagcaucaucaug

SEQ ID NO: 1594967 - RNA, 19 nt, Homo sapiens
  misc_RNA (1)...(19): siRNA sense strand
aaccgggugucugcgauua

SEQ ID NO: 1594968 - RNA, 19 nt, Homo sapiens
  misc_RNA (1)...(19): siRNA sense strand
cgaccgcauuguaaagauc

SEQ ID NO: 1594969 - RNA, 19 nt, Homo sapiens
  misc_RNA (1)...(19): siRNA sense strand
acauaacauuucccacaug

SEQ ID NO: 1594970 - RNA, 19 nt, Homo sapiens
  misc_RNA (1)...(19): siRNA sense strand
caaggaggacggcgugauc

SEQ ID NO: 1594971 - RNA, 19 nt, Homo sapiens
  misc_RNA (1)...(19): siRNA sense strand
acaacagcaucaucaugug

SEQ ID NO: 1594972 - RNA, 19 nt, Homo sapiens
  misc_RNA (1)...(19): siRNA sense strand
gacaacaucacugcaggaa

SEQ ID NO: 1594973 - RNA, 19 nt, Homo sapiens
  misc_RNA (1)...(19): siRNA sense strand
uguaauggaauuucacguu

SEQ ID NO: 1594974 - RNA, 19 nt, Homo sapiens
  misc_RNA (1)...(19): siRNA sense strand
ucagggccaucaugacaag

SEQ ID NO: 1594975 - RNA, 19 nt, Homo sapiens
  misc_RNA (1)...(19): siRNA sense strand
gguuggaaagugauucuug

SEQ ID NO: 1594976 - RNA, 19 nt, Homo sapiens
  misc_RNA (1)...(19): siRNA sense strand
gcugaagcuugaacagaac

SEQ ID NO: 1594977 - RNA, 19 nt, Homo sapiens
  misc_RNA (1)...(19): siRNA sense strand
ccucaaaggacaugaaggu

SEQ ID NO: 1594978 - RNA, 19 nt, Homo sapiens
  misc_RNA (1)...(19): siRNA sense strand
ugacuuugacacucaguau

SEQ ID NO: 1594979 - RNA, 19 nt, Homo sapiens
  misc_RNA (1)...(19): siRNA sense strand
ccucagugguuggaaagug

SEQ ID NO: 1594980 - RNA, 19 nt, Homo sapiens
  misc_RNA (1)...(19): siRNA sense strand
ggccggacgcuguuacuuc

SEQ ID NO: 1594981 - RNA, 19 nt, Homo sapiens
  misc_RNA (1)...(19): siRNA sense strand
aacauaacauuucccacau

SEQ ID NO: 1594982 - RNA, 19 nt, Homo sapiens
  misc_RNA (1)...(19): siRNA sense strand
cucagugguuggaaaguga

SEQ ID NO: 1594983 - RNA, 19 nt, Homo sapiens
  misc_RNA (1)...(19): siRNA sense strand
uggaauuucacguuucuga

SEQ ID NO: 1594984 - RNA, 19 nt, Homo sapiens
  misc_RNA (1)...(19): siRNA sense strand
guuacgacuccaucaaaga

SEQ ID NO: 1594985 - RNA, 19 nt, Homo sapiens
  misc_RNA (1)...(19): siRNA sense strand
gggcuaagacaacaucacu

SEQ ID NO: 1594986 - RNA, 19 nt, Homo sapiens
  misc_RNA (1)...(19): siRNA sense strand
guaccggccacgacaagug

SEQ ID NO: 1594987 - RNA, 19 nt, Homo sapiens
  misc_RNA (1)...(19): siRNA sense strand
acagagugggugaucagua

SEQ ID NO: 1594988 - RNA, 19 nt, Homo sapiens
  misc_RNA (1)...(19): siRNA sense strand
gagcaucugacaacagcau

SEQ ID NO: 1594989 - RNA, 19 nt, Homo sapiens
  misc_RNA (1)...(19): siRNA sense strand
caggauaauggagcuguaa

SEQ ID NO: 1594990 - RNA, 19 nt, Homo sapiens
  misc_RNA (1)...(19): siRNA sense strand
gggcuucgaguuccaaguc

SEQ ID NO: 1594991 - RNA, 19 nt, Homo sapiens
  misc_RNA (1)...(19): siRNA sense strand
aauggaauuucacguuucu

SEQ ID NO: 1594992 - RNA, 19 nt, Homo sapiens
  misc_RNA (1)...(19): siRNA sense strand
uuacgacuccaucaaagau

SEQ ID NO: 1594993 - RNA, 19 nt, Homo sapiens
  misc_RNA (1)...(19): siRNA sense strand
agaccuacccagcucauca

SEQ ID NO: 1594994 - RNA, 19 nt, Homo sapiens
  misc_RNA (1)...(19): siRNA sense strand
gguuugugauucuuguuac

SEQ ID NO: 1594995 - RNA, 19 nt, Homo sapiens
  misc_RNA (1)...(19): siRNA sense strand
cauggauguuagcagagaa

SEQ ID NO: 1594996 - RNA, 19 nt, Homo sapiens
  misc_RNA (1)...(19): siRNA sense strand
agucaugggcuucgaguuc

SEQ ID NO: 1594997 - RNA, 19 nt, Homo sapiens
  misc_RNA (1)...(19): siRNA sense strand
cuacagugcuucuuagaua

SEQ ID NO: 1594998 - RNA, 19 nt, Homo sapiens
  misc_RNA (1)...(19): siRNA sense strand
ggaauuccuuggcuguuua

SEQ ID NO: 1594999 - RNA, 19 nt, Homo sapiens
  misc_RNA (1)...(19): siRNA sense strand
aaucuaagcuguugucuga

SEQ ID NO: 1595000 - RNA, 19 nt, Homo sapiens
  misc_RNA (1)...(19): siRNA sense strand
gaagagaauggaacgguua

SEQ ID NO: 1595001 - RNA, 19 nt, Homo sapiens
  misc_RNA (1)...(19): siRNA sense strand
gaaaucaauuggagaaugg

SEQ ID NO: 1595002 - RNA, 19 nt, Homo sapiens
  misc_RNA (1)...(19): siRNA sense strand
ggaaaucaauuggagaaug

SEQ ID NO: 1595003 - RNA, 19 nt, Homo sapiens
  misc_RNA (1)...(19): siRNA sense strand
ggaagcagcaucuccuuaa

SEQ ID NO: 1595004 - RNA, 19 nt, Homo sapiens
  misc_RNA (1)...(19): siRNA sense strand
gaagcagcaucuccuuaaa

SEQ ID NO: 1595005 - RNA, 19 nt, Homo sapiens
  misc_RNA (1)...(19): siRNA sense strand
cagaugagcugguauggau

SEQ ID NO: 1595006 - RNA, 19 nt, Homo sapiens
  misc_RNA (1)...(19): siRNA sense strand
acaaauggguguaggagaa

SEQ ID NO: 1595007 - RNA, 19 nt, Homo sapiens
  misc_RNA (1)...(19): siRNA sense strand
ggaggaagauuuugagauu

SEQ ID NO: 1595008 - RNA, 19 nt, Homo sapiens
  misc_RNA (1)...(19): siRNA sense strand
ucuaagcuguugucugaua

SEQ ID NO: 1595009 - RNA, 19 nt, Homo sapiens
  misc_RNA (1)...(19): siRNA sense strand
acacuggccucccuuugua

SEQ ID NO: 1595010 - RNA, 19 nt, Homo sapiens
  misc_RNA (1)...(19): siRNA sense strand
aagaacaacccaaagaaua

SEQ ID NO: 1595011 - RNA, 19 nt, Homo sapiens
  misc_RNA (1)...(19): siRNA sense strand
gcuguugucugauauaagu

SEQ ID NO: 1595012 - RNA, 19 nt, Homo sapiens
  misc_RNA (1)...(19): siRNA sense strand
ggagaagggaaaucaauug

SEQ ID NO: 1595013 - RNA, 19 nt, Homo sapiens
  misc_RNA (1)...(19): siRNA sense strand
gcucaagcccuuaucugua

SEQ ID NO: 1595014 - RNA, 19 nt, Homo sapiens
  misc_RNA (1)...(19): siRNA sense strand
gguguagccuuguucagaa

SEQ ID NO: 1595015 - RNA, 19 nt, Homo sapiens
  misc_RNA (1)...(19): siRNA sense strand
uauaagugcucgucuaugg

SEQ ID NO: 1595016 - RNA, 19 nt, Homo sapiens
  misc_RNA (1)...(19): siRNA sense strand
gugacgagcucaucuucuu

SEQ ID NO: 1595017 - RNA, 19 nt, Homo sapiens
  misc_RNA (1)...(19): siRNA sense strand
gauauaagugcucgucuau

SEQ ID NO: 1595018 - RNA, 19 nt, Homo sapiens
  misc_RNA (1)...(19): siRNA sense strand
aaaccuggauccuucaguu

SEQ ID NO: 1595019 - RNA, 19 nt, Homo sapiens
  misc_RNA (1)...(19): siRNA sense strand
ugauauaagugcucgucua

SEQ ID NO: 1595020 - RNA, 19 nt, Homo sapiens
  misc_RNA (1)...(19): siRNA sense strand
acacaguggucauugaaga

SEQ ID NO: 1595021 - RNA, 19 nt, Homo sapiens
  misc_RNA (1)...(19): siRNA sense strand
gagcugguauggaucuuag

SEQ ID NO: 1595022 - RNA, 19 nt, Homo sapiens
  misc_RNA (1)...(19): siRNA sense strand
gaaugaacauccuaaaccu

SEQ ID NO: 1595023 - RNA, 19 nt, Homo sapiens
  misc_RNA (1)...(19): siRNA sense strand
cugacuaccuagaagaaua

SEQ ID NO: 1595024 - RNA, 19 nt, Homo sapiens
  misc_RNA (1)...(19): siRNA sense strand
ugacaggccucccgauucu

SEQ ID NO: 1595025 - RNA, 19 nt, Homo sapiens
  misc_RNA (1)...(19): siRNA sense strand
uaacugguguagccuuguu

SEQ ID NO: 1595026 - RNA, 19 nt, Homo sapiens
  misc_RNA (1)...(19): siRNA sense strand
gggaagcagcaucuccuua

SEQ ID NO: 1595027 - RNA, 19 nt, Homo sapiens
  misc_RNA (1)...(19): siRNA sense strand
ggaguuugaucuggaggaa

SEQ ID NO: 1595028 - RNA, 19 nt, Homo sapiens
  misc_RNA (1)...(19): siRNA sense strand
cauccuacagugcuucuua

SEQ ID NO: 1595029 - RNA, 19 nt, Homo sapiens
  misc_RNA (1)...(19): siRNA sense strand
gcucgucuaugguuuacau

SEQ ID NO: 1595030 - RNA, 19 nt, Homo sapiens
  misc_RNA (1)...(19): siRNA sense strand
gagaauggaacgguuaaug

SEQ ID NO: 1595031 - RNA, 19 nt, Homo sapiens
  misc_RNA (1)...(19): siRNA sense strand
gcuacucuauccaucaaau

SEQ ID NO: 1595032 - RNA, 19 nt, Homo sapiens
  misc_RNA (1)...(19): siRNA sense strand
aaagauuguugcuacucua

SEQ ID NO: 1595033 - RNA, 19 nt, Homo sapiens
  misc_RNA (1)...(19): siRNA sense strand
gcccuuaucuguagacacu

SEQ ID NO: 1595034 - RNA, 19 nt, Homo sapiens
  misc_RNA (1)...(19): siRNA sense strand
uaacacaguggucauugaa

SEQ ID NO: 1595035 - RNA, 19 nt, Homo sapiens
  misc_RNA (1)...(19): siRNA sense strand
agaauggaacgguuaauga

SEQ ID NO: 1595036 - RNA, 19 nt, Homo sapiens
  misc_RNA (1)...(19): siRNA sense strand
agauacagaugagcuggua

SEQ ID NO: 1595037 - RNA, 19 nt, Homo sapiens
  misc_RNA (1)...(19): siRNA sense strand
caaguaugaagaucagauu

SEQ ID NO: 1595038 - RNA, 19 nt, Homo sapiens
  misc_RNA (1)...(19): siRNA sense strand
aaggagaauuuaaggaugu

SEQ ID NO: 1595039 - RNA, 19 nt, Homo sapiens
  misc_RNA (1)...(19): siRNA sense strand
uggaauuccuuggcuguuu

SEQ ID NO: 1595040 - RNA, 19 nt, Homo sapiens
  misc_RNA (1)...(19): siRNA sense strand
ggacuggagcugggagaaa

SEQ ID NO: 1595041 - RNA, 19 nt, Homo sapiens
  misc_RNA (1)...(19): siRNA sense strand
ggauaacacaguggucauu

SEQ ID NO: 1595042 - RNA, 19 nt, Homo sapiens
  misc_RNA (1)...(19): siRNA sense strand
gauaacacaguggucauug

SEQ ID NO: 1595043 - RNA, 19 nt, Homo sapiens
  misc_RNA (1)...(19): siRNA sense strand
cagaauucauugacucuac

SEQ ID NO: 1595044 - RNA, 19 nt, Homo sapiens
  misc_RNA (1)...(19): siRNA sense strand
gagaauuuaaggauguuug

SEQ ID NO: 1595045 - RNA, 19 nt, Homo sapiens
  misc_RNA (1)...(19): siRNA sense strand
aaagaacaacccaaagaau

SEQ ID NO: 1595046 - RNA, 19 nt, Homo sapiens
  misc_RNA (1)...(19): siRNA sense strand
caucaaauggcacaaaugg

SEQ ID NO: 1595047 - RNA, 19 nt, Homo sapiens
  misc_RNA (1)...(19): siRNA sense strand
aagcuguugucugauauaa

SEQ ID NO: 1595048 - RNA, 19 nt, Homo sapiens
  misc_RNA (1)...(19): siRNA sense strand
gaccuuuguugacacugaa

SEQ ID NO: 1595049 - RNA, 19 nt, Homo sapiens
  misc_RNA (1)...(19): siRNA sense strand
guaugaagaucagauuacu

SEQ ID NO: 1595050 - RNA, 19 nt, Homo sapiens
  misc_RNA (1)...(19): siRNA sense strand
uaagugcucgucuaugguu

SEQ ID NO: 1595051 - RNA, 19 nt, Homo sapiens
  misc_RNA (1)...(19): siRNA sense strand
uuccuuggcuguuuauguu

SEQ ID NO: 1595052 - RNA, 19 nt, Homo sapiens
  misc_RNA (1)...(19): siRNA sense strand
auaacacaguggucauuga

SEQ ID NO: 1595053 - RNA, 19 nt, Homo sapiens
  misc_RNA (1)...(19): siRNA sense strand
ggugacaggccucccgauu

SEQ ID NO: 1595054 - RNA, 19 nt, Homo sapiens
  misc_RNA (1)...(19): siRNA sense strand
gaauggaacgguuaaugac

SEQ ID NO: 1595055 - RNA, 19 nt, Homo sapiens
  misc_RNA (1)...(19): siRNA sense strand
cucaagcccuuaucuguag

SEQ ID NO: 1595056 - RNA, 19 nt, Homo sapiens
  misc_RNA (1)...(19): siRNA sense strand
ugaccagacuuuccauugc

SEQ ID NO: 1595057 - RNA, 19 nt, Homo sapiens
  misc_RNA (1)...(19): siRNA sense strand
gagaagggaaaucaauugg

SEQ ID NO: 1595058 - RNA, 19 nt, Homo sapiens
  misc_RNA (1)...(19): siRNA sense strand
cuaagcuguugucugauau

SEQ ID NO: 1595059 - RNA, 19 nt, Homo sapiens
  misc_RNA (1)...(19): siRNA sense strand
aguuugaucuggaggaaga

SEQ ID NO: 1595060 - RNA, 19 nt, Homo sapiens
  misc_RNA (1)...(19): siRNA sense strand
agaccuuuguugacacuga

SEQ ID NO: 1595061 - RNA, 19 nt, Homo sapiens
  misc_RNA (1)...(19): siRNA sense strand
gcagaauucauugacucua

SEQ ID NO: 1595062 - RNA, 19 nt, Homo sapiens
  misc_RNA (1)...(19): siRNA sense strand
ugacuaccuagaagaauau

SEQ ID NO: 1595063 - RNA, 19 nt, Homo sapiens
  misc_RNA (1)...(19): siRNA sense strand
cagcgaaugaacauccuaa

SEQ ID NO: 1595064 - RNA, 19 nt, Homo sapiens
  misc_RNA (1)...(19): siRNA sense strand
ccuuaucuguagacacuug

SEQ ID NO: 1595065 - RNA, 19 nt, Homo sapiens
  misc_RNA (1)...(19): siRNA sense strand
uaagcuguugucugauaua

SEQ ID NO: 1595066 - RNA, 19 nt, Homo sapiens
  misc_RNA (1)...(19): siRNA sense strand
cauacaacccagaccuuug

SEQ ID NO: 1595067 - RNA, 19 nt, Homo sapiens
  misc_RNA (1)...(19): siRNA sense strand
agaacaacccaaagaauac

SEQ ID NO: 1595068 - RNA, 19 nt, Homo sapiens
  misc_RNA (1)...(19): siRNA sense strand
ucauacaacccagaccuuu

SEQ ID NO: 1595069 - RNA, 19 nt, Homo sapiens
  misc_RNA (1)...(19): siRNA sense strand
acaggccucccgauucuuu

SEQ ID NO: 1595070 - RNA, 19 nt, Homo sapiens
  misc_RNA (1)...(19): siRNA sense strand
acaguggucauugaagaua

SEQ ID NO: 1595071 - RNA, 19 nt, Homo sapiens
  misc_RNA (1)...(19): siRNA sense strand
ucaauuggagaaugguuug

SEQ ID NO: 1595072 - RNA, 19 nt, Homo sapiens
  misc_RNA (1)...(19): siRNA sense strand
gacuggagcugggagaaac

SEQ ID NO: 1595073 - RNA, 19 nt, Homo sapiens
  misc_RNA (1)...(19): siRNA sense strand
cauugacucuacugagcaa

SEQ ID NO: 1595074 - RNA, 19 nt, Homo sapiens
  misc_RNA (1)...(19): siRNA sense strand
ucacugacuaccuagaaga

SEQ ID NO: 1595075 - RNA, 19 nt, Homo sapiens
  misc_RNA (1)...(19): siRNA sense strand
cgaaugaacauccuaaacc

SEQ ID NO: 1595076 - RNA, 19 nt, Homo sapiens
  misc_RNA (1)...(19): siRNA sense strand
uguugacacugaagagaau

SEQ ID NO: 1595077 - RNA, 19 nt, Homo sapiens
  misc_RNA (1)...(19): siRNA sense strand
gauuguugcuacucuaucc

SEQ ID NO: 1595078 - RNA, 19 nt, Homo sapiens
  misc_RNA (1)...(19): siRNA sense strand
gaauuaguucagaaacauc

SEQ ID NO: 1595079 - RNA, 19 nt, Homo sapiens
  misc_RNA (1)...(19): siRNA sense strand
ccuagaagaauauccagau

SEQ ID NO: 1595080 - RNA, 19 nt, Homo sapiens
  misc_RNA (1)...(19): siRNA sense strand
caguggucauugaagauau

SEQ ID NO: 1595081 - RNA, 19 nt, Homo sapiens
  misc_RNA (1)...(19): siRNA sense strand
ccaaguaugaagaucagau

SEQ ID NO: 1595082 - RNA, 19 nt, Homo sapiens
  misc_RNA (1)...(19): siRNA sense strand
gcgaaugaacauccuaaac

SEQ ID NO: 1595083 - RNA, 19 nt, Homo sapiens
  misc_RNA (1)...(19): siRNA sense strand
gugacaggccucccgauuc

SEQ ID NO: 1595084 - RNA, 19 nt, Homo sapiens
  misc_RNA (1)...(19): siRNA sense strand
uaggagaagggaaaucaau

SEQ ID NO: 1595085 - RNA, 19 nt, Homo sapiens
  misc_RNA (1)...(19): siRNA sense strand
ggguguaggagaagggaaa

SEQ ID NO: 1595086 - RNA, 19 nt, Homo sapiens
  misc_RNA (1)...(19): siRNA sense strand
uacagugcuucuuagauag

SEQ ID NO: 1595087 - RNA, 19 nt, Homo sapiens
  misc_RNA (1)...(19): siRNA sense strand
gaauuccuuggcuguuuau

SEQ ID NO: 1595088 - RNA, 19 nt, Homo sapiens
  misc_RNA (1)...(19): siRNA sense strand
agaauaccaacgcauccua

SEQ ID NO: 1595089 - RNA, 19 nt, Homo sapiens
  misc_RNA (1)...(19): siRNA sense strand
acccagaccuuuguugaca

SEQ ID NO: 1595090 - RNA, 19 nt, Homo sapiens
  misc_RNA (1)...(19): siRNA sense strand
cuguuuauguuucaaugga

SEQ ID NO: 1595091 - RNA, 19 nt, Homo sapiens
  misc_RNA (1)...(19): siRNA sense strand
uacaguugcacagguguua

SEQ ID NO: 1595092 - RNA, 19 nt, Homo sapiens
  misc_RNA (1)...(19): siRNA sense strand
gaugagcugguauggaucu

SEQ ID NO: 1595093 - RNA, 19 nt, Homo sapiens
  misc_RNA (1)...(19): siRNA sense strand
guaggagaagggaaaucaa

SEQ ID NO: 1595094 - RNA, 19 nt, Homo sapiens
  misc_RNA (1)...(19): siRNA sense strand
caguugcacagguguuaaa

SEQ ID NO: 1595095 - RNA, 19 nt, Homo sapiens
  misc_RNA (1)...(19): siRNA sense strand
ggagaauuuaaggauguuu

SEQ ID NO: 1595096 - RNA, 19 nt, Homo sapiens
  misc_RNA (1)...(19): siRNA sense strand
ugguuuacauacagaagga

SEQ ID NO: 1595097 - RNA, 19 nt, Homo sapiens
  misc_RNA (1)...(19): siRNA sense strand
cuacagugcuucuuagaua

SEQ ID NO: 1595098 - RNA, 19 nt, Homo sapiens
  misc_RNA (1)...(19): siRNA sense strand
ggaauuccuuggcuguuua

SEQ ID NO: 1595099 - RNA, 19 nt, Homo sapiens
  misc_RNA (1)...(19): siRNA sense strand
aaucuaagcuguugucuga

SEQ ID NO: 1595100 - RNA, 19 nt, Homo sapiens
  misc_RNA (1)...(19): siRNA sense strand
gaagagaauggaacgguua

SEQ ID NO: 1595101 - RNA, 19 nt, Homo sapiens
  misc_RNA (1)...(19): siRNA sense strand
gaaaucaauuggagaaugg

SEQ ID NO: 1595102 - RNA, 19 nt, Homo sapiens
  misc_RNA (1)...(19): siRNA sense strand
ggaaaucaauuggagaaug

SEQ ID NO: 1595103 - RNA, 19 nt, Homo sapiens
  misc_RNA (1)...(19): siRNA sense strand
ggaagcagcaucuccuuaa

SEQ ID NO: 1595104 - RNA, 19 nt, Homo sapiens
  misc_RNA (1)...(19): siRNA sense strand
gaagcagcaucuccuuaaa

SEQ ID NO: 1595105 - RNA, 19 nt, Homo sapiens
  misc_RNA (1)...(19): siRNA sense strand
cagaugagcugguauggau

SEQ ID NO: 1595106 - RNA, 19 nt, Homo sapiens
  misc_RNA (1)...(19): siRNA sense strand
acaaauggguguaggagaa

SEQ ID NO: 1595107 - RNA, 19 nt, Homo sapiens
  misc_RNA (1)...(19): siRNA sense strand
ggaggaagauuuugagauu

SEQ ID NO: 1595108 - RNA, 19 nt, Homo sapiens
  misc_RNA (1)...(19): siRNA sense strand
ucuaagcuguugucugaua

SEQ ID NO: 1595109 - RNA, 19 nt, Homo sapiens
  misc_RNA (1)...(19): siRNA sense strand
acacuggccucccuuugua

SEQ ID NO: 1595110 - RNA, 19 nt, Homo sapiens
  misc_RNA (1)...(19): siRNA sense strand
aagaacaacccaaagaaua

SEQ ID NO: 1595111 - RNA, 19 nt, Homo sapiens
  misc_RNA (1)...(19): siRNA sense strand
gcuguugucugauauaagu

SEQ ID NO: 1595112 - RNA, 19 nt, Homo sapiens
  misc_RNA (1)...(19): siRNA sense strand
ggagaagggaaaucaauug

SEQ ID NO: 1595113 - RNA, 19 nt, Homo sapiens
  misc_RNA (1)...(19): siRNA sense strand
gcucaagcccuuaucugua

SEQ ID NO: 1595114 - RNA, 19 nt, Homo sapiens
  misc_RNA (1)...(19): siRNA sense strand
gguguagccuuguucagaa

SEQ ID NO: 1595115 - RNA, 19 nt, Homo sapiens
  misc_RNA (1)...(19): siRNA sense strand
uauaagugcucgucuaugg

SEQ ID NO: 1595116 - RNA, 19 nt, Homo sapiens
  misc_RNA (1)...(19): siRNA sense strand
gugacgagcucaucuucuu

SEQ ID NO: 1595117 - RNA, 19 nt, Homo sapiens
  misc_RNA (1)...(19): siRNA sense strand
gauauaagugcucgucuau

SEQ ID NO: 1595118 - RNA, 19 nt, Homo sapiens
  misc_RNA (1)...(19): siRNA sense strand
aaaccuggauccuucaguu

SEQ ID NO: 1595119 - RNA, 19 nt, Homo sapiens
  misc_RNA (1)...(19): siRNA sense strand
ugauauaagugcucgucua

SEQ ID NO: 1595120 - RNA, 19 nt, Homo sapiens
  misc_RNA (1)...(19): siRNA sense strand
acacaguggucauugaaga

SEQ ID NO: 1595121 - RNA, 19 nt, Homo sapiens
  misc_RNA (1)...(19): siRNA sense strand
gagcugguauggaucuuag

SEQ ID NO: 1595122 - RNA, 19 nt, Homo sapiens
  misc_RNA (1)...(19): siRNA sense strand
gaaugaacauccuaaaccu

SEQ ID NO: 1595123 - RNA, 19 nt, Homo sapiens
  misc_RNA (1)...(19): siRNA sense strand
cugacuaccuagaagaaua

SEQ ID NO: 1595124 - RNA, 19 nt, Homo sapiens
  misc_RNA (1)...(19): siRNA sense strand
ugacaggccucccgauucu

SEQ ID NO: 1595125 - RNA, 19 nt, Homo sapiens
  misc_RNA (1)...(19): siRNA sense strand
uaacugguguagccuuguu

SEQ ID NO: 1595126 - RNA, 19 nt, Homo sapiens
  misc_RNA (1)...(19): siRNA sense strand
gggaagcagcaucuccuua

SEQ ID NO: 1595127 - RNA, 19 nt, Homo sapiens
  misc_RNA (1)...(19): siRNA sense strand
ggaguuugaucuggaggaa

SEQ ID NO: 1595128 - RNA, 19 nt, Homo sapiens
  misc_RNA (1)...(19): siRNA sense strand
cauccuacagugcuucuua

SEQ ID NO: 1595129 - RNA, 19 nt, Homo sapiens
  misc_RNA (1)...(19): siRNA sense strand
gcucgucuaugguuuacau

SEQ ID NO: 1595130 - RNA, 19 nt, Homo sapiens
  misc_RNA (1)...(19): siRNA sense strand
gagaauggaacgguuaaug

SEQ ID NO: 1595131 - RNA, 19 nt, Homo sapiens
  misc_RNA (1)...(19): siRNA sense strand
gcuacucuauccaucaaau

SEQ ID NO: 1595132 - RNA, 19 nt, Homo sapiens
  misc_RNA (1)...(19): siRNA sense strand
aaagauuguugcuacucua

SEQ ID NO: 1595133 - RNA, 19 nt, Homo sapiens
  misc_RNA (1)...(19): siRNA sense strand
gcccuuaucuguagacacu

SEQ ID NO: 1595134 - RNA, 19 nt, Homo sapiens
  misc_RNA (1)...(19): siRNA sense strand
uaacacaguggucauugaa

SEQ ID NO: 1595135 - RNA, 19 nt, Homo sapiens
  misc_RNA (1)...(19): siRNA sense strand
agaauggaacgguuaauga

SEQ ID NO: 1595136 - RNA, 19 nt, Homo sapiens
  misc_RNA (1)...(19): siRNA sense strand
agauacagaugagcuggua

SEQ ID NO: 1595137 - RNA, 19 nt, Homo sapiens
  misc_RNA (1)...(19): siRNA sense strand
caaguaugaagaucagauu

SEQ ID NO: 1595138 - RNA, 19 nt, Homo sapiens
  misc_RNA (1)...(19): siRNA sense strand
aaggagaauuuaaggaugu

SEQ ID NO: 1595139 - RNA, 19 nt, Homo sapiens
  misc_RNA (1)...(19): siRNA sense strand
uggaauuccuuggcuguuu

SEQ ID NO: 1595140 - RNA, 19 nt, Homo sapiens
  misc_RNA (1)...(19): siRNA sense strand
ggacuggagcugggagaaa

SEQ ID NO: 1595141 - RNA, 19 nt, Homo sapiens
  misc_RNA (1)...(19): siRNA sense strand
ggauaacacaguggucauu

SEQ ID NO: 1595142 - RNA, 19 nt, Homo sapiens
  misc_RNA (1)...(19): siRNA sense strand
gauaacacaguggucauug

SEQ ID NO: 1595143 - RNA, 19 nt, Homo sapiens
  misc_RNA (1)...(19): siRNA sense strand
cagaauucauugacucuac

SEQ ID NO: 1595144 - RNA, 19 nt, Homo sapiens
  misc_RNA (1)...(19): siRNA sense strand
gagaauuuaaggauguuug

SEQ ID NO: 1595145 - RNA, 19 nt, Homo sapiens
  misc_RNA (1)...(19): siRNA sense strand
aaagaacaacccaaagaau

SEQ ID NO: 1595146 - RNA, 19 nt, Homo sapiens
  misc_RNA (1)...(19): siRNA sense strand
caucaaauggcacaaaugg

SEQ ID NO: 1595147 - RNA, 19 nt, Homo sapiens
  misc_RNA (1)...(19): siRNA sense strand
aagcuguugucugauauaa

SEQ ID NO: 1595148 - RNA, 19 nt, Homo sapiens
  misc_RNA (1)...(19): siRNA sense strand
gaccuuuguugacacugaa

SEQ ID NO: 1595149 - RNA, 19 nt, Homo sapiens
  misc_RNA (1)...(19): siRNA sense strand
guaugaagaucagauuacu

SEQ ID NO: 1595150 - RNA, 19 nt, Homo sapiens
  misc_RNA (1)...(19): siRNA sense strand
uaagugcucgucuaugguu

SEQ ID NO: 1595151 - RNA, 19 nt, Homo sapiens
  misc_RNA (1)...(19): siRNA sense strand
uuccuuggcuguuuauguu

SEQ ID NO: 1595152 - RNA, 19 nt, Homo sapiens
  misc_RNA (1)...(19): siRNA sense strand
auaacacaguggucauuga

SEQ ID NO: 1595153 - RNA, 19 nt, Homo sapiens
  misc_RNA (1)...(19): siRNA sense strand
ggugacaggccucccgauu

SEQ ID NO: 1595154 - RNA, 19 nt, Homo sapiens
  misc_RNA (1)...(19): siRNA sense strand
gaauggaacgguuaaugac

SEQ ID NO: 1595155 - RNA, 19 nt, Homo sapiens
  misc_RNA (1)...(19): siRNA sense strand
cucaagcccuuaucuguag

SEQ ID NO: 1595156 - RNA, 19 nt, Homo sapiens
  misc_RNA (1)...(19): siRNA sense strand
ugaccagacuuuccauugc

SEQ ID NO: 1595157 - RNA, 19 nt, Homo sapiens
  misc_RNA (1)...(19): siRNA sense strand
gagaagggaaaucaauugg

SEQ ID NO: 1595158 - RNA, 19 nt, Homo sapiens
  misc_RNA (1)...(19): siRNA sense strand
cuaagcuguugucugauau

SEQ ID NO: 1595159 - RNA, 19 nt, Homo sapiens
  misc_RNA (1)...(19): siRNA sense strand
aguuugaucuggaggaaga

SEQ ID NO: 1595160 - RNA, 19 nt, Homo sapiens
  misc_RNA (1)...(19): siRNA sense strand
agaccuuuguugacacuga

SEQ ID NO: 1595161 - RNA, 19 nt, Homo sapiens
  misc_RNA (1)...(19): siRNA sense strand
gcagaauucauugacucua

SEQ ID NO: 1595162 - RNA, 19 nt, Homo sapiens
  misc_RNA (1)...(19): siRNA sense strand
ugacuaccuagaagaauau

SEQ ID NO: 1595163 - RNA, 19 nt, Homo sapiens
  misc_RNA (1)...(19): siRNA sense strand
cagcgaaugaacauccuaa

SEQ ID NO: 1595164 - RNA, 19 nt, Homo sapiens
  misc_RNA (1)...(19): siRNA sense strand
ccuuaucuguagacacuug

SEQ ID NO: 1595165 - RNA, 19 nt, Homo sapiens
  misc_RNA (1)...(19): siRNA sense strand
uaagcuguugucugauaua

SEQ ID NO: 1595166 - RNA, 19 nt, Homo sapiens
  misc_RNA (1)...(19): siRNA sense strand
cauacaacccagaccuuug

SEQ ID NO: 1595167 - RNA, 19 nt, Homo sapiens
  misc_RNA (1)...(19): siRNA sense strand
agaacaacccaaagaauac

SEQ ID NO: 1595168 - RNA, 19 nt, Homo sapiens
  misc_RNA (1)...(19): siRNA sense strand
ucauacaacccagaccuuu

SEQ ID NO: 1595169 - RNA, 19 nt, Homo sapiens
  misc_RNA (1)...(19): siRNA sense strand
acaggccucccgauucuuu

SEQ ID NO: 1595170 - RNA, 19 nt, Homo sapiens
  misc_RNA (1)...(19): siRNA sense strand
acaguggucauugaagaua

SEQ ID NO: 1595171 - RNA, 19 nt, Homo sapiens
  misc_RNA (1)...(19): siRNA sense strand
ucaauuggagaaugguuug

SEQ ID NO: 1595172 - RNA, 19 nt, Homo sapiens
  misc_RNA (1)...(19): siRNA sense strand
gacuggagcugggagaaac

SEQ ID NO: 1595173 - RNA, 19 nt, Homo sapiens
  misc_RNA (1)...(19): siRNA sense strand
cauugacucuacugagcaa

SEQ ID NO: 1595174 - RNA, 19 nt, Homo sapiens
  misc_RNA (1)...(19): siRNA sense strand
ucacugacuaccuagaaga

SEQ ID NO: 1595175 - RNA, 19 nt, Homo sapiens
  misc_RNA (1)...(19): siRNA sense strand
cgaaugaacauccuaaacc

SEQ ID NO: 1595176 - RNA, 19 nt, Homo sapiens
  misc_RNA (1)...(19): siRNA sense strand
uguugacacugaagagaau

SEQ ID NO: 1595177 - RNA, 19 nt, Homo sapiens
  misc_RNA (1)...(19): siRNA sense strand
gauuguugcuacucuaucc

SEQ ID NO: 1595178 - RNA, 19 nt, Homo sapiens
  misc_RNA (1)...(19): siRNA sense strand
gaauuaguucagaaacauc

SEQ ID NO: 1595179 - RNA, 19 nt, Homo sapiens
  misc_RNA (1)...(19): siRNA sense strand
ccuagaagaauauccagau

SEQ ID NO: 1595180 - RNA, 19 nt, Homo sapiens
  misc_RNA (1)...(19): siRNA sense strand
caguggucauugaagauau

SEQ ID NO: 1595181 - RNA, 19 nt, Homo sapiens
  misc_RNA (1)...(19): siRNA sense strand
ccaaguaugaagaucagau

SEQ ID NO: 1595182 - RNA, 19 nt, Homo sapiens
  misc_RNA (1)...(19): siRNA sense strand
gcgaaugaacauccuaaac

SEQ ID NO: 1595183 - RNA, 19 nt, Homo sapiens
  misc_RNA (1)...(19): siRNA sense strand
gugacaggccucccgauuc

SEQ ID NO: 1595184 - RNA, 19 nt, Homo sapiens
  misc_RNA (1)...(19): siRNA sense strand
uaggagaagggaaaucaau

SEQ ID NO: 1595185 - RNA, 19 nt, Homo sapiens
  misc_RNA (1)...(19): siRNA sense strand
ggguguaggagaagggaaa

SEQ ID NO: 1595186 - RNA, 19 nt, Homo sapiens
  misc_RNA (1)...(19): siRNA sense strand
uacagugcuucuuagauag

SEQ ID NO: 1595187 - RNA, 19 nt, Homo sapiens
  misc_RNA (1)...(19): siRNA sense strand
gaauuccuuggcuguuuau

SEQ ID NO: 1595188 - RNA, 19 nt, Homo sapiens
  misc_RNA (1)...(19): siRNA sense strand
agaauaccaacgcauccua

SEQ ID NO: 1595189 - RNA, 19 nt, Homo sapiens
  misc_RNA (1)...(19): siRNA sense strand
acccagaccuuuguugaca

SEQ ID NO: 1595190 - RNA, 19 nt, Homo sapiens
  misc_RNA (1)...(19): siRNA sense strand
cuguuuauguuucaaugga

SEQ ID NO: 1595191 - RNA, 19 nt, Homo sapiens
  misc_RNA (1)...(19): siRNA sense strand
uacaguugcacagguguua

SEQ ID NO: 1595192 - RNA, 19 nt, Homo sapiens
  misc_RNA (1)...(19): siRNA sense strand
gaugagcugguauggaucu

SEQ ID NO: 1595193 - RNA, 19 nt, Homo sapiens
  misc_RNA (1)...(19): siRNA sense strand
guaggagaagggaaaucaa

SEQ ID NO: 1595194 - RNA, 19 nt, Homo sapiens
  misc_RNA (1)...(19): siRNA sense strand
caguugcacagguguuaaa

SEQ ID NO: 1595195 - RNA, 19 nt, Homo sapiens
  misc_RNA (1)...(19): siRNA sense strand
ggagaauuuaaggauguuu

SEQ ID NO: 1595196 - RNA, 19 nt, Homo sapiens
  misc_RNA (1)...(19): siRNA sense strand
ugguuuacauacagaagga

SEQ ID NO: 1595197 - RNA, 19 nt, Homo sapiens
  misc_RNA (1)...(19): siRNA sense strand
cuacagugcuucuuagaua

SEQ ID NO: 1595198 - RNA, 19 nt, Homo sapiens
  misc_RNA (1)...(19): siRNA sense strand
ggaauuccuuggcuguuua

SEQ ID NO: 1595199 - RNA, 19 nt, Homo sapiens
  misc_RNA (1)...(19): siRNA sense strand
gaagagaauggaacgguua

SEQ ID NO: 1595200 - RNA, 19 nt, Homo sapiens
  misc_RNA (1)...(19): siRNA sense strand
gaaaucaauuggagaaugg

SEQ ID NO: 1595201 - RNA, 19 nt, Homo sapiens
  misc_RNA (1)...(19): siRNA sense strand
ggaaaucaauuggagaaug

SEQ ID NO: 1595202 - RNA, 19 nt, Homo sapiens
  misc_RNA (1)...(19): siRNA sense strand
acaaauggguguaggagaa

SEQ ID NO: 1595203 - RNA, 19 nt, Homo sapiens
  misc_RNA (1)...(19): siRNA sense strand
ggaggaagauuuugagauu

SEQ ID NO: 1595204 - RNA, 19 nt, Homo sapiens
  misc_RNA (1)...(19): siRNA sense strand
acacuggccucccuuugua

SEQ ID NO: 1595205 - RNA, 19 nt, Homo sapiens
  misc_RNA (1)...(19): siRNA sense strand
aagaacaacccaaagaaua

SEQ ID NO: 1595206 - RNA, 19 nt, Homo sapiens
  misc_RNA (1)...(19): siRNA sense strand
ggagaagggaaaucaauug

SEQ ID NO: 1595207 - RNA, 19 nt, Homo sapiens
  misc_RNA (1)...(19): siRNA sense strand
gcucaagcccuuaucugua

SEQ ID NO: 1595208 - RNA, 19 nt, Homo sapiens
  misc_RNA (1)...(19): siRNA sense strand
gguguagccuuguucagaa

SEQ ID NO: 1595209 - RNA, 19 nt, Homo sapiens
  misc_RNA (1)...(19): siRNA sense strand
gugacgagcucaucuucuu

SEQ ID NO: 1595210 - RNA, 19 nt, Homo sapiens
  misc_RNA (1)...(19): siRNA sense strand
aaaccuggauccuucaguu

SEQ ID NO: 1595211 - RNA, 19 nt, Homo sapiens
  misc_RNA (1)...(19): siRNA sense strand
acacaguggucauugaaga

SEQ ID NO: 1595212 - RNA, 19 nt, Homo sapiens
  misc_RNA (1)...(19): siRNA sense strand
gaaugaacauccuaaaccu

SEQ ID NO: 1595213 - RNA, 19 nt, Homo sapiens
  misc_RNA (1)...(19): siRNA sense strand
ugacaggccucccgauucu

SEQ ID NO: 1595214 - RNA, 19 nt, Homo sapiens
  misc_RNA (1)...(19): siRNA sense strand
uaacugguguagccuuguu

SEQ ID NO: 1595215 - RNA, 19 nt, Homo sapiens
  misc_RNA (1)...(19): siRNA sense strand
ggaguuugaucuggaggaa

SEQ ID NO: 1595216 - RNA, 19 nt, Homo sapiens
  misc_RNA (1)...(19): siRNA sense strand
cauccuacagugcuucuua

SEQ ID NO: 1595217 - RNA, 19 nt, Homo sapiens
  misc_RNA (1)...(19): siRNA sense strand
aaagauuguugcuacucua

SEQ ID NO: 1595218 - RNA, 19 nt, Homo sapiens
  misc_RNA (1)...(19): siRNA sense strand
gcccuuaucuguagacacu

SEQ ID NO: 1595219 - RNA, 19 nt, Homo sapiens
  misc_RNA (1)...(19): siRNA sense strand
gagaauggaacgguuaaug

SEQ ID NO: 1595220 - RNA, 19 nt, Homo sapiens
  misc_RNA (1)...(19): siRNA sense strand
gcuacucuauccaucaaau

SEQ ID NO: 1595221 - RNA, 19 nt, Homo sapiens
  misc_RNA (1)...(19): siRNA sense strand
uaacacaguggucauugaa

SEQ ID NO: 1595222 - RNA, 19 nt, Homo sapiens
  misc_RNA (1)...(19): siRNA sense strand
agaauggaacgguuaauga

SEQ ID NO: 1595223 - RNA, 19 nt, Homo sapiens
  misc_RNA (1)...(19): siRNA sense strand
uggaauuccuuggcuguuu

SEQ ID NO: 1595224 - RNA, 19 nt, Homo sapiens
  misc_RNA (1)...(19): siRNA sense strand
aaggagaauuuaaggaugu

SEQ ID NO: 1595225 - RNA, 19 nt, Homo sapiens
  misc_RNA (1)...(19): siRNA sense strand
ggauaacacaguggucauu

SEQ ID NO: 1595226 - RNA, 19 nt, Homo sapiens
  misc_RNA (1)...(19): siRNA sense strand
ggacuggagcugggagaaa

SEQ ID NO: 1595227 - RNA, 19 nt, Homo sapiens
  misc_RNA (1)...(19): siRNA sense strand
gauaacacaguggucauug

SEQ ID NO: 1595228 - RNA, 19 nt, Homo sapiens
  misc_RNA (1)...(19): siRNA sense strand
cagaauucauugacucuac

SEQ ID NO: 1595229 - RNA, 19 nt, Homo sapiens
  misc_RNA (1)...(19): siRNA sense strand
gagaauuuaaggauguuug

SEQ ID NO: 1595230 - RNA, 19 nt, Homo sapiens
  misc_RNA (1)...(19): siRNA sense strand
caucaaauggcacaaaugg

SEQ ID NO: 1595231 - RNA, 19 nt, Homo sapiens
  misc_RNA (1)...(19): siRNA sense strand
aaagaacaacccaaagaau

SEQ ID NO: 1595232 - RNA, 19 nt, Homo sapiens
  misc_RNA (1)...(19): siRNA sense strand
gaccuuuguugacacugaa

SEQ ID NO: 1595233 - RNA, 19 nt, Homo sapiens
  misc_RNA (1)...(19): siRNA sense strand
uuccuuggcuguuuauguu

SEQ ID NO: 1595234 - RNA, 19 nt, Homo sapiens
  misc_RNA (1)...(19): siRNA sense strand
auaacacaguggucauuga

SEQ ID NO: 1595235 - RNA, 19 nt, Homo sapiens
  misc_RNA (1)...(19): siRNA sense strand
ggugacaggccucccgauu

SEQ ID NO: 1595236 - RNA, 19 nt, Homo sapiens
  misc_RNA (1)...(19): siRNA sense strand
gaauggaacgguuaaugac

SEQ ID NO: 1595237 - RNA, 19 nt, Homo sapiens
  misc_RNA (1)...(19): siRNA sense strand
gagaagggaaaucaauugg

SEQ ID NO: 1595238 - RNA, 19 nt, Homo sapiens
  misc_RNA (1)...(19): siRNA sense strand
ugaccagacuuuccauugc

SEQ ID NO: 1595239 - RNA, 19 nt, Homo sapiens
  misc_RNA (1)...(19): siRNA sense strand
cucaagcccuuaucuguag

SEQ ID NO: 1595240 - RNA, 19 nt, Homo sapiens
  misc_RNA (1)...(19): siRNA sense strand
agaccuuuguugacacuga

SEQ ID NO: 1595241 - RNA, 19 nt, Homo sapiens
  misc_RNA (1)...(19): siRNA sense strand
aguuugaucuggaggaaga

SEQ ID NO: 1595242 - RNA, 19 nt, Homo sapiens
  misc_RNA (1)...(19): siRNA sense strand
gcagaauucauugacucua

SEQ ID NO: 1595243 - RNA, 19 nt, Homo sapiens
  misc_RNA (1)...(19): siRNA sense strand
cagcgaaugaacauccuaa

SEQ ID NO: 1595244 - RNA, 19 nt, Homo sapiens
  misc_RNA (1)...(19): siRNA sense strand
ccuuaucuguagacacuug

SEQ ID NO: 1595245 - RNA, 19 nt, Homo sapiens
  misc_RNA (1)...(19): siRNA sense strand
cauacaacccagaccuuug

SEQ ID NO: 1595246 - RNA, 19 nt, Homo sapiens
  misc_RNA (1)...(19): siRNA sense strand
ucaauuggagaaugguuug

SEQ ID NO: 1595247 - RNA, 19 nt, Homo sapiens
  misc_RNA (1)...(19): siRNA sense strand
agaacaacccaaagaauac

SEQ ID NO: 1595248 - RNA, 19 nt, Homo sapiens
  misc_RNA (1)...(19): siRNA sense strand
ucauacaacccagaccuuu

SEQ ID NO: 1595249 - RNA, 19 nt, Homo sapiens
  misc_RNA (1)...(19): siRNA sense strand
acaggccucccgauucuuu

SEQ ID NO: 1595250 - RNA, 19 nt, Homo sapiens
  misc_RNA (1)...(19): siRNA sense strand
acaguggucauugaagaua

SEQ ID NO: 1595251 - RNA, 19 nt, Homo sapiens
  misc_RNA (1)...(19): siRNA sense strand
gacuggagcugggagaaac

SEQ ID NO: 1595252 - RNA, 19 nt, Homo sapiens
  misc_RNA (1)...(19): siRNA sense strand
cauugacucuacugagcaa

SEQ ID NO: 1595253 - RNA, 19 nt, Homo sapiens
  misc_RNA (1)...(19): siRNA sense strand
cgaaugaacauccuaaacc

SEQ ID NO: 1595254 - RNA, 19 nt, Homo sapiens
  misc_RNA (1)...(19): siRNA sense strand
uguugacacugaagagaau

SEQ ID NO: 1595255 - RNA, 19 nt, Homo sapiens
  misc_RNA (1)...(19): siRNA sense strand
caguggucauugaagauau

SEQ ID NO: 1595256 - RNA, 19 nt, Homo sapiens
  misc_RNA (1)...(19): siRNA sense strand
gaauuaguucagaaacauc

SEQ ID NO: 1595257 - RNA, 19 nt, Homo sapiens
  misc_RNA (1)...(19): siRNA sense strand
gauuguugcuacucuaucc

SEQ ID NO: 1595258 - RNA, 19 nt, Homo sapiens
  misc_RNA (1)...(19): siRNA sense strand
uaggagaagggaaaucaau

SEQ ID NO: 1595259 - RNA, 19 nt, Homo sapiens
  misc_RNA (1)...(19): siRNA sense strand
gcgaaugaacauccuaaac

SEQ ID NO: 1595260 - RNA, 19 nt, Homo sapiens
  misc_RNA (1)...(19): siRNA sense strand
gugacaggccucccgauuc

SEQ ID NO: 1595261 - RNA, 19 nt, Homo sapiens
  misc_RNA (1)...(19): siRNA sense strand
ggguguaggagaagggaaa

SEQ ID NO: 1595262 - RNA, 19 nt, Homo sapiens
  misc_RNA (1)...(19): siRNA sense strand
gaauuccuuggcuguuuau

SEQ ID NO: 1595263 - RNA, 19 nt, Homo sapiens
  misc_RNA (1)...(19): siRNA sense strand
uacagugcuucuuagauag

SEQ ID NO: 1595264 - RNA, 19 nt, Homo sapiens
  misc_RNA (1)...(19): siRNA sense strand
uacaguugcacagguguua

SEQ ID NO: 1595265 - RNA, 19 nt, Homo sapiens
  misc_RNA (1)...(19): siRNA sense strand
acccagaccuuuguugaca

SEQ ID NO: 1595266 - RNA, 19 nt, Homo sapiens
  misc_RNA (1)...(19): siRNA sense strand
agaauaccaacgcauccua

SEQ ID NO: 1595267 - RNA, 19 nt, Homo sapiens
  misc_RNA (1)...(19): siRNA sense strand
cuguuuauguuucaaugga

SEQ ID NO: 1595268 - RNA, 19 nt, Homo sapiens
  misc_RNA (1)...(19): siRNA sense strand
guaggagaagggaaaucaa

SEQ ID NO: 1595269 - RNA, 19 nt, Homo sapiens
  misc_RNA (1)...(19): siRNA sense strand
caguugcacagguguuaaa

SEQ ID NO: 1595270 - RNA, 19 nt, Homo sapiens
  misc_RNA (1)...(19): siRNA sense strand
ggagaauuuaaggauguuu

SEQ ID NO: 1595271 - RNA, 19 nt, Homo sapiens
  misc_RNA (1)...(19): siRNA sense strand
uugcuacucuauccaucaa

SEQ ID NO: 1595272 - RNA, 19 nt, Homo sapiens
  misc_RNA (1)...(19): siRNA sense strand
ggacauggaucgcaaugaa

SEQ ID NO: 1595273 - RNA, 19 nt, Homo sapiens
  misc_RNA (1)...(19): siRNA sense strand
gcaaugaauucgaccagua

SEQ ID NO: 1595274 - RNA, 19 nt, Homo sapiens
  misc_RNA (1)...(19): siRNA sense strand
gcccacaccuccugaaaug

SEQ ID NO: 1595275 - RNA, 19 nt, Homo sapiens
  misc_RNA (1)...(19): siRNA sense strand
gcaagaugcugggaaaguc

SEQ ID NO: 1595276 - RNA, 19 nt, Homo sapiens
  misc_RNA (1)...(19): siRNA sense strand
uacaacagcuacagugugu

SEQ ID NO: 1595277 - RNA, 19 nt, Homo sapiens
  misc_RNA (1)...(19): siRNA sense strand
gaauucgaccaguauuuga

SEQ ID NO: 1595278 - RNA, 19 nt, Homo sapiens
  misc_RNA (1)...(19): siRNA sense strand
caacagcuacaguguguca

SEQ ID NO: 1595279 - RNA, 19 nt, Homo sapiens
  misc_RNA (1)...(19): siRNA sense strand
caagcccucuccacuguag

SEQ ID NO: 1595280 - RNA, 19 nt, Homo sapiens
  misc_RNA (1)...(19): siRNA sense strand
caaugaauucgaccaguau

SEQ ID NO: 1595281 - RNA, 19 nt, Homo sapiens
  misc_RNA (1)...(19): siRNA sense strand
ugaauucgaccaguauuug

SEQ ID NO: 1595282 - RNA, 19 nt, Homo sapiens
  misc_RNA (1)...(19): siRNA sense strand
agaacgcccugccggagaa

SEQ ID NO: 1595283 - RNA, 19 nt, Homo sapiens
  misc_RNA (1)...(19): siRNA sense strand
cccaagcccucuccacugu

SEQ ID NO: 1595284 - RNA, 19 nt, Homo sapiens
  misc_RNA (1)...(19): siRNA sense strand
ccacguacuacaacagcua

SEQ ID NO: 1595285 - RNA, 19 nt, Homo sapiens
  misc_RNA (1)...(19): siRNA sense strand
acauggaucgcaaugaauu

SEQ ID NO: 1595286 - RNA, 19 nt, Homo sapiens
  misc_RNA (1)...(19): siRNA sense strand
ccacggccacguacuacaa

SEQ ID NO: 1595287 - RNA, 19 nt, Homo sapiens
  misc_RNA (1)...(19): siRNA sense strand
ccacaccuccugaaauguc

SEQ ID NO: 1595288 - RNA, 19 nt, Homo sapiens
  misc_RNA (1)...(19): siRNA sense strand
cagcuacagugugucauag

SEQ ID NO: 1595289 - RNA, 19 nt, Homo sapiens
  misc_RNA (1)...(19): siRNA sense strand
acagcuacagugugucaua

SEQ ID NO: 1595290 - RNA, 19 nt, Homo sapiens
  misc_RNA (1)...(19): siRNA sense strand
gggccaaggacgagaggaa

SEQ ID NO: 1595291 - RNA, 19 nt, Homo sapiens
  misc_RNA (1)...(19): siRNA sense strand
ccccaucuccugccuauua

SEQ ID NO: 1595292 - RNA, 19 nt, Homo sapiens
  misc_RNA (1)...(19): siRNA sense strand
guacuacaacagcuacagu

SEQ ID NO: 1595293 - RNA, 19 nt, Homo sapiens
  misc_RNA (1)...(19): siRNA sense strand
ggccaaggacgagaggaaa

SEQ ID NO: 1595294 - RNA, 19 nt, Homo sapiens
  misc_RNA (1)...(19): siRNA sense strand
cgcugacgcugucccagaa

SEQ ID NO: 1595295 - RNA, 19 nt, Homo sapiens
  misc_RNA (1)...(19): siRNA sense strand
gacauggaucgcaaugaau

SEQ ID NO: 1595296 - RNA, 19 nt, Homo sapiens
  misc_RNA (1)...(19): siRNA sense strand
acgccgagcucagcaagau

SEQ ID NO: 1595297 - RNA, 19 nt, Homo sapiens
  misc_RNA (1)...(19): siRNA sense strand
acagagaccagccucaucu

SEQ ID NO: 1595298 - RNA, 19 nt, Homo sapiens
  misc_RNA (1)...(19): siRNA sense strand
ccacagagaccagccucau

SEQ ID NO: 1595299 - RNA, 19 nt, Homo sapiens
  misc_RNA (1)...(19): siRNA sense strand
gcaaagggcacucagaauc

SEQ ID NO: 1595300 - RNA, 19 nt, Homo sapiens
  misc_RNA (1)...(19): siRNA sense strand
ggaccagucuguguauuuc

SEQ ID NO: 1595301 - RNA, 19 nt, Homo sapiens
  misc_RNA (1)...(19): siRNA sense strand
gccaagcagugacuucuga

SEQ ID NO: 1595302 - RNA, 19 nt, Homo sapiens
  misc_RNA (1)...(19): siRNA sense strand
ggaaggaggaccagucugu

SEQ ID NO: 1595303 - RNA, 19 nt, Homo sapiens
  misc_RNA (1)...(19): siRNA sense strand
caaagggcacucagaauca

SEQ ID NO: 1595304 - RNA, 19 nt, Homo sapiens
  misc_RNA (1)...(19): siRNA sense strand
ggaccaaacucaccaucac

SEQ ID NO: 1595305 - RNA, 19 nt, Homo sapiens
  misc_RNA (1)...(19): siRNA sense strand
ucagaaucauggcaccuaa

SEQ ID NO: 1595306 - RNA, 19 nt, Homo sapiens
  misc_RNA (1)...(19): siRNA sense strand
gaucagggaggcagcaguu

SEQ ID NO: 1595307 - RNA, 19 nt, Homo sapiens
  misc_RNA (1)...(19): siRNA sense strand
ucucaaaccugcggaagga

SEQ ID NO: 1595308 - RNA, 19 nt, Homo sapiens
  misc_RNA (1)...(19): siRNA sense strand
ugaaccggcucuuucugaa

SEQ ID NO: 1595309 - RNA, 19 nt, Homo sapiens
  misc_RNA (1)...(19): siRNA sense strand
ggaggaccagucuguguau

SEQ ID NO: 1595310 - RNA, 19 nt, Homo sapiens
  misc_RNA (1)...(19): siRNA sense strand
gaggaccagucuguguauu

SEQ ID NO: 1595311 - RNA, 19 nt, Homo sapiens
  misc_RNA (1)...(19): siRNA sense strand
gugaaccggcucuuucuga

SEQ ID NO: 1595312 - RNA, 19 nt, Homo sapiens
  misc_RNA (1)...(19): siRNA sense strand
gcaccuaagucuggacacu

SEQ ID NO: 1595313 - RNA, 19 nt, Homo sapiens
  misc_RNA (1)...(19): siRNA sense strand
cagcagcacaaccaccaua

SEQ ID NO: 1595314 - RNA, 19 nt, Homo sapiens
  misc_RNA (1)...(19): siRNA sense strand
aagcaaagggcacucagaa

SEQ ID NO: 1595315 - RNA, 19 nt, Homo sapiens
  misc_RNA (1)...(19): siRNA sense strand
uggaggagaaggaaaggua

SEQ ID NO: 1595316 - RNA, 19 nt, Homo sapiens
  misc_RNA (1)...(19): siRNA sense strand
ggcugucgcugugcucaaa

SEQ ID NO: 1595317 - RNA, 19 nt, Homo sapiens
  misc_RNA (1)...(19): siRNA sense strand
ggccucagggucacagaaa

SEQ ID NO: 1595318 - RNA, 19 nt, Homo sapiens
  misc_RNA (1)...(19): siRNA sense strand
uaugugaaccggcucuuuc

SEQ ID NO: 1595319 - RNA, 19 nt, Homo sapiens
  misc_RNA (1)...(19): siRNA sense strand
gagcuggacacccggagau

SEQ ID NO: 1595320 - RNA, 19 nt, Homo sapiens
  misc_RNA (1)...(19): siRNA sense strand
aaagggcacucagaaucau

SEQ ID NO: 1595321 - RNA, 19 nt, Homo sapiens
  misc_RNA (1)...(19): siRNA sense strand
aaucauggcaccuaagucu

SEQ ID NO: 1595322 - RNA, 19 nt, Homo sapiens
  misc_RNA (1)...(19): siRNA sense strand
gcaguugcaguccaucaag

SEQ ID NO: 1595323 - RNA, 19 nt, Homo sapiens
  misc_RNA (1)...(19): siRNA sense strand
cagggucacagaaagcaaa

SEQ ID NO: 1595324 - RNA, 19 nt, Homo sapiens
  misc_RNA (1)...(19): siRNA sense strand
gaaccggcucuuucugaac

SEQ ID NO: 1595325 - RNA, 19 nt, Homo sapiens
  misc_RNA (1)...(19): siRNA sense strand
ggcagcaguugcaguccau

SEQ ID NO: 1595326 - RNA, 19 nt, Homo sapiens
  misc_RNA (1)...(19): siRNA sense strand
gggaccaaacucaccauca

SEQ ID NO: 1595327 - RNA, 19 nt, Homo sapiens
  misc_RNA (1)...(19): siRNA sense strand
gcaaagggcacucagaauc

SEQ ID NO: 1595328 - RNA, 19 nt, Homo sapiens
  misc_RNA (1)...(19): siRNA sense strand
ggaccagucuguguauuuc

SEQ ID NO: 1595329 - RNA, 19 nt, Homo sapiens
  misc_RNA (1)...(19): siRNA sense strand
ggaaggaggaccagucugu

SEQ ID NO: 1595330 - RNA, 19 nt, Homo sapiens
  misc_RNA (1)...(19): siRNA sense strand
caaagggcacucagaauca

SEQ ID NO: 1595331 - RNA, 19 nt, Homo sapiens
  misc_RNA (1)...(19): siRNA sense strand
ggaccaaacucaccaucac

SEQ ID NO: 1595332 - RNA, 19 nt, Homo sapiens
  misc_RNA (1)...(19): siRNA sense strand
ucagaaucauggcaccuaa

SEQ ID NO: 1595333 - RNA, 19 nt, Homo sapiens
  misc_RNA (1)...(19): siRNA sense strand
gaucagggaggcagcaguu

SEQ ID NO: 1595334 - RNA, 19 nt, Homo sapiens
  misc_RNA (1)...(19): siRNA sense strand
ucucaaaccugcggaagga

SEQ ID NO: 1595335 - RNA, 19 nt, Homo sapiens
  misc_RNA (1)...(19): siRNA sense strand
ugaaccggcucuuucugaa

SEQ ID NO: 1595336 - RNA, 19 nt, Homo sapiens
  misc_RNA (1)...(19): siRNA sense strand
ggaggaccagucuguguau

SEQ ID NO: 1595337 - RNA, 19 nt, Homo sapiens
  misc_RNA (1)...(19): siRNA sense strand
gaggaccagucuguguauu

SEQ ID NO: 1595338 - RNA, 19 nt, Homo sapiens
  misc_RNA (1)...(19): siRNA sense strand
gugaaccggcucuuucuga

SEQ ID NO: 1595339 - RNA, 19 nt, Homo sapiens
  misc_RNA (1)...(19): siRNA sense strand
gcaccuaagucuggacacu

SEQ ID NO: 1595340 - RNA, 19 nt, Homo sapiens
  misc_RNA (1)...(19): siRNA sense strand
cagcagcacaaccaccaua

SEQ ID NO: 1595341 - RNA, 19 nt, Homo sapiens
  misc_RNA (1)...(19): siRNA sense strand
aagcaaagggcacucagaa

SEQ ID NO: 1595342 - RNA, 19 nt, Homo sapiens
  misc_RNA (1)...(19): siRNA sense strand
uggaggagaaggaaaggua

SEQ ID NO: 1595343 - RNA, 19 nt, Homo sapiens
  misc_RNA (1)...(19): siRNA sense strand
ggcugucgcugugcucaaa

SEQ ID NO: 1595344 - RNA, 19 nt, Homo sapiens
  misc_RNA (1)...(19): siRNA sense strand
uaugugaaccggcucuuuc

SEQ ID NO: 1595345 - RNA, 19 nt, Homo sapiens
  misc_RNA (1)...(19): siRNA sense strand
ggccucagggucacagaaa

SEQ ID NO: 1595346 - RNA, 19 nt, Homo sapiens
  misc_RNA (1)...(19): siRNA sense strand
gagcuggacacccggagau

SEQ ID NO: 1595347 - RNA, 19 nt, Homo sapiens
  misc_RNA (1)...(19): siRNA sense strand
aaagggcacucagaaucau

SEQ ID NO: 1595348 - RNA, 19 nt, Homo sapiens
  misc_RNA (1)...(19): siRNA sense strand
aaucauggcaccuaagucu

SEQ ID NO: 1595349 - RNA, 19 nt, Homo sapiens
  misc_RNA (1)...(19): siRNA sense strand
gcaguugcaguccaucaag

SEQ ID NO: 1595350 - RNA, 19 nt, Homo sapiens
  misc_RNA (1)...(19): siRNA sense strand
cagggucacagaaagcaaa

SEQ ID NO: 1595351 - RNA, 19 nt, Homo sapiens
  misc_RNA (1)...(19): siRNA sense strand
gaaccggcucuuucugaac

SEQ ID NO: 1595352 - RNA, 19 nt, Homo sapiens
  misc_RNA (1)...(19): siRNA sense strand
ggcagcaguugcaguccau

SEQ ID NO: 1595353 - RNA, 19 nt, Homo sapiens
  misc_RNA (1)...(19): siRNA sense strand
gggaccaaacucaccauca

SEQ ID NO: 1595354 - RNA, 19 nt, Homo sapiens
  misc_RNA (1)...(19): siRNA sense strand
gcaaagggcacucagaauc

SEQ ID NO: 1595355 - RNA, 19 nt, Homo sapiens
  misc_RNA (1)...(19): siRNA sense strand
ggaccagucuguguauuuc

SEQ ID NO: 1595356 - RNA, 19 nt, Homo sapiens
  misc_RNA (1)...(19): siRNA sense strand
gccaagcagugacuucuga

SEQ ID NO: 1595357 - RNA, 19 nt, Homo sapiens
  misc_RNA (1)...(19): siRNA sense strand
ggaaggaggaccagucugu

SEQ ID NO: 1595358 - RNA, 19 nt, Homo sapiens
  misc_RNA (1)...(19): siRNA sense strand
caaagggcacucagaauca

SEQ ID NO: 1595359 - RNA, 19 nt, Homo sapiens
  misc_RNA (1)...(19): siRNA sense strand
ggaccaaacucaccaucac

SEQ ID NO: 1595360 - RNA, 19 nt, Homo sapiens
  misc_RNA (1)...(19): siRNA sense strand
ucagaaucauggcaccuaa

SEQ ID NO: 1595361 - RNA, 19 nt, Homo sapiens
  misc_RNA (1)...(19): siRNA sense strand
gaucagggaggcagcaguu

SEQ ID NO: 1595362 - RNA, 19 nt, Homo sapiens
  misc_RNA (1)...(19): siRNA sense strand
ucucaaaccugcggaagga

SEQ ID NO: 1595363 - RNA, 19 nt, Homo sapiens
  misc_RNA (1)...(19): siRNA sense strand
ugaaccggcucuuucugaa

SEQ ID NO: 1595364 - RNA, 19 nt, Homo sapiens
  misc_RNA (1)...(19): siRNA sense strand
ggaggaccagucuguguau

SEQ ID NO: 1595365 - RNA, 19 nt, Homo sapiens
  misc_RNA (1)...(19): siRNA sense strand
gaggaccagucuguguauu

SEQ ID NO: 1595366 - RNA, 19 nt, Homo sapiens
  misc_RNA (1)...(19): siRNA sense strand
gugaaccggcucuuucuga

SEQ ID NO: 1595367 - RNA, 19 nt, Homo sapiens
  misc_RNA (1)...(19): siRNA sense strand
gcaccuaagucuggacacu

SEQ ID NO: 1595368 - RNA, 19 nt, Homo sapiens
  misc_RNA (1)...(19): siRNA sense strand
cagcagcacaaccaccaua

SEQ ID NO: 1595369 - RNA, 19 nt, Homo sapiens
  misc_RNA (1)...(19): siRNA sense strand
aagcaaagggcacucagaa

SEQ ID NO: 1595370 - RNA, 19 nt, Homo sapiens
  misc_RNA (1)...(19): siRNA sense strand
uggaggagaaggaaaggua

SEQ ID NO: 1595371 - RNA, 19 nt, Homo sapiens
  misc_RNA (1)...(19): siRNA sense strand
ggcugucgcugugcucaaa

SEQ ID NO: 1595372 - RNA, 19 nt, Homo sapiens
  misc_RNA (1)...(19): siRNA sense strand
ggccucagggucacagaaa

SEQ ID NO: 1595373 - RNA, 19 nt, Homo sapiens
  misc_RNA (1)...(19): siRNA sense strand
uaugugaaccggcucuuuc

SEQ ID NO: 1595374 - RNA, 19 nt, Homo sapiens
  misc_RNA (1)...(19): siRNA sense strand
gagcuggacacccggagau

SEQ ID NO: 1595375 - RNA, 19 nt, Homo sapiens
  misc_RNA (1)...(19): siRNA sense strand
aaagggcacucagaaucau

SEQ ID NO: 1595376 - RNA, 19 nt, Homo sapiens
  misc_RNA (1)...(19): siRNA sense strand
aaucauggcaccuaagucu

SEQ ID NO: 1595377 - RNA, 19 nt, Homo sapiens
  misc_RNA (1)...(19): siRNA sense strand
gcaguugcaguccaucaag

SEQ ID NO: 1595378 - RNA, 19 nt, Homo sapiens
  misc_RNA (1)...(19): siRNA sense strand
cagggucacagaaagcaaa

SEQ ID NO: 1595379 - RNA, 19 nt, Homo sapiens
  misc_RNA (1)...(19): siRNA sense strand
gaaccggcucuuucugaac

SEQ ID NO: 1595380 - RNA, 19 nt, Homo sapiens
  misc_RNA (1)...(19): siRNA sense strand
ggcagcaguugcaguccau

SEQ ID NO: 1595381 - RNA, 19 nt, Homo sapiens
  misc_RNA (1)...(19): siRNA sense strand
gggaccaaacucaccauca

SEQ ID NO: 1595382 - RNA, 19 nt, Homo sapiens
  misc_RNA (1)...(19): siRNA sense strand
uaagugcccuccagucucu

SEQ ID NO: 1595383 - RNA, 19 nt, Homo sapiens
  misc_RNA (1)...(19): siRNA sense strand
caaaugcccuccaaagugu

SEQ ID NO: 1595384 - RNA, 19 nt, Homo sapiens
  misc_RNA (1)...(19): siRNA sense strand
caagugcccucccaagugu

SEQ ID NO: 1595385 - RNA, 19 nt, Homo sapiens
  misc_RNA (1)...(19): siRNA sense strand
ccaaaugcccuccaaagug

SEQ ID NO: 1595386 - RNA, 19 nt, Homo sapiens
  misc_RNA (1)...(19): siRNA sense strand
uaagugcccuccagucucu

SEQ ID NO: 1595387 - RNA, 19 nt, Homo sapiens
  misc_RNA (1)...(19): siRNA sense strand
ccaagugcccucccaagug

SEQ ID NO: 1595388 - RNA, 19 nt, Homo sapiens
  misc_RNA (1)...(19): siRNA sense strand
uaagugcccuccugucucu

SEQ ID NO: 1595389 - RNA, 19 nt, Homo sapiens
  misc_RNA (1)...(19): siRNA sense strand
ccaagugcccucccaagug

SEQ ID NO: 1595390 - RNA, 19 nt, Homo sapiens
  misc_RNA (1)...(19): siRNA sense strand
gaaagacacuccaacuaau

SEQ ID NO: 1595391 - RNA, 19 nt, Homo sapiens
  misc_RNA (1)...(19): siRNA sense strand
cagcaggaauuacuucuua

SEQ ID NO: 1595392 - RNA, 19 nt, Homo sapiens
  misc_RNA (1)...(19): siRNA sense strand
gaacaaaugcgacagcaaa

SEQ ID NO: 1595393 - RNA, 19 nt, Homo sapiens
  misc_RNA (1)...(19): siRNA sense strand
gcaaaugguuucacagcaa

SEQ ID NO: 1595394 - RNA, 19 nt, Homo sapiens
  misc_RNA (1)...(19): siRNA sense strand
guacagaaguaaagcagaa

SEQ ID NO: 1595395 - RNA, 19 nt, Homo sapiens
  misc_RNA (1)...(19): siRNA sense strand
ggacagaccucaggaugau

SEQ ID NO: 1595396 - RNA, 19 nt, Homo sapiens
  misc_RNA (1)...(19): siRNA sense strand
gaacaucuccauccuacaa

SEQ ID NO: 1595397 - RNA, 19 nt, Homo sapiens
  misc_RNA (1)...(19): siRNA sense strand
cgaaagacacuccaacuaa

SEQ ID NO: 1595398 - RNA, 19 nt, Homo sapiens
  misc_RNA (1)...(19): siRNA sense strand
gaacaaacugcuuucgaaa

SEQ ID NO: 1595399 - RNA, 19 nt, Homo sapiens
  misc_RNA (1)...(19): siRNA sense strand
ugaacaaacugcuuucgaa

SEQ ID NO: 1595400 - RNA, 19 nt, Homo sapiens
  misc_RNA (1)...(19): siRNA sense strand
caacaagaacuccuagaaa

SEQ ID NO: 1595401 - RNA, 19 nt, Homo sapiens
  misc_RNA (1)...(19): siRNA sense strand
gaaacagcaugagaacuug

SEQ ID NO: 1595402 - RNA, 19 nt, Homo sapiens
  misc_RNA (1)...(19): siRNA sense strand
caucucaccuuuagaccua

SEQ ID NO: 1595403 - RNA, 19 nt, Homo sapiens
  misc_RNA (1)...(19): siRNA sense strand
gcaacaagaacuccuagaa

SEQ ID NO: 1595404 - RNA, 19 nt, Homo sapiens
  misc_RNA (1)...(19): siRNA sense strand
gcagaagcuucaagaguuc

SEQ ID NO: 1595405 - RNA, 19 nt, Homo sapiens
  misc_RNA (1)...(19): siRNA sense strand
gcggaaggauggaaauguu

SEQ ID NO: 1595406 - RNA, 19 nt, Homo sapiens
  misc_RNA (1)...(19): siRNA sense strand
aaagauagaggacgagaaa

SEQ ID NO: 1595407 - RNA, 19 nt, Homo sapiens
  misc_RNA (1)...(19): siRNA sense strand
gcucaaugcuucgaauuca

SEQ ID NO: 1595408 - RNA, 19 nt, Homo sapiens
  misc_RNA (1)...(19): siRNA sense strand
gaaggugcgguccagguua

SEQ ID NO: 1595409 - RNA, 19 nt, Homo sapiens
  misc_RNA (1)...(19): siRNA sense strand
ucacagcaacgcauucuaa

SEQ ID NO: 1595410 - RNA, 19 nt, Homo sapiens
  misc_RNA (1)...(19): siRNA sense strand
cauuagagguacccacaaa

SEQ ID NO: 1595411 - RNA, 19 nt, Homo sapiens
  misc_RNA (1)...(19): siRNA sense strand
cagcaacgcauucuaauuc

SEQ ID NO: 1595412 - RNA, 19 nt, Homo sapiens
  misc_RNA (1)...(19): siRNA sense strand
gagcccaucucaccuuuag

SEQ ID NO: 1595413 - RNA, 19 nt, Homo sapiens
  misc_RNA (1)...(19): siRNA sense strand
gaacccagucugcaccuuu

SEQ ID NO: 1595414 - RNA, 19 nt, Homo sapiens
  misc_RNA (1)...(19): siRNA sense strand
cgaaaucuauugaacaacu

SEQ ID NO: 1595415 - RNA, 19 nt, Homo sapiens
  misc_RNA (1)...(19): siRNA sense strand
aaacugcuuucgaaaucua

SEQ ID NO: 1595416 - RNA, 19 nt, Homo sapiens
  misc_RNA (1)...(19): siRNA sense strand
acaaacugcuuucgaaauc

SEQ ID NO: 1595417 - RNA, 19 nt, Homo sapiens
  misc_RNA (1)...(19): siRNA sense strand
cgaauucacucaaagaaaa

SEQ ID NO: 1595418 - RNA, 19 nt, Homo sapiens
  misc_RNA (1)...(19): siRNA sense strand
uggagaagcagaagcaaua

SEQ ID NO: 1595419 - RNA, 19 nt, Homo sapiens
  misc_RNA (1)...(19): siRNA sense strand
gaaagggcaguggcaagua

SEQ ID NO: 1595420 - RNA, 19 nt, Homo sapiens
  misc_RNA (1)...(19): siRNA sense strand
gaugugaagucagaaguuc

SEQ ID NO: 1595421 - RNA, 19 nt, Homo sapiens
  misc_RNA (1)...(19): siRNA sense strand
guaaaucagcaacgaaaga

SEQ ID NO: 1595422 - RNA, 19 nt, Homo sapiens
  misc_RNA (1)...(19): siRNA sense strand
gaguaaaucagcaacgaaa

SEQ ID NO: 1595423 - RNA, 19 nt, Homo sapiens
  misc_RNA (1)...(19): siRNA sense strand
gaaaucuauugaacaacug

SEQ ID NO: 1595424 - RNA, 19 nt, Homo sapiens
  misc_RNA (1)...(19): siRNA sense strand
ggacagugaugaagaugcu

SEQ ID NO: 1595425 - RNA, 19 nt, Homo sapiens
  misc_RNA (1)...(19): siRNA sense strand
agaaacagcaugagaacuu

SEQ ID NO: 1595426 - RNA, 19 nt, Homo sapiens
  misc_RNA (1)...(19): siRNA sense strand
caacuggaaguguuacuga

SEQ ID NO: 1595427 - RNA, 19 nt, Homo sapiens
  misc_RNA (1)...(19): siRNA sense strand
agcagaagcuucaagaguu

SEQ ID NO: 1595428 - RNA, 19 nt, Homo sapiens
  misc_RNA (1)...(19): siRNA sense strand
gcagcuuccuccucucaga

SEQ ID NO: 1595429 - RNA, 19 nt, Homo sapiens
  misc_RNA (1)...(19): siRNA sense strand
ccaugaaccugcuaagucu

SEQ ID NO: 1595430 - RNA, 19 nt, Homo sapiens
  misc_RNA (1)...(19): siRNA sense strand
ggauggaaauguugucacu

SEQ ID NO: 1595431 - RNA, 19 nt, Homo sapiens
  misc_RNA (1)...(19): siRNA sense strand
cuucaagaguuccuacuga

SEQ ID NO: 1595432 - RNA, 19 nt, Homo sapiens
  misc_RNA (1)...(19): siRNA sense strand
ugaugaagaugcucagauc

SEQ ID NO: 1595433 - RNA, 19 nt, Homo sapiens
  misc_RNA (1)...(19): siRNA sense strand
uggcucagcuggucauuca

SEQ ID NO: 1595434 - RNA, 19 nt, Homo sapiens
  misc_RNA (1)...(19): siRNA sense strand
ccucugagcccaacuugaa

SEQ ID NO: 1595435 - RNA, 19 nt, Homo sapiens
  misc_RNA (1)...(19): siRNA sense strand
gcaagaacaggaaguagag

SEQ ID NO: 1595436 - RNA, 19 nt, Homo sapiens
  misc_RNA (1)...(19): siRNA sense strand
ccacccucauguuacuuua

SEQ ID NO: 1595437 - RNA, 19 nt, Homo sapiens
  misc_RNA (1)...(19): siRNA sense strand
gacagaauccucagucagu

SEQ ID NO: 1595438 - RNA, 19 nt, Homo sapiens
  misc_RNA (1)...(19): siRNA sense strand
gagaauuucaccuggcauu

SEQ ID NO: 1595439 - RNA, 19 nt, Homo sapiens
  misc_RNA (1)...(19): siRNA sense strand
ucuuguagcugguggaguu

SEQ ID NO: 1595440 - RNA, 19 nt, Homo sapiens
  misc_RNA (1)...(19): siRNA sense strand
gagcacaagaugcaaagga

SEQ ID NO: 1595441 - RNA, 19 nt, Homo sapiens
  misc_RNA (1)...(19): siRNA sense strand
cugcagcauuuauuauuga

SEQ ID NO: 1595442 - RNA, 19 nt, Homo sapiens
  misc_RNA (1)...(19): siRNA sense strand
caacgcauucuaauucaug

SEQ ID NO: 1595443 - RNA, 19 nt, Homo sapiens
  misc_RNA (1)...(19): siRNA sense strand
gaaaaugagacuucgguuu

SEQ ID NO: 1595444 - RNA, 19 nt, Homo sapiens
  misc_RNA (1)...(19): siRNA sense strand
acagaauccucagucagua

SEQ ID NO: 1595445 - RNA, 19 nt, Homo sapiens
  misc_RNA (1)...(19): siRNA sense strand
gcagaggcaagaacaggaa

SEQ ID NO: 1595446 - RNA, 19 nt, Homo sapiens
  misc_RNA (1)...(19): siRNA sense strand
gcaacaccagcaauucuug

SEQ ID NO: 1595447 - RNA, 19 nt, Homo sapiens
  misc_RNA (1)...(19): siRNA sense strand
gcauucuaauucaugaaga

SEQ ID NO: 1595448 - RNA, 19 nt, Homo sapiens
  misc_RNA (1)...(19): siRNA sense strand
agagaggcaucgcagagaa

SEQ ID NO: 1595449 - RNA, 19 nt, Homo sapiens
  misc_RNA (1)...(19): siRNA sense strand
gcaacgcauucuaauucau

SEQ ID NO: 1595450 - RNA, 19 nt, Homo sapiens
  misc_RNA (1)...(19): siRNA sense strand
caguggaugugaagucaga

SEQ ID NO: 1595451 - RNA, 19 nt, Homo sapiens
  misc_RNA (1)...(19): siRNA sense strand
ccugcagcauuuauuauug

SEQ ID NO: 1595452 - RNA, 19 nt, Homo sapiens
  misc_RNA (1)...(19): siRNA sense strand
aacaagaacuccuagaaaa

SEQ ID NO: 1595453 - RNA, 19 nt, Homo sapiens
  misc_RNA (1)...(19): siRNA sense strand
gcagauccacaugaacaaa

SEQ ID NO: 1595454 - RNA, 19 nt, Homo sapiens
  misc_RNA (1)...(19): siRNA sense strand
cagcagauccacaugaaca

SEQ ID NO: 1595455 - RNA, 19 nt, Homo sapiens
  misc_RNA (1)...(19): siRNA sense strand
gaauuucaccuggcauuag

SEQ ID NO: 1595456 - RNA, 19 nt, Homo sapiens
  misc_RNA (1)...(19): siRNA sense strand
gggccaacuggaaguguua

SEQ ID NO: 1595457 - RNA, 19 nt, Homo sapiens
  misc_RNA (1)...(19): siRNA sense strand
ggucccaguucaccaaaca

SEQ ID NO: 1595458 - RNA, 19 nt, Homo sapiens
  misc_RNA (1)...(19): siRNA sense strand
aaggugcgguccagguuaa

SEQ ID NO: 1595459 - RNA, 19 nt, Homo sapiens
  misc_RNA (1)...(19): siRNA sense strand
acacaucauuggaucaaag

SEQ ID NO: 1595460 - RNA, 19 nt, Homo sapiens
  misc_RNA (1)...(19): siRNA sense strand
ggcaagaacaggaaguaga

SEQ ID NO: 1595461 - RNA, 19 nt, Homo sapiens
  misc_RNA (1)...(19): siRNA sense strand
gaggcaagaacaggaagua

SEQ ID NO: 1595462 - RNA, 19 nt, Homo sapiens
  misc_RNA (1)...(19): siRNA sense strand
uuagagguacccacaaauu

SEQ ID NO: 1595463 - RNA, 19 nt, Homo sapiens
  misc_RNA (1)...(19): siRNA sense strand
ggaaggauggaaauguugu

SEQ ID NO: 1595464 - RNA, 19 nt, Homo sapiens
  misc_RNA (1)...(19): siRNA sense strand
cacaagaugcaaaggauga

SEQ ID NO: 1595465 - RNA, 19 nt, Homo sapiens
  misc_RNA (1)...(19): siRNA sense strand
cuuuauaccucuccuucuu

SEQ ID NO: 1595466 - RNA, 19 nt, Homo sapiens
  misc_RNA (1)...(19): siRNA sense strand
ugaaccugcuaagucuuua

SEQ ID NO: 1595467 - RNA, 19 nt, Homo sapiens
  misc_RNA (1)...(19): siRNA sense strand
ggaugugaagucagaaguu

SEQ ID NO: 1595468 - RNA, 19 nt, Homo sapiens
  misc_RNA (1)...(19): siRNA sense strand
uagagguacccacaaauug

SEQ ID NO: 1595469 - RNA, 19 nt, Homo sapiens
  misc_RNA (1)...(19): siRNA sense strand
uuauaccucuccuucuuug

SEQ ID NO: 1595470 - RNA, 19 nt, Homo sapiens
  misc_RNA (1)...(19): siRNA sense strand
aaagacacuccaacuaaug

SEQ ID NO: 1595471 - RNA, 19 nt, Homo sapiens
  misc_RNA (1)...(19): siRNA sense strand
gcaccaggcucagcuucag

SEQ ID NO: 1595472 - RNA, 19 nt, Homo sapiens
  misc_RNA (1)...(19): siRNA sense strand
gcaggaauuacuucuuauc

SEQ ID NO: 1595473 - RNA, 19 nt, Homo sapiens
  misc_RNA (1)...(19): siRNA sense strand
gaaguguuacugaaaauga

SEQ ID NO: 1595474 - RNA, 19 nt, Homo sapiens
  misc_RNA (1)...(19): siRNA sense strand
gcucagauccaggaaaugg

SEQ ID NO: 1595475 - RNA, 19 nt, Homo sapiens
  misc_RNA (1)...(19): siRNA sense strand
caacagcaacaccagcaau

SEQ ID NO: 1595476 - RNA, 19 nt, Homo sapiens
  misc_RNA (1)...(19): siRNA sense strand
ucucagaggcaaagauaga

SEQ ID NO: 1595477 - RNA, 19 nt, Homo sapiens
  misc_RNA (1)...(19): siRNA sense strand
gcagugcuuguguggauga

SEQ ID NO: 1595478 - RNA, 19 nt, Homo sapiens
  misc_RNA (1)...(19): siRNA sense strand
cacaugaacaaacugcuuu

SEQ ID NO: 1595479 - RNA, 19 nt, Homo sapiens
  misc_RNA (1)...(19): siRNA sense strand
aauuucaccuggcauuaga

SEQ ID NO: 1595480 - RNA, 19 nt, Homo sapiens
  misc_RNA (1)...(19): siRNA sense strand
gcaacaaaagagagaauuu

SEQ ID NO: 1595481 - RNA, 19 nt, Homo sapiens
  misc_RNA (1)...(19): siRNA sense strand
guugucacuucauucaaga

SEQ ID NO: 1595482 - RNA, 19 nt, Homo sapiens
  misc_RNA (1)...(19): siRNA sense strand
aaacagaaaguggcagaga

SEQ ID NO: 1595483 - RNA, 19 nt, Homo sapiens
  misc_RNA (1)...(19): siRNA sense strand
ggaaauguugucacuucau

SEQ ID NO: 1595484 - RNA, 19 nt, Homo sapiens
  misc_RNA (1)...(19): siRNA sense strand
caaacugcuuucgaaaucu

SEQ ID NO: 1595485 - RNA, 19 nt, Homo sapiens
  misc_RNA (1)...(19): siRNA sense strand
ccacaugaacaaacugcuu

SEQ ID NO: 1595486 - RNA, 19 nt, Homo sapiens
  misc_RNA (1)...(19): siRNA sense strand
cagcagcagauccacauga

SEQ ID NO: 1595487 - RNA, 19 nt, Homo sapiens
  misc_RNA (1)...(19): siRNA sense strand
gaaccugcuaagucuuuau

SEQ ID NO: 1595488 - RNA, 19 nt, Homo sapiens
  misc_RNA (1)...(19): siRNA sense strand
ucuccugcagcauuuauua

SEQ ID NO: 1595489 - RNA, 19 nt, Homo sapiens
  misc_RNA (1)...(19): siRNA sense strand
gagggaaagccacccaaca

SEQ ID NO: 1595490 - RNA, 19 nt, Homo sapiens
  misc_RNA (1)...(19): siRNA sense strand
gaaagacacuccaacuaau

SEQ ID NO: 1595491 - RNA, 19 nt, Homo sapiens
  misc_RNA (1)...(19): siRNA sense strand
cagcaggaauuacuucuua

SEQ ID NO: 1595492 - RNA, 19 nt, Homo sapiens
  misc_RNA (1)...(19): siRNA sense strand
gaacaaaugcgacagcaaa

SEQ ID NO: 1595493 - RNA, 19 nt, Homo sapiens
  misc_RNA (1)...(19): siRNA sense strand
gcaaaugguuucacagcaa

SEQ ID NO: 1595494 - RNA, 19 nt, Homo sapiens
  misc_RNA (1)...(19): siRNA sense strand
guacagaaguaaagcagaa

SEQ ID NO: 1595495 - RNA, 19 nt, Homo sapiens
  misc_RNA (1)...(19): siRNA sense strand
ggacagaccucaggaugau

SEQ ID NO: 1595496 - RNA, 19 nt, Homo sapiens
  misc_RNA (1)...(19): siRNA sense strand
gaacaucuccauccuacaa

SEQ ID NO: 1595497 - RNA, 19 nt, Homo sapiens
  misc_RNA (1)...(19): siRNA sense strand
cgaaagacacuccaacuaa

SEQ ID NO: 1595498 - RNA, 19 nt, Homo sapiens
  misc_RNA (1)...(19): siRNA sense strand
gaacaaacugcuuucgaaa

SEQ ID NO: 1595499 - RNA, 19 nt, Homo sapiens
  misc_RNA (1)...(19): siRNA sense strand
ugaacaaacugcuuucgaa

SEQ ID NO: 1595500 - RNA, 19 nt, Homo sapiens
  misc_RNA (1)...(19): siRNA sense strand
caacaagaacuccuagaaa

SEQ ID NO: 1595501 - RNA, 19 nt, Homo sapiens
  misc_RNA (1)...(19): siRNA sense strand
gaaacagcaugagaacuug

SEQ ID NO: 1595502 - RNA, 19 nt, Homo sapiens
  misc_RNA (1)...(19): siRNA sense strand
caucucaccuuuagaccua

SEQ ID NO: 1595503 - RNA, 19 nt, Homo sapiens
  misc_RNA (1)...(19): siRNA sense strand
gcaacaagaacuccuagaa

SEQ ID NO: 1595504 - RNA, 19 nt, Homo sapiens
  misc_RNA (1)...(19): siRNA sense strand
gcagaagcuucaagaguuc

SEQ ID NO: 1595505 - RNA, 19 nt, Homo sapiens
  misc_RNA (1)...(19): siRNA sense strand
gcggaaggauggaaauguu

SEQ ID NO: 1595506 - RNA, 19 nt, Homo sapiens
  misc_RNA (1)...(19): siRNA sense strand
aaagauagaggacgagaaa

SEQ ID NO: 1595507 - RNA, 19 nt, Homo sapiens
  misc_RNA (1)...(19): siRNA sense strand
gcucaaugcuucgaauuca

SEQ ID NO: 1595508 - RNA, 19 nt, Homo sapiens
  misc_RNA (1)...(19): siRNA sense strand
gaaggugcgguccagguua

SEQ ID NO: 1595509 - RNA, 19 nt, Homo sapiens
  misc_RNA (1)...(19): siRNA sense strand
ucacagcaacgcauucuaa

SEQ ID NO: 1595510 - RNA, 19 nt, Homo sapiens
  misc_RNA (1)...(19): siRNA sense strand
cauuagagguacccacaaa

SEQ ID NO: 1595511 - RNA, 19 nt, Homo sapiens
  misc_RNA (1)...(19): siRNA sense strand
cagcaacgcauucuaauuc

SEQ ID NO: 1595512 - RNA, 19 nt, Homo sapiens
  misc_RNA (1)...(19): siRNA sense strand
gagcccaucucaccuuuag

SEQ ID NO: 1595513 - RNA, 19 nt, Homo sapiens
  misc_RNA (1)...(19): siRNA sense strand
gaacccagucugcaccuuu

SEQ ID NO: 1595514 - RNA, 19 nt, Homo sapiens
  misc_RNA (1)...(19): siRNA sense strand
cgaaaucuauugaacaacu

SEQ ID NO: 1595515 - RNA, 19 nt, Homo sapiens
  misc_RNA (1)...(19): siRNA sense strand
aaacugcuuucgaaaucua

SEQ ID NO: 1595516 - RNA, 19 nt, Homo sapiens
  misc_RNA (1)...(19): siRNA sense strand
acaaacugcuuucgaaauc

SEQ ID NO: 1595517 - RNA, 19 nt, Homo sapiens
  misc_RNA (1)...(19): siRNA sense strand
cgaauucacucaaagaaaa

SEQ ID NO: 1595518 - RNA, 19 nt, Homo sapiens
  misc_RNA (1)...(19): siRNA sense strand
uggagaagcagaagcaaua

SEQ ID NO: 1595519 - RNA, 19 nt, Homo sapiens
  misc_RNA (1)...(19): siRNA sense strand
gaaagggcaguggcaagua

SEQ ID NO: 1595520 - RNA, 19 nt, Homo sapiens
  misc_RNA (1)...(19): siRNA sense strand
gaugugaagucagaaguuc

SEQ ID NO: 1595521 - RNA, 19 nt, Homo sapiens
  misc_RNA (1)...(19): siRNA sense strand
guaaaucagcaacgaaaga

SEQ ID NO: 1595522 - RNA, 19 nt, Homo sapiens
  misc_RNA (1)...(19): siRNA sense strand
gaguaaaucagcaacgaaa

SEQ ID NO: 1595523 - RNA, 19 nt, Homo sapiens
  misc_RNA (1)...(19): siRNA sense strand
gaaaucuauugaacaacug

SEQ ID NO: 1595524 - RNA, 19 nt, Homo sapiens
  misc_RNA (1)...(19): siRNA sense strand
ggacagugaugaagaugcu

SEQ ID NO: 1595525 - RNA, 19 nt, Homo sapiens
  misc_RNA (1)...(19): siRNA sense strand
agaaacagcaugagaacuu

SEQ ID NO: 1595526 - RNA, 19 nt, Homo sapiens
  misc_RNA (1)...(19): siRNA sense strand
caacuggaaguguuacuga

SEQ ID NO: 1595527 - RNA, 19 nt, Homo sapiens
  misc_RNA (1)...(19): siRNA sense strand
agcagaagcuucaagaguu

SEQ ID NO: 1595528 - RNA, 19 nt, Homo sapiens
  misc_RNA (1)...(19): siRNA sense strand
gcagcuuccuccucucaga

SEQ ID NO: 1595529 - RNA, 19 nt, Homo sapiens
  misc_RNA (1)...(19): siRNA sense strand
ccaugaaccugcuaagucu

SEQ ID NO: 1595530 - RNA, 19 nt, Homo sapiens
  misc_RNA (1)...(19): siRNA sense strand
ggauggaaauguugucacu

SEQ ID NO: 1595531 - RNA, 19 nt, Homo sapiens
  misc_RNA (1)...(19): siRNA sense strand
cuucaagaguuccuacuga

SEQ ID NO: 1595532 - RNA, 19 nt, Homo sapiens
  misc_RNA (1)...(19): siRNA sense strand
ugaugaagaugcucagauc

SEQ ID NO: 1595533 - RNA, 19 nt, Homo sapiens
  misc_RNA (1)...(19): siRNA sense strand
uggcucagcuggucauuca

SEQ ID NO: 1595534 - RNA, 19 nt, Homo sapiens
  misc_RNA (1)...(19): siRNA sense strand
ccucugagcccaacuugaa

SEQ ID NO: 1595535 - RNA, 19 nt, Homo sapiens
  misc_RNA (1)...(19): siRNA sense strand
gcaagaacaggaaguagag

SEQ ID NO: 1595536 - RNA, 19 nt, Homo sapiens
  misc_RNA (1)...(19): siRNA sense strand
ccacccucauguuacuuua

SEQ ID NO: 1595537 - RNA, 19 nt, Homo sapiens
  misc_RNA (1)...(19): siRNA sense strand
gacagaauccucagucagu

SEQ ID NO: 1595538 - RNA, 19 nt, Homo sapiens
  misc_RNA (1)...(19): siRNA sense strand
gagaauuucaccuggcauu

SEQ ID NO: 1595539 - RNA, 19 nt, Homo sapiens
  misc_RNA (1)...(19): siRNA sense strand
ucuuguagcugguggaguu

SEQ ID NO: 1595540 - RNA, 19 nt, Homo sapiens
  misc_RNA (1)...(19): siRNA sense strand
gagcacaagaugcaaagga

SEQ ID NO: 1595541 - RNA, 19 nt, Homo sapiens
  misc_RNA (1)...(19): siRNA sense strand
cugcagcauuuauuauuga

SEQ ID NO: 1595542 - RNA, 19 nt, Homo sapiens
  misc_RNA (1)...(19): siRNA sense strand
caacgcauucuaauucaug

SEQ ID NO: 1595543 - RNA, 19 nt, Homo sapiens
  misc_RNA (1)...(19): siRNA sense strand
gaaaaugagacuucgguuu

SEQ ID NO: 1595544 - RNA, 19 nt, Homo sapiens
  misc_RNA (1)...(19): siRNA sense strand
acagaauccucagucagua

SEQ ID NO: 1595545 - RNA, 19 nt, Homo sapiens
  misc_RNA (1)...(19): siRNA sense strand
gcagaggcaagaacaggaa

SEQ ID NO: 1595546 - RNA, 19 nt, Homo sapiens
  misc_RNA (1)...(19): siRNA sense strand
gcaacaccagcaauucuug

SEQ ID NO: 1595547 - RNA, 19 nt, Homo sapiens
  misc_RNA (1)...(19): siRNA sense strand
gcauucuaauucaugaaga

SEQ ID NO: 1595548 - RNA, 19 nt, Homo sapiens
  misc_RNA (1)...(19): siRNA sense strand
agagaggcaucgcagagaa

SEQ ID NO: 1595549 - RNA, 19 nt, Homo sapiens
  misc_RNA (1)...(19): siRNA sense strand
gcaacgcauucuaauucau

SEQ ID NO: 1595550 - RNA, 19 nt, Homo sapiens
  misc_RNA (1)...(19): siRNA sense strand
caguggaugugaagucaga

SEQ ID NO: 1595551 - RNA, 19 nt, Homo sapiens
  misc_RNA (1)...(19): siRNA sense strand
ccugcagcauuuauuauug

SEQ ID NO: 1595552 - RNA, 19 nt, Homo sapiens
  misc_RNA (1)...(19): siRNA sense strand
aacaagaacuccuagaaaa

SEQ ID NO: 1595553 - RNA, 19 nt, Homo sapiens
  misc_RNA (1)...(19): siRNA sense strand
gcagauccacaugaacaaa

SEQ ID NO: 1595554 - RNA, 19 nt, Homo sapiens
  misc_RNA (1)...(19): siRNA sense strand
cagcagauccacaugaaca

SEQ ID NO: 1595555 - RNA, 19 nt, Homo sapiens
  misc_RNA (1)...(19): siRNA sense strand
gaauuucaccuggcauuag

SEQ ID NO: 1595556 - RNA, 19 nt, Homo sapiens
  misc_RNA (1)...(19): siRNA sense strand
gggccaacuggaaguguua

SEQ ID NO: 1595557 - RNA, 19 nt, Homo sapiens
  misc_RNA (1)...(19): siRNA sense strand
ggucccaguucaccaaaca

SEQ ID NO: 1595558 - RNA, 19 nt, Homo sapiens
  misc_RNA (1)...(19): siRNA sense strand
aaggugcgguccagguuaa

SEQ ID NO: 1595559 - RNA, 19 nt, Homo sapiens
  misc_RNA (1)...(19): siRNA sense strand
acacaucauuggaucaaag

SEQ ID NO: 1595560 - RNA, 19 nt, Homo sapiens
  misc_RNA (1)...(19): siRNA sense strand
ggcaagaacaggaaguaga

SEQ ID NO: 1595561 - RNA, 19 nt, Homo sapiens
  misc_RNA (1)...(19): siRNA sense strand
gaggcaagaacaggaagua

SEQ ID NO: 1595562 - RNA, 19 nt, Homo sapiens
  misc_RNA (1)...(19): siRNA sense strand
uuagagguacccacaaauu

SEQ ID NO: 1595563 - RNA, 19 nt, Homo sapiens
  misc_RNA (1)...(19): siRNA sense strand
ggaaggauggaaauguugu

SEQ ID NO: 1595564 - RNA, 19 nt, Homo sapiens
  misc_RNA (1)...(19): siRNA sense strand
cacaagaugcaaaggauga

SEQ ID NO: 1595565 - RNA, 19 nt, Homo sapiens
  misc_RNA (1)...(19): siRNA sense strand
cuuuauaccucuccuucuu

SEQ ID NO: 1595566 - RNA, 19 nt, Homo sapiens
  misc_RNA (1)...(19): siRNA sense strand
ugaaccugcuaagucuuua

SEQ ID NO: 1595567 - RNA, 19 nt, Homo sapiens
  misc_RNA (1)...(19): siRNA sense strand
ggaugugaagucagaaguu

SEQ ID NO: 1595568 - RNA, 19 nt, Homo sapiens
  misc_RNA (1)...(19): siRNA sense strand
uagagguacccacaaauug

SEQ ID NO: 1595569 - RNA, 19 nt, Homo sapiens
  misc_RNA (1)...(19): siRNA sense strand
uuauaccucuccuucuuug

SEQ ID NO: 1595570 - RNA, 19 nt, Homo sapiens
  misc_RNA (1)...(19): siRNA sense strand
aaagacacuccaacuaaug

SEQ ID NO: 1595571 - RNA, 19 nt, Homo sapiens
  misc_RNA (1)...(19): siRNA sense strand
gcaccaggcucagcuucag

SEQ ID NO: 1595572 - RNA, 19 nt, Homo sapiens
  misc_RNA (1)...(19): siRNA sense strand
gcaggaauuacuucuuauc

SEQ ID NO: 1595573 - RNA, 19 nt, Homo sapiens
  misc_RNA (1)...(19): siRNA sense strand
gaaguguuacugaaaauga

SEQ ID NO: 1595574 - RNA, 19 nt, Homo sapiens
  misc_RNA (1)...(19): siRNA sense strand
gcucagauccaggaaaugg

SEQ ID NO: 1595575 - RNA, 19 nt, Homo sapiens
  misc_RNA (1)...(19): siRNA sense strand
caacagcaacaccagcaau

SEQ ID NO: 1595576 - RNA, 19 nt, Homo sapiens
  misc_RNA (1)...(19): siRNA sense strand
ucucagaggcaaagauaga

SEQ ID NO: 1595577 - RNA, 19 nt, Homo sapiens
  misc_RNA (1)...(19): siRNA sense strand
gcagugcuuguguggauga

SEQ ID NO: 1595578 - RNA, 19 nt, Homo sapiens
  misc_RNA (1)...(19): siRNA sense strand
cacaugaacaaacugcuuu

SEQ ID NO: 1595579 - RNA, 19 nt, Homo sapiens
  misc_RNA (1)...(19): siRNA sense strand
aauuucaccuggcauuaga

SEQ ID NO: 1595580 - RNA, 19 nt, Homo sapiens
  misc_RNA (1)...(19): siRNA sense strand
gcaacaaaagagagaauuu

SEQ ID NO: 1595581 - RNA, 19 nt, Homo sapiens
  misc_RNA (1)...(19): siRNA sense strand
guugucacuucauucaaga

SEQ ID NO: 1595582 - RNA, 19 nt, Homo sapiens
  misc_RNA (1)...(19): siRNA sense strand
aaacagaaaguggcagaga

SEQ ID NO: 1595583 - RNA, 19 nt, Homo sapiens
  misc_RNA (1)...(19): siRNA sense strand
ggaaauguugucacuucau

SEQ ID NO: 1595584 - RNA, 19 nt, Homo sapiens
  misc_RNA (1)...(19): siRNA sense strand
caaacugcuuucgaaaucu

SEQ ID NO: 1595585 - RNA, 19 nt, Homo sapiens
  misc_RNA (1)...(19): siRNA sense strand
ccacaugaacaaacugcuu

SEQ ID NO: 1595586 - RNA, 19 nt, Homo sapiens
  misc_RNA (1)...(19): siRNA sense strand
cagcagcagauccacauga

SEQ ID NO: 1595587 - RNA, 19 nt, Homo sapiens
  misc_RNA (1)...(19): siRNA sense strand
gaaccugcuaagucuuuau

SEQ ID NO: 1595588 - RNA, 19 nt, Homo sapiens
  misc_RNA (1)...(19): siRNA sense strand
ucuccugcagcauuuauua

SEQ ID NO: 1595589 - RNA, 19 nt, Homo sapiens
  misc_RNA (1)...(19): siRNA sense strand
gagggaaagccacccaaca

SEQ ID NO: 1595590 - RNA, 19 nt, Homo sapiens
  misc_RNA (1)...(19): siRNA sense strand
gaaagacacuccaacuaau

SEQ ID NO: 1595591 - RNA, 19 nt, Homo sapiens
  misc_RNA (1)...(19): siRNA sense strand
cagcaggaauuacuucuua

SEQ ID NO: 1595592 - RNA, 19 nt, Homo sapiens
  misc_RNA (1)...(19): siRNA sense strand
gaacaaaugcgacagcaaa

SEQ ID NO: 1595593 - RNA, 19 nt, Homo sapiens
  misc_RNA (1)...(19): siRNA sense strand
gcaaaugguuucacagcaa

SEQ ID NO: 1595594 - RNA, 19 nt, Homo sapiens
  misc_RNA (1)...(19): siRNA sense strand
guacagaaguaaagcagaa

SEQ ID NO: 1595595 - RNA, 19 nt, Homo sapiens
  misc_RNA (1)...(19): siRNA sense strand
ggacagaccucaggaugau

SEQ ID NO: 1595596 - RNA, 19 nt, Homo sapiens
  misc_RNA (1)...(19): siRNA sense strand
gaacaucuccauccuacaa

SEQ ID NO: 1595597 - RNA, 19 nt, Homo sapiens
  misc_RNA (1)...(19): siRNA sense strand
cgaaagacacuccaacuaa

SEQ ID NO: 1595598 - RNA, 19 nt, Homo sapiens
  misc_RNA (1)...(19): siRNA sense strand
gaacaaacugcuuucgaaa

SEQ ID NO: 1595599 - RNA, 19 nt, Homo sapiens
  misc_RNA (1)...(19): siRNA sense strand
ugaacaaacugcuuucgaa

SEQ ID NO: 1595600 - RNA, 19 nt, Homo sapiens
  misc_RNA (1)...(19): siRNA sense strand
caacaagaacuccuagaaa

SEQ ID NO: 1595601 - RNA, 19 nt, Homo sapiens
  misc_RNA (1)...(19): siRNA sense strand
gaaacagcaugagaacuug

SEQ ID NO: 1595602 - RNA, 19 nt, Homo sapiens
  misc_RNA (1)...(19): siRNA sense strand
caucucaccuuuagaccua

SEQ ID NO: 1595603 - RNA, 19 nt, Homo sapiens
  misc_RNA (1)...(19): siRNA sense strand
gcaacaagaacuccuagaa

SEQ ID NO: 1595604 - RNA, 19 nt, Homo sapiens
  misc_RNA (1)...(19): siRNA sense strand
gcagaagcuucaagaguuc

SEQ ID NO: 1595605 - RNA, 19 nt, Homo sapiens
  misc_RNA (1)...(19): siRNA sense strand
gcggaaggauggaaauguu

SEQ ID NO: 1595606 - RNA, 19 nt, Homo sapiens
  misc_RNA (1)...(19): siRNA sense strand
aaagauagaggacgagaaa

SEQ ID NO: 1595607 - RNA, 19 nt, Homo sapiens
  misc_RNA (1)...(19): siRNA sense strand
gcucaaugcuucgaauuca

SEQ ID NO: 1595608 - RNA, 19 nt, Homo sapiens
  misc_RNA (1)...(19): siRNA sense strand
gaaggugcgguccagguua

SEQ ID NO: 1595609 - RNA, 19 nt, Homo sapiens
  misc_RNA (1)...(19): siRNA sense strand
ucacagcaacgcauucuaa

SEQ ID NO: 1595610 - RNA, 19 nt, Homo sapiens
  misc_RNA (1)...(19): siRNA sense strand
cauuagagguacccacaaa

SEQ ID NO: 1595611 - RNA, 19 nt, Homo sapiens
  misc_RNA (1)...(19): siRNA sense strand
cagcaacgcauucuaauuc

SEQ ID NO: 1595612 - RNA, 19 nt, Homo sapiens
  misc_RNA (1)...(19): siRNA sense strand
gagcccaucucaccuuuag

SEQ ID NO: 1595613 - RNA, 19 nt, Homo sapiens
  misc_RNA (1)...(19): siRNA sense strand
gaacccagucugcaccuuu

SEQ ID NO: 1595614 - RNA, 19 nt, Homo sapiens
  misc_RNA (1)...(19): siRNA sense strand
cgaaaucuauugaacaacu

SEQ ID NO: 1595615 - RNA, 19 nt, Homo sapiens
  misc_RNA (1)...(19): siRNA sense strand
aaacugcuuucgaaaucua

SEQ ID NO: 1595616 - RNA, 19 nt, Homo sapiens
  misc_RNA (1)...(19): siRNA sense strand
acaaacugcuuucgaaauc

SEQ ID NO: 1595617 - RNA, 19 nt, Homo sapiens
  misc_RNA (1)...(19): siRNA sense strand
cgaauucacucaaagaaaa

SEQ ID NO: 1595618 - RNA, 19 nt, Homo sapiens
  misc_RNA (1)...(19): siRNA sense strand
uggagaagcagaagcaaua

SEQ ID NO: 1595619 - RNA, 19 nt, Homo sapiens
  misc_RNA (1)...(19): siRNA sense strand
gaaagggcaguggcaagua

SEQ ID NO: 1595620 - RNA, 19 nt, Homo sapiens
  misc_RNA (1)...(19): siRNA sense strand
gaugugaagucagaaguuc

SEQ ID NO: 1595621 - RNA, 19 nt, Homo sapiens
  misc_RNA (1)...(19): siRNA sense strand
guaaaucagcaacgaaaga

SEQ ID NO: 1595622 - RNA, 19 nt, Homo sapiens
  misc_RNA (1)...(19): siRNA sense strand
gaguaaaucagcaacgaaa

SEQ ID NO: 1595623 - RNA, 19 nt, Homo sapiens
  misc_RNA (1)...(19): siRNA sense strand
gaaaucuauugaacaacug

SEQ ID NO: 1595624 - RNA, 19 nt, Homo sapiens
  misc_RNA (1)...(19): siRNA sense strand
ggacagugaugaagaugcu

SEQ ID NO: 1595625 - RNA, 19 nt, Homo sapiens
  misc_RNA (1)...(19): siRNA sense strand
agaaacagcaugagaacuu

SEQ ID NO: 1595626 - RNA, 19 nt, Homo sapiens
  misc_RNA (1)...(19): siRNA sense strand
caacuggaaguguuacuga

SEQ ID NO: 1595627 - RNA, 19 nt, Homo sapiens
  misc_RNA (1)...(19): siRNA sense strand
agcagaagcuucaagaguu

SEQ ID NO: 1595628 - RNA, 19 nt, Homo sapiens
  misc_RNA (1)...(19): siRNA sense strand
gcagcuuccuccucucaga

SEQ ID NO: 1595629 - RNA, 19 nt, Homo sapiens
  misc_RNA (1)...(19): siRNA sense strand
ccaugaaccugcuaagucu

SEQ ID NO: 1595630 - RNA, 19 nt, Homo sapiens
  misc_RNA (1)...(19): siRNA sense strand
ggauggaaauguugucacu

SEQ ID NO: 1595631 - RNA, 19 nt, Homo sapiens
  misc_RNA (1)...(19): siRNA sense strand
cuucaagaguuccuacuga

SEQ ID NO: 1595632 - RNA, 19 nt, Homo sapiens
  misc_RNA (1)...(19): siRNA sense strand
ugaugaagaugcucagauc

SEQ ID NO: 1595633 - RNA, 19 nt, Homo sapiens
  misc_RNA (1)...(19): siRNA sense strand
uggcucagcuggucauuca

SEQ ID NO: 1595634 - RNA, 19 nt, Homo sapiens
  misc_RNA (1)...(19): siRNA sense strand
ccucugagcccaacuugaa

SEQ ID NO: 1595635 - RNA, 19 nt, Homo sapiens
  misc_RNA (1)...(19): siRNA sense strand
gcaagaacaggaaguagag

SEQ ID NO: 1595636 - RNA, 19 nt, Homo sapiens
  misc_RNA (1)...(19): siRNA sense strand
ccacccucauguuacuuua

SEQ ID NO: 1595637 - RNA, 19 nt, Homo sapiens
  misc_RNA (1)...(19): siRNA sense strand
gacagaauccucagucagu

SEQ ID NO: 1595638 - RNA, 19 nt, Homo sapiens
  misc_RNA (1)...(19): siRNA sense strand
gagaauuucaccuggcauu

SEQ ID NO: 1595639 - RNA, 19 nt, Homo sapiens
  misc_RNA (1)...(19): siRNA sense strand
ucuuguagcugguggaguu

SEQ ID NO: 1595640 - RNA, 19 nt, Homo sapiens
  misc_RNA (1)...(19): siRNA sense strand
gagcacaagaugcaaagga

SEQ ID NO: 1595641 - RNA, 19 nt, Homo sapiens
  misc_RNA (1)...(19): siRNA sense strand
cugcagcauuuauuauuga

SEQ ID NO: 1595642 - RNA, 19 nt, Homo sapiens
  misc_RNA (1)...(19): siRNA sense strand
caacgcauucuaauucaug

SEQ ID NO: 1595643 - RNA, 19 nt, Homo sapiens
  misc_RNA (1)...(19): siRNA sense strand
gaaaaugagacuucgguuu

SEQ ID NO: 1595644 - RNA, 19 nt, Homo sapiens
  misc_RNA (1)...(19): siRNA sense strand
acagaauccucagucagua

SEQ ID NO: 1595645 - RNA, 19 nt, Homo sapiens
  misc_RNA (1)...(19): siRNA sense strand
gcagaggcaagaacaggaa

SEQ ID NO: 1595646 - RNA, 19 nt, Homo sapiens
  misc_RNA (1)...(19): siRNA sense strand
gcaacaccagcaauucuug

SEQ ID NO: 1595647 - RNA, 19 nt, Homo sapiens
  misc_RNA (1)...(19): siRNA sense strand
gcauucuaauucaugaaga

SEQ ID NO: 1595648 - RNA, 19 nt, Homo sapiens
  misc_RNA (1)...(19): siRNA sense strand
agagaggcaucgcagagaa

SEQ ID NO: 1595649 - RNA, 19 nt, Homo sapiens
  misc_RNA (1)...(19): siRNA sense strand
gcaacgcauucuaauucau

SEQ ID NO: 1595650 - RNA, 19 nt, Homo sapiens
  misc_RNA (1)...(19): siRNA sense strand
caguggaugugaagucaga

SEQ ID NO: 1595651 - RNA, 19 nt, Homo sapiens
  misc_RNA (1)...(19): siRNA sense strand
ccugcagcauuuauuauug

SEQ ID NO: 1595652 - RNA, 19 nt, Homo sapiens
  misc_RNA (1)...(19): siRNA sense strand
aacaagaacuccuagaaaa

SEQ ID NO: 1595653 - RNA, 19 nt, Homo sapiens
  misc_RNA (1)...(19): siRNA sense strand
gcagauccacaugaacaaa

SEQ ID NO: 1595654 - RNA, 19 nt, Homo sapiens
  misc_RNA (1)...(19): siRNA sense strand
cagcagauccacaugaaca

SEQ ID NO: 1595655 - RNA, 19 nt, Homo sapiens
  misc_RNA (1)...(19): siRNA sense strand
gaauuucaccuggcauuag

SEQ ID NO: 1595656 - RNA, 19 nt, Homo sapiens
  misc_RNA (1)...(19): siRNA sense strand
gggccaacuggaaguguua

SEQ ID NO: 1595657 - RNA, 19 nt, Homo sapiens
  misc_RNA (1)...(19): siRNA sense strand
ggucccaguucaccaaaca

SEQ ID NO: 1595658 - RNA, 19 nt, Homo sapiens
  misc_RNA (1)...(19): siRNA sense strand
aaggugcgguccagguuaa

SEQ ID NO: 1595659 - RNA, 19 nt, Homo sapiens
  misc_RNA (1)...(19): siRNA sense strand
acacaucauuggaucaaag

SEQ ID NO: 1595660 - RNA, 19 nt, Homo sapiens
  misc_RNA (1)...(19): siRNA sense strand
ggcaagaacaggaaguaga

SEQ ID NO: 1595661 - RNA, 19 nt, Homo sapiens
  misc_RNA (1)...(19): siRNA sense strand
gaggcaagaacaggaagua

SEQ ID NO: 1595662 - RNA, 19 nt, Homo sapiens
  misc_RNA (1)...(19): siRNA sense strand
uuagagguacccacaaauu

SEQ ID NO: 1595663 - RNA, 19 nt, Homo sapiens
  misc_RNA (1)...(19): siRNA sense strand
ggaaggauggaaauguugu

SEQ ID NO: 1595664 - RNA, 19 nt, Homo sapiens
  misc_RNA (1)...(19): siRNA sense strand
cacaagaugcaaaggauga

SEQ ID NO: 1595665 - RNA, 19 nt, Homo sapiens
  misc_RNA (1)...(19): siRNA sense strand
cuuuauaccucuccuucuu

SEQ ID NO: 1595666 - RNA, 19 nt, Homo sapiens
  misc_RNA (1)...(19): siRNA sense strand
ugaaccugcuaagucuuua

SEQ ID NO: 1595667 - RNA, 19 nt, Homo sapiens
  misc_RNA (1)...(19): siRNA sense strand
ggaugugaagucagaaguu

SEQ ID NO: 1595668 - RNA, 19 nt, Homo sapiens
  misc_RNA (1)...(19): siRNA sense strand
uagagguacccacaaauug

SEQ ID NO: 1595669 - RNA, 19 nt, Homo sapiens
  misc_RNA (1)...(19): siRNA sense strand
uuauaccucuccuucuuug

SEQ ID NO: 1595670 - RNA, 19 nt, Homo sapiens
  misc_RNA (1)...(19): siRNA sense strand
aaagacacuccaacuaaug

SEQ ID NO: 1595671 - RNA, 19 nt, Homo sapiens
  misc_RNA (1)...(19): siRNA sense strand
gcaccaggcucagcuucag

SEQ ID NO: 1595672 - RNA, 19 nt, Homo sapiens
  misc_RNA (1)...(19): siRNA sense strand
gcaggaauuacuucuuauc

SEQ ID NO: 1595673 - RNA, 19 nt, Homo sapiens
  misc_RNA (1)...(19): siRNA sense strand
gaaguguuacugaaaauga

SEQ ID NO: 1595674 - RNA, 19 nt, Homo sapiens
  misc_RNA (1)...(19): siRNA sense strand
gcucagauccaggaaaugg

SEQ ID NO: 1595675 - RNA, 19 nt, Homo sapiens
  misc_RNA (1)...(19): siRNA sense strand
caacagcaacaccagcaau

SEQ ID NO: 1595676 - RNA, 19 nt, Homo sapiens
  misc_RNA (1)...(19): siRNA sense strand
ucucagaggcaaagauaga

SEQ ID NO: 1595677 - RNA, 19 nt, Homo sapiens
  misc_RNA (1)...(19): siRNA sense strand
gcagugcuuguguggauga

SEQ ID NO: 1595678 - RNA, 19 nt, Homo sapiens
  misc_RNA (1)...(19): siRNA sense strand
cacaugaacaaacugcuuu

SEQ ID NO: 1595679 - RNA, 19 nt, Homo sapiens
  misc_RNA (1)...(19): siRNA sense strand
aauuucaccuggcauuaga

SEQ ID NO: 1595680 - RNA, 19 nt, Homo sapiens
  misc_RNA (1)...(19): siRNA sense strand
gcaacaaaagagagaauuu

SEQ ID NO: 1595681 - RNA, 19 nt, Homo sapiens
  misc_RNA (1)...(19): siRNA sense strand
guugucacuucauucaaga

SEQ ID NO: 1595682 - RNA, 19 nt, Homo sapiens
  misc_RNA (1)...(19): siRNA sense strand
aaacagaaaguggcagaga

SEQ ID NO: 1595683 - RNA, 19 nt, Homo sapiens
  misc_RNA (1)...(19): siRNA sense strand
ggaaauguugucacuucau

SEQ ID NO: 1595684 - RNA, 19 nt, Homo sapiens
  misc_RNA (1)...(19): siRNA sense strand
caaacugcuuucgaaaucu

SEQ ID NO: 1595685 - RNA, 19 nt, Homo sapiens
  misc_RNA (1)...(19): siRNA sense strand
ccacaugaacaaacugcuu

SEQ ID NO: 1595686 - RNA, 19 nt, Homo sapiens
  misc_RNA (1)...(19): siRNA sense strand
cagcagcagauccacauga

SEQ ID NO: 1595687 - RNA, 19 nt, Homo sapiens
  misc_RNA (1)...(19): siRNA sense strand
gaaccugcuaagucuuuau

SEQ ID NO: 1595688 - RNA, 19 nt, Homo sapiens
  misc_RNA (1)...(19): siRNA sense strand
ucuccugcagcauuuauua

SEQ ID NO: 1595689 - RNA, 19 nt, Homo sapiens
  misc_RNA (1)...(19): siRNA sense strand
gagggaaagccacccaaca

SEQ ID NO: 1595690 - RNA, 19 nt, Homo sapiens
  misc_RNA (1)...(19): siRNA sense strand
gaaagacacuccaacuaau

SEQ ID NO: 1595691 - RNA, 19 nt, Homo sapiens
  misc_RNA (1)...(19): siRNA sense strand
cagcaggaauuacuucuua

SEQ ID NO: 1595692 - RNA, 19 nt, Homo sapiens
  misc_RNA (1)...(19): siRNA sense strand
gaacaaaugcgacagcaaa

SEQ ID NO: 1595693 - RNA, 19 nt, Homo sapiens
  misc_RNA (1)...(19): siRNA sense strand
gcaaaugguuucacagcaa

SEQ ID NO: 1595694 - RNA, 19 nt, Homo sapiens
  misc_RNA (1)...(19): siRNA sense strand
guacagaaguaaagcagaa

SEQ ID NO: 1595695 - RNA, 19 nt, Homo sapiens
  misc_RNA (1)...(19): siRNA sense strand
ggacagaccucaggaugau

SEQ ID NO: 1595696 - RNA, 19 nt, Homo sapiens
  misc_RNA (1)...(19): siRNA sense strand
gaacaucuccauccuacaa

SEQ ID NO: 1595697 - RNA, 19 nt, Homo sapiens
  misc_RNA (1)...(19): siRNA sense strand
cgaaagacacuccaacuaa

SEQ ID NO: 1595698 - RNA, 19 nt, Homo sapiens
  misc_RNA (1)...(19): siRNA sense strand
gaacaaacugcuuucgaaa

SEQ ID NO: 1595699 - RNA, 19 nt, Homo sapiens
  misc_RNA (1)...(19): siRNA sense strand
ugaacaaacugcuuucgaa

SEQ ID NO: 1595700 - RNA, 19 nt, Homo sapiens
  misc_RNA (1)...(19): siRNA sense strand
caacaagaacuccuagaaa

SEQ ID NO: 1595701 - RNA, 19 nt, Homo sapiens
  misc_RNA (1)...(19): siRNA sense strand
gaaacagcaugagaacuug

SEQ ID NO: 1595702 - RNA, 19 nt, Homo sapiens
  misc_RNA (1)...(19): siRNA sense strand
caucucaccuuuagaccua

SEQ ID NO: 1595703 - RNA, 19 nt, Homo sapiens
  misc_RNA (1)...(19): siRNA sense strand
gcaacaagaacuccuagaa

SEQ ID NO: 1595704 - RNA, 19 nt, Homo sapiens
  misc_RNA (1)...(19): siRNA sense strand
gcagaagcuucaagaguuc

SEQ ID NO: 1595705 - RNA, 19 nt, Homo sapiens
  misc_RNA (1)...(19): siRNA sense strand
gcggaaggauggaaauguu

SEQ ID NO: 1595706 - RNA, 19 nt, Homo sapiens
  misc_RNA (1)...(19): siRNA sense strand
aaagauagaggacgagaaa

SEQ ID NO: 1595707 - RNA, 19 nt, Homo sapiens
  misc_RNA (1)...(19): siRNA sense strand
gcucaaugcuucgaauuca

SEQ ID NO: 1595708 - RNA, 19 nt, Homo sapiens
  misc_RNA (1)...(19): siRNA sense strand
gaaggugcgguccagguua

SEQ ID NO: 1595709 - RNA, 19 nt, Homo sapiens
  misc_RNA (1)...(19): siRNA sense strand
ucacagcaacgcauucuaa

SEQ ID NO: 1595710 - RNA, 19 nt, Homo sapiens
  misc_RNA (1)...(19): siRNA sense strand
cauuagagguacccacaaa

SEQ ID NO: 1595711 - RNA, 19 nt, Homo sapiens
  misc_RNA (1)...(19): siRNA sense strand
cagcaacgcauucuaauuc

SEQ ID NO: 1595712 - RNA, 19 nt, Homo sapiens
  misc_RNA (1)...(19): siRNA sense strand
gagcccaucucaccuuuag

SEQ ID NO: 1595713 - RNA, 19 nt, Homo sapiens
  misc_RNA (1)...(19): siRNA sense strand
gaacccagucugcaccuuu

SEQ ID NO: 1595714 - RNA, 19 nt, Homo sapiens
  misc_RNA (1)...(19): siRNA sense strand
cgaaaucuauugaacaacu

SEQ ID NO: 1595715 - RNA, 19 nt, Homo sapiens
  misc_RNA (1)...(19): siRNA sense strand
aaacugcuuucgaaaucua

SEQ ID NO: 1595716 - RNA, 19 nt, Homo sapiens
  misc_RNA (1)...(19): siRNA sense strand
acaaacugcuuucgaaauc

SEQ ID NO: 1595717 - RNA, 19 nt, Homo sapiens
  misc_RNA (1)...(19): siRNA sense strand
cgaauucacucaaagaaaa

SEQ ID NO: 1595718 - RNA, 19 nt, Homo sapiens
  misc_RNA (1)...(19): siRNA sense strand
uggagaagcagaagcaaua

SEQ ID NO: 1595719 - RNA, 19 nt, Homo sapiens
  misc_RNA (1)...(19): siRNA sense strand
gaaagggcaguggcaagua

SEQ ID NO: 1595720 - RNA, 19 nt, Homo sapiens
  misc_RNA (1)...(19): siRNA sense strand
gaugugaagucagaaguuc

SEQ ID NO: 1595721 - RNA, 19 nt, Homo sapiens
  misc_RNA (1)...(19): siRNA sense strand
guaaaucagcaacgaaaga

SEQ ID NO: 1595722 - RNA, 19 nt, Homo sapiens
  misc_RNA (1)...(19): siRNA sense strand
gaguaaaucagcaacgaaa

SEQ ID NO: 1595723 - RNA, 19 nt, Homo sapiens
  misc_RNA (1)...(19): siRNA sense strand
gaaaucuauugaacaacug

SEQ ID NO: 1595724 - RNA, 19 nt, Homo sapiens
  misc_RNA (1)...(19): siRNA sense strand
ggacagugaugaagaugcu

SEQ ID NO: 1595725 - RNA, 19 nt, Homo sapiens
  misc_RNA (1)...(19): siRNA sense strand
agaaacagcaugagaacuu

SEQ ID NO: 1595726 - RNA, 19 nt, Homo sapiens
  misc_RNA (1)...(19): siRNA sense strand
caacuggaaguguuacuga

SEQ ID NO: 1595727 - RNA, 19 nt, Homo sapiens
  misc_RNA (1)...(19): siRNA sense strand
agcagaagcuucaagaguu

SEQ ID NO: 1595728 - RNA, 19 nt, Homo sapiens
  misc_RNA (1)...(19): siRNA sense strand
gcagcuuccuccucucaga

SEQ ID NO: 1595729 - RNA, 19 nt, Homo sapiens
  misc_RNA (1)...(19): siRNA sense strand
ccaugaaccugcuaagucu

SEQ ID NO: 1595730 - RNA, 19 nt, Homo sapiens
  misc_RNA (1)...(19): siRNA sense strand
ggauggaaauguugucacu

SEQ ID NO: 1595731 - RNA, 19 nt, Homo sapiens
  misc_RNA (1)...(19): siRNA sense strand
cuucaagaguuccuacuga

SEQ ID NO: 1595732 - RNA, 19 nt, Homo sapiens
  misc_RNA (1)...(19): siRNA sense strand
ugaugaagaugcucagauc

SEQ ID NO: 1595733 - RNA, 19 nt, Homo sapiens
  misc_RNA (1)...(19): siRNA sense strand
uggcucagcuggucauuca

SEQ ID NO: 1595734 - RNA, 19 nt, Homo sapiens
  misc_RNA (1)...(19): siRNA sense strand
ccucugagcccaacuugaa

SEQ ID NO: 1595735 - RNA, 19 nt, Homo sapiens
  misc_RNA (1)...(19): siRNA sense strand
gcaagaacaggaaguagag

SEQ ID NO: 1595736 - RNA, 19 nt, Homo sapiens
  misc_RNA (1)...(19): siRNA sense strand
ccacccucauguuacuuua

SEQ ID NO: 1595737 - RNA, 19 nt, Homo sapiens
  misc_RNA (1)...(19): siRNA sense strand
gacagaauccucagucagu

SEQ ID NO: 1595738 - RNA, 19 nt, Homo sapiens
  misc_RNA (1)...(19): siRNA sense strand
gagaauuucaccuggcauu

SEQ ID NO: 1595739 - RNA, 19 nt, Homo sapiens
  misc_RNA (1)...(19): siRNA sense strand
ucuuguagcugguggaguu

SEQ ID NO: 1595740 - RNA, 19 nt, Homo sapiens
  misc_RNA (1)...(19): siRNA sense strand
gagcacaagaugcaaagga

SEQ ID NO: 1595741 - RNA, 19 nt, Homo sapiens
  misc_RNA (1)...(19): siRNA sense strand
cugcagcauuuauuauuga

SEQ ID NO: 1595742 - RNA, 19 nt, Homo sapiens
  misc_RNA (1)...(19): siRNA sense strand
caacgcauucuaauucaug

SEQ ID NO: 1595743 - RNA, 19 nt, Homo sapiens
  misc_RNA (1)...(19): siRNA sense strand
gaaaaugagacuucgguuu

SEQ ID NO: 1595744 - RNA, 19 nt, Homo sapiens
  misc_RNA (1)...(19): siRNA sense strand
acagaauccucagucagua

SEQ ID NO: 1595745 - RNA, 19 nt, Homo sapiens
  misc_RNA (1)...(19): siRNA sense strand
gcagaggcaagaacaggaa

SEQ ID NO: 1595746 - RNA, 19 nt, Homo sapiens
  misc_RNA (1)...(19): siRNA sense strand
gcaacaccagcaauucuug

SEQ ID NO: 1595747 - RNA, 19 nt, Homo sapiens
  misc_RNA (1)...(19): siRNA sense strand
gcauucuaauucaugaaga

SEQ ID NO: 1595748 - RNA, 19 nt, Homo sapiens
  misc_RNA (1)...(19): siRNA sense strand
agagaggcaucgcagagaa

SEQ ID NO: 1595749 - RNA, 19 nt, Homo sapiens
  misc_RNA (1)...(19): siRNA sense strand
gcaacgcauucuaauucau

SEQ ID NO: 1595750 - RNA, 19 nt, Homo sapiens
  misc_RNA (1)...(19): siRNA sense strand
caguggaugugaagucaga

SEQ ID NO: 1595751 - RNA, 19 nt, Homo sapiens
  misc_RNA (1)...(19): siRNA sense strand
ccugcagcauuuauuauug

SEQ ID NO: 1595752 - RNA, 19 nt, Homo sapiens
  misc_RNA (1)...(19): siRNA sense strand
aacaagaacuccuagaaaa

SEQ ID NO: 1595753 - RNA, 19 nt, Homo sapiens
  misc_RNA (1)...(19): siRNA sense strand
gcagauccacaugaacaaa

SEQ ID NO: 1595754 - RNA, 19 nt, Homo sapiens
  misc_RNA (1)...(19): siRNA sense strand
cagcagauccacaugaaca

SEQ ID NO: 1595755 - RNA, 19 nt, Homo sapiens
  misc_RNA (1)...(19): siRNA sense strand
gaauuucaccuggcauuag

SEQ ID NO: 1595756 - RNA, 19 nt, Homo sapiens
  misc_RNA (1)...(19): siRNA sense strand
gggccaacuggaaguguua

SEQ ID NO: 1595757 - RNA, 19 nt, Homo sapiens
  misc_RNA (1)...(19): siRNA sense strand
ggucccaguucaccaaaca

SEQ ID NO: 1595758 - RNA, 19 nt, Homo sapiens
  misc_RNA (1)...(19): siRNA sense strand
aaggugcgguccagguuaa

SEQ ID NO: 1595759 - RNA, 19 nt, Homo sapiens
  misc_RNA (1)...(19): siRNA sense strand
acacaucauuggaucaaag

SEQ ID NO: 1595760 - RNA, 19 nt, Homo sapiens
  misc_RNA (1)...(19): siRNA sense strand
ggcaagaacaggaaguaga

SEQ ID NO: 1595761 - RNA, 19 nt, Homo sapiens
  misc_RNA (1)...(19): siRNA sense strand
gaggcaagaacaggaagua

SEQ ID NO: 1595762 - RNA, 19 nt, Homo sapiens
  misc_RNA (1)...(19): siRNA sense strand
uuagagguacccacaaauu

SEQ ID NO: 1595763 - RNA, 19 nt, Homo sapiens
  misc_RNA (1)...(19): siRNA sense strand
ggaaggauggaaauguugu

SEQ ID NO: 1595764 - RNA, 19 nt, Homo sapiens
  misc_RNA (1)...(19): siRNA sense strand
cacaagaugcaaaggauga

SEQ ID NO: 1595765 - RNA, 19 nt, Homo sapiens
  misc_RNA (1)...(19): siRNA sense strand
cuuuauaccucuccuucuu

SEQ ID NO: 1595766 - RNA, 19 nt, Homo sapiens
  misc_RNA (1)...(19): siRNA sense strand
ugaaccugcuaagucuuua

SEQ ID NO: 1595767 - RNA, 19 nt, Homo sapiens
  misc_RNA (1)...(19): siRNA sense strand
ggaugugaagucagaaguu

SEQ ID NO: 1595768 - RNA, 19 nt, Homo sapiens
  misc_RNA (1)...(19): siRNA sense strand
uagagguacccacaaauug

SEQ ID NO: 1595769 - RNA, 19 nt, Homo sapiens
  misc_RNA (1)...(19): siRNA sense strand
uuauaccucuccuucuuug

SEQ ID NO: 1595770 - RNA, 19 nt, Homo sapiens
  misc_RNA (1)...(19): siRNA sense strand
aaagacacuccaacuaaug

SEQ ID NO: 1595771 - RNA, 19 nt, Homo sapiens
  misc_RNA (1)...(19): siRNA sense strand
gcaccaggcucagcuucag

SEQ ID NO: 1595772 - RNA, 19 nt, Homo sapiens
  misc_RNA (1)...(19): siRNA sense strand
gcaggaauuacuucuuauc

SEQ ID NO: 1595773 - RNA, 19 nt, Homo sapiens
  misc_RNA (1)...(19): siRNA sense strand
gaaguguuacugaaaauga

SEQ ID NO: 1595774 - RNA, 19 nt, Homo sapiens
  misc_RNA (1)...(19): siRNA sense strand
gcucagauccaggaaaugg

SEQ ID NO: 1595775 - RNA, 19 nt, Homo sapiens
  misc_RNA (1)...(19): siRNA sense strand
caacagcaacaccagcaau

SEQ ID NO: 1595776 - RNA, 19 nt, Homo sapiens
  misc_RNA (1)...(19): siRNA sense strand
ucucagaggcaaagauaga

SEQ ID NO: 1595777 - RNA, 19 nt, Homo sapiens
  misc_RNA (1)...(19): siRNA sense strand
gcagugcuuguguggauga

SEQ ID NO: 1595778 - RNA, 19 nt, Homo sapiens
  misc_RNA (1)...(19): siRNA sense strand
cacaugaacaaacugcuuu

SEQ ID NO: 1595779 - RNA, 19 nt, Homo sapiens
  misc_RNA (1)...(19): siRNA sense strand
aauuucaccuggcauuaga

SEQ ID NO: 1595780 - RNA, 19 nt, Homo sapiens
  misc_RNA (1)...(19): siRNA sense strand
gcaacaaaagagagaauuu

SEQ ID NO: 1595781 - RNA, 19 nt, Homo sapiens
  misc_RNA (1)...(19): siRNA sense strand
guugucacuucauucaaga

SEQ ID NO: 1595782 - RNA, 19 nt, Homo sapiens
  misc_RNA (1)...(19): siRNA sense strand
aaacagaaaguggcagaga

SEQ ID NO: 1595783 - RNA, 19 nt, Homo sapiens
  misc_RNA (1)...(19): siRNA sense strand
ggaaauguugucacuucau

SEQ ID NO: 1595784 - RNA, 19 nt, Homo sapiens
  misc_RNA (1)...(19): siRNA sense strand
caaacugcuuucgaaaucu

SEQ ID NO: 1595785 - RNA, 19 nt, Homo sapiens
  misc_RNA (1)...(19): siRNA sense strand
ccacaugaacaaacugcuu

SEQ ID NO: 1595786 - RNA, 19 nt, Homo sapiens
  misc_RNA (1)...(19): siRNA sense strand
cagcagcagauccacauga

SEQ ID NO: 1595787 - RNA, 19 nt, Homo sapiens
  misc_RNA (1)...(19): siRNA sense strand
gaaccugcuaagucuuuau

SEQ ID NO: 1595788 - RNA, 19 nt, Homo sapiens
  misc_RNA (1)...(19): siRNA sense strand
ucuccugcagcauuuauua

SEQ ID NO: 1595789 - RNA, 19 nt, Homo sapiens
  misc_RNA (1)...(19): siRNA sense strand
gagggaaagccacccaaca

SEQ ID NO: 1595790 - RNA, 19 nt, Homo sapiens
  misc_RNA (1)...(19): siRNA sense strand
gaaagacacuccaacuaau

SEQ ID NO: 1595791 - RNA, 19 nt, Homo sapiens
  misc_RNA (1)...(19): siRNA sense strand
cagcaggaauuacuucuua

SEQ ID NO: 1595792 - RNA, 19 nt, Homo sapiens
  misc_RNA (1)...(19): siRNA sense strand
gaacaaaugcgacagcaaa

SEQ ID NO: 1595793 - RNA, 19 nt, Homo sapiens
  misc_RNA (1)...(19): siRNA sense strand
gcaaaugguuucacagcaa

SEQ ID NO: 1595794 - RNA, 19 nt, Homo sapiens
  misc_RNA (1)...(19): siRNA sense strand
guacagaaguaaagcagaa

SEQ ID NO: 1595795 - RNA, 19 nt, Homo sapiens
  misc_RNA (1)...(19): siRNA sense strand
ggacagaccucaggaugau

SEQ ID NO: 1595796 - RNA, 19 nt, Homo sapiens
  misc_RNA (1)...(19): siRNA sense strand
gaacaucuccauccuacaa

SEQ ID NO: 1595797 - RNA, 19 nt, Homo sapiens
  misc_RNA (1)...(19): siRNA sense strand
cgaaagacacuccaacuaa

SEQ ID NO: 1595798 - RNA, 19 nt, Homo sapiens
  misc_RNA (1)...(19): siRNA sense strand
gaacaaacugcuuucgaaa

SEQ ID NO: 1595799 - RNA, 19 nt, Homo sapiens
  misc_RNA (1)...(19): siRNA sense strand
ugaacaaacugcuuucgaa

SEQ ID NO: 1595800 - RNA, 19 nt, Homo sapiens
  misc_RNA (1)...(19): siRNA sense strand
caacaagaacuccuagaaa

SEQ ID NO: 1595801 - RNA, 19 nt, Homo sapiens
  misc_RNA (1)...(19): siRNA sense strand
gaaacagcaugagaacuug

SEQ ID NO: 1595802 - RNA, 19 nt, Homo sapiens
  misc_RNA (1)...(19): siRNA sense strand
caucucaccuuuagaccua

SEQ ID NO: 1595803 - RNA, 19 nt, Homo sapiens
  misc_RNA (1)...(19): siRNA sense strand
gcaacaagaacuccuagaa

SEQ ID NO: 1595804 - RNA, 19 nt, Homo sapiens
  misc_RNA (1)...(19): siRNA sense strand
gcagaagcuucaagaguuc

SEQ ID NO: 1595805 - RNA, 19 nt, Homo sapiens
  misc_RNA (1)...(19): siRNA sense strand
gcggaaggauggaaauguu

SEQ ID NO: 1595806 - RNA, 19 nt, Homo sapiens
  misc_RNA (1)...(19): siRNA sense strand
aaagauagaggacgagaaa

SEQ ID NO: 1595807 - RNA, 19 nt, Homo sapiens
  misc_RNA (1)...(19): siRNA sense strand
gcucaaugcuucgaauuca

SEQ ID NO: 1595808 - RNA, 19 nt, Homo sapiens
  misc_RNA (1)...(19): siRNA sense strand
gaaggugcgguccagguua

SEQ ID NO: 1595809 - RNA, 19 nt, Homo sapiens
  misc_RNA (1)...(19): siRNA sense strand
ucacagcaacgcauucuaa

SEQ ID NO: 1595810 - RNA, 19 nt, Homo sapiens
  misc_RNA (1)...(19): siRNA sense strand
cauuagagguacccacaaa

SEQ ID NO: 1595811 - RNA, 19 nt, Homo sapiens
  misc_RNA (1)...(19): siRNA sense strand
cagcaacgcauucuaauuc

SEQ ID NO: 1595812 - RNA, 19 nt, Homo sapiens
  misc_RNA (1)...(19): siRNA sense strand
gagcccaucucaccuuuag

SEQ ID NO: 1595813 - RNA, 19 nt, Homo sapiens
  misc_RNA (1)...(19): siRNA sense strand
gaacccagucugcaccuuu

SEQ ID NO: 1595814 - RNA, 19 nt, Homo sapiens
  misc_RNA (1)...(19): siRNA sense strand
cgaaaucuauugaacaacu

SEQ ID NO: 1595815 - RNA, 19 nt, Homo sapiens
  misc_RNA (1)...(19): siRNA sense strand
aaacugcuuucgaaaucua

SEQ ID NO: 1595816 - RNA, 19 nt, Homo sapiens
  misc_RNA (1)...(19): siRNA sense strand
acaaacugcuuucgaaauc

SEQ ID NO: 1595817 - RNA, 19 nt, Homo sapiens
  misc_RNA (1)...(19): siRNA sense strand
cgaauucacucaaagaaaa

SEQ ID NO: 1595818 - RNA, 19 nt, Homo sapiens
  misc_RNA (1)...(19): siRNA sense strand
uggagaagcagaagcaaua

SEQ ID NO: 1595819 - RNA, 19 nt, Homo sapiens
  misc_RNA (1)...(19): siRNA sense strand
gaaagggcaguggcaagua

SEQ ID NO: 1595820 - RNA, 19 nt, Homo sapiens
  misc_RNA (1)...(19): siRNA sense strand
gaugugaagucagaaguuc

SEQ ID NO: 1595821 - RNA, 19 nt, Homo sapiens
  misc_RNA (1)...(19): siRNA sense strand
guaaaucagcaacgaaaga

SEQ ID NO: 1595822 - RNA, 19 nt, Homo sapiens
  misc_RNA (1)...(19): siRNA sense strand
gaguaaaucagcaacgaaa

SEQ ID NO: 1595823 - RNA, 19 nt, Homo sapiens
  misc_RNA (1)...(19): siRNA sense strand
gaaaucuauugaacaacug

SEQ ID NO: 1595824 - RNA, 19 nt, Homo sapiens
  misc_RNA (1)...(19): siRNA sense strand
ggacagugaugaagaugcu

SEQ ID NO: 1595825 - RNA, 19 nt, Homo sapiens
  misc_RNA (1)...(19): siRNA sense strand
agaaacagcaugagaacuu

SEQ ID NO: 1595826 - RNA, 19 nt, Homo sapiens
  misc_RNA (1)...(19): siRNA sense strand
caacuggaaguguuacuga

SEQ ID NO: 1595827 - RNA, 19 nt, Homo sapiens
  misc_RNA (1)...(19): siRNA sense strand
agcagaagcuucaagaguu

SEQ ID NO: 1595828 - RNA, 19 nt, Homo sapiens
  misc_RNA (1)...(19): siRNA sense strand
gcagcuuccuccucucaga

SEQ ID NO: 1595829 - RNA, 19 nt, Homo sapiens
  misc_RNA (1)...(19): siRNA sense strand
ccaugaaccugcuaagucu

SEQ ID NO: 1595830 - RNA, 19 nt, Homo sapiens
  misc_RNA (1)...(19): siRNA sense strand
ggauggaaauguugucacu

SEQ ID NO: 1595831 - RNA, 19 nt, Homo sapiens
  misc_RNA (1)...(19): siRNA sense strand
cuucaagaguuccuacuga

SEQ ID NO: 1595832 - RNA, 19 nt, Homo sapiens
  misc_RNA (1)...(19): siRNA sense strand
ugaugaagaugcucagauc

SEQ ID NO: 1595833 - RNA, 19 nt, Homo sapiens
  misc_RNA (1)...(19): siRNA sense strand
uggcucagcuggucauuca

SEQ ID NO: 1595834 - RNA, 19 nt, Homo sapiens
  misc_RNA (1)...(19): siRNA sense strand
ccucugagcccaacuugaa

SEQ ID NO: 1595835 - RNA, 19 nt, Homo sapiens
  misc_RNA (1)...(19): siRNA sense strand
gcaagaacaggaaguagag

SEQ ID NO: 1595836 - RNA, 19 nt, Homo sapiens
  misc_RNA (1)...(19): siRNA sense strand
ccacccucauguuacuuua

SEQ ID NO: 1595837 - RNA, 19 nt, Homo sapiens
  misc_RNA (1)...(19): siRNA sense strand
gacagaauccucagucagu

SEQ ID NO: 1595838 - RNA, 19 nt, Homo sapiens
  misc_RNA (1)...(19): siRNA sense strand
gagaauuucaccuggcauu

SEQ ID NO: 1595839 - RNA, 19 nt, Homo sapiens
  misc_RNA (1)...(19): siRNA sense strand
ucuuguagcugguggaguu

SEQ ID NO: 1595840 - RNA, 19 nt, Homo sapiens
  misc_RNA (1)...(19): siRNA sense strand
gagcacaagaugcaaagga

SEQ ID NO: 1595841 - RNA, 19 nt, Homo sapiens
  misc_RNA (1)...(19): siRNA sense strand
cugcagcauuuauuauuga

SEQ ID NO: 1595842 - RNA, 19 nt, Homo sapiens
  misc_RNA (1)...(19): siRNA sense strand
caacgcauucuaauucaug

SEQ ID NO: 1595843 - RNA, 19 nt, Homo sapiens
  misc_RNA (1)...(19): siRNA sense strand
gaaaaugagacuucgguuu

SEQ ID NO: 1595844 - RNA, 19 nt, Homo sapiens
  misc_RNA (1)...(19): siRNA sense strand
acagaauccucagucagua

SEQ ID NO: 1595845 - RNA, 19 nt, Homo sapiens
  misc_RNA (1)...(19): siRNA sense strand
gcagaggcaagaacaggaa

SEQ ID NO: 1595846 - RNA, 19 nt, Homo sapiens
  misc_RNA (1)...(19): siRNA sense strand
gcaacaccagcaauucuug

SEQ ID NO: 1595847 - RNA, 19 nt, Homo sapiens
  misc_RNA (1)...(19): siRNA sense strand
gcauucuaauucaugaaga

SEQ ID NO: 1595848 - RNA, 19 nt, Homo sapiens
  misc_RNA (1)...(19): siRNA sense strand
agagaggcaucgcagagaa

SEQ ID NO: 1595849 - RNA, 19 nt, Homo sapiens
  misc_RNA (1)...(19): siRNA sense strand
gcaacgcauucuaauucau

SEQ ID NO: 1595850 - RNA, 19 nt, Homo sapiens
  misc_RNA (1)...(19): siRNA sense strand
caguggaugugaagucaga

SEQ ID NO: 1595851 - RNA, 19 nt, Homo sapiens
  misc_RNA (1)...(19): siRNA sense strand
ccugcagcauuuauuauug

SEQ ID NO: 1595852 - RNA, 19 nt, Homo sapiens
  misc_RNA (1)...(19): siRNA sense strand
aacaagaacuccuagaaaa

SEQ ID NO: 1595853 - RNA, 19 nt, Homo sapiens
  misc_RNA (1)...(19): siRNA sense strand
gcagauccacaugaacaaa

SEQ ID NO: 1595854 - RNA, 19 nt, Homo sapiens
  misc_RNA (1)...(19): siRNA sense strand
cagcagauccacaugaaca

SEQ ID NO: 1595855 - RNA, 19 nt, Homo sapiens
  misc_RNA (1)...(19): siRNA sense strand
gaauuucaccuggcauuag

SEQ ID NO: 1595856 - RNA, 19 nt, Homo sapiens
  misc_RNA (1)...(19): siRNA sense strand
gggccaacuggaaguguua

SEQ ID NO: 1595857 - RNA, 19 nt, Homo sapiens
  misc_RNA (1)...(19): siRNA sense strand
ggucccaguucaccaaaca

SEQ ID NO: 1595858 - RNA, 19 nt, Homo sapiens
  misc_RNA (1)...(19): siRNA sense strand
aaggugcgguccagguuaa

SEQ ID NO: 1595859 - RNA, 19 nt, Homo sapiens
  misc_RNA (1)...(19): siRNA sense strand
acacaucauuggaucaaag

SEQ ID NO: 1595860 - RNA, 19 nt, Homo sapiens
  misc_RNA (1)...(19): siRNA sense strand
ggcaagaacaggaaguaga

SEQ ID NO: 1595861 - RNA, 19 nt, Homo sapiens
  misc_RNA (1)...(19): siRNA sense strand
gaggcaagaacaggaagua

SEQ ID NO: 1595862 - RNA, 19 nt, Homo sapiens
  misc_RNA (1)...(19): siRNA sense strand
uuagagguacccacaaauu

SEQ ID NO: 1595863 - RNA, 19 nt, Homo sapiens
  misc_RNA (1)...(19): siRNA sense strand
ggaaggauggaaauguugu

SEQ ID NO: 1595864 - RNA, 19 nt, Homo sapiens
  misc_RNA (1)...(19): siRNA sense strand
cacaagaugcaaaggauga

SEQ ID NO: 1595865 - RNA, 19 nt, Homo sapiens
  misc_RNA (1)...(19): siRNA sense strand
cuuuauaccucuccuucuu

SEQ ID NO: 1595866 - RNA, 19 nt, Homo sapiens
  misc_RNA (1)...(19): siRNA sense strand
ugaaccugcuaagucuuua

SEQ ID NO: 1595867 - RNA, 19 nt, Homo sapiens
  misc_RNA (1)...(19): siRNA sense strand
ggaugugaagucagaaguu

SEQ ID NO: 1595868 - RNA, 19 nt, Homo sapiens
  misc_RNA (1)...(19): siRNA sense strand
uagagguacccacaaauug

SEQ ID NO: 1595869 - RNA, 19 nt, Homo sapiens
  misc_RNA (1)...(19): siRNA sense strand
uuauaccucuccuucuuug

SEQ ID NO: 1595870 - RNA, 19 nt, Homo sapiens
  misc_RNA (1)...(19): siRNA sense strand
aaagacacuccaacuaaug

SEQ ID NO: 1595871 - RNA, 19 nt, Homo sapiens
  misc_RNA (1)...(19): siRNA sense strand
gcaccaggcucagcuucag

SEQ ID NO: 1595872 - RNA, 19 nt, Homo sapiens
  misc_RNA (1)...(19): siRNA sense strand
gcaggaauuacuucuuauc

SEQ ID NO: 1595873 - RNA, 19 nt, Homo sapiens
  misc_RNA (1)...(19): siRNA sense strand
gaaguguuacugaaaauga

SEQ ID NO: 1595874 - RNA, 19 nt, Homo sapiens
  misc_RNA (1)...(19): siRNA sense strand
gcucagauccaggaaaugg

SEQ ID NO: 1595875 - RNA, 19 nt, Homo sapiens
  misc_RNA (1)...(19): siRNA sense strand
caacagcaacaccagcaau

SEQ ID NO: 1595876 - RNA, 19 nt, Homo sapiens
  misc_RNA (1)...(19): siRNA sense strand
ucucagaggcaaagauaga

SEQ ID NO: 1595877 - RNA, 19 nt, Homo sapiens
  misc_RNA (1)...(19): siRNA sense strand
gcagugcuuguguggauga

SEQ ID NO: 1595878 - RNA, 19 nt, Homo sapiens
  misc_RNA (1)...(19): siRNA sense strand
cacaugaacaaacugcuuu

SEQ ID NO: 1595879 - RNA, 19 nt, Homo sapiens
  misc_RNA (1)...(19): siRNA sense strand
aauuucaccuggcauuaga

SEQ ID NO: 1595880 - RNA, 19 nt, Homo sapiens
  misc_RNA (1)...(19): siRNA sense strand
gcaacaaaagagagaauuu

SEQ ID NO: 1595881 - RNA, 19 nt, Homo sapiens
  misc_RNA (1)...(19): siRNA sense strand
guugucacuucauucaaga

SEQ ID NO: 1595882 - RNA, 19 nt, Homo sapiens
  misc_RNA (1)...(19): siRNA sense strand
aaacagaaaguggcagaga

SEQ ID NO: 1595883 - RNA, 19 nt, Homo sapiens
  misc_RNA (1)...(19): siRNA sense strand
ggaaauguugucacuucau

SEQ ID NO: 1595884 - RNA, 19 nt, Homo sapiens
  misc_RNA (1)...(19): siRNA sense strand
caaacugcuuucgaaaucu

SEQ ID NO: 1595885 - RNA, 19 nt, Homo sapiens
  misc_RNA (1)...(19): siRNA sense strand
ccacaugaacaaacugcuu

SEQ ID NO: 1595886 - RNA, 19 nt, Homo sapiens
  misc_RNA (1)...(19): siRNA sense strand
cagcagcagauccacauga

SEQ ID NO: 1595887 - RNA, 19 nt, Homo sapiens
  misc_RNA (1)...(19): siRNA sense strand
gaaccugcuaagucuuuau

SEQ ID NO: 1595888 - RNA, 19 nt, Homo sapiens
  misc_RNA (1)...(19): siRNA sense strand
ucuccugcagcauuuauua

SEQ ID NO: 1595889 - RNA, 19 nt, Homo sapiens
  misc_RNA (1)...(19): siRNA sense strand
gagggaaagccacccaaca

SEQ ID NO: 1595890 - RNA, 19 nt, Homo sapiens
  misc_RNA (1)...(19): siRNA sense strand
gaacaaacuuagugaagaa

SEQ ID NO: 1595891 - RNA, 19 nt, Homo sapiens
  misc_RNA (1)...(19): siRNA sense strand
cagaaugccuuaguuauua

SEQ ID NO: 1595892 - RNA, 19 nt, Homo sapiens
  misc_RNA (1)...(19): siRNA sense strand
ggacagaaauggucaugug

SEQ ID NO: 1595893 - RNA, 19 nt, Homo sapiens
  misc_RNA (1)...(19): siRNA sense strand
cuacaacaguuuauccuua

SEQ ID NO: 1595894 - RNA, 19 nt, Homo sapiens
  misc_RNA (1)...(19): siRNA sense strand
ggaacaaacuuagugaaga

SEQ ID NO: 1595895 - RNA, 19 nt, Homo sapiens
  misc_RNA (1)...(19): siRNA sense strand
gaaacccuauuacgaugaa

SEQ ID NO: 1595896 - RNA, 19 nt, Homo sapiens
  misc_RNA (1)...(19): siRNA sense strand
ugacaccagugccuacuaa

SEQ ID NO: 1595897 - RNA, 19 nt, Homo sapiens
  misc_RNA (1)...(19): siRNA sense strand
cgaaaacgauucccucuaa

SEQ ID NO: 1595898 - RNA, 19 nt, Homo sapiens
  misc_RNA (1)...(19): siRNA sense strand
cagaauaucaucucuacaa

SEQ ID NO: 1595899 - RNA, 19 nt, Homo sapiens
  misc_RNA (1)...(19): siRNA sense strand
ccagaaugccuuaguuauu

SEQ ID NO: 1595900 - RNA, 19 nt, Homo sapiens
  misc_RNA (1)...(19): siRNA sense strand
cggaggaggucaugagaga

SEQ ID NO: 1595901 - RNA, 19 nt, Homo sapiens
  misc_RNA (1)...(19): siRNA sense strand
aaagaaacccuauuacgau

SEQ ID NO: 1595902 - RNA, 19 nt, Homo sapiens
  misc_RNA (1)...(19): siRNA sense strand
caaacuuagugaagaacaa

SEQ ID NO: 1595903 - RNA, 19 nt, Homo sapiens
  misc_RNA (1)...(19): siRNA sense strand
caaauccuacaacaguuua

SEQ ID NO: 1595904 - RNA, 19 nt, Homo sapiens
  misc_RNA (1)...(19): siRNA sense strand
cuacaaauccuacaacagu

SEQ ID NO: 1595905 - RNA, 19 nt, Homo sapiens
  misc_RNA (1)...(19): siRNA sense strand
ccgagaaggugugaucaaa

SEQ ID NO: 1595906 - RNA, 19 nt, Homo sapiens
  misc_RNA (1)...(19): siRNA sense strand
gaccuuaggaucccuuuga

SEQ ID NO: 1595907 - RNA, 19 nt, Homo sapiens
  misc_RNA (1)...(19): siRNA sense strand
gaggguaucuuuucaacuu

SEQ ID NO: 1595908 - RNA, 19 nt, Homo sapiens
  misc_RNA (1)...(19): siRNA sense strand
caacaaugcagaaaucagu

SEQ ID NO: 1595909 - RNA, 19 nt, Homo sapiens
  misc_RNA (1)...(19): siRNA sense strand
cgaguucaaugccagaaug

SEQ ID NO: 1595910 - RNA, 19 nt, Homo sapiens
  misc_RNA (1)...(19): siRNA sense strand
cuaaguguuuccaauguau

SEQ ID NO: 1595911 - RNA, 19 nt, Homo sapiens
  misc_RNA (1)...(19): siRNA sense strand
agaaaucaguguccagcuu

SEQ ID NO: 1595912 - RNA, 19 nt, Homo sapiens
  misc_RNA (1)...(19): siRNA sense strand
ucuaaguguuuccaaugua

SEQ ID NO: 1595913 - RNA, 19 nt, Homo sapiens
  misc_RNA (1)...(19): siRNA sense strand
cagaaauggucaugugaag

SEQ ID NO: 1595914 - RNA, 19 nt, Homo sapiens
  misc_RNA (1)...(19): siRNA sense strand
guaauucccagccuacaga

SEQ ID NO: 1595915 - RNA, 19 nt, Homo sapiens
  misc_RNA (1)...(19): siRNA sense strand
caugaacgcauuuaugguu

SEQ ID NO: 1595916 - RNA, 19 nt, Homo sapiens
  misc_RNA (1)...(19): siRNA sense strand
cacagaauaucaucucuac

SEQ ID NO: 1595917 - RNA, 19 nt, Homo sapiens
  misc_RNA (1)...(19): siRNA sense strand
gcacaaaagauuaaggaaa

SEQ ID NO: 1595918 - RNA, 19 nt, Homo sapiens
  misc_RNA (1)...(19): siRNA sense strand
ucagggagcuccgccuuca

SEQ ID NO: 1595919 - RNA, 19 nt, Homo sapiens
  misc_RNA (1)...(19): siRNA sense strand
ucccaucacucauccaguu

SEQ ID NO: 1595920 - RNA, 19 nt, Homo sapiens
  misc_RNA (1)...(19): siRNA sense strand
cuacuggagccuucuguaa

SEQ ID NO: 1595921 - RNA, 19 nt, Homo sapiens
  misc_RNA (1)...(19): siRNA sense strand
gaacgcauuuaugguuugg

SEQ ID NO: 1595922 - RNA, 19 nt, Homo sapiens
  misc_RNA (1)...(19): siRNA sense strand
ccuccaggguggucaaguu

SEQ ID NO: 1595923 - RNA, 19 nt, Homo sapiens
  misc_RNA (1)...(19): siRNA sense strand
gaagacagguacccaaaac

SEQ ID NO: 1595924 - RNA, 19 nt, Homo sapiens
  misc_RNA (1)...(19): siRNA sense strand
gaacaaaagaaacccuauu

SEQ ID NO: 1595925 - RNA, 19 nt, Homo sapiens
  misc_RNA (1)...(19): siRNA sense strand
gaccagcacuagccaaagc

SEQ ID NO: 1595926 - RNA, 19 nt, Homo sapiens
  misc_RNA (1)...(19): siRNA sense strand
gacagaaauggucauguga

SEQ ID NO: 1595927 - RNA, 19 nt, Homo sapiens
  misc_RNA (1)...(19): siRNA sense strand
uacguacucugugguaauu

SEQ ID NO: 1595928 - RNA, 19 nt, Homo sapiens
  misc_RNA (1)...(19): siRNA sense strand
acaaauccuacaacaguuu

SEQ ID NO: 1595929 - RNA, 19 nt, Homo sapiens
  misc_RNA (1)...(19): siRNA sense strand
cuauuacgaugaagcacaa

SEQ ID NO: 1595930 - RNA, 19 nt, Homo sapiens
  misc_RNA (1)...(19): siRNA sense strand
ugaacgcauuuaugguuug

SEQ ID NO: 1595931 - RNA, 19 nt, Homo sapiens
  misc_RNA (1)...(19): siRNA sense strand
uaacccagcagccaacaau

SEQ ID NO: 1595932 - RNA, 19 nt, Homo sapiens
  misc_RNA (1)...(19): siRNA sense strand
uacaaauccuacaacaguu

SEQ ID NO: 1595933 - RNA, 19 nt, Homo sapiens
  misc_RNA (1)...(19): siRNA sense strand
gaauuuccugguuggguuu

SEQ ID NO: 1595934 - RNA, 19 nt, Homo sapiens
  misc_RNA (1)...(19): siRNA sense strand
gaugaagcacaaaagauua

SEQ ID NO: 1595935 - RNA, 19 nt, Homo sapiens
  misc_RNA (1)...(19): siRNA sense strand
aaacgauucccucuaagug

SEQ ID NO: 1595936 - RNA, 19 nt, Homo sapiens
  misc_RNA (1)...(19): siRNA sense strand
guuauuaugaagacaggua

SEQ ID NO: 1595937 - RNA, 19 nt, Homo sapiens
  misc_RNA (1)...(19): siRNA sense strand
ccaggguggucaaguugga

SEQ ID NO: 1595938 - RNA, 19 nt, Homo sapiens
  misc_RNA (1)...(19): siRNA sense strand
gccagaaugccuuaguuau

SEQ ID NO: 1595939 - RNA, 19 nt, Homo sapiens
  misc_RNA (1)...(19): siRNA sense strand
ucaaugccagaaugccuua

SEQ ID NO: 1595940 - RNA, 19 nt, Homo sapiens
  misc_RNA (1)...(19): siRNA sense strand
uacagaaucccaucacuca

SEQ ID NO: 1595941 - RNA, 19 nt, Homo sapiens
  misc_RNA (1)...(19): siRNA sense strand
acgauucccucuaaguguu

SEQ ID NO: 1595942 - RNA, 19 nt, Homo sapiens
  misc_RNA (1)...(19): siRNA sense strand
gagaaggugugaucaaaac

SEQ ID NO: 1595943 - RNA, 19 nt, Homo sapiens
  misc_RNA (1)...(19): siRNA sense strand
gaagccagagcagguguug

SEQ ID NO: 1595944 - RNA, 19 nt, Homo sapiens
  misc_RNA (1)...(19): siRNA sense strand
ggguaucuuuucaacuuua

SEQ ID NO: 1595945 - RNA, 19 nt, Homo sapiens
  misc_RNA (1)...(19): siRNA sense strand
ugccagaaugccuuaguua

SEQ ID NO: 1595946 - RNA, 19 nt, Homo sapiens
  misc_RNA (1)...(19): siRNA sense strand
cagaaucccaucacucauc

SEQ ID NO: 1595947 - RNA, 19 nt, Homo sapiens
  misc_RNA (1)...(19): siRNA sense strand
acacagaauaucaucucua

SEQ ID NO: 1595948 - RNA, 19 nt, Homo sapiens
  misc_RNA (1)...(19): siRNA sense strand
uuagaguggaacaaacuua

SEQ ID NO: 1595949 - RNA, 19 nt, Homo sapiens
  misc_RNA (1)...(19): siRNA sense strand
gaguggaacaaacuuagug

SEQ ID NO: 1595950 - RNA, 19 nt, Homo sapiens
  misc_RNA (1)...(19): siRNA sense strand
uacaacaguuuauccuuac

SEQ ID NO: 1595951 - RNA, 19 nt, Homo sapiens
  misc_RNA (1)...(19): siRNA sense strand
augaacgcauuuaugguuu

SEQ ID NO: 1595952 - RNA, 19 nt, Homo sapiens
  misc_RNA (1)...(19): siRNA sense strand
cgucgaaaccgguccuaga

SEQ ID NO: 1595953 - RNA, 19 nt, Homo sapiens
  misc_RNA (1)...(19): siRNA sense strand
ccacacagaauaucaucuc

SEQ ID NO: 1595954 - RNA, 19 nt, Homo sapiens
  misc_RNA (1)...(19): siRNA sense strand
ugauaagauugaccaaggu

SEQ ID NO: 1595955 - RNA, 19 nt, Homo sapiens
  misc_RNA (1)...(19): siRNA sense strand
gcucaccuacguacucugu

SEQ ID NO: 1595956 - RNA, 19 nt, Homo sapiens
  misc_RNA (1)...(19): siRNA sense strand
caugagagacucgaugcaa

SEQ ID NO: 1595957 - RNA, 19 nt, Homo sapiens
  misc_RNA (1)...(19): siRNA sense strand
aaaagaaacccuauuacga

SEQ ID NO: 1595958 - RNA, 19 nt, Homo sapiens
  misc_RNA (1)...(19): siRNA sense strand
acagaaauggucaugugaa

SEQ ID NO: 1595959 - RNA, 19 nt, Homo sapiens
  misc_RNA (1)...(19): siRNA sense strand
uacuggagccuucuguaaa

SEQ ID NO: 1595960 - RNA, 19 nt, Homo sapiens
  misc_RNA (1)...(19): siRNA sense strand
agccaacaaugcagaaauc

SEQ ID NO: 1595961 - RNA, 19 nt, Homo sapiens
  misc_RNA (1)...(19): siRNA sense strand
gaaaacgauucccucuaag

SEQ ID NO: 1595962 - RNA, 19 nt, Homo sapiens
  misc_RNA (1)...(19): siRNA sense strand
uaucaucucuacaaauccu

SEQ ID NO: 1595963 - RNA, 19 nt, Homo sapiens
  misc_RNA (1)...(19): siRNA sense strand
ccucuaaguguuuccaaug

SEQ ID NO: 1595964 - RNA, 19 nt, Homo sapiens
  misc_RNA (1)...(19): siRNA sense strand
ucaccguguugcccucaga

SEQ ID NO: 1595965 - RNA, 19 nt, Homo sapiens
  misc_RNA (1)...(19): siRNA sense strand
gaaugccuuaguuauuaug

SEQ ID NO: 1595966 - RNA, 19 nt, Homo sapiens
  misc_RNA (1)...(19): siRNA sense strand
gguaccacacagaauauca

SEQ ID NO: 1595967 - RNA, 19 nt, Homo sapiens
  misc_RNA (1)...(19): siRNA sense strand
cgaugaagcacaaaagauu

SEQ ID NO: 1595968 - RNA, 19 nt, Homo sapiens
  misc_RNA (1)...(19): siRNA sense strand
ucaaggccaagaagcagaa

SEQ ID NO: 1595969 - RNA, 19 nt, Homo sapiens
  misc_RNA (1)...(19): siRNA sense strand
gaggaggucaugagagacu

SEQ ID NO: 1595970 - RNA, 19 nt, Homo sapiens
  misc_RNA (1)...(19): siRNA sense strand
gauccaccgaccagcacua

SEQ ID NO: 1595971 - RNA, 19 nt, Homo sapiens
  misc_RNA (1)...(19): siRNA sense strand
cccuuuggcuauggaaauu

SEQ ID NO: 1595972 - RNA, 19 nt, Homo sapiens
  misc_RNA (1)...(19): siRNA sense strand
ccuacguacucugugguaa

SEQ ID NO: 1595973 - RNA, 19 nt, Homo sapiens
  misc_RNA (1)...(19): siRNA sense strand
guaccacacagaauaucau

SEQ ID NO: 1595974 - RNA, 19 nt, Homo sapiens
  misc_RNA (1)...(19): siRNA sense strand
ggaaaagcacagagaggaa

SEQ ID NO: 1595975 - RNA, 19 nt, Homo sapiens
  misc_RNA (1)...(19): siRNA sense strand
ugccuuaguuauuaugaag

SEQ ID NO: 1595976 - RNA, 19 nt, Homo sapiens
  misc_RNA (1)...(19): siRNA sense strand
gaacaaacuuagugaagaa

SEQ ID NO: 1595977 - RNA, 19 nt, Homo sapiens
  misc_RNA (1)...(19): siRNA sense strand
gaauggaacuucuuacuau

SEQ ID NO: 1595978 - RNA, 19 nt, Homo sapiens
  misc_RNA (1)...(19): siRNA sense strand
cagaaugccuuaguuauua

SEQ ID NO: 1595979 - RNA, 19 nt, Homo sapiens
  misc_RNA (1)...(19): siRNA sense strand
ggacagaaauggucaugug

SEQ ID NO: 1595980 - RNA, 19 nt, Homo sapiens
  misc_RNA (1)...(19): siRNA sense strand
cuacaacaguuuauccuua

SEQ ID NO: 1595981 - RNA, 19 nt, Homo sapiens
  misc_RNA (1)...(19): siRNA sense strand
ggaacaaacuuagugaaga

SEQ ID NO: 1595982 - RNA, 19 nt, Homo sapiens
  misc_RNA (1)...(19): siRNA sense strand
gaacaugaauggaacuucu

SEQ ID NO: 1595983 - RNA, 19 nt, Homo sapiens
  misc_RNA (1)...(19): siRNA sense strand
gaaacccuauuacgaugaa

SEQ ID NO: 1595984 - RNA, 19 nt, Homo sapiens
  misc_RNA (1)...(19): siRNA sense strand
ugacaccagugccuacuaa

SEQ ID NO: 1595985 - RNA, 19 nt, Homo sapiens
  misc_RNA (1)...(19): siRNA sense strand
cgaaaacgauucccucuaa

SEQ ID NO: 1595986 - RNA, 19 nt, Homo sapiens
  misc_RNA (1)...(19): siRNA sense strand
cagaauaucaucucuacaa

SEQ ID NO: 1595987 - RNA, 19 nt, Homo sapiens
  misc_RNA (1)...(19): siRNA sense strand
ccagaaugccuuaguuauu

SEQ ID NO: 1595988 - RNA, 19 nt, Homo sapiens
  misc_RNA (1)...(19): siRNA sense strand
cggaggaggucaugagaga

SEQ ID NO: 1595989 - RNA, 19 nt, Homo sapiens
  misc_RNA (1)...(19): siRNA sense strand
aaagaaacccuauuacgau

SEQ ID NO: 1595990 - RNA, 19 nt, Homo sapiens
  misc_RNA (1)...(19): siRNA sense strand
caaacuuagugaagaacaa

SEQ ID NO: 1595991 - RNA, 19 nt, Homo sapiens
  misc_RNA (1)...(19): siRNA sense strand
caaauccuacaacaguuua

SEQ ID NO: 1595992 - RNA, 19 nt, Homo sapiens
  misc_RNA (1)...(19): siRNA sense strand
cuacaaauccuacaacagu

SEQ ID NO: 1595993 - RNA, 19 nt, Homo sapiens
  misc_RNA (1)...(19): siRNA sense strand
ccgagaaggugugaucaaa

SEQ ID NO: 1595994 - RNA, 19 nt, Homo sapiens
  misc_RNA (1)...(19): siRNA sense strand
gaccuuaggaucccuuuga

SEQ ID NO: 1595995 - RNA, 19 nt, Homo sapiens
  misc_RNA (1)...(19): siRNA sense strand
ugaauggaacuucuuacua

SEQ ID NO: 1595996 - RNA, 19 nt, Homo sapiens
  misc_RNA (1)...(19): siRNA sense strand
gaggguaucuuuucaacuu

SEQ ID NO: 1595997 - RNA, 19 nt, Homo sapiens
  misc_RNA (1)...(19): siRNA sense strand
caacaaugcagaaaucagu

SEQ ID NO: 1595998 - RNA, 19 nt, Homo sapiens
  misc_RNA (1)...(19): siRNA sense strand
cgaguucaaugccagaaug

SEQ ID NO: 1595999 - RNA, 19 nt, Homo sapiens
  misc_RNA (1)...(19): siRNA sense strand
cuaaguguuuccaauguau

SEQ ID NO: 1596000 - RNA, 19 nt, Homo sapiens
  misc_RNA (1)...(19): siRNA sense strand
agaaaucaguguccagcuu

SEQ ID NO: 1596001 - RNA, 19 nt, Homo sapiens
  misc_RNA (1)...(19): siRNA sense strand
ucuaaguguuuccaaugua

SEQ ID NO: 1596002 - RNA, 19 nt, Homo sapiens
  misc_RNA (1)...(19): siRNA sense strand
cgacagugaugaggaggaa

SEQ ID NO: 1596003 - RNA, 19 nt, Homo sapiens
  misc_RNA (1)...(19): siRNA sense strand
cagaaauggucaugugaag

SEQ ID NO: 1596004 - RNA, 19 nt, Homo sapiens
  misc_RNA (1)...(19): siRNA sense strand
ucaagugaaugcacacaca

SEQ ID NO: 1596005 - RNA, 19 nt, Homo sapiens
  misc_RNA (1)...(19): siRNA sense strand
guaauucccagccuacaga

SEQ ID NO: 1596006 - RNA, 19 nt, Homo sapiens
  misc_RNA (1)...(19): siRNA sense strand
caugaacgcauuuaugguu

SEQ ID NO: 1596007 - RNA, 19 nt, Homo sapiens
  misc_RNA (1)...(19): siRNA sense strand
cacagaauaucaucucuac

SEQ ID NO: 1596008 - RNA, 19 nt, Homo sapiens
  misc_RNA (1)...(19): siRNA sense strand
cgacaucaacuccuucuag

SEQ ID NO: 1596009 - RNA, 19 nt, Homo sapiens
  misc_RNA (1)...(19): siRNA sense strand
gaaugcacacacagugaaa

SEQ ID NO: 1596010 - RNA, 19 nt, Homo sapiens
  misc_RNA (1)...(19): siRNA sense strand
gcacaaaagauuaaggaaa

SEQ ID NO: 1596011 - RNA, 19 nt, Homo sapiens
  misc_RNA (1)...(19): siRNA sense strand
ucagggagcuccgccuuca

SEQ ID NO: 1596012 - RNA, 19 nt, Homo sapiens
  misc_RNA (1)...(19): siRNA sense strand
ucccaucacucauccaguu

SEQ ID NO: 1596013 - RNA, 19 nt, Homo sapiens
  misc_RNA (1)...(19): siRNA sense strand
cuacuggagccuucuguaa

SEQ ID NO: 1596014 - RNA, 19 nt, Homo sapiens
  misc_RNA (1)...(19): siRNA sense strand
gaacgcauuuaugguuugg

SEQ ID NO: 1596015 - RNA, 19 nt, Homo sapiens
  misc_RNA (1)...(19): siRNA sense strand
ggaguugugagaacaugaa

SEQ ID NO: 1596016 - RNA, 19 nt, Homo sapiens
  misc_RNA (1)...(19): siRNA sense strand
gaccagcacuagccaaagc

SEQ ID NO: 1596017 - RNA, 19 nt, Homo sapiens
  misc_RNA (1)...(19): siRNA sense strand
ggaacuucuuacuauaaca

SEQ ID NO: 1596018 - RNA, 19 nt, Homo sapiens
  misc_RNA (1)...(19): siRNA sense strand
gaagacagguacccaaaac

SEQ ID NO: 1596019 - RNA, 19 nt, Homo sapiens
  misc_RNA (1)...(19): siRNA sense strand
gaacaaaagaaacccuauu

SEQ ID NO: 1596020 - RNA, 19 nt, Homo sapiens
  misc_RNA (1)...(19): siRNA sense strand
ccuccaggguggucaaguu

SEQ ID NO: 1596021 - RNA, 19 nt, Homo sapiens
  misc_RNA (1)...(19): siRNA sense strand
gacagaaauggucauguga

SEQ ID NO: 1596022 - RNA, 19 nt, Homo sapiens
  misc_RNA (1)...(19): siRNA sense strand
uaacagucauagccacagu

SEQ ID NO: 1596023 - RNA, 19 nt, Homo sapiens
  misc_RNA (1)...(19): siRNA sense strand
uacguacucugugguaauu

SEQ ID NO: 1596024 - RNA, 19 nt, Homo sapiens
  misc_RNA (1)...(19): siRNA sense strand
acaaauccuacaacaguuu

SEQ ID NO: 1596025 - RNA, 19 nt, Homo sapiens
  misc_RNA (1)...(19): siRNA sense strand
cuauuacgaugaagcacaa

SEQ ID NO: 1596026 - RNA, 19 nt, Homo sapiens
  misc_RNA (1)...(19): siRNA sense strand
ugaacgcauuuaugguuug

SEQ ID NO: 1596027 - RNA, 19 nt, Homo sapiens
  misc_RNA (1)...(19): siRNA sense strand
uaacccagcagccaacaau

SEQ ID NO: 1596028 - RNA, 19 nt, Homo sapiens
  misc_RNA (1)...(19): siRNA sense strand
uacaaauccuacaacaguu

SEQ ID NO: 1596029 - RNA, 19 nt, Homo sapiens
  misc_RNA (1)...(19): siRNA sense strand
gaauuuccugguuggguuu

SEQ ID NO: 1596030 - RNA, 19 nt, Homo sapiens
  misc_RNA (1)...(19): siRNA sense strand
gaugaagcacaaaagauua

SEQ ID NO: 1596031 - RNA, 19 nt, Homo sapiens
  misc_RNA (1)...(19): siRNA sense strand
aaacgauucccucuaagug

SEQ ID NO: 1596032 - RNA, 19 nt, Homo sapiens
  misc_RNA (1)...(19): siRNA sense strand
gugaugaggaggaagaaga

SEQ ID NO: 1596033 - RNA, 19 nt, Homo sapiens
  misc_RNA (1)...(19): siRNA sense strand
gaacuucuuacuauaacag

SEQ ID NO: 1596034 - RNA, 19 nt, Homo sapiens
  misc_RNA (1)...(19): siRNA sense strand
agagacuacucaagugaau

SEQ ID NO: 1596035 - RNA, 19 nt, Homo sapiens
  misc_RNA (1)...(19): siRNA sense strand
guuauuaugaagacaggua

SEQ ID NO: 1596036 - RNA, 19 nt, Homo sapiens
  misc_RNA (1)...(19): siRNA sense strand
uacagaaucccaucacuca

SEQ ID NO: 1596037 - RNA, 19 nt, Homo sapiens
  misc_RNA (1)...(19): siRNA sense strand
ccaggguggucaaguugga

SEQ ID NO: 1596038 - RNA, 19 nt, Homo sapiens
  misc_RNA (1)...(19): siRNA sense strand
gccagaaugccuuaguuau

SEQ ID NO: 1596039 - RNA, 19 nt, Homo sapiens
  misc_RNA (1)...(19): siRNA sense strand
ucaaugccagaaugccuua

SEQ ID NO: 1596040 - RNA, 19 nt, Homo sapiens
  misc_RNA (1)...(19): siRNA sense strand
acgauucccucuaaguguu

SEQ ID NO: 1596041 - RNA, 19 nt, Homo sapiens
  misc_RNA (1)...(19): siRNA sense strand
caucaacuccuucuagcau

SEQ ID NO: 1596042 - RNA, 19 nt, Homo sapiens
  misc_RNA (1)...(19): siRNA sense strand
gagaaggugugaucaaaac

SEQ ID NO: 1596043 - RNA, 19 nt, Homo sapiens
  misc_RNA (1)...(19): siRNA sense strand
acaugaauggaacuucuua

SEQ ID NO: 1596044 - RNA, 19 nt, Homo sapiens
  misc_RNA (1)...(19): siRNA sense strand
ugugagaacaugaauggaa

SEQ ID NO: 1596045 - RNA, 19 nt, Homo sapiens
  misc_RNA (1)...(19): siRNA sense strand
gcacacacagugaaaauuc

SEQ ID NO: 1596046 - RNA, 19 nt, Homo sapiens
  misc_RNA (1)...(19): siRNA sense strand
uuagaguggaacaaacuua

SEQ ID NO: 1596047 - RNA, 19 nt, Homo sapiens
  misc_RNA (1)...(19): siRNA sense strand
gaagccagagcagguguug

SEQ ID NO: 1596048 - RNA, 19 nt, Homo sapiens
  misc_RNA (1)...(19): siRNA sense strand
ggguaucuuuucaacuuua

SEQ ID NO: 1596049 - RNA, 19 nt, Homo sapiens
  misc_RNA (1)...(19): siRNA sense strand
ugccagaaugccuuaguua

SEQ ID NO: 1596050 - RNA, 19 nt, Homo sapiens
  misc_RNA (1)...(19): siRNA sense strand
cagaaucccaucacucauc

SEQ ID NO: 1596051 - RNA, 19 nt, Homo sapiens
  misc_RNA (1)...(19): siRNA sense strand
acacagaauaucaucucua

SEQ ID NO: 1596052 - RNA, 19 nt, Homo sapiens
  misc_RNA (1)...(19): siRNA sense strand
gaguggaacaaacuuagug

SEQ ID NO: 1596053 - RNA, 19 nt, Homo sapiens
  misc_RNA (1)...(19): siRNA sense strand
ugaaugcacacacagugaa

SEQ ID NO: 1596054 - RNA, 19 nt, Homo sapiens
  misc_RNA (1)...(19): siRNA sense strand
gugaaugcacacacaguga

SEQ ID NO: 1596055 - RNA, 19 nt, Homo sapiens
  misc_RNA (1)...(19): siRNA sense strand
uacaacaguuuauccuuac

SEQ ID NO: 1596056 - RNA, 19 nt, Homo sapiens
  misc_RNA (1)...(19): siRNA sense strand
augaacgcauuuaugguuu

SEQ ID NO: 1596057 - RNA, 19 nt, Homo sapiens
  misc_RNA (1)...(19): siRNA sense strand
gcauccagcaagucaaugu

SEQ ID NO: 1596058 - RNA, 19 nt, Homo sapiens
  misc_RNA (1)...(19): siRNA sense strand
cgucgaaaccgguccuaga

SEQ ID NO: 1596059 - RNA, 19 nt, Homo sapiens
  misc_RNA (1)...(19): siRNA sense strand
ccacacagaauaucaucuc

SEQ ID NO: 1596060 - RNA, 19 nt, Homo sapiens
  misc_RNA (1)...(19): siRNA sense strand
gaaccuuggagaaugucuu

SEQ ID NO: 1596061 - RNA, 19 nt, Homo sapiens
  misc_RNA (1)...(19): siRNA sense strand
uuuagagacuacucaagug

SEQ ID NO: 1596062 - RNA, 19 nt, Homo sapiens
  misc_RNA (1)...(19): siRNA sense strand
acagaaauggucaugugaa

SEQ ID NO: 1596063 - RNA, 19 nt, Homo sapiens
  misc_RNA (1)...(19): siRNA sense strand
gcucaccuacguacucugu

SEQ ID NO: 1596064 - RNA, 19 nt, Homo sapiens
  misc_RNA (1)...(19): siRNA sense strand
aaaagaaacccuauuacga

SEQ ID NO: 1596065 - RNA, 19 nt, Homo sapiens
  misc_RNA (1)...(19): siRNA sense strand
ugauaagauugaccaaggu

SEQ ID NO: 1596066 - RNA, 19 nt, Homo sapiens
  misc_RNA (1)...(19): siRNA sense strand
caugagagacucgaugcaa

SEQ ID NO: 1596067 - RNA, 19 nt, Homo sapiens
  misc_RNA (1)...(19): siRNA sense strand
agccaacaaugcagaaauc

SEQ ID NO: 1596068 - RNA, 19 nt, Homo sapiens
  misc_RNA (1)...(19): siRNA sense strand
ugccucagcuggacauugg

SEQ ID NO: 1596069 - RNA, 19 nt, Homo sapiens
  misc_RNA (1)...(19): siRNA sense strand
uacuggagccuucuguaaa

SEQ ID NO: 1596070 - RNA, 19 nt, Homo sapiens
  misc_RNA (1)...(19): siRNA sense strand
guugugagaacaugaaugg

SEQ ID NO: 1596071 - RNA, 19 nt, Homo sapiens
  misc_RNA (1)...(19): siRNA sense strand
uuagagacuacucaaguga

SEQ ID NO: 1596072 - RNA, 19 nt, Homo sapiens
  misc_RNA (1)...(19): siRNA sense strand
gaaaacgauucccucuaag

SEQ ID NO: 1596073 - RNA, 19 nt, Homo sapiens
  misc_RNA (1)...(19): siRNA sense strand
uaucaucucuacaaauccu

SEQ ID NO: 1596074 - RNA, 19 nt, Homo sapiens
  misc_RNA (1)...(19): siRNA sense strand
ccucuaaguguuuccaaug

SEQ ID NO: 1596075 - RNA, 19 nt, Homo sapiens
  misc_RNA (1)...(19): siRNA sense strand
ugaugaggaggaagaagaa

SEQ ID NO: 1596076 - RNA, 19 nt, Homo sapiens
  misc_RNA (1)...(19): siRNA sense strand
agaaagagcuggugaacaa

SEQ ID NO: 1596077 - RNA, 19 nt, Homo sapiens
  misc_RNA (1)...(19): siRNA sense strand
ggagagaucuaccagaaga

SEQ ID NO: 1596078 - RNA, 19 nt, Homo sapiens
  misc_RNA (1)...(19): siRNA sense strand
agaaagagaugcccaaugu

SEQ ID NO: 1596079 - RNA, 19 nt, Homo sapiens
  misc_RNA (1)...(19): siRNA sense strand
gaacaaggcagaccagauc

SEQ ID NO: 1596080 - RNA, 19 nt, Homo sapiens
  misc_RNA (1)...(19): siRNA sense strand
cagcagaggcuaugacuuu

SEQ ID NO: 1596081 - RNA, 19 nt, Homo sapiens
  misc_RNA (1)...(19): siRNA sense strand
gaucaaggcucugaagaac

SEQ ID NO: 1596082 - RNA, 19 nt, Homo sapiens
  misc_RNA (1)...(19): siRNA sense strand
gaagaaccaugaggacaag

SEQ ID NO: 1596083 - RNA, 19 nt, Homo sapiens
  misc_RNA (1)...(19): siRNA sense strand
agaaggagauggugaaguc

SEQ ID NO: 1596084 - RNA, 19 nt, Homo sapiens
  misc_RNA (1)...(19): siRNA sense strand
gaugaguucucggaaguga

SEQ ID NO: 1596085 - RNA, 19 nt, Homo sapiens
  misc_RNA (1)...(19): siRNA sense strand
gaagcucaaugaccugauc

SEQ ID NO: 1596086 - RNA, 19 nt, Homo sapiens
  misc_RNA (1)...(19): siRNA sense strand
caucagcucccucaagaaa

SEQ ID NO: 1596087 - RNA, 19 nt, Homo sapiens
  misc_RNA (1)...(19): siRNA sense strand
ugggagagaucuaccagaa

SEQ ID NO: 1596088 - RNA, 19 nt, Homo sapiens
  misc_RNA (1)...(19): siRNA sense strand
gcaaggacaagcccaccua

SEQ ID NO: 1596089 - RNA, 19 nt, Homo sapiens
  misc_RNA (1)...(19): siRNA sense strand
gauccugucuggagagaag

SEQ ID NO: 1596090 - RNA, 19 nt, Homo sapiens
  misc_RNA (1)...(19): siRNA sense strand
ucagcucccucaagaaaga

SEQ ID NO: 1596091 - RNA, 19 nt, Homo sapiens
  misc_RNA (1)...(19): siRNA sense strand
gaagugaucaaggcucuga

SEQ ID NO: 1596092 - RNA, 19 nt, Homo sapiens
  misc_RNA (1)...(19): siRNA sense strand
ggagagaagcagcggauca

SEQ ID NO: 1596093 - RNA, 19 nt, Homo sapiens
  misc_RNA (1)...(19): siRNA sense strand
ucaaggcucugaagaacca

SEQ ID NO: 1596094 - RNA, 19 nt, Homo sapiens
  misc_RNA (1)...(19): siRNA sense strand
agagaugcccaaugucuuu

SEQ ID NO: 1596095 - RNA, 19 nt, Homo sapiens
  misc_RNA (1)...(19): siRNA sense strand
ccaagaaggagauggugaa

SEQ ID NO: 1596096 - RNA, 19 nt, Homo sapiens
  misc_RNA (1)...(19): siRNA sense strand
gaacaaccugggagagauc

SEQ ID NO: 1596097 - RNA, 19 nt, Homo sapiens
  misc_RNA (1)...(19): siRNA sense strand
ucaaggacauccagucacu

SEQ ID NO: 1596098 - RNA, 19 nt, Homo sapiens
  misc_RNA (1)...(19): siRNA sense strand
guucacgccuacaucauca

SEQ ID NO: 1596099 - RNA, 19 nt, Homo sapiens
  misc_RNA (1)...(19): siRNA sense strand
uggcaacgcuuuccucaac

SEQ ID NO: 1596100 - RNA, 19 nt, Homo sapiens
  misc_RNA (1)...(19): siRNA sense strand
ugaagaaccaugaggacaa

SEQ ID NO: 1596101 - RNA, 19 nt, Homo sapiens
  misc_RNA (1)...(19): siRNA sense strand
ugaacaaccugggagagau

SEQ ID NO: 1596102 - RNA, 19 nt, Homo sapiens
  misc_RNA (1)...(19): siRNA sense strand
ggacacgguggaugacaug

SEQ ID NO: 1596103 - RNA, 19 nt, Homo sapiens
  misc_RNA (1)...(19): siRNA sense strand
agcaggaccucuucaagga

SEQ ID NO: 1596104 - RNA, 19 nt, Homo sapiens
  misc_RNA (1)...(19): siRNA sense strand
aaagagaugcccaaugucu

SEQ ID NO: 1596105 - RNA, 19 nt, Homo sapiens
  misc_RNA (1)...(19): siRNA sense strand
gcaacgcuuuccucaacag

SEQ ID NO: 1596106 - RNA, 19 nt, Homo sapiens
  misc_RNA (1)...(19): siRNA sense strand
gaaccaugaggacaagauc

SEQ ID NO: 1596107 - RNA, 19 nt, Homo sapiens
  misc_RNA (1)...(19): siRNA sense strand
ggacagcaucagcaucauc

SEQ ID NO: 1596108 - RNA, 19 nt, Homo sapiens
  misc_RNA (1)...(19): siRNA sense strand
cgacaaccgcaagcucuuu

SEQ ID NO: 1596109 - RNA, 19 nt, Homo sapiens
  misc_RNA (1)...(19): siRNA sense strand
ugaucaaggcucugaagaa

SEQ ID NO: 1596110 - RNA, 19 nt, Homo sapiens
  misc_RNA (1)...(19): siRNA sense strand
cagaggcuaugacuuugca

SEQ ID NO: 1596111 - RNA, 19 nt, Homo sapiens
  misc_RNA (1)...(19): siRNA sense strand
gggcaagaccaccuucauc

SEQ ID NO: 1596112 - RNA, 19 nt, Homo sapiens
  misc_RNA (1)...(19): siRNA sense strand
gcaaguuccaggcgcugaa

SEQ ID NO: 1596113 - RNA, 19 nt, Homo sapiens
  misc_RNA (1)...(19): siRNA sense strand
gaaagagaugcccaauguc

SEQ ID NO: 1596114 - RNA, 19 nt, Homo sapiens
  misc_RNA (1)...(19): siRNA sense strand
gacaaccgcaagcucuuug

SEQ ID NO: 1596115 - RNA, 19 nt, Homo sapiens
  misc_RNA (1)...(19): siRNA sense strand
ggagcaggaccucuucaag

SEQ ID NO: 1596116 - RNA, 19 nt, Homo sapiens
  misc_RNA (1)...(19): siRNA sense strand
gcacgggcaagaccaccuu

SEQ ID NO: 1596117 - RNA, 19 nt, Homo sapiens
  misc_RNA (1)...(19): siRNA sense strand
cagccguccuggagugguu

SEQ ID NO: 1596118 - RNA, 19 nt, Homo sapiens
  misc_RNA (1)...(19): siRNA sense strand
gcgccaacgccaagaagga

SEQ ID NO: 1596119 - RNA, 19 nt, Homo sapiens
  misc_RNA (1)...(19): siRNA sense strand
acgcugacuucgacaacaa

SEQ ID NO: 1596120 - RNA, 19 nt, Homo sapiens
  misc_RNA (1)...(19): siRNA sense strand
gugaacaaccugggagaga

SEQ ID NO: 1596121 - RNA, 19 nt, Homo sapiens
  misc_RNA (1)...(19): siRNA sense strand
gcaucauccugcucuucga

SEQ ID NO: 1596122 - RNA, 19 nt, Homo sapiens
  misc_RNA (1)...(19): siRNA sense strand
aucaucagcucccucaaga

SEQ ID NO: 1596123 - RNA, 19 nt, Homo sapiens
  misc_RNA (1)...(19): siRNA sense strand
caagaaagagaugcccaau

SEQ ID NO: 1596124 - RNA, 19 nt, Homo sapiens
  misc_RNA (1)...(19): siRNA sense strand
gggauccugucuggagaga

SEQ ID NO: 1596125 - RNA, 19 nt, Homo sapiens
  misc_RNA (1)...(19): siRNA sense strand
acgcuuuccucaacagguu

SEQ ID NO: 1596126 - RNA, 19 nt, Homo sapiens
  misc_RNA (1)...(19): siRNA sense strand
gcucuucgacgcccacaag

SEQ ID NO: 1596127 - RNA, 19 nt, Homo sapiens
  misc_RNA (1)...(19): siRNA sense strand
uggccgacguggacaagga

SEQ ID NO: 1596128 - RNA, 19 nt, Homo sapiens
  misc_RNA (1)...(19): siRNA sense strand
caagcgcagacaugaguga

SEQ ID NO: 1596129 - RNA, 19 nt, Homo sapiens
  misc_RNA (1)...(19): siRNA sense strand
caucaucagcucccucaag

SEQ ID NO: 1596130 - RNA, 19 nt, Homo sapiens
  misc_RNA (1)...(19): siRNA sense strand
cccacaagcuggacaucuc

SEQ ID NO: 1596131 - RNA, 19 nt, Homo sapiens
  misc_RNA (1)...(19): siRNA sense strand
ggcaacgcuuuccucaaca

SEQ ID NO: 1596132 - RNA, 19 nt, Homo sapiens
  misc_RNA (1)...(19): siRNA sense strand
gagaugcccaaugucuuug

SEQ ID NO: 1596133 - RNA, 19 nt, Homo sapiens
  misc_RNA (1)...(19): siRNA sense strand
uaagggagauuucuacaaa

SEQ ID NO: 1596134 - RNA, 19 nt, Homo sapiens
  misc_RNA (1)...(19): siRNA sense strand
cagaucaccuucagucuua

SEQ ID NO: 1596135 - RNA, 19 nt, Homo sapiens
  misc_RNA (1)...(19): siRNA sense strand
gaaauuaacuggaucuacu

SEQ ID NO: 1596136 - RNA, 19 nt, Homo sapiens
  misc_RNA (1)...(19): siRNA sense strand
gaaaugcuccaaaguguaa

SEQ ID NO: 1596137 - RNA, 19 nt, Homo sapiens
  misc_RNA (1)...(19): siRNA sense strand
gauaugauccgccaaauga

SEQ ID NO: 1596138 - RNA, 19 nt, Homo sapiens
  misc_RNA (1)...(19): siRNA sense strand
caaagaugcuaucaaagaa

SEQ ID NO: 1596139 - RNA, 19 nt, Homo sapiens
  misc_RNA (1)...(19): siRNA sense strand
gaaauugaaucagcgauau

SEQ ID NO: 1596140 - RNA, 19 nt, Homo sapiens
  misc_RNA (1)...(19): siRNA sense strand
gacaggaggugaugaagaa

SEQ ID NO: 1596141 - RNA, 19 nt, Homo sapiens
  misc_RNA (1)...(19): siRNA sense strand
gaacugacuuuacccaauc

SEQ ID NO: 1596142 - RNA, 19 nt, Homo sapiens
  misc_RNA (1)...(19): siRNA sense strand
guaaagucauuaaggagua

SEQ ID NO: 1596143 - RNA, 19 nt, Homo sapiens
  misc_RNA (1)...(19): siRNA sense strand
uaaauaagcucaguguuca

SEQ ID NO: 1596144 - RNA, 19 nt, Homo sapiens
  misc_RNA (1)...(19): siRNA sense strand
gagauagaguuccuuguga

SEQ ID NO: 1596145 - RNA, 19 nt, Homo sapiens
  misc_RNA (1)...(19): siRNA sense strand
ggaguacccuggaaaggaa

SEQ ID NO: 1596146 - RNA, 19 nt, Homo sapiens
  misc_RNA (1)...(19): siRNA sense strand
ggagguagaucagauugaa

SEQ ID NO: 1596147 - RNA, 19 nt, Homo sapiens
  misc_RNA (1)...(19): siRNA sense strand
gaaagcaaccaccuaauuc

SEQ ID NO: 1596148 - RNA, 19 nt, Homo sapiens
  misc_RNA (1)...(19): siRNA sense strand
ggauaaagcauacaccaaa

SEQ ID NO: 1596149 - RNA, 19 nt, Homo sapiens
  misc_RNA (1)...(19): siRNA sense strand
ggccaaaggucauauaaag

SEQ ID NO: 1596150 - RNA, 19 nt, Homo sapiens
  misc_RNA (1)...(19): siRNA sense strand
cagcagcgauucagugauu

SEQ ID NO: 1596151 - RNA, 19 nt, Homo sapiens
  misc_RNA (1)...(19): siRNA sense strand
ccaaagaugcuaucaaaga

SEQ ID NO: 1596152 - RNA, 19 nt, Homo sapiens
  misc_RNA (1)...(19): siRNA sense strand
uaagaucuuugaacaggua

SEQ ID NO: 1596153 - RNA, 19 nt, Homo sapiens
  misc_RNA (1)...(19): siRNA sense strand
ggaccaaauuugauaagau

SEQ ID NO: 1596154 - RNA, 19 nt, Homo sapiens
  misc_RNA (1)...(19): siRNA sense strand
gcacaccacugccuguuuc

SEQ ID NO: 1596155 - RNA, 19 nt, Homo sapiens
  misc_RNA (1)...(19): siRNA sense strand
ggaaauugaaucagcgaua

SEQ ID NO: 1596156 - RNA, 19 nt, Homo sapiens
  misc_RNA (1)...(19): siRNA sense strand
guuaccaacuugcauuuaa

SEQ ID NO: 1596157 - RNA, 19 nt, Homo sapiens
  misc_RNA (1)...(19): siRNA sense strand
gauggaaggcugugaauau

SEQ ID NO: 1596158 - RNA, 19 nt, Homo sapiens
  misc_RNA (1)...(19): siRNA sense strand
gaacaggauaucgaaauaa

SEQ ID NO: 1596159 - RNA, 19 nt, Homo sapiens
  misc_RNA (1)...(19): siRNA sense strand
agaacaggauaucgaaaua

SEQ ID NO: 1596160 - RNA, 19 nt, Homo sapiens
  misc_RNA (1)...(19): siRNA sense strand
ggaucuacuucuagucuaa

SEQ ID NO: 1596161 - RNA, 19 nt, Homo sapiens
  misc_RNA (1)...(19): siRNA sense strand
cagauugaauugaaacuga

SEQ ID NO: 1596162 - RNA, 19 nt, Homo sapiens
  misc_RNA (1)...(19): siRNA sense strand
gcacuuugaagguuugaua

SEQ ID NO: 1596163 - RNA, 19 nt, Homo sapiens
  misc_RNA (1)...(19): siRNA sense strand
caucuucccuguuggauau

SEQ ID NO: 1596164 - RNA, 19 nt, Homo sapiens
  misc_RNA (1)...(19): siRNA sense strand
uaaaggagguagaucagau

SEQ ID NO: 1596165 - RNA, 19 nt, Homo sapiens
  misc_RNA (1)...(19): siRNA sense strand
gcaacucuuucucgauuga

SEQ ID NO: 1596166 - RNA, 19 nt, Homo sapiens
  misc_RNA (1)...(19): siRNA sense strand
gaguaaaguuggaauucuu

SEQ ID NO: 1596167 - RNA, 19 nt, Homo sapiens
  misc_RNA (1)...(19): siRNA sense strand
gcaaauggaagaaguaaag

SEQ ID NO: 1596168 - RNA, 19 nt, Homo sapiens
  misc_RNA (1)...(19): siRNA sense strand
gaccaaauuugauaagauc

SEQ ID NO: 1596169 - RNA, 19 nt, Homo sapiens
  misc_RNA (1)...(19): siRNA sense strand
gcuaaagaguacagauuau

SEQ ID NO: 1596170 - RNA, 19 nt, Homo sapiens
  misc_RNA (1)...(19): siRNA sense strand
ccagucaccucaacaaugu

SEQ ID NO: 1596171 - RNA, 19 nt, Homo sapiens
  misc_RNA (1)...(19): siRNA sense strand
ugccaaagaugcuaucaaa

SEQ ID NO: 1596172 - RNA, 19 nt, Homo sapiens
  misc_RNA (1)...(19): siRNA sense strand
gagcugaacaaccuaauug

SEQ ID NO: 1596173 - RNA, 19 nt, Homo sapiens
  misc_RNA (1)...(19): siRNA sense strand
gaaaguagcaaaugaaagc

SEQ ID NO: 1596174 - RNA, 19 nt, Homo sapiens
  misc_RNA (1)...(19): siRNA sense strand
ggacccugcuucuuuccua

SEQ ID NO: 1596175 - RNA, 19 nt, Homo sapiens
  misc_RNA (1)...(19): siRNA sense strand
gggcuaacauccagucaau

SEQ ID NO: 1596176 - RNA, 19 nt, Homo sapiens
  misc_RNA (1)...(19): siRNA sense strand
ggagaaaguagcaaaugaa

SEQ ID NO: 1596177 - RNA, 19 nt, Homo sapiens
  misc_RNA (1)...(19): siRNA sense strand
ugaacaaccuaauugcauu

SEQ ID NO: 1596178 - RNA, 19 nt, Homo sapiens
  misc_RNA (1)...(19): siRNA sense strand
ucagucaucuucccuguug

SEQ ID NO: 1596179 - RNA, 19 nt, Homo sapiens
  misc_RNA (1)...(19): siRNA sense strand
ggaaaugcuccaaagugua

SEQ ID NO: 1596180 - RNA, 19 nt, Homo sapiens
  misc_RNA (1)...(19): siRNA sense strand
gaucugguguuacaaugga

SEQ ID NO: 1596181 - RNA, 19 nt, Homo sapiens
  misc_RNA (1)...(19): siRNA sense strand
gggaggaggaaguaaguua

SEQ ID NO: 1596182 - RNA, 19 nt, Homo sapiens
  misc_RNA (1)...(19): siRNA sense strand
gagaaaguagcaaaugaaa

SEQ ID NO: 1596183 - RNA, 19 nt, Homo sapiens
  misc_RNA (1)...(19): siRNA sense strand
gaaggacuaacaaagaauu

SEQ ID NO: 1596184 - RNA, 19 nt, Homo sapiens
  misc_RNA (1)...(19): siRNA sense strand
aaggagaucuugcuucuuc

SEQ ID NO: 1596185 - RNA, 19 nt, Homo sapiens
  misc_RNA (1)...(19): siRNA sense strand
gacaggaccaaauuugaua

SEQ ID NO: 1596186 - RNA, 19 nt, Homo sapiens
  misc_RNA (1)...(19): siRNA sense strand
ggaaggcugugaauaugca

SEQ ID NO: 1596187 - RNA, 19 nt, Homo sapiens
  misc_RNA (1)...(19): siRNA sense strand
gauaaccucuacaagaaag

SEQ ID NO: 1596188 - RNA, 19 nt, Homo sapiens
  misc_RNA (1)...(19): siRNA sense strand
caacuugcauuuaacaaac

SEQ ID NO: 1596189 - RNA, 19 nt, Homo sapiens
  misc_RNA (1)...(19): siRNA sense strand
gaaaaucucaugucuagaa

SEQ ID NO: 1596190 - RNA, 19 nt, Homo sapiens
  misc_RNA (1)...(19): siRNA sense strand
ggaccuggauggaggaaca

SEQ ID NO: 1596191 - RNA, 19 nt, Homo sapiens
  misc_RNA (1)...(19): siRNA sense strand
aaacaugucugccucugau

SEQ ID NO: 1596192 - RNA, 19 nt, Homo sapiens
  misc_RNA (1)...(19): siRNA sense strand
caagaugacuggcacaacu

SEQ ID NO: 1596193 - RNA, 19 nt, Homo sapiens
  misc_RNA (1)...(19): siRNA sense strand
ugaaagcaaccaccuaauu

SEQ ID NO: 1596194 - RNA, 19 nt, Homo sapiens
  misc_RNA (1)...(19): siRNA sense strand
agaguuaaaugcaagagaa

SEQ ID NO: 1596195 - RNA, 19 nt, Homo sapiens
  misc_RNA (1)...(19): siRNA sense strand
gcaaaugaaagccagaaga

SEQ ID NO: 1596196 - RNA, 19 nt, Homo sapiens
  misc_RNA (1)...(19): siRNA sense strand
ucagaggaguauuuguuaa

SEQ ID NO: 1596197 - RNA, 19 nt, Homo sapiens
  misc_RNA (1)...(19): siRNA sense strand
ggcuaaagaguacagauua

SEQ ID NO: 1596198 - RNA, 19 nt, Homo sapiens
  misc_RNA (1)...(19): siRNA sense strand
gcggaagccuuugcagaaa

SEQ ID NO: 1596199 - RNA, 19 nt, Homo sapiens
  misc_RNA (1)...(19): siRNA sense strand
caaacaagaacuucguaaa

SEQ ID NO: 1596200 - RNA, 19 nt, Homo sapiens
  misc_RNA (1)...(19): siRNA sense strand
ccaaauaaggcaaauggaa

SEQ ID NO: 1596201 - RNA, 19 nt, Homo sapiens
  misc_RNA (1)...(19): siRNA sense strand
caaaguaugccuggaacua

SEQ ID NO: 1596202 - RNA, 19 nt, Homo sapiens
  misc_RNA (1)...(19): siRNA sense strand
gaacagguacuaagugaac

SEQ ID NO: 1596203 - RNA, 19 nt, Homo sapiens
  misc_RNA (1)...(19): siRNA sense strand
caggauaucgaaauaauga

SEQ ID NO: 1596204 - RNA, 19 nt, Homo sapiens
  misc_RNA (1)...(19): siRNA sense strand
uauaagcacuuugaagguu

SEQ ID NO: 1596205 - RNA, 19 nt, Homo sapiens
  misc_RNA (1)...(19): siRNA sense strand
gcaaccaccuaauucaucu

SEQ ID NO: 1596206 - RNA, 19 nt, Homo sapiens
  misc_RNA (1)...(19): siRNA sense strand
gcucacagcuuuuggaaga

SEQ ID NO: 1596207 - RNA, 19 nt, Homo sapiens
  misc_RNA (1)...(19): siRNA sense strand
gauuauuguuccagcauug

SEQ ID NO: 1596208 - RNA, 19 nt, Homo sapiens
  misc_RNA (1)...(19): siRNA sense strand
uuugauagcucgcuguuau

SEQ ID NO: 1596209 - RNA, 19 nt, Homo sapiens
  misc_RNA (1)...(19): siRNA sense strand
gaggaguauuuguuaaugu

SEQ ID NO: 1596210 - RNA, 19 nt, Homo sapiens
  misc_RNA (1)...(19): siRNA sense strand
aaagaaagcaagaaguuug

SEQ ID NO: 1596211 - RNA, 19 nt, Homo sapiens
  misc_RNA (1)...(19): siRNA sense strand
gaggaaaugcuccaaagug

SEQ ID NO: 1596212 - RNA, 19 nt, Homo sapiens
  misc_RNA (1)...(19): siRNA sense strand
gagcaguuaugaggaaaug

SEQ ID NO: 1596213 - RNA, 19 nt, Homo sapiens
  misc_RNA (1)...(19): siRNA sense strand
gagaagaacaggauaucga

SEQ ID NO: 1596214 - RNA, 19 nt, Homo sapiens
  misc_RNA (1)...(19): siRNA sense strand
gcuaacauccagucaauca

SEQ ID NO: 1596215 - RNA, 19 nt, Homo sapiens
  misc_RNA (1)...(19): siRNA sense strand
uggagaaaguagcaaauga

SEQ ID NO: 1596216 - RNA, 19 nt, Homo sapiens
  misc_RNA (1)...(19): siRNA sense strand
gcagaacaggacuucauaa

SEQ ID NO: 1596217 - RNA, 19 nt, Homo sapiens
  misc_RNA (1)...(19): siRNA sense strand
cuaaagaaagcaagaaguu

SEQ ID NO: 1596218 - RNA, 19 nt, Homo sapiens
  misc_RNA (1)...(19): siRNA sense strand
gauuauuuaucccgacuau

SEQ ID NO: 1596219 - RNA, 19 nt, Homo sapiens
  misc_RNA (1)...(19): siRNA sense strand
aaucaagcaugcauuacaa

SEQ ID NO: 1596220 - RNA, 19 nt, Homo sapiens
  misc_RNA (1)...(19): siRNA sense strand
uucaggacauucuggauua

SEQ ID NO: 1596221 - RNA, 19 nt, Homo sapiens
  misc_RNA (1)...(19): siRNA sense strand
cuaaauaagcucaguguuc

SEQ ID NO: 1596222 - RNA, 19 nt, Homo sapiens
  misc_RNA (1)...(19): siRNA sense strand
auagagauuugcuccgaua

SEQ ID NO: 1596223 - RNA, 19 nt, Homo sapiens
  misc_RNA (1)...(19): siRNA sense strand
caucauccauuucauagag

SEQ ID NO: 1596224 - RNA, 19 nt, Homo sapiens
  misc_RNA (1)...(19): siRNA sense strand
agaugaauaccaagaguua

SEQ ID NO: 1596225 - RNA, 19 nt, Homo sapiens
  misc_RNA (1)...(19): siRNA sense strand
ugaagaauuugcuggacuu

SEQ ID NO: 1596226 - RNA, 19 nt, Homo sapiens
  misc_RNA (1)...(19): siRNA sense strand
uuaacuggaucuacuucua

SEQ ID NO: 1596227 - RNA, 19 nt, Homo sapiens
  misc_RNA (1)...(19): siRNA sense strand
ugaugaaauugcuagauga

SEQ ID NO: 1596228 - RNA, 19 nt, Homo sapiens
  misc_RNA (1)...(19): siRNA sense strand
gaagaacaggauaucgaaa

SEQ ID NO: 1596229 - RNA, 19 nt, Homo sapiens
  misc_RNA (1)...(19): siRNA sense strand
gcaagagaagaacaggaua

SEQ ID NO: 1596230 - RNA, 19 nt, Homo sapiens
  misc_RNA (1)...(19): siRNA sense strand
gauaaagcauacaccaaac

SEQ ID NO: 1596231 - RNA, 19 nt, Homo sapiens
  misc_RNA (1)...(19): siRNA sense strand
caaaugcauuaguaaccaa

SEQ ID NO: 1596232 - RNA, 19 nt, Homo sapiens
  misc_RNA (1)...(19): siRNA sense strand
ggauuauuguuccagcauu

SEQ ID NO: 1596233 - RNA, 19 nt, Homo sapiens
  misc_RNA (1)...(19): siRNA sense strand
uaagggagauuucuacaaa

SEQ ID NO: 1596234 - RNA, 19 nt, Homo sapiens
  misc_RNA (1)...(19): siRNA sense strand
cagaucaccuucagucuua

SEQ ID NO: 1596235 - RNA, 19 nt, Homo sapiens
  misc_RNA (1)...(19): siRNA sense strand
gaaauuaacuggaucuacu

SEQ ID NO: 1596236 - RNA, 19 nt, Homo sapiens
  misc_RNA (1)...(19): siRNA sense strand
gaaaugcuccaaaguguaa

SEQ ID NO: 1596237 - RNA, 19 nt, Homo sapiens
  misc_RNA (1)...(19): siRNA sense strand
gauaugauccgccaaauga

SEQ ID NO: 1596238 - RNA, 19 nt, Homo sapiens
  misc_RNA (1)...(19): siRNA sense strand
caaagaugcuaucaaagaa

SEQ ID NO: 1596239 - RNA, 19 nt, Homo sapiens
  misc_RNA (1)...(19): siRNA sense strand
gaaauugaaucagcgauau

SEQ ID NO: 1596240 - RNA, 19 nt, Homo sapiens
  misc_RNA (1)...(19): siRNA sense strand
gacaggaggugaugaagaa

SEQ ID NO: 1596241 - RNA, 19 nt, Homo sapiens
  misc_RNA (1)...(19): siRNA sense strand
gaacugacuuuacccaauc

SEQ ID NO: 1596242 - RNA, 19 nt, Homo sapiens
  misc_RNA (1)...(19): siRNA sense strand
guaaagucauuaaggagua

SEQ ID NO: 1596243 - RNA, 19 nt, Homo sapiens
  misc_RNA (1)...(19): siRNA sense strand
uaaauaagcucaguguuca

SEQ ID NO: 1596244 - RNA, 19 nt, Homo sapiens
  misc_RNA (1)...(19): siRNA sense strand
gagauagaguuccuuguga

SEQ ID NO: 1596245 - RNA, 19 nt, Homo sapiens
  misc_RNA (1)...(19): siRNA sense strand
ggaguacccuggaaaggaa

SEQ ID NO: 1596246 - RNA, 19 nt, Homo sapiens
  misc_RNA (1)...(19): siRNA sense strand
ggagguagaucagauugaa

SEQ ID NO: 1596247 - RNA, 19 nt, Homo sapiens
  misc_RNA (1)...(19): siRNA sense strand
gaaagcaaccaccuaauuc

SEQ ID NO: 1596248 - RNA, 19 nt, Homo sapiens
  misc_RNA (1)...(19): siRNA sense strand
ggauaaagcauacaccaaa

SEQ ID NO: 1596249 - RNA, 19 nt, Homo sapiens
  misc_RNA (1)...(19): siRNA sense strand
ggccaaaggucauauaaag

SEQ ID NO: 1596250 - RNA, 19 nt, Homo sapiens
  misc_RNA (1)...(19): siRNA sense strand
cagcagcgauucagugauu

SEQ ID NO: 1596251 - RNA, 19 nt, Homo sapiens
  misc_RNA (1)...(19): siRNA sense strand
ccaaagaugcuaucaaaga

SEQ ID NO: 1596252 - RNA, 19 nt, Homo sapiens
  misc_RNA (1)...(19): siRNA sense strand
uaagaucuuugaacaggua

SEQ ID NO: 1596253 - RNA, 19 nt, Homo sapiens
  misc_RNA (1)...(19): siRNA sense strand
ggaccaaauuugauaagau

SEQ ID NO: 1596254 - RNA, 19 nt, Homo sapiens
  misc_RNA (1)...(19): siRNA sense strand
gcacaccacugccuguuuc

SEQ ID NO: 1596255 - RNA, 19 nt, Homo sapiens
  misc_RNA (1)...(19): siRNA sense strand
ggaaauugaaucagcgaua

SEQ ID NO: 1596256 - RNA, 19 nt, Homo sapiens
  misc_RNA (1)...(19): siRNA sense strand
guuaccaacuugcauuuaa

SEQ ID NO: 1596257 - RNA, 19 nt, Homo sapiens
  misc_RNA (1)...(19): siRNA sense strand
gauggaaggcugugaauau

SEQ ID NO: 1596258 - RNA, 19 nt, Homo sapiens
  misc_RNA (1)...(19): siRNA sense strand
gaacaggauaucgaaauaa

SEQ ID NO: 1596259 - RNA, 19 nt, Homo sapiens
  misc_RNA (1)...(19): siRNA sense strand
agaacaggauaucgaaaua

SEQ ID NO: 1596260 - RNA, 19 nt, Homo sapiens
  misc_RNA (1)...(19): siRNA sense strand
ggaucuacuucuagucuaa

SEQ ID NO: 1596261 - RNA, 19 nt, Homo sapiens
  misc_RNA (1)...(19): siRNA sense strand
cagauugaauugaaacuga

SEQ ID NO: 1596262 - RNA, 19 nt, Homo sapiens
  misc_RNA (1)...(19): siRNA sense strand
gcacuuugaagguuugaua

SEQ ID NO: 1596263 - RNA, 19 nt, Homo sapiens
  misc_RNA (1)...(19): siRNA sense strand
caucuucccuguuggauau

SEQ ID NO: 1596264 - RNA, 19 nt, Homo sapiens
  misc_RNA (1)...(19): siRNA sense strand
uaaaggagguagaucagau

SEQ ID NO: 1596265 - RNA, 19 nt, Homo sapiens
  misc_RNA (1)...(19): siRNA sense strand
gcaacucuuucucgauuga

SEQ ID NO: 1596266 - RNA, 19 nt, Homo sapiens
  misc_RNA (1)...(19): siRNA sense strand
gaguaaaguuggaauucuu

SEQ ID NO: 1596267 - RNA, 19 nt, Homo sapiens
  misc_RNA (1)...(19): siRNA sense strand
gcaaauggaagaaguaaag

SEQ ID NO: 1596268 - RNA, 19 nt, Homo sapiens
  misc_RNA (1)...(19): siRNA sense strand
gaccaaauuugauaagauc

SEQ ID NO: 1596269 - RNA, 19 nt, Homo sapiens
  misc_RNA (1)...(19): siRNA sense strand
gcuaaagaguacagauuau

SEQ ID NO: 1596270 - RNA, 19 nt, Homo sapiens
  misc_RNA (1)...(19): siRNA sense strand
ccagucaccucaacaaugu

SEQ ID NO: 1596271 - RNA, 19 nt, Homo sapiens
  misc_RNA (1)...(19): siRNA sense strand
ugccaaagaugcuaucaaa

SEQ ID NO: 1596272 - RNA, 19 nt, Homo sapiens
  misc_RNA (1)...(19): siRNA sense strand
gagcugaacaaccuaauug

SEQ ID NO: 1596273 - RNA, 19 nt, Homo sapiens
  misc_RNA (1)...(19): siRNA sense strand
gaaaguagcaaaugaaagc

SEQ ID NO: 1596274 - RNA, 19 nt, Homo sapiens
  misc_RNA (1)...(19): siRNA sense strand
ggacccugcuucuuuccua

SEQ ID NO: 1596275 - RNA, 19 nt, Homo sapiens
  misc_RNA (1)...(19): siRNA sense strand
gggcuaacauccagucaau

SEQ ID NO: 1596276 - RNA, 19 nt, Homo sapiens
  misc_RNA (1)...(19): siRNA sense strand
ggagaaaguagcaaaugaa

SEQ ID NO: 1596277 - RNA, 19 nt, Homo sapiens
  misc_RNA (1)...(19): siRNA sense strand
ugaacaaccuaauugcauu

SEQ ID NO: 1596278 - RNA, 19 nt, Homo sapiens
  misc_RNA (1)...(19): siRNA sense strand
ucagucaucuucccuguug

SEQ ID NO: 1596279 - RNA, 19 nt, Homo sapiens
  misc_RNA (1)...(19): siRNA sense strand
ggaaaugcuccaaagugua

SEQ ID NO: 1596280 - RNA, 19 nt, Homo sapiens
  misc_RNA (1)...(19): siRNA sense strand
gaucugguguuacaaugga

SEQ ID NO: 1596281 - RNA, 19 nt, Homo sapiens
  misc_RNA (1)...(19): siRNA sense strand
gggaggaggaaguaaguua

SEQ ID NO: 1596282 - RNA, 19 nt, Homo sapiens
  misc_RNA (1)...(19): siRNA sense strand
gagaaaguagcaaaugaaa

SEQ ID NO: 1596283 - RNA, 19 nt, Homo sapiens
  misc_RNA (1)...(19): siRNA sense strand
gaaggacuaacaaagaauu

SEQ ID NO: 1596284 - RNA, 19 nt, Homo sapiens
  misc_RNA (1)...(19): siRNA sense strand
aaggagaucuugcuucuuc

SEQ ID NO: 1596285 - RNA, 19 nt, Homo sapiens
  misc_RNA (1)...(19): siRNA sense strand
gacaggaccaaauuugaua

SEQ ID NO: 1596286 - RNA, 19 nt, Homo sapiens
  misc_RNA (1)...(19): siRNA sense strand
ggaaggcugugaauaugca

SEQ ID NO: 1596287 - RNA, 19 nt, Homo sapiens
  misc_RNA (1)...(19): siRNA sense strand
gauaaccucuacaagaaag

SEQ ID NO: 1596288 - RNA, 19 nt, Homo sapiens
  misc_RNA (1)...(19): siRNA sense strand
caacuugcauuuaacaaac

SEQ ID NO: 1596289 - RNA, 19 nt, Homo sapiens
  misc_RNA (1)...(19): siRNA sense strand
gaaaaucucaugucuagaa

SEQ ID NO: 1596290 - RNA, 19 nt, Homo sapiens
  misc_RNA (1)...(19): siRNA sense strand
ggaccuggauggaggaaca

SEQ ID NO: 1596291 - RNA, 19 nt, Homo sapiens
  misc_RNA (1)...(19): siRNA sense strand
aaacaugucugccucugau

SEQ ID NO: 1596292 - RNA, 19 nt, Homo sapiens
  misc_RNA (1)...(19): siRNA sense strand
caagaugacuggcacaacu

SEQ ID NO: 1596293 - RNA, 19 nt, Homo sapiens
  misc_RNA (1)...(19): siRNA sense strand
ugaaagcaaccaccuaauu

SEQ ID NO: 1596294 - RNA, 19 nt, Homo sapiens
  misc_RNA (1)...(19): siRNA sense strand
agaguuaaaugcaagagaa

SEQ ID NO: 1596295 - RNA, 19 nt, Homo sapiens
  misc_RNA (1)...(19): siRNA sense strand
gcaaaugaaagccagaaga

SEQ ID NO: 1596296 - RNA, 19 nt, Homo sapiens
  misc_RNA (1)...(19): siRNA sense strand
ucagaggaguauuuguuaa

SEQ ID NO: 1596297 - RNA, 19 nt, Homo sapiens
  misc_RNA (1)...(19): siRNA sense strand
ggcuaaagaguacagauua

SEQ ID NO: 1596298 - RNA, 19 nt, Homo sapiens
  misc_RNA (1)...(19): siRNA sense strand
gcggaagccuuugcagaaa

SEQ ID NO: 1596299 - RNA, 19 nt, Homo sapiens
  misc_RNA (1)...(19): siRNA sense strand
caaacaagaacuucguaaa

SEQ ID NO: 1596300 - RNA, 19 nt, Homo sapiens
  misc_RNA (1)...(19): siRNA sense strand
ccaaauaaggcaaauggaa

SEQ ID NO: 1596301 - RNA, 19 nt, Homo sapiens
  misc_RNA (1)...(19): siRNA sense strand
caaaguaugccuggaacua

SEQ ID NO: 1596302 - RNA, 19 nt, Homo sapiens
  misc_RNA (1)...(19): siRNA sense strand
gaacagguacuaagugaac

SEQ ID NO: 1596303 - RNA, 19 nt, Homo sapiens
  misc_RNA (1)...(19): siRNA sense strand
caggauaucgaaauaauga

SEQ ID NO: 1596304 - RNA, 19 nt, Homo sapiens
  misc_RNA (1)...(19): siRNA sense strand
uauaagcacuuugaagguu

SEQ ID NO: 1596305 - RNA, 19 nt, Homo sapiens
  misc_RNA (1)...(19): siRNA sense strand
gcaaccaccuaauucaucu

SEQ ID NO: 1596306 - RNA, 19 nt, Homo sapiens
  misc_RNA (1)...(19): siRNA sense strand
gcucacagcuuuuggaaga

SEQ ID NO: 1596307 - RNA, 19 nt, Homo sapiens
  misc_RNA (1)...(19): siRNA sense strand
gauuauuguuccagcauug

SEQ ID NO: 1596308 - RNA, 19 nt, Homo sapiens
  misc_RNA (1)...(19): siRNA sense strand
uuugauagcucgcuguuau

SEQ ID NO: 1596309 - RNA, 19 nt, Homo sapiens
  misc_RNA (1)...(19): siRNA sense strand
gaggaguauuuguuaaugu

SEQ ID NO: 1596310 - RNA, 19 nt, Homo sapiens
  misc_RNA (1)...(19): siRNA sense strand
aaagaaagcaagaaguuug

SEQ ID NO: 1596311 - RNA, 19 nt, Homo sapiens
  misc_RNA (1)...(19): siRNA sense strand
gaggaaaugcuccaaagug

SEQ ID NO: 1596312 - RNA, 19 nt, Homo sapiens
  misc_RNA (1)...(19): siRNA sense strand
gagcaguuaugaggaaaug

SEQ ID NO: 1596313 - RNA, 19 nt, Homo sapiens
  misc_RNA (1)...(19): siRNA sense strand
gagaagaacaggauaucga

SEQ ID NO: 1596314 - RNA, 19 nt, Homo sapiens
  misc_RNA (1)...(19): siRNA sense strand
gcuaacauccagucaauca

SEQ ID NO: 1596315 - RNA, 19 nt, Homo sapiens
  misc_RNA (1)...(19): siRNA sense strand
uggagaaaguagcaaauga

SEQ ID NO: 1596316 - RNA, 19 nt, Homo sapiens
  misc_RNA (1)...(19): siRNA sense strand
gcagaacaggacuucauaa

SEQ ID NO: 1596317 - RNA, 19 nt, Homo sapiens
  misc_RNA (1)...(19): siRNA sense strand
cuaaagaaagcaagaaguu

SEQ ID NO: 1596318 - RNA, 19 nt, Homo sapiens
  misc_RNA (1)...(19): siRNA sense strand
gauuauuuaucccgacuau

SEQ ID NO: 1596319 - RNA, 19 nt, Homo sapiens
  misc_RNA (1)...(19): siRNA sense strand
aaucaagcaugcauuacaa

SEQ ID NO: 1596320 - RNA, 19 nt, Homo sapiens
  misc_RNA (1)...(19): siRNA sense strand
uucaggacauucuggauua

SEQ ID NO: 1596321 - RNA, 19 nt, Homo sapiens
  misc_RNA (1)...(19): siRNA sense strand
cuaaauaagcucaguguuc

SEQ ID NO: 1596322 - RNA, 19 nt, Homo sapiens
  misc_RNA (1)...(19): siRNA sense strand
auagagauuugcuccgaua

SEQ ID NO: 1596323 - RNA, 19 nt, Homo sapiens
  misc_RNA (1)...(19): siRNA sense strand
caucauccauuucauagag

SEQ ID NO: 1596324 - RNA, 19 nt, Homo sapiens
  misc_RNA (1)...(19): siRNA sense strand
agaugaauaccaagaguua

SEQ ID NO: 1596325 - RNA, 19 nt, Homo sapiens
  misc_RNA (1)...(19): siRNA sense strand
ugaagaauuugcuggacuu

SEQ ID NO: 1596326 - RNA, 19 nt, Homo sapiens
  misc_RNA (1)...(19): siRNA sense strand
uuaacuggaucuacuucua

SEQ ID NO: 1596327 - RNA, 19 nt, Homo sapiens
  misc_RNA (1)...(19): siRNA sense strand
ugaugaaauugcuagauga

SEQ ID NO: 1596328 - RNA, 19 nt, Homo sapiens
  misc_RNA (1)...(19): siRNA sense strand
gaagaacaggauaucgaaa

SEQ ID NO: 1596329 - RNA, 19 nt, Homo sapiens
  misc_RNA (1)...(19): siRNA sense strand
gcaagagaagaacaggaua

SEQ ID NO: 1596330 - RNA, 19 nt, Homo sapiens
  misc_RNA (1)...(19): siRNA sense strand
gauaaagcauacaccaaac

SEQ ID NO: 1596331 - RNA, 19 nt, Homo sapiens
  misc_RNA (1)...(19): siRNA sense strand
caaaugcauuaguaaccaa

SEQ ID NO: 1596332 - RNA, 19 nt, Homo sapiens
  misc_RNA (1)...(19): siRNA sense strand
ggauuauuguuccagcauu

SEQ ID NO: 1596333 - RNA, 19 nt, Homo sapiens
  misc_RNA (1)...(19): siRNA sense strand
gaaagacacuccaacuaau

SEQ ID NO: 1596334 - RNA, 19 nt, Homo sapiens
  misc_RNA (1)...(19): siRNA sense strand
cagcaggaauuacuucuua

SEQ ID NO: 1596335 - RNA, 19 nt, Homo sapiens
  misc_RNA (1)...(19): siRNA sense strand
gaacaaaugcgacagcaaa

SEQ ID NO: 1596336 - RNA, 19 nt, Homo sapiens
  misc_RNA (1)...(19): siRNA sense strand
gcaaaugguuucacagcaa

SEQ ID NO: 1596337 - RNA, 19 nt, Homo sapiens
  misc_RNA (1)...(19): siRNA sense strand
guacagaaguaaagcagaa

SEQ ID NO: 1596338 - RNA, 19 nt, Homo sapiens
  misc_RNA (1)...(19): siRNA sense strand
ggacagaccucaggaugau

SEQ ID NO: 1596339 - RNA, 19 nt, Homo sapiens
  misc_RNA (1)...(19): siRNA sense strand
gaacaucuccauccuacaa

SEQ ID NO: 1596340 - RNA, 19 nt, Homo sapiens
  misc_RNA (1)...(19): siRNA sense strand
cgaaagacacuccaacuaa

SEQ ID NO: 1596341 - RNA, 19 nt, Homo sapiens
  misc_RNA (1)...(19): siRNA sense strand
gaacaaacugcuuucgaaa

SEQ ID NO: 1596342 - RNA, 19 nt, Homo sapiens
  misc_RNA (1)...(19): siRNA sense strand
ugaacaaacugcuuucgaa

SEQ ID NO: 1596343 - RNA, 19 nt, Homo sapiens
  misc_RNA (1)...(19): siRNA sense strand
caacaagaacuccuagaaa

SEQ ID NO: 1596344 - RNA, 19 nt, Homo sapiens
  misc_RNA (1)...(19): siRNA sense strand
gaaacagcaugagaacuug

SEQ ID NO: 1596345 - RNA, 19 nt, Homo sapiens
  misc_RNA (1)...(19): siRNA sense strand
caucucaccuuuagaccua

SEQ ID NO: 1596346 - RNA, 19 nt, Homo sapiens
  misc_RNA (1)...(19): siRNA sense strand
gcaacaagaacuccuagaa

SEQ ID NO: 1596347 - RNA, 19 nt, Homo sapiens
  misc_RNA (1)...(19): siRNA sense strand
gcagaagcuucaagaguuc

SEQ ID NO: 1596348 - RNA, 19 nt, Homo sapiens
  misc_RNA (1)...(19): siRNA sense strand
gcggaaggauggaaauguu

SEQ ID NO: 1596349 - RNA, 19 nt, Homo sapiens
  misc_RNA (1)...(19): siRNA sense strand
aaagauagaggacgagaaa

SEQ ID NO: 1596350 - RNA, 19 nt, Homo sapiens
  misc_RNA (1)...(19): siRNA sense strand
gcucaaugcuucgaauuca

SEQ ID NO: 1596351 - RNA, 19 nt, Homo sapiens
  misc_RNA (1)...(19): siRNA sense strand
gaaggugcgguccagguua

SEQ ID NO: 1596352 - RNA, 19 nt, Homo sapiens
  misc_RNA (1)...(19): siRNA sense strand
ucacagcaacgcauucuaa

SEQ ID NO: 1596353 - RNA, 19 nt, Homo sapiens
  misc_RNA (1)...(19): siRNA sense strand
cauuagagguacccacaaa

SEQ ID NO: 1596354 - RNA, 19 nt, Homo sapiens
  misc_RNA (1)...(19): siRNA sense strand
cagcaacgcauucuaauuc

SEQ ID NO: 1596355 - RNA, 19 nt, Homo sapiens
  misc_RNA (1)...(19): siRNA sense strand
gagcccaucucaccuuuag

SEQ ID NO: 1596356 - RNA, 19 nt, Homo sapiens
  misc_RNA (1)...(19): siRNA sense strand
gaacccagucugcaccuuu

SEQ ID NO: 1596357 - RNA, 19 nt, Homo sapiens
  misc_RNA (1)...(19): siRNA sense strand
cgaaaucuauugaacaacu

SEQ ID NO: 1596358 - RNA, 19 nt, Homo sapiens
  misc_RNA (1)...(19): siRNA sense strand
aaacugcuuucgaaaucua

SEQ ID NO: 1596359 - RNA, 19 nt, Homo sapiens
  misc_RNA (1)...(19): siRNA sense strand
acaaacugcuuucgaaauc

SEQ ID NO: 1596360 - RNA, 19 nt, Homo sapiens
  misc_RNA (1)...(19): siRNA sense strand
cgaauucacucaaagaaaa

SEQ ID NO: 1596361 - RNA, 19 nt, Homo sapiens
  misc_RNA (1)...(19): siRNA sense strand
uggagaagcagaagcaaua

SEQ ID NO: 1596362 - RNA, 19 nt, Homo sapiens
  misc_RNA (1)...(19): siRNA sense strand
gaaagggcaguggcaagua

SEQ ID NO: 1596363 - RNA, 19 nt, Homo sapiens
  misc_RNA (1)...(19): siRNA sense strand
gaugugaagucagaaguuc

SEQ ID NO: 1596364 - RNA, 19 nt, Homo sapiens
  misc_RNA (1)...(19): siRNA sense strand
guaaaucagcaacgaaaga

SEQ ID NO: 1596365 - RNA, 19 nt, Homo sapiens
  misc_RNA (1)...(19): siRNA sense strand
gaguaaaucagcaacgaaa

SEQ ID NO: 1596366 - RNA, 19 nt, Homo sapiens
  misc_RNA (1)...(19): siRNA sense strand
gaaaucuauugaacaacug

SEQ ID NO: 1596367 - RNA, 19 nt, Homo sapiens
  misc_RNA (1)...(19): siRNA sense strand
ggacagugaugaagaugcu

SEQ ID NO: 1596368 - RNA, 19 nt, Homo sapiens
  misc_RNA (1)...(19): siRNA sense strand
agaaacagcaugagaacuu

SEQ ID NO: 1596369 - RNA, 19 nt, Homo sapiens
  misc_RNA (1)...(19): siRNA sense strand
caacuggaaguguuacuga

SEQ ID NO: 1596370 - RNA, 19 nt, Homo sapiens
  misc_RNA (1)...(19): siRNA sense strand
agcagaagcuucaagaguu

SEQ ID NO: 1596371 - RNA, 19 nt, Homo sapiens
  misc_RNA (1)...(19): siRNA sense strand
gcagcuuccuccucucaga

SEQ ID NO: 1596372 - RNA, 19 nt, Homo sapiens
  misc_RNA (1)...(19): siRNA sense strand
ccaugaaccugcuaagucu

SEQ ID NO: 1596373 - RNA, 19 nt, Homo sapiens
  misc_RNA (1)...(19): siRNA sense strand
ggauggaaauguugucacu

SEQ ID NO: 1596374 - RNA, 19 nt, Homo sapiens
  misc_RNA (1)...(19): siRNA sense strand
cuucaagaguuccuacuga

SEQ ID NO: 1596375 - RNA, 19 nt, Homo sapiens
  misc_RNA (1)...(19): siRNA sense strand
ugaugaagaugcucagauc

SEQ ID NO: 1596376 - RNA, 19 nt, Homo sapiens
  misc_RNA (1)...(19): siRNA sense strand
uggcucagcuggucauuca

SEQ ID NO: 1596377 - RNA, 19 nt, Homo sapiens
  misc_RNA (1)...(19): siRNA sense strand
ccucugagcccaacuugaa

SEQ ID NO: 1596378 - RNA, 19 nt, Homo sapiens
  misc_RNA (1)...(19): siRNA sense strand
gcaagaacaggaaguagag

SEQ ID NO: 1596379 - RNA, 19 nt, Homo sapiens
  misc_RNA (1)...(19): siRNA sense strand
ccacccucauguuacuuua

SEQ ID NO: 1596380 - RNA, 19 nt, Homo sapiens
  misc_RNA (1)...(19): siRNA sense strand
gacagaauccucagucagu

SEQ ID NO: 1596381 - RNA, 19 nt, Homo sapiens
  misc_RNA (1)...(19): siRNA sense strand
gagaauuucaccuggcauu

SEQ ID NO: 1596382 - RNA, 19 nt, Homo sapiens
  misc_RNA (1)...(19): siRNA sense strand
ucuuguagcugguggaguu

SEQ ID NO: 1596383 - RNA, 19 nt, Homo sapiens
  misc_RNA (1)...(19): siRNA sense strand
gagcacaagaugcaaagga

SEQ ID NO: 1596384 - RNA, 19 nt, Homo sapiens
  misc_RNA (1)...(19): siRNA sense strand
cugcagcauuuauuauuga

SEQ ID NO: 1596385 - RNA, 19 nt, Homo sapiens
  misc_RNA (1)...(19): siRNA sense strand
caacgcauucuaauucaug

SEQ ID NO: 1596386 - RNA, 19 nt, Homo sapiens
  misc_RNA (1)...(19): siRNA sense strand
gaaaaugagacuucgguuu

SEQ ID NO: 1596387 - RNA, 19 nt, Homo sapiens
  misc_RNA (1)...(19): siRNA sense strand
acagaauccucagucagua

SEQ ID NO: 1596388 - RNA, 19 nt, Homo sapiens
  misc_RNA (1)...(19): siRNA sense strand
gcagaggcaagaacaggaa

SEQ ID NO: 1596389 - RNA, 19 nt, Homo sapiens
  misc_RNA (1)...(19): siRNA sense strand
gcaacaccagcaauucuug

SEQ ID NO: 1596390 - RNA, 19 nt, Homo sapiens
  misc_RNA (1)...(19): siRNA sense strand
gcauucuaauucaugaaga

SEQ ID NO: 1596391 - RNA, 19 nt, Homo sapiens
  misc_RNA (1)...(19): siRNA sense strand
agagaggcaucgcagagaa

SEQ ID NO: 1596392 - RNA, 19 nt, Homo sapiens
  misc_RNA (1)...(19): siRNA sense strand
gcaacgcauucuaauucau

SEQ ID NO: 1596393 - RNA, 19 nt, Homo sapiens
  misc_RNA (1)...(19): siRNA sense strand
caguggaugugaagucaga

SEQ ID NO: 1596394 - RNA, 19 nt, Homo sapiens
  misc_RNA (1)...(19): siRNA sense strand
ccugcagcauuuauuauug

SEQ ID NO: 1596395 - RNA, 19 nt, Homo sapiens
  misc_RNA (1)...(19): siRNA sense strand
aacaagaacuccuagaaaa

SEQ ID NO: 1596396 - RNA, 19 nt, Homo sapiens
  misc_RNA (1)...(19): siRNA sense strand
gcagauccacaugaacaaa

SEQ ID NO: 1596397 - RNA, 19 nt, Homo sapiens
  misc_RNA (1)...(19): siRNA sense strand
cagcagauccacaugaaca

SEQ ID NO: 1596398 - RNA, 19 nt, Homo sapiens
  misc_RNA (1)...(19): siRNA sense strand
gaauuucaccuggcauuag

SEQ ID NO: 1596399 - RNA, 19 nt, Homo sapiens
  misc_RNA (1)...(19): siRNA sense strand
gggccaacuggaaguguua

SEQ ID NO: 1596400 - RNA, 19 nt, Homo sapiens
  misc_RNA (1)...(19): siRNA sense strand
ggucccaguucaccaaaca

SEQ ID NO: 1596401 - RNA, 19 nt, Homo sapiens
  misc_RNA (1)...(19): siRNA sense strand
aaggugcgguccagguuaa

SEQ ID NO: 1596402 - RNA, 19 nt, Homo sapiens
  misc_RNA (1)...(19): siRNA sense strand
acacaucauuggaucaaag

SEQ ID NO: 1596403 - RNA, 19 nt, Homo sapiens
  misc_RNA (1)...(19): siRNA sense strand
ggcaagaacaggaaguaga

SEQ ID NO: 1596404 - RNA, 19 nt, Homo sapiens
  misc_RNA (1)...(19): siRNA sense strand
gaggcaagaacaggaagua

SEQ ID NO: 1596405 - RNA, 19 nt, Homo sapiens
  misc_RNA (1)...(19): siRNA sense strand
uuagagguacccacaaauu

SEQ ID NO: 1596406 - RNA, 19 nt, Homo sapiens
  misc_RNA (1)...(19): siRNA sense strand
ggaaggauggaaauguugu

SEQ ID NO: 1596407 - RNA, 19 nt, Homo sapiens
  misc_RNA (1)...(19): siRNA sense strand
cacaagaugcaaaggauga

SEQ ID NO: 1596408 - RNA, 19 nt, Homo sapiens
  misc_RNA (1)...(19): siRNA sense strand
cuuuauaccucuccuucuu

SEQ ID NO: 1596409 - RNA, 19 nt, Homo sapiens
  misc_RNA (1)...(19): siRNA sense strand
ugaaccugcuaagucuuua

SEQ ID NO: 1596410 - RNA, 19 nt, Homo sapiens
  misc_RNA (1)...(19): siRNA sense strand
ggaugugaagucagaaguu

SEQ ID NO: 1596411 - RNA, 19 nt, Homo sapiens
  misc_RNA (1)...(19): siRNA sense strand
uagagguacccacaaauug

SEQ ID NO: 1596412 - RNA, 19 nt, Homo sapiens
  misc_RNA (1)...(19): siRNA sense strand
uuauaccucuccuucuuug

SEQ ID NO: 1596413 - RNA, 19 nt, Homo sapiens
  misc_RNA (1)...(19): siRNA sense strand
aaagacacuccaacuaaug

SEQ ID NO: 1596414 - RNA, 19 nt, Homo sapiens
  misc_RNA (1)...(19): siRNA sense strand
gcaccaggcucagcuucag

SEQ ID NO: 1596415 - RNA, 19 nt, Homo sapiens
  misc_RNA (1)...(19): siRNA sense strand
gcaggaauuacuucuuauc

SEQ ID NO: 1596416 - RNA, 19 nt, Homo sapiens
  misc_RNA (1)...(19): siRNA sense strand
gaaguguuacugaaaauga

SEQ ID NO: 1596417 - RNA, 19 nt, Homo sapiens
  misc_RNA (1)...(19): siRNA sense strand
gcucagauccaggaaaugg

SEQ ID NO: 1596418 - RNA, 19 nt, Homo sapiens
  misc_RNA (1)...(19): siRNA sense strand
caacagcaacaccagcaau

SEQ ID NO: 1596419 - RNA, 19 nt, Homo sapiens
  misc_RNA (1)...(19): siRNA sense strand
ucucagaggcaaagauaga

SEQ ID NO: 1596420 - RNA, 19 nt, Homo sapiens
  misc_RNA (1)...(19): siRNA sense strand
gcagugcuuguguggauga

SEQ ID NO: 1596421 - RNA, 19 nt, Homo sapiens
  misc_RNA (1)...(19): siRNA sense strand
cacaugaacaaacugcuuu

SEQ ID NO: 1596422 - RNA, 19 nt, Homo sapiens
  misc_RNA (1)...(19): siRNA sense strand
aauuucaccuggcauuaga

SEQ ID NO: 1596423 - RNA, 19 nt, Homo sapiens
  misc_RNA (1)...(19): siRNA sense strand
gcaacaaaagagagaauuu

SEQ ID NO: 1596424 - RNA, 19 nt, Homo sapiens
  misc_RNA (1)...(19): siRNA sense strand
guugucacuucauucaaga

SEQ ID NO: 1596425 - RNA, 19 nt, Homo sapiens
  misc_RNA (1)...(19): siRNA sense strand
aaacagaaaguggcagaga

SEQ ID NO: 1596426 - RNA, 19 nt, Homo sapiens
  misc_RNA (1)...(19): siRNA sense strand
ggaaauguugucacuucau

SEQ ID NO: 1596427 - RNA, 19 nt, Homo sapiens
  misc_RNA (1)...(19): siRNA sense strand
caaacugcuuucgaaaucu

SEQ ID NO: 1596428 - RNA, 19 nt, Homo sapiens
  misc_RNA (1)...(19): siRNA sense strand
ccacaugaacaaacugcuu

SEQ ID NO: 1596429 - RNA, 19 nt, Homo sapiens
  misc_RNA (1)...(19): siRNA sense strand
cagcagcagauccacauga

SEQ ID NO: 1596430 - RNA, 19 nt, Homo sapiens
  misc_RNA (1)...(19): siRNA sense strand
gaaccugcuaagucuuuau

SEQ ID NO: 1596431 - RNA, 19 nt, Homo sapiens
  misc_RNA (1)...(19): siRNA sense strand
ucuccugcagcauuuauua

SEQ ID NO: 1596432 - RNA, 19 nt, Homo sapiens
  misc_RNA (1)...(19): siRNA sense strand
gagggaaagccacccaaca

SEQ ID NO: 1596433 - RNA, 19 nt, Homo sapiens
  misc_RNA (1)...(19): siRNA sense strand
gaaagacacuccaacuaau

SEQ ID NO: 1596434 - RNA, 19 nt, Homo sapiens
  misc_RNA (1)...(19): siRNA sense strand
cagcaggaauuacuucuua

SEQ ID NO: 1596435 - RNA, 19 nt, Homo sapiens
  misc_RNA (1)...(19): siRNA sense strand
gaacaaaugcgacagcaaa

SEQ ID NO: 1596436 - RNA, 19 nt, Homo sapiens
  misc_RNA (1)...(19): siRNA sense strand
gcaaaugguuucacagcaa

SEQ ID NO: 1596437 - RNA, 19 nt, Homo sapiens
  misc_RNA (1)...(19): siRNA sense strand
guacagaaguaaagcagaa

SEQ ID NO: 1596438 - RNA, 19 nt, Homo sapiens
  misc_RNA (1)...(19): siRNA sense strand
ggacagaccucaggaugau

SEQ ID NO: 1596439 - RNA, 19 nt, Homo sapiens
  misc_RNA (1)...(19): siRNA sense strand
gaacaucuccauccuacaa

SEQ ID NO: 1596440 - RNA, 19 nt, Homo sapiens
  misc_RNA (1)...(19): siRNA sense strand
cgaaagacacuccaacuaa

SEQ ID NO: 1596441 - RNA, 19 nt, Homo sapiens
  misc_RNA (1)...(19): siRNA sense strand
gaacaaacugcuuucgaaa

SEQ ID NO: 1596442 - RNA, 19 nt, Homo sapiens
  misc_RNA (1)...(19): siRNA sense strand
ugaacaaacugcuuucgaa

SEQ ID NO: 1596443 - RNA, 19 nt, Homo sapiens
  misc_RNA (1)...(19): siRNA sense strand
caacaagaacuccuagaaa

SEQ ID NO: 1596444 - RNA, 19 nt, Homo sapiens
  misc_RNA (1)...(19): siRNA sense strand
gaaacagcaugagaacuug

SEQ ID NO: 1596445 - RNA, 19 nt, Homo sapiens
  misc_RNA (1)...(19): siRNA sense strand
caucucaccuuuagaccua

SEQ ID NO: 1596446 - RNA, 19 nt, Homo sapiens
  misc_RNA (1)...(19): siRNA sense strand
gcaacaagaacuccuagaa

SEQ ID NO: 1596447 - RNA, 19 nt, Homo sapiens
  misc_RNA (1)...(19): siRNA sense strand
gcagaagcuucaagaguuc

SEQ ID NO: 1596448 - RNA, 19 nt, Homo sapiens
  misc_RNA (1)...(19): siRNA sense strand
gcggaaggauggaaauguu

SEQ ID NO: 1596449 - RNA, 19 nt, Homo sapiens
  misc_RNA (1)...(19): siRNA sense strand
aaagauagaggacgagaaa

SEQ ID NO: 1596450 - RNA, 19 nt, Homo sapiens
  misc_RNA (1)...(19): siRNA sense strand
gcucaaugcuucgaauuca

SEQ ID NO: 1596451 - RNA, 19 nt, Homo sapiens
  misc_RNA (1)...(19): siRNA sense strand
gaaggugcgguccagguua

SEQ ID NO: 1596452 - RNA, 19 nt, Homo sapiens
  misc_RNA (1)...(19): siRNA sense strand
ucacagcaacgcauucuaa

SEQ ID NO: 1596453 - RNA, 19 nt, Homo sapiens
  misc_RNA (1)...(19): siRNA sense strand
cauuagagguacccacaaa

SEQ ID NO: 1596454 - RNA, 19 nt, Homo sapiens
  misc_RNA (1)...(19): siRNA sense strand
cagcaacgcauucuaauuc

SEQ ID NO: 1596455 - RNA, 19 nt, Homo sapiens
  misc_RNA (1)...(19): siRNA sense strand
gagcccaucucaccuuuag

SEQ ID NO: 1596456 - RNA, 19 nt, Homo sapiens
  misc_RNA (1)...(19): siRNA sense strand
gaacccagucugcaccuuu

SEQ ID NO: 1596457 - RNA, 19 nt, Homo sapiens
  misc_RNA (1)...(19): siRNA sense strand
cgaaaucuauugaacaacu

SEQ ID NO: 1596458 - RNA, 19 nt, Homo sapiens
  misc_RNA (1)...(19): siRNA sense strand
aaacugcuuucgaaaucua

SEQ ID NO: 1596459 - RNA, 19 nt, Homo sapiens
  misc_RNA (1)...(19): siRNA sense strand
acaaacugcuuucgaaauc

SEQ ID NO: 1596460 - RNA, 19 nt, Homo sapiens
  misc_RNA (1)...(19): siRNA sense strand
cgaauucacucaaagaaaa

SEQ ID NO: 1596461 - RNA, 19 nt, Homo sapiens
  misc_RNA (1)...(19): siRNA sense strand
uggagaagcagaagcaaua

SEQ ID NO: 1596462 - RNA, 19 nt, Homo sapiens
  misc_RNA (1)...(19): siRNA sense strand
gaaagggcaguggcaagua

SEQ ID NO: 1596463 - RNA, 19 nt, Homo sapiens
  misc_RNA (1)...(19): siRNA sense strand
gaugugaagucagaaguuc

SEQ ID NO: 1596464 - RNA, 19 nt, Homo sapiens
  misc_RNA (1)...(19): siRNA sense strand
guaaaucagcaacgaaaga

SEQ ID NO: 1596465 - RNA, 19 nt, Homo sapiens
  misc_RNA (1)...(19): siRNA sense strand
gaguaaaucagcaacgaaa

SEQ ID NO: 1596466 - RNA, 19 nt, Homo sapiens
  misc_RNA (1)...(19): siRNA sense strand
gaaaucuauugaacaacug

SEQ ID NO: 1596467 - RNA, 19 nt, Homo sapiens
  misc_RNA (1)...(19): siRNA sense strand
ggacagugaugaagaugcu

SEQ ID NO: 1596468 - RNA, 19 nt, Homo sapiens
  misc_RNA (1)...(19): siRNA sense strand
agaaacagcaugagaacuu

SEQ ID NO: 1596469 - RNA, 19 nt, Homo sapiens
  misc_RNA (1)...(19): siRNA sense strand
caacuggaaguguuacuga

SEQ ID NO: 1596470 - RNA, 19 nt, Homo sapiens
  misc_RNA (1)...(19): siRNA sense strand
agcagaagcuucaagaguu

SEQ ID NO: 1596471 - RNA, 19 nt, Homo sapiens
  misc_RNA (1)...(19): siRNA sense strand
gcagcuuccuccucucaga

SEQ ID NO: 1596472 - RNA, 19 nt, Homo sapiens
  misc_RNA (1)...(19): siRNA sense strand
ccaugaaccugcuaagucu

SEQ ID NO: 1596473 - RNA, 19 nt, Homo sapiens
  misc_RNA (1)...(19): siRNA sense strand
ggauggaaauguugucacu

SEQ ID NO: 1596474 - RNA, 19 nt, Homo sapiens
  misc_RNA (1)...(19): siRNA sense strand
cuucaagaguuccuacuga

SEQ ID NO: 1596475 - RNA, 19 nt, Homo sapiens
  misc_RNA (1)...(19): siRNA sense strand
ugaugaagaugcucagauc

SEQ ID NO: 1596476 - RNA, 19 nt, Homo sapiens
  misc_RNA (1)...(19): siRNA sense strand
uggcucagcuggucauuca

SEQ ID NO: 1596477 - RNA, 19 nt, Homo sapiens
  misc_RNA (1)...(19): siRNA sense strand
ccucugagcccaacuugaa

SEQ ID NO: 1596478 - RNA, 19 nt, Homo sapiens
  misc_RNA (1)...(19): siRNA sense strand
gcaagaacaggaaguagag

SEQ ID NO: 1596479 - RNA, 19 nt, Homo sapiens
  misc_RNA (1)...(19): siRNA sense strand
ccacccucauguuacuuua

SEQ ID NO: 1596480 - RNA, 19 nt, Homo sapiens
  misc_RNA (1)...(19): siRNA sense strand
gacagaauccucagucagu

SEQ ID NO: 1596481 - RNA, 19 nt, Homo sapiens
  misc_RNA (1)...(19): siRNA sense strand
gagaauuucaccuggcauu

SEQ ID NO: 1596482 - RNA, 19 nt, Homo sapiens
  misc_RNA (1)...(19): siRNA sense strand
ucuuguagcugguggaguu

SEQ ID NO: 1596483 - RNA, 19 nt, Homo sapiens
  misc_RNA (1)...(19): siRNA sense strand
gagcacaagaugcaaagga

SEQ ID NO: 1596484 - RNA, 19 nt, Homo sapiens
  misc_RNA (1)...(19): siRNA sense strand
cugcagcauuuauuauuga

SEQ ID NO: 1596485 - RNA, 19 nt, Homo sapiens
  misc_RNA (1)...(19): siRNA sense strand
caacgcauucuaauucaug

SEQ ID NO: 1596486 - RNA, 19 nt, Homo sapiens
  misc_RNA (1)...(19): siRNA sense strand
gaaaaugagacuucgguuu

SEQ ID NO: 1596487 - RNA, 19 nt, Homo sapiens
  misc_RNA (1)...(19): siRNA sense strand
acagaauccucagucagua

SEQ ID NO: 1596488 - RNA, 19 nt, Homo sapiens
  misc_RNA (1)...(19): siRNA sense strand
gcagaggcaagaacaggaa

SEQ ID NO: 1596489 - RNA, 19 nt, Homo sapiens
  misc_RNA (1)...(19): siRNA sense strand
gcaacaccagcaauucuug

SEQ ID NO: 1596490 - RNA, 19 nt, Homo sapiens
  misc_RNA (1)...(19): siRNA sense strand
gcauucuaauucaugaaga

SEQ ID NO: 1596491 - RNA, 19 nt, Homo sapiens
  misc_RNA (1)...(19): siRNA sense strand
agagaggcaucgcagagaa

SEQ ID NO: 1596492 - RNA, 19 nt, Homo sapiens
  misc_RNA (1)...(19): siRNA sense strand
gcaacgcauucuaauucau

SEQ ID NO: 1596493 - RNA, 19 nt, Homo sapiens
  misc_RNA (1)...(19): siRNA sense strand
caguggaugugaagucaga

SEQ ID NO: 1596494 - RNA, 19 nt, Homo sapiens
  misc_RNA (1)...(19): siRNA sense strand
ccugcagcauuuauuauug

SEQ ID NO: 1596495 - RNA, 19 nt, Homo sapiens
  misc_RNA (1)...(19): siRNA sense strand
aacaagaacuccuagaaaa

SEQ ID NO: 1596496 - RNA, 19 nt, Homo sapiens
  misc_RNA (1)...(19): siRNA sense strand
gcagauccacaugaacaaa

SEQ ID NO: 1596497 - RNA, 19 nt, Homo sapiens
  misc_RNA (1)...(19): siRNA sense strand
cagcagauccacaugaaca

SEQ ID NO: 1596498 - RNA, 19 nt, Homo sapiens
  misc_RNA (1)...(19): siRNA sense strand
gaauuucaccuggcauuag

SEQ ID NO: 1596499 - RNA, 19 nt, Homo sapiens
  misc_RNA (1)...(19): siRNA sense strand
gggccaacuggaaguguua

SEQ ID NO: 1596500 - RNA, 19 nt, Homo sapiens
  misc_RNA (1)...(19): siRNA sense strand
ggucccaguucaccaaaca

SEQ ID NO: 1596501 - RNA, 19 nt, Homo sapiens
  misc_RNA (1)...(19): siRNA sense strand
aaggugcgguccagguuaa

SEQ ID NO: 1596502 - RNA, 19 nt, Homo sapiens
  misc_RNA (1)...(19): siRNA sense strand
acacaucauuggaucaaag

SEQ ID NO: 1596503 - RNA, 19 nt, Homo sapiens
  misc_RNA (1)...(19): siRNA sense strand
ggcaagaacaggaaguaga

SEQ ID NO: 1596504 - RNA, 19 nt, Homo sapiens
  misc_RNA (1)...(19): siRNA sense strand
gaggcaagaacaggaagua

SEQ ID NO: 1596505 - RNA, 19 nt, Homo sapiens
  misc_RNA (1)...(19): siRNA sense strand
uuagagguacccacaaauu

SEQ ID NO: 1596506 - RNA, 19 nt, Homo sapiens
  misc_RNA (1)...(19): siRNA sense strand
ggaaggauggaaauguugu

SEQ ID NO: 1596507 - RNA, 19 nt, Homo sapiens
  misc_RNA (1)...(19): siRNA sense strand
cacaagaugcaaaggauga

SEQ ID NO: 1596508 - RNA, 19 nt, Homo sapiens
  misc_RNA (1)...(19): siRNA sense strand
cuuuauaccucuccuucuu

SEQ ID NO: 1596509 - RNA, 19 nt, Homo sapiens
  misc_RNA (1)...(19): siRNA sense strand
ugaaccugcuaagucuuua

SEQ ID NO: 1596510 - RNA, 19 nt, Homo sapiens
  misc_RNA (1)...(19): siRNA sense strand
ggaugugaagucagaaguu

SEQ ID NO: 1596511 - RNA, 19 nt, Homo sapiens
  misc_RNA (1)...(19): siRNA sense strand
uagagguacccacaaauug

SEQ ID NO: 1596512 - RNA, 19 nt, Homo sapiens
  misc_RNA (1)...(19): siRNA sense strand
uuauaccucuccuucuuug

SEQ ID NO: 1596513 - RNA, 19 nt, Homo sapiens
  misc_RNA (1)...(19): siRNA sense strand
aaagacacuccaacuaaug

SEQ ID NO: 1596514 - RNA, 19 nt, Homo sapiens
  misc_RNA (1)...(19): siRNA sense strand
gcaccaggcucagcuucag

SEQ ID NO: 1596515 - RNA, 19 nt, Homo sapiens
  misc_RNA (1)...(19): siRNA sense strand
gcaggaauuacuucuuauc

SEQ ID NO: 1596516 - RNA, 19 nt, Homo sapiens
  misc_RNA (1)...(19): siRNA sense strand
gaaguguuacugaaaauga

SEQ ID NO: 1596517 - RNA, 19 nt, Homo sapiens
  misc_RNA (1)...(19): siRNA sense strand
gcucagauccaggaaaugg

SEQ ID NO: 1596518 - RNA, 19 nt, Homo sapiens
  misc_RNA (1)...(19): siRNA sense strand
caacagcaacaccagcaau

SEQ ID NO: 1596519 - RNA, 19 nt, Homo sapiens
  misc_RNA (1)...(19): siRNA sense strand
ucucagaggcaaagauaga

SEQ ID NO: 1596520 - RNA, 19 nt, Homo sapiens
  misc_RNA (1)...(19): siRNA sense strand
gcagugcuuguguggauga

SEQ ID NO: 1596521 - RNA, 19 nt, Homo sapiens
  misc_RNA (1)...(19): siRNA sense strand
cacaugaacaaacugcuuu

SEQ ID NO: 1596522 - RNA, 19 nt, Homo sapiens
  misc_RNA (1)...(19): siRNA sense strand
aauuucaccuggcauuaga

SEQ ID NO: 1596523 - RNA, 19 nt, Homo sapiens
  misc_RNA (1)...(19): siRNA sense strand
gcaacaaaagagagaauuu

SEQ ID NO: 1596524 - RNA, 19 nt, Homo sapiens
  misc_RNA (1)...(19): siRNA sense strand
guugucacuucauucaaga

SEQ ID NO: 1596525 - RNA, 19 nt, Homo sapiens
  misc_RNA (1)...(19): siRNA sense strand
aaacagaaaguggcagaga

SEQ ID NO: 1596526 - RNA, 19 nt, Homo sapiens
  misc_RNA (1)...(19): siRNA sense strand
ggaaauguugucacuucau

SEQ ID NO: 1596527 - RNA, 19 nt, Homo sapiens
  misc_RNA (1)...(19): siRNA sense strand
caaacugcuuucgaaaucu

SEQ ID NO: 1596528 - RNA, 19 nt, Homo sapiens
  misc_RNA (1)...(19): siRNA sense strand
ccacaugaacaaacugcuu

SEQ ID NO: 1596529 - RNA, 19 nt, Homo sapiens
  misc_RNA (1)...(19): siRNA sense strand
cagcagcagauccacauga

SEQ ID NO: 1596530 - RNA, 19 nt, Homo sapiens
  misc_RNA (1)...(19): siRNA sense strand
gaaccugcuaagucuuuau

SEQ ID NO: 1596531 - RNA, 19 nt, Homo sapiens
  misc_RNA (1)...(19): siRNA sense strand
ucuccugcagcauuuauua

SEQ ID NO: 1596532 - RNA, 19 nt, Homo sapiens
  misc_RNA (1)...(19): siRNA sense strand
gagggaaagccacccaaca

SEQ ID NO: 1596533 - RNA, 19 nt, Homo sapiens
  misc_RNA (1)...(19): siRNA sense strand
gaaagacacuccaacuaau

SEQ ID NO: 1596534 - RNA, 19 nt, Homo sapiens
  misc_RNA (1)...(19): siRNA sense strand
cagcaggaauuacuucuua

SEQ ID NO: 1596535 - RNA, 19 nt, Homo sapiens
  misc_RNA (1)...(19): siRNA sense strand
gaacaaaugcgacagcaaa

SEQ ID NO: 1596536 - RNA, 19 nt, Homo sapiens
  misc_RNA (1)...(19): siRNA sense strand
gcaaaugguuucacagcaa

SEQ ID NO: 1596537 - RNA, 19 nt, Homo sapiens
  misc_RNA (1)...(19): siRNA sense strand
guacagaaguaaagcagaa

SEQ ID NO: 1596538 - RNA, 19 nt, Homo sapiens
  misc_RNA (1)...(19): siRNA sense strand
ggacagaccucaggaugau

SEQ ID NO: 1596539 - RNA, 19 nt, Homo sapiens
  misc_RNA (1)...(19): siRNA sense strand
gaacaucuccauccuacaa

SEQ ID NO: 1596540 - RNA, 19 nt, Homo sapiens
  misc_RNA (1)...(19): siRNA sense strand
cgaaagacacuccaacuaa

SEQ ID NO: 1596541 - RNA, 19 nt, Homo sapiens
  misc_RNA (1)...(19): siRNA sense strand
gaacaaacugcuuucgaaa

SEQ ID NO: 1596542 - RNA, 19 nt, Homo sapiens
  misc_RNA (1)...(19): siRNA sense strand
ugaacaaacugcuuucgaa

SEQ ID NO: 1596543 - RNA, 19 nt, Homo sapiens
  misc_RNA (1)...(19): siRNA sense strand
caacaagaacuccuagaaa

SEQ ID NO: 1596544 - RNA, 19 nt, Homo sapiens
  misc_RNA (1)...(19): siRNA sense strand
gaaacagcaugagaacuug

SEQ ID NO: 1596545 - RNA, 19 nt, Homo sapiens
  misc_RNA (1)...(19): siRNA sense strand
caucucaccuuuagaccua

SEQ ID NO: 1596546 - RNA, 19 nt, Homo sapiens
  misc_RNA (1)...(19): siRNA sense strand
gcaacaagaacuccuagaa

SEQ ID NO: 1596547 - RNA, 19 nt, Homo sapiens
  misc_RNA (1)...(19): siRNA sense strand
gcagaagcuucaagaguuc

SEQ ID NO: 1596548 - RNA, 19 nt, Homo sapiens
  misc_RNA (1)...(19): siRNA sense strand
gcggaaggauggaaauguu

SEQ ID NO: 1596549 - RNA, 19 nt, Homo sapiens
  misc_RNA (1)...(19): siRNA sense strand
aaagauagaggacgagaaa

SEQ ID NO: 1596550 - RNA, 19 nt, Homo sapiens
  misc_RNA (1)...(19): siRNA sense strand
gcucaaugcuucgaauuca

SEQ ID NO: 1596551 - RNA, 19 nt, Homo sapiens
  misc_RNA (1)...(19): siRNA sense strand
gaaggugcgguccagguua

SEQ ID NO: 1596552 - RNA, 19 nt, Homo sapiens
  misc_RNA (1)...(19): siRNA sense strand
ucacagcaacgcauucuaa

SEQ ID NO: 1596553 - RNA, 19 nt, Homo sapiens
  misc_RNA (1)...(19): siRNA sense strand
cauuagagguacccacaaa

SEQ ID NO: 1596554 - RNA, 19 nt, Homo sapiens
  misc_RNA (1)...(19): siRNA sense strand
cagcaacgcauucuaauuc

SEQ ID NO: 1596555 - RNA, 19 nt, Homo sapiens
  misc_RNA (1)...(19): siRNA sense strand
gagcccaucucaccuuuag

SEQ ID NO: 1596556 - RNA, 19 nt, Homo sapiens
  misc_RNA (1)...(19): siRNA sense strand
gaacccagucugcaccuuu

SEQ ID NO: 1596557 - RNA, 19 nt, Homo sapiens
  misc_RNA (1)...(19): siRNA sense strand
cgaaaucuauugaacaacu

SEQ ID NO: 1596558 - RNA, 19 nt, Homo sapiens
  misc_RNA (1)...(19): siRNA sense strand
aaacugcuuucgaaaucua

SEQ ID NO: 1596559 - RNA, 19 nt, Homo sapiens
  misc_RNA (1)...(19): siRNA sense strand
acaaacugcuuucgaaauc

SEQ ID NO: 1596560 - RNA, 19 nt, Homo sapiens
  misc_RNA (1)...(19): siRNA sense strand
cgaauucacucaaagaaaa

SEQ ID NO: 1596561 - RNA, 19 nt, Homo sapiens
  misc_RNA (1)...(19): siRNA sense strand
uggagaagcagaagcaaua

SEQ ID NO: 1596562 - RNA, 19 nt, Homo sapiens
  misc_RNA (1)...(19): siRNA sense strand
gaaagggcaguggcaagua

SEQ ID NO: 1596563 - RNA, 19 nt, Homo sapiens
  misc_RNA (1)...(19): siRNA sense strand
gaugugaagucagaaguuc

SEQ ID NO: 1596564 - RNA, 19 nt, Homo sapiens
  misc_RNA (1)...(19): siRNA sense strand
guaaaucagcaacgaaaga

SEQ ID NO: 1596565 - RNA, 19 nt, Homo sapiens
  misc_RNA (1)...(19): siRNA sense strand
gaguaaaucagcaacgaaa

SEQ ID NO: 1596566 - RNA, 19 nt, Homo sapiens
  misc_RNA (1)...(19): siRNA sense strand
gaaaucuauugaacaacug

SEQ ID NO: 1596567 - RNA, 19 nt, Homo sapiens
  misc_RNA (1)...(19): siRNA sense strand
ggacagugaugaagaugcu

SEQ ID NO: 1596568 - RNA, 19 nt, Homo sapiens
  misc_RNA (1)...(19): siRNA sense strand
agaaacagcaugagaacuu

SEQ ID NO: 1596569 - RNA, 19 nt, Homo sapiens
  misc_RNA (1)...(19): siRNA sense strand
caacuggaaguguuacuga

SEQ ID NO: 1596570 - RNA, 19 nt, Homo sapiens
  misc_RNA (1)...(19): siRNA sense strand
agcagaagcuucaagaguu

SEQ ID NO: 1596571 - RNA, 19 nt, Homo sapiens
  misc_RNA (1)...(19): siRNA sense strand
gcagcuuccuccucucaga

SEQ ID NO: 1596572 - RNA, 19 nt, Homo sapiens
  misc_RNA (1)...(19): siRNA sense strand
ccaugaaccugcuaagucu

SEQ ID NO: 1596573 - RNA, 19 nt, Homo sapiens
  misc_RNA (1)...(19): siRNA sense strand
ggauggaaauguugucacu

SEQ ID NO: 1596574 - RNA, 19 nt, Homo sapiens
  misc_RNA (1)...(19): siRNA sense strand
cuucaagaguuccuacuga

SEQ ID NO: 1596575 - RNA, 19 nt, Homo sapiens
  misc_RNA (1)...(19): siRNA sense strand
ugaugaagaugcucagauc

SEQ ID NO: 1596576 - RNA, 19 nt, Homo sapiens
  misc_RNA (1)...(19): siRNA sense strand
uggcucagcuggucauuca

SEQ ID NO: 1596577 - RNA, 19 nt, Homo sapiens
  misc_RNA (1)...(19): siRNA sense strand
ccucugagcccaacuugaa

SEQ ID NO: 1596578 - RNA, 19 nt, Homo sapiens
  misc_RNA (1)...(19): siRNA sense strand
gcaagaacaggaaguagag

SEQ ID NO: 1596579 - RNA, 19 nt, Homo sapiens
  misc_RNA (1)...(19): siRNA sense strand
ccacccucauguuacuuua

SEQ ID NO: 1596580 - RNA, 19 nt, Homo sapiens
  misc_RNA (1)...(19): siRNA sense strand
gacagaauccucagucagu

SEQ ID NO: 1596581 - RNA, 19 nt, Homo sapiens
  misc_RNA (1)...(19): siRNA sense strand
gagaauuucaccuggcauu

SEQ ID NO: 1596582 - RNA, 19 nt, Homo sapiens
  misc_RNA (1)...(19): siRNA sense strand
ucuuguagcugguggaguu

SEQ ID NO: 1596583 - RNA, 19 nt, Homo sapiens
  misc_RNA (1)...(19): siRNA sense strand
gagcacaagaugcaaagga

SEQ ID NO: 1596584 - RNA, 19 nt, Homo sapiens
  misc_RNA (1)...(19): siRNA sense strand
cugcagcauuuauuauuga

SEQ ID NO: 1596585 - RNA, 19 nt, Homo sapiens
  misc_RNA (1)...(19): siRNA sense strand
caacgcauucuaauucaug

SEQ ID NO: 1596586 - RNA, 19 nt, Homo sapiens
  misc_RNA (1)...(19): siRNA sense strand
gaaaaugagacuucgguuu

SEQ ID NO: 1596587 - RNA, 19 nt, Homo sapiens
  misc_RNA (1)...(19): siRNA sense strand
acagaauccucagucagua

SEQ ID NO: 1596588 - RNA, 19 nt, Homo sapiens
  misc_RNA (1)...(19): siRNA sense strand
gcagaggcaagaacaggaa

SEQ ID NO: 1596589 - RNA, 19 nt, Homo sapiens
  misc_RNA (1)...(19): siRNA sense strand
gcaacaccagcaauucuug

SEQ ID NO: 1596590 - RNA, 19 nt, Homo sapiens
  misc_RNA (1)...(19): siRNA sense strand
gcauucuaauucaugaaga

SEQ ID NO: 1596591 - RNA, 19 nt, Homo sapiens
  misc_RNA (1)...(19): siRNA sense strand
agagaggcaucgcagagaa

SEQ ID NO: 1596592 - RNA, 19 nt, Homo sapiens
  misc_RNA (1)...(19): siRNA sense strand
gcaacgcauucuaauucau

SEQ ID NO: 1596593 - RNA, 19 nt, Homo sapiens
  misc_RNA (1)...(19): siRNA sense strand
caguggaugugaagucaga

SEQ ID NO: 1596594 - RNA, 19 nt, Homo sapiens
  misc_RNA (1)...(19): siRNA sense strand
ccugcagcauuuauuauug

SEQ ID NO: 1596595 - RNA, 19 nt, Homo sapiens
  misc_RNA (1)...(19): siRNA sense strand
aacaagaacuccuagaaaa

SEQ ID NO: 1596596 - RNA, 19 nt, Homo sapiens
  misc_RNA (1)...(19): siRNA sense strand
gcagauccacaugaacaaa

SEQ ID NO: 1596597 - RNA, 19 nt, Homo sapiens
  misc_RNA (1)...(19): siRNA sense strand
cagcagauccacaugaaca

SEQ ID NO: 1596598 - RNA, 19 nt, Homo sapiens
  misc_RNA (1)...(19): siRNA sense strand
gaauuucaccuggcauuag

SEQ ID NO: 1596599 - RNA, 19 nt, Homo sapiens
  misc_RNA (1)...(19): siRNA sense strand
gggccaacuggaaguguua

SEQ ID NO: 1596600 - RNA, 19 nt, Homo sapiens
  misc_RNA (1)...(19): siRNA sense strand
ggucccaguucaccaaaca

SEQ ID NO: 1596601 - RNA, 19 nt, Homo sapiens
  misc_RNA (1)...(19): siRNA sense strand
aaggugcgguccagguuaa

SEQ ID NO: 1596602 - RNA, 19 nt, Homo sapiens
  misc_RNA (1)...(19): siRNA sense strand
acacaucauuggaucaaag

SEQ ID NO: 1596603 - RNA, 19 nt, Homo sapiens
  misc_RNA (1)...(19): siRNA sense strand
ggcaagaacaggaaguaga

SEQ ID NO: 1596604 - RNA, 19 nt, Homo sapiens
  misc_RNA (1)...(19): siRNA sense strand
gaggcaagaacaggaagua

SEQ ID NO: 1596605 - RNA, 19 nt, Homo sapiens
  misc_RNA (1)...(19): siRNA sense strand
uuagagguacccacaaauu

SEQ ID NO: 1596606 - RNA, 19 nt, Homo sapiens
  misc_RNA (1)...(19): siRNA sense strand
ggaaggauggaaauguugu

SEQ ID NO: 1596607 - RNA, 19 nt, Homo sapiens
  misc_RNA (1)...(19): siRNA sense strand
cacaagaugcaaaggauga

SEQ ID NO: 1596608 - RNA, 19 nt, Homo sapiens
  misc_RNA (1)...(19): siRNA sense strand
cuuuauaccucuccuucuu

SEQ ID NO: 1596609 - RNA, 19 nt, Homo sapiens
  misc_RNA (1)...(19): siRNA sense strand
ugaaccugcuaagucuuua

SEQ ID NO: 1596610 - RNA, 19 nt, Homo sapiens
  misc_RNA (1)...(19): siRNA sense strand
ggaugugaagucagaaguu

SEQ ID NO: 1596611 - RNA, 19 nt, Homo sapiens
  misc_RNA (1)...(19): siRNA sense strand
uagagguacccacaaauug

SEQ ID NO: 1596612 - RNA, 19 nt, Homo sapiens
  misc_RNA (1)...(19): siRNA sense strand
uuauaccucuccuucuuug

SEQ ID NO: 1596613 - RNA, 19 nt, Homo sapiens
  misc_RNA (1)...(19): siRNA sense strand
aaagacacuccaacuaaug

SEQ ID NO: 1596614 - RNA, 19 nt, Homo sapiens
  misc_RNA (1)...(19): siRNA sense strand
gcaccaggcucagcuucag

SEQ ID NO: 1596615 - RNA, 19 nt, Homo sapiens
  misc_RNA (1)...(19): siRNA sense strand
gcaggaauuacuucuuauc

SEQ ID NO: 1596616 - RNA, 19 nt, Homo sapiens
  misc_RNA (1)...(19): siRNA sense strand
gaaguguuacugaaaauga

SEQ ID NO: 1596617 - RNA, 19 nt, Homo sapiens
  misc_RNA (1)...(19): siRNA sense strand
gcucagauccaggaaaugg

SEQ ID NO: 1596618 - RNA, 19 nt, Homo sapiens
  misc_RNA (1)...(19): siRNA sense strand
caacagcaacaccagcaau

SEQ ID NO: 1596619 - RNA, 19 nt, Homo sapiens
  misc_RNA (1)...(19): siRNA sense strand
ucucagaggcaaagauaga

SEQ ID NO: 1596620 - RNA, 19 nt, Homo sapiens
  misc_RNA (1)...(19): siRNA sense strand
gcagugcuuguguggauga

SEQ ID NO: 1596621 - RNA, 19 nt, Homo sapiens
  misc_RNA (1)...(19): siRNA sense strand
cacaugaacaaacugcuuu

SEQ ID NO: 1596622 - RNA, 19 nt, Homo sapiens
  misc_RNA (1)...(19): siRNA sense strand
aauuucaccuggcauuaga

SEQ ID NO: 1596623 - RNA, 19 nt, Homo sapiens
  misc_RNA (1)...(19): siRNA sense strand
gcaacaaaagagagaauuu

SEQ ID NO: 1596624 - RNA, 19 nt, Homo sapiens
  misc_RNA (1)...(19): siRNA sense strand
guugucacuucauucaaga

SEQ ID NO: 1596625 - RNA, 19 nt, Homo sapiens
  misc_RNA (1)...(19): siRNA sense strand
aaacagaaaguggcagaga

SEQ ID NO: 1596626 - RNA, 19 nt, Homo sapiens
  misc_RNA (1)...(19): siRNA sense strand
ggaaauguugucacuucau

SEQ ID NO: 1596627 - RNA, 19 nt, Homo sapiens
  misc_RNA (1)...(19): siRNA sense strand
caaacugcuuucgaaaucu

SEQ ID NO: 1596628 - RNA, 19 nt, Homo sapiens
  misc_RNA (1)...(19): siRNA sense strand
ccacaugaacaaacugcuu

SEQ ID NO: 1596629 - RNA, 19 nt, Homo sapiens
  misc_RNA (1)...(19): siRNA sense strand
cagcagcagauccacauga

SEQ ID NO: 1596630 - RNA, 19 nt, Homo sapiens
  misc_RNA (1)...(19): siRNA sense strand
gaaccugcuaagucuuuau

SEQ ID NO: 1596631 - RNA, 19 nt, Homo sapiens
  misc_RNA (1)...(19): siRNA sense strand
ucuccugcagcauuuauua

SEQ ID NO: 1596632 - RNA, 19 nt, Homo sapiens
  misc_RNA (1)...(19): siRNA sense strand
gagggaaagccacccaaca

SEQ ID NO: 1596633 - RNA, 19 nt, Homo sapiens
  misc_RNA (1)...(19): siRNA sense strand
gaaagacacuccaacuaau

SEQ ID NO: 1596634 - RNA, 19 nt, Homo sapiens
  misc_RNA (1)...(19): siRNA sense strand
cagcaggaauuacuucuua

SEQ ID NO: 1596635 - RNA, 19 nt, Homo sapiens
  misc_RNA (1)...(19): siRNA sense strand
gaacaaaugcgacagcaaa

SEQ ID NO: 1596636 - RNA, 19 nt, Homo sapiens
  misc_RNA (1)...(19): siRNA sense strand
gcaaaugguuucacagcaa

SEQ ID NO: 1596637 - RNA, 19 nt, Homo sapiens
  misc_RNA (1)...(19): siRNA sense strand
guacagaaguaaagcagaa

SEQ ID NO: 1596638 - RNA, 19 nt, Homo sapiens
  misc_RNA (1)...(19): siRNA sense strand
ggacagaccucaggaugau

SEQ ID NO: 1596639 - RNA, 19 nt, Homo sapiens
  misc_RNA (1)...(19): siRNA sense strand
gaacaucuccauccuacaa

SEQ ID NO: 1596640 - RNA, 19 nt, Homo sapiens
  misc_RNA (1)...(19): siRNA sense strand
cgaaagacacuccaacuaa

SEQ ID NO: 1596641 - RNA, 19 nt, Homo sapiens
  misc_RNA (1)...(19): siRNA sense strand
gaacaaacugcuuucgaaa

SEQ ID NO: 1596642 - RNA, 19 nt, Homo sapiens
  misc_RNA (1)...(19): siRNA sense strand
ugaacaaacugcuuucgaa

SEQ ID NO: 1596643 - RNA, 19 nt, Homo sapiens
  misc_RNA (1)...(19): siRNA sense strand
caacaagaacuccuagaaa

SEQ ID NO: 1596644 - RNA, 19 nt, Homo sapiens
  misc_RNA (1)...(19): siRNA sense strand
gaaacagcaugagaacuug

SEQ ID NO: 1596645 - RNA, 19 nt, Homo sapiens
  misc_RNA (1)...(19): siRNA sense strand
caucucaccuuuagaccua

SEQ ID NO: 1596646 - RNA, 19 nt, Homo sapiens
  misc_RNA (1)...(19): siRNA sense strand
gcaacaagaacuccuagaa

SEQ ID NO: 1596647 - RNA, 19 nt, Homo sapiens
  misc_RNA (1)...(19): siRNA sense strand
gcagaagcuucaagaguuc

SEQ ID NO: 1596648 - RNA, 19 nt, Homo sapiens
  misc_RNA (1)...(19): siRNA sense strand
gcggaaggauggaaauguu

SEQ ID NO: 1596649 - RNA, 19 nt, Homo sapiens
  misc_RNA (1)...(19): siRNA sense strand
aaagauagaggacgagaaa

SEQ ID NO: 1596650 - RNA, 19 nt, Homo sapiens
  misc_RNA (1)...(19): siRNA sense strand
gcucaaugcuucgaauuca

SEQ ID NO: 1596651 - RNA, 19 nt, Homo sapiens
  misc_RNA (1)...(19): siRNA sense strand
gaaggugcgguccagguua

SEQ ID NO: 1596652 - RNA, 19 nt, Homo sapiens
  misc_RNA (1)...(19): siRNA sense strand
ucacagcaacgcauucuaa

SEQ ID NO: 1596653 - RNA, 19 nt, Homo sapiens
  misc_RNA (1)...(19): siRNA sense strand
cauuagagguacccacaaa

SEQ ID NO: 1596654 - RNA, 19 nt, Homo sapiens
  misc_RNA (1)...(19): siRNA sense strand
cagcaacgcauucuaauuc

SEQ ID NO: 1596655 - RNA, 19 nt, Homo sapiens
  misc_RNA (1)...(19): siRNA sense strand
gagcccaucucaccuuuag

SEQ ID NO: 1596656 - RNA, 19 nt, Homo sapiens
  misc_RNA (1)...(19): siRNA sense strand
gaacccagucugcaccuuu

SEQ ID NO: 1596657 - RNA, 19 nt, Homo sapiens
  misc_RNA (1)...(19): siRNA sense strand
cgaaaucuauugaacaacu

SEQ ID NO: 1596658 - RNA, 19 nt, Homo sapiens
  misc_RNA (1)...(19): siRNA sense strand
aaacugcuuucgaaaucua

SEQ ID NO: 1596659 - RNA, 19 nt, Homo sapiens
  misc_RNA (1)...(19): siRNA sense strand
acaaacugcuuucgaaauc

SEQ ID NO: 1596660 - RNA, 19 nt, Homo sapiens
  misc_RNA (1)...(19): siRNA sense strand
cgaauucacucaaagaaaa

SEQ ID NO: 1596661 - RNA, 19 nt, Homo sapiens
  misc_RNA (1)...(19): siRNA sense strand
uggagaagcagaagcaaua

SEQ ID NO: 1596662 - RNA, 19 nt, Homo sapiens
  misc_RNA (1)...(19): siRNA sense strand
gaaagggcaguggcaagua

SEQ ID NO: 1596663 - RNA, 19 nt, Homo sapiens
  misc_RNA (1)...(19): siRNA sense strand
gaugugaagucagaaguuc

SEQ ID NO: 1596664 - RNA, 19 nt, Homo sapiens
  misc_RNA (1)...(19): siRNA sense strand
guaaaucagcaacgaaaga

SEQ ID NO: 1596665 - RNA, 19 nt, Homo sapiens
  misc_RNA (1)...(19): siRNA sense strand
gaguaaaucagcaacgaaa

SEQ ID NO: 1596666 - RNA, 19 nt, Homo sapiens
  misc_RNA (1)...(19): siRNA sense strand
gaaaucuauugaacaacug

SEQ ID NO: 1596667 - RNA, 19 nt, Homo sapiens
  misc_RNA (1)...(19): siRNA sense strand
ggacagugaugaagaugcu

SEQ ID NO: 1596668 - RNA, 19 nt, Homo sapiens
  misc_RNA (1)...(19): siRNA sense strand
agaaacagcaugagaacuu

SEQ ID NO: 1596669 - RNA, 19 nt, Homo sapiens
  misc_RNA (1)...(19): siRNA sense strand
caacuggaaguguuacuga

SEQ ID NO: 1596670 - RNA, 19 nt, Homo sapiens
  misc_RNA (1)...(19): siRNA sense strand
agcagaagcuucaagaguu

SEQ ID NO: 1596671 - RNA, 19 nt, Homo sapiens
  misc_RNA (1)...(19): siRNA sense strand
gcagcuuccuccucucaga

SEQ ID NO: 1596672 - RNA, 19 nt, Homo sapiens
  misc_RNA (1)...(19): siRNA sense strand
ccaugaaccugcuaagucu

SEQ ID NO: 1596673 - RNA, 19 nt, Homo sapiens
  misc_RNA (1)...(19): siRNA sense strand
ggauggaaauguugucacu

SEQ ID NO: 1596674 - RNA, 19 nt, Homo sapiens
  misc_RNA (1)...(19): siRNA sense strand
cuucaagaguuccuacuga

SEQ ID NO: 1596675 - RNA, 19 nt, Homo sapiens
  misc_RNA (1)...(19): siRNA sense strand
ugaugaagaugcucagauc

SEQ ID NO: 1596676 - RNA, 19 nt, Homo sapiens
  misc_RNA (1)...(19): siRNA sense strand
uggcucagcuggucauuca

SEQ ID NO: 1596677 - RNA, 19 nt, Homo sapiens
  misc_RNA (1)...(19): siRNA sense strand
ccucugagcccaacuugaa

SEQ ID NO: 1596678 - RNA, 19 nt, Homo sapiens
  misc_RNA (1)...(19): siRNA sense strand
gcaagaacaggaaguagag

SEQ ID NO: 1596679 - RNA, 19 nt, Homo sapiens
  misc_RNA (1)...(19): siRNA sense strand
ccacccucauguuacuuua

SEQ ID NO: 1596680 - RNA, 19 nt, Homo sapiens
  misc_RNA (1)...(19): siRNA sense strand
gacagaauccucagucagu

SEQ ID NO: 1596681 - RNA, 19 nt, Homo sapiens
  misc_RNA (1)...(19): siRNA sense strand
gagaauuucaccuggcauu

SEQ ID NO: 1596682 - RNA, 19 nt, Homo sapiens
  misc_RNA (1)...(19): siRNA sense strand
ucuuguagcugguggaguu

SEQ ID NO: 1596683 - RNA, 19 nt, Homo sapiens
  misc_RNA (1)...(19): siRNA sense strand
gagcacaagaugcaaagga

SEQ ID NO: 1596684 - RNA, 19 nt, Homo sapiens
  misc_RNA (1)...(19): siRNA sense strand
cugcagcauuuauuauuga

SEQ ID NO: 1596685 - RNA, 19 nt, Homo sapiens
  misc_RNA (1)...(19): siRNA sense strand
caacgcauucuaauucaug

SEQ ID NO: 1596686 - RNA, 19 nt, Homo sapiens
  misc_RNA (1)...(19): siRNA sense strand
gaaaaugagacuucgguuu

SEQ ID NO: 1596687 - RNA, 19 nt, Homo sapiens
  misc_RNA (1)...(19): siRNA sense strand
acagaauccucagucagua

SEQ ID NO: 1596688 - RNA, 19 nt, Homo sapiens
  misc_RNA (1)...(19): siRNA sense strand
gcagaggcaagaacaggaa

SEQ ID NO: 1596689 - RNA, 19 nt, Homo sapiens
  misc_RNA (1)...(19): siRNA sense strand
gcaacaccagcaauucuug

SEQ ID NO: 1596690 - RNA, 19 nt, Homo sapiens
  misc_RNA (1)...(19): siRNA sense strand
gcauucuaauucaugaaga

SEQ ID NO: 1596691 - RNA, 19 nt, Homo sapiens
  misc_RNA (1)...(19): siRNA sense strand
agagaggcaucgcagagaa

SEQ ID NO: 1596692 - RNA, 19 nt, Homo sapiens
  misc_RNA (1)...(19): siRNA sense strand
gcaacgcauucuaauucau

SEQ ID NO: 1596693 - RNA, 19 nt, Homo sapiens
  misc_RNA (1)...(19): siRNA sense strand
caguggaugugaagucaga

SEQ ID NO: 1596694 - RNA, 19 nt, Homo sapiens
  misc_RNA (1)...(19): siRNA sense strand
ccugcagcauuuauuauug

SEQ ID NO: 1596695 - RNA, 19 nt, Homo sapiens
  misc_RNA (1)...(19): siRNA sense strand
aacaagaacuccuagaaaa

SEQ ID NO: 1596696 - RNA, 19 nt, Homo sapiens
  misc_RNA (1)...(19): siRNA sense strand
gcagauccacaugaacaaa

SEQ ID NO: 1596697 - RNA, 19 nt, Homo sapiens
  misc_RNA (1)...(19): siRNA sense strand
cagcagauccacaugaaca

SEQ ID NO: 1596698 - RNA, 19 nt, Homo sapiens
  misc_RNA (1)...(19): siRNA sense strand
gaauuucaccuggcauuag

SEQ ID NO: 1596699 - RNA, 19 nt, Homo sapiens
  misc_RNA (1)...(19): siRNA sense strand
gggccaacuggaaguguua

SEQ ID NO: 1596700 - RNA, 19 nt, Homo sapiens
  misc_RNA (1)...(19): siRNA sense strand
ggucccaguucaccaaaca

SEQ ID NO: 1596701 - RNA, 19 nt, Homo sapiens
  misc_RNA (1)...(19): siRNA sense strand
aaggugcgguccagguuaa

SEQ ID NO: 1596702 - RNA, 19 nt, Homo sapiens
  misc_RNA (1)...(19): siRNA sense strand
acacaucauuggaucaaag

SEQ ID NO: 1596703 - RNA, 19 nt, Homo sapiens
  misc_RNA (1)...(19): siRNA sense strand
ggcaagaacaggaaguaga

SEQ ID NO: 1596704 - RNA, 19 nt, Homo sapiens
  misc_RNA (1)...(19): siRNA sense strand
gaggcaagaacaggaagua

SEQ ID NO: 1596705 - RNA, 19 nt, Homo sapiens
  misc_RNA (1)...(19): siRNA sense strand
uuagagguacccacaaauu

SEQ ID NO: 1596706 - RNA, 19 nt, Homo sapiens
  misc_RNA (1)...(19): siRNA sense strand
ggaaggauggaaauguugu

SEQ ID NO: 1596707 - RNA, 19 nt, Homo sapiens
  misc_RNA (1)...(19): siRNA sense strand
cacaagaugcaaaggauga

SEQ ID NO: 1596708 - RNA, 19 nt, Homo sapiens
  misc_RNA (1)...(19): siRNA sense strand
cuuuauaccucuccuucuu

SEQ ID NO: 1596709 - RNA, 19 nt, Homo sapiens
  misc_RNA (1)...(19): siRNA sense strand
ugaaccugcuaagucuuua

SEQ ID NO: 1596710 - RNA, 19 nt, Homo sapiens
  misc_RNA (1)...(19): siRNA sense strand
ggaugugaagucagaaguu

SEQ ID NO: 1596711 - RNA, 19 nt, Homo sapiens
  misc_RNA (1)...(19): siRNA sense strand
uagagguacccacaaauug

SEQ ID NO: 1596712 - RNA, 19 nt, Homo sapiens
  misc_RNA (1)...(19): siRNA sense strand
uuauaccucuccuucuuug

SEQ ID NO: 1596713 - RNA, 19 nt, Homo sapiens
  misc_RNA (1)...(19): siRNA sense strand
aaagacacuccaacuaaug

SEQ ID NO: 1596714 - RNA, 19 nt, Homo sapiens
  misc_RNA (1)...(19): siRNA sense strand
gcaccaggcucagcuucag

SEQ ID NO: 1596715 - RNA, 19 nt, Homo sapiens
  misc_RNA (1)...(19): siRNA sense strand
gcaggaauuacuucuuauc

SEQ ID NO: 1596716 - RNA, 19 nt, Homo sapiens
  misc_RNA (1)...(19): siRNA sense strand
gaaguguuacugaaaauga

SEQ ID NO: 1596717 - RNA, 19 nt, Homo sapiens
  misc_RNA (1)...(19): siRNA sense strand
gcucagauccaggaaaugg

SEQ ID NO: 1596718 - RNA, 19 nt, Homo sapiens
  misc_RNA (1)...(19): siRNA sense strand
caacagcaacaccagcaau

SEQ ID NO: 1596719 - RNA, 19 nt, Homo sapiens
  misc_RNA (1)...(19): siRNA sense strand
ucucagaggcaaagauaga

SEQ ID NO: 1596720 - RNA, 19 nt, Homo sapiens
  misc_RNA (1)...(19): siRNA sense strand
gcagugcuuguguggauga

SEQ ID NO: 1596721 - RNA, 19 nt, Homo sapiens
  misc_RNA (1)...(19): siRNA sense strand
cacaugaacaaacugcuuu

SEQ ID NO: 1596722 - RNA, 19 nt, Homo sapiens
  misc_RNA (1)...(19): siRNA sense strand
aauuucaccuggcauuaga

SEQ ID NO: 1596723 - RNA, 19 nt, Homo sapiens
  misc_RNA (1)...(19): siRNA sense strand
gcaacaaaagagagaauuu

SEQ ID NO: 1596724 - RNA, 19 nt, Homo sapiens
  misc_RNA (1)...(19): siRNA sense strand
guugucacuucauucaaga

SEQ ID NO: 1596725 - RNA, 19 nt, Homo sapiens
  misc_RNA (1)...(19): siRNA sense strand
aaacagaaaguggcagaga

SEQ ID NO: 1596726 - RNA, 19 nt, Homo sapiens
  misc_RNA (1)...(19): siRNA sense strand
ggaaauguugucacuucau

SEQ ID NO: 1596727 - RNA, 19 nt, Homo sapiens
  misc_RNA (1)...(19): siRNA sense strand
caaacugcuuucgaaaucu

SEQ ID NO: 1596728 - RNA, 19 nt, Homo sapiens
  misc_RNA (1)...(19): siRNA sense strand
ccacaugaacaaacugcuu

SEQ ID NO: 1596729 - RNA, 19 nt, Homo sapiens
  misc_RNA (1)...(19): siRNA sense strand
cagcagcagauccacauga

SEQ ID NO: 1596730 - RNA, 19 nt, Homo sapiens
  misc_RNA (1)...(19): siRNA sense strand
gaaccugcuaagucuuuau

SEQ ID NO: 1596731 - RNA, 19 nt, Homo sapiens
  misc_RNA (1)...(19): siRNA sense strand
ucuccugcagcauuuauua

SEQ ID NO: 1596732 - RNA, 19 nt, Homo sapiens
  misc_RNA (1)...(19): siRNA sense strand
gagggaaagccacccaaca

SEQ ID NO: 1596733 - RNA, 19 nt, Homo sapiens
  misc_RNA (1)...(19): siRNA sense strand
gaaagacacuccaacuaau

SEQ ID NO: 1596734 - RNA, 19 nt, Homo sapiens
  misc_RNA (1)...(19): siRNA sense strand
cagcaggaauuacuucuua

SEQ ID NO: 1596735 - RNA, 19 nt, Homo sapiens
  misc_RNA (1)...(19): siRNA sense strand
gaacaaaugcgacagcaaa

SEQ ID NO: 1596736 - RNA, 19 nt, Homo sapiens
  misc_RNA (1)...(19): siRNA sense strand
gcaaaugguuucacagcaa

SEQ ID NO: 1596737 - RNA, 19 nt, Homo sapiens
  misc_RNA (1)...(19): siRNA sense strand
guacagaaguaaagcagaa

SEQ ID NO: 1596738 - RNA, 19 nt, Homo sapiens
  misc_RNA (1)...(19): siRNA sense strand
ggacagaccucaggaugau

SEQ ID NO: 1596739 - RNA, 19 nt, Homo sapiens
  misc_RNA (1)...(19): siRNA sense strand
gaacaucuccauccuacaa

SEQ ID NO: 1596740 - RNA, 19 nt, Homo sapiens
  misc_RNA (1)...(19): siRNA sense strand
cgaaagacacuccaacuaa

SEQ ID NO: 1596741 - RNA, 19 nt, Homo sapiens
  misc_RNA (1)...(19): siRNA sense strand
gaacaaacugcuuucgaaa

SEQ ID NO: 1596742 - RNA, 19 nt, Homo sapiens
  misc_RNA (1)...(19): siRNA sense strand
ugaacaaacugcuuucgaa

SEQ ID NO: 1596743 - RNA, 19 nt, Homo sapiens
  misc_RNA (1)...(19): siRNA sense strand
caacaagaacuccuagaaa

SEQ ID NO: 1596744 - RNA, 19 nt, Homo sapiens
  misc_RNA (1)...(19): siRNA sense strand
gaaacagcaugagaacuug

SEQ ID NO: 1596745 - RNA, 19 nt, Homo sapiens
  misc_RNA (1)...(19): siRNA sense strand
caucucaccuuuagaccua

SEQ ID NO: 1596746 - RNA, 19 nt, Homo sapiens
  misc_RNA (1)...(19): siRNA sense strand
gcaacaagaacuccuagaa

SEQ ID NO: 1596747 - RNA, 19 nt, Homo sapiens
  misc_RNA (1)...(19): siRNA sense strand
gcagaagcuucaagaguuc

SEQ ID NO: 1596748 - RNA, 19 nt, Homo sapiens
  misc_RNA (1)...(19): siRNA sense strand
gcggaaggauggaaauguu

SEQ ID NO: 1596749 - RNA, 19 nt, Homo sapiens
  misc_RNA (1)...(19): siRNA sense strand
aaagauagaggacgagaaa

SEQ ID NO: 1596750 - RNA, 19 nt, Homo sapiens
  misc_RNA (1)...(19): siRNA sense strand
gcucaaugcuucgaauuca

SEQ ID NO: 1596751 - RNA, 19 nt, Homo sapiens
  misc_RNA (1)...(19): siRNA sense strand
gaaggugcgguccagguua

SEQ ID NO: 1596752 - RNA, 19 nt, Homo sapiens
  misc_RNA (1)...(19): siRNA sense strand
ucacagcaacgcauucuaa

SEQ ID NO: 1596753 - RNA, 19 nt, Homo sapiens
  misc_RNA (1)...(19): siRNA sense strand
cauuagagguacccacaaa

SEQ ID NO: 1596754 - RNA, 19 nt, Homo sapiens
  misc_RNA (1)...(19): siRNA sense strand
cagcaacgcauucuaauuc

SEQ ID NO: 1596755 - RNA, 19 nt, Homo sapiens
  misc_RNA (1)...(19): siRNA sense strand
gagcccaucucaccuuuag

SEQ ID NO: 1596756 - RNA, 19 nt, Homo sapiens
  misc_RNA (1)...(19): siRNA sense strand
gaacccagucugcaccuuu

SEQ ID NO: 1596757 - RNA, 19 nt, Homo sapiens
  misc_RNA (1)...(19): siRNA sense strand
cgaaaucuauugaacaacu

SEQ ID NO: 1596758 - RNA, 19 nt, Homo sapiens
  misc_RNA (1)...(19): siRNA sense strand
aaacugcuuucgaaaucua

SEQ ID NO: 1596759 - RNA, 19 nt, Homo sapiens
  misc_RNA (1)...(19): siRNA sense strand
acaaacugcuuucgaaauc

SEQ ID NO: 1596760 - RNA, 19 nt, Homo sapiens
  misc_RNA (1)...(19): siRNA sense strand
cgaauucacucaaagaaaa

SEQ ID NO: 1596761 - RNA, 19 nt, Homo sapiens
  misc_RNA (1)...(19): siRNA sense strand
uggagaagcagaagcaaua

SEQ ID NO: 1596762 - RNA, 19 nt, Homo sapiens
  misc_RNA (1)...(19): siRNA sense strand
gaaagggcaguggcaagua

SEQ ID NO: 1596763 - RNA, 19 nt, Homo sapiens
  misc_RNA (1)...(19): siRNA sense strand
gaugugaagucagaaguuc

SEQ ID NO: 1596764 - RNA, 19 nt, Homo sapiens
  misc_RNA (1)...(19): siRNA sense strand
guaaaucagcaacgaaaga

SEQ ID NO: 1596765 - RNA, 19 nt, Homo sapiens
  misc_RNA (1)...(19): siRNA sense strand
gaguaaaucagcaacgaaa

SEQ ID NO: 1596766 - RNA, 19 nt, Homo sapiens
  misc_RNA (1)...(19): siRNA sense strand
gaaaucuauugaacaacug

SEQ ID NO: 1596767 - RNA, 19 nt, Homo sapiens
  misc_RNA (1)...(19): siRNA sense strand
ggacagugaugaagaugcu

SEQ ID NO: 1596768 - RNA, 19 nt, Homo sapiens
  misc_RNA (1)...(19): siRNA sense strand
agaaacagcaugagaacuu

SEQ ID NO: 1596769 - RNA, 19 nt, Homo sapiens
  misc_RNA (1)...(19): siRNA sense strand
caacuggaaguguuacuga

SEQ ID NO: 1596770 - RNA, 19 nt, Homo sapiens
  misc_RNA (1)...(19): siRNA sense strand
agcagaagcuucaagaguu

SEQ ID NO: 1596771 - RNA, 19 nt, Homo sapiens
  misc_RNA (1)...(19): siRNA sense strand
gcagcuuccuccucucaga

SEQ ID NO: 1596772 - RNA, 19 nt, Homo sapiens
  misc_RNA (1)...(19): siRNA sense strand
ccaugaaccugcuaagucu

SEQ ID NO: 1596773 - RNA, 19 nt, Homo sapiens
  misc_RNA (1)...(19): siRNA sense strand
ggauggaaauguugucacu

SEQ ID NO: 1596774 - RNA, 19 nt, Homo sapiens
  misc_RNA (1)...(19): siRNA sense strand
cuucaagaguuccuacuga

SEQ ID NO: 1596775 - RNA, 19 nt, Homo sapiens
  misc_RNA (1)...(19): siRNA sense strand
ugaugaagaugcucagauc

SEQ ID NO: 1596776 - RNA, 19 nt, Homo sapiens
  misc_RNA (1)...(19): siRNA sense strand
uggcucagcuggucauuca

SEQ ID NO: 1596777 - RNA, 19 nt, Homo sapiens
  misc_RNA (1)...(19): siRNA sense strand
ccucugagcccaacuugaa

SEQ ID NO: 1596778 - RNA, 19 nt, Homo sapiens
  misc_RNA (1)...(19): siRNA sense strand
gcaagaacaggaaguagag

SEQ ID NO: 1596779 - RNA, 19 nt, Homo sapiens
  misc_RNA (1)...(19): siRNA sense strand
ccacccucauguuacuuua

SEQ ID NO: 1596780 - RNA, 19 nt, Homo sapiens
  misc_RNA (1)...(19): siRNA sense strand
gacagaauccucagucagu

SEQ ID NO: 1596781 - RNA, 19 nt, Homo sapiens
  misc_RNA (1)...(19): siRNA sense strand
gagaauuucaccuggcauu

SEQ ID NO: 1596782 - RNA, 19 nt, Homo sapiens
  misc_RNA (1)...(19): siRNA sense strand
ucuuguagcugguggaguu

SEQ ID NO: 1596783 - RNA, 19 nt, Homo sapiens
  misc_RNA (1)...(19): siRNA sense strand
gagcacaagaugcaaagga

SEQ ID NO: 1596784 - RNA, 19 nt, Homo sapiens
  misc_RNA (1)...(19): siRNA sense strand
cugcagcauuuauuauuga

SEQ ID NO: 1596785 - RNA, 19 nt, Homo sapiens
  misc_RNA (1)...(19): siRNA sense strand
caacgcauucuaauucaug

SEQ ID NO: 1596786 - RNA, 19 nt, Homo sapiens
  misc_RNA (1)...(19): siRNA sense strand
gaaaaugagacuucgguuu

SEQ ID NO: 1596787 - RNA, 19 nt, Homo sapiens
  misc_RNA (1)...(19): siRNA sense strand
acagaauccucagucagua

SEQ ID NO: 1596788 - RNA, 19 nt, Homo sapiens
  misc_RNA (1)...(19): siRNA sense strand
gcagaggcaagaacaggaa

SEQ ID NO: 1596789 - RNA, 19 nt, Homo sapiens
  misc_RNA (1)...(19): siRNA sense strand
gcaacaccagcaauucuug

SEQ ID NO: 1596790 - RNA, 19 nt, Homo sapiens
  misc_RNA (1)...(19): siRNA sense strand
gcauucuaauucaugaaga

SEQ ID NO: 1596791 - RNA, 19 nt, Homo sapiens
  misc_RNA (1)...(19): siRNA sense strand
agagaggcaucgcagagaa

SEQ ID NO: 1596792 - RNA, 19 nt, Homo sapiens
  misc_RNA (1)...(19): siRNA sense strand
gcaacgcauucuaauucau

SEQ ID NO: 1596793 - RNA, 19 nt, Homo sapiens
  misc_RNA (1)...(19): siRNA sense strand
caguggaugugaagucaga

SEQ ID NO: 1596794 - RNA, 19 nt, Homo sapiens
  misc_RNA (1)...(19): siRNA sense strand
ccugcagcauuuauuauug

SEQ ID NO: 1596795 - RNA, 19 nt, Homo sapiens
  misc_RNA (1)...(19): siRNA sense strand
aacaagaacuccuagaaaa

SEQ ID NO: 1596796 - RNA, 19 nt, Homo sapiens
  misc_RNA (1)...(19): siRNA sense strand
gcagauccacaugaacaaa

SEQ ID NO: 1596797 - RNA, 19 nt, Homo sapiens
  misc_RNA (1)...(19): siRNA sense strand
cagcagauccacaugaaca

SEQ ID NO: 1596798 - RNA, 19 nt, Homo sapiens
  misc_RNA (1)...(19): siRNA sense strand
gaauuucaccuggcauuag

SEQ ID NO: 1596799 - RNA, 19 nt, Homo sapiens
  misc_RNA (1)...(19): siRNA sense strand
gggccaacuggaaguguua

SEQ ID NO: 1596800 - RNA, 19 nt, Homo sapiens
  misc_RNA (1)...(19): siRNA sense strand
ggucccaguucaccaaaca

SEQ ID NO: 1596801 - RNA, 19 nt, Homo sapiens
  misc_RNA (1)...(19): siRNA sense strand
aaggugcgguccagguuaa

SEQ ID NO: 1596802 - RNA, 19 nt, Homo sapiens
  misc_RNA (1)...(19): siRNA sense strand
acacaucauuggaucaaag

SEQ ID NO: 1596803 - RNA, 19 nt, Homo sapiens
  misc_RNA (1)...(19): siRNA sense strand
ggcaagaacaggaaguaga

SEQ ID NO: 1596804 - RNA, 19 nt, Homo sapiens
  misc_RNA (1)...(19): siRNA sense strand
gaggcaagaacaggaagua

SEQ ID NO: 1596805 - RNA, 19 nt, Homo sapiens
  misc_RNA (1)...(19): siRNA sense strand
uuagagguacccacaaauu

SEQ ID NO: 1596806 - RNA, 19 nt, Homo sapiens
  misc_RNA (1)...(19): siRNA sense strand
ggaaggauggaaauguugu

SEQ ID NO: 1596807 - RNA, 19 nt, Homo sapiens
  misc_RNA (1)...(19): siRNA sense strand
cacaagaugcaaaggauga

SEQ ID NO: 1596808 - RNA, 19 nt, Homo sapiens
  misc_RNA (1)...(19): siRNA sense strand
cuuuauaccucuccuucuu

SEQ ID NO: 1596809 - RNA, 19 nt, Homo sapiens
  misc_RNA (1)...(19): siRNA sense strand
ugaaccugcuaagucuuua

SEQ ID NO: 1596810 - RNA, 19 nt, Homo sapiens
  misc_RNA (1)...(19): siRNA sense strand
ggaugugaagucagaaguu

SEQ ID NO: 1596811 - RNA, 19 nt, Homo sapiens
  misc_RNA (1)...(19): siRNA sense strand
uagagguacccacaaauug

SEQ ID NO: 1596812 - RNA, 19 nt, Homo sapiens
  misc_RNA (1)...(19): siRNA sense strand
uuauaccucuccuucuuug

SEQ ID NO: 1596813 - RNA, 19 nt, Homo sapiens
  misc_RNA (1)...(19): siRNA sense strand
aaagacacuccaacuaaug

SEQ ID NO: 1596814 - RNA, 19 nt, Homo sapiens
  misc_RNA (1)...(19): siRNA sense strand
gcaccaggcucagcuucag

SEQ ID NO: 1596815 - RNA, 19 nt, Homo sapiens
  misc_RNA (1)...(19): siRNA sense strand
gcaggaauuacuucuuauc

SEQ ID NO: 1596816 - RNA, 19 nt, Homo sapiens
  misc_RNA (1)...(19): siRNA sense strand
gaaguguuacugaaaauga

SEQ ID NO: 1596817 - RNA, 19 nt, Homo sapiens
  misc_RNA (1)...(19): siRNA sense strand
gcucagauccaggaaaugg

SEQ ID NO: 1596818 - RNA, 19 nt, Homo sapiens
  misc_RNA (1)...(19): siRNA sense strand
caacagcaacaccagcaau

SEQ ID NO: 1596819 - RNA, 19 nt, Homo sapiens
  misc_RNA (1)...(19): siRNA sense strand
ucucagaggcaaagauaga

SEQ ID NO: 1596820 - RNA, 19 nt, Homo sapiens
  misc_RNA (1)...(19): siRNA sense strand
gcagugcuuguguggauga

SEQ ID NO: 1596821 - RNA, 19 nt, Homo sapiens
  misc_RNA (1)...(19): siRNA sense strand
cacaugaacaaacugcuuu

SEQ ID NO: 1596822 - RNA, 19 nt, Homo sapiens
  misc_RNA (1)...(19): siRNA sense strand
aauuucaccuggcauuaga

SEQ ID NO: 1596823 - RNA, 19 nt, Homo sapiens
  misc_RNA (1)...(19): siRNA sense strand
gcaacaaaagagagaauuu

SEQ ID NO: 1596824 - RNA, 19 nt, Homo sapiens
  misc_RNA (1)...(19): siRNA sense strand
guugucacuucauucaaga

SEQ ID NO: 1596825 - RNA, 19 nt, Homo sapiens
  misc_RNA (1)...(19): siRNA sense strand
aaacagaaaguggcagaga

SEQ ID NO: 1596826 - RNA, 19 nt, Homo sapiens
  misc_RNA (1)...(19): siRNA sense strand
ggaaauguugucacuucau

SEQ ID NO: 1596827 - RNA, 19 nt, Homo sapiens
  misc_RNA (1)...(19): siRNA sense strand
caaacugcuuucgaaaucu

SEQ ID NO: 1596828 - RNA, 19 nt, Homo sapiens
  misc_RNA (1)...(19): siRNA sense strand
ccacaugaacaaacugcuu

SEQ ID NO: 1596829 - RNA, 19 nt, Homo sapiens
  misc_RNA (1)...(19): siRNA sense strand
cagcagcagauccacauga

SEQ ID NO: 1596830 - RNA, 19 nt, Homo sapiens
  misc_RNA (1)...(19): siRNA sense strand
gaaccugcuaagucuuuau

SEQ ID NO: 1596831 - RNA, 19 nt, Homo sapiens
  misc_RNA (1)...(19): siRNA sense strand
ucuccugcagcauuuauua

SEQ ID NO: 1596832 - RNA, 19 nt, Homo sapiens
  misc_RNA (1)...(19): siRNA sense strand
gagggaaagccacccaaca

SEQ ID NO: 1596833 - RNA, 19 nt, Homo sapiens
  misc_RNA (1)...(19): siRNA sense strand
gaucagaugucuaacgaua

SEQ ID NO: 1596834 - RNA, 19 nt, Homo sapiens
  misc_RNA (1)...(19): siRNA sense strand
ucaaggagaucguuuauuu

SEQ ID NO: 1596835 - RNA, 19 nt, Homo sapiens
  misc_RNA (1)...(19): siRNA sense strand
cgaaugagguguggcagua

SEQ ID NO: 1596836 - RNA, 19 nt, Homo sapiens
  misc_RNA (1)...(19): siRNA sense strand
cuacaacaaugaagaauuc

SEQ ID NO: 1596837 - RNA, 19 nt, Homo sapiens
  misc_RNA (1)...(19): siRNA sense strand
ggucagcagucuuccauga

SEQ ID NO: 1596838 - RNA, 19 nt, Homo sapiens
  misc_RNA (1)...(19): siRNA sense strand
gaauggacuuggcucugua

SEQ ID NO: 1596839 - RNA, 19 nt, Homo sapiens
  misc_RNA (1)...(19): siRNA sense strand
gaagaauucccugaucuaa

SEQ ID NO: 1596840 - RNA, 19 nt, Homo sapiens
  misc_RNA (1)...(19): siRNA sense strand
ggacuuggcucuguaaagg

SEQ ID NO: 1596841 - RNA, 19 nt, Homo sapiens
  misc_RNA (1)...(19): siRNA sense strand
gcagcacacucuaugauca

SEQ ID NO: 1596842 - RNA, 19 nt, Homo sapiens
  misc_RNA (1)...(19): siRNA sense strand
ggaauggacuuggcucugu

SEQ ID NO: 1596843 - RNA, 19 nt, Homo sapiens
  misc_RNA (1)...(19): siRNA sense strand
ccacugauggcuccuauaa

SEQ ID NO: 1596844 - RNA, 19 nt, Homo sapiens
  misc_RNA (1)...(19): siRNA sense strand
gugagcagcuuuccacuuc

SEQ ID NO: 1596845 - RNA, 19 nt, Homo sapiens
  misc_RNA (1)...(19): siRNA sense strand
guagugcccuggcucgaaa

SEQ ID NO: 1596846 - RNA, 19 nt, Homo sapiens
  misc_RNA (1)...(19): siRNA sense strand
gaacugaaacauuugaucu

SEQ ID NO: 1596847 - RNA, 19 nt, Homo sapiens
  misc_RNA (1)...(19): siRNA sense strand
ggacccaguuucugugaau

SEQ ID NO: 1596848 - RNA, 19 nt, Homo sapiens
  misc_RNA (1)...(19): siRNA sense strand
gcacccagaugauguggau

SEQ ID NO: 1596849 - RNA, 19 nt, Homo sapiens
  misc_RNA (1)...(19): siRNA sense strand
ggaggcagcagauggcuuu

SEQ ID NO: 1596850 - RNA, 19 nt, Homo sapiens
  misc_RNA (1)...(19): siRNA sense strand
gaagggaacaguaaauuuu

SEQ ID NO: 1596851 - RNA, 19 nt, Homo sapiens
  misc_RNA (1)...(19): siRNA sense strand
gagaagggaacaguaaauu

SEQ ID NO: 1596852 - RNA, 19 nt, Homo sapiens
  misc_RNA (1)...(19): siRNA sense strand
ugaauaggcugagcuuugu

SEQ ID NO: 1596853 - RNA, 19 nt, Homo sapiens
  misc_RNA (1)...(19): siRNA sense strand
cagacaagcuaaccaucuu

SEQ ID NO: 1596854 - RNA, 19 nt, Homo sapiens
  misc_RNA (1)...(19): siRNA sense strand
gccacagucugaaugguuu

SEQ ID NO: 1596855 - RNA, 19 nt, Homo sapiens
  misc_RNA (1)...(19): siRNA sense strand
ugaaacauuugaucuugga

SEQ ID NO: 1596856 - RNA, 19 nt, Homo sapiens
  misc_RNA (1)...(19): siRNA sense strand
gugaauaggcugagcuuug

SEQ ID NO: 1596857 - RNA, 19 nt, Homo sapiens
  misc_RNA (1)...(19): siRNA sense strand
cagaugauguggauaaacu

SEQ ID NO: 1596858 - RNA, 19 nt, Homo sapiens
  misc_RNA (1)...(19): siRNA sense strand
caacagcuacaacaaugaa

SEQ ID NO: 1596859 - RNA, 19 nt, Homo sapiens
  misc_RNA (1)...(19): siRNA sense strand
gagcaacagcuacaacaau

SEQ ID NO: 1596860 - RNA, 19 nt, Homo sapiens
  misc_RNA (1)...(19): siRNA sense strand
gaacagaugcaggaaugga

SEQ ID NO: 1596861 - RNA, 19 nt, Homo sapiens
  misc_RNA (1)...(19): siRNA sense strand
ggagaagggaacaguaaau

SEQ ID NO: 1596862 - RNA, 19 nt, Homo sapiens
  misc_RNA (1)...(19): siRNA sense strand
agaauucccugaucuaacu

SEQ ID NO: 1596863 - RNA, 19 nt, Homo sapiens
  misc_RNA (1)...(19): siRNA sense strand
gagaucagagcaacagcua

SEQ ID NO: 1596864 - RNA, 19 nt, Homo sapiens
  misc_RNA (1)...(19): siRNA sense strand
gauaugguacccaccugua

SEQ ID NO: 1596865 - RNA, 19 nt, Homo sapiens
  misc_RNA (1)...(19): siRNA sense strand
gaucagagcaacagcuaca

SEQ ID NO: 1596866 - RNA, 19 nt, Homo sapiens
  misc_RNA (1)...(19): siRNA sense strand
ucagaugucuaacgauaag

SEQ ID NO: 1596867 - RNA, 19 nt, Homo sapiens
  misc_RNA (1)...(19): siRNA sense strand
ucagcagucuuccaugaga

SEQ ID NO: 1596868 - RNA, 19 nt, Homo sapiens
  misc_RNA (1)...(19): siRNA sense strand
agaagggaacaguaaauuu

SEQ ID NO: 1596869 - RNA, 19 nt, Homo sapiens
  misc_RNA (1)...(19): siRNA sense strand
aggaacagaugcaggaaug

SEQ ID NO: 1596870 - RNA, 19 nt, Homo sapiens
  misc_RNA (1)...(19): siRNA sense strand
uguaugggcucaaggagau

SEQ ID NO: 1596871 - RNA, 19 nt, Homo sapiens
  misc_RNA (1)...(19): siRNA sense strand
gcaacagcuacaacaauga

SEQ ID NO: 1596872 - RNA, 19 nt, Homo sapiens
  misc_RNA (1)...(19): siRNA sense strand
caaggagaucguuuauuug

SEQ ID NO: 1596873 - RNA, 19 nt, Homo sapiens
  misc_RNA (1)...(19): siRNA sense strand
ugaagaauucccugaucua

SEQ ID NO: 1596874 - RNA, 19 nt, Homo sapiens
  misc_RNA (1)...(19): siRNA sense strand
gcuacaacaaugaagaauu

SEQ ID NO: 1596875 - RNA, 19 nt, Homo sapiens
  misc_RNA (1)...(19): siRNA sense strand
guguuucccucccagauga

SEQ ID NO: 1596876 - RNA, 19 nt, Homo sapiens
  misc_RNA (1)...(19): siRNA sense strand
gcuccuauaagccgucuuu

SEQ ID NO: 1596877 - RNA, 19 nt, Homo sapiens
  misc_RNA (1)...(19): siRNA sense strand
gacccaguuucugugaaua

SEQ ID NO: 1596878 - RNA, 19 nt, Homo sapiens
  misc_RNA (1)...(19): siRNA sense strand
gcucaaggagaucguuuau

SEQ ID NO: 1596879 - RNA, 19 nt, Homo sapiens
  misc_RNA (1)...(19): siRNA sense strand
acugaaacauuugaucuug

SEQ ID NO: 1596880 - RNA, 19 nt, Homo sapiens
  misc_RNA (1)...(19): siRNA sense strand
ucccugaucuaacuauguu

SEQ ID NO: 1596881 - RNA, 19 nt, Homo sapiens
  misc_RNA (1)...(19): siRNA sense strand
gauggagaagggaacagua

SEQ ID NO: 1596882 - RNA, 19 nt, Homo sapiens
  misc_RNA (1)...(19): siRNA sense strand
gaauguguaugggcucaag

SEQ ID NO: 1596883 - RNA, 19 nt, Homo sapiens
  misc_RNA (1)...(19): siRNA sense strand
gcauggcaguuucucacau

SEQ ID NO: 1596884 - RNA, 19 nt, Homo sapiens
  misc_RNA (1)...(19): siRNA sense strand
agcaacagcuacaacaaug

SEQ ID NO: 1596885 - RNA, 19 nt, Homo sapiens
  misc_RNA (1)...(19): siRNA sense strand
aaaggaaggucagcagucu

SEQ ID NO: 1596886 - RNA, 19 nt, Homo sapiens
  misc_RNA (1)...(19): siRNA sense strand
cgucuuuccucacugauca

SEQ ID NO: 1596887 - RNA, 19 nt, Homo sapiens
  misc_RNA (1)...(19): siRNA sense strand
ugaaccagccacagucuga

SEQ ID NO: 1596888 - RNA, 19 nt, Homo sapiens
  misc_RNA (1)...(19): siRNA sense strand
agacaagcuaaccaucuua

SEQ ID NO: 1596889 - RNA, 19 nt, Homo sapiens
  misc_RNA (1)...(19): siRNA sense strand
ucguuuauuugccgaauga

SEQ ID NO: 1596890 - RNA, 19 nt, Homo sapiens
  misc_RNA (1)...(19): siRNA sense strand
cagcagucuuccaugagaa

SEQ ID NO: 1596891 - RNA, 19 nt, Homo sapiens
  misc_RNA (1)...(19): siRNA sense strand
gaucaggugcacccagaug

SEQ ID NO: 1596892 - RNA, 19 nt, Homo sapiens
  misc_RNA (1)...(19): siRNA sense strand
caggcagggugguguaugu

SEQ ID NO: 1596893 - RNA, 19 nt, Homo sapiens
  misc_RNA (1)...(19): siRNA sense strand
agaacugucagauauggua

SEQ ID NO: 1596894 - RNA, 19 nt, Homo sapiens
  misc_RNA (1)...(19): siRNA sense strand
gagcagcuuuccacuucag

SEQ ID NO: 1596895 - RNA, 19 nt, Homo sapiens
  misc_RNA (1)...(19): siRNA sense strand
ggcaguuucucacaugaag

SEQ ID NO: 1596896 - RNA, 19 nt, Homo sapiens
  misc_RNA (1)...(19): siRNA sense strand
aaugaagaauucccugauc

SEQ ID NO: 1596897 - RNA, 19 nt, Homo sapiens
  misc_RNA (1)...(19): siRNA sense strand
ggaacugaaacauuugauc

SEQ ID NO: 1596898 - RNA, 19 nt, Homo sapiens
  misc_RNA (1)...(19): siRNA sense strand
gaucguuuauuugccgaau

SEQ ID NO: 1596899 - RNA, 19 nt, Homo sapiens
  misc_RNA (1)...(19): siRNA sense strand
gaugauguggauaaacuuc

SEQ ID NO: 1596900 - RNA, 19 nt, Homo sapiens
  misc_RNA (1)...(19): siRNA sense strand
cagcuacaacaaugaagaa

SEQ ID NO: 1596901 - RNA, 19 nt, Homo sapiens
  misc_RNA (1)...(19): siRNA sense strand
gaaccagccacagucugaa

SEQ ID NO: 1596902 - RNA, 19 nt, Homo sapiens
  misc_RNA (1)...(19): siRNA sense strand
acugauggcuccuauaagc

SEQ ID NO: 1596903 - RNA, 19 nt, Homo sapiens
  misc_RNA (1)...(19): siRNA sense strand
cagccuacaucacagaacu

SEQ ID NO: 1596904 - RNA, 19 nt, Homo sapiens
  misc_RNA (1)...(19): siRNA sense strand
ccacugcacaggcuacauc

SEQ ID NO: 1596905 - RNA, 19 nt, Homo sapiens
  misc_RNA (1)...(19): siRNA sense strand
caaugaagaauucccugau

SEQ ID NO: 1596906 - RNA, 19 nt, Homo sapiens
  misc_RNA (1)...(19): siRNA sense strand
ccagacaagcuaaccaucu

SEQ ID NO: 1596907 - RNA, 19 nt, Homo sapiens
  misc_RNA (1)...(19): siRNA sense strand
caagguggaggagccauug

SEQ ID NO: 1596908 - RNA, 19 nt, Homo sapiens
  misc_RNA (1)...(19): siRNA sense strand
gccauugccucuggaaacu

SEQ ID NO: 1596909 - RNA, 19 nt, Homo sapiens
  misc_RNA (1)...(19): siRNA sense strand
gcagcuuuccacuucagaa

SEQ ID NO: 1596910 - RNA, 19 nt, Homo sapiens
  misc_RNA (1)...(19): siRNA sense strand
aaacuucgugagcagcuuu

SEQ ID NO: 1596911 - RNA, 19 nt, Homo sapiens
  misc_RNA (1)...(19): siRNA sense strand
augaucagaugucuaacga

SEQ ID NO: 1596912 - RNA, 19 nt, Homo sapiens
  misc_RNA (1)...(19): siRNA sense strand
gaggaacagaugcaggaau

SEQ ID NO: 1596913 - RNA, 19 nt, Homo sapiens
  misc_RNA (1)...(19): siRNA sense strand
ggcucaaggagaucguuua

SEQ ID NO: 1596914 - RNA, 19 nt, Homo sapiens
  misc_RNA (1)...(19): siRNA sense strand
gauggcuuucuguuuauug

SEQ ID NO: 1596915 - RNA, 19 nt, Homo sapiens
  misc_RNA (1)...(19): siRNA sense strand
gaaacucuggaccuggaau

SEQ ID NO: 1596916 - RNA, 19 nt, Homo sapiens
  misc_RNA (1)...(19): siRNA sense strand
acccagaugauguggauaa

SEQ ID NO: 1596917 - RNA, 19 nt, Homo sapiens
  misc_RNA (1)...(19): siRNA sense strand
agacaggcaggguggugua

SEQ ID NO: 1596918 - RNA, 19 nt, Homo sapiens
  misc_RNA (1)...(19): siRNA sense strand
ugacagccuacaucacaga

SEQ ID NO: 1596919 - RNA, 19 nt, Homo sapiens
  misc_RNA (1)...(19): siRNA sense strand
gaauucccugaucuaacua

SEQ ID NO: 1596920 - RNA, 19 nt, Homo sapiens
  misc_RNA (1)...(19): siRNA sense strand
cagagcaacagcuacaaca

SEQ ID NO: 1596921 - RNA, 19 nt, Homo sapiens
  misc_RNA (1)...(19): siRNA sense strand
caggaacugaaacauuuga

SEQ ID NO: 1596922 - RNA, 19 nt, Homo sapiens
  misc_RNA (1)...(19): siRNA sense strand
uaagccgucuuuccucacu

SEQ ID NO: 1596923 - RNA, 19 nt, Homo sapiens
  misc_RNA (1)...(19): siRNA sense strand
cccagaugauguggauaaa

SEQ ID NO: 1596924 - RNA, 19 nt, Homo sapiens
  misc_RNA (1)...(19): siRNA sense strand
ggauuuugaugaugaugga

SEQ ID NO: 1596925 - RNA, 19 nt, Homo sapiens
  misc_RNA (1)...(19): siRNA sense strand
uccaggagaugcuguccau

SEQ ID NO: 1596926 - RNA, 19 nt, Homo sapiens
  misc_RNA (1)...(19): siRNA sense strand
gggcucaaggagaucguuu

SEQ ID NO: 1596927 - RNA, 19 nt, Homo sapiens
  misc_RNA (1)...(19): siRNA sense strand
gaucagaugucuaacgaua

SEQ ID NO: 1596928 - RNA, 19 nt, Homo sapiens
  misc_RNA (1)...(19): siRNA sense strand
ucaaggagaucguuuauuu

SEQ ID NO: 1596929 - RNA, 19 nt, Homo sapiens
  misc_RNA (1)...(19): siRNA sense strand
cgaaugagguguggcagua

SEQ ID NO: 1596930 - RNA, 19 nt, Homo sapiens
  misc_RNA (1)...(19): siRNA sense strand
ggucagcagucuuccauga

SEQ ID NO: 1596931 - RNA, 19 nt, Homo sapiens
  misc_RNA (1)...(19): siRNA sense strand
gaauggacuuggcucugua

SEQ ID NO: 1596932 - RNA, 19 nt, Homo sapiens
  misc_RNA (1)...(19): siRNA sense strand
ggacuuggcucuguaaagg

SEQ ID NO: 1596933 - RNA, 19 nt, Homo sapiens
  misc_RNA (1)...(19): siRNA sense strand
gcagcacacucuaugauca

SEQ ID NO: 1596934 - RNA, 19 nt, Homo sapiens
  misc_RNA (1)...(19): siRNA sense strand
ggaauggacuuggcucugu

SEQ ID NO: 1596935 - RNA, 19 nt, Homo sapiens
  misc_RNA (1)...(19): siRNA sense strand
ccacugauggcuccuauaa

SEQ ID NO: 1596936 - RNA, 19 nt, Homo sapiens
  misc_RNA (1)...(19): siRNA sense strand
gugagcagcuuuccacuuc

SEQ ID NO: 1596937 - RNA, 19 nt, Homo sapiens
  misc_RNA (1)...(19): siRNA sense strand
guagugcccuggcucgaaa

SEQ ID NO: 1596938 - RNA, 19 nt, Homo sapiens
  misc_RNA (1)...(19): siRNA sense strand
gaacugaaacauuugaucu

SEQ ID NO: 1596939 - RNA, 19 nt, Homo sapiens
  misc_RNA (1)...(19): siRNA sense strand
ggacccaguuucugugaau

SEQ ID NO: 1596940 - RNA, 19 nt, Homo sapiens
  misc_RNA (1)...(19): siRNA sense strand
gcacccagaugauguggau

SEQ ID NO: 1596941 - RNA, 19 nt, Homo sapiens
  misc_RNA (1)...(19): siRNA sense strand
ggaggcagcagauggcuuu

SEQ ID NO: 1596942 - RNA, 19 nt, Homo sapiens
  misc_RNA (1)...(19): siRNA sense strand
gaagggaacaguaaauuuu

SEQ ID NO: 1596943 - RNA, 19 nt, Homo sapiens
  misc_RNA (1)...(19): siRNA sense strand
gagaagggaacaguaaauu

SEQ ID NO: 1596944 - RNA, 19 nt, Homo sapiens
  misc_RNA (1)...(19): siRNA sense strand
ugaauaggcugagcuuugu

SEQ ID NO: 1596945 - RNA, 19 nt, Homo sapiens
  misc_RNA (1)...(19): siRNA sense strand
cagacaagcuaaccaucuu

SEQ ID NO: 1596946 - RNA, 19 nt, Homo sapiens
  misc_RNA (1)...(19): siRNA sense strand
gccacagucugaaugguuu

SEQ ID NO: 1596947 - RNA, 19 nt, Homo sapiens
  misc_RNA (1)...(19): siRNA sense strand
ugaaacauuugaucuugga

SEQ ID NO: 1596948 - RNA, 19 nt, Homo sapiens
  misc_RNA (1)...(19): siRNA sense strand
gugaauaggcugagcuuug

SEQ ID NO: 1596949 - RNA, 19 nt, Homo sapiens
  misc_RNA (1)...(19): siRNA sense strand
cagaugauguggauaaacu

SEQ ID NO: 1596950 - RNA, 19 nt, Homo sapiens
  misc_RNA (1)...(19): siRNA sense strand
gaacagaugcaggaaugga

SEQ ID NO: 1596951 - RNA, 19 nt, Homo sapiens
  misc_RNA (1)...(19): siRNA sense strand
ggagaagggaacaguaaau

SEQ ID NO: 1596952 - RNA, 19 nt, Homo sapiens
  misc_RNA (1)...(19): siRNA sense strand
gauaugguacccaccugua

SEQ ID NO: 1596953 - RNA, 19 nt, Homo sapiens
  misc_RNA (1)...(19): siRNA sense strand
ucagaugucuaacgauaag

SEQ ID NO: 1596954 - RNA, 19 nt, Homo sapiens
  misc_RNA (1)...(19): siRNA sense strand
ucagcagucuuccaugaga

SEQ ID NO: 1596955 - RNA, 19 nt, Homo sapiens
  misc_RNA (1)...(19): siRNA sense strand
agaagggaacaguaaauuu

SEQ ID NO: 1596956 - RNA, 19 nt, Homo sapiens
  misc_RNA (1)...(19): siRNA sense strand
aggaacagaugcaggaaug

SEQ ID NO: 1596957 - RNA, 19 nt, Homo sapiens
  misc_RNA (1)...(19): siRNA sense strand
uguaugggcucaaggagau

SEQ ID NO: 1596958 - RNA, 19 nt, Homo sapiens
  misc_RNA (1)...(19): siRNA sense strand
caaggagaucguuuauuug

SEQ ID NO: 1596959 - RNA, 19 nt, Homo sapiens
  misc_RNA (1)...(19): siRNA sense strand
guguuucccucccagauga

SEQ ID NO: 1596960 - RNA, 19 nt, Homo sapiens
  misc_RNA (1)...(19): siRNA sense strand
gcuccuauaagccgucuuu

SEQ ID NO: 1596961 - RNA, 19 nt, Homo sapiens
  misc_RNA (1)...(19): siRNA sense strand
gacccaguuucugugaaua

SEQ ID NO: 1596962 - RNA, 19 nt, Homo sapiens
  misc_RNA (1)...(19): siRNA sense strand
gcucaaggagaucguuuau

SEQ ID NO: 1596963 - RNA, 19 nt, Homo sapiens
  misc_RNA (1)...(19): siRNA sense strand
gauggagaagggaacagua

SEQ ID NO: 1596964 - RNA, 19 nt, Homo sapiens
  misc_RNA (1)...(19): siRNA sense strand
gaauguguaugggcucaag

SEQ ID NO: 1596965 - RNA, 19 nt, Homo sapiens
  misc_RNA (1)...(19): siRNA sense strand
acugaaacauuugaucuug

SEQ ID NO: 1596966 - RNA, 19 nt, Homo sapiens
  misc_RNA (1)...(19): siRNA sense strand
gcauggcaguuucucacau

SEQ ID NO: 1596967 - RNA, 19 nt, Homo sapiens
  misc_RNA (1)...(19): siRNA sense strand
aaaggaaggucagcagucu

SEQ ID NO: 1596968 - RNA, 19 nt, Homo sapiens
  misc_RNA (1)...(19): siRNA sense strand
cgucuuuccucacugauca

SEQ ID NO: 1596969 - RNA, 19 nt, Homo sapiens
  misc_RNA (1)...(19): siRNA sense strand
ugaaccagccacagucuga

SEQ ID NO: 1596970 - RNA, 19 nt, Homo sapiens
  misc_RNA (1)...(19): siRNA sense strand
agacaagcuaaccaucuua

SEQ ID NO: 1596971 - RNA, 19 nt, Homo sapiens
  misc_RNA (1)...(19): siRNA sense strand
ucguuuauuugccgaauga

SEQ ID NO: 1596972 - RNA, 19 nt, Homo sapiens
  misc_RNA (1)...(19): siRNA sense strand
cagcagucuuccaugagaa

SEQ ID NO: 1596973 - RNA, 19 nt, Homo sapiens
  misc_RNA (1)...(19): siRNA sense strand
gaucaggugcacccagaug

SEQ ID NO: 1596974 - RNA, 19 nt, Homo sapiens
  misc_RNA (1)...(19): siRNA sense strand
caggcagggugguguaugu

SEQ ID NO: 1596975 - RNA, 19 nt, Homo sapiens
  misc_RNA (1)...(19): siRNA sense strand
agaacugucagauauggua

SEQ ID NO: 1596976 - RNA, 19 nt, Homo sapiens
  misc_RNA (1)...(19): siRNA sense strand
gagcagcuuuccacuucag

SEQ ID NO: 1596977 - RNA, 19 nt, Homo sapiens
  misc_RNA (1)...(19): siRNA sense strand
ggcaguuucucacaugaag

SEQ ID NO: 1596978 - RNA, 19 nt, Homo sapiens
  misc_RNA (1)...(19): siRNA sense strand
ggaacugaaacauuugauc

SEQ ID NO: 1596979 - RNA, 19 nt, Homo sapiens
  misc_RNA (1)...(19): siRNA sense strand
gaucguuuauuugccgaau

SEQ ID NO: 1596980 - RNA, 19 nt, Homo sapiens
  misc_RNA (1)...(19): siRNA sense strand
gaugauguggauaaacuuc

SEQ ID NO: 1596981 - RNA, 19 nt, Homo sapiens
  misc_RNA (1)...(19): siRNA sense strand
gaaccagccacagucugaa

SEQ ID NO: 1596982 - RNA, 19 nt, Homo sapiens
  misc_RNA (1)...(19): siRNA sense strand
acugauggcuccuauaagc

SEQ ID NO: 1596983 - RNA, 19 nt, Homo sapiens
  misc_RNA (1)...(19): siRNA sense strand
cagccuacaucacagaacu

SEQ ID NO: 1596984 - RNA, 19 nt, Homo sapiens
  misc_RNA (1)...(19): siRNA sense strand
ccacugcacaggcuacauc

SEQ ID NO: 1596985 - RNA, 19 nt, Homo sapiens
  misc_RNA (1)...(19): siRNA sense strand
caagguggaggagccauug

SEQ ID NO: 1596986 - RNA, 19 nt, Homo sapiens
  misc_RNA (1)...(19): siRNA sense strand
ccagacaagcuaaccaucu

SEQ ID NO: 1596987 - RNA, 19 nt, Homo sapiens
  misc_RNA (1)...(19): siRNA sense strand
gccauugccucuggaaacu

SEQ ID NO: 1596988 - RNA, 19 nt, Homo sapiens
  misc_RNA (1)...(19): siRNA sense strand
gcagcuuuccacuucagaa

SEQ ID NO: 1596989 - RNA, 19 nt, Homo sapiens
  misc_RNA (1)...(19): siRNA sense strand
aaacuucgugagcagcuuu

SEQ ID NO: 1596990 - RNA, 19 nt, Homo sapiens
  misc_RNA (1)...(19): siRNA sense strand
ggcucaaggagaucguuua

SEQ ID NO: 1596991 - RNA, 19 nt, Homo sapiens
  misc_RNA (1)...(19): siRNA sense strand
augaucagaugucuaacga

SEQ ID NO: 1596992 - RNA, 19 nt, Homo sapiens
  misc_RNA (1)...(19): siRNA sense strand
gaggaacagaugcaggaau

SEQ ID NO: 1596993 - RNA, 19 nt, Homo sapiens
  misc_RNA (1)...(19): siRNA sense strand
gauggcuuucuguuuauug

SEQ ID NO: 1596994 - RNA, 19 nt, Homo sapiens
  misc_RNA (1)...(19): siRNA sense strand
acccagaugauguggauaa

SEQ ID NO: 1596995 - RNA, 19 nt, Homo sapiens
  misc_RNA (1)...(19): siRNA sense strand
gaaacucuggaccuggaau

SEQ ID NO: 1596996 - RNA, 19 nt, Homo sapiens
  misc_RNA (1)...(19): siRNA sense strand
agacaggcaggguggugua

SEQ ID NO: 1596997 - RNA, 19 nt, Homo sapiens
  misc_RNA (1)...(19): siRNA sense strand
ugacagccuacaucacaga

SEQ ID NO: 1596998 - RNA, 19 nt, Homo sapiens
  misc_RNA (1)...(19): siRNA sense strand
caggaacugaaacauuuga

SEQ ID NO: 1596999 - RNA, 19 nt, Homo sapiens
  misc_RNA (1)...(19): siRNA sense strand
uaagccgucuuuccucacu

SEQ ID NO: 1597000 - RNA, 19 nt, Homo sapiens
  misc_RNA (1)...(19): siRNA sense strand
ggauuuugaugaugaugga

SEQ ID NO: 1597001 - RNA, 19 nt, Homo sapiens
  misc_RNA (1)...(19): siRNA sense strand
gggcucaaggagaucguuu

SEQ ID NO: 1597002 - RNA, 19 nt, Homo sapiens
  misc_RNA (1)...(19): siRNA sense strand
cccagaugauguggauaaa

SEQ ID NO: 1597003 - RNA, 19 nt, Homo sapiens
  misc_RNA (1)...(19): siRNA sense strand
gaucagaugucuaacgaua

SEQ ID NO: 1597004 - RNA, 19 nt, Homo sapiens
  misc_RNA (1)...(19): siRNA sense strand
ucaaggagaucguuuauuu

SEQ ID NO: 1597005 - RNA, 19 nt, Homo sapiens
  misc_RNA (1)...(19): siRNA sense strand
cgaaugagguguggcagua

SEQ ID NO: 1597006 - RNA, 19 nt, Homo sapiens
  misc_RNA (1)...(19): siRNA sense strand
cuacaacaaugaagaauuc

SEQ ID NO: 1597007 - RNA, 19 nt, Homo sapiens
  misc_RNA (1)...(19): siRNA sense strand
ggucagcagucuuccauga

SEQ ID NO: 1597008 - RNA, 19 nt, Homo sapiens
  misc_RNA (1)...(19): siRNA sense strand
gaauggacuuggcucugua

SEQ ID NO: 1597009 - RNA, 19 nt, Homo sapiens
  misc_RNA (1)...(19): siRNA sense strand
gaagaauucccugaucuaa

SEQ ID NO: 1597010 - RNA, 19 nt, Homo sapiens
  misc_RNA (1)...(19): siRNA sense strand
ggacuuggcucuguaaagg

SEQ ID NO: 1597011 - RNA, 19 nt, Homo sapiens
  misc_RNA (1)...(19): siRNA sense strand
gcagcacacucuaugauca

SEQ ID NO: 1597012 - RNA, 19 nt, Homo sapiens
  misc_RNA (1)...(19): siRNA sense strand
ggaauggacuuggcucugu

SEQ ID NO: 1597013 - RNA, 19 nt, Homo sapiens
  misc_RNA (1)...(19): siRNA sense strand
ccacugauggcuccuauaa

SEQ ID NO: 1597014 - RNA, 19 nt, Homo sapiens
  misc_RNA (1)...(19): siRNA sense strand
gugagcagcuuuccacuuc

SEQ ID NO: 1597015 - RNA, 19 nt, Homo sapiens
  misc_RNA (1)...(19): siRNA sense strand
guagugcccuggcucgaaa

SEQ ID NO: 1597016 - RNA, 19 nt, Homo sapiens
  misc_RNA (1)...(19): siRNA sense strand
gaacugaaacauuugaucu

SEQ ID NO: 1597017 - RNA, 19 nt, Homo sapiens
  misc_RNA (1)...(19): siRNA sense strand
ggacccaguuucugugaau

SEQ ID NO: 1597018 - RNA, 19 nt, Homo sapiens
  misc_RNA (1)...(19): siRNA sense strand
gcacccagaugauguggau

SEQ ID NO: 1597019 - RNA, 19 nt, Homo sapiens
  misc_RNA (1)...(19): siRNA sense strand
ggaggcagcagauggcuuu

SEQ ID NO: 1597020 - RNA, 19 nt, Homo sapiens
  misc_RNA (1)...(19): siRNA sense strand
gaagggaacaguaaauuuu

SEQ ID NO: 1597021 - RNA, 19 nt, Homo sapiens
  misc_RNA (1)...(19): siRNA sense strand
gagaagggaacaguaaauu

SEQ ID NO: 1597022 - RNA, 19 nt, Homo sapiens
  misc_RNA (1)...(19): siRNA sense strand
ugaauaggcugagcuuugu

SEQ ID NO: 1597023 - RNA, 19 nt, Homo sapiens
  misc_RNA (1)...(19): siRNA sense strand
cagacaagcuaaccaucuu

SEQ ID NO: 1597024 - RNA, 19 nt, Homo sapiens
  misc_RNA (1)...(19): siRNA sense strand
gccacagucugaaugguuu

SEQ ID NO: 1597025 - RNA, 19 nt, Homo sapiens
  misc_RNA (1)...(19): siRNA sense strand
ugaaacauuugaucuugga

SEQ ID NO: 1597026 - RNA, 19 nt, Homo sapiens
  misc_RNA (1)...(19): siRNA sense strand
gugaauaggcugagcuuug

SEQ ID NO: 1597027 - RNA, 19 nt, Homo sapiens
  misc_RNA (1)...(19): siRNA sense strand
cagaugauguggauaaacu

SEQ ID NO: 1597028 - RNA, 19 nt, Homo sapiens
  misc_RNA (1)...(19): siRNA sense strand
caacagcuacaacaaugaa

SEQ ID NO: 1597029 - RNA, 19 nt, Homo sapiens
  misc_RNA (1)...(19): siRNA sense strand
gagcaacagcuacaacaau

SEQ ID NO: 1597030 - RNA, 19 nt, Homo sapiens
  misc_RNA (1)...(19): siRNA sense strand
gaacagaugcaggaaugga

SEQ ID NO: 1597031 - RNA, 19 nt, Homo sapiens
  misc_RNA (1)...(19): siRNA sense strand
ggagaagggaacaguaaau

SEQ ID NO: 1597032 - RNA, 19 nt, Homo sapiens
  misc_RNA (1)...(19): siRNA sense strand
agaauucccugaucuaacu

SEQ ID NO: 1597033 - RNA, 19 nt, Homo sapiens
  misc_RNA (1)...(19): siRNA sense strand
gagaucagagcaacagcua

SEQ ID NO: 1597034 - RNA, 19 nt, Homo sapiens
  misc_RNA (1)...(19): siRNA sense strand
gauaugguacccaccugua

SEQ ID NO: 1597035 - RNA, 19 nt, Homo sapiens
  misc_RNA (1)...(19): siRNA sense strand
gaucagagcaacagcuaca

SEQ ID NO: 1597036 - RNA, 19 nt, Homo sapiens
  misc_RNA (1)...(19): siRNA sense strand
ucagaugucuaacgauaag

SEQ ID NO: 1597037 - RNA, 19 nt, Homo sapiens
  misc_RNA (1)...(19): siRNA sense strand
ucagcagucuuccaugaga

SEQ ID NO: 1597038 - RNA, 19 nt, Homo sapiens
  misc_RNA (1)...(19): siRNA sense strand
agaagggaacaguaaauuu

SEQ ID NO: 1597039 - RNA, 19 nt, Homo sapiens
  misc_RNA (1)...(19): siRNA sense strand
aggaacagaugcaggaaug

SEQ ID NO: 1597040 - RNA, 19 nt, Homo sapiens
  misc_RNA (1)...(19): siRNA sense strand
uguaugggcucaaggagau

SEQ ID NO: 1597041 - RNA, 19 nt, Homo sapiens
  misc_RNA (1)...(19): siRNA sense strand
gcaacagcuacaacaauga

SEQ ID NO: 1597042 - RNA, 19 nt, Homo sapiens
  misc_RNA (1)...(19): siRNA sense strand
caaggagaucguuuauuug

SEQ ID NO: 1597043 - RNA, 19 nt, Homo sapiens
  misc_RNA (1)...(19): siRNA sense strand
ugaagaauucccugaucua

SEQ ID NO: 1597044 - RNA, 19 nt, Homo sapiens
  misc_RNA (1)...(19): siRNA sense strand
gcuacaacaaugaagaauu

SEQ ID NO: 1597045 - RNA, 19 nt, Homo sapiens
  misc_RNA (1)...(19): siRNA sense strand
guguuucccucccagauga

SEQ ID NO: 1597046 - RNA, 19 nt, Homo sapiens
  misc_RNA (1)...(19): siRNA sense strand
gcuccuauaagccgucuuu

SEQ ID NO: 1597047 - RNA, 19 nt, Homo sapiens
  misc_RNA (1)...(19): siRNA sense strand
gacccaguuucugugaaua

SEQ ID NO: 1597048 - RNA, 19 nt, Homo sapiens
  misc_RNA (1)...(19): siRNA sense strand
gcucaaggagaucguuuau

SEQ ID NO: 1597049 - RNA, 19 nt, Homo sapiens
  misc_RNA (1)...(19): siRNA sense strand
acugaaacauuugaucuug

SEQ ID NO: 1597050 - RNA, 19 nt, Homo sapiens
  misc_RNA (1)...(19): siRNA sense strand
ucccugaucuaacuauguu

SEQ ID NO: 1597051 - RNA, 19 nt, Homo sapiens
  misc_RNA (1)...(19): siRNA sense strand
gauggagaagggaacagua

SEQ ID NO: 1597052 - RNA, 19 nt, Homo sapiens
  misc_RNA (1)...(19): siRNA sense strand
gaauguguaugggcucaag

SEQ ID NO: 1597053 - RNA, 19 nt, Homo sapiens
  misc_RNA (1)...(19): siRNA sense strand
gcauggcaguuucucacau

SEQ ID NO: 1597054 - RNA, 19 nt, Homo sapiens
  misc_RNA (1)...(19): siRNA sense strand
agcaacagcuacaacaaug

SEQ ID NO: 1597055 - RNA, 19 nt, Homo sapiens
  misc_RNA (1)...(19): siRNA sense strand
aaaggaaggucagcagucu

SEQ ID NO: 1597056 - RNA, 19 nt, Homo sapiens
  misc_RNA (1)...(19): siRNA sense strand
cgucuuuccucacugauca

SEQ ID NO: 1597057 - RNA, 19 nt, Homo sapiens
  misc_RNA (1)...(19): siRNA sense strand
ugaaccagccacagucuga

SEQ ID NO: 1597058 - RNA, 19 nt, Homo sapiens
  misc_RNA (1)...(19): siRNA sense strand
agacaagcuaaccaucuua

SEQ ID NO: 1597059 - RNA, 19 nt, Homo sapiens
  misc_RNA (1)...(19): siRNA sense strand
ucguuuauuugccgaauga

SEQ ID NO: 1597060 - RNA, 19 nt, Homo sapiens
  misc_RNA (1)...(19): siRNA sense strand
cagcagucuuccaugagaa

SEQ ID NO: 1597061 - RNA, 19 nt, Homo sapiens
  misc_RNA (1)...(19): siRNA sense strand
gaucaggugcacccagaug

SEQ ID NO: 1597062 - RNA, 19 nt, Homo sapiens
  misc_RNA (1)...(19): siRNA sense strand
caggcagggugguguaugu

SEQ ID NO: 1597063 - RNA, 19 nt, Homo sapiens
  misc_RNA (1)...(19): siRNA sense strand
agaacugucagauauggua

SEQ ID NO: 1597064 - RNA, 19 nt, Homo sapiens
  misc_RNA (1)...(19): siRNA sense strand
gagcagcuuuccacuucag

SEQ ID NO: 1597065 - RNA, 19 nt, Homo sapiens
  misc_RNA (1)...(19): siRNA sense strand
ggcaguuucucacaugaag

SEQ ID NO: 1597066 - RNA, 19 nt, Homo sapiens
  misc_RNA (1)...(19): siRNA sense strand
aaugaagaauucccugauc

SEQ ID NO: 1597067 - RNA, 19 nt, Homo sapiens
  misc_RNA (1)...(19): siRNA sense strand
ggaacugaaacauuugauc

SEQ ID NO: 1597068 - RNA, 19 nt, Homo sapiens
  misc_RNA (1)...(19): siRNA sense strand
gaucguuuauuugccgaau

SEQ ID NO: 1597069 - RNA, 19 nt, Homo sapiens
  misc_RNA (1)...(19): siRNA sense strand
gaugauguggauaaacuuc

SEQ ID NO: 1597070 - RNA, 19 nt, Homo sapiens
  misc_RNA (1)...(19): siRNA sense strand
cagcuacaacaaugaagaa

SEQ ID NO: 1597071 - RNA, 19 nt, Homo sapiens
  misc_RNA (1)...(19): siRNA sense strand
gaaccagccacagucugaa

SEQ ID NO: 1597072 - RNA, 19 nt, Homo sapiens
  misc_RNA (1)...(19): siRNA sense strand
acugauggcuccuauaagc

SEQ ID NO: 1597073 - RNA, 19 nt, Homo sapiens
  misc_RNA (1)...(19): siRNA sense strand
cagccuacaucacagaacu

SEQ ID NO: 1597074 - RNA, 19 nt, Homo sapiens
  misc_RNA (1)...(19): siRNA sense strand
ccacugcacaggcuacauc

SEQ ID NO: 1597075 - RNA, 19 nt, Homo sapiens
  misc_RNA (1)...(19): siRNA sense strand
caaugaagaauucccugau

SEQ ID NO: 1597076 - RNA, 19 nt, Homo sapiens
  misc_RNA (1)...(19): siRNA sense strand
ccagacaagcuaaccaucu

SEQ ID NO: 1597077 - RNA, 19 nt, Homo sapiens
  misc_RNA (1)...(19): siRNA sense strand
caagguggaggagccauug

SEQ ID NO: 1597078 - RNA, 19 nt, Homo sapiens
  misc_RNA (1)...(19): siRNA sense strand
gccauugccucuggaaacu

SEQ ID NO: 1597079 - RNA, 19 nt, Homo sapiens
  misc_RNA (1)...(19): siRNA sense strand
gcagcuuuccacuucagaa

SEQ ID NO: 1597080 - RNA, 19 nt, Homo sapiens
  misc_RNA (1)...(19): siRNA sense strand
aaacuucgugagcagcuuu

SEQ ID NO: 1597081 - RNA, 19 nt, Homo sapiens
  misc_RNA (1)...(19): siRNA sense strand
augaucagaugucuaacga

SEQ ID NO: 1597082 - RNA, 19 nt, Homo sapiens
  misc_RNA (1)...(19): siRNA sense strand
gaggaacagaugcaggaau

SEQ ID NO: 1597083 - RNA, 19 nt, Homo sapiens
  misc_RNA (1)...(19): siRNA sense strand
ggcucaaggagaucguuua

SEQ ID NO: 1597084 - RNA, 19 nt, Homo sapiens
  misc_RNA (1)...(19): siRNA sense strand
gauggcuuucuguuuauug

SEQ ID NO: 1597085 - RNA, 19 nt, Homo sapiens
  misc_RNA (1)...(19): siRNA sense strand
gaaacucuggaccuggaau

SEQ ID NO: 1597086 - RNA, 19 nt, Homo sapiens
  misc_RNA (1)...(19): siRNA sense strand
acccagaugauguggauaa

SEQ ID NO: 1597087 - RNA, 19 nt, Homo sapiens
  misc_RNA (1)...(19): siRNA sense strand
agacaggcaggguggugua

SEQ ID NO: 1597088 - RNA, 19 nt, Homo sapiens
  misc_RNA (1)...(19): siRNA sense strand
ugacagccuacaucacaga

SEQ ID NO: 1597089 - RNA, 19 nt, Homo sapiens
  misc_RNA (1)...(19): siRNA sense strand
gaauucccugaucuaacua

SEQ ID NO: 1597090 - RNA, 19 nt, Homo sapiens
  misc_RNA (1)...(19): siRNA sense strand
cagagcaacagcuacaaca

SEQ ID NO: 1597091 - RNA, 19 nt, Homo sapiens
  misc_RNA (1)...(19): siRNA sense strand
caggaacugaaacauuuga

SEQ ID NO: 1597092 - RNA, 19 nt, Homo sapiens
  misc_RNA (1)...(19): siRNA sense strand
uaagccgucuuuccucacu

SEQ ID NO: 1597093 - RNA, 19 nt, Homo sapiens
  misc_RNA (1)...(19): siRNA sense strand
cccagaugauguggauaaa

SEQ ID NO: 1597094 - RNA, 19 nt, Homo sapiens
  misc_RNA (1)...(19): siRNA sense strand
ggauuuugaugaugaugga

SEQ ID NO: 1597095 - RNA, 19 nt, Homo sapiens
  misc_RNA (1)...(19): siRNA sense strand
uccaggagaugcuguccau

SEQ ID NO: 1597096 - RNA, 19 nt, Homo sapiens
  misc_RNA (1)...(19): siRNA sense strand
gggcucaaggagaucguuu

SEQ ID NO: 1597097 - RNA, 19 nt, Homo sapiens
  misc_RNA (1)...(19): siRNA sense strand
gaucagaugucuaacgaua

SEQ ID NO: 1597098 - RNA, 19 nt, Homo sapiens
  misc_RNA (1)...(19): siRNA sense strand
ucaaggagaucguuuauuu

SEQ ID NO: 1597099 - RNA, 19 nt, Homo sapiens
  misc_RNA (1)...(19): siRNA sense strand
cgaaugagguguggcagua

SEQ ID NO: 1597100 - RNA, 19 nt, Homo sapiens
  misc_RNA (1)...(19): siRNA sense strand
cuacaacaaugaagaauuc

SEQ ID NO: 1597101 - RNA, 19 nt, Homo sapiens
  misc_RNA (1)...(19): siRNA sense strand
ggucagcagucuuccauga

SEQ ID NO: 1597102 - RNA, 19 nt, Homo sapiens
  misc_RNA (1)...(19): siRNA sense strand
gaauggacuuggcucugua

SEQ ID NO: 1597103 - RNA, 19 nt, Homo sapiens
  misc_RNA (1)...(19): siRNA sense strand
gaagaauucccugaucuaa

SEQ ID NO: 1597104 - RNA, 19 nt, Homo sapiens
  misc_RNA (1)...(19): siRNA sense strand
ggacuuggcucuguaaagg

SEQ ID NO: 1597105 - RNA, 19 nt, Homo sapiens
  misc_RNA (1)...(19): siRNA sense strand
gcagcacacucuaugauca

SEQ ID NO: 1597106 - RNA, 19 nt, Homo sapiens
  misc_RNA (1)...(19): siRNA sense strand
ggaauggacuuggcucugu

SEQ ID NO: 1597107 - RNA, 19 nt, Homo sapiens
  misc_RNA (1)...(19): siRNA sense strand
ccacugauggcuccuauaa

SEQ ID NO: 1597108 - RNA, 19 nt, Homo sapiens
  misc_RNA (1)...(19): siRNA sense strand
gugagcagcuuuccacuuc

SEQ ID NO: 1597109 - RNA, 19 nt, Homo sapiens
  misc_RNA (1)...(19): siRNA sense strand
guagugcccuggcucgaaa

SEQ ID NO: 1597110 - RNA, 19 nt, Homo sapiens
  misc_RNA (1)...(19): siRNA sense strand
gaacugaaacauuugaucu

SEQ ID NO: 1597111 - RNA, 19 nt, Homo sapiens
  misc_RNA (1)...(19): siRNA sense strand
ggacccaguuucugugaau

SEQ ID NO: 1597112 - RNA, 19 nt, Homo sapiens
  misc_RNA (1)...(19): siRNA sense strand
gcacccagaugauguggau

SEQ ID NO: 1597113 - RNA, 19 nt, Homo sapiens
  misc_RNA (1)...(19): siRNA sense strand
ggaggcagcagauggcuuu

SEQ ID NO: 1597114 - RNA, 19 nt, Homo sapiens
  misc_RNA (1)...(19): siRNA sense strand
gaagggaacaguaaauuuu

SEQ ID NO: 1597115 - RNA, 19 nt, Homo sapiens
  misc_RNA (1)...(19): siRNA sense strand
gagaagggaacaguaaauu

SEQ ID NO: 1597116 - RNA, 19 nt, Homo sapiens
  misc_RNA (1)...(19): siRNA sense strand
ugaauaggcugagcuuugu

SEQ ID NO: 1597117 - RNA, 19 nt, Homo sapiens
  misc_RNA (1)...(19): siRNA sense strand
cagacaagcuaaccaucuu

SEQ ID NO: 1597118 - RNA, 19 nt, Homo sapiens
  misc_RNA (1)...(19): siRNA sense strand
gccacagucugaaugguuu

SEQ ID NO: 1597119 - RNA, 19 nt, Homo sapiens
  misc_RNA (1)...(19): siRNA sense strand
ugaaacauuugaucuugga

SEQ ID NO: 1597120 - RNA, 19 nt, Homo sapiens
  misc_RNA (1)...(19): siRNA sense strand
gugaauaggcugagcuuug

SEQ ID NO: 1597121 - RNA, 19 nt, Homo sapiens
  misc_RNA (1)...(19): siRNA sense strand
cagaugauguggauaaacu

SEQ ID NO: 1597122 - RNA, 19 nt, Homo sapiens
  misc_RNA (1)...(19): siRNA sense strand
caacagcuacaacaaugaa

SEQ ID NO: 1597123 - RNA, 19 nt, Homo sapiens
  misc_RNA (1)...(19): siRNA sense strand
gagcaacagcuacaacaau

SEQ ID NO: 1597124 - RNA, 19 nt, Homo sapiens
  misc_RNA (1)...(19): siRNA sense strand
gaacagaugcaggaaugga

SEQ ID NO: 1597125 - RNA, 19 nt, Homo sapiens
  misc_RNA (1)...(19): siRNA sense strand
ggagaagggaacaguaaau

SEQ ID NO: 1597126 - RNA, 19 nt, Homo sapiens
  misc_RNA (1)...(19): siRNA sense strand
agaauucccugaucuaacu

SEQ ID NO: 1597127 - RNA, 19 nt, Homo sapiens
  misc_RNA (1)...(19): siRNA sense strand
gagaucagagcaacagcua

SEQ ID NO: 1597128 - RNA, 19 nt, Homo sapiens
  misc_RNA (1)...(19): siRNA sense strand
gauaugguacccaccugua

SEQ ID NO: 1597129 - RNA, 19 nt, Homo sapiens
  misc_RNA (1)...(19): siRNA sense strand
gaucagagcaacagcuaca

SEQ ID NO: 1597130 - RNA, 19 nt, Homo sapiens
  misc_RNA (1)...(19): siRNA sense strand
ucagaugucuaacgauaag

SEQ ID NO: 1597131 - RNA, 19 nt, Homo sapiens
  misc_RNA (1)...(19): siRNA sense strand
ucagcagucuuccaugaga

SEQ ID NO: 1597132 - RNA, 19 nt, Homo sapiens
  misc_RNA (1)...(19): siRNA sense strand
agaagggaacaguaaauuu

SEQ ID NO: 1597133 - RNA, 19 nt, Homo sapiens
  misc_RNA (1)...(19): siRNA sense strand
aggaacagaugcaggaaug

SEQ ID NO: 1597134 - RNA, 19 nt, Homo sapiens
  misc_RNA (1)...(19): siRNA sense strand
uguaugggcucaaggagau

SEQ ID NO: 1597135 - RNA, 19 nt, Homo sapiens
  misc_RNA (1)...(19): siRNA sense strand
gcaacagcuacaacaauga

SEQ ID NO: 1597136 - RNA, 19 nt, Homo sapiens
  misc_RNA (1)...(19): siRNA sense strand
caaggagaucguuuauuug

SEQ ID NO: 1597137 - RNA, 19 nt, Homo sapiens
  misc_RNA (1)...(19): siRNA sense strand
ugaagaauucccugaucua

SEQ ID NO: 1597138 - RNA, 19 nt, Homo sapiens
  misc_RNA (1)...(19): siRNA sense strand
gcuacaacaaugaagaauu

SEQ ID NO: 1597139 - RNA, 19 nt, Homo sapiens
  misc_RNA (1)...(19): siRNA sense strand
guguuucccucccagauga

SEQ ID NO: 1597140 - RNA, 19 nt, Homo sapiens
  misc_RNA (1)...(19): siRNA sense strand
gcuccuauaagccgucuuu

SEQ ID NO: 1597141 - RNA, 19 nt, Homo sapiens
  misc_RNA (1)...(19): siRNA sense strand
gacccaguuucugugaaua

SEQ ID NO: 1597142 - RNA, 19 nt, Homo sapiens
  misc_RNA (1)...(19): siRNA sense strand
gcucaaggagaucguuuau

SEQ ID NO: 1597143 - RNA, 19 nt, Homo sapiens
  misc_RNA (1)...(19): siRNA sense strand
acugaaacauuugaucuug

SEQ ID NO: 1597144 - RNA, 19 nt, Homo sapiens
  misc_RNA (1)...(19): siRNA sense strand
ucccugaucuaacuauguu

SEQ ID NO: 1597145 - RNA, 19 nt, Homo sapiens
  misc_RNA (1)...(19): siRNA sense strand
gauggagaagggaacagua

SEQ ID NO: 1597146 - RNA, 19 nt, Homo sapiens
  misc_RNA (1)...(19): siRNA sense strand
gaauguguaugggcucaag

SEQ ID NO: 1597147 - RNA, 19 nt, Homo sapiens
  misc_RNA (1)...(19): siRNA sense strand
gcauggcaguuucucacau

SEQ ID NO: 1597148 - RNA, 19 nt, Homo sapiens
  misc_RNA (1)...(19): siRNA sense strand
agcaacagcuacaacaaug

SEQ ID NO: 1597149 - RNA, 19 nt, Homo sapiens
  misc_RNA (1)...(19): siRNA sense strand
aaaggaaggucagcagucu

SEQ ID NO: 1597150 - RNA, 19 nt, Homo sapiens
  misc_RNA (1)...(19): siRNA sense strand
cgucuuuccucacugauca

SEQ ID NO: 1597151 - RNA, 19 nt, Homo sapiens
  misc_RNA (1)...(19): siRNA sense strand
ugaaccagccacagucuga

SEQ ID NO: 1597152 - RNA, 19 nt, Homo sapiens
  misc_RNA (1)...(19): siRNA sense strand
agacaagcuaaccaucuua

SEQ ID NO: 1597153 - RNA, 19 nt, Homo sapiens
  misc_RNA (1)...(19): siRNA sense strand
ucguuuauuugccgaauga

SEQ ID NO: 1597154 - RNA, 19 nt, Homo sapiens
  misc_RNA (1)...(19): siRNA sense strand
cagcagucuuccaugagaa

SEQ ID NO: 1597155 - RNA, 19 nt, Homo sapiens
  misc_RNA (1)...(19): siRNA sense strand
gaucaggugcacccagaug

SEQ ID NO: 1597156 - RNA, 19 nt, Homo sapiens
  misc_RNA (1)...(19): siRNA sense strand
caggcagggugguguaugu

SEQ ID NO: 1597157 - RNA, 19 nt, Homo sapiens
  misc_RNA (1)...(19): siRNA sense strand
agaacugucagauauggua

SEQ ID NO: 1597158 - RNA, 19 nt, Homo sapiens
  misc_RNA (1)...(19): siRNA sense strand
gagcagcuuuccacuucag

SEQ ID NO: 1597159 - RNA, 19 nt, Homo sapiens
  misc_RNA (1)...(19): siRNA sense strand
ggcaguuucucacaugaag

SEQ ID NO: 1597160 - RNA, 19 nt, Homo sapiens
  misc_RNA (1)...(19): siRNA sense strand
aaugaagaauucccugauc

SEQ ID NO: 1597161 - RNA, 19 nt, Homo sapiens
  misc_RNA (1)...(19): siRNA sense strand
ggaacugaaacauuugauc

SEQ ID NO: 1597162 - RNA, 19 nt, Homo sapiens
  misc_RNA (1)...(19): siRNA sense strand
gaucguuuauuugccgaau

SEQ ID NO: 1597163 - RNA, 19 nt, Homo sapiens
  misc_RNA (1)...(19): siRNA sense strand
gaugauguggauaaacuuc

SEQ ID NO: 1597164 - RNA, 19 nt, Homo sapiens
  misc_RNA (1)...(19): siRNA sense strand
cagcuacaacaaugaagaa

SEQ ID NO: 1597165 - RNA, 19 nt, Homo sapiens
  misc_RNA (1)...(19): siRNA sense strand
gaaccagccacagucugaa

SEQ ID NO: 1597166 - RNA, 19 nt, Homo sapiens
  misc_RNA (1)...(19): siRNA sense strand
acugauggcuccuauaagc

SEQ ID NO: 1597167 - RNA, 19 nt, Homo sapiens
  misc_RNA (1)...(19): siRNA sense strand
cagccuacaucacagaacu

SEQ ID NO: 1597168 - RNA, 19 nt, Homo sapiens
  misc_RNA (1)...(19): siRNA sense strand
ccacugcacaggcuacauc

SEQ ID NO: 1597169 - RNA, 19 nt, Homo sapiens
  misc_RNA (1)...(19): siRNA sense strand
caaugaagaauucccugau

SEQ ID NO: 1597170 - RNA, 19 nt, Homo sapiens
  misc_RNA (1)...(19): siRNA sense strand
ccagacaagcuaaccaucu

SEQ ID NO: 1597171 - RNA, 19 nt, Homo sapiens
  misc_RNA (1)...(19): siRNA sense strand
caagguggaggagccauug

SEQ ID NO: 1597172 - RNA, 19 nt, Homo sapiens
  misc_RNA (1)...(19): siRNA sense strand
gccauugccucuggaaacu

SEQ ID NO: 1597173 - RNA, 19 nt, Homo sapiens
  misc_RNA (1)...(19): siRNA sense strand
gcagcuuuccacuucagaa

SEQ ID NO: 1597174 - RNA, 19 nt, Homo sapiens
  misc_RNA (1)...(19): siRNA sense strand
aaacuucgugagcagcuuu

SEQ ID NO: 1597175 - RNA, 19 nt, Homo sapiens
  misc_RNA (1)...(19): siRNA sense strand
augaucagaugucuaacga

SEQ ID NO: 1597176 - RNA, 19 nt, Homo sapiens
  misc_RNA (1)...(19): siRNA sense strand
gaggaacagaugcaggaau

SEQ ID NO: 1597177 - RNA, 19 nt, Homo sapiens
  misc_RNA (1)...(19): siRNA sense strand
ggcucaaggagaucguuua

SEQ ID NO: 1597178 - RNA, 19 nt, Homo sapiens
  misc_RNA (1)...(19): siRNA sense strand
gauggcuuucuguuuauug

SEQ ID NO: 1597179 - RNA, 19 nt, Homo sapiens
  misc_RNA (1)...(19): siRNA sense strand
gaaacucuggaccuggaau

SEQ ID NO: 1597180 - RNA, 19 nt, Homo sapiens
  misc_RNA (1)...(19): siRNA sense strand
acccagaugauguggauaa

SEQ ID NO: 1597181 - RNA, 19 nt, Homo sapiens
  misc_RNA (1)...(19): siRNA sense strand
agacaggcaggguggugua

SEQ ID NO: 1597182 - RNA, 19 nt, Homo sapiens
  misc_RNA (1)...(19): siRNA sense strand
ugacagccuacaucacaga

SEQ ID NO: 1597183 - RNA, 19 nt, Homo sapiens
  misc_RNA (1)...(19): siRNA sense strand
gaauucccugaucuaacua

SEQ ID NO: 1597184 - RNA, 19 nt, Homo sapiens
  misc_RNA (1)...(19): siRNA sense strand
cagagcaacagcuacaaca

SEQ ID NO: 1597185 - RNA, 19 nt, Homo sapiens
  misc_RNA (1)...(19): siRNA sense strand
caggaacugaaacauuuga

SEQ ID NO: 1597186 - RNA, 19 nt, Homo sapiens
  misc_RNA (1)...(19): siRNA sense strand
uaagccgucuuuccucacu

SEQ ID NO: 1597187 - RNA, 19 nt, Homo sapiens
  misc_RNA (1)...(19): siRNA sense strand
cccagaugauguggauaaa

SEQ ID NO: 1597188 - RNA, 19 nt, Homo sapiens
  misc_RNA (1)...(19): siRNA sense strand
ggauuuugaugaugaugga

SEQ ID NO: 1597189 - RNA, 19 nt, Homo sapiens
  misc_RNA (1)...(19): siRNA sense strand
uccaggagaugcuguccau

SEQ ID NO: 1597190 - RNA, 19 nt, Homo sapiens
  misc_RNA (1)...(19): siRNA sense strand
gggcucaaggagaucguuu

SEQ ID NO: 1597191 - RNA, 19 nt, Homo sapiens
  misc_RNA (1)...(19): siRNA sense strand
gaucagaugucuaacgaua

SEQ ID NO: 1597192 - RNA, 19 nt, Homo sapiens
  misc_RNA (1)...(19): siRNA sense strand
ucaaggagaucguuuauuu

SEQ ID NO: 1597193 - RNA, 19 nt, Homo sapiens
  misc_RNA (1)...(19): siRNA sense strand
cgaaugagguguggcagua

SEQ ID NO: 1597194 - RNA, 19 nt, Homo sapiens
  misc_RNA (1)...(19): siRNA sense strand
ggucagcagucuuccauga

SEQ ID NO: 1597195 - RNA, 19 nt, Homo sapiens
  misc_RNA (1)...(19): siRNA sense strand
gaauggacuuggcucugua

SEQ ID NO: 1597196 - RNA, 19 nt, Homo sapiens
  misc_RNA (1)...(19): siRNA sense strand
ggacuuggcucuguaaagg

SEQ ID NO: 1597197 - RNA, 19 nt, Homo sapiens
  misc_RNA (1)...(19): siRNA sense strand
gcagcacacucuaugauca

SEQ ID NO: 1597198 - RNA, 19 nt, Homo sapiens
  misc_RNA (1)...(19): siRNA sense strand
ggaauggacuuggcucugu

SEQ ID NO: 1597199 - RNA, 19 nt, Homo sapiens
  misc_RNA (1)...(19): siRNA sense strand
ccacugauggcuccuauaa

SEQ ID NO: 1597200 - RNA, 19 nt, Homo sapiens
  misc_RNA (1)...(19): siRNA sense strand
gugagcagcuuuccacuuc

SEQ ID NO: 1597201 - RNA, 19 nt, Homo sapiens
  misc_RNA (1)...(19): siRNA sense strand
guagugcccuggcucgaaa

SEQ ID NO: 1597202 - RNA, 19 nt, Homo sapiens
  misc_RNA (1)...(19): siRNA sense strand
gaacugaaacauuugaucu

SEQ ID NO: 1597203 - RNA, 19 nt, Homo sapiens
  misc_RNA (1)...(19): siRNA sense strand
ggacccaguuucugugaau

SEQ ID NO: 1597204 - RNA, 19 nt, Homo sapiens
  misc_RNA (1)...(19): siRNA sense strand
gcacccagaugauguggau

SEQ ID NO: 1597205 - RNA, 19 nt, Homo sapiens
  misc_RNA (1)...(19): siRNA sense strand
ggaggcagcagauggcuuu

SEQ ID NO: 1597206 - RNA, 19 nt, Homo sapiens
  misc_RNA (1)...(19): siRNA sense strand
gaagggaacaguaaauuuu

SEQ ID NO: 1597207 - RNA, 19 nt, Homo sapiens
  misc_RNA (1)...(19): siRNA sense strand
gagaagggaacaguaaauu

SEQ ID NO: 1597208 - RNA, 19 nt, Homo sapiens
  misc_RNA (1)...(19): siRNA sense strand
ugaauaggcugagcuuugu

SEQ ID NO: 1597209 - RNA, 19 nt, Homo sapiens
  misc_RNA (1)...(19): siRNA sense strand
cagacaagcuaaccaucuu

SEQ ID NO: 1597210 - RNA, 19 nt, Homo sapiens
  misc_RNA (1)...(19): siRNA sense strand
gccacagucugaaugguuu

SEQ ID NO: 1597211 - RNA, 19 nt, Homo sapiens
  misc_RNA (1)...(19): siRNA sense strand
ugaaacauuugaucuugga

SEQ ID NO: 1597212 - RNA, 19 nt, Homo sapiens
  misc_RNA (1)...(19): siRNA sense strand
gugaauaggcugagcuuug

SEQ ID NO: 1597213 - RNA, 19 nt, Homo sapiens
  misc_RNA (1)...(19): siRNA sense strand
cagaugauguggauaaacu

SEQ ID NO: 1597214 - RNA, 19 nt, Homo sapiens
  misc_RNA (1)...(19): siRNA sense strand
gaacagaugcaggaaugga

SEQ ID NO: 1597215 - RNA, 19 nt, Homo sapiens
  misc_RNA (1)...(19): siRNA sense strand
ggagaagggaacaguaaau

SEQ ID NO: 1597216 - RNA, 19 nt, Homo sapiens
  misc_RNA (1)...(19): siRNA sense strand
gauaugguacccaccugua

SEQ ID NO: 1597217 - RNA, 19 nt, Homo sapiens
  misc_RNA (1)...(19): siRNA sense strand
ucagaugucuaacgauaag

SEQ ID NO: 1597218 - RNA, 19 nt, Homo sapiens
  misc_RNA (1)...(19): siRNA sense strand
ucagcagucuuccaugaga

SEQ ID NO: 1597219 - RNA, 19 nt, Homo sapiens
  misc_RNA (1)...(19): siRNA sense strand
agaagggaacaguaaauuu

SEQ ID NO: 1597220 - RNA, 19 nt, Homo sapiens
  misc_RNA (1)...(19): siRNA sense strand
aggaacagaugcaggaaug

SEQ ID NO: 1597221 - RNA, 19 nt, Homo sapiens
  misc_RNA (1)...(19): siRNA sense strand
uguaugggcucaaggagau

SEQ ID NO: 1597222 - RNA, 19 nt, Homo sapiens
  misc_RNA (1)...(19): siRNA sense strand
caaggagaucguuuauuug

SEQ ID NO: 1597223 - RNA, 19 nt, Homo sapiens
  misc_RNA (1)...(19): siRNA sense strand
guguuucccucccagauga

SEQ ID NO: 1597224 - RNA, 19 nt, Homo sapiens
  misc_RNA (1)...(19): siRNA sense strand
gcuccuauaagccgucuuu

SEQ ID NO: 1597225 - RNA, 19 nt, Homo sapiens
  misc_RNA (1)...(19): siRNA sense strand
gacccaguuucugugaaua

SEQ ID NO: 1597226 - RNA, 19 nt, Homo sapiens
  misc_RNA (1)...(19): siRNA sense strand
gcucaaggagaucguuuau

SEQ ID NO: 1597227 - RNA, 19 nt, Homo sapiens
  misc_RNA (1)...(19): siRNA sense strand
gauggagaagggaacagua

SEQ ID NO: 1597228 - RNA, 19 nt, Homo sapiens
  misc_RNA (1)...(19): siRNA sense strand
gaauguguaugggcucaag

SEQ ID NO: 1597229 - RNA, 19 nt, Homo sapiens
  misc_RNA (1)...(19): siRNA sense strand
acugaaacauuugaucuug

SEQ ID NO: 1597230 - RNA, 19 nt, Homo sapiens
  misc_RNA (1)...(19): siRNA sense strand
gcauggcaguuucucacau

SEQ ID NO: 1597231 - RNA, 19 nt, Homo sapiens
  misc_RNA (1)...(19): siRNA sense strand
aaaggaaggucagcagucu

SEQ ID NO: 1597232 - RNA, 19 nt, Homo sapiens
  misc_RNA (1)...(19): siRNA sense strand
cgucuuuccucacugauca

SEQ ID NO: 1597233 - RNA, 19 nt, Homo sapiens
  misc_RNA (1)...(19): siRNA sense strand
ugaaccagccacagucuga

SEQ ID NO: 1597234 - RNA, 19 nt, Homo sapiens
  misc_RNA (1)...(19): siRNA sense strand
agacaagcuaaccaucuua

SEQ ID NO: 1597235 - RNA, 19 nt, Homo sapiens
  misc_RNA (1)...(19): siRNA sense strand
ucguuuauuugccgaauga

SEQ ID NO: 1597236 - RNA, 19 nt, Homo sapiens
  misc_RNA (1)...(19): siRNA sense strand
cagcagucuuccaugagaa

SEQ ID NO: 1597237 - RNA, 19 nt, Homo sapiens
  misc_RNA (1)...(19): siRNA sense strand
gaucaggugcacccagaug

SEQ ID NO: 1597238 - RNA, 19 nt, Homo sapiens
  misc_RNA (1)...(19): siRNA sense strand
caggcagggugguguaugu

SEQ ID NO: 1597239 - RNA, 19 nt, Homo sapiens
  misc_RNA (1)...(19): siRNA sense strand
agaacugucagauauggua

SEQ ID NO: 1597240 - RNA, 19 nt, Homo sapiens
  misc_RNA (1)...(19): siRNA sense strand
gagcagcuuuccacuucag

SEQ ID NO: 1597241 - RNA, 19 nt, Homo sapiens
  misc_RNA (1)...(19): siRNA sense strand
ggcaguuucucacaugaag

SEQ ID NO: 1597242 - RNA, 19 nt, Homo sapiens
  misc_RNA (1)...(19): siRNA sense strand
ggaacugaaacauuugauc

SEQ ID NO: 1597243 - RNA, 19 nt, Homo sapiens
  misc_RNA (1)...(19): siRNA sense strand
gaucguuuauuugccgaau

SEQ ID NO: 1597244 - RNA, 19 nt, Homo sapiens
  misc_RNA (1)...(19): siRNA sense strand
gaugauguggauaaacuuc

SEQ ID NO: 1597245 - RNA, 19 nt, Homo sapiens
  misc_RNA (1)...(19): siRNA sense strand
gaaccagccacagucugaa

SEQ ID NO: 1597246 - RNA, 19 nt, Homo sapiens
  misc_RNA (1)...(19): siRNA sense strand
acugauggcuccuauaagc

SEQ ID NO: 1597247 - RNA, 19 nt, Homo sapiens
  misc_RNA (1)...(19): siRNA sense strand
cagccuacaucacagaacu

SEQ ID NO: 1597248 - RNA, 19 nt, Homo sapiens
  misc_RNA (1)...(19): siRNA sense strand
ccacugcacaggcuacauc

SEQ ID NO: 1597249 - RNA, 19 nt, Homo sapiens
  misc_RNA (1)...(19): siRNA sense strand
caagguggaggagccauug

SEQ ID NO: 1597250 - RNA, 19 nt, Homo sapiens
  misc_RNA (1)...(19): siRNA sense strand
ccagacaagcuaaccaucu

SEQ ID NO: 1597251 - RNA, 19 nt, Homo sapiens
  misc_RNA (1)...(19): siRNA sense strand
gccauugccucuggaaacu

SEQ ID NO: 1597252 - RNA, 19 nt, Homo sapiens
  misc_RNA (1)...(19): siRNA sense strand
gcagcuuuccacuucagaa

SEQ ID NO: 1597253 - RNA, 19 nt, Homo sapiens
  misc_RNA (1)...(19): siRNA sense strand
aaacuucgugagcagcuuu

SEQ ID NO: 1597254 - RNA, 19 nt, Homo sapiens
  misc_RNA (1)...(19): siRNA sense strand
ggcucaaggagaucguuua

SEQ ID NO: 1597255 - RNA, 19 nt, Homo sapiens
  misc_RNA (1)...(19): siRNA sense strand
augaucagaugucuaacga

SEQ ID NO: 1597256 - RNA, 19 nt, Homo sapiens
  misc_RNA (1)...(19): siRNA sense strand
gaggaacagaugcaggaau

SEQ ID NO: 1597257 - RNA, 19 nt, Homo sapiens
  misc_RNA (1)...(19): siRNA sense strand
gauggcuuucuguuuauug

SEQ ID NO: 1597258 - RNA, 19 nt, Homo sapiens
  misc_RNA (1)...(19): siRNA sense strand
acccagaugauguggauaa

SEQ ID NO: 1597259 - RNA, 19 nt, Homo sapiens
  misc_RNA (1)...(19): siRNA sense strand
gaaacucuggaccuggaau

SEQ ID NO: 1597260 - RNA, 19 nt, Homo sapiens
  misc_RNA (1)...(19): siRNA sense strand
agacaggcaggguggugua

SEQ ID NO: 1597261 - RNA, 19 nt, Homo sapiens
  misc_RNA (1)...(19): siRNA sense strand
ugacagccuacaucacaga

SEQ ID NO: 1597262 - RNA, 19 nt, Homo sapiens
  misc_RNA (1)...(19): siRNA sense strand
caggaacugaaacauuuga

SEQ ID NO: 1597263 - RNA, 19 nt, Homo sapiens
  misc_RNA (1)...(19): siRNA sense strand
uaagccgucuuuccucacu

SEQ ID NO: 1597264 - RNA, 19 nt, Homo sapiens
  misc_RNA (1)...(19): siRNA sense strand
ggauuuugaugaugaugga

SEQ ID NO: 1597265 - RNA, 19 nt, Homo sapiens
  misc_RNA (1)...(19): siRNA sense strand
gggcucaaggagaucguuu

SEQ ID NO: 1597266 - RNA, 19 nt, Homo sapiens
  misc_RNA (1)...(19): siRNA sense strand
cccagaugauguggauaaa

SEQ ID NO: 1597267 - RNA, 19 nt, Homo sapiens
  misc_RNA (1)...(19): siRNA sense strand
gaucagaugucuaacgaua

SEQ ID NO: 1597268 - RNA, 19 nt, Homo sapiens
  misc_RNA (1)...(19): siRNA sense strand
ucaaggagaucguuuauuu

SEQ ID NO: 1597269 - RNA, 19 nt, Homo sapiens
  misc_RNA (1)...(19): siRNA sense strand
cgaaugagguguggcagua

SEQ ID NO: 1597270 - RNA, 19 nt, Homo sapiens
  misc_RNA (1)...(19): siRNA sense strand
cuacaacaaugaagaauuc

SEQ ID NO: 1597271 - RNA, 19 nt, Homo sapiens
  misc_RNA (1)...(19): siRNA sense strand
ggucagcagucuuccauga

SEQ ID NO: 1597272 - RNA, 19 nt, Homo sapiens
  misc_RNA (1)...(19): siRNA sense strand
gaauggacuuggcucugua

SEQ ID NO: 1597273 - RNA, 19 nt, Homo sapiens
  misc_RNA (1)...(19): siRNA sense strand
gaagaauucccugaucuaa

SEQ ID NO: 1597274 - RNA, 19 nt, Homo sapiens
  misc_RNA (1)...(19): siRNA sense strand
ggacuuggcucuguaaagg

SEQ ID NO: 1597275 - RNA, 19 nt, Homo sapiens
  misc_RNA (1)...(19): siRNA sense strand
gcagcacacucuaugauca

SEQ ID NO: 1597276 - RNA, 19 nt, Homo sapiens
  misc_RNA (1)...(19): siRNA sense strand
ggaauggacuuggcucugu

SEQ ID NO: 1597277 - RNA, 19 nt, Homo sapiens
  misc_RNA (1)...(19): siRNA sense strand
ccacugauggcuccuauaa

SEQ ID NO: 1597278 - RNA, 19 nt, Homo sapiens
  misc_RNA (1)...(19): siRNA sense strand
gugagcagcuuuccacuuc

SEQ ID NO: 1597279 - RNA, 19 nt, Homo sapiens
  misc_RNA (1)...(19): siRNA sense strand
guagugcccuggcucgaaa

SEQ ID NO: 1597280 - RNA, 19 nt, Homo sapiens
  misc_RNA (1)...(19): siRNA sense strand
gaacugaaacauuugaucu

SEQ ID NO: 1597281 - RNA, 19 nt, Homo sapiens
  misc_RNA (1)...(19): siRNA sense strand
ggacccaguuucugugaau

SEQ ID NO: 1597282 - RNA, 19 nt, Homo sapiens
  misc_RNA (1)...(19): siRNA sense strand
gcacccagaugauguggau

SEQ ID NO: 1597283 - RNA, 19 nt, Homo sapiens
  misc_RNA (1)...(19): siRNA sense strand
ggaggcagcagauggcuuu

SEQ ID NO: 1597284 - RNA, 19 nt, Homo sapiens
  misc_RNA (1)...(19): siRNA sense strand
gaagggaacaguaaauuuu

SEQ ID NO: 1597285 - RNA, 19 nt, Homo sapiens
  misc_RNA (1)...(19): siRNA sense strand
gagaagggaacaguaaauu

SEQ ID NO: 1597286 - RNA, 19 nt, Homo sapiens
  misc_RNA (1)...(19): siRNA sense strand
ugaauaggcugagcuuugu

SEQ ID NO: 1597287 - RNA, 19 nt, Homo sapiens
  misc_RNA (1)...(19): siRNA sense strand
cagacaagcuaaccaucuu

SEQ ID NO: 1597288 - RNA, 19 nt, Homo sapiens
  misc_RNA (1)...(19): siRNA sense strand
gccacagucugaaugguuu

SEQ ID NO: 1597289 - RNA, 19 nt, Homo sapiens
  misc_RNA (1)...(19): siRNA sense strand
ugaaacauuugaucuugga

SEQ ID NO: 1597290 - RNA, 19 nt, Homo sapiens
  misc_RNA (1)...(19): siRNA sense strand
gugaauaggcugagcuuug

SEQ ID NO: 1597291 - RNA, 19 nt, Homo sapiens
  misc_RNA (1)...(19): siRNA sense strand
cagaugauguggauaaacu

SEQ ID NO: 1597292 - RNA, 19 nt, Homo sapiens
  misc_RNA (1)...(19): siRNA sense strand
caacagcuacaacaaugaa

SEQ ID NO: 1597293 - RNA, 19 nt, Homo sapiens
  misc_RNA (1)...(19): siRNA sense strand
gagcaacagcuacaacaau

SEQ ID NO: 1597294 - RNA, 19 nt, Homo sapiens
  misc_RNA (1)...(19): siRNA sense strand
gaacagaugcaggaaugga

SEQ ID NO: 1597295 - RNA, 19 nt, Homo sapiens
  misc_RNA (1)...(19): siRNA sense strand
ggagaagggaacaguaaau

SEQ ID NO: 1597296 - RNA, 19 nt, Homo sapiens
  misc_RNA (1)...(19): siRNA sense strand
agaauucccugaucuaacu

SEQ ID NO: 1597297 - RNA, 19 nt, Homo sapiens
  misc_RNA (1)...(19): siRNA sense strand
gagaucagagcaacagcua

SEQ ID NO: 1597298 - RNA, 19 nt, Homo sapiens
  misc_RNA (1)...(19): siRNA sense strand
gauaugguacccaccugua

SEQ ID NO: 1597299 - RNA, 19 nt, Homo sapiens
  misc_RNA (1)...(19): siRNA sense strand
gaucagagcaacagcuaca

SEQ ID NO: 1597300 - RNA, 19 nt, Homo sapiens
  misc_RNA (1)...(19): siRNA sense strand
ucagaugucuaacgauaag

SEQ ID NO: 1597301 - RNA, 19 nt, Homo sapiens
  misc_RNA (1)...(19): siRNA sense strand
ucagcagucuuccaugaga

SEQ ID NO: 1597302 - RNA, 19 nt, Homo sapiens
  misc_RNA (1)...(19): siRNA sense strand
agaagggaacaguaaauuu

SEQ ID NO: 1597303 - RNA, 19 nt, Homo sapiens
  misc_RNA (1)...(19): siRNA sense strand
aggaacagaugcaggaaug

SEQ ID NO: 1597304 - RNA, 19 nt, Homo sapiens
  misc_RNA (1)...(19): siRNA sense strand
uguaugggcucaaggagau

SEQ ID NO: 1597305 - RNA, 19 nt, Homo sapiens
  misc_RNA (1)...(19): siRNA sense strand
gcaacagcuacaacaauga

SEQ ID NO: 1597306 - RNA, 19 nt, Homo sapiens
  misc_RNA (1)...(19): siRNA sense strand
caaggagaucguuuauuug

SEQ ID NO: 1597307 - RNA, 19 nt, Homo sapiens
  misc_RNA (1)...(19): siRNA sense strand
ugaagaauucccugaucua

SEQ ID NO: 1597308 - RNA, 19 nt, Homo sapiens
  misc_RNA (1)...(19): siRNA sense strand
gcuacaacaaugaagaauu

SEQ ID NO: 1597309 - RNA, 19 nt, Homo sapiens
  misc_RNA (1)...(19): siRNA sense strand
guguuucccucccagauga

SEQ ID NO: 1597310 - RNA, 19 nt, Homo sapiens
  misc_RNA (1)...(19): siRNA sense strand
gcuccuauaagccgucuuu

SEQ ID NO: 1597311 - RNA, 19 nt, Homo sapiens
  misc_RNA (1)...(19): siRNA sense strand
gacccaguuucugugaaua

SEQ ID NO: 1597312 - RNA, 19 nt, Homo sapiens
  misc_RNA (1)...(19): siRNA sense strand
gcucaaggagaucguuuau

SEQ ID NO: 1597313 - RNA, 19 nt, Homo sapiens
  misc_RNA (1)...(19): siRNA sense strand
acugaaacauuugaucuug

SEQ ID NO: 1597314 - RNA, 19 nt, Homo sapiens
  misc_RNA (1)...(19): siRNA sense strand
ucccugaucuaacuauguu

SEQ ID NO: 1597315 - RNA, 19 nt, Homo sapiens
  misc_RNA (1)...(19): siRNA sense strand
gauggagaagggaacagua

SEQ ID NO: 1597316 - RNA, 19 nt, Homo sapiens
  misc_RNA (1)...(19): siRNA sense strand
gaauguguaugggcucaag

SEQ ID NO: 1597317 - RNA, 19 nt, Homo sapiens
  misc_RNA (1)...(19): siRNA sense strand
gcauggcaguuucucacau

SEQ ID NO: 1597318 - RNA, 19 nt, Homo sapiens
  misc_RNA (1)...(19): siRNA sense strand
agcaacagcuacaacaaug

SEQ ID NO: 1597319 - RNA, 19 nt, Homo sapiens
  misc_RNA (1)...(19): siRNA sense strand
aaaggaaggucagcagucu

SEQ ID NO: 1597320 - RNA, 19 nt, Homo sapiens
  misc_RNA (1)...(19): siRNA sense strand
cgucuuuccucacugauca

SEQ ID NO: 1597321 - RNA, 19 nt, Homo sapiens
  misc_RNA (1)...(19): siRNA sense strand
ugaaccagccacagucuga

SEQ ID NO: 1597322 - RNA, 19 nt, Homo sapiens
  misc_RNA (1)...(19): siRNA sense strand
agacaagcuaaccaucuua

SEQ ID NO: 1597323 - RNA, 19 nt, Homo sapiens
  misc_RNA (1)...(19): siRNA sense strand
ucguuuauuugccgaauga

SEQ ID NO: 1597324 - RNA, 19 nt, Homo sapiens
  misc_RNA (1)...(19): siRNA sense strand
cagcagucuuccaugagaa

SEQ ID NO: 1597325 - RNA, 19 nt, Homo sapiens
  misc_RNA (1)...(19): siRNA sense strand
gaucaggugcacccagaug

SEQ ID NO: 1597326 - RNA, 19 nt, Homo sapiens
  misc_RNA (1)...(19): siRNA sense strand
caggcagggugguguaugu

SEQ ID NO: 1597327 - RNA, 19 nt, Homo sapiens
  misc_RNA (1)...(19): siRNA sense strand
agaacugucagauauggua

SEQ ID NO: 1597328 - RNA, 19 nt, Homo sapiens
  misc_RNA (1)...(19): siRNA sense strand
gagcagcuuuccacuucag

SEQ ID NO: 1597329 - RNA, 19 nt, Homo sapiens
  misc_RNA (1)...(19): siRNA sense strand
ggcaguuucucacaugaag

SEQ ID NO: 1597330 - RNA, 19 nt, Homo sapiens
  misc_RNA (1)...(19): siRNA sense strand
aaugaagaauucccugauc

SEQ ID NO: 1597331 - RNA, 19 nt, Homo sapiens
  misc_RNA (1)...(19): siRNA sense strand
ggaacugaaacauuugauc

SEQ ID NO: 1597332 - RNA, 19 nt, Homo sapiens
  misc_RNA (1)...(19): siRNA sense strand
gaucguuuauuugccgaau

SEQ ID NO: 1597333 - RNA, 19 nt, Homo sapiens
  misc_RNA (1)...(19): siRNA sense strand
gaugauguggauaaacuuc

SEQ ID NO: 1597334 - RNA, 19 nt, Homo sapiens
  misc_RNA (1)...(19): siRNA sense strand
cagcuacaacaaugaagaa

SEQ ID NO: 1597335 - RNA, 19 nt, Homo sapiens
  misc_RNA (1)...(19): siRNA sense strand
gaaccagccacagucugaa

SEQ ID NO: 1597336 - RNA, 19 nt, Homo sapiens
  misc_RNA (1)...(19): siRNA sense strand
acugauggcuccuauaagc

SEQ ID NO: 1597337 - RNA, 19 nt, Homo sapiens
  misc_RNA (1)...(19): siRNA sense strand
cagccuacaucacagaacu

SEQ ID NO: 1597338 - RNA, 19 nt, Homo sapiens
  misc_RNA (1)...(19): siRNA sense strand
ccacugcacaggcuacauc

SEQ ID NO: 1597339 - RNA, 19 nt, Homo sapiens
  misc_RNA (1)...(19): siRNA sense strand
caaugaagaauucccugau

SEQ ID NO: 1597340 - RNA, 19 nt, Homo sapiens
  misc_RNA (1)...(19): siRNA sense strand
ccagacaagcuaaccaucu

SEQ ID NO: 1597341 - RNA, 19 nt, Homo sapiens
  misc_RNA (1)...(19): siRNA sense strand
caagguggaggagccauug

SEQ ID NO: 1597342 - RNA, 19 nt, Homo sapiens
  misc_RNA (1)...(19): siRNA sense strand
gccauugccucuggaaacu

SEQ ID NO: 1597343 - RNA, 19 nt, Homo sapiens
  misc_RNA (1)...(19): siRNA sense strand
gcagcuuuccacuucagaa

SEQ ID NO: 1597344 - RNA, 19 nt, Homo sapiens
  misc_RNA (1)...(19): siRNA sense strand
aaacuucgugagcagcuuu

SEQ ID NO: 1597345 - RNA, 19 nt, Homo sapiens
  misc_RNA (1)...(19): siRNA sense strand
augaucagaugucuaacga

SEQ ID NO: 1597346 - RNA, 19 nt, Homo sapiens
  misc_RNA (1)...(19): siRNA sense strand
gaggaacagaugcaggaau

SEQ ID NO: 1597347 - RNA, 19 nt, Homo sapiens
  misc_RNA (1)...(19): siRNA sense strand
ggcucaaggagaucguuua

SEQ ID NO: 1597348 - RNA, 19 nt, Homo sapiens
  misc_RNA (1)...(19): siRNA sense strand
gauggcuuucuguuuauug

SEQ ID NO: 1597349 - RNA, 19 nt, Homo sapiens
  misc_RNA (1)...(19): siRNA sense strand
gaaacucuggaccuggaau

SEQ ID NO: 1597350 - RNA, 19 nt, Homo sapiens
  misc_RNA (1)...(19): siRNA sense strand
acccagaugauguggauaa

SEQ ID NO: 1597351 - RNA, 19 nt, Homo sapiens
  misc_RNA (1)...(19): siRNA sense strand
agacaggcaggguggugua

SEQ ID NO: 1597352 - RNA, 19 nt, Homo sapiens
  misc_RNA (1)...(19): siRNA sense strand
ugacagccuacaucacaga

SEQ ID NO: 1597353 - RNA, 19 nt, Homo sapiens
  misc_RNA (1)...(19): siRNA sense strand
gaauucccugaucuaacua

SEQ ID NO: 1597354 - RNA, 19 nt, Homo sapiens
  misc_RNA (1)...(19): siRNA sense strand
cagagcaacagcuacaaca

SEQ ID NO: 1597355 - RNA, 19 nt, Homo sapiens
  misc_RNA (1)...(19): siRNA sense strand
caggaacugaaacauuuga

SEQ ID NO: 1597356 - RNA, 19 nt, Homo sapiens
  misc_RNA (1)...(19): siRNA sense strand
uaagccgucuuuccucacu

SEQ ID NO: 1597357 - RNA, 19 nt, Homo sapiens
  misc_RNA (1)...(19): siRNA sense strand
cccagaugauguggauaaa

SEQ ID NO: 1597358 - RNA, 19 nt, Homo sapiens
  misc_RNA (1)...(19): siRNA sense strand
ggauuuugaugaugaugga

SEQ ID NO: 1597359 - RNA, 19 nt, Homo sapiens
  misc_RNA (1)...(19): siRNA sense strand
uccaggagaugcuguccau

SEQ ID NO: 1597360 - RNA, 19 nt, Homo sapiens
  misc_RNA (1)...(19): siRNA sense strand
gggcucaaggagaucguuu

SEQ ID NO: 1597361 - RNA, 19 nt, Homo sapiens
  misc_RNA (1)...(19): siRNA sense strand
ccaaguguccuccaaagug

SEQ ID NO: 1597362 - RNA, 19 nt, Homo sapiens
  misc_RNA (1)...(19): siRNA sense strand
ccaaagugccgaccucagu

SEQ ID NO: 1597363 - RNA, 19 nt, Homo sapiens
  misc_RNA (1)...(19): siRNA sense strand
ccacccaaguguccuccaa

SEQ ID NO: 1597364 - RNA, 19 nt, Homo sapiens
  misc_RNA (1)...(19): siRNA sense strand
caaaaugcccacccaagug

SEQ ID NO: 1597365 - RNA, 19 nt, Homo sapiens
  misc_RNA (1)...(19): siRNA sense strand
caaguguccucccaagugu

SEQ ID NO: 1597366 - RNA, 19 nt, Homo sapiens
  misc_RNA (1)...(19): siRNA sense strand
ccaaguguccucccaagug

SEQ ID NO: 1597367 - RNA, 19 nt, Homo sapiens
  misc_RNA (1)...(19): siRNA sense strand
gugcccagcuccauguuuc

SEQ ID NO: 1597368 - RNA, 19 nt, Homo sapiens
  misc_RNA (1)...(19): siRNA sense strand
cgacugcugugagagugaa

SEQ ID NO: 1597369 - RNA, 19 nt, Homo sapiens
  misc_RNA (1)...(19): siRNA sense strand
caaaauguccaccuaagug

SEQ ID NO: 1597370 - RNA, 19 nt, Homo sapiens
  misc_RNA (1)...(19): siRNA sense strand
ucccugcagucucuucuug

SEQ ID NO: 1597371 - RNA, 19 nt, Homo sapiens
  misc_RNA (1)...(19): siRNA sense strand
caaauguccucccaagugu

SEQ ID NO: 1597372 - RNA, 19 nt, Homo sapiens
  misc_RNA (1)...(19): siRNA sense strand
ccaaauguccucccaagug

SEQ ID NO: 1597373 - RNA, 19 nt, Homo sapiens
  misc_RNA (1)...(19): siRNA sense strand
caaaauguccaccuaagug

SEQ ID NO: 1597374 - RNA, 19 nt, Homo sapiens
  misc_RNA (1)...(19): siRNA sense strand
gcaaagagcccagcacagu

SEQ ID NO: 1597375 - RNA, 19 nt, Homo sapiens
  misc_RNA (1)...(19): siRNA sense strand
ccaagugcccugcaaagag

SEQ ID NO: 1597376 - RNA, 19 nt, Homo sapiens
  misc_RNA (1)...(19): siRNA sense strand
aaagagcccagcacagugu

SEQ ID NO: 1597377 - RNA, 19 nt, Homo sapiens
  misc_RNA (1)...(19): siRNA sense strand
ucacugagcugccggacua

SEQ ID NO: 1597378 - RNA, 19 nt, Homo sapiens
  misc_RNA (1)...(19): siRNA sense strand
acaacaagaucuccuuuaa

SEQ ID NO: 1597379 - RNA, 19 nt, Homo sapiens
  misc_RNA (1)...(19): siRNA sense strand
ccaaggcucuccuccauca

SEQ ID NO: 1597380 - RNA, 19 nt, Homo sapiens
  misc_RNA (1)...(19): siRNA sense strand
gaacgauauugaacagcuu

SEQ ID NO: 1597381 - RNA, 19 nt, Homo sapiens
  misc_RNA (1)...(19): siRNA sense strand
ggacaaucaguauguggua

SEQ ID NO: 1597382 - RNA, 19 nt, Homo sapiens
  misc_RNA (1)...(19): siRNA sense strand
cgagauaguugcccucaag

SEQ ID NO: 1597383 - RNA, 19 nt, Homo sapiens
  misc_RNA (1)...(19): siRNA sense strand
caagaacgauauugaacag

SEQ ID NO: 1597384 - RNA, 19 nt, Homo sapiens
  misc_RNA (1)...(19): siRNA sense strand
gcaagaacgauauugaaca

SEQ ID NO: 1597385 - RNA, 19 nt, Homo sapiens
  misc_RNA (1)...(19): siRNA sense strand
ucaagaagguggcccuaag

SEQ ID NO: 1597386 - RNA, 19 nt, Homo sapiens
  misc_RNA (1)...(19): siRNA sense strand
uggccuggcucgagucuuu

SEQ ID NO: 1597387 - RNA, 19 nt, Homo sapiens
  misc_RNA (1)...(19): siRNA sense strand
gcuuugugcuggccuuuga

SEQ ID NO: 1597388 - RNA, 19 nt, Homo sapiens
  misc_RNA (1)...(19): siRNA sense strand
gggcaagaacgauauugaa

SEQ ID NO: 1597389 - RNA, 19 nt, Homo sapiens
  misc_RNA (1)...(19): siRNA sense strand
caucugagcugccgauucc

SEQ ID NO: 1597390 - RNA, 19 nt, Homo sapiens
  misc_RNA (1)...(19): siRNA sense strand
aggcacaggucaagagcua

SEQ ID NO: 1597391 - RNA, 19 nt, Homo sapiens
  misc_RNA (1)...(19): siRNA sense strand
uugaacagcuuugcuaugu

SEQ ID NO: 1597392 - RNA, 19 nt, Homo sapiens
  misc_RNA (1)...(19): siRNA sense strand
ggaggacaaucaguaugug

SEQ ID NO: 1597393 - RNA, 19 nt, Homo sapiens
  misc_RNA (1)...(19): siRNA sense strand
gauaguugcccucaagaag

SEQ ID NO: 1597394 - RNA, 19 nt, Homo sapiens
  misc_RNA (1)...(19): siRNA sense strand
uuaaggcucugcaggagau

SEQ ID NO: 1597395 - RNA, 19 nt, Homo sapiens
  misc_RNA (1)...(19): siRNA sense strand
caacaagaucuccuuuaag

SEQ ID NO: 1597396 - RNA, 19 nt, Homo sapiens
  misc_RNA (1)...(19): siRNA sense strand
gcuaugugcuucgcaucuu

SEQ ID NO: 1597397 - RNA, 19 nt, Homo sapiens
  misc_RNA (1)...(19): siRNA sense strand
gauggaggacaaucaguau

SEQ ID NO: 1597398 - RNA, 19 nt, Homo sapiens
  misc_RNA (1)...(19): siRNA sense strand
gcagccgccucuacacaca

SEQ ID NO: 1597399 - RNA, 19 nt, Homo sapiens
  misc_RNA (1)...(19): siRNA sense strand
gaggacggcuucccuaacc

SEQ ID NO: 1597400 - RNA, 19 nt, Homo sapiens
  misc_RNA (1)...(19): siRNA sense strand
uacaacaagaucuccuuua

SEQ ID NO: 1597401 - RNA, 19 nt, Homo sapiens
  misc_RNA (1)...(19): siRNA sense strand
ugcaggagauggaggacaa

SEQ ID NO: 1597402 - RNA, 19 nt, Homo sapiens
  misc_RNA (1)...(19): siRNA sense strand
agauggaggacaaucagua

SEQ ID NO: 1597403 - RNA, 19 nt, Homo sapiens
  misc_RNA (1)...(19): siRNA sense strand
cuacaacaagaucuccuuu

SEQ ID NO: 1597404 - RNA, 19 nt, Homo sapiens
  misc_RNA (1)...(19): siRNA sense strand
gagcugauucggcccuuca

SEQ ID NO: 1597405 - RNA, 19 nt, Homo sapiens
  misc_RNA (1)...(19): siRNA sense strand
caaucaguaugugguacaa

SEQ ID NO: 1597406 - RNA, 19 nt, Homo sapiens
  misc_RNA (1)...(19): siRNA sense strand
caagagcuaccugcagaug

SEQ ID NO: 1597407 - RNA, 19 nt, Homo sapiens
  misc_RNA (1)...(19): siRNA sense strand
gugcuggccuuugaguuca

SEQ ID NO: 1597408 - RNA, 19 nt, Homo sapiens
  misc_RNA (1)...(19): siRNA sense strand
ggagauggaggacaaucag

SEQ ID NO: 1597409 - RNA, 19 nt, Homo sapiens
  misc_RNA (1)...(19): siRNA sense strand
ugaacagcuuugcuaugug

SEQ ID NO: 1597410 - RNA, 19 nt, Homo sapiens
  misc_RNA (1)...(19): siRNA sense strand
gagauaguugcccucaaga

SEQ ID NO: 1597411 - RNA, 19 nt, Homo sapiens
  misc_RNA (1)...(19): siRNA sense strand
cuaugugcuucgcaucuug

SEQ ID NO: 1597412 - RNA, 19 nt, Homo sapiens
  misc_RNA (1)...(19): siRNA sense strand
cuugaggagucgcuguuga

SEQ ID NO: 1597413 - RNA, 19 nt, Homo sapiens
  misc_RNA (1)...(19): siRNA sense strand
ggugcugccugacgucucu

SEQ ID NO: 1597414 - RNA, 19 nt, Homo sapiens
  misc_RNA (1)...(19): siRNA sense strand
gcgagauaguugcccucaa

SEQ ID NO: 1597415 - RNA, 19 nt, Homo sapiens
  misc_RNA (1)...(19): siRNA sense strand
gcucaagauagcggacuuu

SEQ ID NO: 1597416 - RNA, 19 nt, Homo sapiens
  misc_RNA (1)...(19): siRNA sense strand
uaguugcccucaagaaggu

SEQ ID NO: 1597417 - RNA, 19 nt, Homo sapiens
  misc_RNA (1)...(19): siRNA sense strand
aggcucuccuccaucagua

SEQ ID NO: 1597418 - RNA, 19 nt, Homo sapiens
  misc_RNA (1)...(19): siRNA sense strand
ggcaagaacgauauugaac

SEQ ID NO: 1597419 - RNA, 19 nt, Homo sapiens
  misc_RNA (1)...(19): siRNA sense strand
caagaagguggcccuaagg

SEQ ID NO: 1597420 - RNA, 19 nt, Homo sapiens
  misc_RNA (1)...(19): siRNA sense strand
uggaucugcugggucaauu

SEQ ID NO: 1597421 - RNA, 19 nt, Homo sapiens
  misc_RNA (1)...(19): siRNA sense strand
guacaucgggaccugaaac

SEQ ID NO: 1597422 - RNA, 19 nt, Homo sapiens
  misc_RNA (1)...(19): siRNA sense strand
ggaggacggcuucccuaac

SEQ ID NO: 1597423 - RNA, 19 nt, Homo sapiens
  misc_RNA (1)...(19): siRNA sense strand
auauugaacagcuuugcua

SEQ ID NO: 1597424 - RNA, 19 nt, Homo sapiens
  misc_RNA (1)...(19): siRNA sense strand
ucacugagcugccggacua

SEQ ID NO: 1597425 - RNA, 19 nt, Homo sapiens
  misc_RNA (1)...(19): siRNA sense strand
acaacaagaucuccuuuaa

SEQ ID NO: 1597426 - RNA, 19 nt, Homo sapiens
  misc_RNA (1)...(19): siRNA sense strand
ccaaggcucuccuccauca

SEQ ID NO: 1597427 - RNA, 19 nt, Homo sapiens
  misc_RNA (1)...(19): siRNA sense strand
gaacgauauugaacagcuu

SEQ ID NO: 1597428 - RNA, 19 nt, Homo sapiens
  misc_RNA (1)...(19): siRNA sense strand
ggacaaucaguauguggua

SEQ ID NO: 1597429 - RNA, 19 nt, Homo sapiens
  misc_RNA (1)...(19): siRNA sense strand
cgagauaguugcccucaag

SEQ ID NO: 1597430 - RNA, 19 nt, Homo sapiens
  misc_RNA (1)...(19): siRNA sense strand
caagaacgauauugaacag

SEQ ID NO: 1597431 - RNA, 19 nt, Homo sapiens
  misc_RNA (1)...(19): siRNA sense strand
gcaagaacgauauugaaca

SEQ ID NO: 1597432 - RNA, 19 nt, Homo sapiens
  misc_RNA (1)...(19): siRNA sense strand
ucaagaagguggcccuaag

SEQ ID NO: 1597433 - RNA, 19 nt, Homo sapiens
  misc_RNA (1)...(19): siRNA sense strand
uggccuggcucgagucuuu

SEQ ID NO: 1597434 - RNA, 19 nt, Homo sapiens
  misc_RNA (1)...(19): siRNA sense strand
gcuuugugcuggccuuuga

SEQ ID NO: 1597435 - RNA, 19 nt, Homo sapiens
  misc_RNA (1)...(19): siRNA sense strand
gggcaagaacgauauugaa

SEQ ID NO: 1597436 - RNA, 19 nt, Homo sapiens
  misc_RNA (1)...(19): siRNA sense strand
caucugagcugccgauucc

SEQ ID NO: 1597437 - RNA, 19 nt, Homo sapiens
  misc_RNA (1)...(19): siRNA sense strand
aggcacaggucaagagcua

SEQ ID NO: 1597438 - RNA, 19 nt, Homo sapiens
  misc_RNA (1)...(19): siRNA sense strand
uugaacagcuuugcuaugu

SEQ ID NO: 1597439 - RNA, 19 nt, Homo sapiens
  misc_RNA (1)...(19): siRNA sense strand
ggaggacaaucaguaugug

SEQ ID NO: 1597440 - RNA, 19 nt, Homo sapiens
  misc_RNA (1)...(19): siRNA sense strand
gauaguugcccucaagaag

SEQ ID NO: 1597441 - RNA, 19 nt, Homo sapiens
  misc_RNA (1)...(19): siRNA sense strand
uuaaggcucugcaggagau

SEQ ID NO: 1597442 - RNA, 19 nt, Homo sapiens
  misc_RNA (1)...(19): siRNA sense strand
caacaagaucuccuuuaag

SEQ ID NO: 1597443 - RNA, 19 nt, Homo sapiens
  misc_RNA (1)...(19): siRNA sense strand
gcuaugugcuucgcaucuu

SEQ ID NO: 1597444 - RNA, 19 nt, Homo sapiens
  misc_RNA (1)...(19): siRNA sense strand
gauggaggacaaucaguau

SEQ ID NO: 1597445 - RNA, 19 nt, Homo sapiens
  misc_RNA (1)...(19): siRNA sense strand
gcagccgccucuacacaca

SEQ ID NO: 1597446 - RNA, 19 nt, Homo sapiens
  misc_RNA (1)...(19): siRNA sense strand
gaggacggcuucccuaacc

SEQ ID NO: 1597447 - RNA, 19 nt, Homo sapiens
  misc_RNA (1)...(19): siRNA sense strand
uacaacaagaucuccuuua

SEQ ID NO: 1597448 - RNA, 19 nt, Homo sapiens
  misc_RNA (1)...(19): siRNA sense strand
ugcaggagauggaggacaa

SEQ ID NO: 1597449 - RNA, 19 nt, Homo sapiens
  misc_RNA (1)...(19): siRNA sense strand
agauggaggacaaucagua

SEQ ID NO: 1597450 - RNA, 19 nt, Homo sapiens
  misc_RNA (1)...(19): siRNA sense strand
cuacaacaagaucuccuuu

SEQ ID NO: 1597451 - RNA, 19 nt, Homo sapiens
  misc_RNA (1)...(19): siRNA sense strand
gagcugauucggcccuuca

SEQ ID NO: 1597452 - RNA, 19 nt, Homo sapiens
  misc_RNA (1)...(19): siRNA sense strand
caaucaguaugugguacaa

SEQ ID NO: 1597453 - RNA, 19 nt, Homo sapiens
  misc_RNA (1)...(19): siRNA sense strand
caagagcuaccugcagaug

SEQ ID NO: 1597454 - RNA, 19 nt, Homo sapiens
  misc_RNA (1)...(19): siRNA sense strand
gugcuggccuuugaguuca

SEQ ID NO: 1597455 - RNA, 19 nt, Homo sapiens
  misc_RNA (1)...(19): siRNA sense strand
ggagauggaggacaaucag

SEQ ID NO: 1597456 - RNA, 19 nt, Homo sapiens
  misc_RNA (1)...(19): siRNA sense strand
ugaacagcuuugcuaugug

SEQ ID NO: 1597457 - RNA, 19 nt, Homo sapiens
  misc_RNA (1)...(19): siRNA sense strand
gagauaguugcccucaaga

SEQ ID NO: 1597458 - RNA, 19 nt, Homo sapiens
  misc_RNA (1)...(19): siRNA sense strand
cuaugugcuucgcaucuug

SEQ ID NO: 1597459 - RNA, 19 nt, Homo sapiens
  misc_RNA (1)...(19): siRNA sense strand
cuugaggagucgcuguuga

SEQ ID NO: 1597460 - RNA, 19 nt, Homo sapiens
  misc_RNA (1)...(19): siRNA sense strand
ggugcugccugacgucucu

SEQ ID NO: 1597461 - RNA, 19 nt, Homo sapiens
  misc_RNA (1)...(19): siRNA sense strand
gcgagauaguugcccucaa

SEQ ID NO: 1597462 - RNA, 19 nt, Homo sapiens
  misc_RNA (1)...(19): siRNA sense strand
gcucaagauagcggacuuu

SEQ ID NO: 1597463 - RNA, 19 nt, Homo sapiens
  misc_RNA (1)...(19): siRNA sense strand
uaguugcccucaagaaggu

SEQ ID NO: 1597464 - RNA, 19 nt, Homo sapiens
  misc_RNA (1)...(19): siRNA sense strand
aggcucuccuccaucagua

SEQ ID NO: 1597465 - RNA, 19 nt, Homo sapiens
  misc_RNA (1)...(19): siRNA sense strand
ggcaagaacgauauugaac

SEQ ID NO: 1597466 - RNA, 19 nt, Homo sapiens
  misc_RNA (1)...(19): siRNA sense strand
caagaagguggcccuaagg

SEQ ID NO: 1597467 - RNA, 19 nt, Homo sapiens
  misc_RNA (1)...(19): siRNA sense strand
uggaucugcugggucaauu

SEQ ID NO: 1597468 - RNA, 19 nt, Homo sapiens
  misc_RNA (1)...(19): siRNA sense strand
guacaucgggaccugaaac

SEQ ID NO: 1597469 - RNA, 19 nt, Homo sapiens
  misc_RNA (1)...(19): siRNA sense strand
ggaggacggcuucccuaac

SEQ ID NO: 1597470 - RNA, 19 nt, Homo sapiens
  misc_RNA (1)...(19): siRNA sense strand
auauugaacagcuuugcua

SEQ ID NO: 1597471 - RNA, 19 nt, Homo sapiens
  misc_RNA (1)...(19): siRNA sense strand
caagugagcuacauucaug

SEQ ID NO: 1597472 - RNA, 19 nt, Homo sapiens
  misc_RNA (1)...(19): siRNA sense strand
caacuacucugguaccauu

SEQ ID NO: 1597473 - RNA, 19 nt, Homo sapiens
  misc_RNA (1)...(19): siRNA sense strand
gaacucugcuccuacauuc

SEQ ID NO: 1597474 - RNA, 19 nt, Homo sapiens
  misc_RNA (1)...(19): siRNA sense strand
uaagagagcugauacuuuu

SEQ ID NO: 1597475 - RNA, 19 nt, Homo sapiens
  misc_RNA (1)...(19): siRNA sense strand
ggaugguucuucuaaauga

SEQ ID NO: 1597476 - RNA, 19 nt, Homo sapiens
  misc_RNA (1)...(19): siRNA sense strand
ggccagauguggaaccaua

SEQ ID NO: 1597477 - RNA, 19 nt, Homo sapiens
  misc_RNA (1)...(19): siRNA sense strand
gaaaggcgauguuggaaaa

SEQ ID NO: 1597478 - RNA, 19 nt, Homo sapiens
  misc_RNA (1)...(19): siRNA sense strand
gcaagcuaaugaagaauau

SEQ ID NO: 1597479 - RNA, 19 nt, Homo sapiens
  misc_RNA (1)...(19): siRNA sense strand
ccucgaaacuauuccauga

SEQ ID NO: 1597480 - RNA, 19 nt, Homo sapiens
  misc_RNA (1)...(19): siRNA sense strand
guaacaagcucuucuucag

SEQ ID NO: 1597481 - RNA, 19 nt, Homo sapiens
  misc_RNA (1)...(19): siRNA sense strand
cauaagaacccacacaaug

SEQ ID NO: 1597482 - RNA, 19 nt, Homo sapiens
  misc_RNA (1)...(19): siRNA sense strand
aacaagcucuucuucagua

SEQ ID NO: 1597483 - RNA, 19 nt, Homo sapiens
  misc_RNA (1)...(19): siRNA sense strand
uagagcagcugauggaaug

SEQ ID NO: 1597484 - RNA, 19 nt, Homo sapiens
  misc_RNA (1)...(19): siRNA sense strand
ccgaaugaauggugauaaa

SEQ ID NO: 1597485 - RNA, 19 nt, Homo sapiens
  misc_RNA (1)...(19): siRNA sense strand
caggcaagcuaaugaagaa

SEQ ID NO: 1597486 - RNA, 19 nt, Homo sapiens
  misc_RNA (1)...(19): siRNA sense strand
gaaacuauuccaugauugu

SEQ ID NO: 1597487 - RNA, 19 nt, Homo sapiens
  misc_RNA (1)...(19): siRNA sense strand
uaccacggcuauccuuaua

SEQ ID NO: 1597488 - RNA, 19 nt, Homo sapiens
  misc_RNA (1)...(19): siRNA sense strand
ucaguaugguggacuauga

SEQ ID NO: 1597489 - RNA, 19 nt, Homo sapiens
  misc_RNA (1)...(19): siRNA sense strand
ccacccaacuacucuggua

SEQ ID NO: 1597490 - RNA, 19 nt, Homo sapiens
  misc_RNA (1)...(19): siRNA sense strand
ucgaaacuauuccaugauu

SEQ ID NO: 1597491 - RNA, 19 nt, Homo sapiens
  misc_RNA (1)...(19): siRNA sense strand
gaguucaucuauaacaaga

SEQ ID NO: 1597492 - RNA, 19 nt, Homo sapiens
  misc_RNA (1)...(19): siRNA sense strand
caauauuucguuccaagua

SEQ ID NO: 1597493 - RNA, 19 nt, Homo sapiens
  misc_RNA (1)...(19): siRNA sense strand
ggacaagugagcuacauuc

SEQ ID NO: 1597494 - RNA, 19 nt, Homo sapiens
  misc_RNA (1)...(19): siRNA sense strand
guggcagaaucacacauua

SEQ ID NO: 1597495 - RNA, 19 nt, Homo sapiens
  misc_RNA (1)...(19): siRNA sense strand
gagguuugcuuuauuugag

SEQ ID NO: 1597496 - RNA, 19 nt, Homo sapiens
  misc_RNA (1)...(19): siRNA sense strand
cauggugucucuguguaua

SEQ ID NO: 1597497 - RNA, 19 nt, Homo sapiens
  misc_RNA (1)...(19): siRNA sense strand
ggcagaaucacacauuauu

SEQ ID NO: 1597498 - RNA, 19 nt, Homo sapiens
  misc_RNA (1)...(19): siRNA sense strand
cgaaacuauuccaugauug

SEQ ID NO: 1597499 - RNA, 19 nt, Homo sapiens
  misc_RNA (1)...(19): siRNA sense strand
uaauuugccuagugggauu

SEQ ID NO: 1597500 - RNA, 19 nt, Homo sapiens
  misc_RNA (1)...(19): siRNA sense strand
acuuggaguucaucuauaa

SEQ ID NO: 1597501 - RNA, 19 nt, Homo sapiens
  misc_RNA (1)...(19): siRNA sense strand
ggcaagcuaaugaagaaua

SEQ ID NO: 1597502 - RNA, 19 nt, Homo sapiens
  misc_RNA (1)...(19): siRNA sense strand
gcaggcaagcuaaugaaga

SEQ ID NO: 1597503 - RNA, 19 nt, Homo sapiens
  misc_RNA (1)...(19): siRNA sense strand
ggagguuugcuuuauuuga

SEQ ID NO: 1597504 - RNA, 19 nt, Homo sapiens
  misc_RNA (1)...(19): siRNA sense strand
guuggagguuugcuuuauu

SEQ ID NO: 1597505 - RNA, 19 nt, Homo sapiens
  misc_RNA (1)...(19): siRNA sense strand
cuaagagagcugauacuuu

SEQ ID NO: 1597506 - RNA, 19 nt, Homo sapiens
  misc_RNA (1)...(19): siRNA sense strand
ggcaccaccucgaaacuau

SEQ ID NO: 1597507 - RNA, 19 nt, Homo sapiens
  misc_RNA (1)...(19): siRNA sense strand
gccauggugucucugugua

SEQ ID NO: 1597508 - RNA, 19 nt, Homo sapiens
  misc_RNA (1)...(19): siRNA sense strand
ggugauaaauuccgaaaau

SEQ ID NO: 1597509 - RNA, 19 nt, Homo sapiens
  misc_RNA (1)...(19): siRNA sense strand
gcgaacuccuggcgcuauu

SEQ ID NO: 1597510 - RNA, 19 nt, Homo sapiens
  misc_RNA (1)...(19): siRNA sense strand
caugaacucugcuccuaca

SEQ ID NO: 1597511 - RNA, 19 nt, Homo sapiens
  misc_RNA (1)...(19): siRNA sense strand
gcaacuagcaaaguggauu

SEQ ID NO: 1597512 - RNA, 19 nt, Homo sapiens
  misc_RNA (1)...(19): siRNA sense strand
gaugguucuucuaaaugaa

SEQ ID NO: 1597513 - RNA, 19 nt, Homo sapiens
  misc_RNA (1)...(19): siRNA sense strand
uaaaggcaccaccucgaaa

SEQ ID NO: 1597514 - RNA, 19 nt, Homo sapiens
  misc_RNA (1)...(19): siRNA sense strand
cagcugagcaacuagcaaa

SEQ ID NO: 1597515 - RNA, 19 nt, Homo sapiens
  misc_RNA (1)...(19): siRNA sense strand
uuggagguuugcuuuauuu

SEQ ID NO: 1597516 - RNA, 19 nt, Homo sapiens
  misc_RNA (1)...(19): siRNA sense strand
aaaguggauugcugacaga

SEQ ID NO: 1597517 - RNA, 19 nt, Homo sapiens
  misc_RNA (1)...(19): siRNA sense strand
cagcggcaguguucugugu

SEQ ID NO: 1597518 - RNA, 19 nt, Homo sapiens
  misc_RNA (1)...(19): siRNA sense strand
cgaaaggcgauguuggaaa

SEQ ID NO: 1597519 - RNA, 19 nt, Homo sapiens
  misc_RNA (1)...(19): siRNA sense strand
uaagaacccacacaaugga

SEQ ID NO: 1597520 - RNA, 19 nt, Homo sapiens
  misc_RNA (1)...(19): siRNA sense strand
aacaugaacucugcuccua

SEQ ID NO: 1597521 - RNA, 19 nt, Homo sapiens
  misc_RNA (1)...(19): siRNA sense strand
gaacuccuggcgcuauuca

SEQ ID NO: 1597522 - RNA, 19 nt, Homo sapiens
  misc_RNA (1)...(19): siRNA sense strand
caacuagcaaaguggauug

SEQ ID NO: 1597523 - RNA, 19 nt, Homo sapiens
  misc_RNA (1)...(19): siRNA sense strand
guaccacggcuauccuuau

SEQ ID NO: 1597524 - RNA, 19 nt, Homo sapiens
  misc_RNA (1)...(19): siRNA sense strand
ccacacaauggacaaguga

SEQ ID NO: 1597525 - RNA, 19 nt, Homo sapiens
  misc_RNA (1)...(19): siRNA sense strand
cgcucaaucuuccgaauga

SEQ ID NO: 1597526 - RNA, 19 nt, Homo sapiens
  misc_RNA (1)...(19): siRNA sense strand
gaacccacacaauggacaa

SEQ ID NO: 1597527 - RNA, 19 nt, Homo sapiens
  misc_RNA (1)...(19): siRNA sense strand
gauugggccugguggucuu

SEQ ID NO: 1597528 - RNA, 19 nt, Homo sapiens
  misc_RNA (1)...(19): siRNA sense strand
gggaugguucuucuaaaug

SEQ ID NO: 1597529 - RNA, 19 nt, Homo sapiens
  misc_RNA (1)...(19): siRNA sense strand
uaacaagcucuucuucagu

SEQ ID NO: 1597530 - RNA, 19 nt, Homo sapiens
  misc_RNA (1)...(19): siRNA sense strand
ccaaaaggcagaccuaaga

SEQ ID NO: 1597531 - RNA, 19 nt, Homo sapiens
  misc_RNA (1)...(19): siRNA sense strand
gagaaucuuuuagcugaaa

SEQ ID NO: 1597532 - RNA, 19 nt, Homo sapiens
  misc_RNA (1)...(19): siRNA sense strand
gcaccaccucgaaacuauu

SEQ ID NO: 1597533 - RNA, 19 nt, Homo sapiens
  misc_RNA (1)...(19): siRNA sense strand
ggaguucaucuauaacaag

SEQ ID NO: 1597534 - RNA, 19 nt, Homo sapiens
  misc_RNA (1)...(19): siRNA sense strand
guagagcagcugauggaau

SEQ ID NO: 1597535 - RNA, 19 nt, Homo sapiens
  misc_RNA (1)...(19): siRNA sense strand
guucaucuauaacaagacu

SEQ ID NO: 1597536 - RNA, 19 nt, Homo sapiens
  misc_RNA (1)...(19): siRNA sense strand
gacaagugagcuacauuca

SEQ ID NO: 1597537 - RNA, 19 nt, Homo sapiens
  misc_RNA (1)...(19): siRNA sense strand
ugaacucugcuccuacauu

SEQ ID NO: 1597538 - RNA, 19 nt, Homo sapiens
  misc_RNA (1)...(19): siRNA sense strand
acggauaauuugccuagug

SEQ ID NO: 1597539 - RNA, 19 nt, Homo sapiens
  misc_RNA (1)...(19): siRNA sense strand
gcucaaucuuccgaaugaa

SEQ ID NO: 1597540 - RNA, 19 nt, Homo sapiens
  misc_RNA (1)...(19): siRNA sense strand
gauguucauauucggguuu

SEQ ID NO: 1597541 - RNA, 19 nt, Homo sapiens
  misc_RNA (1)...(19): siRNA sense strand
cugagcaacuagcaaagug

SEQ ID NO: 1597542 - RNA, 19 nt, Homo sapiens
  misc_RNA (1)...(19): siRNA sense strand
ggggaugguucuucuaaau

SEQ ID NO: 1597543 - RNA, 19 nt, Homo sapiens
  misc_RNA (1)...(19): siRNA sense strand
uggaguucaucuauaacaa

SEQ ID NO: 1597544 - RNA, 19 nt, Homo sapiens
  misc_RNA (1)...(19): siRNA sense strand
cgaaugaauggugauaaau

SEQ ID NO: 1597545 - RNA, 19 nt, Homo sapiens
  misc_RNA (1)...(19): siRNA sense strand
acauuauucugguacugaa

SEQ ID NO: 1597546 - RNA, 19 nt, Homo sapiens
  misc_RNA (1)...(19): siRNA sense strand
ugagaaggaacaacuugga

SEQ ID NO: 1597547 - RNA, 19 nt, Homo sapiens
  misc_RNA (1)...(19): siRNA sense strand
ccuaagagagcugauacuu

SEQ ID NO: 1597548 - RNA, 19 nt, Homo sapiens
  misc_RNA (1)...(19): siRNA sense strand
guggucuucuucuucaguu

SEQ ID NO: 1597549 - RNA, 19 nt, Homo sapiens
  misc_RNA (1)...(19): siRNA sense strand
gguacugaaugccgcuauc

SEQ ID NO: 1597550 - RNA, 19 nt, Homo sapiens
  misc_RNA (1)...(19): siRNA sense strand
gguuugcuuuauuugagaa

SEQ ID NO: 1597551 - RNA, 19 nt, Homo sapiens
  misc_RNA (1)...(19): siRNA sense strand
uguuggagguuugcuuuau

SEQ ID NO: 1597552 - RNA, 19 nt, Homo sapiens
  misc_RNA (1)...(19): siRNA sense strand
ucaaucuuccgaaugaaug

SEQ ID NO: 1597553 - RNA, 19 nt, Homo sapiens
  misc_RNA (1)...(19): siRNA sense strand
guacugaaugccgcuauca

SEQ ID NO: 1597554 - RNA, 19 nt, Homo sapiens
  misc_RNA (1)...(19): siRNA sense strand
gcucauaagaacccacaca

SEQ ID NO: 1597555 - RNA, 19 nt, Homo sapiens
  misc_RNA (1)...(19): siRNA sense strand
auaagaacccacacaaugg

SEQ ID NO: 1597556 - RNA, 19 nt, Homo sapiens
  misc_RNA (1)...(19): siRNA sense strand
gacgcucaaucuuccgaau

SEQ ID NO: 1597557 - RNA, 19 nt, Homo sapiens
  misc_RNA (1)...(19): siRNA sense strand
acaauggacaagugagcua

SEQ ID NO: 1597558 - RNA, 19 nt, Homo sapiens
  misc_RNA (1)...(19): siRNA sense strand
gaccuaagagagcugauac

SEQ ID NO: 1597559 - RNA, 19 nt, Homo sapiens
  misc_RNA (1)...(19): siRNA sense strand
aagcucuucuucaguaugg

SEQ ID NO: 1597560 - RNA, 19 nt, Homo sapiens
  misc_RNA (1)...(19): siRNA sense strand
cugguggucuucuucuuca

SEQ ID NO: 1597561 - RNA, 19 nt, Homo sapiens
  misc_RNA (1)...(19): siRNA sense strand
ucauaagaacccacacaau

SEQ ID NO: 1597562 - RNA, 19 nt, Homo sapiens
  misc_RNA (1)...(19): siRNA sense strand
auaaaggcaccaccucgaa

SEQ ID NO: 1597563 - RNA, 19 nt, Homo sapiens
  misc_RNA (1)...(19): siRNA sense strand
gugcaggcaagcuaaugaa

SEQ ID NO: 1597564 - RNA, 19 nt, Homo sapiens
  misc_RNA (1)...(19): siRNA sense strand
guaugguggacuaugauga

SEQ ID NO: 1597565 - RNA, 19 nt, Homo sapiens
  misc_RNA (1)...(19): siRNA sense strand
acaagcucuucuucaguau

SEQ ID NO: 1597566 - RNA, 19 nt, Homo sapiens
  misc_RNA (1)...(19): siRNA sense strand
uauguucacugcucuucag

SEQ ID NO: 1597567 - RNA, 19 nt, Homo sapiens
  misc_RNA (1)...(19): siRNA sense strand
gcuuuggcccuguuagugu

SEQ ID NO: 1597568 - RNA, 19 nt, Homo sapiens
  misc_RNA (1)...(19): siRNA sense strand
agaccuaagagagcugaua

SEQ ID NO: 1597569 - RNA, 19 nt, Homo sapiens
  misc_RNA (1)...(19): siRNA sense strand
guuagugucgcuuguugga

SEQ ID NO: 1597570 - RNA, 19 nt, Homo sapiens
  misc_RNA (1)...(19): siRNA sense strand
aauauuucguuccaaguac

SEQ ID NO: 1597571 - RNA, 19 nt, Homo sapiens
  misc_RNA (1)...(19): siRNA sense strand
caagugagcuacauucaug

SEQ ID NO: 1597572 - RNA, 19 nt, Homo sapiens
  misc_RNA (1)...(19): siRNA sense strand
caacuacucugguaccauu

SEQ ID NO: 1597573 - RNA, 19 nt, Homo sapiens
  misc_RNA (1)...(19): siRNA sense strand
gaacucugcuccuacauuc

SEQ ID NO: 1597574 - RNA, 19 nt, Homo sapiens
  misc_RNA (1)...(19): siRNA sense strand
uaagagagcugauacuuuu

SEQ ID NO: 1597575 - RNA, 19 nt, Homo sapiens
  misc_RNA (1)...(19): siRNA sense strand
ggaugguucuucuaaauga

SEQ ID NO: 1597576 - RNA, 19 nt, Homo sapiens
  misc_RNA (1)...(19): siRNA sense strand
ggccagauguggaaccaua

SEQ ID NO: 1597577 - RNA, 19 nt, Homo sapiens
  misc_RNA (1)...(19): siRNA sense strand
gaaaggcgauguuggaaaa

SEQ ID NO: 1597578 - RNA, 19 nt, Homo sapiens
  misc_RNA (1)...(19): siRNA sense strand
gcaagcuaaugaagaauau

SEQ ID NO: 1597579 - RNA, 19 nt, Homo sapiens
  misc_RNA (1)...(19): siRNA sense strand
ccucgaaacuauuccauga

SEQ ID NO: 1597580 - RNA, 19 nt, Homo sapiens
  misc_RNA (1)...(19): siRNA sense strand
guaacaagcucuucuucag

SEQ ID NO: 1597581 - RNA, 19 nt, Homo sapiens
  misc_RNA (1)...(19): siRNA sense strand
cauaagaacccacacaaug

SEQ ID NO: 1597582 - RNA, 19 nt, Homo sapiens
  misc_RNA (1)...(19): siRNA sense strand
aacaagcucuucuucagua

SEQ ID NO: 1597583 - RNA, 19 nt, Homo sapiens
  misc_RNA (1)...(19): siRNA sense strand
uagagcagcugauggaaug

SEQ ID NO: 1597584 - RNA, 19 nt, Homo sapiens
  misc_RNA (1)...(19): siRNA sense strand
ccgaaugaauggugauaaa

SEQ ID NO: 1597585 - RNA, 19 nt, Homo sapiens
  misc_RNA (1)...(19): siRNA sense strand
caggcaagcuaaugaagaa

SEQ ID NO: 1597586 - RNA, 19 nt, Homo sapiens
  misc_RNA (1)...(19): siRNA sense strand
gaaacuauuccaugauugu

SEQ ID NO: 1597587 - RNA, 19 nt, Homo sapiens
  misc_RNA (1)...(19): siRNA sense strand
uaccacggcuauccuuaua

SEQ ID NO: 1597588 - RNA, 19 nt, Homo sapiens
  misc_RNA (1)...(19): siRNA sense strand
ucaguaugguggacuauga

SEQ ID NO: 1597589 - RNA, 19 nt, Homo sapiens
  misc_RNA (1)...(19): siRNA sense strand
ccacccaacuacucuggua

SEQ ID NO: 1597590 - RNA, 19 nt, Homo sapiens
  misc_RNA (1)...(19): siRNA sense strand
ucgaaacuauuccaugauu

SEQ ID NO: 1597591 - RNA, 19 nt, Homo sapiens
  misc_RNA (1)...(19): siRNA sense strand
gaguucaucuauaacaaga

SEQ ID NO: 1597592 - RNA, 19 nt, Homo sapiens
  misc_RNA (1)...(19): siRNA sense strand
caauauuucguuccaagua

SEQ ID NO: 1597593 - RNA, 19 nt, Homo sapiens
  misc_RNA (1)...(19): siRNA sense strand
ggacaagugagcuacauuc

SEQ ID NO: 1597594 - RNA, 19 nt, Homo sapiens
  misc_RNA (1)...(19): siRNA sense strand
guggcagaaucacacauua

SEQ ID NO: 1597595 - RNA, 19 nt, Homo sapiens
  misc_RNA (1)...(19): siRNA sense strand
gagguuugcuuuauuugag

SEQ ID NO: 1597596 - RNA, 19 nt, Homo sapiens
  misc_RNA (1)...(19): siRNA sense strand
cauggugucucuguguaua

SEQ ID NO: 1597597 - RNA, 19 nt, Homo sapiens
  misc_RNA (1)...(19): siRNA sense strand
ggcagaaucacacauuauu

SEQ ID NO: 1597598 - RNA, 19 nt, Homo sapiens
  misc_RNA (1)...(19): siRNA sense strand
cgaaacuauuccaugauug

SEQ ID NO: 1597599 - RNA, 19 nt, Homo sapiens
  misc_RNA (1)...(19): siRNA sense strand
uaauuugccuagugggauu

SEQ ID NO: 1597600 - RNA, 19 nt, Homo sapiens
  misc_RNA (1)...(19): siRNA sense strand
acuuggaguucaucuauaa

SEQ ID NO: 1597601 - RNA, 19 nt, Homo sapiens
  misc_RNA (1)...(19): siRNA sense strand
ggcaagcuaaugaagaaua

SEQ ID NO: 1597602 - RNA, 19 nt, Homo sapiens
  misc_RNA (1)...(19): siRNA sense strand
gcaggcaagcuaaugaaga

SEQ ID NO: 1597603 - RNA, 19 nt, Homo sapiens
  misc_RNA (1)...(19): siRNA sense strand
ggagguuugcuuuauuuga

SEQ ID NO: 1597604 - RNA, 19 nt, Homo sapiens
  misc_RNA (1)...(19): siRNA sense strand
guuggagguuugcuuuauu

SEQ ID NO: 1597605 - RNA, 19 nt, Homo sapiens
  misc_RNA (1)...(19): siRNA sense strand
cuaagagagcugauacuuu

SEQ ID NO: 1597606 - RNA, 19 nt, Homo sapiens
  misc_RNA (1)...(19): siRNA sense strand
ggcaccaccucgaaacuau

SEQ ID NO: 1597607 - RNA, 19 nt, Homo sapiens
  misc_RNA (1)...(19): siRNA sense strand
gccauggugucucugugua

SEQ ID NO: 1597608 - RNA, 19 nt, Homo sapiens
  misc_RNA (1)...(19): siRNA sense strand
ggugauaaauuccgaaaau

SEQ ID NO: 1597609 - RNA, 19 nt, Homo sapiens
  misc_RNA (1)...(19): siRNA sense strand
gcgaacuccuggcgcuauu

SEQ ID NO: 1597610 - RNA, 19 nt, Homo sapiens
  misc_RNA (1)...(19): siRNA sense strand
caugaacucugcuccuaca

SEQ ID NO: 1597611 - RNA, 19 nt, Homo sapiens
  misc_RNA (1)...(19): siRNA sense strand
gcaacuagcaaaguggauu

SEQ ID NO: 1597612 - RNA, 19 nt, Homo sapiens
  misc_RNA (1)...(19): siRNA sense strand
gaugguucuucuaaaugaa

SEQ ID NO: 1597613 - RNA, 19 nt, Homo sapiens
  misc_RNA (1)...(19): siRNA sense strand
uaaaggcaccaccucgaaa

SEQ ID NO: 1597614 - RNA, 19 nt, Homo sapiens
  misc_RNA (1)...(19): siRNA sense strand
cagcugagcaacuagcaaa

SEQ ID NO: 1597615 - RNA, 19 nt, Homo sapiens
  misc_RNA (1)...(19): siRNA sense strand
uuggagguuugcuuuauuu

SEQ ID NO: 1597616 - RNA, 19 nt, Homo sapiens
  misc_RNA (1)...(19): siRNA sense strand
aaaguggauugcugacaga

SEQ ID NO: 1597617 - RNA, 19 nt, Homo sapiens
  misc_RNA (1)...(19): siRNA sense strand
cagcggcaguguucugugu

SEQ ID NO: 1597618 - RNA, 19 nt, Homo sapiens
  misc_RNA (1)...(19): siRNA sense strand
cgaaaggcgauguuggaaa

SEQ ID NO: 1597619 - RNA, 19 nt, Homo sapiens
  misc_RNA (1)...(19): siRNA sense strand
uaagaacccacacaaugga

SEQ ID NO: 1597620 - RNA, 19 nt, Homo sapiens
  misc_RNA (1)...(19): siRNA sense strand
aacaugaacucugcuccua

SEQ ID NO: 1597621 - RNA, 19 nt, Homo sapiens
  misc_RNA (1)...(19): siRNA sense strand
gaacuccuggcgcuauuca

SEQ ID NO: 1597622 - RNA, 19 nt, Homo sapiens
  misc_RNA (1)...(19): siRNA sense strand
caacuagcaaaguggauug

SEQ ID NO: 1597623 - RNA, 19 nt, Homo sapiens
  misc_RNA (1)...(19): siRNA sense strand
guaccacggcuauccuuau

SEQ ID NO: 1597624 - RNA, 19 nt, Homo sapiens
  misc_RNA (1)...(19): siRNA sense strand
ccacacaauggacaaguga

SEQ ID NO: 1597625 - RNA, 19 nt, Homo sapiens
  misc_RNA (1)...(19): siRNA sense strand
cgcucaaucuuccgaauga

SEQ ID NO: 1597626 - RNA, 19 nt, Homo sapiens
  misc_RNA (1)...(19): siRNA sense strand
gaacccacacaauggacaa

SEQ ID NO: 1597627 - RNA, 19 nt, Homo sapiens
  misc_RNA (1)...(19): siRNA sense strand
gauugggccugguggucuu

SEQ ID NO: 1597628 - RNA, 19 nt, Homo sapiens
  misc_RNA (1)...(19): siRNA sense strand
gggaugguucuucuaaaug

SEQ ID NO: 1597629 - RNA, 19 nt, Homo sapiens
  misc_RNA (1)...(19): siRNA sense strand
uaacaagcucuucuucagu

SEQ ID NO: 1597630 - RNA, 19 nt, Homo sapiens
  misc_RNA (1)...(19): siRNA sense strand
ccaaaaggcagaccuaaga

SEQ ID NO: 1597631 - RNA, 19 nt, Homo sapiens
  misc_RNA (1)...(19): siRNA sense strand
gagaaucuuuuagcugaaa

SEQ ID NO: 1597632 - RNA, 19 nt, Homo sapiens
  misc_RNA (1)...(19): siRNA sense strand
gcaccaccucgaaacuauu

SEQ ID NO: 1597633 - RNA, 19 nt, Homo sapiens
  misc_RNA (1)...(19): siRNA sense strand
ggaguucaucuauaacaag

SEQ ID NO: 1597634 - RNA, 19 nt, Homo sapiens
  misc_RNA (1)...(19): siRNA sense strand
guagagcagcugauggaau

SEQ ID NO: 1597635 - RNA, 19 nt, Homo sapiens
  misc_RNA (1)...(19): siRNA sense strand
guucaucuauaacaagacu

SEQ ID NO: 1597636 - RNA, 19 nt, Homo sapiens
  misc_RNA (1)...(19): siRNA sense strand
gacaagugagcuacauuca

SEQ ID NO: 1597637 - RNA, 19 nt, Homo sapiens
  misc_RNA (1)...(19): siRNA sense strand
ugaacucugcuccuacauu

SEQ ID NO: 1597638 - RNA, 19 nt, Homo sapiens
  misc_RNA (1)...(19): siRNA sense strand
acggauaauuugccuagug

SEQ ID NO: 1597639 - RNA, 19 nt, Homo sapiens
  misc_RNA (1)...(19): siRNA sense strand
gcucaaucuuccgaaugaa

SEQ ID NO: 1597640 - RNA, 19 nt, Homo sapiens
  misc_RNA (1)...(19): siRNA sense strand
gauguucauauucggguuu

SEQ ID NO: 1597641 - RNA, 19 nt, Homo sapiens
  misc_RNA (1)...(19): siRNA sense strand
cugagcaacuagcaaagug

SEQ ID NO: 1597642 - RNA, 19 nt, Homo sapiens
  misc_RNA (1)...(19): siRNA sense strand
ggggaugguucuucuaaau

SEQ ID NO: 1597643 - RNA, 19 nt, Homo sapiens
  misc_RNA (1)...(19): siRNA sense strand
uggaguucaucuauaacaa

SEQ ID NO: 1597644 - RNA, 19 nt, Homo sapiens
  misc_RNA (1)...(19): siRNA sense strand
cgaaugaauggugauaaau

SEQ ID NO: 1597645 - RNA, 19 nt, Homo sapiens
  misc_RNA (1)...(19): siRNA sense strand
acauuauucugguacugaa

SEQ ID NO: 1597646 - RNA, 19 nt, Homo sapiens
  misc_RNA (1)...(19): siRNA sense strand
ugagaaggaacaacuugga

SEQ ID NO: 1597647 - RNA, 19 nt, Homo sapiens
  misc_RNA (1)...(19): siRNA sense strand
ccuaagagagcugauacuu

SEQ ID NO: 1597648 - RNA, 19 nt, Homo sapiens
  misc_RNA (1)...(19): siRNA sense strand
guggucuucuucuucaguu

SEQ ID NO: 1597649 - RNA, 19 nt, Homo sapiens
  misc_RNA (1)...(19): siRNA sense strand
gguacugaaugccgcuauc

SEQ ID NO: 1597650 - RNA, 19 nt, Homo sapiens
  misc_RNA (1)...(19): siRNA sense strand
gguuugcuuuauuugagaa

SEQ ID NO: 1597651 - RNA, 19 nt, Homo sapiens
  misc_RNA (1)...(19): siRNA sense strand
uguuggagguuugcuuuau

SEQ ID NO: 1597652 - RNA, 19 nt, Homo sapiens
  misc_RNA (1)...(19): siRNA sense strand
ucaaucuuccgaaugaaug

SEQ ID NO: 1597653 - RNA, 19 nt, Homo sapiens
  misc_RNA (1)...(19): siRNA sense strand
guacugaaugccgcuauca

SEQ ID NO: 1597654 - RNA, 19 nt, Homo sapiens
  misc_RNA (1)...(19): siRNA sense strand
gcucauaagaacccacaca

SEQ ID NO: 1597655 - RNA, 19 nt, Homo sapiens
  misc_RNA (1)...(19): siRNA sense strand
auaagaacccacacaaugg

SEQ ID NO: 1597656 - RNA, 19 nt, Homo sapiens
  misc_RNA (1)...(19): siRNA sense strand
gacgcucaaucuuccgaau

SEQ ID NO: 1597657 - RNA, 19 nt, Homo sapiens
  misc_RNA (1)...(19): siRNA sense strand
acaauggacaagugagcua

SEQ ID NO: 1597658 - RNA, 19 nt, Homo sapiens
  misc_RNA (1)...(19): siRNA sense strand
gaccuaagagagcugauac

SEQ ID NO: 1597659 - RNA, 19 nt, Homo sapiens
  misc_RNA (1)...(19): siRNA sense strand
aagcucuucuucaguaugg

SEQ ID NO: 1597660 - RNA, 19 nt, Homo sapiens
  misc_RNA (1)...(19): siRNA sense strand
cugguggucuucuucuuca

SEQ ID NO: 1597661 - RNA, 19 nt, Homo sapiens
  misc_RNA (1)...(19): siRNA sense strand
ucauaagaacccacacaau

SEQ ID NO: 1597662 - RNA, 19 nt, Homo sapiens
  misc_RNA (1)...(19): siRNA sense strand
auaaaggcaccaccucgaa

SEQ ID NO: 1597663 - RNA, 19 nt, Homo sapiens
  misc_RNA (1)...(19): siRNA sense strand
gugcaggcaagcuaaugaa

SEQ ID NO: 1597664 - RNA, 19 nt, Homo sapiens
  misc_RNA (1)...(19): siRNA sense strand
guaugguggacuaugauga

SEQ ID NO: 1597665 - RNA, 19 nt, Homo sapiens
  misc_RNA (1)...(19): siRNA sense strand
acaagcucuucuucaguau

SEQ ID NO: 1597666 - RNA, 19 nt, Homo sapiens
  misc_RNA (1)...(19): siRNA sense strand
uauguucacugcucuucag

SEQ ID NO: 1597667 - RNA, 19 nt, Homo sapiens
  misc_RNA (1)...(19): siRNA sense strand
gcuuuggcccuguuagugu

SEQ ID NO: 1597668 - RNA, 19 nt, Homo sapiens
  misc_RNA (1)...(19): siRNA sense strand
agaccuaagagagcugaua

SEQ ID NO: 1597669 - RNA, 19 nt, Homo sapiens
  misc_RNA (1)...(19): siRNA sense strand
guuagugucgcuuguugga

SEQ ID NO: 1597670 - RNA, 19 nt, Homo sapiens
  misc_RNA (1)...(19): siRNA sense strand
aauauuucguuccaaguac

SEQ ID NO: 1597671 - RNA, 19 nt, Homo sapiens
  misc_RNA (1)...(19): siRNA sense strand
ccaaagagcucagcacagu

SEQ ID NO: 1597672 - RNA, 19 nt, Homo sapiens
  misc_RNA (1)...(19): siRNA sense strand
cagaggcaguggucagcaa

SEQ ID NO: 1597673 - RNA, 19 nt, Homo sapiens
  misc_RNA (1)...(19): siRNA sense strand
aaagagcucagcacagugu

SEQ ID NO: 1597674 - RNA, 19 nt, Homo sapiens
  misc_RNA (1)...(19): siRNA sense strand
ccaaagagcccagcacagu

SEQ ID NO: 1597675 - RNA, 19 nt, Homo sapiens
  misc_RNA (1)...(19): siRNA sense strand
gcacuucaggucccaucaa

SEQ ID NO: 1597676 - RNA, 19 nt, Homo sapiens
  misc_RNA (1)...(19): siRNA sense strand
aaagagcccagcacagugu

SEQ ID NO: 1597677 - RNA, 19 nt, Homo sapiens
  misc_RNA (1)...(19): siRNA sense strand
cacuucaggucccaucaau

SEQ ID NO: 1597678 - RNA, 19 nt, Homo sapiens
  misc_RNA (1)...(19): siRNA sense strand
agagauccaacuccuguga

SEQ ID NO: 1597679 - RNA, 19 nt, Homo sapiens
  misc_RNA (1)...(19): siRNA sense strand
ccaaagaacccaguacagu

SEQ ID NO: 1597680 - RNA, 19 nt, Homo sapiens
  misc_RNA (1)...(19): siRNA sense strand
aaagaacccaguacagugu

SEQ ID NO: 1597681 - RNA, 19 nt, Homo sapiens
  misc_RNA (1)...(19): siRNA sense strand
uaaaugcccucccaagugu

SEQ ID NO: 1597682 - RNA, 19 nt, Homo sapiens
  misc_RNA (1)...(19): siRNA sense strand
caaguguacuccuaagugu

SEQ ID NO: 1597683 - RNA, 19 nt, Homo sapiens
  misc_RNA (1)...(19): siRNA sense strand
uaaguguccucccaagugu

SEQ ID NO: 1597684 - RNA, 19 nt, Homo sapiens
  misc_RNA (1)...(19): siRNA sense strand
cuaaaugcccucccaagug

SEQ ID NO: 1597685 - RNA, 19 nt, Homo sapiens
  misc_RNA (1)...(19): siRNA sense strand
ccaaguguacuccuaagug

SEQ ID NO: 1597686 - RNA, 19 nt, Homo sapiens
  misc_RNA (1)...(19): siRNA sense strand
gugccagccuccucccaaa

SEQ ID NO: 1597687 - RNA, 19 nt, Homo sapiens
  misc_RNA (1)...(19): siRNA sense strand
cuaaguguccucccaagug

SEQ ID NO: 1597688 - RNA, 19 nt, Homo sapiens
  misc_RNA (1)...(19): siRNA sense strand
ccucccaaguguacuccua

SEQ ID NO: 1597689 - RNA, 19 nt, Homo sapiens
  misc_RNA (1)...(19): siRNA sense strand
cgacgccgaccucagaguu

SEQ ID NO: 1597690 - RNA, 19 nt, Homo sapiens
  misc_RNA (1)...(19): siRNA sense strand
aaaaugcccuccccagugu

SEQ ID NO: 1597691 - RNA, 19 nt, Homo sapiens
  misc_RNA (1)...(19): siRNA sense strand
ccagccuccucccaaaugu

SEQ ID NO: 1597692 - RNA, 19 nt, Homo sapiens
  misc_RNA (1)...(19): siRNA sense strand
ccaaauguaccccuaaaug

SEQ ID NO: 1597693 - RNA, 19 nt, Homo sapiens
  misc_RNA (1)...(19): siRNA sense strand
ccuaaaugcccucccaagu

SEQ ID NO: 1597694 - RNA, 19 nt, Homo sapiens
  misc_RNA (1)...(19): siRNA sense strand
gccagccuccucccaaaug

SEQ ID NO: 1597695 - RNA, 19 nt, Homo sapiens
  misc_RNA (1)...(19): siRNA sense strand
ggacugcacugugaagauc

SEQ ID NO: 1597696 - RNA, 19 nt, Homo sapiens
  misc_RNA (1)...(19): siRNA sense strand
gcaacgaccugaccaucuc

SEQ ID NO: 1597697 - RNA, 19 nt, Homo sapiens
  misc_RNA (1)...(19): siRNA sense strand
caccucagcuucucccauu

SEQ ID NO: 1597698 - RNA, 19 nt, Homo sapiens
  misc_RNA (1)...(19): siRNA sense strand
caagcccuaugacguguuu

SEQ ID NO: 1597699 - RNA, 19 nt, Homo sapiens
  misc_RNA (1)...(19): siRNA sense strand
ggaccacgucauagacaua

SEQ ID NO: 1597700 - RNA, 19 nt, Homo sapiens
  misc_RNA (1)...(19): siRNA sense strand
cagcggccauguccuggua

SEQ ID NO: 1597701 - RNA, 19 nt, Homo sapiens
  misc_RNA (1)...(19): siRNA sense strand
cgacgacgccaccaucaaa

SEQ ID NO: 1597702 - RNA, 19 nt, Homo sapiens
  misc_RNA (1)...(19): siRNA sense strand
gacgagugcuucuucaucu

SEQ ID NO: 1597703 - RNA, 19 nt, Homo sapiens
  misc_RNA (1)...(19): siRNA sense strand
uccaaggacugcacuguga

SEQ ID NO: 1597704 - RNA, 19 nt, Homo sapiens
  misc_RNA (1)...(19): siRNA sense strand
gggcuccgaugccuucuuc

SEQ ID NO: 1597705 - RNA, 19 nt, Homo sapiens
  misc_RNA (1)...(19): siRNA sense strand
gcacgaggauguggucaac

SEQ ID NO: 1597706 - RNA, 19 nt, Homo sapiens
  misc_RNA (1)...(19): siRNA sense strand
caacgacgagugcuucuuc

SEQ ID NO: 1597707 - RNA, 19 nt, Homo sapiens
  misc_RNA (1)...(19): siRNA sense strand
agauugaccugcugguguu

SEQ ID NO: 1597708 - RNA, 19 nt, Homo sapiens
  misc_RNA (1)...(19): siRNA sense strand
agacauacacggacacauc

SEQ ID NO: 1597709 - RNA, 19 nt, Homo sapiens
  misc_RNA (1)...(19): siRNA sense strand
gacauacacggacacauca

SEQ ID NO: 1597710 - RNA, 19 nt, Homo sapiens
  misc_RNA (1)...(19): siRNA sense strand
gcaguucuaccgcuacuac

SEQ ID NO: 1597711 - RNA, 19 nt, Homo sapiens
  misc_RNA (1)...(19): siRNA sense strand
acacccaguucucccaguu

SEQ ID NO: 1597712 - RNA, 19 nt, Homo sapiens
  misc_RNA (1)...(19): siRNA sense strand
gagcaguucuaccgcuacu

SEQ ID NO: 1597713 - RNA, 19 nt, Homo sapiens
  misc_RNA (1)...(19): siRNA sense strand
ggaccgccacuacaacauc

SEQ ID NO: 1597714 - RNA, 19 nt, Homo sapiens
  misc_RNA (1)...(19): siRNA sense strand
gauccugccacaccagaug

SEQ ID NO: 1597715 - RNA, 19 nt, Homo sapiens
  misc_RNA (1)...(19): siRNA sense strand
cgacgagugcuucuucauc

SEQ ID NO: 1597716 - RNA, 19 nt, Homo sapiens
  misc_RNA (1)...(19): siRNA sense strand
caacucaguggucuucagu

SEQ ID NO: 1597717 - RNA, 19 nt, Homo sapiens
  misc_RNA (1)...(19): siRNA sense strand
ggucaacucaguggucuuc

SEQ ID NO: 1597718 - RNA, 19 nt, Homo sapiens
  misc_RNA (1)...(19): siRNA sense strand
gaccgccacuacaacaucu

SEQ ID NO: 1597719 - RNA, 19 nt, Homo sapiens
  misc_RNA (1)...(19): siRNA sense strand
caagauccagaaccucaau

SEQ ID NO: 1597720 - RNA, 19 nt, Homo sapiens
  misc_RNA (1)...(19): siRNA sense strand
gcucggugcuguggcucaa

SEQ ID NO: 1597721 - RNA, 19 nt, Homo sapiens
  misc_RNA (1)...(19): siRNA sense strand
ucucccaguucaacaagga

SEQ ID NO: 1597722 - RNA, 19 nt, Homo sapiens
  misc_RNA (1)...(19): siRNA sense strand
ugucggagcgcaugcuaga

SEQ ID NO: 1597723 - RNA, 19 nt, Homo sapiens
  misc_RNA (1)...(19): siRNA sense strand
ccaaggacugcacugugaa

SEQ ID NO: 1597724 - RNA, 19 nt, Homo sapiens
  misc_RNA (1)...(19): siRNA sense strand
ccaugcagccgccaccaau

SEQ ID NO: 1597725 - RNA, 19 nt, Homo sapiens
  misc_RNA (1)...(19): siRNA sense strand
cgagugcuucuucaucuuc

SEQ ID NO: 1597726 - RNA, 19 nt, Homo sapiens
  misc_RNA (1)...(19): siRNA sense strand
ggacugcacugugaagauc

SEQ ID NO: 1597727 - RNA, 19 nt, Homo sapiens
  misc_RNA (1)...(19): siRNA sense strand
gcaacgaccugaccaucuc

SEQ ID NO: 1597728 - RNA, 19 nt, Homo sapiens
  misc_RNA (1)...(19): siRNA sense strand
caccucagcuucucccauu

SEQ ID NO: 1597729 - RNA, 19 nt, Homo sapiens
  misc_RNA (1)...(19): siRNA sense strand
caagcccuaugacguguuu

SEQ ID NO: 1597730 - RNA, 19 nt, Homo sapiens
  misc_RNA (1)...(19): siRNA sense strand
cagcggccauguccuggua

SEQ ID NO: 1597731 - RNA, 19 nt, Homo sapiens
  misc_RNA (1)...(19): siRNA sense strand
uccaaggacugcacuguga

SEQ ID NO: 1597732 - RNA, 19 nt, Homo sapiens
  misc_RNA (1)...(19): siRNA sense strand
gcaguucuaccgcuacuac

SEQ ID NO: 1597733 - RNA, 19 nt, Homo sapiens
  misc_RNA (1)...(19): siRNA sense strand
acacccaguucucccaguu

SEQ ID NO: 1597734 - RNA, 19 nt, Homo sapiens
  misc_RNA (1)...(19): siRNA sense strand
gagcaguucuaccgcuacu

SEQ ID NO: 1597735 - RNA, 19 nt, Homo sapiens
  misc_RNA (1)...(19): siRNA sense strand
gcucggugcuguggcucaa

SEQ ID NO: 1597736 - RNA, 19 nt, Homo sapiens
  misc_RNA (1)...(19): siRNA sense strand
ucucccaguucaacaagga

SEQ ID NO: 1597737 - RNA, 19 nt, Homo sapiens
  misc_RNA (1)...(19): siRNA sense strand
ccaaggacugcacugugaa

SEQ ID NO: 1597738 - RNA, 19 nt, Homo sapiens
  misc_RNA (1)...(19): siRNA sense strand
ggacugcacugugaagauc

SEQ ID NO: 1597739 - RNA, 19 nt, Homo sapiens
  misc_RNA (1)...(19): siRNA sense strand
gcaacgaccugaccaucuc

SEQ ID NO: 1597740 - RNA, 19 nt, Homo sapiens
  misc_RNA (1)...(19): siRNA sense strand
caccucagcuucucccauu

SEQ ID NO: 1597741 - RNA, 19 nt, Homo sapiens
  misc_RNA (1)...(19): siRNA sense strand
cagcggccauguccuggua

SEQ ID NO: 1597742 - RNA, 19 nt, Homo sapiens
  misc_RNA (1)...(19): siRNA sense strand
uccaaggacugcacuguga

SEQ ID NO: 1597743 - RNA, 19 nt, Homo sapiens
  misc_RNA (1)...(19): siRNA sense strand
gcaguucuaccgcuacuac

SEQ ID NO: 1597744 - RNA, 19 nt, Homo sapiens
  misc_RNA (1)...(19): siRNA sense strand
acacccaguucucccaguu

SEQ ID NO: 1597745 - RNA, 19 nt, Homo sapiens
  misc_RNA (1)...(19): siRNA sense strand
gagcaguucuaccgcuacu

SEQ ID NO: 1597746 - RNA, 19 nt, Homo sapiens
  misc_RNA (1)...(19): siRNA sense strand
ucucccaguucaacaagga

SEQ ID NO: 1597747 - RNA, 19 nt, Homo sapiens
  misc_RNA (1)...(19): siRNA sense strand
ccaaggacugcacugugaa

SEQ ID NO: 1597748 - RNA, 19 nt, Homo sapiens
  misc_RNA (1)...(19): siRNA sense strand
ggacugcacugugaagauc

SEQ ID NO: 1597749 - RNA, 19 nt, Homo sapiens
  misc_RNA (1)...(19): siRNA sense strand
gcaacgaccugaccaucuc

SEQ ID NO: 1597750 - RNA, 19 nt, Homo sapiens
  misc_RNA (1)...(19): siRNA sense strand
caccucagcuucucccauu

SEQ ID NO: 1597751 - RNA, 19 nt, Homo sapiens
  misc_RNA (1)...(19): siRNA sense strand
caagcccuaugacguguuu

SEQ ID NO: 1597752 - RNA, 19 nt, Homo sapiens
  misc_RNA (1)...(19): siRNA sense strand
ggaccacgucauagacaua

SEQ ID NO: 1597753 - RNA, 19 nt, Homo sapiens
  misc_RNA (1)...(19): siRNA sense strand
cagcggccauguccuggua

SEQ ID NO: 1597754 - RNA, 19 nt, Homo sapiens
  misc_RNA (1)...(19): siRNA sense strand
cgacgacgccaccaucaaa

SEQ ID NO: 1597755 - RNA, 19 nt, Homo sapiens
  misc_RNA (1)...(19): siRNA sense strand
gacgagugcuucuucaucu

SEQ ID NO: 1597756 - RNA, 19 nt, Homo sapiens
  misc_RNA (1)...(19): siRNA sense strand
uccaaggacugcacuguga

SEQ ID NO: 1597757 - RNA, 19 nt, Homo sapiens
  misc_RNA (1)...(19): siRNA sense strand
gggcuccgaugccuucuuc

SEQ ID NO: 1597758 - RNA, 19 nt, Homo sapiens
  misc_RNA (1)...(19): siRNA sense strand
gcacgaggauguggucaac

SEQ ID NO: 1597759 - RNA, 19 nt, Homo sapiens
  misc_RNA (1)...(19): siRNA sense strand
caacgacgagugcuucuuc

SEQ ID NO: 1597760 - RNA, 19 nt, Homo sapiens
  misc_RNA (1)...(19): siRNA sense strand
agauugaccugcugguguu

SEQ ID NO: 1597761 - RNA, 19 nt, Homo sapiens
  misc_RNA (1)...(19): siRNA sense strand
agacauacacggacacauc

SEQ ID NO: 1597762 - RNA, 19 nt, Homo sapiens
  misc_RNA (1)...(19): siRNA sense strand
gacauacacggacacauca

SEQ ID NO: 1597763 - RNA, 19 nt, Homo sapiens
  misc_RNA (1)...(19): siRNA sense strand
gcaguucuaccgcuacuac

SEQ ID NO: 1597764 - RNA, 19 nt, Homo sapiens
  misc_RNA (1)...(19): siRNA sense strand
acacccaguucucccaguu

SEQ ID NO: 1597765 - RNA, 19 nt, Homo sapiens
  misc_RNA (1)...(19): siRNA sense strand
gagcaguucuaccgcuacu

SEQ ID NO: 1597766 - RNA, 19 nt, Homo sapiens
  misc_RNA (1)...(19): siRNA sense strand
ggaccgccacuacaacauc

SEQ ID NO: 1597767 - RNA, 19 nt, Homo sapiens
  misc_RNA (1)...(19): siRNA sense strand
gauccugccacaccagaug

SEQ ID NO: 1597768 - RNA, 19 nt, Homo sapiens
  misc_RNA (1)...(19): siRNA sense strand
cgacgagugcuucuucauc

SEQ ID NO: 1597769 - RNA, 19 nt, Homo sapiens
  misc_RNA (1)...(19): siRNA sense strand
caacucaguggucuucagu

SEQ ID NO: 1597770 - RNA, 19 nt, Homo sapiens
  misc_RNA (1)...(19): siRNA sense strand
ggucaacucaguggucuuc

SEQ ID NO: 1597771 - RNA, 19 nt, Homo sapiens
  misc_RNA (1)...(19): siRNA sense strand
gaccgccacuacaacaucu

SEQ ID NO: 1597772 - RNA, 19 nt, Homo sapiens
  misc_RNA (1)...(19): siRNA sense strand
caagauccagaaccucaau

SEQ ID NO: 1597773 - RNA, 19 nt, Homo sapiens
  misc_RNA (1)...(19): siRNA sense strand
gcucggugcuguggcucaa

SEQ ID NO: 1597774 - RNA, 19 nt, Homo sapiens
  misc_RNA (1)...(19): siRNA sense strand
ucucccaguucaacaagga

SEQ ID NO: 1597775 - RNA, 19 nt, Homo sapiens
  misc_RNA (1)...(19): siRNA sense strand
ugucggagcgcaugcuaga

SEQ ID NO: 1597776 - RNA, 19 nt, Homo sapiens
  misc_RNA (1)...(19): siRNA sense strand
ccaaggacugcacugugaa

SEQ ID NO: 1597777 - RNA, 19 nt, Homo sapiens
  misc_RNA (1)...(19): siRNA sense strand
ccaugcagccgccaccaau

SEQ ID NO: 1597778 - RNA, 19 nt, Homo sapiens
  misc_RNA (1)...(19): siRNA sense strand
cgagugcuucuucaucuuc

SEQ ID NO: 1597779 - RNA, 19 nt, Homo sapiens
  misc_RNA (1)...(19): siRNA sense strand
ggacugcacugugaagauc

SEQ ID NO: 1597780 - RNA, 19 nt, Homo sapiens
  misc_RNA (1)...(19): siRNA sense strand
gcaacgaccugaccaucuc

SEQ ID NO: 1597781 - RNA, 19 nt, Homo sapiens
  misc_RNA (1)...(19): siRNA sense strand
caccucagcuucucccauu

SEQ ID NO: 1597782 - RNA, 19 nt, Homo sapiens
  misc_RNA (1)...(19): siRNA sense strand
caagcccuaugacguguuu

SEQ ID NO: 1597783 - RNA, 19 nt, Homo sapiens
  misc_RNA (1)...(19): siRNA sense strand
cagcggccauguccuggua

SEQ ID NO: 1597784 - RNA, 19 nt, Homo sapiens
  misc_RNA (1)...(19): siRNA sense strand
uccaaggacugcacuguga

SEQ ID NO: 1597785 - RNA, 19 nt, Homo sapiens
  misc_RNA (1)...(19): siRNA sense strand
gcaguucuaccgcuacuac

SEQ ID NO: 1597786 - RNA, 19 nt, Homo sapiens
  misc_RNA (1)...(19): siRNA sense strand
acacccaguucucccaguu

SEQ ID NO: 1597787 - RNA, 19 nt, Homo sapiens
  misc_RNA (1)...(19): siRNA sense strand
gagcaguucuaccgcuacu

SEQ ID NO: 1597788 - RNA, 19 nt, Homo sapiens
  misc_RNA (1)...(19): siRNA sense strand
gcucggugcuguggcucaa

SEQ ID NO: 1597789 - RNA, 19 nt, Homo sapiens
  misc_RNA (1)...(19): siRNA sense strand
ucucccaguucaacaagga

SEQ ID NO: 1597790 - RNA, 19 nt, Homo sapiens
  misc_RNA (1)...(19): siRNA sense strand
ccaaggacugcacugugaa

SEQ ID NO: 1597791 - RNA, 19 nt, Homo sapiens
  misc_RNA (1)...(19): siRNA sense strand
ggacugcacugugaagauc

SEQ ID NO: 1597792 - RNA, 19 nt, Homo sapiens
  misc_RNA (1)...(19): siRNA sense strand
gcaacgaccugaccaucuc

SEQ ID NO: 1597793 - RNA, 19 nt, Homo sapiens
  misc_RNA (1)...(19): siRNA sense strand
caccucagcuucucccauu

SEQ ID NO: 1597794 - RNA, 19 nt, Homo sapiens
  misc_RNA (1)...(19): siRNA sense strand
cagcggccauguccuggua

SEQ ID NO: 1597795 - RNA, 19 nt, Homo sapiens
  misc_RNA (1)...(19): siRNA sense strand
uccaaggacugcacuguga

SEQ ID NO: 1597796 - RNA, 19 nt, Homo sapiens
  misc_RNA (1)...(19): siRNA sense strand
gcaguucuaccgcuacuac

SEQ ID NO: 1597797 - RNA, 19 nt, Homo sapiens
  misc_RNA (1)...(19): siRNA sense strand
acacccaguucucccaguu

SEQ ID NO: 1597798 - RNA, 19 nt, Homo sapiens
  misc_RNA (1)...(19): siRNA sense strand
gagcaguucuaccgcuacu

SEQ ID NO: 1597799 - RNA, 19 nt, Homo sapiens
  misc_RNA (1)...(19): siRNA sense strand
ucucccaguucaacaagga

SEQ ID NO: 1597800 - RNA, 19 nt, Homo sapiens
  misc_RNA (1)...(19): siRNA sense strand
ccaaggacugcacugugaa

SEQ ID NO: 1597801 - RNA, 19 nt, Homo sapiens
  misc_RNA (1)...(19): siRNA sense strand
ggacagagauugugcaugu

SEQ ID NO: 1597802 - RNA, 19 nt, Homo sapiens
  misc_RNA (1)...(19): siRNA sense strand
gaucgaauguccuaacugu

SEQ ID NO: 1597803 - RNA, 19 nt, Homo sapiens
  misc_RNA (1)...(19): siRNA sense strand
cgacguccuuuaaagauaa

SEQ ID NO: 1597804 - RNA, 19 nt, Homo sapiens
  misc_RNA (1)...(19): siRNA sense strand
gcgacguccuuuaaagaua

SEQ ID NO: 1597805 - RNA, 19 nt, Homo sapiens
  misc_RNA (1)...(19): siRNA sense strand
gcaucaagcucuccaagca

SEQ ID NO: 1597806 - RNA, 19 nt, Homo sapiens
  misc_RNA (1)...(19): siRNA sense strand
ggugacagccauugacaua

SEQ ID NO: 1597807 - RNA, 19 nt, Homo sapiens
  misc_RNA (1)...(19): siRNA sense strand
ggaaggaguucagcaucaa

SEQ ID NO: 1597808 - RNA, 19 nt, Homo sapiens
  misc_RNA (1)...(19): siRNA sense strand
gaacugauggguuucugaa

SEQ ID NO: 1597809 - RNA, 19 nt, Homo sapiens
  misc_RNA (1)...(19): siRNA sense strand
ggaugggucucgcaaaaua

SEQ ID NO: 1597810 - RNA, 19 nt, Homo sapiens
  misc_RNA (1)...(19): siRNA sense strand
ggaaggagugccucaugaa

SEQ ID NO: 1597811 - RNA, 19 nt, Homo sapiens
  misc_RNA (1)...(19): siRNA sense strand
aaacaucugcuuccacuga

SEQ ID NO: 1597812 - RNA, 19 nt, Homo sapiens
  misc_RNA (1)...(19): siRNA sense strand
gccuggaacugauggguuu

SEQ ID NO: 1597813 - RNA, 19 nt, Homo sapiens
  misc_RNA (1)...(19): siRNA sense strand
ugacagcuguucaucaaag

SEQ ID NO: 1597814 - RNA, 19 nt, Homo sapiens
  misc_RNA (1)...(19): siRNA sense strand
ugugacagcuguucaucaa

SEQ ID NO: 1597815 - RNA, 19 nt, Homo sapiens
  misc_RNA (1)...(19): siRNA sense strand
gugcauguguggccuggaa

SEQ ID NO: 1597816 - RNA, 19 nt, Homo sapiens
  misc_RNA (1)...(19): siRNA sense strand
gaacguccaguuagcuguu

SEQ ID NO: 1597817 - RNA, 19 nt, Homo sapiens
  misc_RNA (1)...(19): siRNA sense strand
gccaagagccgcugcagau

SEQ ID NO: 1597818 - RNA, 19 nt, Homo sapiens
  misc_RNA (1)...(19): siRNA sense strand
cggcaguacugguuuggaa

SEQ ID NO: 1597819 - RNA, 19 nt, Homo sapiens
  misc_RNA (1)...(19): siRNA sense strand
cggaaggaguucagcauca

SEQ ID NO: 1597820 - RNA, 19 nt, Homo sapiens
  misc_RNA (1)...(19): siRNA sense strand
ccaccaaggcugugacuuc

SEQ ID NO: 1597821 - RNA, 19 nt, Homo sapiens
  misc_RNA (1)...(19): siRNA sense strand
gaaggagugccucaugaag

SEQ ID NO: 1597822 - RNA, 19 nt, Homo sapiens
  misc_RNA (1)...(19): siRNA sense strand
gacagcuguucaucaaaga

SEQ ID NO: 1597823 - RNA, 19 nt, Homo sapiens
  misc_RNA (1)...(19): siRNA sense strand
aggaaggagugccucauga

SEQ ID NO: 1597824 - RNA, 19 nt, Homo sapiens
  misc_RNA (1)...(19): siRNA sense strand
cacuaggucugguaaagga

SEQ ID NO: 1597825 - RNA, 19 nt, Homo sapiens
  misc_RNA (1)...(19): siRNA sense strand
aggcacaaguggacgauga

SEQ ID NO: 1597826 - RNA, 19 nt, Homo sapiens
  misc_RNA (1)...(19): siRNA sense strand
ugcaaggccugcuaugaga

SEQ ID NO: 1597827 - RNA, 19 nt, Homo sapiens
  misc_RNA (1)...(19): siRNA sense strand
ccaagagccgcugcagaua

SEQ ID NO: 1597828 - RNA, 19 nt, Homo sapiens
  misc_RNA (1)...(19): siRNA sense strand
auucugagcugcaacaagu

SEQ ID NO: 1597829 - RNA, 19 nt, Homo sapiens
  misc_RNA (1)...(19): siRNA sense strand
gggguuggauguaagaaaa

SEQ ID NO: 1597830 - RNA, 19 nt, Homo sapiens
  misc_RNA (1)...(19): siRNA sense strand
uaugacaaccgaguguaua

SEQ ID NO: 1597831 - RNA, 19 nt, Homo sapiens
  misc_RNA (1)...(19): siRNA sense strand
ggaacugauggguuucuga

SEQ ID NO: 1597832 - RNA, 19 nt, Homo sapiens
  misc_RNA (1)...(19): siRNA sense strand
gcggugagauccccgauga

SEQ ID NO: 1597833 - RNA, 19 nt, Homo sapiens
  misc_RNA (1)...(19): siRNA sense strand
guagucggcaguacugguu

SEQ ID NO: 1597834 - RNA, 19 nt, Homo sapiens
  misc_RNA (1)...(19): siRNA sense strand
gugcgacguccuuuaaaga

SEQ ID NO: 1597835 - RNA, 19 nt, Homo sapiens
  misc_RNA (1)...(19): siRNA sense strand
gugaugagugcucccauga

SEQ ID NO: 1597836 - RNA, 19 nt, Homo sapiens
  misc_RNA (1)...(19): siRNA sense strand
caagagccgcugcagauac

SEQ ID NO: 1597837 - RNA, 19 nt, Homo sapiens
  misc_RNA (1)...(19): siRNA sense strand
cuggguaugugaucgaaug

SEQ ID NO: 1597838 - RNA, 19 nt, Homo sapiens
  misc_RNA (1)...(19): siRNA sense strand
gcgaggaagucaguguagu

SEQ ID NO: 1597839 - RNA, 19 nt, Homo sapiens
  misc_RNA (1)...(19): siRNA sense strand
guaugacaaccgaguguau

SEQ ID NO: 1597840 - RNA, 19 nt, Homo sapiens
  misc_RNA (1)...(19): siRNA sense strand
cugauggguuucugaagga

SEQ ID NO: 1597841 - RNA, 19 nt, Homo sapiens
  misc_RNA (1)...(19): siRNA sense strand
ccaggaacguccaguuagc

SEQ ID NO: 1597842 - RNA, 19 nt, Homo sapiens
  misc_RNA (1)...(19): siRNA sense strand
gagaggcgaggaagucagu

SEQ ID NO: 1597843 - RNA, 19 nt, Homo sapiens
  misc_RNA (1)...(19): siRNA sense strand
guaagaaaagcaugaauca

SEQ ID NO: 1597844 - RNA, 19 nt, Homo sapiens
  misc_RNA (1)...(19): siRNA sense strand
cgaggaagucaguguagug

SEQ ID NO: 1597845 - RNA, 19 nt, Homo sapiens
  misc_RNA (1)...(19): siRNA sense strand
ggggagggcuucugugaca

SEQ ID NO: 1597846 - RNA, 19 nt, Homo sapiens
  misc_RNA (1)...(19): siRNA sense strand
caaggccugcuaugagaga

SEQ ID NO: 1597847 - RNA, 19 nt, Homo sapiens
  misc_RNA (1)...(19): siRNA sense strand
agccaggaacguccaguua

SEQ ID NO: 1597848 - RNA, 19 nt, Homo sapiens
  misc_RNA (1)...(19): siRNA sense strand
uaugugaucgaauguccua

SEQ ID NO: 1597849 - RNA, 19 nt, Homo sapiens
  misc_RNA (1)...(19): siRNA sense strand
uaacuguggcguggucuau

SEQ ID NO: 1597850 - RNA, 19 nt, Homo sapiens
  misc_RNA (1)...(19): siRNA sense strand
ugacagccauugacauacc

SEQ ID NO: 1597851 - RNA, 19 nt, Homo sapiens
  misc_RNA (1)...(19): siRNA sense strand
aaagauaacgacacuaagc

SEQ ID NO: 1597852 - RNA, 19 nt, Homo sapiens
  misc_RNA (1)...(19): siRNA sense strand
ugaaggacaacaacaaugc

SEQ ID NO: 1597853 - RNA, 19 nt, Homo sapiens
  misc_RNA (1)...(19): siRNA sense strand
gagagaggcgaggaaguca

SEQ ID NO: 1597854 - RNA, 19 nt, Homo sapiens
  misc_RNA (1)...(19): siRNA sense strand
gaaggaguucagcaucaag

SEQ ID NO: 1597855 - RNA, 19 nt, Homo sapiens
  misc_RNA (1)...(19): siRNA sense strand
gccauugacauaccacuag

SEQ ID NO: 1597856 - RNA, 19 nt, Homo sapiens
  misc_RNA (1)...(19): siRNA sense strand
acaaguggacgaugaaggu

SEQ ID NO: 1597857 - RNA, 19 nt, Homo sapiens
  misc_RNA (1)...(19): siRNA sense strand
ggcguggucuaucguaguc

SEQ ID NO: 1597858 - RNA, 19 nt, Homo sapiens
  misc_RNA (1)...(19): siRNA sense strand
ugagagaggcgaggaaguc

SEQ ID NO: 1597859 - RNA, 19 nt, Homo sapiens
  misc_RNA (1)...(19): siRNA sense strand
gaccaucccguccgagucu

SEQ ID NO: 1597860 - RNA, 19 nt, Homo sapiens
  misc_RNA (1)...(19): siRNA sense strand
cugggugccugaccacgaa

SEQ ID NO: 1597861 - RNA, 19 nt, Homo sapiens
  misc_RNA (1)...(19): siRNA sense strand
gugaucgaauguccuaacu

SEQ ID NO: 1597862 - RNA, 19 nt, Homo sapiens
  misc_RNA (1)...(19): siRNA sense strand
gaaggaaggagugccucau

SEQ ID NO: 1597863 - RNA, 19 nt, Homo sapiens
  misc_RNA (1)...(19): siRNA sense strand
guccgagucugcuucaacu

SEQ ID NO: 1597864 - RNA, 19 nt, Homo sapiens
  misc_RNA (1)...(19): siRNA sense strand
gcugugggguuggauguaa

SEQ ID NO: 1597865 - RNA, 19 nt, Homo sapiens
  misc_RNA (1)...(19): siRNA sense strand
gccaggaacguccaguuag

SEQ ID NO: 1597866 - RNA, 19 nt, Homo sapiens
  misc_RNA (1)...(19): siRNA sense strand
gacagagauugugcaugug

SEQ ID NO: 1597867 - RNA, 19 nt, Homo sapiens
  misc_RNA (1)...(19): siRNA sense strand
aagagccgcugcagauacu

SEQ ID NO: 1597868 - RNA, 19 nt, Homo sapiens
  misc_RNA (1)...(19): siRNA sense strand
cugcuucaacugcaauaaa

SEQ ID NO: 1597869 - RNA, 19 nt, Homo sapiens
  misc_RNA (1)...(19): siRNA sense strand
agugugcgacguccuuuaa

SEQ ID NO: 1597870 - RNA, 19 nt, Homo sapiens
  misc_RNA (1)...(19): siRNA sense strand
aggcccaacucccagauuc

SEQ ID NO: 1597871 - RNA, 19 nt, Homo sapiens
  misc_RNA (1)...(19): siRNA sense strand
ggacagagauugugcaugu

SEQ ID NO: 1597872 - RNA, 19 nt, Homo sapiens
  misc_RNA (1)...(19): siRNA sense strand
gaucgaauguccuaacugu

SEQ ID NO: 1597873 - RNA, 19 nt, Homo sapiens
  misc_RNA (1)...(19): siRNA sense strand
cgacguccuuuaaagauaa

SEQ ID NO: 1597874 - RNA, 19 nt, Homo sapiens
  misc_RNA (1)...(19): siRNA sense strand
gcgacguccuuuaaagaua

SEQ ID NO: 1597875 - RNA, 19 nt, Homo sapiens
  misc_RNA (1)...(19): siRNA sense strand
gcaucaagcucuccaagca

SEQ ID NO: 1597876 - RNA, 19 nt, Homo sapiens
  misc_RNA (1)...(19): siRNA sense strand
ggugacagccauugacaua

SEQ ID NO: 1597877 - RNA, 19 nt, Homo sapiens
  misc_RNA (1)...(19): siRNA sense strand
ggaaggaguucagcaucaa

SEQ ID NO: 1597878 - RNA, 19 nt, Homo sapiens
  misc_RNA (1)...(19): siRNA sense strand
gaacugauggguuucugaa

SEQ ID NO: 1597879 - RNA, 19 nt, Homo sapiens
  misc_RNA (1)...(19): siRNA sense strand
ggaugggucucgcaaaaua

SEQ ID NO: 1597880 - RNA, 19 nt, Homo sapiens
  misc_RNA (1)...(19): siRNA sense strand
ggaaggagugccucaugaa

SEQ ID NO: 1597881 - RNA, 19 nt, Homo sapiens
  misc_RNA (1)...(19): siRNA sense strand
aaacaucugcuuccacuga

SEQ ID NO: 1597882 - RNA, 19 nt, Homo sapiens
  misc_RNA (1)...(19): siRNA sense strand
gccuggaacugauggguuu

SEQ ID NO: 1597883 - RNA, 19 nt, Homo sapiens
  misc_RNA (1)...(19): siRNA sense strand
ugacagcuguucaucaaag

SEQ ID NO: 1597884 - RNA, 19 nt, Homo sapiens
  misc_RNA (1)...(19): siRNA sense strand
ugugacagcuguucaucaa

SEQ ID NO: 1597885 - RNA, 19 nt, Homo sapiens
  misc_RNA (1)...(19): siRNA sense strand
gugcauguguggccuggaa

SEQ ID NO: 1597886 - RNA, 19 nt, Homo sapiens
  misc_RNA (1)...(19): siRNA sense strand
gaacguccaguuagcuguu

SEQ ID NO: 1597887 - RNA, 19 nt, Homo sapiens
  misc_RNA (1)...(19): siRNA sense strand
gccaagagccgcugcagau

SEQ ID NO: 1597888 - RNA, 19 nt, Homo sapiens
  misc_RNA (1)...(19): siRNA sense strand
cggcaguacugguuuggaa

SEQ ID NO: 1597889 - RNA, 19 nt, Homo sapiens
  misc_RNA (1)...(19): siRNA sense strand
cggaaggaguucagcauca

SEQ ID NO: 1597890 - RNA, 19 nt, Homo sapiens
  misc_RNA (1)...(19): siRNA sense strand
ccaccaaggcugugacuuc

SEQ ID NO: 1597891 - RNA, 19 nt, Homo sapiens
  misc_RNA (1)...(19): siRNA sense strand
gaaggagugccucaugaag

SEQ ID NO: 1597892 - RNA, 19 nt, Homo sapiens
  misc_RNA (1)...(19): siRNA sense strand
gacagcuguucaucaaaga

SEQ ID NO: 1597893 - RNA, 19 nt, Homo sapiens
  misc_RNA (1)...(19): siRNA sense strand
aggaaggagugccucauga

SEQ ID NO: 1597894 - RNA, 19 nt, Homo sapiens
  misc_RNA (1)...(19): siRNA sense strand
cacuaggucugguaaagga

SEQ ID NO: 1597895 - RNA, 19 nt, Homo sapiens
  misc_RNA (1)...(19): siRNA sense strand
aggcacaaguggacgauga

SEQ ID NO: 1597896 - RNA, 19 nt, Homo sapiens
  misc_RNA (1)...(19): siRNA sense strand
ugcaaggccugcuaugaga

SEQ ID NO: 1597897 - RNA, 19 nt, Homo sapiens
  misc_RNA (1)...(19): siRNA sense strand
ccaagagccgcugcagaua

SEQ ID NO: 1597898 - RNA, 19 nt, Homo sapiens
  misc_RNA (1)...(19): siRNA sense strand
auucugagcugcaacaagu

SEQ ID NO: 1597899 - RNA, 19 nt, Homo sapiens
  misc_RNA (1)...(19): siRNA sense strand
gggguuggauguaagaaaa

SEQ ID NO: 1597900 - RNA, 19 nt, Homo sapiens
  misc_RNA (1)...(19): siRNA sense strand
uaugacaaccgaguguaua

SEQ ID NO: 1597901 - RNA, 19 nt, Homo sapiens
  misc_RNA (1)...(19): siRNA sense strand
ggaacugauggguuucuga

SEQ ID NO: 1597902 - RNA, 19 nt, Homo sapiens
  misc_RNA (1)...(19): siRNA sense strand
guagucggcaguacugguu

SEQ ID NO: 1597903 - RNA, 19 nt, Homo sapiens
  misc_RNA (1)...(19): siRNA sense strand
gugcgacguccuuuaaaga

SEQ ID NO: 1597904 - RNA, 19 nt, Homo sapiens
  misc_RNA (1)...(19): siRNA sense strand
gugaugagugcucccauga

SEQ ID NO: 1597905 - RNA, 19 nt, Homo sapiens
  misc_RNA (1)...(19): siRNA sense strand
guaugacaaccgaguguau

SEQ ID NO: 1597906 - RNA, 19 nt, Homo sapiens
  misc_RNA (1)...(19): siRNA sense strand
cuggguaugugaucgaaug

SEQ ID NO: 1597907 - RNA, 19 nt, Homo sapiens
  misc_RNA (1)...(19): siRNA sense strand
caagagccgcugcagauac

SEQ ID NO: 1597908 - RNA, 19 nt, Homo sapiens
  misc_RNA (1)...(19): siRNA sense strand
gcgaggaagucaguguagu

SEQ ID NO: 1597909 - RNA, 19 nt, Homo sapiens
  misc_RNA (1)...(19): siRNA sense strand
cugauggguuucugaagga

SEQ ID NO: 1597910 - RNA, 19 nt, Homo sapiens
  misc_RNA (1)...(19): siRNA sense strand
ccaggaacguccaguuagc

SEQ ID NO: 1597911 - RNA, 19 nt, Homo sapiens
  misc_RNA (1)...(19): siRNA sense strand
gagaggcgaggaagucagu

SEQ ID NO: 1597912 - RNA, 19 nt, Homo sapiens
  misc_RNA (1)...(19): siRNA sense strand
guaagaaaagcaugaauca

SEQ ID NO: 1597913 - RNA, 19 nt, Homo sapiens
  misc_RNA (1)...(19): siRNA sense strand
cgaggaagucaguguagug

SEQ ID NO: 1597914 - RNA, 19 nt, Homo sapiens
  misc_RNA (1)...(19): siRNA sense strand
ggggagggcuucugugaca

SEQ ID NO: 1597915 - RNA, 19 nt, Homo sapiens
  misc_RNA (1)...(19): siRNA sense strand
caaggccugcuaugagaga

SEQ ID NO: 1597916 - RNA, 19 nt, Homo sapiens
  misc_RNA (1)...(19): siRNA sense strand
agccaggaacguccaguua

SEQ ID NO: 1597917 - RNA, 19 nt, Homo sapiens
  misc_RNA (1)...(19): siRNA sense strand
uaugugaucgaauguccua

SEQ ID NO: 1597918 - RNA, 19 nt, Homo sapiens
  misc_RNA (1)...(19): siRNA sense strand
uaacuguggcguggucuau

SEQ ID NO: 1597919 - RNA, 19 nt, Homo sapiens
  misc_RNA (1)...(19): siRNA sense strand
ugacagccauugacauacc

SEQ ID NO: 1597920 - RNA, 19 nt, Homo sapiens
  misc_RNA (1)...(19): siRNA sense strand
aaagauaacgacacuaagc

SEQ ID NO: 1597921 - RNA, 19 nt, Homo sapiens
  misc_RNA (1)...(19): siRNA sense strand
ugaaggacaacaacaaugc

SEQ ID NO: 1597922 - RNA, 19 nt, Homo sapiens
  misc_RNA (1)...(19): siRNA sense strand
gagagaggcgaggaaguca

SEQ ID NO: 1597923 - RNA, 19 nt, Homo sapiens
  misc_RNA (1)...(19): siRNA sense strand
gaaggaguucagcaucaag

SEQ ID NO: 1597924 - RNA, 19 nt, Homo sapiens
  misc_RNA (1)...(19): siRNA sense strand
gccauugacauaccacuag

SEQ ID NO: 1597925 - RNA, 19 nt, Homo sapiens
  misc_RNA (1)...(19): siRNA sense strand
acaaguggacgaugaaggu

SEQ ID NO: 1597926 - RNA, 19 nt, Homo sapiens
  misc_RNA (1)...(19): siRNA sense strand
ggcguggucuaucguaguc

SEQ ID NO: 1597927 - RNA, 19 nt, Homo sapiens
  misc_RNA (1)...(19): siRNA sense strand
gugaucgaauguccuaacu

SEQ ID NO: 1597928 - RNA, 19 nt, Homo sapiens
  misc_RNA (1)...(19): siRNA sense strand
gaccaucccguccgagucu

SEQ ID NO: 1597929 - RNA, 19 nt, Homo sapiens
  misc_RNA (1)...(19): siRNA sense strand
ugagagaggcgaggaaguc

SEQ ID NO: 1597930 - RNA, 19 nt, Homo sapiens
  misc_RNA (1)...(19): siRNA sense strand
cugggugccugaccacgaa

SEQ ID NO: 1597931 - RNA, 19 nt, Homo sapiens
  misc_RNA (1)...(19): siRNA sense strand
gacagagauugugcaugug

SEQ ID NO: 1597932 - RNA, 19 nt, Homo sapiens
  misc_RNA (1)...(19): siRNA sense strand
guccgagucugcuucaacu

SEQ ID NO: 1597933 - RNA, 19 nt, Homo sapiens
  misc_RNA (1)...(19): siRNA sense strand
gccaggaacguccaguuag

SEQ ID NO: 1597934 - RNA, 19 nt, Homo sapiens
  misc_RNA (1)...(19): siRNA sense strand
gaaggaaggagugccucau

SEQ ID NO: 1597935 - RNA, 19 nt, Homo sapiens
  misc_RNA (1)...(19): siRNA sense strand
gcugugggguuggauguaa

SEQ ID NO: 1597936 - RNA, 19 nt, Homo sapiens
  misc_RNA (1)...(19): siRNA sense strand
aagagccgcugcagauacu

SEQ ID NO: 1597937 - RNA, 19 nt, Homo sapiens
  misc_RNA (1)...(19): siRNA sense strand
cugcuucaacugcaauaaa

SEQ ID NO: 1597938 - RNA, 19 nt, Homo sapiens
  misc_RNA (1)...(19): siRNA sense strand
agugugcgacguccuuuaa

SEQ ID NO: 1597939 - RNA, 19 nt, Homo sapiens
  misc_RNA (1)...(19): siRNA sense strand
aggcccaacucccagauuc

SEQ ID NO: 1597940 - RNA, 19 nt, Homo sapiens
  misc_RNA (1)...(19): siRNA sense strand
gagauaccgugaaacauua

SEQ ID NO: 1597941 - RNA, 19 nt, Homo sapiens
  misc_RNA (1)...(19): siRNA sense strand
gcagggagauaccgugaaa

SEQ ID NO: 1597942 - RNA, 19 nt, Homo sapiens
  misc_RNA (1)...(19): siRNA sense strand
ggagauaccgugaaacauu

SEQ ID NO: 1597943 - RNA, 19 nt, Homo sapiens
  misc_RNA (1)...(19): siRNA sense strand
gaggagcucuacaacauca

SEQ ID NO: 1597944 - RNA, 19 nt, Homo sapiens
  misc_RNA (1)...(19): siRNA sense strand
ccagaagccuugggagaaa

SEQ ID NO: 1597945 - RNA, 19 nt, Homo sapiens
  misc_RNA (1)...(19): siRNA sense strand
cugcaucccugguguguaa

SEQ ID NO: 1597946 - RNA, 19 nt, Homo sapiens
  misc_RNA (1)...(19): siRNA sense strand
gaagcuugcuggacuuucu

SEQ ID NO: 1597947 - RNA, 19 nt, Homo sapiens
  misc_RNA (1)...(19): siRNA sense strand
ugauggagaucgucaccua

SEQ ID NO: 1597948 - RNA, 19 nt, Homo sapiens
  misc_RNA (1)...(19): siRNA sense strand
ccaaggagcccaucuacau

SEQ ID NO: 1597949 - RNA, 19 nt, Homo sapiens
  misc_RNA (1)...(19): siRNA sense strand
ugguugcccuguaugauua

SEQ ID NO: 1597950 - RNA, 19 nt, Homo sapiens
  misc_RNA (1)...(19): siRNA sense strand
gagcccaucuacaucauca

SEQ ID NO: 1597951 - RNA, 19 nt, Homo sapiens
  misc_RNA (1)...(19): siRNA sense strand
ugaaaacucugcagcauga

SEQ ID NO: 1597952 - RNA, 19 nt, Homo sapiens
  misc_RNA (1)...(19): siRNA sense strand
ucgaauacauccagagugu

SEQ ID NO: 1597953 - RNA, 19 nt, Homo sapiens
  misc_RNA (1)...(19): siRNA sense strand
gaucccacauccaccauca

SEQ ID NO: 1597954 - RNA, 19 nt, Homo sapiens
  misc_RNA (1)...(19): siRNA sense strand
cgugaaacauuacaagauc

SEQ ID NO: 1597955 - RNA, 19 nt, Homo sapiens
  misc_RNA (1)...(19): siRNA sense strand
caucgugguugcccuguau

SEQ ID NO: 1597956 - RNA, 19 nt, Homo sapiens
  misc_RNA (1)...(19): siRNA sense strand
gaaagaugccugggagauc

SEQ ID NO: 1597957 - RNA, 19 nt, Homo sapiens
  misc_RNA (1)...(19): siRNA sense strand
gucaaacccugaagugauc

SEQ ID NO: 1597958 - RNA, 19 nt, Homo sapiens
  misc_RNA (1)...(19): siRNA sense strand
ggagacagaggagugguuu

SEQ ID NO: 1597959 - RNA, 19 nt, Homo sapiens
  misc_RNA (1)...(19): siRNA sense strand
gcaacaugcugggcuccuu

SEQ ID NO: 1597960 - RNA, 19 nt, Homo sapiens
  misc_RNA (1)...(19): siRNA sense strand
guguaagauugcugacuuu

SEQ ID NO: 1597961 - RNA, 19 nt, Homo sapiens
  misc_RNA (1)...(19): siRNA sense strand
ccuccgagcugccaacauc

SEQ ID NO: 1597962 - RNA, 19 nt, Homo sapiens
  misc_RNA (1)...(19): siRNA sense strand
uguguaagauugcugacuu

SEQ ID NO: 1597963 - RNA, 19 nt, Homo sapiens
  misc_RNA (1)...(19): siRNA sense strand
ggucggaggcaauacauuc

SEQ ID NO: 1597964 - RNA, 19 nt, Homo sapiens
  misc_RNA (1)...(19): siRNA sense strand
augcugggcuccuucauga

SEQ ID NO: 1597965 - RNA, 19 nt, Homo sapiens
  misc_RNA (1)...(19): siRNA sense strand
ugacuucucagcccagauu

SEQ ID NO: 1597966 - RNA, 19 nt, Homo sapiens
  misc_RNA (1)...(19): siRNA sense strand
gacgucugguccuuuggua

SEQ ID NO: 1597967 - RNA, 19 nt, Homo sapiens
  misc_RNA (1)...(19): siRNA sense strand
gaggcaauacauucucaaa

SEQ ID NO: 1597968 - RNA, 19 nt, Homo sapiens
  misc_RNA (1)...(19): siRNA sense strand
gggauagcgagaccacuaa

SEQ ID NO: 1597969 - RNA, 19 nt, Homo sapiens
  misc_RNA (1)...(19): siRNA sense strand
agagugugcuggaugacuu

SEQ ID NO: 1597970 - RNA, 19 nt, Homo sapiens
  misc_RNA (1)...(19): siRNA sense strand
ucauugaggacaacgagua

SEQ ID NO: 1597971 - RNA, 19 nt, Homo sapiens
  misc_RNA (1)...(19): siRNA sense strand
ccacagagagccaguacca

SEQ ID NO: 1597972 - RNA, 19 nt, Homo sapiens
  misc_RNA (1)...(19): siRNA sense strand
cccucaagcuggagaagaa

SEQ ID NO: 1597973 - RNA, 19 nt, Homo sapiens
  misc_RNA (1)...(19): siRNA sense strand
gaugucaaacccugaagug

SEQ ID NO: 1597974 - RNA, 19 nt, Homo sapiens
  misc_RNA (1)...(19): siRNA sense strand
ggauagcgagaccacuaaa

SEQ ID NO: 1597975 - RNA, 19 nt, Homo sapiens
  misc_RNA (1)...(19): siRNA sense strand
acuuggagcugggcaguuu

SEQ ID NO: 1597976 - RNA, 19 nt, Homo sapiens
  misc_RNA (1)...(19): siRNA sense strand
gugguugcccuguaugauu

SEQ ID NO: 1597977 - RNA, 19 nt, Homo sapiens
  misc_RNA (1)...(19): siRNA sense strand
gacaagcuggucaaacuuc

SEQ ID NO: 1597978 - RNA, 19 nt, Homo sapiens
  misc_RNA (1)...(19): siRNA sense strand
gcagaggccaacgugauga

SEQ ID NO: 1597979 - RNA, 19 nt, Homo sapiens
  misc_RNA (1)...(19): siRNA sense strand
cuacaucccaagcaacuau

SEQ ID NO: 1597980 - RNA, 19 nt, Homo sapiens
  misc_RNA (1)...(19): siRNA sense strand
ggauggccaccuacaacaa

SEQ ID NO: 1597981 - RNA, 19 nt, Homo sapiens
  misc_RNA (1)...(19): siRNA sense strand
ucaccaaggagcccaucua

SEQ ID NO: 1597982 - RNA, 19 nt, Homo sapiens
  misc_RNA (1)...(19): siRNA sense strand
caaguggacagcuccugaa

SEQ ID NO: 1597983 - RNA, 19 nt, Homo sapiens
  misc_RNA (1)...(19): siRNA sense strand
cgggauagcgagaccacua

SEQ ID NO: 1597984 - RNA, 19 nt, Homo sapiens
  misc_RNA (1)...(19): siRNA sense strand
caaggagcccaucuacauc

SEQ ID NO: 1597985 - RNA, 19 nt, Homo sapiens
  misc_RNA (1)...(19): siRNA sense strand
ucccugguguguaagauug

SEQ ID NO: 1597986 - RNA, 19 nt, Homo sapiens
  misc_RNA (1)...(19): siRNA sense strand
cagcaacacaccaggaauc

SEQ ID NO: 1597987 - RNA, 19 nt, Homo sapiens
  misc_RNA (1)...(19): siRNA sense strand
ugucaaacccugaagugau

SEQ ID NO: 1597988 - RNA, 19 nt, Homo sapiens
  misc_RNA (1)...(19): siRNA sense strand
cggaggcaauacauucuca

SEQ ID NO: 1597989 - RNA, 19 nt, Homo sapiens
  misc_RNA (1)...(19): siRNA sense strand
acaacaagcacaccaaggu

SEQ ID NO: 1597990 - RNA, 19 nt, Homo sapiens
  misc_RNA (1)...(19): siRNA sense strand
caugaugcgcugcuggaaa

SEQ ID NO: 1597991 - RNA, 19 nt, Homo sapiens
  misc_RNA (1)...(19): siRNA sense strand
cugaagccaucaacuuugg

SEQ ID NO: 1597992 - RNA, 19 nt, Homo sapiens
  misc_RNA (1)...(19): siRNA sense strand
cuaauagccacaacagcaa

SEQ ID NO: 1597993 - RNA, 19 nt, Homo sapiens
  misc_RNA (1)...(19): siRNA sense strand
ggaguucauggccaaagga

SEQ ID NO: 1597994 - RNA, 19 nt, Homo sapiens
  misc_RNA (1)...(19): siRNA sense strand
acaagcuggucaaacuuca

SEQ ID NO: 1597995 - RNA, 19 nt, Homo sapiens
  misc_RNA (1)...(19): siRNA sense strand
ggcagaggccaacgugaug

SEQ ID NO: 1597996 - RNA, 19 nt, Homo sapiens
  misc_RNA (1)...(19): siRNA sense strand
gcugggcuccuucaugauc

SEQ ID NO: 1597997 - RNA, 19 nt, Homo sapiens
  misc_RNA (1)...(19): siRNA sense strand
guaccaacagcagccauga

SEQ ID NO: 1597998 - RNA, 19 nt, Homo sapiens
  misc_RNA (1)...(19): siRNA sense strand
ggagcucuacaacaucaug

SEQ ID NO: 1597999 - RNA, 19 nt, Homo sapiens
  misc_RNA (1)...(19): siRNA sense strand
ggcaggcucugaggacauc

SEQ ID NO: 1598000 - RNA, 19 nt, Homo sapiens
  misc_RNA (1)...(19): siRNA sense strand
caucaucacggaguucaug

SEQ ID NO: 1598001 - RNA, 19 nt, Homo sapiens
  misc_RNA (1)...(19): siRNA sense strand
gaugaaaacucugcagcau

SEQ ID NO: 1598002 - RNA, 19 nt, Homo sapiens
  misc_RNA (1)...(19): siRNA sense strand
gugcaugaaguccaaguuc

SEQ ID NO: 1598003 - RNA, 19 nt, Homo sapiens
  misc_RNA (1)...(19): siRNA sense strand
gagcucuacaacaucauga

SEQ ID NO: 1598004 - RNA, 19 nt, Homo sapiens
  misc_RNA (1)...(19): siRNA sense strand
uagcgagaccacuaaagga

SEQ ID NO: 1598005 - RNA, 19 nt, Homo sapiens
  misc_RNA (1)...(19): siRNA sense strand
guaagauugcugacuuugg

SEQ ID NO: 1598006 - RNA, 19 nt, Homo sapiens
  misc_RNA (1)...(19): siRNA sense strand
gauggccaccuacaacaag

SEQ ID NO: 1598007 - RNA, 19 nt, Homo sapiens
  misc_RNA (1)...(19): siRNA sense strand
ccugaagccaucaacuuug

SEQ ID NO: 1598008 - RNA, 19 nt, Homo sapiens
  misc_RNA (1)...(19): siRNA sense strand
uccugaagccaucaacuuu

SEQ ID NO: 1598009 - RNA, 19 nt, Homo sapiens
  misc_RNA (1)...(19): siRNA sense strand
ggccgaccuucgaauacau

SEQ ID NO: 1598010 - RNA, 19 nt, Homo sapiens
  misc_RNA (1)...(19): siRNA sense strand
cggccgaccuucgaauaca

SEQ ID NO: 1598011 - RNA, 19 nt, Homo sapiens
  misc_RNA (1)...(19): siRNA sense strand
guauccugcugauggagau

SEQ ID NO: 1598012 - RNA, 19 nt, Homo sapiens
  misc_RNA (1)...(19): siRNA sense strand
ggaacaacaugaaauauag

SEQ ID NO: 1598013 - RNA, 19 nt, Homo sapiens
  misc_RNA (1)...(19): siRNA sense strand
ucaccaagaugcugaaauu

SEQ ID NO: 1598014 - RNA, 19 nt, Homo sapiens
  misc_RNA (1)...(19): siRNA sense strand
ggaaacaauugggaaauau

SEQ ID NO: 1598015 - RNA, 19 nt, Homo sapiens
  misc_RNA (1)...(19): siRNA sense strand
gaucccagcuguacaauag

SEQ ID NO: 1598016 - RNA, 19 nt, Homo sapiens
  misc_RNA (1)...(19): siRNA sense strand
uggcuuacaucaacuaaua

SEQ ID NO: 1598017 - RNA, 19 nt, Homo sapiens
  misc_RNA (1)...(19): siRNA sense strand
gaauauggcugaccuacag

SEQ ID NO: 1598018 - RNA, 19 nt, Homo sapiens
  misc_RNA (1)...(19): siRNA sense strand
agaauucccucaaauagaa

SEQ ID NO: 1598019 - RNA, 19 nt, Homo sapiens
  misc_RNA (1)...(19): siRNA sense strand
caagaugacaguuugauuu

SEQ ID NO: 1598020 - RNA, 19 nt, Homo sapiens
  misc_RNA (1)...(19): siRNA sense strand
gaagaauucccucaaauag

SEQ ID NO: 1598021 - RNA, 19 nt, Homo sapiens
  misc_RNA (1)...(19): siRNA sense strand
gaaauauaguuggguguug

SEQ ID NO: 1598022 - RNA, 19 nt, Homo sapiens
  misc_RNA (1)...(19): siRNA sense strand
guagaagaauuucguaaag

SEQ ID NO: 1598023 - RNA, 19 nt, Homo sapiens
  misc_RNA (1)...(19): siRNA sense strand
uaaaggauuucccucuuga

SEQ ID NO: 1598024 - RNA, 19 nt, Homo sapiens
  misc_RNA (1)...(19): siRNA sense strand
aauagaggaucacguaauu

SEQ ID NO: 1598025 - RNA, 19 nt, Homo sapiens
  misc_RNA (1)...(19): siRNA sense strand
ggaccuggccugaugcuuu

SEQ ID NO: 1598026 - RNA, 19 nt, Homo sapiens
  misc_RNA (1)...(19): siRNA sense strand
auacuacacuuucuuggua

SEQ ID NO: 1598027 - RNA, 19 nt, Homo sapiens
  misc_RNA (1)...(19): siRNA sense strand
caacaccgacuacuuagaa

SEQ ID NO: 1598028 - RNA, 19 nt, Homo sapiens
  misc_RNA (1)...(19): siRNA sense strand
ccacugcccuucucccaaa

SEQ ID NO: 1598029 - RNA, 19 nt, Homo sapiens
  misc_RNA (1)...(19): siRNA sense strand
caggaaauguagaagaauu

SEQ ID NO: 1598030 - RNA, 19 nt, Homo sapiens
  misc_RNA (1)...(19): siRNA sense strand
gaugacaguuugauuuaca

SEQ ID NO: 1598031 - RNA, 19 nt, Homo sapiens
  misc_RNA (1)...(19): siRNA sense strand
gaaggaaacaauugggaaa

SEQ ID NO: 1598032 - RNA, 19 nt, Homo sapiens
  misc_RNA (1)...(19): siRNA sense strand
gaacagaugaaguugacaa

SEQ ID NO: 1598033 - RNA, 19 nt, Homo sapiens
  misc_RNA (1)...(19): siRNA sense strand
gaaccaacaccgacuacuu

SEQ ID NO: 1598034 - RNA, 19 nt, Homo sapiens
  misc_RNA (1)...(19): siRNA sense strand
gaugacaaagcuguuauua

SEQ ID NO: 1598035 - RNA, 19 nt, Homo sapiens
  misc_RNA (1)...(19): siRNA sense strand
gaaaugcgaaaugaaguuu

SEQ ID NO: 1598036 - RNA, 19 nt, Homo sapiens
  misc_RNA (1)...(19): siRNA sense strand
gaagcaaggcauccugauu

SEQ ID NO: 1598037 - RNA, 19 nt, Homo sapiens
  misc_RNA (1)...(19): siRNA sense strand
gcagaugacaaagcuguua

SEQ ID NO: 1598038 - RNA, 19 nt, Homo sapiens
  misc_RNA (1)...(19): siRNA sense strand
gaccuggccugaugcuuug

SEQ ID NO: 1598039 - RNA, 19 nt, Homo sapiens
  misc_RNA (1)...(19): siRNA sense strand
ggauuucccucuugagaca

SEQ ID NO: 1598040 - RNA, 19 nt, Homo sapiens
  misc_RNA (1)...(19): siRNA sense strand
cauauuacuuugcuggauu

SEQ ID NO: 1598041 - RNA, 19 nt, Homo sapiens
  misc_RNA (1)...(19): siRNA sense strand
ggaaagaagucugggaaaa

SEQ ID NO: 1598042 - RNA, 19 nt, Homo sapiens
  misc_RNA (1)...(19): siRNA sense strand
cauaaaggauuucccucuu

SEQ ID NO: 1598043 - RNA, 19 nt, Homo sapiens
  misc_RNA (1)...(19): siRNA sense strand
gcaaaccuaaacagucaua

SEQ ID NO: 1598044 - RNA, 19 nt, Homo sapiens
  misc_RNA (1)...(19): siRNA sense strand
gcucagcuuugacaacaga

SEQ ID NO: 1598045 - RNA, 19 nt, Homo sapiens
  misc_RNA (1)...(19): siRNA sense strand
aaacagagugcuuccauga

SEQ ID NO: 1598046 - RNA, 19 nt, Homo sapiens
  misc_RNA (1)...(19): siRNA sense strand
gaucaugaaaugcgaaaug

SEQ ID NO: 1598047 - RNA, 19 nt, Homo sapiens
  misc_RNA (1)...(19): siRNA sense strand
ucacguaauugcaggaaau

SEQ ID NO: 1598048 - RNA, 19 nt, Homo sapiens
  misc_RNA (1)...(19): siRNA sense strand
uggcaaaccuaaacaguca

SEQ ID NO: 1598049 - RNA, 19 nt, Homo sapiens
  misc_RNA (1)...(19): siRNA sense strand
aggaaacaauugggaaaua

SEQ ID NO: 1598050 - RNA, 19 nt, Homo sapiens
  misc_RNA (1)...(19): siRNA sense strand
gaugucagcauaaaggauu

SEQ ID NO: 1598051 - RNA, 19 nt, Homo sapiens
  misc_RNA (1)...(19): siRNA sense strand
gugcuuccaugacuucuga

SEQ ID NO: 1598052 - RNA, 19 nt, Homo sapiens
  misc_RNA (1)...(19): siRNA sense strand
uuacauggauccucauuac

SEQ ID NO: 1598053 - RNA, 19 nt, Homo sapiens
  misc_RNA (1)...(19): siRNA sense strand
aaccaacaccgacuacuua

SEQ ID NO: 1598054 - RNA, 19 nt, Homo sapiens
  misc_RNA (1)...(19): siRNA sense strand
aagcaaggcauccugauuu

SEQ ID NO: 1598055 - RNA, 19 nt, Homo sapiens
  misc_RNA (1)...(19): siRNA sense strand
gaaauguucaggacuucaa

SEQ ID NO: 1598056 - RNA, 19 nt, Homo sapiens
  misc_RNA (1)...(19): siRNA sense strand
agcaaggcauccugauuua

SEQ ID NO: 1598057 - RNA, 19 nt, Homo sapiens
  misc_RNA (1)...(19): siRNA sense strand
gauguacaauagaggauca

SEQ ID NO: 1598058 - RNA, 19 nt, Homo sapiens
  misc_RNA (1)...(19): siRNA sense strand
uuacuuugcuggauuucaa

SEQ ID NO: 1598059 - RNA, 19 nt, Homo sapiens
  misc_RNA (1)...(19): siRNA sense strand
ccugaugcuuugaauauug

SEQ ID NO: 1598060 - RNA, 19 nt, Homo sapiens
  misc_RNA (1)...(19): siRNA sense strand
ggacucauacuacacuuuc

SEQ ID NO: 1598061 - RNA, 19 nt, Homo sapiens
  misc_RNA (1)...(19): siRNA sense strand
auagaaggcucagcuuuga

SEQ ID NO: 1598062 - RNA, 19 nt, Homo sapiens
  misc_RNA (1)...(19): siRNA sense strand
gcuuggaccuggccugaug

SEQ ID NO: 1598063 - RNA, 19 nt, Homo sapiens
  misc_RNA (1)...(19): siRNA sense strand
cugaagaaaucaccaagau

SEQ ID NO: 1598064 - RNA, 19 nt, Homo sapiens
  misc_RNA (1)...(19): siRNA sense strand
aaauauaguuggguguuga

SEQ ID NO: 1598065 - RNA, 19 nt, Homo sapiens
  misc_RNA (1)...(19): siRNA sense strand
cuauuuauguugcacaaga

SEQ ID NO: 1598066 - RNA, 19 nt, Homo sapiens
  misc_RNA (1)...(19): siRNA sense strand
uacaauagaggaucacgua

SEQ ID NO: 1598067 - RNA, 19 nt, Homo sapiens
  misc_RNA (1)...(19): siRNA sense strand
ggccugaugcuuugaauau

SEQ ID NO: 1598068 - RNA, 19 nt, Homo sapiens
  misc_RNA (1)...(19): siRNA sense strand
gagucgggauguacaauag

SEQ ID NO: 1598069 - RNA, 19 nt, Homo sapiens
  misc_RNA (1)...(19): siRNA sense strand
gaaaaucaucucuugguuu

SEQ ID NO: 1598070 - RNA, 19 nt, Homo sapiens
  misc_RNA (1)...(19): siRNA sense strand
gaacuggccagaugcucuu

SEQ ID NO: 1598071 - RNA, 19 nt, Homo sapiens
  misc_RNA (1)...(19): siRNA sense strand
agaugaaguugacaagcua

SEQ ID NO: 1598072 - RNA, 19 nt, Homo sapiens
  misc_RNA (1)...(19): siRNA sense strand
ugcaggaaauguagaagaa

SEQ ID NO: 1598073 - RNA, 19 nt, Homo sapiens
  misc_RNA (1)...(19): siRNA sense strand
auaaaggauuucccucuug

SEQ ID NO: 1598074 - RNA, 19 nt, Homo sapiens
  misc_RNA (1)...(19): siRNA sense strand
ggaaaaucaucucuugguu

SEQ ID NO: 1598075 - RNA, 19 nt, Homo sapiens
  misc_RNA (1)...(19): siRNA sense strand
cguaauugcaggaaaugua

SEQ ID NO: 1598076 - RNA, 19 nt, Homo sapiens
  misc_RNA (1)...(19): siRNA sense strand
caccgacuacuuagaauuu

SEQ ID NO: 1598077 - RNA, 19 nt, Homo sapiens
  misc_RNA (1)...(19): siRNA sense strand
caaggcauccugauuuaca

SEQ ID NO: 1598078 - RNA, 19 nt, Homo sapiens
  misc_RNA (1)...(19): siRNA sense strand
gcucaaggacucauacuac

SEQ ID NO: 1598079 - RNA, 19 nt, Homo sapiens
  misc_RNA (1)...(19): siRNA sense strand
uagaauuugugaaggguau

SEQ ID NO: 1598080 - RNA, 19 nt, Homo sapiens
  misc_RNA (1)...(19): siRNA sense strand
aaaaucaucucuugguuug

SEQ ID NO: 1598081 - RNA, 19 nt, Homo sapiens
  misc_RNA (1)...(19): siRNA sense strand
caauagaggaucacguaau

SEQ ID NO: 1598082 - RNA, 19 nt, Homo sapiens
  misc_RNA (1)...(19): siRNA sense strand
ccucauuacugccaaucuu

SEQ ID NO: 1598083 - RNA, 19 nt, Homo sapiens
  misc_RNA (1)...(19): siRNA sense strand
cagaugaaguugacaagcu

SEQ ID NO: 1598084 - RNA, 19 nt, Homo sapiens
  misc_RNA (1)...(19): siRNA sense strand
caacaauuucucugaagga

SEQ ID NO: 1598085 - RNA, 19 nt, Homo sapiens
  misc_RNA (1)...(19): siRNA sense strand
ugggaaauauucugaugau

SEQ ID NO: 1598086 - RNA, 19 nt, Homo sapiens
  misc_RNA (1)...(19): siRNA sense strand
ggacuucccacacugucaa

SEQ ID NO: 1598087 - RNA, 19 nt, Homo sapiens
  misc_RNA (1)...(19): siRNA sense strand
gucgaaauguucaggacuu

SEQ ID NO: 1598088 - RNA, 19 nt, Homo sapiens
  misc_RNA (1)...(19): siRNA sense strand
gacaaagcuguuauuauuc

SEQ ID NO: 1598089 - RNA, 19 nt, Homo sapiens
  misc_RNA (1)...(19): siRNA sense strand
aaauagaaggcucagcuuu

SEQ ID NO: 1598090 - RNA, 19 nt, Homo sapiens
  misc_RNA (1)...(19): siRNA sense strand
caucuacuacaaccaauga

SEQ ID NO: 1598091 - RNA, 19 nt, Homo sapiens
  misc_RNA (1)...(19): siRNA sense strand
gauuucaagaugacaguuu

SEQ ID NO: 1598092 - RNA, 19 nt, Homo sapiens
  misc_RNA (1)...(19): siRNA sense strand
gaauuugugaaggguauuu

SEQ ID NO: 1598093 - RNA, 19 nt, Homo sapiens
  misc_RNA (1)...(19): siRNA sense strand
aauagaaggcucagcuuug

SEQ ID NO: 1598094 - RNA, 19 nt, Homo sapiens
  misc_RNA (1)...(19): siRNA sense strand
guagaugucagcauaaagg

SEQ ID NO: 1598095 - RNA, 19 nt, Homo sapiens
  misc_RNA (1)...(19): siRNA sense strand
guaauugcaggaaauguag

SEQ ID NO: 1598096 - RNA, 19 nt, Homo sapiens
  misc_RNA (1)...(19): siRNA sense strand
uagacuugguggagaaaga

SEQ ID NO: 1598097 - RNA, 19 nt, Homo sapiens
  misc_RNA (1)...(19): siRNA sense strand
guacaguuuacaauucuga

SEQ ID NO: 1598098 - RNA, 19 nt, Homo sapiens
  misc_RNA (1)...(19): siRNA sense strand
auugagaacuggccagaug

SEQ ID NO: 1598099 - RNA, 19 nt, Homo sapiens
  misc_RNA (1)...(19): siRNA sense strand
acaguuugauuuacaugga

SEQ ID NO: 1598100 - RNA, 19 nt, Homo sapiens
  misc_RNA (1)...(19): siRNA sense strand
ccuaaacagucauauuacu

SEQ ID NO: 1598101 - RNA, 19 nt, Homo sapiens
  misc_RNA (1)...(19): siRNA sense strand
cuacuuagaauuugugaag

SEQ ID NO: 1598102 - RNA, 19 nt, Homo sapiens
  misc_RNA (1)...(19): siRNA sense strand
uaaugcagaugacaaagcu

SEQ ID NO: 1598103 - RNA, 19 nt, Homo sapiens
  misc_RNA (1)...(19): siRNA sense strand
ugauaaugcagaugacaaa

SEQ ID NO: 1598104 - RNA, 19 nt, Homo sapiens
  misc_RNA (1)...(19): siRNA sense strand
uacaggaacagaugaaguu

SEQ ID NO: 1598105 - RNA, 19 nt, Homo sapiens
  misc_RNA (1)...(19): siRNA sense strand
ugaaaugcgaaaugaaguu

SEQ ID NO: 1598106 - RNA, 19 nt, Homo sapiens
  misc_RNA (1)...(19): siRNA sense strand
caauugggaaauauucuga

SEQ ID NO: 1598107 - RNA, 19 nt, Homo sapiens
  misc_RNA (1)...(19): siRNA sense strand
cugaugcuuugaauauuga

SEQ ID NO: 1598108 - RNA, 19 nt, Homo sapiens
  misc_RNA (1)...(19): siRNA sense strand
cuuggaacaacaugaaaua

SEQ ID NO: 1598109 - RNA, 19 nt, Homo sapiens
  misc_RNA (1)...(19): siRNA sense strand
cuacuacaaccaaugaaga

SEQ ID NO: 1598110 - RNA, 19 nt, Homo sapiens
  misc_RNA (1)...(19): siRNA sense strand
uuccaugacuucugauaau

SEQ ID NO: 1598111 - RNA, 19 nt, Homo sapiens
  misc_RNA (1)...(19): siRNA sense strand
caugaaaugcgaaaugaag

SEQ ID NO: 1598112 - RNA, 19 nt, Homo sapiens
  misc_RNA (1)...(19): siRNA sense strand
ggaacaacaugaaauauag

SEQ ID NO: 1598113 - RNA, 19 nt, Homo sapiens
  misc_RNA (1)...(19): siRNA sense strand
ucaccaagaugcugaaauu

SEQ ID NO: 1598114 - RNA, 19 nt, Homo sapiens
  misc_RNA (1)...(19): siRNA sense strand
ggaaacaauugggaaauau

SEQ ID NO: 1598115 - RNA, 19 nt, Homo sapiens
  misc_RNA (1)...(19): siRNA sense strand
gaucccagcuguacaauag

SEQ ID NO: 1598116 - RNA, 19 nt, Homo sapiens
  misc_RNA (1)...(19): siRNA sense strand
uggcuuacaucaacuaaua

SEQ ID NO: 1598117 - RNA, 19 nt, Homo sapiens
  misc_RNA (1)...(19): siRNA sense strand
gaauauggcugaccuacag

SEQ ID NO: 1598118 - RNA, 19 nt, Homo sapiens
  misc_RNA (1)...(19): siRNA sense strand
agaauucccucaaauagaa

SEQ ID NO: 1598119 - RNA, 19 nt, Homo sapiens
  misc_RNA (1)...(19): siRNA sense strand
caagaugacaguuugauuu

SEQ ID NO: 1598120 - RNA, 19 nt, Homo sapiens
  misc_RNA (1)...(19): siRNA sense strand
gaagaauucccucaaauag

SEQ ID NO: 1598121 - RNA, 19 nt, Homo sapiens
  misc_RNA (1)...(19): siRNA sense strand
gaaauauaguuggguguug

SEQ ID NO: 1598122 - RNA, 19 nt, Homo sapiens
  misc_RNA (1)...(19): siRNA sense strand
guagaagaauuucguaaag

SEQ ID NO: 1598123 - RNA, 19 nt, Homo sapiens
  misc_RNA (1)...(19): siRNA sense strand
uaaaggauuucccucuuga

SEQ ID NO: 1598124 - RNA, 19 nt, Homo sapiens
  misc_RNA (1)...(19): siRNA sense strand
aauagaggaucacguaauu

SEQ ID NO: 1598125 - RNA, 19 nt, Homo sapiens
  misc_RNA (1)...(19): siRNA sense strand
ggaccuggccugaugcuuu

SEQ ID NO: 1598126 - RNA, 19 nt, Homo sapiens
  misc_RNA (1)...(19): siRNA sense strand
auacuacacuuucuuggua

SEQ ID NO: 1598127 - RNA, 19 nt, Homo sapiens
  misc_RNA (1)...(19): siRNA sense strand
caacaccgacuacuuagaa

SEQ ID NO: 1598128 - RNA, 19 nt, Homo sapiens
  misc_RNA (1)...(19): siRNA sense strand
ccacugcccuucucccaaa

SEQ ID NO: 1598129 - RNA, 19 nt, Homo sapiens
  misc_RNA (1)...(19): siRNA sense strand
caggaaauguagaagaauu

SEQ ID NO: 1598130 - RNA, 19 nt, Homo sapiens
  misc_RNA (1)...(19): siRNA sense strand
gaugacaguuugauuuaca

SEQ ID NO: 1598131 - RNA, 19 nt, Homo sapiens
  misc_RNA (1)...(19): siRNA sense strand
gaaggaaacaauugggaaa

SEQ ID NO: 1598132 - RNA, 19 nt, Homo sapiens
  misc_RNA (1)...(19): siRNA sense strand
gaacagaugaaguugacaa

SEQ ID NO: 1598133 - RNA, 19 nt, Homo sapiens
  misc_RNA (1)...(19): siRNA sense strand
gaaccaacaccgacuacuu

SEQ ID NO: 1598134 - RNA, 19 nt, Homo sapiens
  misc_RNA (1)...(19): siRNA sense strand
gaugacaaagcuguuauua

SEQ ID NO: 1598135 - RNA, 19 nt, Homo sapiens
  misc_RNA (1)...(19): siRNA sense strand
gaaaugcgaaaugaaguuu

SEQ ID NO: 1598136 - RNA, 19 nt, Homo sapiens
  misc_RNA (1)...(19): siRNA sense strand
gaagcaaggcauccugauu

SEQ ID NO: 1598137 - RNA, 19 nt, Homo sapiens
  misc_RNA (1)...(19): siRNA sense strand
gcagaugacaaagcuguua

SEQ ID NO: 1598138 - RNA, 19 nt, Homo sapiens
  misc_RNA (1)...(19): siRNA sense strand
gaccuggccugaugcuuug

SEQ ID NO: 1598139 - RNA, 19 nt, Homo sapiens
  misc_RNA (1)...(19): siRNA sense strand
ggauuucccucuugagaca

SEQ ID NO: 1598140 - RNA, 19 nt, Homo sapiens
  misc_RNA (1)...(19): siRNA sense strand
cauauuacuuugcuggauu

SEQ ID NO: 1598141 - RNA, 19 nt, Homo sapiens
  misc_RNA (1)...(19): siRNA sense strand
ggaaagaagucugggaaaa

SEQ ID NO: 1598142 - RNA, 19 nt, Homo sapiens
  misc_RNA (1)...(19): siRNA sense strand
cauaaaggauuucccucuu

SEQ ID NO: 1598143 - RNA, 19 nt, Homo sapiens
  misc_RNA (1)...(19): siRNA sense strand
gcaaaccuaaacagucaua

SEQ ID NO: 1598144 - RNA, 19 nt, Homo sapiens
  misc_RNA (1)...(19): siRNA sense strand
gcucagcuuugacaacaga

SEQ ID NO: 1598145 - RNA, 19 nt, Homo sapiens
  misc_RNA (1)...(19): siRNA sense strand
aaacagagugcuuccauga

SEQ ID NO: 1598146 - RNA, 19 nt, Homo sapiens
  misc_RNA (1)...(19): siRNA sense strand
gaucaugaaaugcgaaaug

SEQ ID NO: 1598147 - RNA, 19 nt, Homo sapiens
  misc_RNA (1)...(19): siRNA sense strand
ucacguaauugcaggaaau

SEQ ID NO: 1598148 - RNA, 19 nt, Homo sapiens
  misc_RNA (1)...(19): siRNA sense strand
uggcaaaccuaaacaguca

SEQ ID NO: 1598149 - RNA, 19 nt, Homo sapiens
  misc_RNA (1)...(19): siRNA sense strand
aggaaacaauugggaaaua

SEQ ID NO: 1598150 - RNA, 19 nt, Homo sapiens
  misc_RNA (1)...(19): siRNA sense strand
gaugucagcauaaaggauu

SEQ ID NO: 1598151 - RNA, 19 nt, Homo sapiens
  misc_RNA (1)...(19): siRNA sense strand
gugcuuccaugacuucuga

SEQ ID NO: 1598152 - RNA, 19 nt, Homo sapiens
  misc_RNA (1)...(19): siRNA sense strand
uuacauggauccucauuac

SEQ ID NO: 1598153 - RNA, 19 nt, Homo sapiens
  misc_RNA (1)...(19): siRNA sense strand
aaccaacaccgacuacuua

SEQ ID NO: 1598154 - RNA, 19 nt, Homo sapiens
  misc_RNA (1)...(19): siRNA sense strand
aagcaaggcauccugauuu

SEQ ID NO: 1598155 - RNA, 19 nt, Homo sapiens
  misc_RNA (1)...(19): siRNA sense strand
gaaauguucaggacuucaa

SEQ ID NO: 1598156 - RNA, 19 nt, Homo sapiens
  misc_RNA (1)...(19): siRNA sense strand
agcaaggcauccugauuua

SEQ ID NO: 1598157 - RNA, 19 nt, Homo sapiens
  misc_RNA (1)...(19): siRNA sense strand
gauguacaauagaggauca

SEQ ID NO: 1598158 - RNA, 19 nt, Homo sapiens
  misc_RNA (1)...(19): siRNA sense strand
uuacuuugcuggauuucaa

SEQ ID NO: 1598159 - RNA, 19 nt, Homo sapiens
  misc_RNA (1)...(19): siRNA sense strand
ccugaugcuuugaauauug

SEQ ID NO: 1598160 - RNA, 19 nt, Homo sapiens
  misc_RNA (1)...(19): siRNA sense strand
ggacucauacuacacuuuc

SEQ ID NO: 1598161 - RNA, 19 nt, Homo sapiens
  misc_RNA (1)...(19): siRNA sense strand
auagaaggcucagcuuuga

SEQ ID NO: 1598162 - RNA, 19 nt, Homo sapiens
  misc_RNA (1)...(19): siRNA sense strand
gcuuggaccuggccugaug

SEQ ID NO: 1598163 - RNA, 19 nt, Homo sapiens
  misc_RNA (1)...(19): siRNA sense strand
cugaagaaaucaccaagau

SEQ ID NO: 1598164 - RNA, 19 nt, Homo sapiens
  misc_RNA (1)...(19): siRNA sense strand
aaauauaguuggguguuga

SEQ ID NO: 1598165 - RNA, 19 nt, Homo sapiens
  misc_RNA (1)...(19): siRNA sense strand
cuauuuauguugcacaaga

SEQ ID NO: 1598166 - RNA, 19 nt, Homo sapiens
  misc_RNA (1)...(19): siRNA sense strand
uacaauagaggaucacgua

SEQ ID NO: 1598167 - RNA, 19 nt, Homo sapiens
  misc_RNA (1)...(19): siRNA sense strand
ggccugaugcuuugaauau

SEQ ID NO: 1598168 - RNA, 19 nt, Homo sapiens
  misc_RNA (1)...(19): siRNA sense strand
gagucgggauguacaauag

SEQ ID NO: 1598169 - RNA, 19 nt, Homo sapiens
  misc_RNA (1)...(19): siRNA sense strand
gaaaaucaucucuugguuu

SEQ ID NO: 1598170 - RNA, 19 nt, Homo sapiens
  misc_RNA (1)...(19): siRNA sense strand
gaacuggccagaugcucuu

SEQ ID NO: 1598171 - RNA, 19 nt, Homo sapiens
  misc_RNA (1)...(19): siRNA sense strand
agaugaaguugacaagcua

SEQ ID NO: 1598172 - RNA, 19 nt, Homo sapiens
  misc_RNA (1)...(19): siRNA sense strand
ugcaggaaauguagaagaa

SEQ ID NO: 1598173 - RNA, 19 nt, Homo sapiens
  misc_RNA (1)...(19): siRNA sense strand
auaaaggauuucccucuug

SEQ ID NO: 1598174 - RNA, 19 nt, Homo sapiens
  misc_RNA (1)...(19): siRNA sense strand
ggaaaaucaucucuugguu

SEQ ID NO: 1598175 - RNA, 19 nt, Homo sapiens
  misc_RNA (1)...(19): siRNA sense strand
cguaauugcaggaaaugua

SEQ ID NO: 1598176 - RNA, 19 nt, Homo sapiens
  misc_RNA (1)...(19): siRNA sense strand
caccgacuacuuagaauuu

SEQ ID NO: 1598177 - RNA, 19 nt, Homo sapiens
  misc_RNA (1)...(19): siRNA sense strand
caaggcauccugauuuaca

SEQ ID NO: 1598178 - RNA, 19 nt, Homo sapiens
  misc_RNA (1)...(19): siRNA sense strand
gcucaaggacucauacuac

SEQ ID NO: 1598179 - RNA, 19 nt, Homo sapiens
  misc_RNA (1)...(19): siRNA sense strand
uagaauuugugaaggguau

SEQ ID NO: 1598180 - RNA, 19 nt, Homo sapiens
  misc_RNA (1)...(19): siRNA sense strand
aaaaucaucucuugguuug

SEQ ID NO: 1598181 - RNA, 19 nt, Homo sapiens
  misc_RNA (1)...(19): siRNA sense strand
caauagaggaucacguaau

SEQ ID NO: 1598182 - RNA, 19 nt, Homo sapiens
  misc_RNA (1)...(19): siRNA sense strand
ccucauuacugccaaucuu

SEQ ID NO: 1598183 - RNA, 19 nt, Homo sapiens
  misc_RNA (1)...(19): siRNA sense strand
cagaugaaguugacaagcu

SEQ ID NO: 1598184 - RNA, 19 nt, Homo sapiens
  misc_RNA (1)...(19): siRNA sense strand
caacaauuucucugaagga

SEQ ID NO: 1598185 - RNA, 19 nt, Homo sapiens
  misc_RNA (1)...(19): siRNA sense strand
ugggaaauauucugaugau

SEQ ID NO: 1598186 - RNA, 19 nt, Homo sapiens
  misc_RNA (1)...(19): siRNA sense strand
ggacuucccacacugucaa

SEQ ID NO: 1598187 - RNA, 19 nt, Homo sapiens
  misc_RNA (1)...(19): siRNA sense strand
gucgaaauguucaggacuu

SEQ ID NO: 1598188 - RNA, 19 nt, Homo sapiens
  misc_RNA (1)...(19): siRNA sense strand
gacaaagcuguuauuauuc

SEQ ID NO: 1598189 - RNA, 19 nt, Homo sapiens
  misc_RNA (1)...(19): siRNA sense strand
aaauagaaggcucagcuuu

SEQ ID NO: 1598190 - RNA, 19 nt, Homo sapiens
  misc_RNA (1)...(19): siRNA sense strand
caucuacuacaaccaauga

SEQ ID NO: 1598191 - RNA, 19 nt, Homo sapiens
  misc_RNA (1)...(19): siRNA sense strand
gauuucaagaugacaguuu

SEQ ID NO: 1598192 - RNA, 19 nt, Homo sapiens
  misc_RNA (1)...(19): siRNA sense strand
gaauuugugaaggguauuu

SEQ ID NO: 1598193 - RNA, 19 nt, Homo sapiens
  misc_RNA (1)...(19): siRNA sense strand
aauagaaggcucagcuuug

SEQ ID NO: 1598194 - RNA, 19 nt, Homo sapiens
  misc_RNA (1)...(19): siRNA sense strand
guagaugucagcauaaagg

SEQ ID NO: 1598195 - RNA, 19 nt, Homo sapiens
  misc_RNA (1)...(19): siRNA sense strand
guaauugcaggaaauguag

SEQ ID NO: 1598196 - RNA, 19 nt, Homo sapiens
  misc_RNA (1)...(19): siRNA sense strand
uagacuugguggagaaaga

SEQ ID NO: 1598197 - RNA, 19 nt, Homo sapiens
  misc_RNA (1)...(19): siRNA sense strand
guacaguuuacaauucuga

SEQ ID NO: 1598198 - RNA, 19 nt, Homo sapiens
  misc_RNA (1)...(19): siRNA sense strand
auugagaacuggccagaug

SEQ ID NO: 1598199 - RNA, 19 nt, Homo sapiens
  misc_RNA (1)...(19): siRNA sense strand
acaguuugauuuacaugga

SEQ ID NO: 1598200 - RNA, 19 nt, Homo sapiens
  misc_RNA (1)...(19): siRNA sense strand
ccuaaacagucauauuacu

SEQ ID NO: 1598201 - RNA, 19 nt, Homo sapiens
  misc_RNA (1)...(19): siRNA sense strand
cuacuuagaauuugugaag

SEQ ID NO: 1598202 - RNA, 19 nt, Homo sapiens
  misc_RNA (1)...(19): siRNA sense strand
uaaugcagaugacaaagcu

SEQ ID NO: 1598203 - RNA, 19 nt, Homo sapiens
  misc_RNA (1)...(19): siRNA sense strand
ugauaaugcagaugacaaa

SEQ ID NO: 1598204 - RNA, 19 nt, Homo sapiens
  misc_RNA (1)...(19): siRNA sense strand
uacaggaacagaugaaguu

SEQ ID NO: 1598205 - RNA, 19 nt, Homo sapiens
  misc_RNA (1)...(19): siRNA sense strand
ugaaaugcgaaaugaaguu

SEQ ID NO: 1598206 - RNA, 19 nt, Homo sapiens
  misc_RNA (1)...(19): siRNA sense strand
caauugggaaauauucuga

SEQ ID NO: 1598207 - RNA, 19 nt, Homo sapiens
  misc_RNA (1)...(19): siRNA sense strand
cugaugcuuugaauauuga

SEQ ID NO: 1598208 - RNA, 19 nt, Homo sapiens
  misc_RNA (1)...(19): siRNA sense strand
cuuggaacaacaugaaaua

SEQ ID NO: 1598209 - RNA, 19 nt, Homo sapiens
  misc_RNA (1)...(19): siRNA sense strand
cuacuacaaccaaugaaga

SEQ ID NO: 1598210 - RNA, 19 nt, Homo sapiens
  misc_RNA (1)...(19): siRNA sense strand
uuccaugacuucugauaau

SEQ ID NO: 1598211 - RNA, 19 nt, Homo sapiens
  misc_RNA (1)...(19): siRNA sense strand
caugaaaugcgaaaugaag

SEQ ID NO: 1598212 - RNA, 19 nt, Homo sapiens
  misc_RNA (1)...(19): siRNA sense strand
gcaagacgcugggcaagcu

SEQ ID NO: 1598213 - RNA, 19 nt, Homo sapiens
  misc_RNA (1)...(19): siRNA sense strand
gcaggccuccagcuacuau

SEQ ID NO: 1598214 - RNA, 19 nt, Homo sapiens
  misc_RNA (1)...(19): siRNA sense strand
gcucacagggcgacuaugg

SEQ ID NO: 1598215 - RNA, 19 nt, Homo sapiens
  misc_RNA (1)...(19): siRNA sense strand
gcaggaagagcgccaaagc

SEQ ID NO: 1598216 - RNA, 19 nt, Homo sapiens
  misc_RNA (1)...(19): siRNA sense strand
uccacgaguucgaccagua

SEQ ID NO: 1598217 - RNA, 19 nt, Homo sapiens
  misc_RNA (1)...(19): siRNA sense strand
gccagaacaucgacuucag

SEQ ID NO: 1598218 - RNA, 19 nt, Homo sapiens
  misc_RNA (1)...(19): siRNA sense strand
aagccaagccgcaugugaa

SEQ ID NO: 1598219 - RNA, 19 nt, Homo sapiens
  misc_RNA (1)...(19): siRNA sense strand
ucaaagccaagccgcaugu

SEQ ID NO: 1598220 - RNA, 19 nt, Homo sapiens
  misc_RNA (1)...(19): siRNA sense strand
guaguacccuuucuuauua

SEQ ID NO: 1598221 - RNA, 19 nt, Homo sapiens
  misc_RNA (1)...(19): siRNA sense strand
caaagaagaugucagagaa

SEQ ID NO: 1598222 - RNA, 19 nt, Homo sapiens
  misc_RNA (1)...(19): siRNA sense strand
ucacucaacugccuuauaa

SEQ ID NO: 1598223 - RNA, 19 nt, Homo sapiens
  misc_RNA (1)...(19): siRNA sense strand
gaauuuggcuguagcagau

SEQ ID NO: 1598224 - RNA, 19 nt, Homo sapiens
  misc_RNA (1)...(19): siRNA sense strand
gaaaguggccaagaaauau

SEQ ID NO: 1598225 - RNA, 19 nt, Homo sapiens
  misc_RNA (1)...(19): siRNA sense strand
gaucugcauuggauuugua

SEQ ID NO: 1598226 - RNA, 19 nt, Homo sapiens
  misc_RNA (1)...(19): siRNA sense strand
gaagaugccaaacauuaaa

SEQ ID NO: 1598227 - RNA, 19 nt, Homo sapiens
  misc_RNA (1)...(19): siRNA sense strand
caaggacacucaugaagau

SEQ ID NO: 1598228 - RNA, 19 nt, Homo sapiens
  misc_RNA (1)...(19): siRNA sense strand
gaauggcacuuaugacuac

SEQ ID NO: 1598229 - RNA, 19 nt, Homo sapiens
  misc_RNA (1)...(19): siRNA sense strand
ucaacugccuuauaacauu

SEQ ID NO: 1598230 - RNA, 19 nt, Homo sapiens
  misc_RNA (1)...(19): siRNA sense strand
ugaaaguggccaagaaaua

SEQ ID NO: 1598231 - RNA, 19 nt, Homo sapiens
  misc_RNA (1)...(19): siRNA sense strand
gcaaggacacucaugaaga

SEQ ID NO: 1598232 - RNA, 19 nt, Homo sapiens
  misc_RNA (1)...(19): siRNA sense strand
ugaaaugaauggcacuuau

SEQ ID NO: 1598233 - RNA, 19 nt, Homo sapiens
  misc_RNA (1)...(19): siRNA sense strand
gaacagaaccagucaacag

SEQ ID NO: 1598234 - RNA, 19 nt, Homo sapiens
  misc_RNA (1)...(19): siRNA sense strand
agacagauauguggcagua

SEQ ID NO: 1598235 - RNA, 19 nt, Homo sapiens
  misc_RNA (1)...(19): siRNA sense strand
gaagaugucagagaauuug

SEQ ID NO: 1598236 - RNA, 19 nt, Homo sapiens
  misc_RNA (1)...(19): siRNA sense strand
cuagagaucugcauuggau

SEQ ID NO: 1598237 - RNA, 19 nt, Homo sapiens
  misc_RNA (1)...(19): siRNA sense strand
gacaaaguguggaggaguu

SEQ ID NO: 1598238 - RNA, 19 nt, Homo sapiens
  misc_RNA (1)...(19): siRNA sense strand
gaaaugaauggcacuuaug

SEQ ID NO: 1598239 - RNA, 19 nt, Homo sapiens
  misc_RNA (1)...(19): siRNA sense strand
caacugccuuauaacauug

SEQ ID NO: 1598240 - RNA, 19 nt, Homo sapiens
  misc_RNA (1)...(19): siRNA sense strand
ggacaucgccauccaaguc

SEQ ID NO: 1598241 - RNA, 19 nt, Homo sapiens
  misc_RNA (1)...(19): siRNA sense strand
aaauauggguccuggagaa

SEQ ID NO: 1598242 - RNA, 19 nt, Homo sapiens
  misc_RNA (1)...(19): siRNA sense strand
cagauuuacuccuucuauu

SEQ ID NO: 1598243 - RNA, 19 nt, Homo sapiens
  misc_RNA (1)...(19): siRNA sense strand
cagaaccagucaacagauu

SEQ ID NO: 1598244 - RNA, 19 nt, Homo sapiens
  misc_RNA (1)...(19): siRNA sense strand
caugcuggaucaucuguuu

SEQ ID NO: 1598245 - RNA, 19 nt, Homo sapiens
  misc_RNA (1)...(19): siRNA sense strand
aagaagaugucagagaauu

SEQ ID NO: 1598246 - RNA, 19 nt, Homo sapiens
  misc_RNA (1)...(19): siRNA sense strand
ccaugguaguggcaauuua

SEQ ID NO: 1598247 - RNA, 19 nt, Homo sapiens
  misc_RNA (1)...(19): siRNA sense strand
gcucacagucguuauaguu

SEQ ID NO: 1598248 - RNA, 19 nt, Homo sapiens
  misc_RNA (1)...(19): siRNA sense strand
gaagacagagacaaagugu

SEQ ID NO: 1598249 - RNA, 19 nt, Homo sapiens
  misc_RNA (1)...(19): siRNA sense strand
gaaccagucaacagauuau

SEQ ID NO: 1598250 - RNA, 19 nt, Homo sapiens
  misc_RNA (1)...(19): siRNA sense strand
ugaagaugccaaacauuaa

SEQ ID NO: 1598251 - RNA, 19 nt, Homo sapiens
  misc_RNA (1)...(19): siRNA sense strand
gcagauuuacuccuucuau

SEQ ID NO: 1598252 - RNA, 19 nt, Homo sapiens
  misc_RNA (1)...(19): siRNA sense strand
gauauguggcaguaacuaa

SEQ ID NO: 1598253 - RNA, 19 nt, Homo sapiens
  misc_RNA (1)...(19): siRNA sense strand
uaucaaagaagaugucaga

SEQ ID NO: 1598254 - RNA, 19 nt, Homo sapiens
  misc_RNA (1)...(19): siRNA sense strand
ggaaaaccaugcuggauca

SEQ ID NO: 1598255 - RNA, 19 nt, Homo sapiens
  misc_RNA (1)...(19): siRNA sense strand
caauaugaacugaucugua

SEQ ID NO: 1598256 - RNA, 19 nt, Homo sapiens
  misc_RNA (1)...(19): siRNA sense strand
uguaguacccuuucuuauu

SEQ ID NO: 1598257 - RNA, 19 nt, Homo sapiens
  misc_RNA (1)...(19): siRNA sense strand
gcuaggugcauucccauuu

SEQ ID NO: 1598258 - RNA, 19 nt, Homo sapiens
  misc_RNA (1)...(19): siRNA sense strand
uaugggagcaucuuucaaa

SEQ ID NO: 1598259 - RNA, 19 nt, Homo sapiens
  misc_RNA (1)...(19): siRNA sense strand
ucaaagaagaugucagaga

SEQ ID NO: 1598260 - RNA, 19 nt, Homo sapiens
  misc_RNA (1)...(19): siRNA sense strand
augaagaugccaaacauua

SEQ ID NO: 1598261 - RNA, 19 nt, Homo sapiens
  misc_RNA (1)...(19): siRNA sense strand
ucaugaagaugccaaacau

SEQ ID NO: 1598262 - RNA, 19 nt, Homo sapiens
  misc_RNA (1)...(19): siRNA sense strand
caaguucugccgagccaua

SEQ ID NO: 1598263 - RNA, 19 nt, Homo sapiens
  misc_RNA (1)...(19): siRNA sense strand
caagaaacagagaaccaaa

SEQ ID NO: 1598264 - RNA, 19 nt, Homo sapiens
  misc_RNA (1)...(19): siRNA sense strand
ccuaggaacaucaaugaaa

SEQ ID NO: 1598265 - RNA, 19 nt, Homo sapiens
  misc_RNA (1)...(19): siRNA sense strand
cuaggaacaucaaugaaag

SEQ ID NO: 1598266 - RNA, 19 nt, Homo sapiens
  misc_RNA (1)...(19): siRNA sense strand
uuaugaaaguggccaagaa

SEQ ID NO: 1598267 - RNA, 19 nt, Homo sapiens
  misc_RNA (1)...(19): siRNA sense strand
gauuuacuccuucuauuca

SEQ ID NO: 1598268 - RNA, 19 nt, Homo sapiens
  misc_RNA (1)...(19): siRNA sense strand
ccagucaacagauuauuau

SEQ ID NO: 1598269 - RNA, 19 nt, Homo sapiens
  misc_RNA (1)...(19): siRNA sense strand
gagaagacagagacaaagu

SEQ ID NO: 1598270 - RNA, 19 nt, Homo sapiens
  misc_RNA (1)...(19): siRNA sense strand
cuacagagccaaccaguac

SEQ ID NO: 1598271 - RNA, 19 nt, Homo sapiens
  misc_RNA (1)...(19): siRNA sense strand
aaaccaugcuggaucaucu

SEQ ID NO: 1598272 - RNA, 19 nt, Homo sapiens
  misc_RNA (1)...(19): siRNA sense strand
gagccaaccaguacuuuua

SEQ ID NO: 1598273 - RNA, 19 nt, Homo sapiens
  misc_RNA (1)...(19): siRNA sense strand
ugaauggcacuuaugacua

SEQ ID NO: 1598274 - RNA, 19 nt, Homo sapiens
  misc_RNA (1)...(19): siRNA sense strand
cacaauaguuuucgucauu

SEQ ID NO: 1598275 - RNA, 19 nt, Homo sapiens
  misc_RNA (1)...(19): siRNA sense strand
aaaugaauggcacuuauga

SEQ ID NO: 1598276 - RNA, 19 nt, Homo sapiens
  misc_RNA (1)...(19): siRNA sense strand
uguagcagauuuacuccuu

SEQ ID NO: 1598277 - RNA, 19 nt, Homo sapiens
  misc_RNA (1)...(19): siRNA sense strand
ucaacccaauccuuuaugu

SEQ ID NO: 1598278 - RNA, 19 nt, Homo sapiens
  misc_RNA (1)...(19): siRNA sense strand
gaucaccagcugcaacaug

SEQ ID NO: 1598279 - RNA, 19 nt, Homo sapiens
  misc_RNA (1)...(19): siRNA sense strand
aacccaauccuuuauguuu

SEQ ID NO: 1598280 - RNA, 19 nt, Homo sapiens
  misc_RNA (1)...(19): siRNA sense strand
aaacuacguuaugaaagug

SEQ ID NO: 1598281 - RNA, 19 nt, Homo sapiens
  misc_RNA (1)...(19): siRNA sense strand
uaugaaaguggccaagaaa

SEQ ID NO: 1598282 - RNA, 19 nt, Homo sapiens
  misc_RNA (1)...(19): siRNA sense strand
uaaacuuugucucuggaau

SEQ ID NO: 1598283 - RNA, 19 nt, Homo sapiens
  misc_RNA (1)...(19): siRNA sense strand
agaaccagucaacagauua

SEQ ID NO: 1598284 - RNA, 19 nt, Homo sapiens
  misc_RNA (1)...(19): siRNA sense strand
cagcaaggacacucaugaa

SEQ ID NO: 1598285 - RNA, 19 nt, Homo sapiens
  misc_RNA (1)...(19): siRNA sense strand
agagaucugcauuggauuu

SEQ ID NO: 1598286 - RNA, 19 nt, Homo sapiens
  misc_RNA (1)...(19): siRNA sense strand
ugcaggcaauuccauggua

SEQ ID NO: 1598287 - RNA, 19 nt, Homo sapiens
  misc_RNA (1)...(19): siRNA sense strand
cagagaauuugcaaaaguu

SEQ ID NO: 1598288 - RNA, 19 nt, Homo sapiens
  misc_RNA (1)...(19): siRNA sense strand
acagauauguggcaguaac

SEQ ID NO: 1598289 - RNA, 19 nt, Homo sapiens
  misc_RNA (1)...(19): siRNA sense strand
gcaguucauggguggguuu

SEQ ID NO: 1598290 - RNA, 19 nt, Homo sapiens
  misc_RNA (1)...(19): siRNA sense strand
uggagaagacagagacaaa

SEQ ID NO: 1598291 - RNA, 19 nt, Homo sapiens
  misc_RNA (1)...(19): siRNA sense strand
caacccaauccuuuauguu

SEQ ID NO: 1598292 - RNA, 19 nt, Homo sapiens
  misc_RNA (1)...(19): siRNA sense strand
gaaccaaaacagaugugua

SEQ ID NO: 1598293 - RNA, 19 nt, Homo sapiens
  misc_RNA (1)...(19): siRNA sense strand
ggagaagacagagacaaag

SEQ ID NO: 1598294 - RNA, 19 nt, Homo sapiens
  misc_RNA (1)...(19): siRNA sense strand
agaagaugucagagaauuu

SEQ ID NO: 1598295 - RNA, 19 nt, Homo sapiens
  misc_RNA (1)...(19): siRNA sense strand
ucacagucguuauaguuuu

SEQ ID NO: 1598296 - RNA, 19 nt, Homo sapiens
  misc_RNA (1)...(19): siRNA sense strand
uaaaaguucugcucacagu

SEQ ID NO: 1598297 - RNA, 19 nt, Homo sapiens
  misc_RNA (1)...(19): siRNA sense strand
ugauucaaaugcuagagau

SEQ ID NO: 1598298 - RNA, 19 nt, Homo sapiens
  misc_RNA (1)...(19): siRNA sense strand
uaccuaggaacaucaauga

SEQ ID NO: 1598299 - RNA, 19 nt, Homo sapiens
  misc_RNA (1)...(19): siRNA sense strand
cauccugaauuuggcugua

SEQ ID NO: 1598300 - RNA, 19 nt, Homo sapiens
  misc_RNA (1)...(19): siRNA sense strand
guucugcucacagucguua

SEQ ID NO: 1598301 - RNA, 19 nt, Homo sapiens
  misc_RNA (1)...(19): siRNA sense strand
caugguaguggcaauuuau

SEQ ID NO: 1598302 - RNA, 19 nt, Homo sapiens
  misc_RNA (1)...(19): siRNA sense strand
gggaaaauaaugugcaaaa

SEQ ID NO: 1598303 - RNA, 19 nt, Homo sapiens
  misc_RNA (1)...(19): siRNA sense strand
uguacacacuaaacuuugu

SEQ ID NO: 1598304 - RNA, 19 nt, Homo sapiens
  misc_RNA (1)...(19): siRNA sense strand
ccaguacuuuuagcauuua

SEQ ID NO: 1598305 - RNA, 19 nt, Homo sapiens
  misc_RNA (1)...(19): siRNA sense strand
cugcauuggauuuguagua

SEQ ID NO: 1598306 - RNA, 19 nt, Homo sapiens
  misc_RNA (1)...(19): siRNA sense strand
aaacuuugucucuggaaug

SEQ ID NO: 1598307 - RNA, 19 nt, Homo sapiens
  misc_RNA (1)...(19): siRNA sense strand
gagcaaacgcauggacauc

SEQ ID NO: 1598308 - RNA, 19 nt, Homo sapiens
  misc_RNA (1)...(19): siRNA sense strand
uuuguaguacccuuucuua

SEQ ID NO: 1598309 - RNA, 19 nt, Homo sapiens
  misc_RNA (1)...(19): siRNA sense strand
gagaucugcauuggauuug

SEQ ID NO: 1598310 - RNA, 19 nt, Homo sapiens
  misc_RNA (1)...(19): siRNA sense strand
uagcagauuuacuccuucu

SEQ ID NO: 1598311 - RNA, 19 nt, Homo sapiens
  misc_RNA (1)...(19): siRNA sense strand
ucagagaauuugcaaaagu

SEQ ID NO: 1598312 - RNA, 19 nt, Homo sapiens
  misc_RNA (1)...(19): siRNA sense strand
ggaguuuccuuuugauucu

SEQ ID NO: 1598313 - RNA, 19 nt, Homo sapiens
  misc_RNA (1)...(19): siRNA sense strand
gaugucagagaauuugcaa

SEQ ID NO: 1598314 - RNA, 19 nt, Homo sapiens
  misc_RNA (1)...(19): siRNA sense strand
accagucaacagauuauua

SEQ ID NO: 1598315 - RNA, 19 nt, Homo sapiens
  misc_RNA (1)...(19): siRNA sense strand
cuuguacacacuaaacuuu

SEQ ID NO: 1598316 - RNA, 19 nt, Homo sapiens
  misc_RNA (1)...(19): siRNA sense strand
ccucaacccaauccuuuau

SEQ ID NO: 1598317 - RNA, 19 nt, Homo sapiens
  misc_RNA (1)...(19): siRNA sense strand
gccucaacccaauccuuua

SEQ ID NO: 1598318 - RNA, 19 nt, Homo sapiens
  misc_RNA (1)...(19): siRNA sense strand
acagcaaggacacucauga

SEQ ID NO: 1598319 - RNA, 19 nt, Homo sapiens
  misc_RNA (1)...(19): siRNA sense strand
acagcugccucaacccaau

SEQ ID NO: 1598320 - RNA, 19 nt, Homo sapiens
  misc_RNA (1)...(19): siRNA sense strand
guaguacccuuucuuauua

SEQ ID NO: 1598321 - RNA, 19 nt, Homo sapiens
  misc_RNA (1)...(19): siRNA sense strand
caaagaagaugucagagaa

SEQ ID NO: 1598322 - RNA, 19 nt, Homo sapiens
  misc_RNA (1)...(19): siRNA sense strand
ucacucaacugccuuauaa

SEQ ID NO: 1598323 - RNA, 19 nt, Homo sapiens
  misc_RNA (1)...(19): siRNA sense strand
gaauuuggcuguagcagau

SEQ ID NO: 1598324 - RNA, 19 nt, Homo sapiens
  misc_RNA (1)...(19): siRNA sense strand
gaaaguggccaagaaauau

SEQ ID NO: 1598325 - RNA, 19 nt, Homo sapiens
  misc_RNA (1)...(19): siRNA sense strand
gaucugcauuggauuugua

SEQ ID NO: 1598326 - RNA, 19 nt, Homo sapiens
  misc_RNA (1)...(19): siRNA sense strand
gaagaugccaaacauuaaa

SEQ ID NO: 1598327 - RNA, 19 nt, Homo sapiens
  misc_RNA (1)...(19): siRNA sense strand
caaggacacucaugaagau

SEQ ID NO: 1598328 - RNA, 19 nt, Homo sapiens
  misc_RNA (1)...(19): siRNA sense strand
gaauggcacuuaugacuac

SEQ ID NO: 1598329 - RNA, 19 nt, Homo sapiens
  misc_RNA (1)...(19): siRNA sense strand
ucaacugccuuauaacauu

SEQ ID NO: 1598330 - RNA, 19 nt, Homo sapiens
  misc_RNA (1)...(19): siRNA sense strand
ugaaaguggccaagaaaua

SEQ ID NO: 1598331 - RNA, 19 nt, Homo sapiens
  misc_RNA (1)...(19): siRNA sense strand
gcaaggacacucaugaaga

SEQ ID NO: 1598332 - RNA, 19 nt, Homo sapiens
  misc_RNA (1)...(19): siRNA sense strand
ugaaaugaauggcacuuau

SEQ ID NO: 1598333 - RNA, 19 nt, Homo sapiens
  misc_RNA (1)...(19): siRNA sense strand
gaacagaaccagucaacag

SEQ ID NO: 1598334 - RNA, 19 nt, Homo sapiens
  misc_RNA (1)...(19): siRNA sense strand
agacagauauguggcagua

SEQ ID NO: 1598335 - RNA, 19 nt, Homo sapiens
  misc_RNA (1)...(19): siRNA sense strand
gaagaugucagagaauuug

SEQ ID NO: 1598336 - RNA, 19 nt, Homo sapiens
  misc_RNA (1)...(19): siRNA sense strand
cuagagaucugcauuggau

SEQ ID NO: 1598337 - RNA, 19 nt, Homo sapiens
  misc_RNA (1)...(19): siRNA sense strand
gacaaaguguggaggaguu

SEQ ID NO: 1598338 - RNA, 19 nt, Homo sapiens
  misc_RNA (1)...(19): siRNA sense strand
gaaaugaauggcacuuaug

SEQ ID NO: 1598339 - RNA, 19 nt, Homo sapiens
  misc_RNA (1)...(19): siRNA sense strand
caacugccuuauaacauug

SEQ ID NO: 1598340 - RNA, 19 nt, Homo sapiens
  misc_RNA (1)...(19): siRNA sense strand
ggacaucgccauccaaguc

SEQ ID NO: 1598341 - RNA, 19 nt, Homo sapiens
  misc_RNA (1)...(19): siRNA sense strand
aaauauggguccuggagaa

SEQ ID NO: 1598342 - RNA, 19 nt, Homo sapiens
  misc_RNA (1)...(19): siRNA sense strand
cagauuuacuccuucuauu

SEQ ID NO: 1598343 - RNA, 19 nt, Homo sapiens
  misc_RNA (1)...(19): siRNA sense strand
cagaaccagucaacagauu

SEQ ID NO: 1598344 - RNA, 19 nt, Homo sapiens
  misc_RNA (1)...(19): siRNA sense strand
caugcuggaucaucuguuu

SEQ ID NO: 1598345 - RNA, 19 nt, Homo sapiens
  misc_RNA (1)...(19): siRNA sense strand
aagaagaugucagagaauu

SEQ ID NO: 1598346 - RNA, 19 nt, Homo sapiens
  misc_RNA (1)...(19): siRNA sense strand
ccaugguaguggcaauuua

SEQ ID NO: 1598347 - RNA, 19 nt, Homo sapiens
  misc_RNA (1)...(19): siRNA sense strand
gcucacagucguuauaguu

SEQ ID NO: 1598348 - RNA, 19 nt, Homo sapiens
  misc_RNA (1)...(19): siRNA sense strand
gaagacagagacaaagugu

SEQ ID NO: 1598349 - RNA, 19 nt, Homo sapiens
  misc_RNA (1)...(19): siRNA sense strand
gaaccagucaacagauuau

SEQ ID NO: 1598350 - RNA, 19 nt, Homo sapiens
  misc_RNA (1)...(19): siRNA sense strand
ugaagaugccaaacauuaa

SEQ ID NO: 1598351 - RNA, 19 nt, Homo sapiens
  misc_RNA (1)...(19): siRNA sense strand
gcagauuuacuccuucuau

SEQ ID NO: 1598352 - RNA, 19 nt, Homo sapiens
  misc_RNA (1)...(19): siRNA sense strand
gauauguggcaguaacuaa

SEQ ID NO: 1598353 - RNA, 19 nt, Homo sapiens
  misc_RNA (1)...(19): siRNA sense strand
uaucaaagaagaugucaga

SEQ ID NO: 1598354 - RNA, 19 nt, Homo sapiens
  misc_RNA (1)...(19): siRNA sense strand
ggaaaaccaugcuggauca

SEQ ID NO: 1598355 - RNA, 19 nt, Homo sapiens
  misc_RNA (1)...(19): siRNA sense strand
caauaugaacugaucugua

SEQ ID NO: 1598356 - RNA, 19 nt, Homo sapiens
  misc_RNA (1)...(19): siRNA sense strand
uguaguacccuuucuuauu

SEQ ID NO: 1598357 - RNA, 19 nt, Homo sapiens
  misc_RNA (1)...(19): siRNA sense strand
gcuaggugcauucccauuu

SEQ ID NO: 1598358 - RNA, 19 nt, Homo sapiens
  misc_RNA (1)...(19): siRNA sense strand
uaugggagcaucuuucaaa

SEQ ID NO: 1598359 - RNA, 19 nt, Homo sapiens
  misc_RNA (1)...(19): siRNA sense strand
ucaaagaagaugucagaga

SEQ ID NO: 1598360 - RNA, 19 nt, Homo sapiens
  misc_RNA (1)...(19): siRNA sense strand
augaagaugccaaacauua

SEQ ID NO: 1598361 - RNA, 19 nt, Homo sapiens
  misc_RNA (1)...(19): siRNA sense strand
ucaugaagaugccaaacau

SEQ ID NO: 1598362 - RNA, 19 nt, Homo sapiens
  misc_RNA (1)...(19): siRNA sense strand
caaguucugccgagccaua

SEQ ID NO: 1598363 - RNA, 19 nt, Homo sapiens
  misc_RNA (1)...(19): siRNA sense strand
caagaaacagagaaccaaa

SEQ ID NO: 1598364 - RNA, 19 nt, Homo sapiens
  misc_RNA (1)...(19): siRNA sense strand
ccuaggaacaucaaugaaa

SEQ ID NO: 1598365 - RNA, 19 nt, Homo sapiens
  misc_RNA (1)...(19): siRNA sense strand
cuaggaacaucaaugaaag

SEQ ID NO: 1598366 - RNA, 19 nt, Homo sapiens
  misc_RNA (1)...(19): siRNA sense strand
uuaugaaaguggccaagaa

SEQ ID NO: 1598367 - RNA, 19 nt, Homo sapiens
  misc_RNA (1)...(19): siRNA sense strand
gauuuacuccuucuauuca

SEQ ID NO: 1598368 - RNA, 19 nt, Homo sapiens
  misc_RNA (1)...(19): siRNA sense strand
ccagucaacagauuauuau

SEQ ID NO: 1598369 - RNA, 19 nt, Homo sapiens
  misc_RNA (1)...(19): siRNA sense strand
gagaagacagagacaaagu

SEQ ID NO: 1598370 - RNA, 19 nt, Homo sapiens
  misc_RNA (1)...(19): siRNA sense strand
cuacagagccaaccaguac

SEQ ID NO: 1598371 - RNA, 19 nt, Homo sapiens
  misc_RNA (1)...(19): siRNA sense strand
aaaccaugcuggaucaucu

SEQ ID NO: 1598372 - RNA, 19 nt, Homo sapiens
  misc_RNA (1)...(19): siRNA sense strand
gagccaaccaguacuuuua

SEQ ID NO: 1598373 - RNA, 19 nt, Homo sapiens
  misc_RNA (1)...(19): siRNA sense strand
ugaauggcacuuaugacua

SEQ ID NO: 1598374 - RNA, 19 nt, Homo sapiens
  misc_RNA (1)...(19): siRNA sense strand
cacaauaguuuucgucauu

SEQ ID NO: 1598375 - RNA, 19 nt, Homo sapiens
  misc_RNA (1)...(19): siRNA sense strand
aaaugaauggcacuuauga

SEQ ID NO: 1598376 - RNA, 19 nt, Homo sapiens
  misc_RNA (1)...(19): siRNA sense strand
uguagcagauuuacuccuu

SEQ ID NO: 1598377 - RNA, 19 nt, Homo sapiens
  misc_RNA (1)...(19): siRNA sense strand
ucaacccaauccuuuaugu

SEQ ID NO: 1598378 - RNA, 19 nt, Homo sapiens
  misc_RNA (1)...(19): siRNA sense strand
gaucaccagcugcaacaug

SEQ ID NO: 1598379 - RNA, 19 nt, Homo sapiens
  misc_RNA (1)...(19): siRNA sense strand
aacccaauccuuuauguuu

SEQ ID NO: 1598380 - RNA, 19 nt, Homo sapiens
  misc_RNA (1)...(19): siRNA sense strand
aaacuacguuaugaaagug

SEQ ID NO: 1598381 - RNA, 19 nt, Homo sapiens
  misc_RNA (1)...(19): siRNA sense strand
uaugaaaguggccaagaaa

SEQ ID NO: 1598382 - RNA, 19 nt, Homo sapiens
  misc_RNA (1)...(19): siRNA sense strand
uaaacuuugucucuggaau

SEQ ID NO: 1598383 - RNA, 19 nt, Homo sapiens
  misc_RNA (1)...(19): siRNA sense strand
agaaccagucaacagauua

SEQ ID NO: 1598384 - RNA, 19 nt, Homo sapiens
  misc_RNA (1)...(19): siRNA sense strand
cagcaaggacacucaugaa

SEQ ID NO: 1598385 - RNA, 19 nt, Homo sapiens
  misc_RNA (1)...(19): siRNA sense strand
agagaucugcauuggauuu

SEQ ID NO: 1598386 - RNA, 19 nt, Homo sapiens
  misc_RNA (1)...(19): siRNA sense strand
ugcaggcaauuccauggua

SEQ ID NO: 1598387 - RNA, 19 nt, Homo sapiens
  misc_RNA (1)...(19): siRNA sense strand
cagagaauuugcaaaaguu

SEQ ID NO: 1598388 - RNA, 19 nt, Homo sapiens
  misc_RNA (1)...(19): siRNA sense strand
acagauauguggcaguaac

SEQ ID NO: 1598389 - RNA, 19 nt, Homo sapiens
  misc_RNA (1)...(19): siRNA sense strand
gcaguucauggguggguuu

SEQ ID NO: 1598390 - RNA, 19 nt, Homo sapiens
  misc_RNA (1)...(19): siRNA sense strand
uggagaagacagagacaaa

SEQ ID NO: 1598391 - RNA, 19 nt, Homo sapiens
  misc_RNA (1)...(19): siRNA sense strand
caacccaauccuuuauguu

SEQ ID NO: 1598392 - RNA, 19 nt, Homo sapiens
  misc_RNA (1)...(19): siRNA sense strand
gaaccaaaacagaugugua

SEQ ID NO: 1598393 - RNA, 19 nt, Homo sapiens
  misc_RNA (1)...(19): siRNA sense strand
ggagaagacagagacaaag

SEQ ID NO: 1598394 - RNA, 19 nt, Homo sapiens
  misc_RNA (1)...(19): siRNA sense strand
agaagaugucagagaauuu

SEQ ID NO: 1598395 - RNA, 19 nt, Homo sapiens
  misc_RNA (1)...(19): siRNA sense strand
ucacagucguuauaguuuu

SEQ ID NO: 1598396 - RNA, 19 nt, Homo sapiens
  misc_RNA (1)...(19): siRNA sense strand
uaaaaguucugcucacagu

SEQ ID NO: 1598397 - RNA, 19 nt, Homo sapiens
  misc_RNA (1)...(19): siRNA sense strand
ugauucaaaugcuagagau

SEQ ID NO: 1598398 - RNA, 19 nt, Homo sapiens
  misc_RNA (1)...(19): siRNA sense strand
uaccuaggaacaucaauga

SEQ ID NO: 1598399 - RNA, 19 nt, Homo sapiens
  misc_RNA (1)...(19): siRNA sense strand
cauccugaauuuggcugua

SEQ ID NO: 1598400 - RNA, 19 nt, Homo sapiens
  misc_RNA (1)...(19): siRNA sense strand
guucugcucacagucguua

SEQ ID NO: 1598401 - RNA, 19 nt, Homo sapiens
  misc_RNA (1)...(19): siRNA sense strand
caugguaguggcaauuuau

SEQ ID NO: 1598402 - RNA, 19 nt, Homo sapiens
  misc_RNA (1)...(19): siRNA sense strand
gggaaaauaaugugcaaaa

SEQ ID NO: 1598403 - RNA, 19 nt, Homo sapiens
  misc_RNA (1)...(19): siRNA sense strand
uguacacacuaaacuuugu

SEQ ID NO: 1598404 - RNA, 19 nt, Homo sapiens
  misc_RNA (1)...(19): siRNA sense strand
ccaguacuuuuagcauuua

SEQ ID NO: 1598405 - RNA, 19 nt, Homo sapiens
  misc_RNA (1)...(19): siRNA sense strand
cugcauuggauuuguagua

SEQ ID NO: 1598406 - RNA, 19 nt, Homo sapiens
  misc_RNA (1)...(19): siRNA sense strand
aaacuuugucucuggaaug

SEQ ID NO: 1598407 - RNA, 19 nt, Homo sapiens
  misc_RNA (1)...(19): siRNA sense strand
gagcaaacgcauggacauc

SEQ ID NO: 1598408 - RNA, 19 nt, Homo sapiens
  misc_RNA (1)...(19): siRNA sense strand
uuuguaguacccuuucuua

SEQ ID NO: 1598409 - RNA, 19 nt, Homo sapiens
  misc_RNA (1)...(19): siRNA sense strand
gagaucugcauuggauuug

SEQ ID NO: 1598410 - RNA, 19 nt, Homo sapiens
  misc_RNA (1)...(19): siRNA sense strand
uagcagauuuacuccuucu

SEQ ID NO: 1598411 - RNA, 19 nt, Homo sapiens
  misc_RNA (1)...(19): siRNA sense strand
ucagagaauuugcaaaagu

SEQ ID NO: 1598412 - RNA, 19 nt, Homo sapiens
  misc_RNA (1)...(19): siRNA sense strand
ggaguuuccuuuugauucu

SEQ ID NO: 1598413 - RNA, 19 nt, Homo sapiens
  misc_RNA (1)...(19): siRNA sense strand
gaugucagagaauuugcaa

SEQ ID NO: 1598414 - RNA, 19 nt, Homo sapiens
  misc_RNA (1)...(19): siRNA sense strand
accagucaacagauuauua

SEQ ID NO: 1598415 - RNA, 19 nt, Homo sapiens
  misc_RNA (1)...(19): siRNA sense strand
cuuguacacacuaaacuuu

SEQ ID NO: 1598416 - RNA, 19 nt, Homo sapiens
  misc_RNA (1)...(19): siRNA sense strand
ccucaacccaauccuuuau

SEQ ID NO: 1598417 - RNA, 19 nt, Homo sapiens
  misc_RNA (1)...(19): siRNA sense strand
gccucaacccaauccuuua

SEQ ID NO: 1598418 - RNA, 19 nt, Homo sapiens
  misc_RNA (1)...(19): siRNA sense strand
acagcaaggacacucauga

SEQ ID NO: 1598419 - RNA, 19 nt, Homo sapiens
  misc_RNA (1)...(19): siRNA sense strand
acagcugccucaacccaau

SEQ ID NO: 1598420 - RNA, 19 nt, Homo sapiens
  misc_RNA (1)...(19): siRNA sense strand
ccagaaagcuccuugugaa

SEQ ID NO: 1598421 - RNA, 19 nt, Homo sapiens
  misc_RNA (1)...(19): siRNA sense strand
gagcuucggucucguauug

SEQ ID NO: 1598422 - RNA, 19 nt, Homo sapiens
  misc_RNA (1)...(19): siRNA sense strand
gagaagacuuagacccuuu

SEQ ID NO: 1598423 - RNA, 19 nt, Homo sapiens
  misc_RNA (1)...(19): siRNA sense strand
gcagcaugauccucaaugu

SEQ ID NO: 1598424 - RNA, 19 nt, Homo sapiens
  misc_RNA (1)...(19): siRNA sense strand
ucggagagguggcaugauu

SEQ ID NO: 1598425 - RNA, 19 nt, Homo sapiens
  misc_RNA (1)...(19): siRNA sense strand
gaaagcuccuugugaaagc

SEQ ID NO: 1598426 - RNA, 19 nt, Homo sapiens
  misc_RNA (1)...(19): siRNA sense strand
ggaccuacaagaacaguga

SEQ ID NO: 1598427 - RNA, 19 nt, Homo sapiens
  misc_RNA (1)...(19): siRNA sense strand
gggcuacgaugacauguac

SEQ ID NO: 1598428 - RNA, 19 nt, Homo sapiens
  misc_RNA (1)...(19): siRNA sense strand
ccaaugauaagaagucaga

SEQ ID NO: 1598429 - RNA, 19 nt, Homo sapiens
  misc_RNA (1)...(19): siRNA sense strand
ggaaaaggcuaauguaagc

SEQ ID NO: 1598430 - RNA, 19 nt, Homo sapiens
  misc_RNA (1)...(19): siRNA sense strand
caacaauaaagaccuguau

SEQ ID NO: 1598431 - RNA, 19 nt, Homo sapiens
  misc_RNA (1)...(19): siRNA sense strand
caagaacagugaggagcuu

SEQ ID NO: 1598432 - RNA, 19 nt, Homo sapiens
  misc_RNA (1)...(19): siRNA sense strand
gguggaacaacaauaaaga

SEQ ID NO: 1598433 - RNA, 19 nt, Homo sapiens
  misc_RNA (1)...(19): siRNA sense strand
gaggagcuucggucucgua

SEQ ID NO: 1598434 - RNA, 19 nt, Homo sapiens
  misc_RNA (1)...(19): siRNA sense strand
caucacaccuauccaugag

SEQ ID NO: 1598435 - RNA, 19 nt, Homo sapiens
  misc_RNA (1)...(19): siRNA sense strand
acaauaaagaccuguaugu

SEQ ID NO: 1598436 - RNA, 19 nt, Homo sapiens
  misc_RNA (1)...(19): siRNA sense strand
ggagagguggcaugauugu

SEQ ID NO: 1598437 - RNA, 19 nt, Homo sapiens
  misc_RNA (1)...(19): siRNA sense strand
cagaaagcuccuugugaaa

SEQ ID NO: 1598438 - RNA, 19 nt, Homo sapiens
  misc_RNA (1)...(19): siRNA sense strand
ggaaucaucacaccuaucc

SEQ ID NO: 1598439 - RNA, 19 nt, Homo sapiens
  misc_RNA (1)...(19): siRNA sense strand
ccagcuggguggaacaaca

SEQ ID NO: 1598440 - RNA, 19 nt, Homo sapiens
  misc_RNA (1)...(19): siRNA sense strand
caauaaagaccuguauguc

SEQ ID NO: 1598441 - RNA, 19 nt, Homo sapiens
  misc_RNA (1)...(19): siRNA sense strand
cguauugugucuggaauca

SEQ ID NO: 1598442 - RNA, 19 nt, Homo sapiens
  misc_RNA (1)...(19): siRNA sense strand
uauugugucuggaaucauc

SEQ ID NO: 1598443 - RNA, 19 nt, Homo sapiens
  misc_RNA (1)...(19): siRNA sense strand
cagccucccuggugugauc

SEQ ID NO: 1598444 - RNA, 19 nt, Homo sapiens
  misc_RNA (1)...(19): siRNA sense strand
uguauguccuccgguauga

SEQ ID NO: 1598445 - RNA, 19 nt, Homo sapiens
  misc_RNA (1)...(19): siRNA sense strand
cagccgggucccaaugaua

SEQ ID NO: 1598446 - RNA, 19 nt, Homo sapiens
  misc_RNA (1)...(19): siRNA sense strand
gaccuaacccagaccaucu

SEQ ID NO: 1598447 - RNA, 19 nt, Homo sapiens
  misc_RNA (1)...(19): siRNA sense strand
gagaucuggcuucccaaga

SEQ ID NO: 1598448 - RNA, 19 nt, Homo sapiens
  misc_RNA (1)...(19): siRNA sense strand
gcuucggucucguauugug

SEQ ID NO: 1598449 - RNA, 19 nt, Homo sapiens
  misc_RNA (1)...(19): siRNA sense strand
auaaggauggguccagaaa

SEQ ID NO: 1598450 - RNA, 19 nt, Homo sapiens
  misc_RNA (1)...(19): siRNA sense strand
cccaggagcucgcuuugac

SEQ ID NO: 1598451 - RNA, 19 nt, Homo sapiens
  misc_RNA (1)...(19): siRNA sense strand
cuggguggaacaacaauaa

SEQ ID NO: 1598452 - RNA, 19 nt, Homo sapiens
  misc_RNA (1)...(19): siRNA sense strand
ucuggaaucaucacaccua

SEQ ID NO: 1598453 - RNA, 19 nt, Homo sapiens
  misc_RNA (1)...(19): siRNA sense strand
aaggauggguccagaaagc

SEQ ID NO: 1598454 - RNA, 19 nt, Homo sapiens
  misc_RNA (1)...(19): siRNA sense strand
agaucuggcuucccaagag

SEQ ID NO: 1598455 - RNA, 19 nt, Homo sapiens
  misc_RNA (1)...(19): siRNA sense strand
agaaagcuccuugugaaag

SEQ ID NO: 1598456 - RNA, 19 nt, Homo sapiens
  misc_RNA (1)...(19): siRNA sense strand
gcuggguggaacaacaaua

SEQ ID NO: 1598457 - RNA, 19 nt, Homo sapiens
  misc_RNA (1)...(19): siRNA sense strand
uccagaaagcuccuuguga

SEQ ID NO: 1598458 - RNA, 19 nt, Homo sapiens
  misc_RNA (1)...(19): siRNA sense strand
gauuguggauccccugaga

SEQ ID NO: 1598459 - RNA, 19 nt, Homo sapiens
  misc_RNA (1)...(19): siRNA sense strand
ccagaaagcuccuugugaa

SEQ ID NO: 1598460 - RNA, 19 nt, Homo sapiens
  misc_RNA (1)...(19): siRNA sense strand
gagcuucggucucguauug

SEQ ID NO: 1598461 - RNA, 19 nt, Homo sapiens
  misc_RNA (1)...(19): siRNA sense strand
gagaagacuuagacccuuu

SEQ ID NO: 1598462 - RNA, 19 nt, Homo sapiens
  misc_RNA (1)...(19): siRNA sense strand
gcagcaugauccucaaugu

SEQ ID NO: 1598463 - RNA, 19 nt, Homo sapiens
  misc_RNA (1)...(19): siRNA sense strand
ucggagagguggcaugauu

SEQ ID NO: 1598464 - RNA, 19 nt, Homo sapiens
  misc_RNA (1)...(19): siRNA sense strand
gaaagcuccuugugaaagc

SEQ ID NO: 1598465 - RNA, 19 nt, Homo sapiens
  misc_RNA (1)...(19): siRNA sense strand
ggaccuacaagaacaguga

SEQ ID NO: 1598466 - RNA, 19 nt, Homo sapiens
  misc_RNA (1)...(19): siRNA sense strand
gggcuacgaugacauguac

SEQ ID NO: 1598467 - RNA, 19 nt, Homo sapiens
  misc_RNA (1)...(19): siRNA sense strand
ccaaugauaagaagucaga

SEQ ID NO: 1598468 - RNA, 19 nt, Homo sapiens
  misc_RNA (1)...(19): siRNA sense strand
ggaaaaggcuaauguaagc

SEQ ID NO: 1598469 - RNA, 19 nt, Homo sapiens
  misc_RNA (1)...(19): siRNA sense strand
caacaauaaagaccuguau

SEQ ID NO: 1598470 - RNA, 19 nt, Homo sapiens
  misc_RNA (1)...(19): siRNA sense strand
caagaacagugaggagcuu

SEQ ID NO: 1598471 - RNA, 19 nt, Homo sapiens
  misc_RNA (1)...(19): siRNA sense strand
gguggaacaacaauaaaga

SEQ ID NO: 1598472 - RNA, 19 nt, Homo sapiens
  misc_RNA (1)...(19): siRNA sense strand
gaggagcuucggucucgua

SEQ ID NO: 1598473 - RNA, 19 nt, Homo sapiens
  misc_RNA (1)...(19): siRNA sense strand
caucacaccuauccaugag

SEQ ID NO: 1598474 - RNA, 19 nt, Homo sapiens
  misc_RNA (1)...(19): siRNA sense strand
acaauaaagaccuguaugu

SEQ ID NO: 1598475 - RNA, 19 nt, Homo sapiens
  misc_RNA (1)...(19): siRNA sense strand
ggagagguggcaugauugu

SEQ ID NO: 1598476 - RNA, 19 nt, Homo sapiens
  misc_RNA (1)...(19): siRNA sense strand
cagaaagcuccuugugaaa

SEQ ID NO: 1598477 - RNA, 19 nt, Homo sapiens
  misc_RNA (1)...(19): siRNA sense strand
ggaaucaucacaccuaucc

SEQ ID NO: 1598478 - RNA, 19 nt, Homo sapiens
  misc_RNA (1)...(19): siRNA sense strand
ccagcuggguggaacaaca

SEQ ID NO: 1598479 - RNA, 19 nt, Homo sapiens
  misc_RNA (1)...(19): siRNA sense strand
caauaaagaccuguauguc

SEQ ID NO: 1598480 - RNA, 19 nt, Homo sapiens
  misc_RNA (1)...(19): siRNA sense strand
cguauugugucuggaauca

SEQ ID NO: 1598481 - RNA, 19 nt, Homo sapiens
  misc_RNA (1)...(19): siRNA sense strand
uauugugucuggaaucauc

SEQ ID NO: 1598482 - RNA, 19 nt, Homo sapiens
  misc_RNA (1)...(19): siRNA sense strand
cagccucccuggugugauc

SEQ ID NO: 1598483 - RNA, 19 nt, Homo sapiens
  misc_RNA (1)...(19): siRNA sense strand
uguauguccuccgguauga

SEQ ID NO: 1598484 - RNA, 19 nt, Homo sapiens
  misc_RNA (1)...(19): siRNA sense strand
cagccgggucccaaugaua

SEQ ID NO: 1598485 - RNA, 19 nt, Homo sapiens
  misc_RNA (1)...(19): siRNA sense strand
gaccuaacccagaccaucu

SEQ ID NO: 1598486 - RNA, 19 nt, Homo sapiens
  misc_RNA (1)...(19): siRNA sense strand
gagaucuggcuucccaaga

SEQ ID NO: 1598487 - RNA, 19 nt, Homo sapiens
  misc_RNA (1)...(19): siRNA sense strand
gcuucggucucguauugug

SEQ ID NO: 1598488 - RNA, 19 nt, Homo sapiens
  misc_RNA (1)...(19): siRNA sense strand
auaaggauggguccagaaa

SEQ ID NO: 1598489 - RNA, 19 nt, Homo sapiens
  misc_RNA (1)...(19): siRNA sense strand
cccaggagcucgcuuugac

SEQ ID NO: 1598490 - RNA, 19 nt, Homo sapiens
  misc_RNA (1)...(19): siRNA sense strand
cuggguggaacaacaauaa

SEQ ID NO: 1598491 - RNA, 19 nt, Homo sapiens
  misc_RNA (1)...(19): siRNA sense strand
ucuggaaucaucacaccua

SEQ ID NO: 1598492 - RNA, 19 nt, Homo sapiens
  misc_RNA (1)...(19): siRNA sense strand
aaggauggguccagaaagc

SEQ ID NO: 1598493 - RNA, 19 nt, Homo sapiens
  misc_RNA (1)...(19): siRNA sense strand
agaucuggcuucccaagag

SEQ ID NO: 1598494 - RNA, 19 nt, Homo sapiens
  misc_RNA (1)...(19): siRNA sense strand
agaaagcuccuugugaaag

SEQ ID NO: 1598495 - RNA, 19 nt, Homo sapiens
  misc_RNA (1)...(19): siRNA sense strand
gcuggguggaacaacaaua

SEQ ID NO: 1598496 - RNA, 19 nt, Homo sapiens
  misc_RNA (1)...(19): siRNA sense strand
uccagaaagcuccuuguga

SEQ ID NO: 1598497 - RNA, 19 nt, Homo sapiens
  misc_RNA (1)...(19): siRNA sense strand
gauuguggauccccugaga

SEQ ID NO: 1598498 - RNA, 19 nt, Homo sapiens
  misc_RNA (1)...(19): siRNA sense strand
ccagaaagcuccuugugaa

SEQ ID NO: 1598499 - RNA, 19 nt, Homo sapiens
  misc_RNA (1)...(19): siRNA sense strand
gcagcaugauccucaaugu

SEQ ID NO: 1598500 - RNA, 19 nt, Homo sapiens
  misc_RNA (1)...(19): siRNA sense strand
gaaagcuccuugugaaagc

SEQ ID NO: 1598501 - RNA, 19 nt, Homo sapiens
  misc_RNA (1)...(19): siRNA sense strand
ggaccuacaagaacaguga

SEQ ID NO: 1598502 - RNA, 19 nt, Homo sapiens
  misc_RNA (1)...(19): siRNA sense strand
ccaaugauaagaagucaga

SEQ ID NO: 1598503 - RNA, 19 nt, Homo sapiens
  misc_RNA (1)...(19): siRNA sense strand
caacaauaaagaccuguau

SEQ ID NO: 1598504 - RNA, 19 nt, Homo sapiens
  misc_RNA (1)...(19): siRNA sense strand
gguggaacaacaauaaaga

SEQ ID NO: 1598505 - RNA, 19 nt, Homo sapiens
  misc_RNA (1)...(19): siRNA sense strand
acaauaaagaccuguaugu

SEQ ID NO: 1598506 - RNA, 19 nt, Homo sapiens
  misc_RNA (1)...(19): siRNA sense strand
cagaaagcuccuugugaaa

SEQ ID NO: 1598507 - RNA, 19 nt, Homo sapiens
  misc_RNA (1)...(19): siRNA sense strand
ccagcuggguggaacaaca

SEQ ID NO: 1598508 - RNA, 19 nt, Homo sapiens
  misc_RNA (1)...(19): siRNA sense strand
caauaaagaccuguauguc

SEQ ID NO: 1598509 - RNA, 19 nt, Homo sapiens
  misc_RNA (1)...(19): siRNA sense strand
uguauguccuccgguauga

SEQ ID NO: 1598510 - RNA, 19 nt, Homo sapiens
  misc_RNA (1)...(19): siRNA sense strand
cagccgggucccaaugaua

SEQ ID NO: 1598511 - RNA, 19 nt, Homo sapiens
  misc_RNA (1)...(19): siRNA sense strand
auaaggauggguccagaaa

SEQ ID NO: 1598512 - RNA, 19 nt, Homo sapiens
  misc_RNA (1)...(19): siRNA sense strand
cuggguggaacaacaauaa

SEQ ID NO: 1598513 - RNA, 19 nt, Homo sapiens
  misc_RNA (1)...(19): siRNA sense strand
aaggauggguccagaaagc

SEQ ID NO: 1598514 - RNA, 19 nt, Homo sapiens
  misc_RNA (1)...(19): siRNA sense strand
agaaagcuccuugugaaag

SEQ ID NO: 1598515 - RNA, 19 nt, Homo sapiens
  misc_RNA (1)...(19): siRNA sense strand
gcuggguggaacaacaaua

SEQ ID NO: 1598516 - RNA, 19 nt, Homo sapiens
  misc_RNA (1)...(19): siRNA sense strand
uccagaaagcuccuuguga

SEQ ID NO: 1598517 - RNA, 19 nt, Homo sapiens
  misc_RNA (1)...(19): siRNA sense strand
ccagaaagcuccuugugaa

SEQ ID NO: 1598518 - RNA, 19 nt, Homo sapiens
  misc_RNA (1)...(19): siRNA sense strand
gagcuucggucucguauug

SEQ ID NO: 1598519 - RNA, 19 nt, Homo sapiens
  misc_RNA (1)...(19): siRNA sense strand
gagaagacuuagacccuuu

SEQ ID NO: 1598520 - RNA, 19 nt, Homo sapiens
  misc_RNA (1)...(19): siRNA sense strand
gcagcaugauccucaaugu

SEQ ID NO: 1598521 - RNA, 19 nt, Homo sapiens
  misc_RNA (1)...(19): siRNA sense strand
ucggagagguggcaugauu

SEQ ID NO: 1598522 - RNA, 19 nt, Homo sapiens
  misc_RNA (1)...(19): siRNA sense strand
gaaagcuccuugugaaagc

SEQ ID NO: 1598523 - RNA, 19 nt, Homo sapiens
  misc_RNA (1)...(19): siRNA sense strand
ggaccuacaagaacaguga

SEQ ID NO: 1598524 - RNA, 19 nt, Homo sapiens
  misc_RNA (1)...(19): siRNA sense strand
gggcuacgaugacauguac

SEQ ID NO: 1598525 - RNA, 19 nt, Homo sapiens
  misc_RNA (1)...(19): siRNA sense strand
ccaaugauaagaagucaga

SEQ ID NO: 1598526 - RNA, 19 nt, Homo sapiens
  misc_RNA (1)...(19): siRNA sense strand
ggaaaaggcuaauguaagc

SEQ ID NO: 1598527 - RNA, 19 nt, Homo sapiens
  misc_RNA (1)...(19): siRNA sense strand
caacaauaaagaccuguau

SEQ ID NO: 1598528 - RNA, 19 nt, Homo sapiens
  misc_RNA (1)...(19): siRNA sense strand
caagaacagugaggagcuu

SEQ ID NO: 1598529 - RNA, 19 nt, Homo sapiens
  misc_RNA (1)...(19): siRNA sense strand
gguggaacaacaauaaaga

SEQ ID NO: 1598530 - RNA, 19 nt, Homo sapiens
  misc_RNA (1)...(19): siRNA sense strand
gaggagcuucggucucgua

SEQ ID NO: 1598531 - RNA, 19 nt, Homo sapiens
  misc_RNA (1)...(19): siRNA sense strand
caucacaccuauccaugag

SEQ ID NO: 1598532 - RNA, 19 nt, Homo sapiens
  misc_RNA (1)...(19): siRNA sense strand
acaauaaagaccuguaugu

SEQ ID NO: 1598533 - RNA, 19 nt, Homo sapiens
  misc_RNA (1)...(19): siRNA sense strand
ggagagguggcaugauugu

SEQ ID NO: 1598534 - RNA, 19 nt, Homo sapiens
  misc_RNA (1)...(19): siRNA sense strand
cagaaagcuccuugugaaa

SEQ ID NO: 1598535 - RNA, 19 nt, Homo sapiens
  misc_RNA (1)...(19): siRNA sense strand
ggaaucaucacaccuaucc

SEQ ID NO: 1598536 - RNA, 19 nt, Homo sapiens
  misc_RNA (1)...(19): siRNA sense strand
ccagcuggguggaacaaca

SEQ ID NO: 1598537 - RNA, 19 nt, Homo sapiens
  misc_RNA (1)...(19): siRNA sense strand
caauaaagaccuguauguc

SEQ ID NO: 1598538 - RNA, 19 nt, Homo sapiens
  misc_RNA (1)...(19): siRNA sense strand
cguauugugucuggaauca

SEQ ID NO: 1598539 - RNA, 19 nt, Homo sapiens
  misc_RNA (1)...(19): siRNA sense strand
uauugugucuggaaucauc

SEQ ID NO: 1598540 - RNA, 19 nt, Homo sapiens
  misc_RNA (1)...(19): siRNA sense strand
cagccucccuggugugauc

SEQ ID NO: 1598541 - RNA, 19 nt, Homo sapiens
  misc_RNA (1)...(19): siRNA sense strand
uguauguccuccgguauga

SEQ ID NO: 1598542 - RNA, 19 nt, Homo sapiens
  misc_RNA (1)...(19): siRNA sense strand
cagccgggucccaaugaua

SEQ ID NO: 1598543 - RNA, 19 nt, Homo sapiens
  misc_RNA (1)...(19): siRNA sense strand
gaccuaacccagaccaucu

SEQ ID NO: 1598544 - RNA, 19 nt, Homo sapiens
  misc_RNA (1)...(19): siRNA sense strand
gagaucuggcuucccaaga

SEQ ID NO: 1598545 - RNA, 19 nt, Homo sapiens
  misc_RNA (1)...(19): siRNA sense strand
gcuucggucucguauugug

SEQ ID NO: 1598546 - RNA, 19 nt, Homo sapiens
  misc_RNA (1)...(19): siRNA sense strand
auaaggauggguccagaaa

SEQ ID NO: 1598547 - RNA, 19 nt, Homo sapiens
  misc_RNA (1)...(19): siRNA sense strand
cccaggagcucgcuuugac

SEQ ID NO: 1598548 - RNA, 19 nt, Homo sapiens
  misc_RNA (1)...(19): siRNA sense strand
cuggguggaacaacaauaa

SEQ ID NO: 1598549 - RNA, 19 nt, Homo sapiens
  misc_RNA (1)...(19): siRNA sense strand
ucuggaaucaucacaccua

SEQ ID NO: 1598550 - RNA, 19 nt, Homo sapiens
  misc_RNA (1)...(19): siRNA sense strand
aaggauggguccagaaagc

SEQ ID NO: 1598551 - RNA, 19 nt, Homo sapiens
  misc_RNA (1)...(19): siRNA sense strand
agaucuggcuucccaagag

SEQ ID NO: 1598552 - RNA, 19 nt, Homo sapiens
  misc_RNA (1)...(19): siRNA sense strand
agaaagcuccuugugaaag

SEQ ID NO: 1598553 - RNA, 19 nt, Homo sapiens
  misc_RNA (1)...(19): siRNA sense strand
gcuggguggaacaacaaua

SEQ ID NO: 1598554 - RNA, 19 nt, Homo sapiens
  misc_RNA (1)...(19): siRNA sense strand
uccagaaagcuccuuguga

SEQ ID NO: 1598555 - RNA, 19 nt, Homo sapiens
  misc_RNA (1)...(19): siRNA sense strand
gauuguggauccccugaga

SEQ ID NO: 1598556 - RNA, 19 nt, Homo sapiens
  misc_RNA (1)...(19): siRNA sense strand
ccagaaagcuccuugugaa

SEQ ID NO: 1598557 - RNA, 19 nt, Homo sapiens
  misc_RNA (1)...(19): siRNA sense strand
gagcuucggucucguauug

SEQ ID NO: 1598558 - RNA, 19 nt, Homo sapiens
  misc_RNA (1)...(19): siRNA sense strand
gagaagacuuagacccuuu

SEQ ID NO: 1598559 - RNA, 19 nt, Homo sapiens
  misc_RNA (1)...(19): siRNA sense strand
gcagcaugauccucaaugu

SEQ ID NO: 1598560 - RNA, 19 nt, Homo sapiens
  misc_RNA (1)...(19): siRNA sense strand
ucggagagguggcaugauu

SEQ ID NO: 1598561 - RNA, 19 nt, Homo sapiens
  misc_RNA (1)...(19): siRNA sense strand
gaaagcuccuugugaaagc

SEQ ID NO: 1598562 - RNA, 19 nt, Homo sapiens
  misc_RNA (1)...(19): siRNA sense strand
ggaccuacaagaacaguga

SEQ ID NO: 1598563 - RNA, 19 nt, Homo sapiens
  misc_RNA (1)...(19): siRNA sense strand
gggcuacgaugacauguac

SEQ ID NO: 1598564 - RNA, 19 nt, Homo sapiens
  misc_RNA (1)...(19): siRNA sense strand
ccaaugauaagaagucaga

SEQ ID NO: 1598565 - RNA, 19 nt, Homo sapiens
  misc_RNA (1)...(19): siRNA sense strand
ggaaaaggcuaauguaagc

SEQ ID NO: 1598566 - RNA, 19 nt, Homo sapiens
  misc_RNA (1)...(19): siRNA sense strand
caacaauaaagaccuguau

SEQ ID NO: 1598567 - RNA, 19 nt, Homo sapiens
  misc_RNA (1)...(19): siRNA sense strand
caagaacagugaggagcuu

SEQ ID NO: 1598568 - RNA, 19 nt, Homo sapiens
  misc_RNA (1)...(19): siRNA sense strand
gguggaacaacaauaaaga

SEQ ID NO: 1598569 - RNA, 19 nt, Homo sapiens
  misc_RNA (1)...(19): siRNA sense strand
gaggagcuucggucucgua

SEQ ID NO: 1598570 - RNA, 19 nt, Homo sapiens
  misc_RNA (1)...(19): siRNA sense strand
caucacaccuauccaugag

SEQ ID NO: 1598571 - RNA, 19 nt, Homo sapiens
  misc_RNA (1)...(19): siRNA sense strand
acaauaaagaccuguaugu

SEQ ID NO: 1598572 - RNA, 19 nt, Homo sapiens
  misc_RNA (1)...(19): siRNA sense strand
ggagagguggcaugauugu

SEQ ID NO: 1598573 - RNA, 19 nt, Homo sapiens
  misc_RNA (1)...(19): siRNA sense strand
cagaaagcuccuugugaaa

SEQ ID NO: 1598574 - RNA, 19 nt, Homo sapiens
  misc_RNA (1)...(19): siRNA sense strand
ggaaucaucacaccuaucc

SEQ ID NO: 1598575 - RNA, 19 nt, Homo sapiens
  misc_RNA (1)...(19): siRNA sense strand
ccagcuggguggaacaaca

SEQ ID NO: 1598576 - RNA, 19 nt, Homo sapiens
  misc_RNA (1)...(19): siRNA sense strand
caauaaagaccuguauguc

SEQ ID NO: 1598577 - RNA, 19 nt, Homo sapiens
  misc_RNA (1)...(19): siRNA sense strand
cguauugugucuggaauca

SEQ ID NO: 1598578 - RNA, 19 nt, Homo sapiens
  misc_RNA (1)...(19): siRNA sense strand
uauugugucuggaaucauc

SEQ ID NO: 1598579 - RNA, 19 nt, Homo sapiens
  misc_RNA (1)...(19): siRNA sense strand
cagccucccuggugugauc

SEQ ID NO: 1598580 - RNA, 19 nt, Homo sapiens
  misc_RNA (1)...(19): siRNA sense strand
uguauguccuccgguauga

SEQ ID NO: 1598581 - RNA, 19 nt, Homo sapiens
  misc_RNA (1)...(19): siRNA sense strand
cagccgggucccaaugaua

SEQ ID NO: 1598582 - RNA, 19 nt, Homo sapiens
  misc_RNA (1)...(19): siRNA sense strand
gaccuaacccagaccaucu

SEQ ID NO: 1598583 - RNA, 19 nt, Homo sapiens
  misc_RNA (1)...(19): siRNA sense strand
gagaucuggcuucccaaga

SEQ ID NO: 1598584 - RNA, 19 nt, Homo sapiens
  misc_RNA (1)...(19): siRNA sense strand
gcuucggucucguauugug

SEQ ID NO: 1598585 - RNA, 19 nt, Homo sapiens
  misc_RNA (1)...(19): siRNA sense strand
auaaggauggguccagaaa

SEQ ID NO: 1598586 - RNA, 19 nt, Homo sapiens
  misc_RNA (1)...(19): siRNA sense strand
cccaggagcucgcuuugac

SEQ ID NO: 1598587 - RNA, 19 nt, Homo sapiens
  misc_RNA (1)...(19): siRNA sense strand
cuggguggaacaacaauaa

SEQ ID NO: 1598588 - RNA, 19 nt, Homo sapiens
  misc_RNA (1)...(19): siRNA sense strand
ucuggaaucaucacaccua

SEQ ID NO: 1598589 - RNA, 19 nt, Homo sapiens
  misc_RNA (1)...(19): siRNA sense strand
aaggauggguccagaaagc

SEQ ID NO: 1598590 - RNA, 19 nt, Homo sapiens
  misc_RNA (1)...(19): siRNA sense strand
agaucuggcuucccaagag

SEQ ID NO: 1598591 - RNA, 19 nt, Homo sapiens
  misc_RNA (1)...(19): siRNA sense strand
agaaagcuccuugugaaag

SEQ ID NO: 1598592 - RNA, 19 nt, Homo sapiens
  misc_RNA (1)...(19): siRNA sense strand
gcuggguggaacaacaaua

SEQ ID NO: 1598593 - RNA, 19 nt, Homo sapiens
  misc_RNA (1)...(19): siRNA sense strand
uccagaaagcuccuuguga

SEQ ID NO: 1598594 - RNA, 19 nt, Homo sapiens
  misc_RNA (1)...(19): siRNA sense strand
gauuguggauccccugaga

SEQ ID NO: 1598595 - RNA, 19 nt, Homo sapiens
  misc_RNA (1)...(19): siRNA sense strand
ccagaaagcuccuugugaa

SEQ ID NO: 1598596 - RNA, 19 nt, Homo sapiens
  misc_RNA (1)...(19): siRNA sense strand
gcagcaugauccucaaugu

SEQ ID NO: 1598597 - RNA, 19 nt, Homo sapiens
  misc_RNA (1)...(19): siRNA sense strand
gaaagcuccuugugaaagc

SEQ ID NO: 1598598 - RNA, 19 nt, Homo sapiens
  misc_RNA (1)...(19): siRNA sense strand
ggaccuacaagaacaguga

SEQ ID NO: 1598599 - RNA, 19 nt, Homo sapiens
  misc_RNA (1)...(19): siRNA sense strand
ccaaugauaagaagucaga

SEQ ID NO: 1598600 - RNA, 19 nt, Homo sapiens
  misc_RNA (1)...(19): siRNA sense strand
caacaauaaagaccuguau

SEQ ID NO: 1598601 - RNA, 19 nt, Homo sapiens
  misc_RNA (1)...(19): siRNA sense strand
gguggaacaacaauaaaga

SEQ ID NO: 1598602 - RNA, 19 nt, Homo sapiens
  misc_RNA (1)...(19): siRNA sense strand
acaauaaagaccuguaugu

SEQ ID NO: 1598603 - RNA, 19 nt, Homo sapiens
  misc_RNA (1)...(19): siRNA sense strand
cagaaagcuccuugugaaa

SEQ ID NO: 1598604 - RNA, 19 nt, Homo sapiens
  misc_RNA (1)...(19): siRNA sense strand
ccagcuggguggaacaaca

SEQ ID NO: 1598605 - RNA, 19 nt, Homo sapiens
  misc_RNA (1)...(19): siRNA sense strand
caauaaagaccuguauguc

SEQ ID NO: 1598606 - RNA, 19 nt, Homo sapiens
  misc_RNA (1)...(19): siRNA sense strand
uguauguccuccgguauga

SEQ ID NO: 1598607 - RNA, 19 nt, Homo sapiens
  misc_RNA (1)...(19): siRNA sense strand
cagccgggucccaaugaua

SEQ ID NO: 1598608 - RNA, 19 nt, Homo sapiens
  misc_RNA (1)...(19): siRNA sense strand
auaaggauggguccagaaa

SEQ ID NO: 1598609 - RNA, 19 nt, Homo sapiens
  misc_RNA (1)...(19): siRNA sense strand
cuggguggaacaacaauaa

SEQ ID NO: 1598610 - RNA, 19 nt, Homo sapiens
  misc_RNA (1)...(19): siRNA sense strand
aaggauggguccagaaagc

SEQ ID NO: 1598611 - RNA, 19 nt, Homo sapiens
  misc_RNA (1)...(19): siRNA sense strand
agaaagcuccuugugaaag

SEQ ID NO: 1598612 - RNA, 19 nt, Homo sapiens
  misc_RNA (1)...(19): siRNA sense strand
gcuggguggaacaacaaua

SEQ ID NO: 1598613 - RNA, 19 nt, Homo sapiens
  misc_RNA (1)...(19): siRNA sense strand
uccagaaagcuccuuguga

SEQ ID NO: 1598614 - RNA, 19 nt, Homo sapiens
  misc_RNA (1)...(19): siRNA sense strand
caagaaugcuucagacaug

SEQ ID NO: 1598615 - RNA, 19 nt, Homo sapiens
  misc_RNA (1)...(19): siRNA sense strand
agacaugccugaaacaauc

SEQ ID NO: 1598616 - RNA, 19 nt, Homo sapiens
  misc_RNA (1)...(19): siRNA sense strand
gcaagaaugcuucagacau

SEQ ID NO: 1598617 - RNA, 19 nt, Homo sapiens
  misc_RNA (1)...(19): siRNA sense strand
gcccucagcgauccgcaua

SEQ ID NO: 1598618 - RNA, 19 nt, Homo sapiens
  misc_RNA (1)...(19): siRNA sense strand
gcggcaagaaugcuucaga

SEQ ID NO: 1598619 - RNA, 19 nt, Homo sapiens
  misc_RNA (1)...(19): siRNA sense strand
cagacaugccugaaacaau

SEQ ID NO: 1598620 - RNA, 19 nt, Homo sapiens
  misc_RNA (1)...(19): siRNA sense strand
caagaaugcuucagacaug

SEQ ID NO: 1598621 - RNA, 19 nt, Homo sapiens
  misc_RNA (1)...(19): siRNA sense strand
agacaugccugaaacaauc

SEQ ID NO: 1598622 - RNA, 19 nt, Homo sapiens
  misc_RNA (1)...(19): siRNA sense strand
gcaagaaugcuucagacau

SEQ ID NO: 1598623 - RNA, 19 nt, Homo sapiens
  misc_RNA (1)...(19): siRNA sense strand
gcccucagcgauccgcaua

SEQ ID NO: 1598624 - RNA, 19 nt, Homo sapiens
  misc_RNA (1)...(19): siRNA sense strand
gcggcaagaaugcuucaga

SEQ ID NO: 1598625 - RNA, 19 nt, Homo sapiens
  misc_RNA (1)...(19): siRNA sense strand
cagacaugccugaaacaau

SEQ ID NO: 1598626 - RNA, 19 nt, Homo sapiens
  misc_RNA (1)...(19): siRNA sense strand
caagaaugcuucagacaug

SEQ ID NO: 1598627 - RNA, 19 nt, Homo sapiens
  misc_RNA (1)...(19): siRNA sense strand
agacaugccugaaacaauc

SEQ ID NO: 1598628 - RNA, 19 nt, Homo sapiens
  misc_RNA (1)...(19): siRNA sense strand
gcaagaaugcuucagacau

SEQ ID NO: 1598629 - RNA, 19 nt, Homo sapiens
  misc_RNA (1)...(19): siRNA sense strand
gcccucagcgauccgcaua

SEQ ID NO: 1598630 - RNA, 19 nt, Homo sapiens
  misc_RNA (1)...(19): siRNA sense strand
gcggcaagaaugcuucaga

SEQ ID NO: 1598631 - RNA, 19 nt, Homo sapiens
  misc_RNA (1)...(19): siRNA sense strand
cagacaugccugaaacaau

SEQ ID NO: 1598632 - RNA, 19 nt, Homo sapiens
  misc_RNA (1)...(19): siRNA sense strand
caagaaugcuucagacaug

SEQ ID NO: 1598633 - RNA, 19 nt, Homo sapiens
  misc_RNA (1)...(19): siRNA sense strand
agacaugccugaaacaauc

SEQ ID NO: 1598634 - RNA, 19 nt, Homo sapiens
  misc_RNA (1)...(19): siRNA sense strand
gcaagaaugcuucagacau

SEQ ID NO: 1598635 - RNA, 19 nt, Homo sapiens
  misc_RNA (1)...(19): siRNA sense strand
gcccucagcgauccgcaua

SEQ ID NO: 1598636 - RNA, 19 nt, Homo sapiens
  misc_RNA (1)...(19): siRNA sense strand
gcggcaagaaugcuucaga

SEQ ID NO: 1598637 - RNA, 19 nt, Homo sapiens
  misc_RNA (1)...(19): siRNA sense strand
cagacaugccugaaacaau

SEQ ID NO: 1598638 - RNA, 19 nt, Homo sapiens
  misc_RNA (1)...(19): siRNA sense strand
caagaaugcuucagacaug

SEQ ID NO: 1598639 - RNA, 19 nt, Homo sapiens
  misc_RNA (1)...(19): siRNA sense strand
agacaugccugaaacaauc

SEQ ID NO: 1598640 - RNA, 19 nt, Homo sapiens
  misc_RNA (1)...(19): siRNA sense strand
gcaagaaugcuucagacau

SEQ ID NO: 1598641 - RNA, 19 nt, Homo sapiens
  misc_RNA (1)...(19): siRNA sense strand
gcccucagcgauccgcaua

SEQ ID NO: 1598642 - RNA, 19 nt, Homo sapiens
  misc_RNA (1)...(19): siRNA sense strand
gcggcaagaaugcuucaga

SEQ ID NO: 1598643 - RNA, 19 nt, Homo sapiens
  misc_RNA (1)...(19): siRNA sense strand
cagacaugccugaaacaau

SEQ ID NO: 1598644 - RNA, 19 nt, Homo sapiens
  misc_RNA (1)...(19): siRNA sense strand
caagaaugcuucagacaug

SEQ ID NO: 1598645 - RNA, 19 nt, Homo sapiens
  misc_RNA (1)...(19): siRNA sense strand
agacaugccugaaacaauc

SEQ ID NO: 1598646 - RNA, 19 nt, Homo sapiens
  misc_RNA (1)...(19): siRNA sense strand
gcaagaaugcuucagacau

SEQ ID NO: 1598647 - RNA, 19 nt, Homo sapiens
  misc_RNA (1)...(19): siRNA sense strand
gcccucagcgauccgcaua

SEQ ID NO: 1598648 - RNA, 19 nt, Homo sapiens
  misc_RNA (1)...(19): siRNA sense strand
gcggcaagaaugcuucaga

SEQ ID NO: 1598649 - RNA, 19 nt, Homo sapiens
  misc_RNA (1)...(19): siRNA sense strand
cagacaugccugaaacaau

SEQ ID NO: 1598650 - RNA, 19 nt, Homo sapiens
  misc_RNA (1)...(19): siRNA sense strand
caagaaugcuucagacaug

SEQ ID NO: 1598651 - RNA, 19 nt, Homo sapiens
  misc_RNA (1)...(19): siRNA sense strand
agacaugccugaaacaauc

SEQ ID NO: 1598652 - RNA, 19 nt, Homo sapiens
  misc_RNA (1)...(19): siRNA sense strand
gcaagaaugcuucagacau

SEQ ID NO: 1598653 - RNA, 19 nt, Homo sapiens
  misc_RNA (1)...(19): siRNA sense strand
gcccucagcgauccgcaua

SEQ ID NO: 1598654 - RNA, 19 nt, Homo sapiens
  misc_RNA (1)...(19): siRNA sense strand
gcggcaagaaugcuucaga

SEQ ID NO: 1598655 - RNA, 19 nt, Homo sapiens
  misc_RNA (1)...(19): siRNA sense strand
cagacaugccugaaacaau

SEQ ID NO: 1598656 - RNA, 19 nt, Homo sapiens
  misc_RNA (1)...(19): siRNA sense strand
caagaaugcuucagacaug

SEQ ID NO: 1598657 - RNA, 19 nt, Homo sapiens
  misc_RNA (1)...(19): siRNA sense strand
agacaugccugaaacaauc

SEQ ID NO: 1598658 - RNA, 19 nt, Homo sapiens
  misc_RNA (1)...(19): siRNA sense strand
gcaagaaugcuucagacau

SEQ ID NO: 1598659 - RNA, 19 nt, Homo sapiens
  misc_RNA (1)...(19): siRNA sense strand
gcccucagcgauccgcaua

SEQ ID NO: 1598660 - RNA, 19 nt, Homo sapiens
  misc_RNA (1)...(19): siRNA sense strand
gcggcaagaaugcuucaga

SEQ ID NO: 1598661 - RNA, 19 nt, Homo sapiens
  misc_RNA (1)...(19): siRNA sense strand
cagacaugccugaaacaau

SEQ ID NO: 1598662 - RNA, 19 nt, Homo sapiens
  misc_RNA (1)...(19): siRNA sense strand
caagaaugcuucagacaug

SEQ ID NO: 1598663 - RNA, 19 nt, Homo sapiens
  misc_RNA (1)...(19): siRNA sense strand
agacaugccugaaacaauc

SEQ ID NO: 1598664 - RNA, 19 nt, Homo sapiens
  misc_RNA (1)...(19): siRNA sense strand
gcaagaaugcuucagacau

SEQ ID NO: 1598665 - RNA, 19 nt, Homo sapiens
  misc_RNA (1)...(19): siRNA sense strand
gcccucagcgauccgcaua

SEQ ID NO: 1598666 - RNA, 19 nt, Homo sapiens
  misc_RNA (1)...(19): siRNA sense strand
gcggcaagaaugcuucaga

SEQ ID NO: 1598667 - RNA, 19 nt, Homo sapiens
  misc_RNA (1)...(19): siRNA sense strand
cagacaugccugaaacaau

SEQ ID NO: 1598668 - RNA, 19 nt, Homo sapiens
  misc_RNA (1)...(19): siRNA sense strand
caagaaugcuucagacaug

SEQ ID NO: 1598669 - RNA, 19 nt, Homo sapiens
  misc_RNA (1)...(19): siRNA sense strand
agacaugccugaaacaauc

SEQ ID NO: 1598670 - RNA, 19 nt, Homo sapiens
  misc_RNA (1)...(19): siRNA sense strand
gcaagaaugcuucagacau

SEQ ID NO: 1598671 - RNA, 19 nt, Homo sapiens
  misc_RNA (1)...(19): siRNA sense strand
gcccucagcgauccgcaua

SEQ ID NO: 1598672 - RNA, 19 nt, Homo sapiens
  misc_RNA (1)...(19): siRNA sense strand
gcggcaagaaugcuucaga

SEQ ID NO: 1598673 - RNA, 19 nt, Homo sapiens
  misc_RNA (1)...(19): siRNA sense strand
cagacaugccugaaacaau

SEQ ID NO: 1598674 - RNA, 19 nt, Homo sapiens
  misc_RNA (1)...(19): siRNA sense strand
caagaaugcuucagacaug

SEQ ID NO: 1598675 - RNA, 19 nt, Homo sapiens
  misc_RNA (1)...(19): siRNA sense strand
agacaugccugaaacaauc

SEQ ID NO: 1598676 - RNA, 19 nt, Homo sapiens
  misc_RNA (1)...(19): siRNA sense strand
gcaagaaugcuucagacau

SEQ ID NO: 1598677 - RNA, 19 nt, Homo sapiens
  misc_RNA (1)...(19): siRNA sense strand
gcccucagcgauccgcaua

SEQ ID NO: 1598678 - RNA, 19 nt, Homo sapiens
  misc_RNA (1)...(19): siRNA sense strand
gcggcaagaaugcuucaga

SEQ ID NO: 1598679 - RNA, 19 nt, Homo sapiens
  misc_RNA (1)...(19): siRNA sense strand
cagacaugccugaaacaau

SEQ ID NO: 1598680 - RNA, 19 nt, Homo sapiens
  misc_RNA (1)...(19): siRNA sense strand
caagaaugcuucagacaug

SEQ ID NO: 1598681 - RNA, 19 nt, Homo sapiens
  misc_RNA (1)...(19): siRNA sense strand
agacaugccugaaacaauc

SEQ ID NO: 1598682 - RNA, 19 nt, Homo sapiens
  misc_RNA (1)...(19): siRNA sense strand
gcaagaaugcuucagacau

SEQ ID NO: 1598683 - RNA, 19 nt, Homo sapiens
  misc_RNA (1)...(19): siRNA sense strand
gcccucagcgauccgcaua

SEQ ID NO: 1598684 - RNA, 19 nt, Homo sapiens
  misc_RNA (1)...(19): siRNA sense strand
gcggcaagaaugcuucaga

SEQ ID NO: 1598685 - RNA, 19 nt, Homo sapiens
  misc_RNA (1)...(19): siRNA sense strand
cagacaugccugaaacaau

SEQ ID NO: 1598686 - RNA, 19 nt, Homo sapiens
  misc_RNA (1)...(19): siRNA sense strand
gaaaugggcuuuacagaug

SEQ ID NO: 1598687 - RNA, 19 nt, Homo sapiens
  misc_RNA (1)...(19): siRNA sense strand
gaaagaagccauauugaaa

SEQ ID NO: 1598688 - RNA, 19 nt, Homo sapiens
  misc_RNA (1)...(19): siRNA sense strand
gaagagagcuaccaaccaa

SEQ ID NO: 1598689 - RNA, 19 nt, Homo sapiens
  misc_RNA (1)...(19): siRNA sense strand
cuacauagaugcucaguuu

SEQ ID NO: 1598690 - RNA, 19 nt, Homo sapiens
  misc_RNA (1)...(19): siRNA sense strand
ggaaaguaauguucaauug

SEQ ID NO: 1598691 - RNA, 19 nt, Homo sapiens
  misc_RNA (1)...(19): siRNA sense strand
caagguuucugcuuuaaua

SEQ ID NO: 1598692 - RNA, 19 nt, Homo sapiens
  misc_RNA (1)...(19): siRNA sense strand
gcaauggcguccagauaua

SEQ ID NO: 1598693 - RNA, 19 nt, Homo sapiens
  misc_RNA (1)...(19): siRNA sense strand
caagaagaacugaagauua

SEQ ID NO: 1598694 - RNA, 19 nt, Homo sapiens
  misc_RNA (1)...(19): siRNA sense strand
ggagaaagaagccauauug

SEQ ID NO: 1598695 - RNA, 19 nt, Homo sapiens
  misc_RNA (1)...(19): siRNA sense strand
gaaggaagaagaaaugaaa

SEQ ID NO: 1598696 - RNA, 19 nt, Homo sapiens
  misc_RNA (1)...(19): siRNA sense strand
ggucaacgcugcaaugaau

SEQ ID NO: 1598697 - RNA, 19 nt, Homo sapiens
  misc_RNA (1)...(19): siRNA sense strand
gaaugaagcuugaagaaaa

SEQ ID NO: 1598698 - RNA, 19 nt, Homo sapiens
  misc_RNA (1)...(19): siRNA sense strand
gaacagauccauucagcaa

SEQ ID NO: 1598699 - RNA, 19 nt, Homo sapiens
  misc_RNA (1)...(19): siRNA sense strand
ggucaaagcucgccaguac

SEQ ID NO: 1598700 - RNA, 19 nt, Homo sapiens
  misc_RNA (1)...(19): siRNA sense strand
gaaacaagauggucaaagc

SEQ ID NO: 1598701 - RNA, 19 nt, Homo sapiens
  misc_RNA (1)...(19): siRNA sense strand
caacacugauugacacauu

SEQ ID NO: 1598702 - RNA, 19 nt, Homo sapiens
  misc_RNA (1)...(19): siRNA sense strand
uaagagacuucaccaagaa

SEQ ID NO: 1598703 - RNA, 19 nt, Homo sapiens
  misc_RNA (1)...(19): siRNA sense strand
gauuaagcguucucucuuu

SEQ ID NO: 1598704 - RNA, 19 nt, Homo sapiens
  misc_RNA (1)...(19): siRNA sense strand
ugaagaaccuugacagcaa

SEQ ID NO: 1598705 - RNA, 19 nt, Homo sapiens
  misc_RNA (1)...(19): siRNA sense strand
gaaauugaccauugugaau

SEQ ID NO: 1598706 - RNA, 19 nt, Homo sapiens
  misc_RNA (1)...(19): siRNA sense strand
gaaagcuaccuccgagaua

SEQ ID NO: 1598707 - RNA, 19 nt, Homo sapiens
  misc_RNA (1)...(19): siRNA sense strand
ggaaaugggcuuuacagau

SEQ ID NO: 1598708 - RNA, 19 nt, Homo sapiens
  misc_RNA (1)...(19): siRNA sense strand
gaagaagaaaugaaacaga

SEQ ID NO: 1598709 - RNA, 19 nt, Homo sapiens
  misc_RNA (1)...(19): siRNA sense strand
cauaugaacuccaggaaag

SEQ ID NO: 1598710 - RNA, 19 nt, Homo sapiens
  misc_RNA (1)...(19): siRNA sense strand
ggaaggacaaggaccguaa

SEQ ID NO: 1598711 - RNA, 19 nt, Homo sapiens
  misc_RNA (1)...(19): siRNA sense strand
aaaccacugugacuuugua

SEQ ID NO: 1598712 - RNA, 19 nt, Homo sapiens
  misc_RNA (1)...(19): siRNA sense strand
gaagccauauugaaagaag

SEQ ID NO: 1598713 - RNA, 19 nt, Homo sapiens
  misc_RNA (1)...(19): siRNA sense strand
gaagaaaugaaacagaugu

SEQ ID NO: 1598714 - RNA, 19 nt, Homo sapiens
  misc_RNA (1)...(19): siRNA sense strand
agaucaagcucaugaguga

SEQ ID NO: 1598715 - RNA, 19 nt, Homo sapiens
  misc_RNA (1)...(19): siRNA sense strand
uuaagagacuucaccaaga

SEQ ID NO: 1598716 - RNA, 19 nt, Homo sapiens
  misc_RNA (1)...(19): siRNA sense strand
gagaaagaagccauauuga

SEQ ID NO: 1598717 - RNA, 19 nt, Homo sapiens
  misc_RNA (1)...(19): siRNA sense strand
gcagcaaccugaggaagga

SEQ ID NO: 1598718 - RNA, 19 nt, Homo sapiens
  misc_RNA (1)...(19): siRNA sense strand
gagaaugaagcuugaagaa

SEQ ID NO: 1598719 - RNA, 19 nt, Homo sapiens
  misc_RNA (1)...(19): siRNA sense strand
gacagcaagguaaacauua

SEQ ID NO: 1598720 - RNA, 19 nt, Homo sapiens
  misc_RNA (1)...(19): siRNA sense strand
gaugaugacacuauugcua

SEQ ID NO: 1598721 - RNA, 19 nt, Homo sapiens
  misc_RNA (1)...(19): siRNA sense strand
gacuaugaauccucacauu

SEQ ID NO: 1598722 - RNA, 19 nt, Homo sapiens
  misc_RNA (1)...(19): siRNA sense strand
uuaaagcucagacauauga

SEQ ID NO: 1598723 - RNA, 19 nt, Homo sapiens
  misc_RNA (1)...(19): siRNA sense strand
ugaaagaagcugagagaga

SEQ ID NO: 1598724 - RNA, 19 nt, Homo sapiens
  misc_RNA (1)...(19): siRNA sense strand
gcugcaaacuggaggaaau

SEQ ID NO: 1598725 - RNA, 19 nt, Homo sapiens
  misc_RNA (1)...(19): siRNA sense strand
caacggaugaugacacuau

SEQ ID NO: 1598726 - RNA, 19 nt, Homo sapiens
  misc_RNA (1)...(19): siRNA sense strand
aagcagauacgguuucuaa

SEQ ID NO: 1598727 - RNA, 19 nt, Homo sapiens
  misc_RNA (1)...(19): siRNA sense strand
gcuuuaauauucucugugu

SEQ ID NO: 1598728 - RNA, 19 nt, Homo sapiens
  misc_RNA (1)...(19): siRNA sense strand
agaaagaagccauauugaa

SEQ ID NO: 1598729 - RNA, 19 nt, Homo sapiens
  misc_RNA (1)...(19): siRNA sense strand
gaggaaggaagaagaaaug

SEQ ID NO: 1598730 - RNA, 19 nt, Homo sapiens
  misc_RNA (1)...(19): siRNA sense strand
gacuaugucuggccauguu

SEQ ID NO: 1598731 - RNA, 19 nt, Homo sapiens
  misc_RNA (1)...(19): siRNA sense strand
ggaaggaagaagaaaugaa

SEQ ID NO: 1598732 - RNA, 19 nt, Homo sapiens
  misc_RNA (1)...(19): siRNA sense strand
ggacaaggaccguaagaac

SEQ ID NO: 1598733 - RNA, 19 nt, Homo sapiens
  misc_RNA (1)...(19): siRNA sense strand
gguuucugcuuuaauauuc

SEQ ID NO: 1598734 - RNA, 19 nt, Homo sapiens
  misc_RNA (1)...(19): siRNA sense strand
guaaacauuauaccaguga

SEQ ID NO: 1598735 - RNA, 19 nt, Homo sapiens
  misc_RNA (1)...(19): siRNA sense strand
auuaagcguucucucuuua

SEQ ID NO: 1598736 - RNA, 19 nt, Homo sapiens
  misc_RNA (1)...(19): siRNA sense strand
ccaggaaaguaauguucaa

SEQ ID NO: 1598737 - RNA, 19 nt, Homo sapiens
  misc_RNA (1)...(19): siRNA sense strand
aagaagccauauugaaaga

SEQ ID NO: 1598738 - RNA, 19 nt, Homo sapiens
  misc_RNA (1)...(19): siRNA sense strand
gaaaaccacugugacuuug

SEQ ID NO: 1598739 - RNA, 19 nt, Homo sapiens
  misc_RNA (1)...(19): siRNA sense strand
cagcaauggcguccagaua

SEQ ID NO: 1598740 - RNA, 19 nt, Homo sapiens
  misc_RNA (1)...(19): siRNA sense strand
aaagcuaccuccgagauau

SEQ ID NO: 1598741 - RNA, 19 nt, Homo sapiens
  misc_RNA (1)...(19): siRNA sense strand
gaaguauggaugagguaaa

SEQ ID NO: 1598742 - RNA, 19 nt, Homo sapiens
  misc_RNA (1)...(19): siRNA sense strand
ccaagaagaacugaagauu

SEQ ID NO: 1598743 - RNA, 19 nt, Homo sapiens
  misc_RNA (1)...(19): siRNA sense strand
acagcaagguaaacauuau

SEQ ID NO: 1598744 - RNA, 19 nt, Homo sapiens
  misc_RNA (1)...(19): siRNA sense strand
agagagcuaccaaccaaua

SEQ ID NO: 1598745 - RNA, 19 nt, Homo sapiens
  misc_RNA (1)...(19): siRNA sense strand
gugugucucuacuucauuu

SEQ ID NO: 1598746 - RNA, 19 nt, Homo sapiens
  misc_RNA (1)...(19): siRNA sense strand
acuuaaagcucagacauau

SEQ ID NO: 1598747 - RNA, 19 nt, Homo sapiens
  misc_RNA (1)...(19): siRNA sense strand
gcagauacgguuucuaaaa

SEQ ID NO: 1598748 - RNA, 19 nt, Homo sapiens
  misc_RNA (1)...(19): siRNA sense strand
gagcuaccaaccaauaguu

SEQ ID NO: 1598749 - RNA, 19 nt, Homo sapiens
  misc_RNA (1)...(19): siRNA sense strand
ugacagcaagguaaacauu

SEQ ID NO: 1598750 - RNA, 19 nt, Homo sapiens
  misc_RNA (1)...(19): siRNA sense strand
gaacuccaggaaaguaaug

SEQ ID NO: 1598751 - RNA, 19 nt, Homo sapiens
  misc_RNA (1)...(19): siRNA sense strand
gagaaaacauucguucguu

SEQ ID NO: 1598752 - RNA, 19 nt, Homo sapiens
  misc_RNA (1)...(19): siRNA sense strand
ggaaguauggaugagguaa

SEQ ID NO: 1598753 - RNA, 19 nt, Homo sapiens
  misc_RNA (1)...(19): siRNA sense strand
cagcaagguaaacauuaua

SEQ ID NO: 1598754 - RNA, 19 nt, Homo sapiens
  misc_RNA (1)...(19): siRNA sense strand
gagcuacaggccaaauuug

SEQ ID NO: 1598755 - RNA, 19 nt, Homo sapiens
  misc_RNA (1)...(19): siRNA sense strand
aagagagaaugaagcuuga

SEQ ID NO: 1598756 - RNA, 19 nt, Homo sapiens
  misc_RNA (1)...(19): siRNA sense strand
uaaagaagagagcuaccaa

SEQ ID NO: 1598757 - RNA, 19 nt, Homo sapiens
  misc_RNA (1)...(19): siRNA sense strand
gagaagacuuuuggaagaa

SEQ ID NO: 1598758 - RNA, 19 nt, Homo sapiens
  misc_RNA (1)...(19): siRNA sense strand
ugcaaugaauggacaguug

SEQ ID NO: 1598759 - RNA, 19 nt, Homo sapiens
  misc_RNA (1)...(19): siRNA sense strand
caaagcagauacgguuucu

SEQ ID NO: 1598760 - RNA, 19 nt, Homo sapiens
  misc_RNA (1)...(19): siRNA sense strand
ugaaauugaccauugugaa

SEQ ID NO: 1598761 - RNA, 19 nt, Homo sapiens
  misc_RNA (1)...(19): siRNA sense strand
ccaugugugucucuacuuc

SEQ ID NO: 1598762 - RNA, 19 nt, Homo sapiens
  misc_RNA (1)...(19): siRNA sense strand
ugaggccuaucuccaagaa

SEQ ID NO: 1598763 - RNA, 19 nt, Homo sapiens
  misc_RNA (1)...(19): siRNA sense strand
acauagaugcucaguuuga

SEQ ID NO: 1598764 - RNA, 19 nt, Homo sapiens
  misc_RNA (1)...(19): siRNA sense strand
ccaaauuugagcaccuuaa

SEQ ID NO: 1598765 - RNA, 19 nt, Homo sapiens
  misc_RNA (1)...(19): siRNA sense strand
agagaccuaugaagccaaa

SEQ ID NO: 1598766 - RNA, 19 nt, Homo sapiens
  misc_RNA (1)...(19): siRNA sense strand
gaauggacaguugccguuu

SEQ ID NO: 1598767 - RNA, 19 nt, Homo sapiens
  misc_RNA (1)...(19): siRNA sense strand
aggccuaucuccaagaaga

SEQ ID NO: 1598768 - RNA, 19 nt, Homo sapiens
  misc_RNA (1)...(19): siRNA sense strand
gaaaacauucguucguuga

SEQ ID NO: 1598769 - RNA, 19 nt, Homo sapiens
  misc_RNA (1)...(19): siRNA sense strand
agaaugaagcuugaagaaa

SEQ ID NO: 1598770 - RNA, 19 nt, Homo sapiens
  misc_RNA (1)...(19): siRNA sense strand
cugauugacacauuguuua

SEQ ID NO: 1598771 - RNA, 19 nt, Homo sapiens
  misc_RNA (1)...(19): siRNA sense strand
cgacaggccacucucugaa

SEQ ID NO: 1598772 - RNA, 19 nt, Homo sapiens
  misc_RNA (1)...(19): siRNA sense strand
ggaagaagaaauaauugcu

SEQ ID NO: 1598773 - RNA, 19 nt, Homo sapiens
  misc_RNA (1)...(19): siRNA sense strand
acaggccacucucugaaga

SEQ ID NO: 1598774 - RNA, 19 nt, Homo sapiens
  misc_RNA (1)...(19): siRNA sense strand
gagagcuacaggccaaauu

SEQ ID NO: 1598775 - RNA, 19 nt, Homo sapiens
  misc_RNA (1)...(19): siRNA sense strand
aacauucguucguugacua

SEQ ID NO: 1598776 - RNA, 19 nt, Homo sapiens
  misc_RNA (1)...(19): siRNA sense strand
aaagaagccauauugaaag

SEQ ID NO: 1598777 - RNA, 19 nt, Homo sapiens
  misc_RNA (1)...(19): siRNA sense strand
gcaagguuucugcuuuaau

SEQ ID NO: 1598778 - RNA, 19 nt, Homo sapiens
  misc_RNA (1)...(19): siRNA sense strand
gaccguaagaacuccaauu

SEQ ID NO: 1598779 - RNA, 19 nt, Homo sapiens
  misc_RNA (1)...(19): siRNA sense strand
gacaaggaccguaagaacu

SEQ ID NO: 1598780 - RNA, 19 nt, Homo sapiens
  misc_RNA (1)...(19): siRNA sense strand
gauccauucagcaagguuu

SEQ ID NO: 1598781 - RNA, 19 nt, Homo sapiens
  misc_RNA (1)...(19): siRNA sense strand
gaucagcuggugaacagau

SEQ ID NO: 1598782 - RNA, 19 nt, Homo sapiens
  misc_RNA (1)...(19): siRNA sense strand
aaaggagaaagaagccaua

SEQ ID NO: 1598783 - RNA, 19 nt, Homo sapiens
  misc_RNA (1)...(19): siRNA sense strand
gcgaguaaaggagaaagaa

SEQ ID NO: 1598784 - RNA, 19 nt, Homo sapiens
  misc_RNA (1)...(19): siRNA sense strand
ucagaggaaggaagaagaa

SEQ ID NO: 1598785 - RNA, 19 nt, Homo sapiens
  misc_RNA (1)...(19): siRNA sense strand
agagaagacuuuuggaaga

SEQ ID NO: 1598786 - RNA, 19 nt, Homo sapiens
  misc_RNA (1)...(19): siRNA sense strand
gaaaugggcuuuacagaug

SEQ ID NO: 1598787 - RNA, 19 nt, Homo sapiens
  misc_RNA (1)...(19): siRNA sense strand
gaaagaagccauauugaaa

SEQ ID NO: 1598788 - RNA, 19 nt, Homo sapiens
  misc_RNA (1)...(19): siRNA sense strand
gaagagagcuaccaaccaa

SEQ ID NO: 1598789 - RNA, 19 nt, Homo sapiens
  misc_RNA (1)...(19): siRNA sense strand
cuacauagaugcucaguuu

SEQ ID NO: 1598790 - RNA, 19 nt, Homo sapiens
  misc_RNA (1)...(19): siRNA sense strand
ggaaaguaauguucaauug

SEQ ID NO: 1598791 - RNA, 19 nt, Homo sapiens
  misc_RNA (1)...(19): siRNA sense strand
caagguuucugcuuuaaua

SEQ ID NO: 1598792 - RNA, 19 nt, Homo sapiens
  misc_RNA (1)...(19): siRNA sense strand
gcaauggcguccagauaua

SEQ ID NO: 1598793 - RNA, 19 nt, Homo sapiens
  misc_RNA (1)...(19): siRNA sense strand
caagaagaacugaagauua

SEQ ID NO: 1598794 - RNA, 19 nt, Homo sapiens
  misc_RNA (1)...(19): siRNA sense strand
ggagaaagaagccauauug

SEQ ID NO: 1598795 - RNA, 19 nt, Homo sapiens
  misc_RNA (1)...(19): siRNA sense strand
gaaggaagaagaaaugaaa

SEQ ID NO: 1598796 - RNA, 19 nt, Homo sapiens
  misc_RNA (1)...(19): siRNA sense strand
ggucaacgcugcaaugaau

SEQ ID NO: 1598797 - RNA, 19 nt, Homo sapiens
  misc_RNA (1)...(19): siRNA sense strand
gaaugaagcuugaagaaaa

SEQ ID NO: 1598798 - RNA, 19 nt, Homo sapiens
  misc_RNA (1)...(19): siRNA sense strand
gaacagauccauucagcaa

SEQ ID NO: 1598799 - RNA, 19 nt, Homo sapiens
  misc_RNA (1)...(19): siRNA sense strand
ggucaaagcucgccaguac

SEQ ID NO: 1598800 - RNA, 19 nt, Homo sapiens
  misc_RNA (1)...(19): siRNA sense strand
gaaacaagauggucaaagc

SEQ ID NO: 1598801 - RNA, 19 nt, Homo sapiens
  misc_RNA (1)...(19): siRNA sense strand
caacacugauugacacauu

SEQ ID NO: 1598802 - RNA, 19 nt, Homo sapiens
  misc_RNA (1)...(19): siRNA sense strand
uaagagacuucaccaagaa

SEQ ID NO: 1598803 - RNA, 19 nt, Homo sapiens
  misc_RNA (1)...(19): siRNA sense strand
gauuaagcguucucucuuu

SEQ ID NO: 1598804 - RNA, 19 nt, Homo sapiens
  misc_RNA (1)...(19): siRNA sense strand
ugaagaaccuugacagcaa

SEQ ID NO: 1598805 - RNA, 19 nt, Homo sapiens
  misc_RNA (1)...(19): siRNA sense strand
gaaauugaccauugugaau

SEQ ID NO: 1598806 - RNA, 19 nt, Homo sapiens
  misc_RNA (1)...(19): siRNA sense strand
gaaagcuaccuccgagaua

SEQ ID NO: 1598807 - RNA, 19 nt, Homo sapiens
  misc_RNA (1)...(19): siRNA sense strand
ggaaaugggcuuuacagau

SEQ ID NO: 1598808 - RNA, 19 nt, Homo sapiens
  misc_RNA (1)...(19): siRNA sense strand
gaagaagaaaugaaacaga

SEQ ID NO: 1598809 - RNA, 19 nt, Homo sapiens
  misc_RNA (1)...(19): siRNA sense strand
cauaugaacuccaggaaag

SEQ ID NO: 1598810 - RNA, 19 nt, Homo sapiens
  misc_RNA (1)...(19): siRNA sense strand
ggaaggacaaggaccguaa

SEQ ID NO: 1598811 - RNA, 19 nt, Homo sapiens
  misc_RNA (1)...(19): siRNA sense strand
aaaccacugugacuuugua

SEQ ID NO: 1598812 - RNA, 19 nt, Homo sapiens
  misc_RNA (1)...(19): siRNA sense strand
gaagccauauugaaagaag

SEQ ID NO: 1598813 - RNA, 19 nt, Homo sapiens
  misc_RNA (1)...(19): siRNA sense strand
gaagaaaugaaacagaugu

SEQ ID NO: 1598814 - RNA, 19 nt, Homo sapiens
  misc_RNA (1)...(19): siRNA sense strand
agaucaagcucaugaguga

SEQ ID NO: 1598815 - RNA, 19 nt, Homo sapiens
  misc_RNA (1)...(19): siRNA sense strand
uuaagagacuucaccaaga

SEQ ID NO: 1598816 - RNA, 19 nt, Homo sapiens
  misc_RNA (1)...(19): siRNA sense strand
gagaaagaagccauauuga

SEQ ID NO: 1598817 - RNA, 19 nt, Homo sapiens
  misc_RNA (1)...(19): siRNA sense strand
gcagcaaccugaggaagga

SEQ ID NO: 1598818 - RNA, 19 nt, Homo sapiens
  misc_RNA (1)...(19): siRNA sense strand
gagaaugaagcuugaagaa

SEQ ID NO: 1598819 - RNA, 19 nt, Homo sapiens
  misc_RNA (1)...(19): siRNA sense strand
gacagcaagguaaacauua

SEQ ID NO: 1598820 - RNA, 19 nt, Homo sapiens
  misc_RNA (1)...(19): siRNA sense strand
gaugaugacacuauugcua

SEQ ID NO: 1598821 - RNA, 19 nt, Homo sapiens
  misc_RNA (1)...(19): siRNA sense strand
gacuaugaauccucacauu

SEQ ID NO: 1598822 - RNA, 19 nt, Homo sapiens
  misc_RNA (1)...(19): siRNA sense strand
uuaaagcucagacauauga

SEQ ID NO: 1598823 - RNA, 19 nt, Homo sapiens
  misc_RNA (1)...(19): siRNA sense strand
ugaaagaagcugagagaga

SEQ ID NO: 1598824 - RNA, 19 nt, Homo sapiens
  misc_RNA (1)...(19): siRNA sense strand
gcugcaaacuggaggaaau

SEQ ID NO: 1598825 - RNA, 19 nt, Homo sapiens
  misc_RNA (1)...(19): siRNA sense strand
caacggaugaugacacuau

SEQ ID NO: 1598826 - RNA, 19 nt, Homo sapiens
  misc_RNA (1)...(19): siRNA sense strand
aagcagauacgguuucuaa

SEQ ID NO: 1598827 - RNA, 19 nt, Homo sapiens
  misc_RNA (1)...(19): siRNA sense strand
gcuuuaauauucucugugu

SEQ ID NO: 1598828 - RNA, 19 nt, Homo sapiens
  misc_RNA (1)...(19): siRNA sense strand
agaaagaagccauauugaa

SEQ ID NO: 1598829 - RNA, 19 nt, Homo sapiens
  misc_RNA (1)...(19): siRNA sense strand
gaggaaggaagaagaaaug

SEQ ID NO: 1598830 - RNA, 19 nt, Homo sapiens
  misc_RNA (1)...(19): siRNA sense strand
gacuaugucuggccauguu

SEQ ID NO: 1598831 - RNA, 19 nt, Homo sapiens
  misc_RNA (1)...(19): siRNA sense strand
ggaaggaagaagaaaugaa

SEQ ID NO: 1598832 - RNA, 19 nt, Homo sapiens
  misc_RNA (1)...(19): siRNA sense strand
ggacaaggaccguaagaac

SEQ ID NO: 1598833 - RNA, 19 nt, Homo sapiens
  misc_RNA (1)...(19): siRNA sense strand
gguuucugcuuuaauauuc

SEQ ID NO: 1598834 - RNA, 19 nt, Homo sapiens
  misc_RNA (1)...(19): siRNA sense strand
guaaacauuauaccaguga

SEQ ID NO: 1598835 - RNA, 19 nt, Homo sapiens
  misc_RNA (1)...(19): siRNA sense strand
auuaagcguucucucuuua

SEQ ID NO: 1598836 - RNA, 19 nt, Homo sapiens
  misc_RNA (1)...(19): siRNA sense strand
ccaggaaaguaauguucaa

SEQ ID NO: 1598837 - RNA, 19 nt, Homo sapiens
  misc_RNA (1)...(19): siRNA sense strand
aagaagccauauugaaaga

SEQ ID NO: 1598838 - RNA, 19 nt, Homo sapiens
  misc_RNA (1)...(19): siRNA sense strand
gaaaaccacugugacuuug

SEQ ID NO: 1598839 - RNA, 19 nt, Homo sapiens
  misc_RNA (1)...(19): siRNA sense strand
cagcaauggcguccagaua

SEQ ID NO: 1598840 - RNA, 19 nt, Homo sapiens
  misc_RNA (1)...(19): siRNA sense strand
aaagcuaccuccgagauau

SEQ ID NO: 1598841 - RNA, 19 nt, Homo sapiens
  misc_RNA (1)...(19): siRNA sense strand
gaaguauggaugagguaaa

SEQ ID NO: 1598842 - RNA, 19 nt, Homo sapiens
  misc_RNA (1)...(19): siRNA sense strand
ccaagaagaacugaagauu

SEQ ID NO: 1598843 - RNA, 19 nt, Homo sapiens
  misc_RNA (1)...(19): siRNA sense strand
acagcaagguaaacauuau

SEQ ID NO: 1598844 - RNA, 19 nt, Homo sapiens
  misc_RNA (1)...(19): siRNA sense strand
agagagcuaccaaccaaua

SEQ ID NO: 1598845 - RNA, 19 nt, Homo sapiens
  misc_RNA (1)...(19): siRNA sense strand
gugugucucuacuucauuu

SEQ ID NO: 1598846 - RNA, 19 nt, Homo sapiens
  misc_RNA (1)...(19): siRNA sense strand
acuuaaagcucagacauau

SEQ ID NO: 1598847 - RNA, 19 nt, Homo sapiens
  misc_RNA (1)...(19): siRNA sense strand
gcagauacgguuucuaaaa

SEQ ID NO: 1598848 - RNA, 19 nt, Homo sapiens
  misc_RNA (1)...(19): siRNA sense strand
gagcuaccaaccaauaguu

SEQ ID NO: 1598849 - RNA, 19 nt, Homo sapiens
  misc_RNA (1)...(19): siRNA sense strand
ugacagcaagguaaacauu

SEQ ID NO: 1598850 - RNA, 19 nt, Homo sapiens
  misc_RNA (1)...(19): siRNA sense strand
gaacuccaggaaaguaaug

SEQ ID NO: 1598851 - RNA, 19 nt, Homo sapiens
  misc_RNA (1)...(19): siRNA sense strand
gagaaaacauucguucguu

SEQ ID NO: 1598852 - RNA, 19 nt, Homo sapiens
  misc_RNA (1)...(19): siRNA sense strand
ggaaguauggaugagguaa

SEQ ID NO: 1598853 - RNA, 19 nt, Homo sapiens
  misc_RNA (1)...(19): siRNA sense strand
cagcaagguaaacauuaua

SEQ ID NO: 1598854 - RNA, 19 nt, Homo sapiens
  misc_RNA (1)...(19): siRNA sense strand
gagcuacaggccaaauuug

SEQ ID NO: 1598855 - RNA, 19 nt, Homo sapiens
  misc_RNA (1)...(19): siRNA sense strand
aagagagaaugaagcuuga

SEQ ID NO: 1598856 - RNA, 19 nt, Homo sapiens
  misc_RNA (1)...(19): siRNA sense strand
uaaagaagagagcuaccaa

SEQ ID NO: 1598857 - RNA, 19 nt, Homo sapiens
  misc_RNA (1)...(19): siRNA sense strand
gagaagacuuuuggaagaa

SEQ ID NO: 1598858 - RNA, 19 nt, Homo sapiens
  misc_RNA (1)...(19): siRNA sense strand
ugcaaugaauggacaguug

SEQ ID NO: 1598859 - RNA, 19 nt, Homo sapiens
  misc_RNA (1)...(19): siRNA sense strand
caaagcagauacgguuucu

SEQ ID NO: 1598860 - RNA, 19 nt, Homo sapiens
  misc_RNA (1)...(19): siRNA sense strand
ugaaauugaccauugugaa

SEQ ID NO: 1598861 - RNA, 19 nt, Homo sapiens
  misc_RNA (1)...(19): siRNA sense strand
ccaugugugucucuacuuc

SEQ ID NO: 1598862 - RNA, 19 nt, Homo sapiens
  misc_RNA (1)...(19): siRNA sense strand
ugaggccuaucuccaagaa

SEQ ID NO: 1598863 - RNA, 19 nt, Homo sapiens
  misc_RNA (1)...(19): siRNA sense strand
acauagaugcucaguuuga

SEQ ID NO: 1598864 - RNA, 19 nt, Homo sapiens
  misc_RNA (1)...(19): siRNA sense strand
ccaaauuugagcaccuuaa

SEQ ID NO: 1598865 - RNA, 19 nt, Homo sapiens
  misc_RNA (1)...(19): siRNA sense strand
agagaccuaugaagccaaa

SEQ ID NO: 1598866 - RNA, 19 nt, Homo sapiens
  misc_RNA (1)...(19): siRNA sense strand
gaauggacaguugccguuu

SEQ ID NO: 1598867 - RNA, 19 nt, Homo sapiens
  misc_RNA (1)...(19): siRNA sense strand
aggccuaucuccaagaaga

SEQ ID NO: 1598868 - RNA, 19 nt, Homo sapiens
  misc_RNA (1)...(19): siRNA sense strand
gaaaacauucguucguuga

SEQ ID NO: 1598869 - RNA, 19 nt, Homo sapiens
  misc_RNA (1)...(19): siRNA sense strand
agaaugaagcuugaagaaa

SEQ ID NO: 1598870 - RNA, 19 nt, Homo sapiens
  misc_RNA (1)...(19): siRNA sense strand
cugauugacacauuguuua

SEQ ID NO: 1598871 - RNA, 19 nt, Homo sapiens
  misc_RNA (1)...(19): siRNA sense strand
cgacaggccacucucugaa

SEQ ID NO: 1598872 - RNA, 19 nt, Homo sapiens
  misc_RNA (1)...(19): siRNA sense strand
ggaagaagaaauaauugcu

SEQ ID NO: 1598873 - RNA, 19 nt, Homo sapiens
  misc_RNA (1)...(19): siRNA sense strand
acaggccacucucugaaga

SEQ ID NO: 1598874 - RNA, 19 nt, Homo sapiens
  misc_RNA (1)...(19): siRNA sense strand
gagagcuacaggccaaauu

SEQ ID NO: 1598875 - RNA, 19 nt, Homo sapiens
  misc_RNA (1)...(19): siRNA sense strand
aacauucguucguugacua

SEQ ID NO: 1598876 - RNA, 19 nt, Homo sapiens
  misc_RNA (1)...(19): siRNA sense strand
aaagaagccauauugaaag

SEQ ID NO: 1598877 - RNA, 19 nt, Homo sapiens
  misc_RNA (1)...(19): siRNA sense strand
gcaagguuucugcuuuaau

SEQ ID NO: 1598878 - RNA, 19 nt, Homo sapiens
  misc_RNA (1)...(19): siRNA sense strand
gaccguaagaacuccaauu

SEQ ID NO: 1598879 - RNA, 19 nt, Homo sapiens
  misc_RNA (1)...(19): siRNA sense strand
gacaaggaccguaagaacu

SEQ ID NO: 1598880 - RNA, 19 nt, Homo sapiens
  misc_RNA (1)...(19): siRNA sense strand
gauccauucagcaagguuu

SEQ ID NO: 1598881 - RNA, 19 nt, Homo sapiens
  misc_RNA (1)...(19): siRNA sense strand
gaucagcuggugaacagau

SEQ ID NO: 1598882 - RNA, 19 nt, Homo sapiens
  misc_RNA (1)...(19): siRNA sense strand
aaaggagaaagaagccaua

SEQ ID NO: 1598883 - RNA, 19 nt, Homo sapiens
  misc_RNA (1)...(19): siRNA sense strand
gcgaguaaaggagaaagaa

SEQ ID NO: 1598884 - RNA, 19 nt, Homo sapiens
  misc_RNA (1)...(19): siRNA sense strand
ucagaggaaggaagaagaa

SEQ ID NO: 1598885 - RNA, 19 nt, Homo sapiens
  misc_RNA (1)...(19): siRNA sense strand
agagaagacuuuuggaaga

SEQ ID NO: 1598886 - RNA, 19 nt, Homo sapiens
  misc_RNA (1)...(19): siRNA sense strand
ggagagagauuuucuuaaa

SEQ ID NO: 1598887 - RNA, 19 nt, Homo sapiens
  misc_RNA (1)...(19): siRNA sense strand
ggaaauauugggaaguaua

SEQ ID NO: 1598888 - RNA, 19 nt, Homo sapiens
  misc_RNA (1)...(19): siRNA sense strand
ugauggcacuucucaaaua

SEQ ID NO: 1598889 - RNA, 19 nt, Homo sapiens
  misc_RNA (1)...(19): siRNA sense strand
gaaguaauguucuuaaacg

SEQ ID NO: 1598890 - RNA, 19 nt, Homo sapiens
  misc_RNA (1)...(19): siRNA sense strand
gaauauaucacccauaauc

SEQ ID NO: 1598891 - RNA, 19 nt, Homo sapiens
  misc_RNA (1)...(19): siRNA sense strand
uaagugaccuaaaguggaa

SEQ ID NO: 1598892 - RNA, 19 nt, Homo sapiens
  misc_RNA (1)...(19): siRNA sense strand
guccauauguuugcaguua

SEQ ID NO: 1598893 - RNA, 19 nt, Homo sapiens
  misc_RNA (1)...(19): siRNA sense strand
aaacagagcaucauaaugg

SEQ ID NO: 1598894 - RNA, 19 nt, Homo sapiens
  misc_RNA (1)...(19): siRNA sense strand
gcaguuaacauguuucgaa

SEQ ID NO: 1598895 - RNA, 19 nt, Homo sapiens
  misc_RNA (1)...(19): siRNA sense strand
gcgaagaaauauauugauc

SEQ ID NO: 1598896 - RNA, 19 nt, Homo sapiens
  misc_RNA (1)...(19): siRNA sense strand
ggaagaugaaccaacguua

SEQ ID NO: 1598897 - RNA, 19 nt, Homo sapiens
  misc_RNA (1)...(19): siRNA sense strand
cuugagagcuuacaucaga

SEQ ID NO: 1598898 - RNA, 19 nt, Homo sapiens
  misc_RNA (1)...(19): siRNA sense strand
caucagaauuugugaagau

SEQ ID NO: 1598899 - RNA, 19 nt, Homo sapiens
  misc_RNA (1)...(19): siRNA sense strand
gaaguaguccauauguuug

SEQ ID NO: 1598900 - RNA, 19 nt, Homo sapiens
  misc_RNA (1)...(19): siRNA sense strand
cagaguuacuggaaauauu

SEQ ID NO: 1598901 - RNA, 19 nt, Homo sapiens
  misc_RNA (1)...(19): siRNA sense strand
ugaaaucucugagugucua

SEQ ID NO: 1598902 - RNA, 19 nt, Homo sapiens
  misc_RNA (1)...(19): siRNA sense strand
agaaguaguccauauguuu

SEQ ID NO: 1598903 - RNA, 19 nt, Homo sapiens
  misc_RNA (1)...(19): siRNA sense strand
gaagcagccuggccucauc

SEQ ID NO: 1598904 - RNA, 19 nt, Homo sapiens
  misc_RNA (1)...(19): siRNA sense strand
ccagauuuccaaccuaaua

SEQ ID NO: 1598905 - RNA, 19 nt, Homo sapiens
  misc_RNA (1)...(19): siRNA sense strand
gaucagaaguuuguauugc

SEQ ID NO: 1598906 - RNA, 19 nt, Homo sapiens
  misc_RNA (1)...(19): siRNA sense strand
gaagaugaaccaacguuag

SEQ ID NO: 1598907 - RNA, 19 nt, Homo sapiens
  misc_RNA (1)...(19): siRNA sense strand
caucaugaguuuaaucagu

SEQ ID NO: 1598908 - RNA, 19 nt, Homo sapiens
  misc_RNA (1)...(19): siRNA sense strand
gaaacagagcaucauaaug

SEQ ID NO: 1598909 - RNA, 19 nt, Homo sapiens
  misc_RNA (1)...(19): siRNA sense strand
ggugauggcacuucucaaa

SEQ ID NO: 1598910 - RNA, 19 nt, Homo sapiens
  misc_RNA (1)...(19): siRNA sense strand
aaaccacccuucacagaau

SEQ ID NO: 1598911 - RNA, 19 nt, Homo sapiens
  misc_RNA (1)...(19): siRNA sense strand
uagcagaguuacuggaaau

SEQ ID NO: 1598912 - RNA, 19 nt, Homo sapiens
  misc_RNA (1)...(19): siRNA sense strand
cauugaaccaucagaauuu

SEQ ID NO: 1598913 - RNA, 19 nt, Homo sapiens
  misc_RNA (1)...(19): siRNA sense strand
uaaaguggaaggaaguaaa

SEQ ID NO: 1598914 - RNA, 19 nt, Homo sapiens
  misc_RNA (1)...(19): siRNA sense strand
cagaaguaguccauauguu

SEQ ID NO: 1598915 - RNA, 19 nt, Homo sapiens
  misc_RNA (1)...(19): siRNA sense strand
ccaccuuccuccaauccua

SEQ ID NO: 1598916 - RNA, 19 nt, Homo sapiens
  misc_RNA (1)...(19): siRNA sense strand
cuggaaauauugggaagua

SEQ ID NO: 1598917 - RNA, 19 nt, Homo sapiens
  misc_RNA (1)...(19): siRNA sense strand
gaaauuccuaggcuugaga

SEQ ID NO: 1598918 - RNA, 19 nt, Homo sapiens
  misc_RNA (1)...(19): siRNA sense strand
ucacagaaucuaugggaaa

SEQ ID NO: 1598919 - RNA, 19 nt, Homo sapiens
  misc_RNA (1)...(19): siRNA sense strand
aaagaagagcacaagauuu

SEQ ID NO: 1598920 - RNA, 19 nt, Homo sapiens
  misc_RNA (1)...(19): siRNA sense strand
ucaaagacccauuggaaca

SEQ ID NO: 1598921 - RNA, 19 nt, Homo sapiens
  misc_RNA (1)...(19): siRNA sense strand
gaagagauuuuagauguca

SEQ ID NO: 1598922 - RNA, 19 nt, Homo sapiens
  misc_RNA (1)...(19): siRNA sense strand
aaaacgagcugcuuuaagu

SEQ ID NO: 1598923 - RNA, 19 nt, Homo sapiens
  misc_RNA (1)...(19): siRNA sense strand
gauggcacuucucaaauac

SEQ ID NO: 1598924 - RNA, 19 nt, Homo sapiens
  misc_RNA (1)...(19): siRNA sense strand
ugaaacagagcaucauaau

SEQ ID NO: 1598925 - RNA, 19 nt, Homo sapiens
  misc_RNA (1)...(19): siRNA sense strand
gaucacagagccuauuuac

SEQ ID NO: 1598926 - RNA, 19 nt, Homo sapiens
  misc_RNA (1)...(19): siRNA sense strand
gcagaguuacuggaaauau

SEQ ID NO: 1598927 - RNA, 19 nt, Homo sapiens
  misc_RNA (1)...(19): siRNA sense strand
ugacaacgcagcgaagauu

SEQ ID NO: 1598928 - RNA, 19 nt, Homo sapiens
  misc_RNA (1)...(19): siRNA sense strand
gcaacucaaagacccauug

SEQ ID NO: 1598929 - RNA, 19 nt, Homo sapiens
  misc_RNA (1)...(19): siRNA sense strand
cgagcugcuuuaagugaaa

SEQ ID NO: 1598930 - RNA, 19 nt, Homo sapiens
  misc_RNA (1)...(19): siRNA sense strand
gcgaagauucugcccauca

SEQ ID NO: 1598931 - RNA, 19 nt, Homo sapiens
  misc_RNA (1)...(19): siRNA sense strand
aaccuaauauagcgaagaa

SEQ ID NO: 1598932 - RNA, 19 nt, Homo sapiens
  misc_RNA (1)...(19): siRNA sense strand
ucauugaaccaucagaauu

SEQ ID NO: 1598933 - RNA, 19 nt, Homo sapiens
  misc_RNA (1)...(19): siRNA sense strand
aucuacagcuuguuuauga

SEQ ID NO: 1598934 - RNA, 19 nt, Homo sapiens
  misc_RNA (1)...(19): siRNA sense strand
acucaaagacccauuggaa

SEQ ID NO: 1598935 - RNA, 19 nt, Homo sapiens
  misc_RNA (1)...(19): siRNA sense strand
cgaagauucugcccaucau

SEQ ID NO: 1598936 - RNA, 19 nt, Homo sapiens
  misc_RNA (1)...(19): siRNA sense strand
cuccagauuuccaaccuaa

SEQ ID NO: 1598937 - RNA, 19 nt, Homo sapiens
  misc_RNA (1)...(19): siRNA sense strand
guuugcaguuaacauguuu

SEQ ID NO: 1598938 - RNA, 19 nt, Homo sapiens
  misc_RNA (1)...(19): siRNA sense strand
caaagacccauuggaacaa

SEQ ID NO: 1598939 - RNA, 19 nt, Homo sapiens
  misc_RNA (1)...(19): siRNA sense strand
uuuagagucuccagauuuc

SEQ ID NO: 1598940 - RNA, 19 nt, Homo sapiens
  misc_RNA (1)...(19): siRNA sense strand
ccagaaguaguccauaugu

SEQ ID NO: 1598941 - RNA, 19 nt, Homo sapiens
  misc_RNA (1)...(19): siRNA sense strand
cacagaaucuaugggaaau

SEQ ID NO: 1598942 - RNA, 19 nt, Homo sapiens
  misc_RNA (1)...(19): siRNA sense strand
ccuaauauagcgaagaaau

SEQ ID NO: 1598943 - RNA, 19 nt, Homo sapiens
  misc_RNA (1)...(19): siRNA sense strand
gaaccaucagaauuuguga

SEQ ID NO: 1598944 - RNA, 19 nt, Homo sapiens
  misc_RNA (1)...(19): siRNA sense strand
cucaaauacuggccaaaga

SEQ ID NO: 1598945 - RNA, 19 nt, Homo sapiens
  misc_RNA (1)...(19): siRNA sense strand
aagaagagcacaagauuuu

SEQ ID NO: 1598946 - RNA, 19 nt, Homo sapiens
  misc_RNA (1)...(19): siRNA sense strand
ugcuuuaagugaaauggua

SEQ ID NO: 1598947 - RNA, 19 nt, Homo sapiens
  misc_RNA (1)...(19): siRNA sense strand
cagaauuugugaagaucau

SEQ ID NO: 1598948 - RNA, 19 nt, Homo sapiens
  misc_RNA (1)...(19): siRNA sense strand
ccucaucuacagcuuguuu

SEQ ID NO: 1598949 - RNA, 19 nt, Homo sapiens
  misc_RNA (1)...(19): siRNA sense strand
ggaauuugacccggaggaa

SEQ ID NO: 1598950 - RNA, 19 nt, Homo sapiens
  misc_RNA (1)...(19): siRNA sense strand
gagccuauuuacccagaag

SEQ ID NO: 1598951 - RNA, 19 nt, Homo sapiens
  misc_RNA (1)...(19): siRNA sense strand
caaagugaaaucucugagu

SEQ ID NO: 1598952 - RNA, 19 nt, Homo sapiens
  misc_RNA (1)...(19): siRNA sense strand
cauagcagaguuacuggaa

SEQ ID NO: 1598953 - RNA, 19 nt, Homo sapiens
  misc_RNA (1)...(19): siRNA sense strand
uaauggcauagcagaguua

SEQ ID NO: 1598954 - RNA, 19 nt, Homo sapiens
  misc_RNA (1)...(19): siRNA sense strand
ugaagauccucgggagaga

SEQ ID NO: 1598955 - RNA, 19 nt, Homo sapiens
  misc_RNA (1)...(19): siRNA sense strand
guagaauauaucacccaua

SEQ ID NO: 1598956 - RNA, 19 nt, Homo sapiens
  misc_RNA (1)...(19): siRNA sense strand
gauucugcccaucauguuu

SEQ ID NO: 1598957 - RNA, 19 nt, Homo sapiens
  misc_RNA (1)...(19): siRNA sense strand
gaagauucugcccaucaug

SEQ ID NO: 1598958 - RNA, 19 nt, Homo sapiens
  misc_RNA (1)...(19): siRNA sense strand
ucuuugacuuuguuucuga

SEQ ID NO: 1598959 - RNA, 19 nt, Homo sapiens
  misc_RNA (1)...(19): siRNA sense strand
ccagcuggcauacugugua

SEQ ID NO: 1598960 - RNA, 19 nt, Homo sapiens
  misc_RNA (1)...(19): siRNA sense strand
agaguuacuggaaauauug

SEQ ID NO: 1598961 - RNA, 19 nt, Homo sapiens
  misc_RNA (1)...(19): siRNA sense strand
gagcuuacaucagaaaaca

SEQ ID NO: 1598962 - RNA, 19 nt, Homo sapiens
  misc_RNA (1)...(19): siRNA sense strand
aaguuuguauugcagcuuu

SEQ ID NO: 1598963 - RNA, 19 nt, Homo sapiens
  misc_RNA (1)...(19): siRNA sense strand
ggccucaucuacagcuugu

SEQ ID NO: 1598964 - RNA, 19 nt, Homo sapiens
  misc_RNA (1)...(19): siRNA sense strand
aagaugaaccaacguuaga

SEQ ID NO: 1598965 - RNA, 19 nt, Homo sapiens
  misc_RNA (1)...(19): siRNA sense strand
gagcugcuuuaagugaaau

SEQ ID NO: 1598966 - RNA, 19 nt, Homo sapiens
  misc_RNA (1)...(19): siRNA sense strand
cauguuuccuuccuuguac

SEQ ID NO: 1598967 - RNA, 19 nt, Homo sapiens
  misc_RNA (1)...(19): siRNA sense strand
cagcuggcauacuguguag

SEQ ID NO: 1598968 - RNA, 19 nt, Homo sapiens
  misc_RNA (1)...(19): siRNA sense strand
cuacgggagcggaauuuga

SEQ ID NO: 1598969 - RNA, 19 nt, Homo sapiens
  misc_RNA (1)...(19): siRNA sense strand
caacuccaaugggccuuuc

SEQ ID NO: 1598970 - RNA, 19 nt, Homo sapiens
  misc_RNA (1)...(19): siRNA sense strand
acccagaaguaguccauau

SEQ ID NO: 1598971 - RNA, 19 nt, Homo sapiens
  misc_RNA (1)...(19): siRNA sense strand
ucaugaguuuaaucaguga

SEQ ID NO: 1598972 - RNA, 19 nt, Homo sapiens
  misc_RNA (1)...(19): siRNA sense strand
uuucgaacauuaccaccuu

SEQ ID NO: 1598973 - RNA, 19 nt, Homo sapiens
  misc_RNA (1)...(19): siRNA sense strand
auaauggcauagcagaguu

SEQ ID NO: 1598974 - RNA, 19 nt, Homo sapiens
  misc_RNA (1)...(19): siRNA sense strand
aaaagaagagcacaagauu

SEQ ID NO: 1598975 - RNA, 19 nt, Homo sapiens
  misc_RNA (1)...(19): siRNA sense strand
gugaucacagagccuauuu

SEQ ID NO: 1598976 - RNA, 19 nt, Homo sapiens
  misc_RNA (1)...(19): siRNA sense strand
ucauguuuccuuccuugua

SEQ ID NO: 1598977 - RNA, 19 nt, Homo sapiens
  misc_RNA (1)...(19): siRNA sense strand
ugggaaguauaauuaaugg

SEQ ID NO: 1598978 - RNA, 19 nt, Homo sapiens
  misc_RNA (1)...(19): siRNA sense strand
cgugguccuucuccauauu

SEQ ID NO: 1598979 - RNA, 19 nt, Homo sapiens
  misc_RNA (1)...(19): siRNA sense strand
gcugaucaagagaagcuuu

SEQ ID NO: 1598980 - RNA, 19 nt, Homo sapiens
  misc_RNA (1)...(19): siRNA sense strand
gcaucauaauggcauagca

SEQ ID NO: 1598981 - RNA, 19 nt, Homo sapiens
  misc_RNA (1)...(19): siRNA sense strand
gauccucgggagagagauu

SEQ ID NO: 1598982 - RNA, 19 nt, Homo sapiens
  misc_RNA (1)...(19): siRNA sense strand
gauuuccaaccuaauauag

SEQ ID NO: 1598983 - RNA, 19 nt, Homo sapiens
  misc_RNA (1)...(19): siRNA sense strand
gaugaaccaacguuagaag

SEQ ID NO: 1598984 - RNA, 19 nt, Homo sapiens
  misc_RNA (1)...(19): siRNA sense strand
cauaauggcauagcagagu

SEQ ID NO: 1598985 - RNA, 19 nt, Homo sapiens
  misc_RNA (1)...(19): siRNA sense strand
agaaguuacgucaguguug

SEQ ID NO: 1598986 - RNA, 19 nt, Homo sapiens
  misc_RNA (1)...(19): siRNA sense strand
ggagagagauuuucuuaaa

SEQ ID NO: 1598987 - RNA, 19 nt, Homo sapiens
  misc_RNA (1)...(19): siRNA sense strand
ggaaauauugggaaguaua

SEQ ID NO: 1598988 - RNA, 19 nt, Homo sapiens
  misc_RNA (1)...(19): siRNA sense strand
ugauggcacuucucaaaua

SEQ ID NO: 1598989 - RNA, 19 nt, Homo sapiens
  misc_RNA (1)...(19): siRNA sense strand
gaaguaauguucuuaaacg

SEQ ID NO: 1598990 - RNA, 19 nt, Homo sapiens
  misc_RNA (1)...(19): siRNA sense strand
gaauauaucacccauaauc

SEQ ID NO: 1598991 - RNA, 19 nt, Homo sapiens
  misc_RNA (1)...(19): siRNA sense strand
uaagugaccuaaaguggaa

SEQ ID NO: 1598992 - RNA, 19 nt, Homo sapiens
  misc_RNA (1)...(19): siRNA sense strand
guccauauguuugcaguua

SEQ ID NO: 1598993 - RNA, 19 nt, Homo sapiens
  misc_RNA (1)...(19): siRNA sense strand
aaacagagcaucauaaugg

SEQ ID NO: 1598994 - RNA, 19 nt, Homo sapiens
  misc_RNA (1)...(19): siRNA sense strand
gcaguuaacauguuucgaa

SEQ ID NO: 1598995 - RNA, 19 nt, Homo sapiens
  misc_RNA (1)...(19): siRNA sense strand
gcgaagaaauauauugauc

SEQ ID NO: 1598996 - RNA, 19 nt, Homo sapiens
  misc_RNA (1)...(19): siRNA sense strand
ggaagaugaaccaacguua

SEQ ID NO: 1598997 - RNA, 19 nt, Homo sapiens
  misc_RNA (1)...(19): siRNA sense strand
cuugagagcuuacaucaga

SEQ ID NO: 1598998 - RNA, 19 nt, Homo sapiens
  misc_RNA (1)...(19): siRNA sense strand
caucagaauuugugaagau

SEQ ID NO: 1598999 - RNA, 19 nt, Homo sapiens
  misc_RNA (1)...(19): siRNA sense strand
gaaguaguccauauguuug

SEQ ID NO: 1599000 - RNA, 19 nt, Homo sapiens
  misc_RNA (1)...(19): siRNA sense strand
cagaguuacuggaaauauu

SEQ ID NO: 1599001 - RNA, 19 nt, Homo sapiens
  misc_RNA (1)...(19): siRNA sense strand
ugaaaucucugagugucua

SEQ ID NO: 1599002 - RNA, 19 nt, Homo sapiens
  misc_RNA (1)...(19): siRNA sense strand
agaaguaguccauauguuu

SEQ ID NO: 1599003 - RNA, 19 nt, Homo sapiens
  misc_RNA (1)...(19): siRNA sense strand
gaagcagccuggccucauc

SEQ ID NO: 1599004 - RNA, 19 nt, Homo sapiens
  misc_RNA (1)...(19): siRNA sense strand
ccagauuuccaaccuaaua

SEQ ID NO: 1599005 - RNA, 19 nt, Homo sapiens
  misc_RNA (1)...(19): siRNA sense strand
gaucagaaguuuguauugc

SEQ ID NO: 1599006 - RNA, 19 nt, Homo sapiens
  misc_RNA (1)...(19): siRNA sense strand
gaagaugaaccaacguuag

SEQ ID NO: 1599007 - RNA, 19 nt, Homo sapiens
  misc_RNA (1)...(19): siRNA sense strand
caucaugaguuuaaucagu

SEQ ID NO: 1599008 - RNA, 19 nt, Homo sapiens
  misc_RNA (1)...(19): siRNA sense strand
gaaacagagcaucauaaug

SEQ ID NO: 1599009 - RNA, 19 nt, Homo sapiens
  misc_RNA (1)...(19): siRNA sense strand
ggugauggcacuucucaaa

SEQ ID NO: 1599010 - RNA, 19 nt, Homo sapiens
  misc_RNA (1)...(19): siRNA sense strand
aaaccacccuucacagaau

SEQ ID NO: 1599011 - RNA, 19 nt, Homo sapiens
  misc_RNA (1)...(19): siRNA sense strand
uagcagaguuacuggaaau

SEQ ID NO: 1599012 - RNA, 19 nt, Homo sapiens
  misc_RNA (1)...(19): siRNA sense strand
cauugaaccaucagaauuu

SEQ ID NO: 1599013 - RNA, 19 nt, Homo sapiens
  misc_RNA (1)...(19): siRNA sense strand
uaaaguggaaggaaguaaa

SEQ ID NO: 1599014 - RNA, 19 nt, Homo sapiens
  misc_RNA (1)...(19): siRNA sense strand
cagaaguaguccauauguu

SEQ ID NO: 1599015 - RNA, 19 nt, Homo sapiens
  misc_RNA (1)...(19): siRNA sense strand
ccaccuuccuccaauccua

SEQ ID NO: 1599016 - RNA, 19 nt, Homo sapiens
  misc_RNA (1)...(19): siRNA sense strand
cuggaaauauugggaagua

SEQ ID NO: 1599017 - RNA, 19 nt, Homo sapiens
  misc_RNA (1)...(19): siRNA sense strand
gaaauuccuaggcuugaga

SEQ ID NO: 1599018 - RNA, 19 nt, Homo sapiens
  misc_RNA (1)...(19): siRNA sense strand
ucacagaaucuaugggaaa

SEQ ID NO: 1599019 - RNA, 19 nt, Homo sapiens
  misc_RNA (1)...(19): siRNA sense strand
aaagaagagcacaagauuu

SEQ ID NO: 1599020 - RNA, 19 nt, Homo sapiens
  misc_RNA (1)...(19): siRNA sense strand
ucaaagacccauuggaaca

SEQ ID NO: 1599021 - RNA, 19 nt, Homo sapiens
  misc_RNA (1)...(19): siRNA sense strand
gaagagauuuuagauguca

SEQ ID NO: 1599022 - RNA, 19 nt, Homo sapiens
  misc_RNA (1)...(19): siRNA sense strand
aaaacgagcugcuuuaagu

SEQ ID NO: 1599023 - RNA, 19 nt, Homo sapiens
  misc_RNA (1)...(19): siRNA sense strand
gauggcacuucucaaauac

SEQ ID NO: 1599024 - RNA, 19 nt, Homo sapiens
  misc_RNA (1)...(19): siRNA sense strand
ugaaacagagcaucauaau

SEQ ID NO: 1599025 - RNA, 19 nt, Homo sapiens
  misc_RNA (1)...(19): siRNA sense strand
gaucacagagccuauuuac

SEQ ID NO: 1599026 - RNA, 19 nt, Homo sapiens
  misc_RNA (1)...(19): siRNA sense strand
gcagaguuacuggaaauau

SEQ ID NO: 1599027 - RNA, 19 nt, Homo sapiens
  misc_RNA (1)...(19): siRNA sense strand
ugacaacgcagcgaagauu

SEQ ID NO: 1599028 - RNA, 19 nt, Homo sapiens
  misc_RNA (1)...(19): siRNA sense strand
gcaacucaaagacccauug

SEQ ID NO: 1599029 - RNA, 19 nt, Homo sapiens
  misc_RNA (1)...(19): siRNA sense strand
cgagcugcuuuaagugaaa

SEQ ID NO: 1599030 - RNA, 19 nt, Homo sapiens
  misc_RNA (1)...(19): siRNA sense strand
gcgaagauucugcccauca

SEQ ID NO: 1599031 - RNA, 19 nt, Homo sapiens
  misc_RNA (1)...(19): siRNA sense strand
aaccuaauauagcgaagaa

SEQ ID NO: 1599032 - RNA, 19 nt, Homo sapiens
  misc_RNA (1)...(19): siRNA sense strand
ucauugaaccaucagaauu

SEQ ID NO: 1599033 - RNA, 19 nt, Homo sapiens
  misc_RNA (1)...(19): siRNA sense strand
aucuacagcuuguuuauga

SEQ ID NO: 1599034 - RNA, 19 nt, Homo sapiens
  misc_RNA (1)...(19): siRNA sense strand
acucaaagacccauuggaa

SEQ ID NO: 1599035 - RNA, 19 nt, Homo sapiens
  misc_RNA (1)...(19): siRNA sense strand
cgaagauucugcccaucau

SEQ ID NO: 1599036 - RNA, 19 nt, Homo sapiens
  misc_RNA (1)...(19): siRNA sense strand
cuccagauuuccaaccuaa

SEQ ID NO: 1599037 - RNA, 19 nt, Homo sapiens
  misc_RNA (1)...(19): siRNA sense strand
guuugcaguuaacauguuu

SEQ ID NO: 1599038 - RNA, 19 nt, Homo sapiens
  misc_RNA (1)...(19): siRNA sense strand
caaagacccauuggaacaa

SEQ ID NO: 1599039 - RNA, 19 nt, Homo sapiens
  misc_RNA (1)...(19): siRNA sense strand
uuuagagucuccagauuuc

SEQ ID NO: 1599040 - RNA, 19 nt, Homo sapiens
  misc_RNA (1)...(19): siRNA sense strand
ccagaaguaguccauaugu

SEQ ID NO: 1599041 - RNA, 19 nt, Homo sapiens
  misc_RNA (1)...(19): siRNA sense strand
cacagaaucuaugggaaau

SEQ ID NO: 1599042 - RNA, 19 nt, Homo sapiens
  misc_RNA (1)...(19): siRNA sense strand
ccuaauauagcgaagaaau

SEQ ID NO: 1599043 - RNA, 19 nt, Homo sapiens
  misc_RNA (1)...(19): siRNA sense strand
gaaccaucagaauuuguga

SEQ ID NO: 1599044 - RNA, 19 nt, Homo sapiens
  misc_RNA (1)...(19): siRNA sense strand
cucaaauacuggccaaaga

SEQ ID NO: 1599045 - RNA, 19 nt, Homo sapiens
  misc_RNA (1)...(19): siRNA sense strand
aagaagagcacaagauuuu

SEQ ID NO: 1599046 - RNA, 19 nt, Homo sapiens
  misc_RNA (1)...(19): siRNA sense strand
ugcuuuaagugaaauggua

SEQ ID NO: 1599047 - RNA, 19 nt, Homo sapiens
  misc_RNA (1)...(19): siRNA sense strand
cagaauuugugaagaucau

SEQ ID NO: 1599048 - RNA, 19 nt, Homo sapiens
  misc_RNA (1)...(19): siRNA sense strand
ccucaucuacagcuuguuu

SEQ ID NO: 1599049 - RNA, 19 nt, Homo sapiens
  misc_RNA (1)...(19): siRNA sense strand
ggaauuugacccggaggaa

SEQ ID NO: 1599050 - RNA, 19 nt, Homo sapiens
  misc_RNA (1)...(19): siRNA sense strand
gagccuauuuacccagaag

SEQ ID NO: 1599051 - RNA, 19 nt, Homo sapiens
  misc_RNA (1)...(19): siRNA sense strand
caaagugaaaucucugagu

SEQ ID NO: 1599052 - RNA, 19 nt, Homo sapiens
  misc_RNA (1)...(19): siRNA sense strand
cauagcagaguuacuggaa

SEQ ID NO: 1599053 - RNA, 19 nt, Homo sapiens
  misc_RNA (1)...(19): siRNA sense strand
uaauggcauagcagaguua

SEQ ID NO: 1599054 - RNA, 19 nt, Homo sapiens
  misc_RNA (1)...(19): siRNA sense strand
ugaagauccucgggagaga

SEQ ID NO: 1599055 - RNA, 19 nt, Homo sapiens
  misc_RNA (1)...(19): siRNA sense strand
guagaauauaucacccaua

SEQ ID NO: 1599056 - RNA, 19 nt, Homo sapiens
  misc_RNA (1)...(19): siRNA sense strand
gauucugcccaucauguuu

SEQ ID NO: 1599057 - RNA, 19 nt, Homo sapiens
  misc_RNA (1)...(19): siRNA sense strand
gaagauucugcccaucaug

SEQ ID NO: 1599058 - RNA, 19 nt, Homo sapiens
  misc_RNA (1)...(19): siRNA sense strand
ucuuugacuuuguuucuga

SEQ ID NO: 1599059 - RNA, 19 nt, Homo sapiens
  misc_RNA (1)...(19): siRNA sense strand
ccagcuggcauacugugua

SEQ ID NO: 1599060 - RNA, 19 nt, Homo sapiens
  misc_RNA (1)...(19): siRNA sense strand
agaguuacuggaaauauug

SEQ ID NO: 1599061 - RNA, 19 nt, Homo sapiens
  misc_RNA (1)...(19): siRNA sense strand
gagcuuacaucagaaaaca

SEQ ID NO: 1599062 - RNA, 19 nt, Homo sapiens
  misc_RNA (1)...(19): siRNA sense strand
aaguuuguauugcagcuuu

SEQ ID NO: 1599063 - RNA, 19 nt, Homo sapiens
  misc_RNA (1)...(19): siRNA sense strand
ggccucaucuacagcuugu

SEQ ID NO: 1599064 - RNA, 19 nt, Homo sapiens
  misc_RNA (1)...(19): siRNA sense strand
aagaugaaccaacguuaga

SEQ ID NO: 1599065 - RNA, 19 nt, Homo sapiens
  misc_RNA (1)...(19): siRNA sense strand
gagcugcuuuaagugaaau

SEQ ID NO: 1599066 - RNA, 19 nt, Homo sapiens
  misc_RNA (1)...(19): siRNA sense strand
cauguuuccuuccuuguac

SEQ ID NO: 1599067 - RNA, 19 nt, Homo sapiens
  misc_RNA (1)...(19): siRNA sense strand
cagcuggcauacuguguag

SEQ ID NO: 1599068 - RNA, 19 nt, Homo sapiens
  misc_RNA (1)...(19): siRNA sense strand
cuacgggagcggaauuuga

SEQ ID NO: 1599069 - RNA, 19 nt, Homo sapiens
  misc_RNA (1)...(19): siRNA sense strand
caacuccaaugggccuuuc

SEQ ID NO: 1599070 - RNA, 19 nt, Homo sapiens
  misc_RNA (1)...(19): siRNA sense strand
acccagaaguaguccauau

SEQ ID NO: 1599071 - RNA, 19 nt, Homo sapiens
  misc_RNA (1)...(19): siRNA sense strand
ucaugaguuuaaucaguga

SEQ ID NO: 1599072 - RNA, 19 nt, Homo sapiens
  misc_RNA (1)...(19): siRNA sense strand
uuucgaacauuaccaccuu

SEQ ID NO: 1599073 - RNA, 19 nt, Homo sapiens
  misc_RNA (1)...(19): siRNA sense strand
auaauggcauagcagaguu

SEQ ID NO: 1599074 - RNA, 19 nt, Homo sapiens
  misc_RNA (1)...(19): siRNA sense strand
aaaagaagagcacaagauu

SEQ ID NO: 1599075 - RNA, 19 nt, Homo sapiens
  misc_RNA (1)...(19): siRNA sense strand
gugaucacagagccuauuu

SEQ ID NO: 1599076 - RNA, 19 nt, Homo sapiens
  misc_RNA (1)...(19): siRNA sense strand
ucauguuuccuuccuugua

SEQ ID NO: 1599077 - RNA, 19 nt, Homo sapiens
  misc_RNA (1)...(19): siRNA sense strand
ugggaaguauaauuaaugg

SEQ ID NO: 1599078 - RNA, 19 nt, Homo sapiens
  misc_RNA (1)...(19): siRNA sense strand
cgugguccuucuccauauu

SEQ ID NO: 1599079 - RNA, 19 nt, Homo sapiens
  misc_RNA (1)...(19): siRNA sense strand
gcugaucaagagaagcuuu

SEQ ID NO: 1599080 - RNA, 19 nt, Homo sapiens
  misc_RNA (1)...(19): siRNA sense strand
gcaucauaauggcauagca

SEQ ID NO: 1599081 - RNA, 19 nt, Homo sapiens
  misc_RNA (1)...(19): siRNA sense strand
gauccucgggagagagauu

SEQ ID NO: 1599082 - RNA, 19 nt, Homo sapiens
  misc_RNA (1)...(19): siRNA sense strand
gauuuccaaccuaauauag

SEQ ID NO: 1599083 - RNA, 19 nt, Homo sapiens
  misc_RNA (1)...(19): siRNA sense strand
gaugaaccaacguuagaag

SEQ ID NO: 1599084 - RNA, 19 nt, Homo sapiens
  misc_RNA (1)...(19): siRNA sense strand
cauaauggcauagcagagu

SEQ ID NO: 1599085 - RNA, 19 nt, Homo sapiens
  misc_RNA (1)...(19): siRNA sense strand
agaaguuacgucaguguug

SEQ ID NO: 1599086 - RNA, 19 nt, Homo sapiens
  misc_RNA (1)...(19): siRNA sense strand
ggagagagauuuucuuaaa

SEQ ID NO: 1599087 - RNA, 19 nt, Homo sapiens
  misc_RNA (1)...(19): siRNA sense strand
ggaaauauugggaaguaua

SEQ ID NO: 1599088 - RNA, 19 nt, Homo sapiens
  misc_RNA (1)...(19): siRNA sense strand
ugauggcacuucucaaaua

SEQ ID NO: 1599089 - RNA, 19 nt, Homo sapiens
  misc_RNA (1)...(19): siRNA sense strand
gaaguaauguucuuaaacg

SEQ ID NO: 1599090 - RNA, 19 nt, Homo sapiens
  misc_RNA (1)...(19): siRNA sense strand
gaauauaucacccauaauc

SEQ ID NO: 1599091 - RNA, 19 nt, Homo sapiens
  misc_RNA (1)...(19): siRNA sense strand
uaagugaccuaaaguggaa

SEQ ID NO: 1599092 - RNA, 19 nt, Homo sapiens
  misc_RNA (1)...(19): siRNA sense strand
guccauauguuugcaguua

SEQ ID NO: 1599093 - RNA, 19 nt, Homo sapiens
  misc_RNA (1)...(19): siRNA sense strand
aaacagagcaucauaaugg

SEQ ID NO: 1599094 - RNA, 19 nt, Homo sapiens
  misc_RNA (1)...(19): siRNA sense strand
gcaguuaacauguuucgaa

SEQ ID NO: 1599095 - RNA, 19 nt, Homo sapiens
  misc_RNA (1)...(19): siRNA sense strand
gcgaagaaauauauugauc

SEQ ID NO: 1599096 - RNA, 19 nt, Homo sapiens
  misc_RNA (1)...(19): siRNA sense strand
ggaagaugaaccaacguua

SEQ ID NO: 1599097 - RNA, 19 nt, Homo sapiens
  misc_RNA (1)...(19): siRNA sense strand
cuugagagcuuacaucaga

SEQ ID NO: 1599098 - RNA, 19 nt, Homo sapiens
  misc_RNA (1)...(19): siRNA sense strand
caucagaauuugugaagau

SEQ ID NO: 1599099 - RNA, 19 nt, Homo sapiens
  misc_RNA (1)...(19): siRNA sense strand
gaaguaguccauauguuug

SEQ ID NO: 1599100 - RNA, 19 nt, Homo sapiens
  misc_RNA (1)...(19): siRNA sense strand
cagaguuacuggaaauauu

SEQ ID NO: 1599101 - RNA, 19 nt, Homo sapiens
  misc_RNA (1)...(19): siRNA sense strand
ugaaaucucugagugucua

SEQ ID NO: 1599102 - RNA, 19 nt, Homo sapiens
  misc_RNA (1)...(19): siRNA sense strand
agaaguaguccauauguuu

SEQ ID NO: 1599103 - RNA, 19 nt, Homo sapiens
  misc_RNA (1)...(19): siRNA sense strand
gaagcagccuggccucauc

SEQ ID NO: 1599104 - RNA, 19 nt, Homo sapiens
  misc_RNA (1)...(19): siRNA sense strand
ccagauuuccaaccuaaua

SEQ ID NO: 1599105 - RNA, 19 nt, Homo sapiens
  misc_RNA (1)...(19): siRNA sense strand
gaucagaaguuuguauugc

SEQ ID NO: 1599106 - RNA, 19 nt, Homo sapiens
  misc_RNA (1)...(19): siRNA sense strand
gaagaugaaccaacguuag

SEQ ID NO: 1599107 - RNA, 19 nt, Homo sapiens
  misc_RNA (1)...(19): siRNA sense strand
caucaugaguuuaaucagu

SEQ ID NO: 1599108 - RNA, 19 nt, Homo sapiens
  misc_RNA (1)...(19): siRNA sense strand
gaaacagagcaucauaaug

SEQ ID NO: 1599109 - RNA, 19 nt, Homo sapiens
  misc_RNA (1)...(19): siRNA sense strand
ggugauggcacuucucaaa

SEQ ID NO: 1599110 - RNA, 19 nt, Homo sapiens
  misc_RNA (1)...(19): siRNA sense strand
aaaccacccuucacagaau

SEQ ID NO: 1599111 - RNA, 19 nt, Homo sapiens
  misc_RNA (1)...(19): siRNA sense strand
uagcagaguuacuggaaau

SEQ ID NO: 1599112 - RNA, 19 nt, Homo sapiens
  misc_RNA (1)...(19): siRNA sense strand
cauugaaccaucagaauuu

SEQ ID NO: 1599113 - RNA, 19 nt, Homo sapiens
  misc_RNA (1)...(19): siRNA sense strand
uaaaguggaaggaaguaaa

SEQ ID NO: 1599114 - RNA, 19 nt, Homo sapiens
  misc_RNA (1)...(19): siRNA sense strand
cagaaguaguccauauguu

SEQ ID NO: 1599115 - RNA, 19 nt, Homo sapiens
  misc_RNA (1)...(19): siRNA sense strand
ccaccuuccuccaauccua

SEQ ID NO: 1599116 - RNA, 19 nt, Homo sapiens
  misc_RNA (1)...(19): siRNA sense strand
cuggaaauauugggaagua

SEQ ID NO: 1599117 - RNA, 19 nt, Homo sapiens
  misc_RNA (1)...(19): siRNA sense strand
gaaauuccuaggcuugaga

SEQ ID NO: 1599118 - RNA, 19 nt, Homo sapiens
  misc_RNA (1)...(19): siRNA sense strand
ucacagaaucuaugggaaa

SEQ ID NO: 1599119 - RNA, 19 nt, Homo sapiens
  misc_RNA (1)...(19): siRNA sense strand
aaagaagagcacaagauuu

SEQ ID NO: 1599120 - RNA, 19 nt, Homo sapiens
  misc_RNA (1)...(19): siRNA sense strand
ucaaagacccauuggaaca

SEQ ID NO: 1599121 - RNA, 19 nt, Homo sapiens
  misc_RNA (1)...(19): siRNA sense strand
gaagagauuuuagauguca

SEQ ID NO: 1599122 - RNA, 19 nt, Homo sapiens
  misc_RNA (1)...(19): siRNA sense strand
aaaacgagcugcuuuaagu

SEQ ID NO: 1599123 - RNA, 19 nt, Homo sapiens
  misc_RNA (1)...(19): siRNA sense strand
gauggcacuucucaaauac

SEQ ID NO: 1599124 - RNA, 19 nt, Homo sapiens
  misc_RNA (1)...(19): siRNA sense strand
ugaaacagagcaucauaau

SEQ ID NO: 1599125 - RNA, 19 nt, Homo sapiens
  misc_RNA (1)...(19): siRNA sense strand
gaucacagagccuauuuac

SEQ ID NO: 1599126 - RNA, 19 nt, Homo sapiens
  misc_RNA (1)...(19): siRNA sense strand
gcagaguuacuggaaauau

SEQ ID NO: 1599127 - RNA, 19 nt, Homo sapiens
  misc_RNA (1)...(19): siRNA sense strand
ugacaacgcagcgaagauu

SEQ ID NO: 1599128 - RNA, 19 nt, Homo sapiens
  misc_RNA (1)...(19): siRNA sense strand
gcaacucaaagacccauug

SEQ ID NO: 1599129 - RNA, 19 nt, Homo sapiens
  misc_RNA (1)...(19): siRNA sense strand
cgagcugcuuuaagugaaa

SEQ ID NO: 1599130 - RNA, 19 nt, Homo sapiens
  misc_RNA (1)...(19): siRNA sense strand
gcgaagauucugcccauca

SEQ ID NO: 1599131 - RNA, 19 nt, Homo sapiens
  misc_RNA (1)...(19): siRNA sense strand
aaccuaauauagcgaagaa

SEQ ID NO: 1599132 - RNA, 19 nt, Homo sapiens
  misc_RNA (1)...(19): siRNA sense strand
ucauugaaccaucagaauu

SEQ ID NO: 1599133 - RNA, 19 nt, Homo sapiens
  misc_RNA (1)...(19): siRNA sense strand
aucuacagcuuguuuauga

SEQ ID NO: 1599134 - RNA, 19 nt, Homo sapiens
  misc_RNA (1)...(19): siRNA sense strand
acucaaagacccauuggaa

SEQ ID NO: 1599135 - RNA, 19 nt, Homo sapiens
  misc_RNA (1)...(19): siRNA sense strand
cgaagauucugcccaucau

SEQ ID NO: 1599136 - RNA, 19 nt, Homo sapiens
  misc_RNA (1)...(19): siRNA sense strand
cuccagauuuccaaccuaa

SEQ ID NO: 1599137 - RNA, 19 nt, Homo sapiens
  misc_RNA (1)...(19): siRNA sense strand
guuugcaguuaacauguuu

SEQ ID NO: 1599138 - RNA, 19 nt, Homo sapiens
  misc_RNA (1)...(19): siRNA sense strand
caaagacccauuggaacaa

SEQ ID NO: 1599139 - RNA, 19 nt, Homo sapiens
  misc_RNA (1)...(19): siRNA sense strand
uuuagagucuccagauuuc

SEQ ID NO: 1599140 - RNA, 19 nt, Homo sapiens
  misc_RNA (1)...(19): siRNA sense strand
ccagaaguaguccauaugu

SEQ ID NO: 1599141 - RNA, 19 nt, Homo sapiens
  misc_RNA (1)...(19): siRNA sense strand
cacagaaucuaugggaaau

SEQ ID NO: 1599142 - RNA, 19 nt, Homo sapiens
  misc_RNA (1)...(19): siRNA sense strand
ccuaauauagcgaagaaau

SEQ ID NO: 1599143 - RNA, 19 nt, Homo sapiens
  misc_RNA (1)...(19): siRNA sense strand
gaaccaucagaauuuguga

SEQ ID NO: 1599144 - RNA, 19 nt, Homo sapiens
  misc_RNA (1)...(19): siRNA sense strand
cucaaauacuggccaaaga

SEQ ID NO: 1599145 - RNA, 19 nt, Homo sapiens
  misc_RNA (1)...(19): siRNA sense strand
aagaagagcacaagauuuu

SEQ ID NO: 1599146 - RNA, 19 nt, Homo sapiens
  misc_RNA (1)...(19): siRNA sense strand
ugcuuuaagugaaauggua

SEQ ID NO: 1599147 - RNA, 19 nt, Homo sapiens
  misc_RNA (1)...(19): siRNA sense strand
cagaauuugugaagaucau

SEQ ID NO: 1599148 - RNA, 19 nt, Homo sapiens
  misc_RNA (1)...(19): siRNA sense strand
ccucaucuacagcuuguuu

SEQ ID NO: 1599149 - RNA, 19 nt, Homo sapiens
  misc_RNA (1)...(19): siRNA sense strand
ggaauuugacccggaggaa

SEQ ID NO: 1599150 - RNA, 19 nt, Homo sapiens
  misc_RNA (1)...(19): siRNA sense strand
gagccuauuuacccagaag

SEQ ID NO: 1599151 - RNA, 19 nt, Homo sapiens
  misc_RNA (1)...(19): siRNA sense strand
caaagugaaaucucugagu

SEQ ID NO: 1599152 - RNA, 19 nt, Homo sapiens
  misc_RNA (1)...(19): siRNA sense strand
cauagcagaguuacuggaa

SEQ ID NO: 1599153 - RNA, 19 nt, Homo sapiens
  misc_RNA (1)...(19): siRNA sense strand
uaauggcauagcagaguua

SEQ ID NO: 1599154 - RNA, 19 nt, Homo sapiens
  misc_RNA (1)...(19): siRNA sense strand
ugaagauccucgggagaga

SEQ ID NO: 1599155 - RNA, 19 nt, Homo sapiens
  misc_RNA (1)...(19): siRNA sense strand
guagaauauaucacccaua

SEQ ID NO: 1599156 - RNA, 19 nt, Homo sapiens
  misc_RNA (1)...(19): siRNA sense strand
gauucugcccaucauguuu

SEQ ID NO: 1599157 - RNA, 19 nt, Homo sapiens
  misc_RNA (1)...(19): siRNA sense strand
gaagauucugcccaucaug

SEQ ID NO: 1599158 - RNA, 19 nt, Homo sapiens
  misc_RNA (1)...(19): siRNA sense strand
ucuuugacuuuguuucuga

SEQ ID NO: 1599159 - RNA, 19 nt, Homo sapiens
  misc_RNA (1)...(19): siRNA sense strand
ccagcuggcauacugugua

SEQ ID NO: 1599160 - RNA, 19 nt, Homo sapiens
  misc_RNA (1)...(19): siRNA sense strand
agaguuacuggaaauauug

SEQ ID NO: 1599161 - RNA, 19 nt, Homo sapiens
  misc_RNA (1)...(19): siRNA sense strand
gagcuuacaucagaaaaca

SEQ ID NO: 1599162 - RNA, 19 nt, Homo sapiens
  misc_RNA (1)...(19): siRNA sense strand
aaguuuguauugcagcuuu

SEQ ID NO: 1599163 - RNA, 19 nt, Homo sapiens
  misc_RNA (1)...(19): siRNA sense strand
ggccucaucuacagcuugu

SEQ ID NO: 1599164 - RNA, 19 nt, Homo sapiens
  misc_RNA (1)...(19): siRNA sense strand
aagaugaaccaacguuaga

SEQ ID NO: 1599165 - RNA, 19 nt, Homo sapiens
  misc_RNA (1)...(19): siRNA sense strand
gagcugcuuuaagugaaau

SEQ ID NO: 1599166 - RNA, 19 nt, Homo sapiens
  misc_RNA (1)...(19): siRNA sense strand
cauguuuccuuccuuguac

SEQ ID NO: 1599167 - RNA, 19 nt, Homo sapiens
  misc_RNA (1)...(19): siRNA sense strand
cagcuggcauacuguguag

SEQ ID NO: 1599168 - RNA, 19 nt, Homo sapiens
  misc_RNA (1)...(19): siRNA sense strand
cuacgggagcggaauuuga

SEQ ID NO: 1599169 - RNA, 19 nt, Homo sapiens
  misc_RNA (1)...(19): siRNA sense strand
caacuccaaugggccuuuc

SEQ ID NO: 1599170 - RNA, 19 nt, Homo sapiens
  misc_RNA (1)...(19): siRNA sense strand
acccagaaguaguccauau

SEQ ID NO: 1599171 - RNA, 19 nt, Homo sapiens
  misc_RNA (1)...(19): siRNA sense strand
ucaugaguuuaaucaguga

SEQ ID NO: 1599172 - RNA, 19 nt, Homo sapiens
  misc_RNA (1)...(19): siRNA sense strand
uuucgaacauuaccaccuu

SEQ ID NO: 1599173 - RNA, 19 nt, Homo sapiens
  misc_RNA (1)...(19): siRNA sense strand
auaauggcauagcagaguu

SEQ ID NO: 1599174 - RNA, 19 nt, Homo sapiens
  misc_RNA (1)...(19): siRNA sense strand
aaaagaagagcacaagauu

SEQ ID NO: 1599175 - RNA, 19 nt, Homo sapiens
  misc_RNA (1)...(19): siRNA sense strand
gugaucacagagccuauuu

SEQ ID NO: 1599176 - RNA, 19 nt, Homo sapiens
  misc_RNA (1)...(19): siRNA sense strand
ucauguuuccuuccuugua

SEQ ID NO: 1599177 - RNA, 19 nt, Homo sapiens
  misc_RNA (1)...(19): siRNA sense strand
ugggaaguauaauuaaugg

SEQ ID NO: 1599178 - RNA, 19 nt, Homo sapiens
  misc_RNA (1)...(19): siRNA sense strand
cgugguccuucuccauauu

SEQ ID NO: 1599179 - RNA, 19 nt, Homo sapiens
  misc_RNA (1)...(19): siRNA sense strand
gcugaucaagagaagcuuu

SEQ ID NO: 1599180 - RNA, 19 nt, Homo sapiens
  misc_RNA (1)...(19): siRNA sense strand
gcaucauaauggcauagca

SEQ ID NO: 1599181 - RNA, 19 nt, Homo sapiens
  misc_RNA (1)...(19): siRNA sense strand
gauccucgggagagagauu

SEQ ID NO: 1599182 - RNA, 19 nt, Homo sapiens
  misc_RNA (1)...(19): siRNA sense strand
gauuuccaaccuaauauag

SEQ ID NO: 1599183 - RNA, 19 nt, Homo sapiens
  misc_RNA (1)...(19): siRNA sense strand
gaugaaccaacguuagaag

SEQ ID NO: 1599184 - RNA, 19 nt, Homo sapiens
  misc_RNA (1)...(19): siRNA sense strand
cauaauggcauagcagagu

SEQ ID NO: 1599185 - RNA, 19 nt, Homo sapiens
  misc_RNA (1)...(19): siRNA sense strand
agaaguuacgucaguguug

SEQ ID NO: 1599186 - RNA, 19 nt, Homo sapiens
  misc_RNA (1)...(19): siRNA sense strand
ggagagagauuuucuuaaa

SEQ ID NO: 1599187 - RNA, 19 nt, Homo sapiens
  misc_RNA (1)...(19): siRNA sense strand
ggaaauauugggaaguaua

SEQ ID NO: 1599188 - RNA, 19 nt, Homo sapiens
  misc_RNA (1)...(19): siRNA sense strand
ugauggcacuucucaaaua

SEQ ID NO: 1599189 - RNA, 19 nt, Homo sapiens
  misc_RNA (1)...(19): siRNA sense strand
gaaguaauguucuuaaacg

SEQ ID NO: 1599190 - RNA, 19 nt, Homo sapiens
  misc_RNA (1)...(19): siRNA sense strand
gaauauaucacccauaauc

SEQ ID NO: 1599191 - RNA, 19 nt, Homo sapiens
  misc_RNA (1)...(19): siRNA sense strand
uaagugaccuaaaguggaa

SEQ ID NO: 1599192 - RNA, 19 nt, Homo sapiens
  misc_RNA (1)...(19): siRNA sense strand
guccauauguuugcaguua

SEQ ID NO: 1599193 - RNA, 19 nt, Homo sapiens
  misc_RNA (1)...(19): siRNA sense strand
aaacagagcaucauaaugg

SEQ ID NO: 1599194 - RNA, 19 nt, Homo sapiens
  misc_RNA (1)...(19): siRNA sense strand
gcaguuaacauguuucgaa

SEQ ID NO: 1599195 - RNA, 19 nt, Homo sapiens
  misc_RNA (1)...(19): siRNA sense strand
gcgaagaaauauauugauc

SEQ ID NO: 1599196 - RNA, 19 nt, Homo sapiens
  misc_RNA (1)...(19): siRNA sense strand
ggaagaugaaccaacguua

SEQ ID NO: 1599197 - RNA, 19 nt, Homo sapiens
  misc_RNA (1)...(19): siRNA sense strand
cuugagagcuuacaucaga

SEQ ID NO: 1599198 - RNA, 19 nt, Homo sapiens
  misc_RNA (1)...(19): siRNA sense strand
caucagaauuugugaagau

SEQ ID NO: 1599199 - RNA, 19 nt, Homo sapiens
  misc_RNA (1)...(19): siRNA sense strand
gaaguaguccauauguuug

SEQ ID NO: 1599200 - RNA, 19 nt, Homo sapiens
  misc_RNA (1)...(19): siRNA sense strand
cagaguuacuggaaauauu

SEQ ID NO: 1599201 - RNA, 19 nt, Homo sapiens
  misc_RNA (1)...(19): siRNA sense strand
ugaaaucucugagugucua

SEQ ID NO: 1599202 - RNA, 19 nt, Homo sapiens
  misc_RNA (1)...(19): siRNA sense strand
agaaguaguccauauguuu

SEQ ID NO: 1599203 - RNA, 19 nt, Homo sapiens
  misc_RNA (1)...(19): siRNA sense strand
gaagcagccuggccucauc

SEQ ID NO: 1599204 - RNA, 19 nt, Homo sapiens
  misc_RNA (1)...(19): siRNA sense strand
ccagauuuccaaccuaaua

SEQ ID NO: 1599205 - RNA, 19 nt, Homo sapiens
  misc_RNA (1)...(19): siRNA sense strand
gaucagaaguuuguauugc

SEQ ID NO: 1599206 - RNA, 19 nt, Homo sapiens
  misc_RNA (1)...(19): siRNA sense strand
gaagaugaaccaacguuag

SEQ ID NO: 1599207 - RNA, 19 nt, Homo sapiens
  misc_RNA (1)...(19): siRNA sense strand
caucaugaguuuaaucagu

SEQ ID NO: 1599208 - RNA, 19 nt, Homo sapiens
  misc_RNA (1)...(19): siRNA sense strand
gaaacagagcaucauaaug

SEQ ID NO: 1599209 - RNA, 19 nt, Homo sapiens
  misc_RNA (1)...(19): siRNA sense strand
ggugauggcacuucucaaa

SEQ ID NO: 1599210 - RNA, 19 nt, Homo sapiens
  misc_RNA (1)...(19): siRNA sense strand
aaaccacccuucacagaau

SEQ ID NO: 1599211 - RNA, 19 nt, Homo sapiens
  misc_RNA (1)...(19): siRNA sense strand
uagcagaguuacuggaaau

SEQ ID NO: 1599212 - RNA, 19 nt, Homo sapiens
  misc_RNA (1)...(19): siRNA sense strand
cauugaaccaucagaauuu

SEQ ID NO: 1599213 - RNA, 19 nt, Homo sapiens
  misc_RNA (1)...(19): siRNA sense strand
uaaaguggaaggaaguaaa

SEQ ID NO: 1599214 - RNA, 19 nt, Homo sapiens
  misc_RNA (1)...(19): siRNA sense strand
cagaaguaguccauauguu

SEQ ID NO: 1599215 - RNA, 19 nt, Homo sapiens
  misc_RNA (1)...(19): siRNA sense strand
ccaccuuccuccaauccua

SEQ ID NO: 1599216 - RNA, 19 nt, Homo sapiens
  misc_RNA (1)...(19): siRNA sense strand
cuggaaauauugggaagua

SEQ ID NO: 1599217 - RNA, 19 nt, Homo sapiens
  misc_RNA (1)...(19): siRNA sense strand
gaaauuccuaggcuugaga

SEQ ID NO: 1599218 - RNA, 19 nt, Homo sapiens
  misc_RNA (1)...(19): siRNA sense strand
ucacagaaucuaugggaaa

SEQ ID NO: 1599219 - RNA, 19 nt, Homo sapiens
  misc_RNA (1)...(19): siRNA sense strand
aaagaagagcacaagauuu

SEQ ID NO: 1599220 - RNA, 19 nt, Homo sapiens
  misc_RNA (1)...(19): siRNA sense strand
ucaaagacccauuggaaca

SEQ ID NO: 1599221 - RNA, 19 nt, Homo sapiens
  misc_RNA (1)...(19): siRNA sense strand
gaagagauuuuagauguca

SEQ ID NO: 1599222 - RNA, 19 nt, Homo sapiens
  misc_RNA (1)...(19): siRNA sense strand
aaaacgagcugcuuuaagu

SEQ ID NO: 1599223 - RNA, 19 nt, Homo sapiens
  misc_RNA (1)...(19): siRNA sense strand
gauggcacuucucaaauac

SEQ ID NO: 1599224 - RNA, 19 nt, Homo sapiens
  misc_RNA (1)...(19): siRNA sense strand
ugaaacagagcaucauaau

SEQ ID NO: 1599225 - RNA, 19 nt, Homo sapiens
  misc_RNA (1)...(19): siRNA sense strand
gaucacagagccuauuuac

SEQ ID NO: 1599226 - RNA, 19 nt, Homo sapiens
  misc_RNA (1)...(19): siRNA sense strand
gcagaguuacuggaaauau

SEQ ID NO: 1599227 - RNA, 19 nt, Homo sapiens
  misc_RNA (1)...(19): siRNA sense strand
ugacaacgcagcgaagauu

SEQ ID NO: 1599228 - RNA, 19 nt, Homo sapiens
  misc_RNA (1)...(19): siRNA sense strand
gcaacucaaagacccauug

SEQ ID NO: 1599229 - RNA, 19 nt, Homo sapiens
  misc_RNA (1)...(19): siRNA sense strand
cgagcugcuuuaagugaaa

SEQ ID NO: 1599230 - RNA, 19 nt, Homo sapiens
  misc_RNA (1)...(19): siRNA sense strand
gcgaagauucugcccauca

SEQ ID NO: 1599231 - RNA, 19 nt, Homo sapiens
  misc_RNA (1)...(19): siRNA sense strand
aaccuaauauagcgaagaa

SEQ ID NO: 1599232 - RNA, 19 nt, Homo sapiens
  misc_RNA (1)...(19): siRNA sense strand
ucauugaaccaucagaauu

SEQ ID NO: 1599233 - RNA, 19 nt, Homo sapiens
  misc_RNA (1)...(19): siRNA sense strand
aucuacagcuuguuuauga

SEQ ID NO: 1599234 - RNA, 19 nt, Homo sapiens
  misc_RNA (1)...(19): siRNA sense strand
acucaaagacccauuggaa

SEQ ID NO: 1599235 - RNA, 19 nt, Homo sapiens
  misc_RNA (1)...(19): siRNA sense strand
cgaagauucugcccaucau

SEQ ID NO: 1599236 - RNA, 19 nt, Homo sapiens
  misc_RNA (1)...(19): siRNA sense strand
cuccagauuuccaaccuaa

SEQ ID NO: 1599237 - RNA, 19 nt, Homo sapiens
  misc_RNA (1)...(19): siRNA sense strand
guuugcaguuaacauguuu

SEQ ID NO: 1599238 - RNA, 19 nt, Homo sapiens
  misc_RNA (1)...(19): siRNA sense strand
caaagacccauuggaacaa

SEQ ID NO: 1599239 - RNA, 19 nt, Homo sapiens
  misc_RNA (1)...(19): siRNA sense strand
uuuagagucuccagauuuc

SEQ ID NO: 1599240 - RNA, 19 nt, Homo sapiens
  misc_RNA (1)...(19): siRNA sense strand
ccagaaguaguccauaugu

SEQ ID NO: 1599241 - RNA, 19 nt, Homo sapiens
  misc_RNA (1)...(19): siRNA sense strand
cacagaaucuaugggaaau

SEQ ID NO: 1599242 - RNA, 19 nt, Homo sapiens
  misc_RNA (1)...(19): siRNA sense strand
ccuaauauagcgaagaaau

SEQ ID NO: 1599243 - RNA, 19 nt, Homo sapiens
  misc_RNA (1)...(19): siRNA sense strand
gaaccaucagaauuuguga

SEQ ID NO: 1599244 - RNA, 19 nt, Homo sapiens
  misc_RNA (1)...(19): siRNA sense strand
cucaaauacuggccaaaga

SEQ ID NO: 1599245 - RNA, 19 nt, Homo sapiens
  misc_RNA (1)...(19): siRNA sense strand
aagaagagcacaagauuuu

SEQ ID NO: 1599246 - RNA, 19 nt, Homo sapiens
  misc_RNA (1)...(19): siRNA sense strand
ugcuuuaagugaaauggua

SEQ ID NO: 1599247 - RNA, 19 nt, Homo sapiens
  misc_RNA (1)...(19): siRNA sense strand
cagaauuugugaagaucau

SEQ ID NO: 1599248 - RNA, 19 nt, Homo sapiens
  misc_RNA (1)...(19): siRNA sense strand
ccucaucuacagcuuguuu

SEQ ID NO: 1599249 - RNA, 19 nt, Homo sapiens
  misc_RNA (1)...(19): siRNA sense strand
ggaauuugacccggaggaa

SEQ ID NO: 1599250 - RNA, 19 nt, Homo sapiens
  misc_RNA (1)...(19): siRNA sense strand
gagccuauuuacccagaag

SEQ ID NO: 1599251 - RNA, 19 nt, Homo sapiens
  misc_RNA (1)...(19): siRNA sense strand
caaagugaaaucucugagu

SEQ ID NO: 1599252 - RNA, 19 nt, Homo sapiens
  misc_RNA (1)...(19): siRNA sense strand
cauagcagaguuacuggaa

SEQ ID NO: 1599253 - RNA, 19 nt, Homo sapiens
  misc_RNA (1)...(19): siRNA sense strand
uaauggcauagcagaguua

SEQ ID NO: 1599254 - RNA, 19 nt, Homo sapiens
  misc_RNA (1)...(19): siRNA sense strand
ugaagauccucgggagaga

SEQ ID NO: 1599255 - RNA, 19 nt, Homo sapiens
  misc_RNA (1)...(19): siRNA sense strand
guagaauauaucacccaua

SEQ ID NO: 1599256 - RNA, 19 nt, Homo sapiens
  misc_RNA (1)...(19): siRNA sense strand
gauucugcccaucauguuu

SEQ ID NO: 1599257 - RNA, 19 nt, Homo sapiens
  misc_RNA (1)...(19): siRNA sense strand
gaagauucugcccaucaug

SEQ ID NO: 1599258 - RNA, 19 nt, Homo sapiens
  misc_RNA (1)...(19): siRNA sense strand
ucuuugacuuuguuucuga

SEQ ID NO: 1599259 - RNA, 19 nt, Homo sapiens
  misc_RNA (1)...(19): siRNA sense strand
ccagcuggcauacugugua

SEQ ID NO: 1599260 - RNA, 19 nt, Homo sapiens
  misc_RNA (1)...(19): siRNA sense strand
agaguuacuggaaauauug

SEQ ID NO: 1599261 - RNA, 19 nt, Homo sapiens
  misc_RNA (1)...(19): siRNA sense strand
gagcuuacaucagaaaaca

SEQ ID NO: 1599262 - RNA, 19 nt, Homo sapiens
  misc_RNA (1)...(19): siRNA sense strand
aaguuuguauugcagcuuu

SEQ ID NO: 1599263 - RNA, 19 nt, Homo sapiens
  misc_RNA (1)...(19): siRNA sense strand
ggccucaucuacagcuugu

SEQ ID NO: 1599264 - RNA, 19 nt, Homo sapiens
  misc_RNA (1)...(19): siRNA sense strand
aagaugaaccaacguuaga

SEQ ID NO: 1599265 - RNA, 19 nt, Homo sapiens
  misc_RNA (1)...(19): siRNA sense strand
gagcugcuuuaagugaaau

SEQ ID NO: 1599266 - RNA, 19 nt, Homo sapiens
  misc_RNA (1)...(19): siRNA sense strand
cauguuuccuuccuuguac

SEQ ID NO: 1599267 - RNA, 19 nt, Homo sapiens
  misc_RNA (1)...(19): siRNA sense strand
cagcuggcauacuguguag

SEQ ID NO: 1599268 - RNA, 19 nt, Homo sapiens
  misc_RNA (1)...(19): siRNA sense strand
cuacgggagcggaauuuga

SEQ ID NO: 1599269 - RNA, 19 nt, Homo sapiens
  misc_RNA (1)...(19): siRNA sense strand
caacuccaaugggccuuuc

SEQ ID NO: 1599270 - RNA, 19 nt, Homo sapiens
  misc_RNA (1)...(19): siRNA sense strand
acccagaaguaguccauau

SEQ ID NO: 1599271 - RNA, 19 nt, Homo sapiens
  misc_RNA (1)...(19): siRNA sense strand
ucaugaguuuaaucaguga

SEQ ID NO: 1599272 - RNA, 19 nt, Homo sapiens
  misc_RNA (1)...(19): siRNA sense strand
uuucgaacauuaccaccuu

SEQ ID NO: 1599273 - RNA, 19 nt, Homo sapiens
  misc_RNA (1)...(19): siRNA sense strand
auaauggcauagcagaguu

SEQ ID NO: 1599274 - RNA, 19 nt, Homo sapiens
  misc_RNA (1)...(19): siRNA sense strand
aaaagaagagcacaagauu

SEQ ID NO: 1599275 - RNA, 19 nt, Homo sapiens
  misc_RNA (1)...(19): siRNA sense strand
gugaucacagagccuauuu

SEQ ID NO: 1599276 - RNA, 19 nt, Homo sapiens
  misc_RNA (1)...(19): siRNA sense strand
ucauguuuccuuccuugua

SEQ ID NO: 1599277 - RNA, 19 nt, Homo sapiens
  misc_RNA (1)...(19): siRNA sense strand
ugggaaguauaauuaaugg

SEQ ID NO: 1599278 - RNA, 19 nt, Homo sapiens
  misc_RNA (1)...(19): siRNA sense strand
cgugguccuucuccauauu

SEQ ID NO: 1599279 - RNA, 19 nt, Homo sapiens
  misc_RNA (1)...(19): siRNA sense strand
gcugaucaagagaagcuuu

SEQ ID NO: 1599280 - RNA, 19 nt, Homo sapiens
  misc_RNA (1)...(19): siRNA sense strand
gcaucauaauggcauagca

SEQ ID NO: 1599281 - RNA, 19 nt, Homo sapiens
  misc_RNA (1)...(19): siRNA sense strand
gauccucgggagagagauu

SEQ ID NO: 1599282 - RNA, 19 nt, Homo sapiens
  misc_RNA (1)...(19): siRNA sense strand
gauuuccaaccuaauauag

SEQ ID NO: 1599283 - RNA, 19 nt, Homo sapiens
  misc_RNA (1)...(19): siRNA sense strand
gaugaaccaacguuagaag

SEQ ID NO: 1599284 - RNA, 19 nt, Homo sapiens
  misc_RNA (1)...(19): siRNA sense strand
cauaauggcauagcagagu

SEQ ID NO: 1599285 - RNA, 19 nt, Homo sapiens
  misc_RNA (1)...(19): siRNA sense strand
agaaguuacgucaguguug

SEQ ID NO: 1599286 - RNA, 19 nt, Homo sapiens
  misc_RNA (1)...(19): siRNA sense strand
gaagaaaucguucaucaua

SEQ ID NO: 1599287 - RNA, 19 nt, Homo sapiens
  misc_RNA (1)...(19): siRNA sense strand
gagaacaacuggcagcuuu

SEQ ID NO: 1599288 - RNA, 19 nt, Homo sapiens
  misc_RNA (1)...(19): siRNA sense strand
aagaagaaaucguucauca

SEQ ID NO: 1599289 - RNA, 19 nt, Homo sapiens
  misc_RNA (1)...(19): siRNA sense strand
gaacaacuggcagcuuuga

SEQ ID NO: 1599290 - RNA, 19 nt, Homo sapiens
  misc_RNA (1)...(19): siRNA sense strand
agaaaucguucaucauaag

SEQ ID NO: 1599291 - RNA, 19 nt, Homo sapiens
  misc_RNA (1)...(19): siRNA sense strand
gaaaucguucaucauaaga

SEQ ID NO: 1599292 - RNA, 19 nt, Homo sapiens
  misc_RNA (1)...(19): siRNA sense strand
agagagagcaggcugaaga

SEQ ID NO: 1599293 - RNA, 19 nt, Homo sapiens
  misc_RNA (1)...(19): siRNA sense strand
gaaauugagcgccauaagc

SEQ ID NO: 1599294 - RNA, 19 nt, Homo sapiens
  misc_RNA (1)...(19): siRNA sense strand
agagcaggcugaagaggaa

SEQ ID NO: 1599295 - RNA, 19 nt, Homo sapiens
  misc_RNA (1)...(19): siRNA sense strand
gccauaagcagaagaucaa

SEQ ID NO: 1599296 - RNA, 19 nt, Homo sapiens
  misc_RNA (1)...(19): siRNA sense strand
gagcgucugcagaaagaaa

SEQ ID NO: 1599297 - RNA, 19 nt, Homo sapiens
  misc_RNA (1)...(19): siRNA sense strand
gaagaagaaaucguucauc

SEQ ID NO: 1599298 - RNA, 19 nt, Homo sapiens
  misc_RNA (1)...(19): siRNA sense strand
gauugagcgucugcagaaa

SEQ ID NO: 1599299 - RNA, 19 nt, Homo sapiens
  misc_RNA (1)...(19): siRNA sense strand
ugaagaggaacgauauuuc

SEQ ID NO: 1599300 - RNA, 19 nt, Homo sapiens
  misc_RNA (1)...(19): siRNA sense strand
ccaugaagaagaaaucguu

SEQ ID NO: 1599301 - RNA, 19 nt, Homo sapiens
  misc_RNA (1)...(19): siRNA sense strand
acaacuggcagcuuugaaa

SEQ ID NO: 1599302 - RNA, 19 nt, Homo sapiens
  misc_RNA (1)...(19): siRNA sense strand
aaagaaauugagcgccaua

SEQ ID NO: 1599303 - RNA, 19 nt, Homo sapiens
  misc_RNA (1)...(19): siRNA sense strand
aaauugagcgccauaagca

SEQ ID NO: 1599304 - RNA, 19 nt, Homo sapiens
  misc_RNA (1)...(19): siRNA sense strand
gcacagaguagagaacaac

SEQ ID NO: 1599305 - RNA, 19 nt, Homo sapiens
  misc_RNA (1)...(19): siRNA sense strand
gagcacagaguagagaaca

SEQ ID NO: 1599306 - RNA, 19 nt, Homo sapiens
  misc_RNA (1)...(19): siRNA sense strand
agauugagcgucugcagaa

SEQ ID NO: 1599307 - RNA, 19 nt, Homo sapiens
  misc_RNA (1)...(19): siRNA sense strand
uugagcgucugcagaaaga

SEQ ID NO: 1599308 - RNA, 19 nt, Homo sapiens
  misc_RNA (1)...(19): siRNA sense strand
cugaagaggaacgauauuu

SEQ ID NO: 1599309 - RNA, 19 nt, Homo sapiens
  misc_RNA (1)...(19): siRNA sense strand
aaaacaccaugaagaagaa

SEQ ID NO: 1599310 - RNA, 19 nt, Homo sapiens
  misc_RNA (1)...(19): siRNA sense strand
caucauaagaaggagauug

SEQ ID NO: 1599311 - RNA, 19 nt, Homo sapiens
  misc_RNA (1)...(19): siRNA sense strand
gcugaagaggaacgauauu

SEQ ID NO: 1599312 - RNA, 19 nt, Homo sapiens
  misc_RNA (1)...(19): siRNA sense strand
cagaagaucaaaaugcuaa

SEQ ID NO: 1599313 - RNA, 19 nt, Homo sapiens
  misc_RNA (1)...(19): siRNA sense strand
aaagagagagcaggcugaa

SEQ ID NO: 1599314 - RNA, 19 nt, Homo sapiens
  misc_RNA (1)...(19): siRNA sense strand
aaucguucaucauaagaag

SEQ ID NO: 1599315 - RNA, 19 nt, Homo sapiens
  misc_RNA (1)...(19): siRNA sense strand
ggcugaagaggaacgauau

SEQ ID NO: 1599316 - RNA, 19 nt, Homo sapiens
  misc_RNA (1)...(19): siRNA sense strand
agagagagcaggcugaaga

SEQ ID NO: 1599317 - RNA, 19 nt, Homo sapiens
  misc_RNA (1)...(19): siRNA sense strand
agagcaggcugaagaggaa

SEQ ID NO: 1599318 - RNA, 19 nt, Homo sapiens
  misc_RNA (1)...(19): siRNA sense strand
ugaagaggaacgauauuuc

SEQ ID NO: 1599319 - RNA, 19 nt, Homo sapiens
  misc_RNA (1)...(19): siRNA sense strand
cugaagaggaacgauauuu

SEQ ID NO: 1599320 - RNA, 19 nt, Homo sapiens
  misc_RNA (1)...(19): siRNA sense strand
gcugaagaggaacgauauu

SEQ ID NO: 1599321 - RNA, 19 nt, Homo sapiens
  misc_RNA (1)...(19): siRNA sense strand
aaagagagagcaggcugaa

SEQ ID NO: 1599322 - RNA, 19 nt, Homo sapiens
  misc_RNA (1)...(19): siRNA sense strand
ggcugaagaggaacgauau

SEQ ID NO: 1599323 - RNA, 19 nt, Homo sapiens
  misc_RNA (1)...(19): siRNA sense strand
agagagagcaggcugaaga

SEQ ID NO: 1599324 - RNA, 19 nt, Homo sapiens
  misc_RNA (1)...(19): siRNA sense strand
agagcaggcugaagaggaa

SEQ ID NO: 1599325 - RNA, 19 nt, Homo sapiens
  misc_RNA (1)...(19): siRNA sense strand
ugaagaggaacgauauuuc

SEQ ID NO: 1599326 - RNA, 19 nt, Homo sapiens
  misc_RNA (1)...(19): siRNA sense strand
cugaagaggaacgauauuu

SEQ ID NO: 1599327 - RNA, 19 nt, Homo sapiens
  misc_RNA (1)...(19): siRNA sense strand
gcugaagaggaacgauauu

SEQ ID NO: 1599328 - RNA, 19 nt, Homo sapiens
  misc_RNA (1)...(19): siRNA sense strand
aaagagagagcaggcugaa

SEQ ID NO: 1599329 - RNA, 19 nt, Homo sapiens
  misc_RNA (1)...(19): siRNA sense strand
ggcugaagaggaacgauau

SEQ ID NO: 1599330 - RNA, 19 nt, Homo sapiens
  misc_RNA (1)...(19): siRNA sense strand
ggaacaacaugaaauauag

SEQ ID NO: 1599331 - RNA, 19 nt, Homo sapiens
  misc_RNA (1)...(19): siRNA sense strand
ucaccaagaugcugaaauu

SEQ ID NO: 1599332 - RNA, 19 nt, Homo sapiens
  misc_RNA (1)...(19): siRNA sense strand
ggaaacaauugggaaauau

SEQ ID NO: 1599333 - RNA, 19 nt, Homo sapiens
  misc_RNA (1)...(19): siRNA sense strand
gaucccagcuguacaauag

SEQ ID NO: 1599334 - RNA, 19 nt, Homo sapiens
  misc_RNA (1)...(19): siRNA sense strand
uggcuuacaucaacuaaua

SEQ ID NO: 1599335 - RNA, 19 nt, Homo sapiens
  misc_RNA (1)...(19): siRNA sense strand
gaauauggcugaccuacag

SEQ ID NO: 1599336 - RNA, 19 nt, Homo sapiens
  misc_RNA (1)...(19): siRNA sense strand
agaauucccucaaauagaa

SEQ ID NO: 1599337 - RNA, 19 nt, Homo sapiens
  misc_RNA (1)...(19): siRNA sense strand
caagaugacaguuugauuu

SEQ ID NO: 1599338 - RNA, 19 nt, Homo sapiens
  misc_RNA (1)...(19): siRNA sense strand
gaagaauucccucaaauag

SEQ ID NO: 1599339 - RNA, 19 nt, Homo sapiens
  misc_RNA (1)...(19): siRNA sense strand
gaaauauaguuggguguug

SEQ ID NO: 1599340 - RNA, 19 nt, Homo sapiens
  misc_RNA (1)...(19): siRNA sense strand
guagaagaauuucguaaag

SEQ ID NO: 1599341 - RNA, 19 nt, Homo sapiens
  misc_RNA (1)...(19): siRNA sense strand
uaaaggauuucccucuuga

SEQ ID NO: 1599342 - RNA, 19 nt, Homo sapiens
  misc_RNA (1)...(19): siRNA sense strand
aauagaggaucacguaauu

SEQ ID NO: 1599343 - RNA, 19 nt, Homo sapiens
  misc_RNA (1)...(19): siRNA sense strand
ggaccuggccugaugcuuu

SEQ ID NO: 1599344 - RNA, 19 nt, Homo sapiens
  misc_RNA (1)...(19): siRNA sense strand
auacuacacuuucuuggua

SEQ ID NO: 1599345 - RNA, 19 nt, Homo sapiens
  misc_RNA (1)...(19): siRNA sense strand
caacaccgacuacuuagaa

SEQ ID NO: 1599346 - RNA, 19 nt, Homo sapiens
  misc_RNA (1)...(19): siRNA sense strand
ccacugcccuucucccaaa

SEQ ID NO: 1599347 - RNA, 19 nt, Homo sapiens
  misc_RNA (1)...(19): siRNA sense strand
caggaaauguagaagaauu

SEQ ID NO: 1599348 - RNA, 19 nt, Homo sapiens
  misc_RNA (1)...(19): siRNA sense strand
gaugacaguuugauuuaca

SEQ ID NO: 1599349 - RNA, 19 nt, Homo sapiens
  misc_RNA (1)...(19): siRNA sense strand
gaaggaaacaauugggaaa

SEQ ID NO: 1599350 - RNA, 19 nt, Homo sapiens
  misc_RNA (1)...(19): siRNA sense strand
gaacagaugaaguugacaa

SEQ ID NO: 1599351 - RNA, 19 nt, Homo sapiens
  misc_RNA (1)...(19): siRNA sense strand
gaaccaacaccgacuacuu

SEQ ID NO: 1599352 - RNA, 19 nt, Homo sapiens
  misc_RNA (1)...(19): siRNA sense strand
gaugacaaagcuguuauua

SEQ ID NO: 1599353 - RNA, 19 nt, Homo sapiens
  misc_RNA (1)...(19): siRNA sense strand
gaaaugcgaaaugaaguuu

SEQ ID NO: 1599354 - RNA, 19 nt, Homo sapiens
  misc_RNA (1)...(19): siRNA sense strand
gaagcaaggcauccugauu

SEQ ID NO: 1599355 - RNA, 19 nt, Homo sapiens
  misc_RNA (1)...(19): siRNA sense strand
gcagaugacaaagcuguua

SEQ ID NO: 1599356 - RNA, 19 nt, Homo sapiens
  misc_RNA (1)...(19): siRNA sense strand
gaccuggccugaugcuuug

SEQ ID NO: 1599357 - RNA, 19 nt, Homo sapiens
  misc_RNA (1)...(19): siRNA sense strand
ggauuucccucuugagaca

SEQ ID NO: 1599358 - RNA, 19 nt, Homo sapiens
  misc_RNA (1)...(19): siRNA sense strand
cauauuacuuugcuggauu

SEQ ID NO: 1599359 - RNA, 19 nt, Homo sapiens
  misc_RNA (1)...(19): siRNA sense strand
ggaaagaagucugggaaaa

SEQ ID NO: 1599360 - RNA, 19 nt, Homo sapiens
  misc_RNA (1)...(19): siRNA sense strand
cauaaaggauuucccucuu

SEQ ID NO: 1599361 - RNA, 19 nt, Homo sapiens
  misc_RNA (1)...(19): siRNA sense strand
gcaaaccuaaacagucaua

SEQ ID NO: 1599362 - RNA, 19 nt, Homo sapiens
  misc_RNA (1)...(19): siRNA sense strand
gcucagcuuugacaacaga

SEQ ID NO: 1599363 - RNA, 19 nt, Homo sapiens
  misc_RNA (1)...(19): siRNA sense strand
aaacagagugcuuccauga

SEQ ID NO: 1599364 - RNA, 19 nt, Homo sapiens
  misc_RNA (1)...(19): siRNA sense strand
gaucaugaaaugcgaaaug

SEQ ID NO: 1599365 - RNA, 19 nt, Homo sapiens
  misc_RNA (1)...(19): siRNA sense strand
ucacguaauugcaggaaau

SEQ ID NO: 1599366 - RNA, 19 nt, Homo sapiens
  misc_RNA (1)...(19): siRNA sense strand
uggcaaaccuaaacaguca

SEQ ID NO: 1599367 - RNA, 19 nt, Homo sapiens
  misc_RNA (1)...(19): siRNA sense strand
aggaaacaauugggaaaua

SEQ ID NO: 1599368 - RNA, 19 nt, Homo sapiens
  misc_RNA (1)...(19): siRNA sense strand
gaugucagcauaaaggauu

SEQ ID NO: 1599369 - RNA, 19 nt, Homo sapiens
  misc_RNA (1)...(19): siRNA sense strand
gugcuuccaugacuucuga

SEQ ID NO: 1599370 - RNA, 19 nt, Homo sapiens
  misc_RNA (1)...(19): siRNA sense strand
uuacauggauccucauuac

SEQ ID NO: 1599371 - RNA, 19 nt, Homo sapiens
  misc_RNA (1)...(19): siRNA sense strand
aaccaacaccgacuacuua

SEQ ID NO: 1599372 - RNA, 19 nt, Homo sapiens
  misc_RNA (1)...(19): siRNA sense strand
aagcaaggcauccugauuu

SEQ ID NO: 1599373 - RNA, 19 nt, Homo sapiens
  misc_RNA (1)...(19): siRNA sense strand
gaaauguucaggacuucaa

SEQ ID NO: 1599374 - RNA, 19 nt, Homo sapiens
  misc_RNA (1)...(19): siRNA sense strand
agcaaggcauccugauuua

SEQ ID NO: 1599375 - RNA, 19 nt, Homo sapiens
  misc_RNA (1)...(19): siRNA sense strand
gauguacaauagaggauca

SEQ ID NO: 1599376 - RNA, 19 nt, Homo sapiens
  misc_RNA (1)...(19): siRNA sense strand
uuacuuugcuggauuucaa

SEQ ID NO: 1599377 - RNA, 19 nt, Homo sapiens
  misc_RNA (1)...(19): siRNA sense strand
ccugaugcuuugaauauug

SEQ ID NO: 1599378 - RNA, 19 nt, Homo sapiens
  misc_RNA (1)...(19): siRNA sense strand
ggacucauacuacacuuuc

SEQ ID NO: 1599379 - RNA, 19 nt, Homo sapiens
  misc_RNA (1)...(19): siRNA sense strand
auagaaggcucagcuuuga

SEQ ID NO: 1599380 - RNA, 19 nt, Homo sapiens
  misc_RNA (1)...(19): siRNA sense strand
gcuuggaccuggccugaug

SEQ ID NO: 1599381 - RNA, 19 nt, Homo sapiens
  misc_RNA (1)...(19): siRNA sense strand
cugaagaaaucaccaagau

SEQ ID NO: 1599382 - RNA, 19 nt, Homo sapiens
  misc_RNA (1)...(19): siRNA sense strand
aaauauaguuggguguuga

SEQ ID NO: 1599383 - RNA, 19 nt, Homo sapiens
  misc_RNA (1)...(19): siRNA sense strand
cuauuuauguugcacaaga

SEQ ID NO: 1599384 - RNA, 19 nt, Homo sapiens
  misc_RNA (1)...(19): siRNA sense strand
uacaauagaggaucacgua

SEQ ID NO: 1599385 - RNA, 19 nt, Homo sapiens
  misc_RNA (1)...(19): siRNA sense strand
ggccugaugcuuugaauau

SEQ ID NO: 1599386 - RNA, 19 nt, Homo sapiens
  misc_RNA (1)...(19): siRNA sense strand
gagucgggauguacaauag

SEQ ID NO: 1599387 - RNA, 19 nt, Homo sapiens
  misc_RNA (1)...(19): siRNA sense strand
gaaaaucaucucuugguuu

SEQ ID NO: 1599388 - RNA, 19 nt, Homo sapiens
  misc_RNA (1)...(19): siRNA sense strand
gaacuggccagaugcucuu

SEQ ID NO: 1599389 - RNA, 19 nt, Homo sapiens
  misc_RNA (1)...(19): siRNA sense strand
agaugaaguugacaagcua

SEQ ID NO: 1599390 - RNA, 19 nt, Homo sapiens
  misc_RNA (1)...(19): siRNA sense strand
ugcaggaaauguagaagaa

SEQ ID NO: 1599391 - RNA, 19 nt, Homo sapiens
  misc_RNA (1)...(19): siRNA sense strand
auaaaggauuucccucuug

SEQ ID NO: 1599392 - RNA, 19 nt, Homo sapiens
  misc_RNA (1)...(19): siRNA sense strand
ggaaaaucaucucuugguu

SEQ ID NO: 1599393 - RNA, 19 nt, Homo sapiens
  misc_RNA (1)...(19): siRNA sense strand
cguaauugcaggaaaugua

SEQ ID NO: 1599394 - RNA, 19 nt, Homo sapiens
  misc_RNA (1)...(19): siRNA sense strand
caccgacuacuuagaauuu

SEQ ID NO: 1599395 - RNA, 19 nt, Homo sapiens
  misc_RNA (1)...(19): siRNA sense strand
caaggcauccugauuuaca

SEQ ID NO: 1599396 - RNA, 19 nt, Homo sapiens
  misc_RNA (1)...(19): siRNA sense strand
gcucaaggacucauacuac

SEQ ID NO: 1599397 - RNA, 19 nt, Homo sapiens
  misc_RNA (1)...(19): siRNA sense strand
uagaauuugugaaggguau

SEQ ID NO: 1599398 - RNA, 19 nt, Homo sapiens
  misc_RNA (1)...(19): siRNA sense strand
aaaaucaucucuugguuug

SEQ ID NO: 1599399 - RNA, 19 nt, Homo sapiens
  misc_RNA (1)...(19): siRNA sense strand
caauagaggaucacguaau

SEQ ID NO: 1599400 - RNA, 19 nt, Homo sapiens
  misc_RNA (1)...(19): siRNA sense strand
ccucauuacugccaaucuu

SEQ ID NO: 1599401 - RNA, 19 nt, Homo sapiens
  misc_RNA (1)...(19): siRNA sense strand
cagaugaaguugacaagcu

SEQ ID NO: 1599402 - RNA, 19 nt, Homo sapiens
  misc_RNA (1)...(19): siRNA sense strand
caacaauuucucugaagga

SEQ ID NO: 1599403 - RNA, 19 nt, Homo sapiens
  misc_RNA (1)...(19): siRNA sense strand
ugggaaauauucugaugau

SEQ ID NO: 1599404 - RNA, 19 nt, Homo sapiens
  misc_RNA (1)...(19): siRNA sense strand
ggacuucccacacugucaa

SEQ ID NO: 1599405 - RNA, 19 nt, Homo sapiens
  misc_RNA (1)...(19): siRNA sense strand
gucgaaauguucaggacuu

SEQ ID NO: 1599406 - RNA, 19 nt, Homo sapiens
  misc_RNA (1)...(19): siRNA sense strand
gacaaagcuguuauuauuc

SEQ ID NO: 1599407 - RNA, 19 nt, Homo sapiens
  misc_RNA (1)...(19): siRNA sense strand
aaauagaaggcucagcuuu

SEQ ID NO: 1599408 - RNA, 19 nt, Homo sapiens
  misc_RNA (1)...(19): siRNA sense strand
caucuacuacaaccaauga

SEQ ID NO: 1599409 - RNA, 19 nt, Homo sapiens
  misc_RNA (1)...(19): siRNA sense strand
gauuucaagaugacaguuu

SEQ ID NO: 1599410 - RNA, 19 nt, Homo sapiens
  misc_RNA (1)...(19): siRNA sense strand
gaauuugugaaggguauuu

SEQ ID NO: 1599411 - RNA, 19 nt, Homo sapiens
  misc_RNA (1)...(19): siRNA sense strand
aauagaaggcucagcuuug

SEQ ID NO: 1599412 - RNA, 19 nt, Homo sapiens
  misc_RNA (1)...(19): siRNA sense strand
guagaugucagcauaaagg

SEQ ID NO: 1599413 - RNA, 19 nt, Homo sapiens
  misc_RNA (1)...(19): siRNA sense strand
guaauugcaggaaauguag

SEQ ID NO: 1599414 - RNA, 19 nt, Homo sapiens
  misc_RNA (1)...(19): siRNA sense strand
uagacuugguggagaaaga

SEQ ID NO: 1599415 - RNA, 19 nt, Homo sapiens
  misc_RNA (1)...(19): siRNA sense strand
guacaguuuacaauucuga

SEQ ID NO: 1599416 - RNA, 19 nt, Homo sapiens
  misc_RNA (1)...(19): siRNA sense strand
auugagaacuggccagaug

SEQ ID NO: 1599417 - RNA, 19 nt, Homo sapiens
  misc_RNA (1)...(19): siRNA sense strand
acaguuugauuuacaugga

SEQ ID NO: 1599418 - RNA, 19 nt, Homo sapiens
  misc_RNA (1)...(19): siRNA sense strand
ccuaaacagucauauuacu

SEQ ID NO: 1599419 - RNA, 19 nt, Homo sapiens
  misc_RNA (1)...(19): siRNA sense strand
cuacuuagaauuugugaag

SEQ ID NO: 1599420 - RNA, 19 nt, Homo sapiens
  misc_RNA (1)...(19): siRNA sense strand
uaaugcagaugacaaagcu

SEQ ID NO: 1599421 - RNA, 19 nt, Homo sapiens
  misc_RNA (1)...(19): siRNA sense strand
ugauaaugcagaugacaaa

SEQ ID NO: 1599422 - RNA, 19 nt, Homo sapiens
  misc_RNA (1)...(19): siRNA sense strand
uacaggaacagaugaaguu

SEQ ID NO: 1599423 - RNA, 19 nt, Homo sapiens
  misc_RNA (1)...(19): siRNA sense strand
ugaaaugcgaaaugaaguu

SEQ ID NO: 1599424 - RNA, 19 nt, Homo sapiens
  misc_RNA (1)...(19): siRNA sense strand
caauugggaaauauucuga

SEQ ID NO: 1599425 - RNA, 19 nt, Homo sapiens
  misc_RNA (1)...(19): siRNA sense strand
cugaugcuuugaauauuga

SEQ ID NO: 1599426 - RNA, 19 nt, Homo sapiens
  misc_RNA (1)...(19): siRNA sense strand
cuuggaacaacaugaaaua

SEQ ID NO: 1599427 - RNA, 19 nt, Homo sapiens
  misc_RNA (1)...(19): siRNA sense strand
cuacuacaaccaaugaaga

SEQ ID NO: 1599428 - RNA, 19 nt, Homo sapiens
  misc_RNA (1)...(19): siRNA sense strand
uuccaugacuucugauaau

SEQ ID NO: 1599429 - RNA, 19 nt, Homo sapiens
  misc_RNA (1)...(19): siRNA sense strand
caugaaaugcgaaaugaag

SEQ ID NO: 1599430 - RNA, 19 nt, Homo sapiens
  misc_RNA (1)...(19): siRNA sense strand
ggaacaacaugaaauauag

SEQ ID NO: 1599431 - RNA, 19 nt, Homo sapiens
  misc_RNA (1)...(19): siRNA sense strand
ucaccaagaugcugaaauu

SEQ ID NO: 1599432 - RNA, 19 nt, Homo sapiens
  misc_RNA (1)...(19): siRNA sense strand
ggaaacaauugggaaauau

SEQ ID NO: 1599433 - RNA, 19 nt, Homo sapiens
  misc_RNA (1)...(19): siRNA sense strand
gaucccagcuguacaauag

SEQ ID NO: 1599434 - RNA, 19 nt, Homo sapiens
  misc_RNA (1)...(19): siRNA sense strand
uggcuuacaucaacuaaua

SEQ ID NO: 1599435 - RNA, 19 nt, Homo sapiens
  misc_RNA (1)...(19): siRNA sense strand
gaauauggcugaccuacag

SEQ ID NO: 1599436 - RNA, 19 nt, Homo sapiens
  misc_RNA (1)...(19): siRNA sense strand
agaauucccucaaauagaa

SEQ ID NO: 1599437 - RNA, 19 nt, Homo sapiens
  misc_RNA (1)...(19): siRNA sense strand
caagaugacaguuugauuu

SEQ ID NO: 1599438 - RNA, 19 nt, Homo sapiens
  misc_RNA (1)...(19): siRNA sense strand
gaagaauucccucaaauag

SEQ ID NO: 1599439 - RNA, 19 nt, Homo sapiens
  misc_RNA (1)...(19): siRNA sense strand
gaaauauaguuggguguug

SEQ ID NO: 1599440 - RNA, 19 nt, Homo sapiens
  misc_RNA (1)...(19): siRNA sense strand
guagaagaauuucguaaag

SEQ ID NO: 1599441 - RNA, 19 nt, Homo sapiens
  misc_RNA (1)...(19): siRNA sense strand
uaaaggauuucccucuuga

SEQ ID NO: 1599442 - RNA, 19 nt, Homo sapiens
  misc_RNA (1)...(19): siRNA sense strand
aauagaggaucacguaauu

SEQ ID NO: 1599443 - RNA, 19 nt, Homo sapiens
  misc_RNA (1)...(19): siRNA sense strand
ggaccuggccugaugcuuu

SEQ ID NO: 1599444 - RNA, 19 nt, Homo sapiens
  misc_RNA (1)...(19): siRNA sense strand
auacuacacuuucuuggua

SEQ ID NO: 1599445 - RNA, 19 nt, Homo sapiens
  misc_RNA (1)...(19): siRNA sense strand
caacaccgacuacuuagaa

SEQ ID NO: 1599446 - RNA, 19 nt, Homo sapiens
  misc_RNA (1)...(19): siRNA sense strand
ccacugcccuucucccaaa

SEQ ID NO: 1599447 - RNA, 19 nt, Homo sapiens
  misc_RNA (1)...(19): siRNA sense strand
caggaaauguagaagaauu

SEQ ID NO: 1599448 - RNA, 19 nt, Homo sapiens
  misc_RNA (1)...(19): siRNA sense strand
gaugacaguuugauuuaca

SEQ ID NO: 1599449 - RNA, 19 nt, Homo sapiens
  misc_RNA (1)...(19): siRNA sense strand
gaaggaaacaauugggaaa

SEQ ID NO: 1599450 - RNA, 19 nt, Homo sapiens
  misc_RNA (1)...(19): siRNA sense strand
gaacagaugaaguugacaa

SEQ ID NO: 1599451 - RNA, 19 nt, Homo sapiens
  misc_RNA (1)...(19): siRNA sense strand
gaaccaacaccgacuacuu

SEQ ID NO: 1599452 - RNA, 19 nt, Homo sapiens
  misc_RNA (1)...(19): siRNA sense strand
gaugacaaagcuguuauua

SEQ ID NO: 1599453 - RNA, 19 nt, Homo sapiens
  misc_RNA (1)...(19): siRNA sense strand
gaaaugcgaaaugaaguuu

SEQ ID NO: 1599454 - RNA, 19 nt, Homo sapiens
  misc_RNA (1)...(19): siRNA sense strand
gaagcaaggcauccugauu

SEQ ID NO: 1599455 - RNA, 19 nt, Homo sapiens
  misc_RNA (1)...(19): siRNA sense strand
gcagaugacaaagcuguua

SEQ ID NO: 1599456 - RNA, 19 nt, Homo sapiens
  misc_RNA (1)...(19): siRNA sense strand
gaccuggccugaugcuuug

SEQ ID NO: 1599457 - RNA, 19 nt, Homo sapiens
  misc_RNA (1)...(19): siRNA sense strand
ggauuucccucuugagaca

SEQ ID NO: 1599458 - RNA, 19 nt, Homo sapiens
  misc_RNA (1)...(19): siRNA sense strand
cauauuacuuugcuggauu

SEQ ID NO: 1599459 - RNA, 19 nt, Homo sapiens
  misc_RNA (1)...(19): siRNA sense strand
ggaaagaagucugggaaaa

SEQ ID NO: 1599460 - RNA, 19 nt, Homo sapiens
  misc_RNA (1)...(19): siRNA sense strand
cauaaaggauuucccucuu

SEQ ID NO: 1599461 - RNA, 19 nt, Homo sapiens
  misc_RNA (1)...(19): siRNA sense strand
gcaaaccuaaacagucaua

SEQ ID NO: 1599462 - RNA, 19 nt, Homo sapiens
  misc_RNA (1)...(19): siRNA sense strand
gcucagcuuugacaacaga

SEQ ID NO: 1599463 - RNA, 19 nt, Homo sapiens
  misc_RNA (1)...(19): siRNA sense strand
aaacagagugcuuccauga

SEQ ID NO: 1599464 - RNA, 19 nt, Homo sapiens
  misc_RNA (1)...(19): siRNA sense strand
gaucaugaaaugcgaaaug

SEQ ID NO: 1599465 - RNA, 19 nt, Homo sapiens
  misc_RNA (1)...(19): siRNA sense strand
ucacguaauugcaggaaau

SEQ ID NO: 1599466 - RNA, 19 nt, Homo sapiens
  misc_RNA (1)...(19): siRNA sense strand
uggcaaaccuaaacaguca

SEQ ID NO: 1599467 - RNA, 19 nt, Homo sapiens
  misc_RNA (1)...(19): siRNA sense strand
aggaaacaauugggaaaua

SEQ ID NO: 1599468 - RNA, 19 nt, Homo sapiens
  misc_RNA (1)...(19): siRNA sense strand
gaugucagcauaaaggauu

SEQ ID NO: 1599469 - RNA, 19 nt, Homo sapiens
  misc_RNA (1)...(19): siRNA sense strand
gugcuuccaugacuucuga

SEQ ID NO: 1599470 - RNA, 19 nt, Homo sapiens
  misc_RNA (1)...(19): siRNA sense strand
uuacauggauccucauuac

SEQ ID NO: 1599471 - RNA, 19 nt, Homo sapiens
  misc_RNA (1)...(19): siRNA sense strand
aaccaacaccgacuacuua

SEQ ID NO: 1599472 - RNA, 19 nt, Homo sapiens
  misc_RNA (1)...(19): siRNA sense strand
aagcaaggcauccugauuu

SEQ ID NO: 1599473 - RNA, 19 nt, Homo sapiens
  misc_RNA (1)...(19): siRNA sense strand
gaaauguucaggacuucaa

SEQ ID NO: 1599474 - RNA, 19 nt, Homo sapiens
  misc_RNA (1)...(19): siRNA sense strand
agcaaggcauccugauuua

SEQ ID NO: 1599475 - RNA, 19 nt, Homo sapiens
  misc_RNA (1)...(19): siRNA sense strand
gauguacaauagaggauca

SEQ ID NO: 1599476 - RNA, 19 nt, Homo sapiens
  misc_RNA (1)...(19): siRNA sense strand
uuacuuugcuggauuucaa

SEQ ID NO: 1599477 - RNA, 19 nt, Homo sapiens
  misc_RNA (1)...(19): siRNA sense strand
ccugaugcuuugaauauug

SEQ ID NO: 1599478 - RNA, 19 nt, Homo sapiens
  misc_RNA (1)...(19): siRNA sense strand
ggacucauacuacacuuuc

SEQ ID NO: 1599479 - RNA, 19 nt, Homo sapiens
  misc_RNA (1)...(19): siRNA sense strand
auagaaggcucagcuuuga

SEQ ID NO: 1599480 - RNA, 19 nt, Homo sapiens
  misc_RNA (1)...(19): siRNA sense strand
gcuuggaccuggccugaug

SEQ ID NO: 1599481 - RNA, 19 nt, Homo sapiens
  misc_RNA (1)...(19): siRNA sense strand
cugaagaaaucaccaagau

SEQ ID NO: 1599482 - RNA, 19 nt, Homo sapiens
  misc_RNA (1)...(19): siRNA sense strand
aaauauaguuggguguuga

SEQ ID NO: 1599483 - RNA, 19 nt, Homo sapiens
  misc_RNA (1)...(19): siRNA sense strand
cuauuuauguugcacaaga

SEQ ID NO: 1599484 - RNA, 19 nt, Homo sapiens
  misc_RNA (1)...(19): siRNA sense strand
uacaauagaggaucacgua

SEQ ID NO: 1599485 - RNA, 19 nt, Homo sapiens
  misc_RNA (1)...(19): siRNA sense strand
ggccugaugcuuugaauau

SEQ ID NO: 1599486 - RNA, 19 nt, Homo sapiens
  misc_RNA (1)...(19): siRNA sense strand
gagucgggauguacaauag

SEQ ID NO: 1599487 - RNA, 19 nt, Homo sapiens
  misc_RNA (1)...(19): siRNA sense strand
gaaaaucaucucuugguuu

SEQ ID NO: 1599488 - RNA, 19 nt, Homo sapiens
  misc_RNA (1)...(19): siRNA sense strand
gaacuggccagaugcucuu

SEQ ID NO: 1599489 - RNA, 19 nt, Homo sapiens
  misc_RNA (1)...(19): siRNA sense strand
agaugaaguugacaagcua

SEQ ID NO: 1599490 - RNA, 19 nt, Homo sapiens
  misc_RNA (1)...(19): siRNA sense strand
ugcaggaaauguagaagaa

SEQ ID NO: 1599491 - RNA, 19 nt, Homo sapiens
  misc_RNA (1)...(19): siRNA sense strand
auaaaggauuucccucuug

SEQ ID NO: 1599492 - RNA, 19 nt, Homo sapiens
  misc_RNA (1)...(19): siRNA sense strand
ggaaaaucaucucuugguu

SEQ ID NO: 1599493 - RNA, 19 nt, Homo sapiens
  misc_RNA (1)...(19): siRNA sense strand
cguaauugcaggaaaugua

SEQ ID NO: 1599494 - RNA, 19 nt, Homo sapiens
  misc_RNA (1)...(19): siRNA sense strand
caccgacuacuuagaauuu

SEQ ID NO: 1599495 - RNA, 19 nt, Homo sapiens
  misc_RNA (1)...(19): siRNA sense strand
caaggcauccugauuuaca

SEQ ID NO: 1599496 - RNA, 19 nt, Homo sapiens
  misc_RNA (1)...(19): siRNA sense strand
gcucaaggacucauacuac

SEQ ID NO: 1599497 - RNA, 19 nt, Homo sapiens
  misc_RNA (1)...(19): siRNA sense strand
uagaauuugugaaggguau

SEQ ID NO: 1599498 - RNA, 19 nt, Homo sapiens
  misc_RNA (1)...(19): siRNA sense strand
aaaaucaucucuugguuug

SEQ ID NO: 1599499 - RNA, 19 nt, Homo sapiens
  misc_RNA (1)...(19): siRNA sense strand
caauagaggaucacguaau

SEQ ID NO: 1599500 - RNA, 19 nt, Homo sapiens
  misc_RNA (1)...(19): siRNA sense strand
ccucauuacugccaaucuu

SEQ ID NO: 1599501 - RNA, 19 nt, Homo sapiens
  misc_RNA (1)...(19): siRNA sense strand
cagaugaaguugacaagcu

SEQ ID NO: 1599502 - RNA, 19 nt, Homo sapiens
  misc_RNA (1)...(19): siRNA sense strand
caacaauuucucugaagga

SEQ ID NO: 1599503 - RNA, 19 nt, Homo sapiens
  misc_RNA (1)...(19): siRNA sense strand
ugggaaauauucugaugau

SEQ ID NO: 1599504 - RNA, 19 nt, Homo sapiens
  misc_RNA (1)...(19): siRNA sense strand
ggacuucccacacugucaa

SEQ ID NO: 1599505 - RNA, 19 nt, Homo sapiens
  misc_RNA (1)...(19): siRNA sense strand
gucgaaauguucaggacuu

SEQ ID NO: 1599506 - RNA, 19 nt, Homo sapiens
  misc_RNA (1)...(19): siRNA sense strand
gacaaagcuguuauuauuc

SEQ ID NO: 1599507 - RNA, 19 nt, Homo sapiens
  misc_RNA (1)...(19): siRNA sense strand
aaauagaaggcucagcuuu

SEQ ID NO: 1599508 - RNA, 19 nt, Homo sapiens
  misc_RNA (1)...(19): siRNA sense strand
caucuacuacaaccaauga

SEQ ID NO: 1599509 - RNA, 19 nt, Homo sapiens
  misc_RNA (1)...(19): siRNA sense strand
gauuucaagaugacaguuu

SEQ ID NO: 1599510 - RNA, 19 nt, Homo sapiens
  misc_RNA (1)...(19): siRNA sense strand
gaauuugugaaggguauuu

SEQ ID NO: 1599511 - RNA, 19 nt, Homo sapiens
  misc_RNA (1)...(19): siRNA sense strand
aauagaaggcucagcuuug

SEQ ID NO: 1599512 - RNA, 19 nt, Homo sapiens
  misc_RNA (1)...(19): siRNA sense strand
guagaugucagcauaaagg

SEQ ID NO: 1599513 - RNA, 19 nt, Homo sapiens
  misc_RNA (1)...(19): siRNA sense strand
guaauugcaggaaauguag

SEQ ID NO: 1599514 - RNA, 19 nt, Homo sapiens
  misc_RNA (1)...(19): siRNA sense strand
uagacuugguggagaaaga

SEQ ID NO: 1599515 - RNA, 19 nt, Homo sapiens
  misc_RNA (1)...(19): siRNA sense strand
guacaguuuacaauucuga

SEQ ID NO: 1599516 - RNA, 19 nt, Homo sapiens
  misc_RNA (1)...(19): siRNA sense strand
auugagaacuggccagaug

SEQ ID NO: 1599517 - RNA, 19 nt, Homo sapiens
  misc_RNA (1)...(19): siRNA sense strand
acaguuugauuuacaugga

SEQ ID NO: 1599518 - RNA, 19 nt, Homo sapiens
  misc_RNA (1)...(19): siRNA sense strand
ccuaaacagucauauuacu

SEQ ID NO: 1599519 - RNA, 19 nt, Homo sapiens
  misc_RNA (1)...(19): siRNA sense strand
cuacuuagaauuugugaag

SEQ ID NO: 1599520 - RNA, 19 nt, Homo sapiens
  misc_RNA (1)...(19): siRNA sense strand
uaaugcagaugacaaagcu

SEQ ID NO: 1599521 - RNA, 19 nt, Homo sapiens
  misc_RNA (1)...(19): siRNA sense strand
ugauaaugcagaugacaaa

SEQ ID NO: 1599522 - RNA, 19 nt, Homo sapiens
  misc_RNA (1)...(19): siRNA sense strand
uacaggaacagaugaaguu

SEQ ID NO: 1599523 - RNA, 19 nt, Homo sapiens
  misc_RNA (1)...(19): siRNA sense strand
ugaaaugcgaaaugaaguu

SEQ ID NO: 1599524 - RNA, 19 nt, Homo sapiens
  misc_RNA (1)...(19): siRNA sense strand
caauugggaaauauucuga

SEQ ID NO: 1599525 - RNA, 19 nt, Homo sapiens
  misc_RNA (1)...(19): siRNA sense strand
cugaugcuuugaauauuga

SEQ ID NO: 1599526 - RNA, 19 nt, Homo sapiens
  misc_RNA (1)...(19): siRNA sense strand
cuuggaacaacaugaaaua

SEQ ID NO: 1599527 - RNA, 19 nt, Homo sapiens
  misc_RNA (1)...(19): siRNA sense strand
cuacuacaaccaaugaaga

SEQ ID NO: 1599528 - RNA, 19 nt, Homo sapiens
  misc_RNA (1)...(19): siRNA sense strand
uuccaugacuucugauaau

SEQ ID NO: 1599529 - RNA, 19 nt, Homo sapiens
  misc_RNA (1)...(19): siRNA sense strand
caugaaaugcgaaaugaag

SEQ ID NO: 1599530 - RNA, 19 nt, Homo sapiens
  misc_RNA (1)...(19): siRNA sense strand
gcaaaccgcucaucuauaa

SEQ ID NO: 1599531 - RNA, 19 nt, Homo sapiens
  misc_RNA (1)...(19): siRNA sense strand
caucaagucuggagaaaga

SEQ ID NO: 1599532 - RNA, 19 nt, Homo sapiens
  misc_RNA (1)...(19): siRNA sense strand
caacauuacaguucucaua

SEQ ID NO: 1599533 - RNA, 19 nt, Homo sapiens
  misc_RNA (1)...(19): siRNA sense strand
gagaaucacuuugucauag

SEQ ID NO: 1599534 - RNA, 19 nt, Homo sapiens
  misc_RNA (1)...(19): siRNA sense strand
gaaagcaacauuacaguuc

SEQ ID NO: 1599535 - RNA, 19 nt, Homo sapiens
  misc_RNA (1)...(19): siRNA sense strand
gcaaggcugugaccaagau

SEQ ID NO: 1599536 - RNA, 19 nt, Homo sapiens
  misc_RNA (1)...(19): siRNA sense strand
ccacgagaaagcaacauua

SEQ ID NO: 1599537 - RNA, 19 nt, Homo sapiens
  misc_RNA (1)...(19): siRNA sense strand
ugaccaagaugcccaaagu

SEQ ID NO: 1599538 - RNA, 19 nt, Homo sapiens
  misc_RNA (1)...(19): siRNA sense strand
gaauagucuuuaccuuuag

SEQ ID NO: 1599539 - RNA, 19 nt, Homo sapiens
  misc_RNA (1)...(19): siRNA sense strand
ggcagaagcuuuugagauu

SEQ ID NO: 1599540 - RNA, 19 nt, Homo sapiens
  misc_RNA (1)...(19): siRNA sense strand
caucaucgagucuguguuu

SEQ ID NO: 1599541 - RNA, 19 nt, Homo sapiens
  misc_RNA (1)...(19): siRNA sense strand
cggcugcaguuccaaguuu

SEQ ID NO: 1599542 - RNA, 19 nt, Homo sapiens
  misc_RNA (1)...(19): siRNA sense strand
ggaaccuucugcagcaaug

SEQ ID NO: 1599543 - RNA, 19 nt, Homo sapiens
  misc_RNA (1)...(19): siRNA sense strand
ugagaaucacuuugucaua

SEQ ID NO: 1599544 - RNA, 19 nt, Homo sapiens
  misc_RNA (1)...(19): siRNA sense strand
gaugcaagaaggagugaaa

SEQ ID NO: 1599545 - RNA, 19 nt, Homo sapiens
  misc_RNA (1)...(19): siRNA sense strand
guuacaucgucauuucuaa

SEQ ID NO: 1599546 - RNA, 19 nt, Homo sapiens
  misc_RNA (1)...(19): siRNA sense strand
agaaucacuuugucauaga

SEQ ID NO: 1599547 - RNA, 19 nt, Homo sapiens
  misc_RNA (1)...(19): siRNA sense strand
ccuguuacaucgucauuuc

SEQ ID NO: 1599548 - RNA, 19 nt, Homo sapiens
  misc_RNA (1)...(19): siRNA sense strand
aggaggagcggguugaaua

SEQ ID NO: 1599549 - RNA, 19 nt, Homo sapiens
  misc_RNA (1)...(19): siRNA sense strand
cauuacaguucucauaaag

SEQ ID NO: 1599550 - RNA, 19 nt, Homo sapiens
  misc_RNA (1)...(19): siRNA sense strand
gcucaugacguggcaguuu

SEQ ID NO: 1599551 - RNA, 19 nt, Homo sapiens
  misc_RNA (1)...(19): siRNA sense strand
cauaagagcaucgguuuag

SEQ ID NO: 1599552 - RNA, 19 nt, Homo sapiens
  misc_RNA (1)...(19): siRNA sense strand
agaaaugucuccggcuuca

SEQ ID NO: 1599553 - RNA, 19 nt, Homo sapiens
  misc_RNA (1)...(19): siRNA sense strand
ggagcggguugaauacuac

SEQ ID NO: 1599554 - RNA, 19 nt, Homo sapiens
  misc_RNA (1)...(19): siRNA sense strand
ggaaggaggagcggguuga

SEQ ID NO: 1599555 - RNA, 19 nt, Homo sapiens
  misc_RNA (1)...(19): siRNA sense strand
gaugucaaagcucauaaga

SEQ ID NO: 1599556 - RNA, 19 nt, Homo sapiens
  misc_RNA (1)...(19): siRNA sense strand
caagucuggagaaagaaua

SEQ ID NO: 1599557 - RNA, 19 nt, Homo sapiens
  misc_RNA (1)...(19): siRNA sense strand
gaaucacuuugucauagag

SEQ ID NO: 1599558 - RNA, 19 nt, Homo sapiens
  misc_RNA (1)...(19): siRNA sense strand
gccagaguccugagaauca

SEQ ID NO: 1599559 - RNA, 19 nt, Homo sapiens
  misc_RNA (1)...(19): siRNA sense strand
caagcagccugggaacaug

SEQ ID NO: 1599560 - RNA, 19 nt, Homo sapiens
  misc_RNA (1)...(19): siRNA sense strand
gagaaagcaacauuacagu

SEQ ID NO: 1599561 - RNA, 19 nt, Homo sapiens
  misc_RNA (1)...(19): siRNA sense strand
gaucaagaugcaagaagga

SEQ ID NO: 1599562 - RNA, 19 nt, Homo sapiens
  misc_RNA (1)...(19): siRNA sense strand
ccuuacaccucccaugguu

SEQ ID NO: 1599563 - RNA, 19 nt, Homo sapiens
  misc_RNA (1)...(19): siRNA sense strand
ccugaugucugccaacuac

SEQ ID NO: 1599564 - RNA, 19 nt, Homo sapiens
  misc_RNA (1)...(19): siRNA sense strand
uuacaguucucauaaagcu

SEQ ID NO: 1599565 - RNA, 19 nt, Homo sapiens
  misc_RNA (1)...(19): siRNA sense strand
uaaccauguuguccaucaa

SEQ ID NO: 1599566 - RNA, 19 nt, Homo sapiens
  misc_RNA (1)...(19): siRNA sense strand
aggagcggguugaauacua

SEQ ID NO: 1599567 - RNA, 19 nt, Homo sapiens
  misc_RNA (1)...(19): siRNA sense strand
guuuagagcugcaguuuuc

SEQ ID NO: 1599568 - RNA, 19 nt, Homo sapiens
  misc_RNA (1)...(19): siRNA sense strand
ugucauagagauccagaaa

SEQ ID NO: 1599569 - RNA, 19 nt, Homo sapiens
  misc_RNA (1)...(19): siRNA sense strand
cgagaaagcaacauuacag

SEQ ID NO: 1599570 - RNA, 19 nt, Homo sapiens
  misc_RNA (1)...(19): siRNA sense strand
aaagcaacauuacaguucu

SEQ ID NO: 1599571 - RNA, 19 nt, Homo sapiens
  misc_RNA (1)...(19): siRNA sense strand
gaaggaggagcggguugaa

SEQ ID NO: 1599572 - RNA, 19 nt, Homo sapiens
  misc_RNA (1)...(19): siRNA sense strand
ucauaagagcaucgguuua

SEQ ID NO: 1599573 - RNA, 19 nt, Homo sapiens
  misc_RNA (1)...(19): siRNA sense strand
agaaagcaacauuacaguu

SEQ ID NO: 1599574 - RNA, 19 nt, Homo sapiens
  misc_RNA (1)...(19): siRNA sense strand
caacauccacaaaaugaaa

SEQ ID NO: 1599575 - RNA, 19 nt, Homo sapiens
  misc_RNA (1)...(19): siRNA sense strand
gcagaagcuuuugagauug

SEQ ID NO: 1599576 - RNA, 19 nt, Homo sapiens
  misc_RNA (1)...(19): siRNA sense strand
gguccaacauccacaaaau

SEQ ID NO: 1599577 - RNA, 19 nt, Homo sapiens
  misc_RNA (1)...(19): siRNA sense strand
uugcaaaccgcucaucuau

SEQ ID NO: 1599578 - RNA, 19 nt, Homo sapiens
  misc_RNA (1)...(19): siRNA sense strand
auaaccauguuguccauca

SEQ ID NO: 1599579 - RNA, 19 nt, Homo sapiens
  misc_RNA (1)...(19): siRNA sense strand
uguucaagcuggaggacaa

SEQ ID NO: 1599580 - RNA, 19 nt, Homo sapiens
  misc_RNA (1)...(19): siRNA sense strand
gcaagaaggagugaaaaug

SEQ ID NO: 1599581 - RNA, 19 nt, Homo sapiens
  misc_RNA (1)...(19): siRNA sense strand
caucgagucuguguuugag

SEQ ID NO: 1599582 - RNA, 19 nt, Homo sapiens
  misc_RNA (1)...(19): siRNA sense strand
ggaggagcggguugaauac

SEQ ID NO: 1599583 - RNA, 19 nt, Homo sapiens
  misc_RNA (1)...(19): siRNA sense strand
auaagagcaucgguuuaga

SEQ ID NO: 1599584 - RNA, 19 nt, Homo sapiens
  misc_RNA (1)...(19): siRNA sense strand
cucaugacguggcaguuug

SEQ ID NO: 1599585 - RNA, 19 nt, Homo sapiens
  misc_RNA (1)...(19): siRNA sense strand
caucgucauuucuaaaaga

SEQ ID NO: 1599586 - RNA, 19 nt, Homo sapiens
  misc_RNA (1)...(19): siRNA sense strand
ugcaaaccgcucaucuaua

SEQ ID NO: 1599587 - RNA, 19 nt, Homo sapiens
  misc_RNA (1)...(19): siRNA sense strand
ggcacugugucccggauca

SEQ ID NO: 1599588 - RNA, 19 nt, Homo sapiens
  misc_RNA (1)...(19): siRNA sense strand
guccugagaaucacuuugu

SEQ ID NO: 1599589 - RNA, 19 nt, Homo sapiens
  misc_RNA (1)...(19): siRNA sense strand
ucaucgagucuguguuuga

SEQ ID NO: 1599590 - RNA, 19 nt, Homo sapiens
  misc_RNA (1)...(19): siRNA sense strand
uaagagcaucgguuuagag

SEQ ID NO: 1599591 - RNA, 19 nt, Homo sapiens
  misc_RNA (1)...(19): siRNA sense strand
gggaugucaaagcucauaa

SEQ ID NO: 1599592 - RNA, 19 nt, Homo sapiens
  misc_RNA (1)...(19): siRNA sense strand
gccacgagaaagcaacauu

SEQ ID NO: 1599593 - RNA, 19 nt, Homo sapiens
  misc_RNA (1)...(19): siRNA sense strand
gcaaaccgcucaucuauaa

SEQ ID NO: 1599594 - RNA, 19 nt, Homo sapiens
  misc_RNA (1)...(19): siRNA sense strand
caucaagucuggagaaaga

SEQ ID NO: 1599595 - RNA, 19 nt, Homo sapiens
  misc_RNA (1)...(19): siRNA sense strand
caacauuacaguucucaua

SEQ ID NO: 1599596 - RNA, 19 nt, Homo sapiens
  misc_RNA (1)...(19): siRNA sense strand
gagaaucacuuugucauag

SEQ ID NO: 1599597 - RNA, 19 nt, Homo sapiens
  misc_RNA (1)...(19): siRNA sense strand
gaaagcaacauuacaguuc

SEQ ID NO: 1599598 - RNA, 19 nt, Homo sapiens
  misc_RNA (1)...(19): siRNA sense strand
gcaaggcugugaccaagau

SEQ ID NO: 1599599 - RNA, 19 nt, Homo sapiens
  misc_RNA (1)...(19): siRNA sense strand
ccacgagaaagcaacauua

SEQ ID NO: 1599600 - RNA, 19 nt, Homo sapiens
  misc_RNA (1)...(19): siRNA sense strand
ugaccaagaugcccaaagu

SEQ ID NO: 1599601 - RNA, 19 nt, Homo sapiens
  misc_RNA (1)...(19): siRNA sense strand
gaauagucuuuaccuuuag

SEQ ID NO: 1599602 - RNA, 19 nt, Homo sapiens
  misc_RNA (1)...(19): siRNA sense strand
ggcagaagcuuuugagauu

SEQ ID NO: 1599603 - RNA, 19 nt, Homo sapiens
  misc_RNA (1)...(19): siRNA sense strand
caucaucgagucuguguuu

SEQ ID NO: 1599604 - RNA, 19 nt, Homo sapiens
  misc_RNA (1)...(19): siRNA sense strand
cggcugcaguuccaaguuu

SEQ ID NO: 1599605 - RNA, 19 nt, Homo sapiens
  misc_RNA (1)...(19): siRNA sense strand
ggaaccuucugcagcaaug

SEQ ID NO: 1599606 - RNA, 19 nt, Homo sapiens
  misc_RNA (1)...(19): siRNA sense strand
ugagaaucacuuugucaua

SEQ ID NO: 1599607 - RNA, 19 nt, Homo sapiens
  misc_RNA (1)...(19): siRNA sense strand
gaugcaagaaggagugaaa

SEQ ID NO: 1599608 - RNA, 19 nt, Homo sapiens
  misc_RNA (1)...(19): siRNA sense strand
guuacaucgucauuucuaa

SEQ ID NO: 1599609 - RNA, 19 nt, Homo sapiens
  misc_RNA (1)...(19): siRNA sense strand
agaaucacuuugucauaga

SEQ ID NO: 1599610 - RNA, 19 nt, Homo sapiens
  misc_RNA (1)...(19): siRNA sense strand
ccuguuacaucgucauuuc

SEQ ID NO: 1599611 - RNA, 19 nt, Homo sapiens
  misc_RNA (1)...(19): siRNA sense strand
aggaggagcggguugaaua

SEQ ID NO: 1599612 - RNA, 19 nt, Homo sapiens
  misc_RNA (1)...(19): siRNA sense strand
cauuacaguucucauaaag

SEQ ID NO: 1599613 - RNA, 19 nt, Homo sapiens
  misc_RNA (1)...(19): siRNA sense strand
gcucaugacguggcaguuu

SEQ ID NO: 1599614 - RNA, 19 nt, Homo sapiens
  misc_RNA (1)...(19): siRNA sense strand
cauaagagcaucgguuuag

SEQ ID NO: 1599615 - RNA, 19 nt, Homo sapiens
  misc_RNA (1)...(19): siRNA sense strand
agaaaugucuccggcuuca

SEQ ID NO: 1599616 - RNA, 19 nt, Homo sapiens
  misc_RNA (1)...(19): siRNA sense strand
ggagcggguugaauacuac

SEQ ID NO: 1599617 - RNA, 19 nt, Homo sapiens
  misc_RNA (1)...(19): siRNA sense strand
ggaaggaggagcggguuga

SEQ ID NO: 1599618 - RNA, 19 nt, Homo sapiens
  misc_RNA (1)...(19): siRNA sense strand
gaugucaaagcucauaaga

SEQ ID NO: 1599619 - RNA, 19 nt, Homo sapiens
  misc_RNA (1)...(19): siRNA sense strand
caagucuggagaaagaaua

SEQ ID NO: 1599620 - RNA, 19 nt, Homo sapiens
  misc_RNA (1)...(19): siRNA sense strand
gaaucacuuugucauagag

SEQ ID NO: 1599621 - RNA, 19 nt, Homo sapiens
  misc_RNA (1)...(19): siRNA sense strand
gccagaguccugagaauca

SEQ ID NO: 1599622 - RNA, 19 nt, Homo sapiens
  misc_RNA (1)...(19): siRNA sense strand
caagcagccugggaacaug

SEQ ID NO: 1599623 - RNA, 19 nt, Homo sapiens
  misc_RNA (1)...(19): siRNA sense strand
gagaaagcaacauuacagu

SEQ ID NO: 1599624 - RNA, 19 nt, Homo sapiens
  misc_RNA (1)...(19): siRNA sense strand
gaucaagaugcaagaagga

SEQ ID NO: 1599625 - RNA, 19 nt, Homo sapiens
  misc_RNA (1)...(19): siRNA sense strand
ccuuacaccucccaugguu

SEQ ID NO: 1599626 - RNA, 19 nt, Homo sapiens
  misc_RNA (1)...(19): siRNA sense strand
ccugaugucugccaacuac

SEQ ID NO: 1599627 - RNA, 19 nt, Homo sapiens
  misc_RNA (1)...(19): siRNA sense strand
uuacaguucucauaaagcu

SEQ ID NO: 1599628 - RNA, 19 nt, Homo sapiens
  misc_RNA (1)...(19): siRNA sense strand
uaaccauguuguccaucaa

SEQ ID NO: 1599629 - RNA, 19 nt, Homo sapiens
  misc_RNA (1)...(19): siRNA sense strand
aggagcggguugaauacua

SEQ ID NO: 1599630 - RNA, 19 nt, Homo sapiens
  misc_RNA (1)...(19): siRNA sense strand
guuuagagcugcaguuuuc

SEQ ID NO: 1599631 - RNA, 19 nt, Homo sapiens
  misc_RNA (1)...(19): siRNA sense strand
ugucauagagauccagaaa

SEQ ID NO: 1599632 - RNA, 19 nt, Homo sapiens
  misc_RNA (1)...(19): siRNA sense strand
cgagaaagcaacauuacag

SEQ ID NO: 1599633 - RNA, 19 nt, Homo sapiens
  misc_RNA (1)...(19): siRNA sense strand
aaagcaacauuacaguucu

SEQ ID NO: 1599634 - RNA, 19 nt, Homo sapiens
  misc_RNA (1)...(19): siRNA sense strand
gaaggaggagcggguugaa

SEQ ID NO: 1599635 - RNA, 19 nt, Homo sapiens
  misc_RNA (1)...(19): siRNA sense strand
ucauaagagcaucgguuua

SEQ ID NO: 1599636 - RNA, 19 nt, Homo sapiens
  misc_RNA (1)...(19): siRNA sense strand
agaaagcaacauuacaguu

SEQ ID NO: 1599637 - RNA, 19 nt, Homo sapiens
  misc_RNA (1)...(19): siRNA sense strand
caacauccacaaaaugaaa

SEQ ID NO: 1599638 - RNA, 19 nt, Homo sapiens
  misc_RNA (1)...(19): siRNA sense strand
gcagaagcuuuugagauug

SEQ ID NO: 1599639 - RNA, 19 nt, Homo sapiens
  misc_RNA (1)...(19): siRNA sense strand
gguccaacauccacaaaau

SEQ ID NO: 1599640 - RNA, 19 nt, Homo sapiens
  misc_RNA (1)...(19): siRNA sense strand
uugcaaaccgcucaucuau

SEQ ID NO: 1599641 - RNA, 19 nt, Homo sapiens
  misc_RNA (1)...(19): siRNA sense strand
auaaccauguuguccauca

SEQ ID NO: 1599642 - RNA, 19 nt, Homo sapiens
  misc_RNA (1)...(19): siRNA sense strand
uguucaagcuggaggacaa

SEQ ID NO: 1599643 - RNA, 19 nt, Homo sapiens
  misc_RNA (1)...(19): siRNA sense strand
gcaagaaggagugaaaaug

SEQ ID NO: 1599644 - RNA, 19 nt, Homo sapiens
  misc_RNA (1)...(19): siRNA sense strand
caucgagucuguguuugag

SEQ ID NO: 1599645 - RNA, 19 nt, Homo sapiens
  misc_RNA (1)...(19): siRNA sense strand
ggaggagcggguugaauac

SEQ ID NO: 1599646 - RNA, 19 nt, Homo sapiens
  misc_RNA (1)...(19): siRNA sense strand
auaagagcaucgguuuaga

SEQ ID NO: 1599647 - RNA, 19 nt, Homo sapiens
  misc_RNA (1)...(19): siRNA sense strand
cucaugacguggcaguuug

SEQ ID NO: 1599648 - RNA, 19 nt, Homo sapiens
  misc_RNA (1)...(19): siRNA sense strand
caucgucauuucuaaaaga

SEQ ID NO: 1599649 - RNA, 19 nt, Homo sapiens
  misc_RNA (1)...(19): siRNA sense strand
ugcaaaccgcucaucuaua

SEQ ID NO: 1599650 - RNA, 19 nt, Homo sapiens
  misc_RNA (1)...(19): siRNA sense strand
ggcacugugucccggauca

SEQ ID NO: 1599651 - RNA, 19 nt, Homo sapiens
  misc_RNA (1)...(19): siRNA sense strand
guccugagaaucacuuugu

SEQ ID NO: 1599652 - RNA, 19 nt, Homo sapiens
  misc_RNA (1)...(19): siRNA sense strand
ucaucgagucuguguuuga

SEQ ID NO: 1599653 - RNA, 19 nt, Homo sapiens
  misc_RNA (1)...(19): siRNA sense strand
uaagagcaucgguuuagag

SEQ ID NO: 1599654 - RNA, 19 nt, Homo sapiens
  misc_RNA (1)...(19): siRNA sense strand
gggaugucaaagcucauaa

SEQ ID NO: 1599655 - RNA, 19 nt, Homo sapiens
  misc_RNA (1)...(19): siRNA sense strand
gccacgagaaagcaacauu

SEQ ID NO: 1599656 - RNA, 19 nt, Homo sapiens
  misc_RNA (1)...(19): siRNA sense strand
gaagaaaucguucaucaua

SEQ ID NO: 1599657 - RNA, 19 nt, Homo sapiens
  misc_RNA (1)...(19): siRNA sense strand
gagaacaacuggcagcuuu

SEQ ID NO: 1599658 - RNA, 19 nt, Homo sapiens
  misc_RNA (1)...(19): siRNA sense strand
aagaagaaaucguucauca

SEQ ID NO: 1599659 - RNA, 19 nt, Homo sapiens
  misc_RNA (1)...(19): siRNA sense strand
gaacaacuggcagcuuuga

SEQ ID NO: 1599660 - RNA, 19 nt, Homo sapiens
  misc_RNA (1)...(19): siRNA sense strand
agaaaucguucaucauaag

SEQ ID NO: 1599661 - RNA, 19 nt, Homo sapiens
  misc_RNA (1)...(19): siRNA sense strand
gaaaucguucaucauaaga

SEQ ID NO: 1599662 - RNA, 19 nt, Homo sapiens
  misc_RNA (1)...(19): siRNA sense strand
agagagagcaggcugaaga

SEQ ID NO: 1599663 - RNA, 19 nt, Homo sapiens
  misc_RNA (1)...(19): siRNA sense strand
gaaauugagcgccauaagc

SEQ ID NO: 1599664 - RNA, 19 nt, Homo sapiens
  misc_RNA (1)...(19): siRNA sense strand
agagcaggcugaagaggaa

SEQ ID NO: 1599665 - RNA, 19 nt, Homo sapiens
  misc_RNA (1)...(19): siRNA sense strand
gccauaagcagaagaucaa

SEQ ID NO: 1599666 - RNA, 19 nt, Homo sapiens
  misc_RNA (1)...(19): siRNA sense strand
gagcgucugcagaaagaaa

SEQ ID NO: 1599667 - RNA, 19 nt, Homo sapiens
  misc_RNA (1)...(19): siRNA sense strand
gaagaagaaaucguucauc

SEQ ID NO: 1599668 - RNA, 19 nt, Homo sapiens
  misc_RNA (1)...(19): siRNA sense strand
gauugagcgucugcagaaa

SEQ ID NO: 1599669 - RNA, 19 nt, Homo sapiens
  misc_RNA (1)...(19): siRNA sense strand
ugaagaggaacgauauuuc

SEQ ID NO: 1599670 - RNA, 19 nt, Homo sapiens
  misc_RNA (1)...(19): siRNA sense strand
ccaugaagaagaaaucguu

SEQ ID NO: 1599671 - RNA, 19 nt, Homo sapiens
  misc_RNA (1)...(19): siRNA sense strand
acaacuggcagcuuugaaa

SEQ ID NO: 1599672 - RNA, 19 nt, Homo sapiens
  misc_RNA (1)...(19): siRNA sense strand
aaagaaauugagcgccaua

SEQ ID NO: 1599673 - RNA, 19 nt, Homo sapiens
  misc_RNA (1)...(19): siRNA sense strand
aaauugagcgccauaagca

SEQ ID NO: 1599674 - RNA, 19 nt, Homo sapiens
  misc_RNA (1)...(19): siRNA sense strand
gcacagaguagagaacaac

SEQ ID NO: 1599675 - RNA, 19 nt, Homo sapiens
  misc_RNA (1)...(19): siRNA sense strand
gagcacagaguagagaaca

SEQ ID NO: 1599676 - RNA, 19 nt, Homo sapiens
  misc_RNA (1)...(19): siRNA sense strand
agauugagcgucugcagaa

SEQ ID NO: 1599677 - RNA, 19 nt, Homo sapiens
  misc_RNA (1)...(19): siRNA sense strand
uugagcgucugcagaaaga

SEQ ID NO: 1599678 - RNA, 19 nt, Homo sapiens
  misc_RNA (1)...(19): siRNA sense strand
cugaagaggaacgauauuu

SEQ ID NO: 1599679 - RNA, 19 nt, Homo sapiens
  misc_RNA (1)...(19): siRNA sense strand
aaaacaccaugaagaagaa

SEQ ID NO: 1599680 - RNA, 19 nt, Homo sapiens
  misc_RNA (1)...(19): siRNA sense strand
caucauaagaaggagauug

SEQ ID NO: 1599681 - RNA, 19 nt, Homo sapiens
  misc_RNA (1)...(19): siRNA sense strand
gcugaagaggaacgauauu

SEQ ID NO: 1599682 - RNA, 19 nt, Homo sapiens
  misc_RNA (1)...(19): siRNA sense strand
cagaagaucaaaaugcuaa

SEQ ID NO: 1599683 - RNA, 19 nt, Homo sapiens
  misc_RNA (1)...(19): siRNA sense strand
aaagagagagcaggcugaa

SEQ ID NO: 1599684 - RNA, 19 nt, Homo sapiens
  misc_RNA (1)...(19): siRNA sense strand
aaucguucaucauaagaag

SEQ ID NO: 1599685 - RNA, 19 nt, Homo sapiens
  misc_RNA (1)...(19): siRNA sense strand
ggcugaagaggaacgauau

SEQ ID NO: 1599686 - RNA, 19 nt, Homo sapiens
  misc_RNA (1)...(19): siRNA sense strand
agagagagcaggcugaaga

SEQ ID NO: 1599687 - RNA, 19 nt, Homo sapiens
  misc_RNA (1)...(19): siRNA sense strand
agagcaggcugaagaggaa

SEQ ID NO: 1599688 - RNA, 19 nt, Homo sapiens
  misc_RNA (1)...(19): siRNA sense strand
ugaagaggaacgauauuuc

SEQ ID NO: 1599689 - RNA, 19 nt, Homo sapiens
  misc_RNA (1)...(19): siRNA sense strand
cugaagaggaacgauauuu

SEQ ID NO: 1599690 - RNA, 19 nt, Homo sapiens
  misc_RNA (1)...(19): siRNA sense strand
gcugaagaggaacgauauu

SEQ ID NO: 1599691 - RNA, 19 nt, Homo sapiens
  misc_RNA (1)...(19): siRNA sense strand
aaagagagagcaggcugaa

SEQ ID NO: 1599692 - RNA, 19 nt, Homo sapiens
  misc_RNA (1)...(19): siRNA sense strand
ggcugaagaggaacgauau

SEQ ID NO: 1599693 - RNA, 19 nt, Homo sapiens
  misc_RNA (1)...(19): siRNA sense strand
agagagagcaggcugaaga

SEQ ID NO: 1599694 - RNA, 19 nt, Homo sapiens
  misc_RNA (1)...(19): siRNA sense strand
agagcaggcugaagaggaa

SEQ ID NO: 1599695 - RNA, 19 nt, Homo sapiens
  misc_RNA (1)...(19): siRNA sense strand
ugaagaggaacgauauuuc

SEQ ID NO: 1599696 - RNA, 19 nt, Homo sapiens
  misc_RNA (1)...(19): siRNA sense strand
cugaagaggaacgauauuu

SEQ ID NO: 1599697 - RNA, 19 nt, Homo sapiens
  misc_RNA (1)...(19): siRNA sense strand
gcugaagaggaacgauauu

SEQ ID NO: 1599698 - RNA, 19 nt, Homo sapiens
  misc_RNA (1)...(19): siRNA sense strand
aaagagagagcaggcugaa

SEQ ID NO: 1599699 - RNA, 19 nt, Homo sapiens
  misc_RNA (1)...(19): siRNA sense strand
ggcugaagaggaacgauau

SEQ ID NO: 1599700 - RNA, 19 nt, Homo sapiens
  misc_RNA (1)...(19): siRNA sense strand
ggagagagauuuucuuaaa

SEQ ID NO: 1599701 - RNA, 19 nt, Homo sapiens
  misc_RNA (1)...(19): siRNA sense strand
ggaaauauugggaaguaua

SEQ ID NO: 1599702 - RNA, 19 nt, Homo sapiens
  misc_RNA (1)...(19): siRNA sense strand
ugauggcacuucucaaaua

SEQ ID NO: 1599703 - RNA, 19 nt, Homo sapiens
  misc_RNA (1)...(19): siRNA sense strand
gaaguaauguucuuaaacg

SEQ ID NO: 1599704 - RNA, 19 nt, Homo sapiens
  misc_RNA (1)...(19): siRNA sense strand
gaauauaucacccauaauc

SEQ ID NO: 1599705 - RNA, 19 nt, Homo sapiens
  misc_RNA (1)...(19): siRNA sense strand
uaagugaccuaaaguggaa

SEQ ID NO: 1599706 - RNA, 19 nt, Homo sapiens
  misc_RNA (1)...(19): siRNA sense strand
guccauauguuugcaguua

SEQ ID NO: 1599707 - RNA, 19 nt, Homo sapiens
  misc_RNA (1)...(19): siRNA sense strand
aaacagagcaucauaaugg

SEQ ID NO: 1599708 - RNA, 19 nt, Homo sapiens
  misc_RNA (1)...(19): siRNA sense strand
gcaguuaacauguuucgaa

SEQ ID NO: 1599709 - RNA, 19 nt, Homo sapiens
  misc_RNA (1)...(19): siRNA sense strand
gcgaagaaauauauugauc

SEQ ID NO: 1599710 - RNA, 19 nt, Homo sapiens
  misc_RNA (1)...(19): siRNA sense strand
ggaagaugaaccaacguua

SEQ ID NO: 1599711 - RNA, 19 nt, Homo sapiens
  misc_RNA (1)...(19): siRNA sense strand
cuugagagcuuacaucaga

SEQ ID NO: 1599712 - RNA, 19 nt, Homo sapiens
  misc_RNA (1)...(19): siRNA sense strand
caucagaauuugugaagau

SEQ ID NO: 1599713 - RNA, 19 nt, Homo sapiens
  misc_RNA (1)...(19): siRNA sense strand
gaaguaguccauauguuug

SEQ ID NO: 1599714 - RNA, 19 nt, Homo sapiens
  misc_RNA (1)...(19): siRNA sense strand
cagaguuacuggaaauauu

SEQ ID NO: 1599715 - RNA, 19 nt, Homo sapiens
  misc_RNA (1)...(19): siRNA sense strand
ugaaaucucugagugucua

SEQ ID NO: 1599716 - RNA, 19 nt, Homo sapiens
  misc_RNA (1)...(19): siRNA sense strand
agaaguaguccauauguuu

SEQ ID NO: 1599717 - RNA, 19 nt, Homo sapiens
  misc_RNA (1)...(19): siRNA sense strand
gaagcagccuggccucauc

SEQ ID NO: 1599718 - RNA, 19 nt, Homo sapiens
  misc_RNA (1)...(19): siRNA sense strand
ccagauuuccaaccuaaua

SEQ ID NO: 1599719 - RNA, 19 nt, Homo sapiens
  misc_RNA (1)...(19): siRNA sense strand
gaucagaaguuuguauugc

SEQ ID NO: 1599720 - RNA, 19 nt, Homo sapiens
  misc_RNA (1)...(19): siRNA sense strand
gaagaugaaccaacguuag

SEQ ID NO: 1599721 - RNA, 19 nt, Homo sapiens
  misc_RNA (1)...(19): siRNA sense strand
caucaugaguuuaaucagu

SEQ ID NO: 1599722 - RNA, 19 nt, Homo sapiens
  misc_RNA (1)...(19): siRNA sense strand
gaaacagagcaucauaaug

SEQ ID NO: 1599723 - RNA, 19 nt, Homo sapiens
  misc_RNA (1)...(19): siRNA sense strand
ggugauggcacuucucaaa

SEQ ID NO: 1599724 - RNA, 19 nt, Homo sapiens
  misc_RNA (1)...(19): siRNA sense strand
aaaccacccuucacagaau

SEQ ID NO: 1599725 - RNA, 19 nt, Homo sapiens
  misc_RNA (1)...(19): siRNA sense strand
uagcagaguuacuggaaau

SEQ ID NO: 1599726 - RNA, 19 nt, Homo sapiens
  misc_RNA (1)...(19): siRNA sense strand
cauugaaccaucagaauuu

SEQ ID NO: 1599727 - RNA, 19 nt, Homo sapiens
  misc_RNA (1)...(19): siRNA sense strand
uaaaguggaaggaaguaaa

SEQ ID NO: 1599728 - RNA, 19 nt, Homo sapiens
  misc_RNA (1)...(19): siRNA sense strand
cagaaguaguccauauguu

SEQ ID NO: 1599729 - RNA, 19 nt, Homo sapiens
  misc_RNA (1)...(19): siRNA sense strand
ccaccuuccuccaauccua

SEQ ID NO: 1599730 - RNA, 19 nt, Homo sapiens
  misc_RNA (1)...(19): siRNA sense strand
cuggaaauauugggaagua

SEQ ID NO: 1599731 - RNA, 19 nt, Homo sapiens
  misc_RNA (1)...(19): siRNA sense strand
gaaauuccuaggcuugaga

SEQ ID NO: 1599732 - RNA, 19 nt, Homo sapiens
  misc_RNA (1)...(19): siRNA sense strand
ucacagaaucuaugggaaa

SEQ ID NO: 1599733 - RNA, 19 nt, Homo sapiens
  misc_RNA (1)...(19): siRNA sense strand
aaagaagagcacaagauuu

SEQ ID NO: 1599734 - RNA, 19 nt, Homo sapiens
  misc_RNA (1)...(19): siRNA sense strand
ucaaagacccauuggaaca

SEQ ID NO: 1599735 - RNA, 19 nt, Homo sapiens
  misc_RNA (1)...(19): siRNA sense strand
gaagagauuuuagauguca

SEQ ID NO: 1599736 - RNA, 19 nt, Homo sapiens
  misc_RNA (1)...(19): siRNA sense strand
aaaacgagcugcuuuaagu

SEQ ID NO: 1599737 - RNA, 19 nt, Homo sapiens
  misc_RNA (1)...(19): siRNA sense strand
gauggcacuucucaaauac

SEQ ID NO: 1599738 - RNA, 19 nt, Homo sapiens
  misc_RNA (1)...(19): siRNA sense strand
ugaaacagagcaucauaau

SEQ ID NO: 1599739 - RNA, 19 nt, Homo sapiens
  misc_RNA (1)...(19): siRNA sense strand
gaucacagagccuauuuac

SEQ ID NO: 1599740 - RNA, 19 nt, Homo sapiens
  misc_RNA (1)...(19): siRNA sense strand
gcagaguuacuggaaauau

SEQ ID NO: 1599741 - RNA, 19 nt, Homo sapiens
  misc_RNA (1)...(19): siRNA sense strand
ugacaacgcagcgaagauu

SEQ ID NO: 1599742 - RNA, 19 nt, Homo sapiens
  misc_RNA (1)...(19): siRNA sense strand
gcaacucaaagacccauug

SEQ ID NO: 1599743 - RNA, 19 nt, Homo sapiens
  misc_RNA (1)...(19): siRNA sense strand
cgagcugcuuuaagugaaa

SEQ ID NO: 1599744 - RNA, 19 nt, Homo sapiens
  misc_RNA (1)...(19): siRNA sense strand
gcgaagauucugcccauca

SEQ ID NO: 1599745 - RNA, 19 nt, Homo sapiens
  misc_RNA (1)...(19): siRNA sense strand
aaccuaauauagcgaagaa

SEQ ID NO: 1599746 - RNA, 19 nt, Homo sapiens
  misc_RNA (1)...(19): siRNA sense strand
ucauugaaccaucagaauu

SEQ ID NO: 1599747 - RNA, 19 nt, Homo sapiens
  misc_RNA (1)...(19): siRNA sense strand
aucuacagcuuguuuauga

SEQ ID NO: 1599748 - RNA, 19 nt, Homo sapiens
  misc_RNA (1)...(19): siRNA sense strand
acucaaagacccauuggaa

SEQ ID NO: 1599749 - RNA, 19 nt, Homo sapiens
  misc_RNA (1)...(19): siRNA sense strand
cgaagauucugcccaucau

SEQ ID NO: 1599750 - RNA, 19 nt, Homo sapiens
  misc_RNA (1)...(19): siRNA sense strand
cuccagauuuccaaccuaa

SEQ ID NO: 1599751 - RNA, 19 nt, Homo sapiens
  misc_RNA (1)...(19): siRNA sense strand
guuugcaguuaacauguuu

SEQ ID NO: 1599752 - RNA, 19 nt, Homo sapiens
  misc_RNA (1)...(19): siRNA sense strand
caaagacccauuggaacaa

SEQ ID NO: 1599753 - RNA, 19 nt, Homo sapiens
  misc_RNA (1)...(19): siRNA sense strand
uuuagagucuccagauuuc

SEQ ID NO: 1599754 - RNA, 19 nt, Homo sapiens
  misc_RNA (1)...(19): siRNA sense strand
ccagaaguaguccauaugu

SEQ ID NO: 1599755 - RNA, 19 nt, Homo sapiens
  misc_RNA (1)...(19): siRNA sense strand
cacagaaucuaugggaaau

SEQ ID NO: 1599756 - RNA, 19 nt, Homo sapiens
  misc_RNA (1)...(19): siRNA sense strand
ccuaauauagcgaagaaau

SEQ ID NO: 1599757 - RNA, 19 nt, Homo sapiens
  misc_RNA (1)...(19): siRNA sense strand
gaaccaucagaauuuguga

SEQ ID NO: 1599758 - RNA, 19 nt, Homo sapiens
  misc_RNA (1)...(19): siRNA sense strand
cucaaauacuggccaaaga

SEQ ID NO: 1599759 - RNA, 19 nt, Homo sapiens
  misc_RNA (1)...(19): siRNA sense strand
aagaagagcacaagauuuu

SEQ ID NO: 1599760 - RNA, 19 nt, Homo sapiens
  misc_RNA (1)...(19): siRNA sense strand
ugcuuuaagugaaauggua

SEQ ID NO: 1599761 - RNA, 19 nt, Homo sapiens
  misc_RNA (1)...(19): siRNA sense strand
cagaauuugugaagaucau

SEQ ID NO: 1599762 - RNA, 19 nt, Homo sapiens
  misc_RNA (1)...(19): siRNA sense strand
ccucaucuacagcuuguuu

SEQ ID NO: 1599763 - RNA, 19 nt, Homo sapiens
  misc_RNA (1)...(19): siRNA sense strand
ggaauuugacccggaggaa

SEQ ID NO: 1599764 - RNA, 19 nt, Homo sapiens
  misc_RNA (1)...(19): siRNA sense strand
gagccuauuuacccagaag

SEQ ID NO: 1599765 - RNA, 19 nt, Homo sapiens
  misc_RNA (1)...(19): siRNA sense strand
caaagugaaaucucugagu

SEQ ID NO: 1599766 - RNA, 19 nt, Homo sapiens
  misc_RNA (1)...(19): siRNA sense strand
cauagcagaguuacuggaa

SEQ ID NO: 1599767 - RNA, 19 nt, Homo sapiens
  misc_RNA (1)...(19): siRNA sense strand
uaauggcauagcagaguua

SEQ ID NO: 1599768 - RNA, 19 nt, Homo sapiens
  misc_RNA (1)...(19): siRNA sense strand
ugaagauccucgggagaga

SEQ ID NO: 1599769 - RNA, 19 nt, Homo sapiens
  misc_RNA (1)...(19): siRNA sense strand
guagaauauaucacccaua

SEQ ID NO: 1599770 - RNA, 19 nt, Homo sapiens
  misc_RNA (1)...(19): siRNA sense strand
gauucugcccaucauguuu

SEQ ID NO: 1599771 - RNA, 19 nt, Homo sapiens
  misc_RNA (1)...(19): siRNA sense strand
gaagauucugcccaucaug

SEQ ID NO: 1599772 - RNA, 19 nt, Homo sapiens
  misc_RNA (1)...(19): siRNA sense strand
ucuuugacuuuguuucuga

SEQ ID NO: 1599773 - RNA, 19 nt, Homo sapiens
  misc_RNA (1)...(19): siRNA sense strand
ccagcuggcauacugugua

SEQ ID NO: 1599774 - RNA, 19 nt, Homo sapiens
  misc_RNA (1)...(19): siRNA sense strand
agaguuacuggaaauauug

SEQ ID NO: 1599775 - RNA, 19 nt, Homo sapiens
  misc_RNA (1)...(19): siRNA sense strand
gagcuuacaucagaaaaca

SEQ ID NO: 1599776 - RNA, 19 nt, Homo sapiens
  misc_RNA (1)...(19): siRNA sense strand
aaguuuguauugcagcuuu

SEQ ID NO: 1599777 - RNA, 19 nt, Homo sapiens
  misc_RNA (1)...(19): siRNA sense strand
ggccucaucuacagcuugu

SEQ ID NO: 1599778 - RNA, 19 nt, Homo sapiens
  misc_RNA (1)...(19): siRNA sense strand
aagaugaaccaacguuaga

SEQ ID NO: 1599779 - RNA, 19 nt, Homo sapiens
  misc_RNA (1)...(19): siRNA sense strand
gagcugcuuuaagugaaau

SEQ ID NO: 1599780 - RNA, 19 nt, Homo sapiens
  misc_RNA (1)...(19): siRNA sense strand
cauguuuccuuccuuguac

SEQ ID NO: 1599781 - RNA, 19 nt, Homo sapiens
  misc_RNA (1)...(19): siRNA sense strand
cagcuggcauacuguguag

SEQ ID NO: 1599782 - RNA, 19 nt, Homo sapiens
  misc_RNA (1)...(19): siRNA sense strand
cuacgggagcggaauuuga

SEQ ID NO: 1599783 - RNA, 19 nt, Homo sapiens
  misc_RNA (1)...(19): siRNA sense strand
caacuccaaugggccuuuc

SEQ ID NO: 1599784 - RNA, 19 nt, Homo sapiens
  misc_RNA (1)...(19): siRNA sense strand
acccagaaguaguccauau

SEQ ID NO: 1599785 - RNA, 19 nt, Homo sapiens
  misc_RNA (1)...(19): siRNA sense strand
ucaugaguuuaaucaguga

SEQ ID NO: 1599786 - RNA, 19 nt, Homo sapiens
  misc_RNA (1)...(19): siRNA sense strand
uuucgaacauuaccaccuu

SEQ ID NO: 1599787 - RNA, 19 nt, Homo sapiens
  misc_RNA (1)...(19): siRNA sense strand
auaauggcauagcagaguu

SEQ ID NO: 1599788 - RNA, 19 nt, Homo sapiens
  misc_RNA (1)...(19): siRNA sense strand
aaaagaagagcacaagauu

SEQ ID NO: 1599789 - RNA, 19 nt, Homo sapiens
  misc_RNA (1)...(19): siRNA sense strand
gugaucacagagccuauuu

SEQ ID NO: 1599790 - RNA, 19 nt, Homo sapiens
  misc_RNA (1)...(19): siRNA sense strand
ucauguuuccuuccuugua

SEQ ID NO: 1599791 - RNA, 19 nt, Homo sapiens
  misc_RNA (1)...(19): siRNA sense strand
ugggaaguauaauuaaugg

SEQ ID NO: 1599792 - RNA, 19 nt, Homo sapiens
  misc_RNA (1)...(19): siRNA sense strand
cgugguccuucuccauauu

SEQ ID NO: 1599793 - RNA, 19 nt, Homo sapiens
  misc_RNA (1)...(19): siRNA sense strand
gcugaucaagagaagcuuu

SEQ ID NO: 1599794 - RNA, 19 nt, Homo sapiens
  misc_RNA (1)...(19): siRNA sense strand
gcaucauaauggcauagca

SEQ ID NO: 1599795 - RNA, 19 nt, Homo sapiens
  misc_RNA (1)...(19): siRNA sense strand
gauccucgggagagagauu

SEQ ID NO: 1599796 - RNA, 19 nt, Homo sapiens
  misc_RNA (1)...(19): siRNA sense strand
gauuuccaaccuaauauag

SEQ ID NO: 1599797 - RNA, 19 nt, Homo sapiens
  misc_RNA (1)...(19): siRNA sense strand
gaugaaccaacguuagaag

SEQ ID NO: 1599798 - RNA, 19 nt, Homo sapiens
  misc_RNA (1)...(19): siRNA sense strand
cauaauggcauagcagagu

SEQ ID NO: 1599799 - RNA, 19 nt, Homo sapiens
  misc_RNA (1)...(19): siRNA sense strand
agaaguuacgucaguguug

SEQ ID NO: 1599800 - RNA, 19 nt, Homo sapiens
  misc_RNA (1)...(19): siRNA sense strand
ggagagagauuuucuuaaa

SEQ ID NO: 1599801 - RNA, 19 nt, Homo sapiens
  misc_RNA (1)...(19): siRNA sense strand
ggaaauauugggaaguaua

SEQ ID NO: 1599802 - RNA, 19 nt, Homo sapiens
  misc_RNA (1)...(19): siRNA sense strand
ugauggcacuucucaaaua

SEQ ID NO: 1599803 - RNA, 19 nt, Homo sapiens
  misc_RNA (1)...(19): siRNA sense strand
gaaguaauguucuuaaacg

SEQ ID NO: 1599804 - RNA, 19 nt, Homo sapiens
  misc_RNA (1)...(19): siRNA sense strand
gaauauaucacccauaauc

SEQ ID NO: 1599805 - RNA, 19 nt, Homo sapiens
  misc_RNA (1)...(19): siRNA sense strand
uaagugaccuaaaguggaa

SEQ ID NO: 1599806 - RNA, 19 nt, Homo sapiens
  misc_RNA (1)...(19): siRNA sense strand
guccauauguuugcaguua

SEQ ID NO: 1599807 - RNA, 19 nt, Homo sapiens
  misc_RNA (1)...(19): siRNA sense strand
aaacagagcaucauaaugg

SEQ ID NO: 1599808 - RNA, 19 nt, Homo sapiens
  misc_RNA (1)...(19): siRNA sense strand
gcaguuaacauguuucgaa

SEQ ID NO: 1599809 - RNA, 19 nt, Homo sapiens
  misc_RNA (1)...(19): siRNA sense strand
gcgaagaaauauauugauc

SEQ ID NO: 1599810 - RNA, 19 nt, Homo sapiens
  misc_RNA (1)...(19): siRNA sense strand
ggaagaugaaccaacguua

SEQ ID NO: 1599811 - RNA, 19 nt, Homo sapiens
  misc_RNA (1)...(19): siRNA sense strand
cuugagagcuuacaucaga

SEQ ID NO: 1599812 - RNA, 19 nt, Homo sapiens
  misc_RNA (1)...(19): siRNA sense strand
caucagaauuugugaagau

SEQ ID NO: 1599813 - RNA, 19 nt, Homo sapiens
  misc_RNA (1)...(19): siRNA sense strand
gaaguaguccauauguuug

SEQ ID NO: 1599814 - RNA, 19 nt, Homo sapiens
  misc_RNA (1)...(19): siRNA sense strand
cagaguuacuggaaauauu

SEQ ID NO: 1599815 - RNA, 19 nt, Homo sapiens
  misc_RNA (1)...(19): siRNA sense strand
ugaaaucucugagugucua

SEQ ID NO: 1599816 - RNA, 19 nt, Homo sapiens
  misc_RNA (1)...(19): siRNA sense strand
agaaguaguccauauguuu

SEQ ID NO: 1599817 - RNA, 19 nt, Homo sapiens
  misc_RNA (1)...(19): siRNA sense strand
gaagcagccuggccucauc

SEQ ID NO: 1599818 - RNA, 19 nt, Homo sapiens
  misc_RNA (1)...(19): siRNA sense strand
ccagauuuccaaccuaaua

SEQ ID NO: 1599819 - RNA, 19 nt, Homo sapiens
  misc_RNA (1)...(19): siRNA sense strand
gaucagaaguuuguauugc

SEQ ID NO: 1599820 - RNA, 19 nt, Homo sapiens
  misc_RNA (1)...(19): siRNA sense strand
gaagaugaaccaacguuag

SEQ ID NO: 1599821 - RNA, 19 nt, Homo sapiens
  misc_RNA (1)...(19): siRNA sense strand
caucaugaguuuaaucagu

SEQ ID NO: 1599822 - RNA, 19 nt, Homo sapiens
  misc_RNA (1)...(19): siRNA sense strand
gaaacagagcaucauaaug

SEQ ID NO: 1599823 - RNA, 19 nt, Homo sapiens
  misc_RNA (1)...(19): siRNA sense strand
ggugauggcacuucucaaa

SEQ ID NO: 1599824 - RNA, 19 nt, Homo sapiens
  misc_RNA (1)...(19): siRNA sense strand
aaaccacccuucacagaau

SEQ ID NO: 1599825 - RNA, 19 nt, Homo sapiens
  misc_RNA (1)...(19): siRNA sense strand
uagcagaguuacuggaaau

SEQ ID NO: 1599826 - RNA, 19 nt, Homo sapiens
  misc_RNA (1)...(19): siRNA sense strand
cauugaaccaucagaauuu

SEQ ID NO: 1599827 - RNA, 19 nt, Homo sapiens
  misc_RNA (1)...(19): siRNA sense strand
uaaaguggaaggaaguaaa

SEQ ID NO: 1599828 - RNA, 19 nt, Homo sapiens
  misc_RNA (1)...(19): siRNA sense strand
cagaaguaguccauauguu

SEQ ID NO: 1599829 - RNA, 19 nt, Homo sapiens
  misc_RNA (1)...(19): siRNA sense strand
ccaccuuccuccaauccua

SEQ ID NO: 1599830 - RNA, 19 nt, Homo sapiens
  misc_RNA (1)...(19): siRNA sense strand
cuggaaauauugggaagua

SEQ ID NO: 1599831 - RNA, 19 nt, Homo sapiens
  misc_RNA (1)...(19): siRNA sense strand
gaaauuccuaggcuugaga

SEQ ID NO: 1599832 - RNA, 19 nt, Homo sapiens
  misc_RNA (1)...(19): siRNA sense strand
ucacagaaucuaugggaaa

SEQ ID NO: 1599833 - RNA, 19 nt, Homo sapiens
  misc_RNA (1)...(19): siRNA sense strand
aaagaagagcacaagauuu

SEQ ID NO: 1599834 - RNA, 19 nt, Homo sapiens
  misc_RNA (1)...(19): siRNA sense strand
ucaaagacccauuggaaca

SEQ ID NO: 1599835 - RNA, 19 nt, Homo sapiens
  misc_RNA (1)...(19): siRNA sense strand
gaagagauuuuagauguca

SEQ ID NO: 1599836 - RNA, 19 nt, Homo sapiens
  misc_RNA (1)...(19): siRNA sense strand
aaaacgagcugcuuuaagu

SEQ ID NO: 1599837 - RNA, 19 nt, Homo sapiens
  misc_RNA (1)...(19): siRNA sense strand
gauggcacuucucaaauac

SEQ ID NO: 1599838 - RNA, 19 nt, Homo sapiens
  misc_RNA (1)...(19): siRNA sense strand
ugaaacagagcaucauaau

SEQ ID NO: 1599839 - RNA, 19 nt, Homo sapiens
  misc_RNA (1)...(19): siRNA sense strand
gaucacagagccuauuuac

SEQ ID NO: 1599840 - RNA, 19 nt, Homo sapiens
  misc_RNA (1)...(19): siRNA sense strand
gcagaguuacuggaaauau

SEQ ID NO: 1599841 - RNA, 19 nt, Homo sapiens
  misc_RNA (1)...(19): siRNA sense strand
ugacaacgcagcgaagauu

SEQ ID NO: 1599842 - RNA, 19 nt, Homo sapiens
  misc_RNA (1)...(19): siRNA sense strand
gcaacucaaagacccauug

SEQ ID NO: 1599843 - RNA, 19 nt, Homo sapiens
  misc_RNA (1)...(19): siRNA sense strand
cgagcugcuuuaagugaaa

SEQ ID NO: 1599844 - RNA, 19 nt, Homo sapiens
  misc_RNA (1)...(19): siRNA sense strand
gcgaagauucugcccauca

SEQ ID NO: 1599845 - RNA, 19 nt, Homo sapiens
  misc_RNA (1)...(19): siRNA sense strand
aaccuaauauagcgaagaa

SEQ ID NO: 1599846 - RNA, 19 nt, Homo sapiens
  misc_RNA (1)...(19): siRNA sense strand
ucauugaaccaucagaauu

SEQ ID NO: 1599847 - RNA, 19 nt, Homo sapiens
  misc_RNA (1)...(19): siRNA sense strand
aucuacagcuuguuuauga

SEQ ID NO: 1599848 - RNA, 19 nt, Homo sapiens
  misc_RNA (1)...(19): siRNA sense strand
acucaaagacccauuggaa

SEQ ID NO: 1599849 - RNA, 19 nt, Homo sapiens
  misc_RNA (1)...(19): siRNA sense strand
cgaagauucugcccaucau

SEQ ID NO: 1599850 - RNA, 19 nt, Homo sapiens
  misc_RNA (1)...(19): siRNA sense strand
cuccagauuuccaaccuaa

SEQ ID NO: 1599851 - RNA, 19 nt, Homo sapiens
  misc_RNA (1)...(19): siRNA sense strand
guuugcaguuaacauguuu

SEQ ID NO: 1599852 - RNA, 19 nt, Homo sapiens
  misc_RNA (1)...(19): siRNA sense strand
caaagacccauuggaacaa

SEQ ID NO: 1599853 - RNA, 19 nt, Homo sapiens
  misc_RNA (1)...(19): siRNA sense strand
uuuagagucuccagauuuc

SEQ ID NO: 1599854 - RNA, 19 nt, Homo sapiens
  misc_RNA (1)...(19): siRNA sense strand
ccagaaguaguccauaugu

SEQ ID NO: 1599855 - RNA, 19 nt, Homo sapiens
  misc_RNA (1)...(19): siRNA sense strand
cacagaaucuaugggaaau

SEQ ID NO: 1599856 - RNA, 19 nt, Homo sapiens
  misc_RNA (1)...(19): siRNA sense strand
ccuaauauagcgaagaaau

SEQ ID NO: 1599857 - RNA, 19 nt, Homo sapiens
  misc_RNA (1)...(19): siRNA sense strand
gaaccaucagaauuuguga

SEQ ID NO: 1599858 - RNA, 19 nt, Homo sapiens
  misc_RNA (1)...(19): siRNA sense strand
cucaaauacuggccaaaga

SEQ ID NO: 1599859 - RNA, 19 nt, Homo sapiens
  misc_RNA (1)...(19): siRNA sense strand
aagaagagcacaagauuuu

SEQ ID NO: 1599860 - RNA, 19 nt, Homo sapiens
  misc_RNA (1)...(19): siRNA sense strand
ugcuuuaagugaaauggua

SEQ ID NO: 1599861 - RNA, 19 nt, Homo sapiens
  misc_RNA (1)...(19): siRNA sense strand
cagaauuugugaagaucau

SEQ ID NO: 1599862 - RNA, 19 nt, Homo sapiens
  misc_RNA (1)...(19): siRNA sense strand
ccucaucuacagcuuguuu

SEQ ID NO: 1599863 - RNA, 19 nt, Homo sapiens
  misc_RNA (1)...(19): siRNA sense strand
ggaauuugacccggaggaa

SEQ ID NO: 1599864 - RNA, 19 nt, Homo sapiens
  misc_RNA (1)...(19): siRNA sense strand
gagccuauuuacccagaag

SEQ ID NO: 1599865 - RNA, 19 nt, Homo sapiens
  misc_RNA (1)...(19): siRNA sense strand
caaagugaaaucucugagu

SEQ ID NO: 1599866 - RNA, 19 nt, Homo sapiens
  misc_RNA (1)...(19): siRNA sense strand
cauagcagaguuacuggaa

SEQ ID NO: 1599867 - RNA, 19 nt, Homo sapiens
  misc_RNA (1)...(19): siRNA sense strand
uaauggcauagcagaguua

SEQ ID NO: 1599868 - RNA, 19 nt, Homo sapiens
  misc_RNA (1)...(19): siRNA sense strand
ugaagauccucgggagaga

SEQ ID NO: 1599869 - RNA, 19 nt, Homo sapiens
  misc_RNA (1)...(19): siRNA sense strand
guagaauauaucacccaua

SEQ ID NO: 1599870 - RNA, 19 nt, Homo sapiens
  misc_RNA (1)...(19): siRNA sense strand
gauucugcccaucauguuu

SEQ ID NO: 1599871 - RNA, 19 nt, Homo sapiens
  misc_RNA (1)...(19): siRNA sense strand
gaagauucugcccaucaug

SEQ ID NO: 1599872 - RNA, 19 nt, Homo sapiens
  misc_RNA (1)...(19): siRNA sense strand
ucuuugacuuuguuucuga

SEQ ID NO: 1599873 - RNA, 19 nt, Homo sapiens
  misc_RNA (1)...(19): siRNA sense strand
ccagcuggcauacugugua

SEQ ID NO: 1599874 - RNA, 19 nt, Homo sapiens
  misc_RNA (1)...(19): siRNA sense strand
agaguuacuggaaauauug

SEQ ID NO: 1599875 - RNA, 19 nt, Homo sapiens
  misc_RNA (1)...(19): siRNA sense strand
gagcuuacaucagaaaaca

SEQ ID NO: 1599876 - RNA, 19 nt, Homo sapiens
  misc_RNA (1)...(19): siRNA sense strand
aaguuuguauugcagcuuu

SEQ ID NO: 1599877 - RNA, 19 nt, Homo sapiens
  misc_RNA (1)...(19): siRNA sense strand
ggccucaucuacagcuugu

SEQ ID NO: 1599878 - RNA, 19 nt, Homo sapiens
  misc_RNA (1)...(19): siRNA sense strand
aagaugaaccaacguuaga

SEQ ID NO: 1599879 - RNA, 19 nt, Homo sapiens
  misc_RNA (1)...(19): siRNA sense strand
gagcugcuuuaagugaaau

SEQ ID NO: 1599880 - RNA, 19 nt, Homo sapiens
  misc_RNA (1)...(19): siRNA sense strand
cauguuuccuuccuuguac

SEQ ID NO: 1599881 - RNA, 19 nt, Homo sapiens
  misc_RNA (1)...(19): siRNA sense strand
cagcuggcauacuguguag

SEQ ID NO: 1599882 - RNA, 19 nt, Homo sapiens
  misc_RNA (1)...(19): siRNA sense strand
cuacgggagcggaauuuga

SEQ ID NO: 1599883 - RNA, 19 nt, Homo sapiens
  misc_RNA (1)...(19): siRNA sense strand
caacuccaaugggccuuuc

SEQ ID NO: 1599884 - RNA, 19 nt, Homo sapiens
  misc_RNA (1)...(19): siRNA sense strand
acccagaaguaguccauau

SEQ ID NO: 1599885 - RNA, 19 nt, Homo sapiens
  misc_RNA (1)...(19): siRNA sense strand
ucaugaguuuaaucaguga

SEQ ID NO: 1599886 - RNA, 19 nt, Homo sapiens
  misc_RNA (1)...(19): siRNA sense strand
uuucgaacauuaccaccuu

SEQ ID NO: 1599887 - RNA, 19 nt, Homo sapiens
  misc_RNA (1)...(19): siRNA sense strand
auaauggcauagcagaguu

SEQ ID NO: 1599888 - RNA, 19 nt, Homo sapiens
  misc_RNA (1)...(19): siRNA sense strand
aaaagaagagcacaagauu

SEQ ID NO: 1599889 - RNA, 19 nt, Homo sapiens
  misc_RNA (1)...(19): siRNA sense strand
gugaucacagagccuauuu

SEQ ID NO: 1599890 - RNA, 19 nt, Homo sapiens
  misc_RNA (1)...(19): siRNA sense strand
ucauguuuccuuccuugua

SEQ ID NO: 1599891 - RNA, 19 nt, Homo sapiens
  misc_RNA (1)...(19): siRNA sense strand
ugggaaguauaauuaaugg

SEQ ID NO: 1599892 - RNA, 19 nt, Homo sapiens
  misc_RNA (1)...(19): siRNA sense strand
cgugguccuucuccauauu

SEQ ID NO: 1599893 - RNA, 19 nt, Homo sapiens
  misc_RNA (1)...(19): siRNA sense strand
gcugaucaagagaagcuuu

SEQ ID NO: 1599894 - RNA, 19 nt, Homo sapiens
  misc_RNA (1)...(19): siRNA sense strand
gcaucauaauggcauagca

SEQ ID NO: 1599895 - RNA, 19 nt, Homo sapiens
  misc_RNA (1)...(19): siRNA sense strand
gauccucgggagagagauu

SEQ ID NO: 1599896 - RNA, 19 nt, Homo sapiens
  misc_RNA (1)...(19): siRNA sense strand
gauuuccaaccuaauauag

SEQ ID NO: 1599897 - RNA, 19 nt, Homo sapiens
  misc_RNA (1)...(19): siRNA sense strand
gaugaaccaacguuagaag

SEQ ID NO: 1599898 - RNA, 19 nt, Homo sapiens
  misc_RNA (1)...(19): siRNA sense strand
cauaauggcauagcagagu

SEQ ID NO: 1599899 - RNA, 19 nt, Homo sapiens
  misc_RNA (1)...(19): siRNA sense strand
agaaguuacgucaguguug

SEQ ID NO: 1599900 - RNA, 19 nt, Homo sapiens
  misc_RNA (1)...(19): siRNA sense strand
ggagagagauuuucuuaaa

SEQ ID NO: 1599901 - RNA, 19 nt, Homo sapiens
  misc_RNA (1)...(19): siRNA sense strand
ggaaauauugggaaguaua

SEQ ID NO: 1599902 - RNA, 19 nt, Homo sapiens
  misc_RNA (1)...(19): siRNA sense strand
ugauggcacuucucaaaua

SEQ ID NO: 1599903 - RNA, 19 nt, Homo sapiens
  misc_RNA (1)...(19): siRNA sense strand
gaaguaauguucuuaaacg

SEQ ID NO: 1599904 - RNA, 19 nt, Homo sapiens
  misc_RNA (1)...(19): siRNA sense strand
gaauauaucacccauaauc

SEQ ID NO: 1599905 - RNA, 19 nt, Homo sapiens
  misc_RNA (1)...(19): siRNA sense strand
uaagugaccuaaaguggaa

SEQ ID NO: 1599906 - RNA, 19 nt, Homo sapiens
  misc_RNA (1)...(19): siRNA sense strand
guccauauguuugcaguua

SEQ ID NO: 1599907 - RNA, 19 nt, Homo sapiens
  misc_RNA (1)...(19): siRNA sense strand
aaacagagcaucauaaugg

SEQ ID NO: 1599908 - RNA, 19 nt, Homo sapiens
  misc_RNA (1)...(19): siRNA sense strand
gcaguuaacauguuucgaa

SEQ ID NO: 1599909 - RNA, 19 nt, Homo sapiens
  misc_RNA (1)...(19): siRNA sense strand
gcgaagaaauauauugauc

SEQ ID NO: 1599910 - RNA, 19 nt, Homo sapiens
  misc_RNA (1)...(19): siRNA sense strand
ggaagaugaaccaacguua

SEQ ID NO: 1599911 - RNA, 19 nt, Homo sapiens
  misc_RNA (1)...(19): siRNA sense strand
cuugagagcuuacaucaga

SEQ ID NO: 1599912 - RNA, 19 nt, Homo sapiens
  misc_RNA (1)...(19): siRNA sense strand
caucagaauuugugaagau

SEQ ID NO: 1599913 - RNA, 19 nt, Homo sapiens
  misc_RNA (1)...(19): siRNA sense strand
gaaguaguccauauguuug

SEQ ID NO: 1599914 - RNA, 19 nt, Homo sapiens
  misc_RNA (1)...(19): siRNA sense strand
cagaguuacuggaaauauu

SEQ ID NO: 1599915 - RNA, 19 nt, Homo sapiens
  misc_RNA (1)...(19): siRNA sense strand
ugaaaucucugagugucua

SEQ ID NO: 1599916 - RNA, 19 nt, Homo sapiens
  misc_RNA (1)...(19): siRNA sense strand
agaaguaguccauauguuu

SEQ ID NO: 1599917 - RNA, 19 nt, Homo sapiens
  misc_RNA (1)...(19): siRNA sense strand
gaagcagccuggccucauc

SEQ ID NO: 1599918 - RNA, 19 nt, Homo sapiens
  misc_RNA (1)...(19): siRNA sense strand
ccagauuuccaaccuaaua

SEQ ID NO: 1599919 - RNA, 19 nt, Homo sapiens
  misc_RNA (1)...(19): siRNA sense strand
gaucagaaguuuguauugc

SEQ ID NO: 1599920 - RNA, 19 nt, Homo sapiens
  misc_RNA (1)...(19): siRNA sense strand
gaagaugaaccaacguuag

SEQ ID NO: 1599921 - RNA, 19 nt, Homo sapiens
  misc_RNA (1)...(19): siRNA sense strand
caucaugaguuuaaucagu

SEQ ID NO: 1599922 - RNA, 19 nt, Homo sapiens
  misc_RNA (1)...(19): siRNA sense strand
gaaacagagcaucauaaug

SEQ ID NO: 1599923 - RNA, 19 nt, Homo sapiens
  misc_RNA (1)...(19): siRNA sense strand
ggugauggcacuucucaaa

SEQ ID NO: 1599924 - RNA, 19 nt, Homo sapiens
  misc_RNA (1)...(19): siRNA sense strand
aaaccacccuucacagaau

SEQ ID NO: 1599925 - RNA, 19 nt, Homo sapiens
  misc_RNA (1)...(19): siRNA sense strand
uagcagaguuacuggaaau

SEQ ID NO: 1599926 - RNA, 19 nt, Homo sapiens
  misc_RNA (1)...(19): siRNA sense strand
cauugaaccaucagaauuu

SEQ ID NO: 1599927 - RNA, 19 nt, Homo sapiens
  misc_RNA (1)...(19): siRNA sense strand
uaaaguggaaggaaguaaa

SEQ ID NO: 1599928 - RNA, 19 nt, Homo sapiens
  misc_RNA (1)...(19): siRNA sense strand
cagaaguaguccauauguu

SEQ ID NO: 1599929 - RNA, 19 nt, Homo sapiens
  misc_RNA (1)...(19): siRNA sense strand
ccaccuuccuccaauccua

SEQ ID NO: 1599930 - RNA, 19 nt, Homo sapiens
  misc_RNA (1)...(19): siRNA sense strand
cuggaaauauugggaagua

SEQ ID NO: 1599931 - RNA, 19 nt, Homo sapiens
  misc_RNA (1)...(19): siRNA sense strand
gaaauuccuaggcuugaga

SEQ ID NO: 1599932 - RNA, 19 nt, Homo sapiens
  misc_RNA (1)...(19): siRNA sense strand
ucacagaaucuaugggaaa

SEQ ID NO: 1599933 - RNA, 19 nt, Homo sapiens
  misc_RNA (1)...(19): siRNA sense strand
aaagaagagcacaagauuu

SEQ ID NO: 1599934 - RNA, 19 nt, Homo sapiens
  misc_RNA (1)...(19): siRNA sense strand
ucaaagacccauuggaaca

SEQ ID NO: 1599935 - RNA, 19 nt, Homo sapiens
  misc_RNA (1)...(19): siRNA sense strand
gaagagauuuuagauguca

SEQ ID NO: 1599936 - RNA, 19 nt, Homo sapiens
  misc_RNA (1)...(19): siRNA sense strand
aaaacgagcugcuuuaagu

SEQ ID NO: 1599937 - RNA, 19 nt, Homo sapiens
  misc_RNA (1)...(19): siRNA sense strand
gauggcacuucucaaauac

SEQ ID NO: 1599938 - RNA, 19 nt, Homo sapiens
  misc_RNA (1)...(19): siRNA sense strand
ugaaacagagcaucauaau

SEQ ID NO: 1599939 - RNA, 19 nt, Homo sapiens
  misc_RNA (1)...(19): siRNA sense strand
gaucacagagccuauuuac

SEQ ID NO: 1599940 - RNA, 19 nt, Homo sapiens
  misc_RNA (1)...(19): siRNA sense strand
gcagaguuacuggaaauau

SEQ ID NO: 1599941 - RNA, 19 nt, Homo sapiens
  misc_RNA (1)...(19): siRNA sense strand
ugacaacgcagcgaagauu

SEQ ID NO: 1599942 - RNA, 19 nt, Homo sapiens
  misc_RNA (1)...(19): siRNA sense strand
gcaacucaaagacccauug

SEQ ID NO: 1599943 - RNA, 19 nt, Homo sapiens
  misc_RNA (1)...(19): siRNA sense strand
cgagcugcuuuaagugaaa

SEQ ID NO: 1599944 - RNA, 19 nt, Homo sapiens
  misc_RNA (1)...(19): siRNA sense strand
gcgaagauucugcccauca

SEQ ID NO: 1599945 - RNA, 19 nt, Homo sapiens
  misc_RNA (1)...(19): siRNA sense strand
aaccuaauauagcgaagaa

SEQ ID NO: 1599946 - RNA, 19 nt, Homo sapiens
  misc_RNA (1)...(19): siRNA sense strand
ucauugaaccaucagaauu

SEQ ID NO: 1599947 - RNA, 19 nt, Homo sapiens
  misc_RNA (1)...(19): siRNA sense strand
aucuacagcuuguuuauga

SEQ ID NO: 1599948 - RNA, 19 nt, Homo sapiens
  misc_RNA (1)...(19): siRNA sense strand
acucaaagacccauuggaa

SEQ ID NO: 1599949 - RNA, 19 nt, Homo sapiens
  misc_RNA (1)...(19): siRNA sense strand
cgaagauucugcccaucau

SEQ ID NO: 1599950 - RNA, 19 nt, Homo sapiens
  misc_RNA (1)...(19): siRNA sense strand
cuccagauuuccaaccuaa

SEQ ID NO: 1599951 - RNA, 19 nt, Homo sapiens
  misc_RNA (1)...(19): siRNA sense strand
guuugcaguuaacauguuu

SEQ ID NO: 1599952 - RNA, 19 nt, Homo sapiens
  misc_RNA (1)...(19): siRNA sense strand
caaagacccauuggaacaa

SEQ ID NO: 1599953 - RNA, 19 nt, Homo sapiens
  misc_RNA (1)...(19): siRNA sense strand
uuuagagucuccagauuuc

SEQ ID NO: 1599954 - RNA, 19 nt, Homo sapiens
  misc_RNA (1)...(19): siRNA sense strand
ccagaaguaguccauaugu

SEQ ID NO: 1599955 - RNA, 19 nt, Homo sapiens
  misc_RNA (1)...(19): siRNA sense strand
cacagaaucuaugggaaau

SEQ ID NO: 1599956 - RNA, 19 nt, Homo sapiens
  misc_RNA (1)...(19): siRNA sense strand
ccuaauauagcgaagaaau

SEQ ID NO: 1599957 - RNA, 19 nt, Homo sapiens
  misc_RNA (1)...(19): siRNA sense strand
gaaccaucagaauuuguga

SEQ ID NO: 1599958 - RNA, 19 nt, Homo sapiens
  misc_RNA (1)...(19): siRNA sense strand
cucaaauacuggccaaaga

SEQ ID NO: 1599959 - RNA, 19 nt, Homo sapiens
  misc_RNA (1)...(19): siRNA sense strand
aagaagagcacaagauuuu

SEQ ID NO: 1599960 - RNA, 19 nt, Homo sapiens
  misc_RNA (1)...(19): siRNA sense strand
ugcuuuaagugaaauggua

SEQ ID NO: 1599961 - RNA, 19 nt, Homo sapiens
  misc_RNA (1)...(19): siRNA sense strand
cagaauuugugaagaucau

SEQ ID NO: 1599962 - RNA, 19 nt, Homo sapiens
  misc_RNA (1)...(19): siRNA sense strand
ccucaucuacagcuuguuu

SEQ ID NO: 1599963 - RNA, 19 nt, Homo sapiens
  misc_RNA (1)...(19): siRNA sense strand
ggaauuugacccggaggaa

SEQ ID NO: 1599964 - RNA, 19 nt, Homo sapiens
  misc_RNA (1)...(19): siRNA sense strand
gagccuauuuacccagaag

SEQ ID NO: 1599965 - RNA, 19 nt, Homo sapiens
  misc_RNA (1)...(19): siRNA sense strand
caaagugaaaucucugagu

SEQ ID NO: 1599966 - RNA, 19 nt, Homo sapiens
  misc_RNA (1)...(19): siRNA sense strand
cauagcagaguuacuggaa

SEQ ID NO: 1599967 - RNA, 19 nt, Homo sapiens
  misc_RNA (1)...(19): siRNA sense strand
uaauggcauagcagaguua

SEQ ID NO: 1599968 - RNA, 19 nt, Homo sapiens
  misc_RNA (1)...(19): siRNA sense strand
ugaagauccucgggagaga

SEQ ID NO: 1599969 - RNA, 19 nt, Homo sapiens
  misc_RNA (1)...(19): siRNA sense strand
guagaauauaucacccaua

SEQ ID NO: 1599970 - RNA, 19 nt, Homo sapiens
  misc_RNA (1)...(19): siRNA sense strand
gauucugcccaucauguuu

SEQ ID NO: 1599971 - RNA, 19 nt, Homo sapiens
  misc_RNA (1)...(19): siRNA sense strand
gaagauucugcccaucaug

SEQ ID NO: 1599972 - RNA, 19 nt, Homo sapiens
  misc_RNA (1)...(19): siRNA sense strand
ucuuugacuuuguuucuga

SEQ ID NO: 1599973 - RNA, 19 nt, Homo sapiens
  misc_RNA (1)...(19): siRNA sense strand
ccagcuggcauacugugua

SEQ ID NO: 1599974 - RNA, 19 nt, Homo sapiens
  misc_RNA (1)...(19): siRNA sense strand
agaguuacuggaaauauug

SEQ ID NO: 1599975 - RNA, 19 nt, Homo sapiens
  misc_RNA (1)...(19): siRNA sense strand
gagcuuacaucagaaaaca

SEQ ID NO: 1599976 - RNA, 19 nt, Homo sapiens
  misc_RNA (1)...(19): siRNA sense strand
aaguuuguauugcagcuuu

SEQ ID NO: 1599977 - RNA, 19 nt, Homo sapiens
  misc_RNA (1)...(19): siRNA sense strand
ggccucaucuacagcuugu

SEQ ID NO: 1599978 - RNA, 19 nt, Homo sapiens
  misc_RNA (1)...(19): siRNA sense strand
aagaugaaccaacguuaga

SEQ ID NO: 1599979 - RNA, 19 nt, Homo sapiens
  misc_RNA (1)...(19): siRNA sense strand
gagcugcuuuaagugaaau

SEQ ID NO: 1599980 - RNA, 19 nt, Homo sapiens
  misc_RNA (1)...(19): siRNA sense strand
cauguuuccuuccuuguac

SEQ ID NO: 1599981 - RNA, 19 nt, Homo sapiens
  misc_RNA (1)...(19): siRNA sense strand
cagcuggcauacuguguag

SEQ ID NO: 1599982 - RNA, 19 nt, Homo sapiens
  misc_RNA (1)...(19): siRNA sense strand
cuacgggagcggaauuuga

SEQ ID NO: 1599983 - RNA, 19 nt, Homo sapiens
  misc_RNA (1)...(19): siRNA sense strand
caacuccaaugggccuuuc

SEQ ID NO: 1599984 - RNA, 19 nt, Homo sapiens
  misc_RNA (1)...(19): siRNA sense strand
acccagaaguaguccauau

SEQ ID NO: 1599985 - RNA, 19 nt, Homo sapiens
  misc_RNA (1)...(19): siRNA sense strand
ucaugaguuuaaucaguga

SEQ ID NO: 1599986 - RNA, 19 nt, Homo sapiens
  misc_RNA (1)...(19): siRNA sense strand
uuucgaacauuaccaccuu

SEQ ID NO: 1599987 - RNA, 19 nt, Homo sapiens
  misc_RNA (1)...(19): siRNA sense strand
auaauggcauagcagaguu

SEQ ID NO: 1599988 - RNA, 19 nt, Homo sapiens
  misc_RNA (1)...(19): siRNA sense strand
aaaagaagagcacaagauu

SEQ ID NO: 1599989 - RNA, 19 nt, Homo sapiens
  misc_RNA (1)...(19): siRNA sense strand
gugaucacagagccuauuu

SEQ ID NO: 1599990 - RNA, 19 nt, Homo sapiens
  misc_RNA (1)...(19): siRNA sense strand
ucauguuuccuuccuugua

SEQ ID NO: 1599991 - RNA, 19 nt, Homo sapiens
  misc_RNA (1)...(19): siRNA sense strand
ugggaaguauaauuaaugg

SEQ ID NO: 1599992 - RNA, 19 nt, Homo sapiens
  misc_RNA (1)...(19): siRNA sense strand
cgugguccuucuccauauu

SEQ ID NO: 1599993 - RNA, 19 nt, Homo sapiens
  misc_RNA (1)...(19): siRNA sense strand
gcugaucaagagaagcuuu

SEQ ID NO: 1599994 - RNA, 19 nt, Homo sapiens
  misc_RNA (1)...(19): siRNA sense strand
gcaucauaauggcauagca

SEQ ID NO: 1599995 - RNA, 19 nt, Homo sapiens
  misc_RNA (1)...(19): siRNA sense strand
gauccucgggagagagauu

SEQ ID NO: 1599996 - RNA, 19 nt, Homo sapiens
  misc_RNA (1)...(19): siRNA sense strand
gauuuccaaccuaauauag

SEQ ID NO: 1599997 - RNA, 19 nt, Homo sapiens
  misc_RNA (1)...(19): siRNA sense strand
gaugaaccaacguuagaag

SEQ ID NO: 1599998 - RNA, 19 nt, Homo sapiens
  misc_RNA (1)...(19): siRNA sense strand
cauaauggcauagcagagu

SEQ ID NO: 1599999 - RNA, 19 nt, Homo sapiens
  misc_RNA (1)...(19): siRNA sense strand
agaaguuacgucaguguug

SEQ ID NO: 1600000 - RNA, 19 nt, Homo sapiens
  misc_RNA (1)...(19): siRNA sense strand
ggagagagauuuucuuaaa

SEQ ID NO: 1600001 - RNA, 19 nt, Homo sapiens
  misc_RNA (1)...(19): siRNA sense strand
ggaaauauugggaaguaua

SEQ ID NO: 1600002 - RNA, 19 nt, Homo sapiens
  misc_RNA (1)...(19): siRNA sense strand
ugauggcacuucucaaaua

SEQ ID NO: 1600003 - RNA, 19 nt, Homo sapiens
  misc_RNA (1)...(19): siRNA sense strand
gaaguaauguucuuaaacg

SEQ ID NO: 1600004 - RNA, 19 nt, Homo sapiens
  misc_RNA (1)...(19): siRNA sense strand
gaauauaucacccauaauc

SEQ ID NO: 1600005 - RNA, 19 nt, Homo sapiens
  misc_RNA (1)...(19): siRNA sense strand
uaagugaccuaaaguggaa

SEQ ID NO: 1600006 - RNA, 19 nt, Homo sapiens
  misc_RNA (1)...(19): siRNA sense strand
guccauauguuugcaguua

SEQ ID NO: 1600007 - RNA, 19 nt, Homo sapiens
  misc_RNA (1)...(19): siRNA sense strand
aaacagagcaucauaaugg

SEQ ID NO: 1600008 - RNA, 19 nt, Homo sapiens
  misc_RNA (1)...(19): siRNA sense strand
gcaguuaacauguuucgaa

SEQ ID NO: 1600009 - RNA, 19 nt, Homo sapiens
  misc_RNA (1)...(19): siRNA sense strand
gcgaagaaauauauugauc

SEQ ID NO: 1600010 - RNA, 19 nt, Homo sapiens
  misc_RNA (1)...(19): siRNA sense strand
ggaagaugaaccaacguua

SEQ ID NO: 1600011 - RNA, 19 nt, Homo sapiens
  misc_RNA (1)...(19): siRNA sense strand
cuugagagcuuacaucaga

SEQ ID NO: 1600012 - RNA, 19 nt, Homo sapiens
  misc_RNA (1)...(19): siRNA sense strand
caucagaauuugugaagau

SEQ ID NO: 1600013 - RNA, 19 nt, Homo sapiens
  misc_RNA (1)...(19): siRNA sense strand
gaaguaguccauauguuug

SEQ ID NO: 1600014 - RNA, 19 nt, Homo sapiens
  misc_RNA (1)...(19): siRNA sense strand
cagaguuacuggaaauauu

SEQ ID NO: 1600015 - RNA, 19 nt, Homo sapiens
  misc_RNA (1)...(19): siRNA sense strand
ugaaaucucugagugucua

SEQ ID NO: 1600016 - RNA, 19 nt, Homo sapiens
  misc_RNA (1)...(19): siRNA sense strand
agaaguaguccauauguuu

SEQ ID NO: 1600017 - RNA, 19 nt, Homo sapiens
  misc_RNA (1)...(19): siRNA sense strand
gaagcagccuggccucauc

SEQ ID NO: 1600018 - RNA, 19 nt, Homo sapiens
  misc_RNA (1)...(19): siRNA sense strand
ccagauuuccaaccuaaua

SEQ ID NO: 1600019 - RNA, 19 nt, Homo sapiens
  misc_RNA (1)...(19): siRNA sense strand
gaucagaaguuuguauugc

SEQ ID NO: 1600020 - RNA, 19 nt, Homo sapiens
  misc_RNA (1)...(19): siRNA sense strand
gaagaugaaccaacguuag

SEQ ID NO: 1600021 - RNA, 19 nt, Homo sapiens
  misc_RNA (1)...(19): siRNA sense strand
caucaugaguuuaaucagu

SEQ ID NO: 1600022 - RNA, 19 nt, Homo sapiens
  misc_RNA (1)...(19): siRNA sense strand
gaaacagagcaucauaaug

SEQ ID NO: 1600023 - RNA, 19 nt, Homo sapiens
  misc_RNA (1)...(19): siRNA sense strand
ggugauggcacuucucaaa

SEQ ID NO: 1600024 - RNA, 19 nt, Homo sapiens
  misc_RNA (1)...(19): siRNA sense strand
aaaccacccuucacagaau

SEQ ID NO: 1600025 - RNA, 19 nt, Homo sapiens
  misc_RNA (1)...(19): siRNA sense strand
uagcagaguuacuggaaau

SEQ ID NO: 1600026 - RNA, 19 nt, Homo sapiens
  misc_RNA (1)...(19): siRNA sense strand
cauugaaccaucagaauuu

SEQ ID NO: 1600027 - RNA, 19 nt, Homo sapiens
  misc_RNA (1)...(19): siRNA sense strand
uaaaguggaaggaaguaaa

SEQ ID NO: 1600028 - RNA, 19 nt, Homo sapiens
  misc_RNA (1)...(19): siRNA sense strand
cagaaguaguccauauguu

SEQ ID NO: 1600029 - RNA, 19 nt, Homo sapiens
  misc_RNA (1)...(19): siRNA sense strand
ccaccuuccuccaauccua

SEQ ID NO: 1600030 - RNA, 19 nt, Homo sapiens
  misc_RNA (1)...(19): siRNA sense strand
cuggaaauauugggaagua

SEQ ID NO: 1600031 - RNA, 19 nt, Homo sapiens
  misc_RNA (1)...(19): siRNA sense strand
gaaauuccuaggcuugaga

SEQ ID NO: 1600032 - RNA, 19 nt, Homo sapiens
  misc_RNA (1)...(19): siRNA sense strand
ucacagaaucuaugggaaa

SEQ ID NO: 1600033 - RNA, 19 nt, Homo sapiens
  misc_RNA (1)...(19): siRNA sense strand
aaagaagagcacaagauuu

SEQ ID NO: 1600034 - RNA, 19 nt, Homo sapiens
  misc_RNA (1)...(19): siRNA sense strand
ucaaagacccauuggaaca

SEQ ID NO: 1600035 - RNA, 19 nt, Homo sapiens
  misc_RNA (1)...(19): siRNA sense strand
gaagagauuuuagauguca

SEQ ID NO: 1600036 - RNA, 19 nt, Homo sapiens
  misc_RNA (1)...(19): siRNA sense strand
aaaacgagcugcuuuaagu

SEQ ID NO: 1600037 - RNA, 19 nt, Homo sapiens
  misc_RNA (1)...(19): siRNA sense strand
gauggcacuucucaaauac

SEQ ID NO: 1600038 - RNA, 19 nt, Homo sapiens
  misc_RNA (1)...(19): siRNA sense strand
ugaaacagagcaucauaau

SEQ ID NO: 1600039 - RNA, 19 nt, Homo sapiens
  misc_RNA (1)...(19): siRNA sense strand
gaucacagagccuauuuac

SEQ ID NO: 1600040 - RNA, 19 nt, Homo sapiens
  misc_RNA (1)...(19): siRNA sense strand
gcagaguuacuggaaauau

SEQ ID NO: 1600041 - RNA, 19 nt, Homo sapiens
  misc_RNA (1)...(19): siRNA sense strand
ugacaacgcagcgaagauu

SEQ ID NO: 1600042 - RNA, 19 nt, Homo sapiens
  misc_RNA (1)...(19): siRNA sense strand
gcaacucaaagacccauug

SEQ ID NO: 1600043 - RNA, 19 nt, Homo sapiens
  misc_RNA (1)...(19): siRNA sense strand
cgagcugcuuuaagugaaa

SEQ ID NO: 1600044 - RNA, 19 nt, Homo sapiens
  misc_RNA (1)...(19): siRNA sense strand
gcgaagauucugcccauca

SEQ ID NO: 1600045 - RNA, 19 nt, Homo sapiens
  misc_RNA (1)...(19): siRNA sense strand
aaccuaauauagcgaagaa

SEQ ID NO: 1600046 - RNA, 19 nt, Homo sapiens
  misc_RNA (1)...(19): siRNA sense strand
ucauugaaccaucagaauu

SEQ ID NO: 1600047 - RNA, 19 nt, Homo sapiens
  misc_RNA (1)...(19): siRNA sense strand
aucuacagcuuguuuauga

SEQ ID NO: 1600048 - RNA, 19 nt, Homo sapiens
  misc_RNA (1)...(19): siRNA sense strand
acucaaagacccauuggaa

SEQ ID NO: 1600049 - RNA, 19 nt, Homo sapiens
  misc_RNA (1)...(19): siRNA sense strand
cgaagauucugcccaucau

SEQ ID NO: 1600050 - RNA, 19 nt, Homo sapiens
  misc_RNA (1)...(19): siRNA sense strand
cuccagauuuccaaccuaa

SEQ ID NO: 1600051 - RNA, 19 nt, Homo sapiens
  misc_RNA (1)...(19): siRNA sense strand
guuugcaguuaacauguuu

SEQ ID NO: 1600052 - RNA, 19 nt, Homo sapiens
  misc_RNA (1)...(19): siRNA sense strand
caaagacccauuggaacaa

SEQ ID NO: 1600053 - RNA, 19 nt, Homo sapiens
  misc_RNA (1)...(19): siRNA sense strand
uuuagagucuccagauuuc

SEQ ID NO: 1600054 - RNA, 19 nt, Homo sapiens
  misc_RNA (1)...(19): siRNA sense strand
ccagaaguaguccauaugu

SEQ ID NO: 1600055 - RNA, 19 nt, Homo sapiens
  misc_RNA (1)...(19): siRNA sense strand
cacagaaucuaugggaaau

SEQ ID NO: 1600056 - RNA, 19 nt, Homo sapiens
  misc_RNA (1)...(19): siRNA sense strand
ccuaauauagcgaagaaau

SEQ ID NO: 1600057 - RNA, 19 nt, Homo sapiens
  misc_RNA (1)...(19): siRNA sense strand
gaaccaucagaauuuguga

SEQ ID NO: 1600058 - RNA, 19 nt, Homo sapiens
  misc_RNA (1)...(19): siRNA sense strand
cucaaauacuggccaaaga

SEQ ID NO: 1600059 - RNA, 19 nt, Homo sapiens
  misc_RNA (1)...(19): siRNA sense strand
aagaagagcacaagauuuu

SEQ ID NO: 1600060 - RNA, 19 nt, Homo sapiens
  misc_RNA (1)...(19): siRNA sense strand
ugcuuuaagugaaauggua

SEQ ID NO: 1600061 - RNA, 19 nt, Homo sapiens
  misc_RNA (1)...(19): siRNA sense strand
cagaauuugugaagaucau

SEQ ID NO: 1600062 - RNA, 19 nt, Homo sapiens
  misc_RNA (1)...(19): siRNA sense strand
ccucaucuacagcuuguuu

SEQ ID NO: 1600063 - RNA, 19 nt, Homo sapiens
  misc_RNA (1)...(19): siRNA sense strand
ggaauuugacccggaggaa

SEQ ID NO: 1600064 - RNA, 19 nt, Homo sapiens
  misc_RNA (1)...(19): siRNA sense strand
gagccuauuuacccagaag

SEQ ID NO: 1600065 - RNA, 19 nt, Homo sapiens
  misc_RNA (1)...(19): siRNA sense strand
caaagugaaaucucugagu

SEQ ID NO: 1600066 - RNA, 19 nt, Homo sapiens
  misc_RNA (1)...(19): siRNA sense strand
cauagcagaguuacuggaa

SEQ ID NO: 1600067 - RNA, 19 nt, Homo sapiens
  misc_RNA (1)...(19): siRNA sense strand
uaauggcauagcagaguua

SEQ ID NO: 1600068 - RNA, 19 nt, Homo sapiens
  misc_RNA (1)...(19): siRNA sense strand
ugaagauccucgggagaga

SEQ ID NO: 1600069 - RNA, 19 nt, Homo sapiens
  misc_RNA (1)...(19): siRNA sense strand
guagaauauaucacccaua

SEQ ID NO: 1600070 - RNA, 19 nt, Homo sapiens
  misc_RNA (1)...(19): siRNA sense strand
gauucugcccaucauguuu

SEQ ID NO: 1600071 - RNA, 19 nt, Homo sapiens
  misc_RNA (1)...(19): siRNA sense strand
gaagauucugcccaucaug

SEQ ID NO: 1600072 - RNA, 19 nt, Homo sapiens
  misc_RNA (1)...(19): siRNA sense strand
ucuuugacuuuguuucuga

SEQ ID NO: 1600073 - RNA, 19 nt, Homo sapiens
  misc_RNA (1)...(19): siRNA sense strand
ccagcuggcauacugugua

SEQ ID NO: 1600074 - RNA, 19 nt, Homo sapiens
  misc_RNA (1)...(19): siRNA sense strand
agaguuacuggaaauauug

SEQ ID NO: 1600075 - RNA, 19 nt, Homo sapiens
  misc_RNA (1)...(19): siRNA sense strand
gagcuuacaucagaaaaca

SEQ ID NO: 1600076 - RNA, 19 nt, Homo sapiens
  misc_RNA (1)...(19): siRNA sense strand
aaguuuguauugcagcuuu

SEQ ID NO: 1600077 - RNA, 19 nt, Homo sapiens
  misc_RNA (1)...(19): siRNA sense strand
ggccucaucuacagcuugu

SEQ ID NO: 1600078 - RNA, 19 nt, Homo sapiens
  misc_RNA (1)...(19): siRNA sense strand
aagaugaaccaacguuaga

SEQ ID NO: 1600079 - RNA, 19 nt, Homo sapiens
  misc_RNA (1)...(19): siRNA sense strand
gagcugcuuuaagugaaau

SEQ ID NO: 1600080 - RNA, 19 nt, Homo sapiens
  misc_RNA (1)...(19): siRNA sense strand
cauguuuccuuccuuguac

SEQ ID NO: 1600081 - RNA, 19 nt, Homo sapiens
  misc_RNA (1)...(19): siRNA sense strand
cagcuggcauacuguguag

SEQ ID NO: 1600082 - RNA, 19 nt, Homo sapiens
  misc_RNA (1)...(19): siRNA sense strand
cuacgggagcggaauuuga

SEQ ID NO: 1600083 - RNA, 19 nt, Homo sapiens
  misc_RNA (1)...(19): siRNA sense strand
caacuccaaugggccuuuc

SEQ ID NO: 1600084 - RNA, 19 nt, Homo sapiens
  misc_RNA (1)...(19): siRNA sense strand
acccagaaguaguccauau

SEQ ID NO: 1600085 - RNA, 19 nt, Homo sapiens
  misc_RNA (1)...(19): siRNA sense strand
ucaugaguuuaaucaguga

SEQ ID NO: 1600086 - RNA, 19 nt, Homo sapiens
  misc_RNA (1)...(19): siRNA sense strand
uuucgaacauuaccaccuu

SEQ ID NO: 1600087 - RNA, 19 nt, Homo sapiens
  misc_RNA (1)...(19): siRNA sense strand
auaauggcauagcagaguu

SEQ ID NO: 1600088 - RNA, 19 nt, Homo sapiens
  misc_RNA (1)...(19): siRNA sense strand
aaaagaagagcacaagauu

SEQ ID NO: 1600089 - RNA, 19 nt, Homo sapiens
  misc_RNA (1)...(19): siRNA sense strand
gugaucacagagccuauuu

SEQ ID NO: 1600090 - RNA, 19 nt, Homo sapiens
  misc_RNA (1)...(19): siRNA sense strand
ucauguuuccuuccuugua

SEQ ID NO: 1600091 - RNA, 19 nt, Homo sapiens
  misc_RNA (1)...(19): siRNA sense strand
ugggaaguauaauuaaugg

SEQ ID NO: 1600092 - RNA, 19 nt, Homo sapiens
  misc_RNA (1)...(19): siRNA sense strand
cgugguccuucuccauauu

SEQ ID NO: 1600093 - RNA, 19 nt, Homo sapiens
  misc_RNA (1)...(19): siRNA sense strand
gcugaucaagagaagcuuu

SEQ ID NO: 1600094 - RNA, 19 nt, Homo sapiens
  misc_RNA (1)...(19): siRNA sense strand
gcaucauaauggcauagca

SEQ ID NO: 1600095 - RNA, 19 nt, Homo sapiens
  misc_RNA (1)...(19): siRNA sense strand
gauccucgggagagagauu

SEQ ID NO: 1600096 - RNA, 19 nt, Homo sapiens
  misc_RNA (1)...(19): siRNA sense strand
gauuuccaaccuaauauag

SEQ ID NO: 1600097 - RNA, 19 nt, Homo sapiens
  misc_RNA (1)...(19): siRNA sense strand
gaugaaccaacguuagaag

SEQ ID NO: 1600098 - RNA, 19 nt, Homo sapiens
  misc_RNA (1)...(19): siRNA sense strand
cauaauggcauagcagagu

SEQ ID NO: 1600099 - RNA, 19 nt, Homo sapiens
  misc_RNA (1)...(19): siRNA sense strand
agaaguuacgucaguguug

SEQ ID NO: 1600100 - RNA, 19 nt, Homo sapiens
  misc_RNA (1)...(19): siRNA sense strand
ggagagagauuuucuuaaa

SEQ ID NO: 1600101 - RNA, 19 nt, Homo sapiens
  misc_RNA (1)...(19): siRNA sense strand
ggaaauauugggaaguaua

SEQ ID NO: 1600102 - RNA, 19 nt, Homo sapiens
  misc_RNA (1)...(19): siRNA sense strand
ugauggcacuucucaaaua

SEQ ID NO: 1600103 - RNA, 19 nt, Homo sapiens
  misc_RNA (1)...(19): siRNA sense strand
gaaguaauguucuuaaacg

SEQ ID NO: 1600104 - RNA, 19 nt, Homo sapiens
  misc_RNA (1)...(19): siRNA sense strand
gaauauaucacccauaauc

SEQ ID NO: 1600105 - RNA, 19 nt, Homo sapiens
  misc_RNA (1)...(19): siRNA sense strand
uaagugaccuaaaguggaa

SEQ ID NO: 1600106 - RNA, 19 nt, Homo sapiens
  misc_RNA (1)...(19): siRNA sense strand
guccauauguuugcaguua

SEQ ID NO: 1600107 - RNA, 19 nt, Homo sapiens
  misc_RNA (1)...(19): siRNA sense strand
aaacagagcaucauaaugg

SEQ ID NO: 1600108 - RNA, 19 nt, Homo sapiens
  misc_RNA (1)...(19): siRNA sense strand
gcaguuaacauguuucgaa

SEQ ID NO: 1600109 - RNA, 19 nt, Homo sapiens
  misc_RNA (1)...(19): siRNA sense strand
gcgaagaaauauauugauc

SEQ ID NO: 1600110 - RNA, 19 nt, Homo sapiens
  misc_RNA (1)...(19): siRNA sense strand
ggaagaugaaccaacguua

SEQ ID NO: 1600111 - RNA, 19 nt, Homo sapiens
  misc_RNA (1)...(19): siRNA sense strand
cuugagagcuuacaucaga

SEQ ID NO: 1600112 - RNA, 19 nt, Homo sapiens
  misc_RNA (1)...(19): siRNA sense strand
caucagaauuugugaagau

SEQ ID NO: 1600113 - RNA, 19 nt, Homo sapiens
  misc_RNA (1)...(19): siRNA sense strand
gaaguaguccauauguuug

SEQ ID NO: 1600114 - RNA, 19 nt, Homo sapiens
  misc_RNA (1)...(19): siRNA sense strand
cagaguuacuggaaauauu

SEQ ID NO: 1600115 - RNA, 19 nt, Homo sapiens
  misc_RNA (1)...(19): siRNA sense strand
ugaaaucucugagugucua

SEQ ID NO: 1600116 - RNA, 19 nt, Homo sapiens
  misc_RNA (1)...(19): siRNA sense strand
agaaguaguccauauguuu

SEQ ID NO: 1600117 - RNA, 19 nt, Homo sapiens
  misc_RNA (1)...(19): siRNA sense strand
gaagcagccuggccucauc

SEQ ID NO: 1600118 - RNA, 19 nt, Homo sapiens
  misc_RNA (1)...(19): siRNA sense strand
ccagauuuccaaccuaaua

SEQ ID NO: 1600119 - RNA, 19 nt, Homo sapiens
  misc_RNA (1)...(19): siRNA sense strand
gaucagaaguuuguauugc

SEQ ID NO: 1600120 - RNA, 19 nt, Homo sapiens
  misc_RNA (1)...(19): siRNA sense strand
gaagaugaaccaacguuag

SEQ ID NO: 1600121 - RNA, 19 nt, Homo sapiens
  misc_RNA (1)...(19): siRNA sense strand
caucaugaguuuaaucagu

SEQ ID NO: 1600122 - RNA, 19 nt, Homo sapiens
  misc_RNA (1)...(19): siRNA sense strand
gaaacagagcaucauaaug

SEQ ID NO: 1600123 - RNA, 19 nt, Homo sapiens
  misc_RNA (1)...(19): siRNA sense strand
ggugauggcacuucucaaa

SEQ ID NO: 1600124 - RNA, 19 nt, Homo sapiens
  misc_RNA (1)...(19): siRNA sense strand
aaaccacccuucacagaau

SEQ ID NO: 1600125 - RNA, 19 nt, Homo sapiens
  misc_RNA (1)...(19): siRNA sense strand
uagcagaguuacuggaaau

SEQ ID NO: 1600126 - RNA, 19 nt, Homo sapiens
  misc_RNA (1)...(19): siRNA sense strand
cauugaaccaucagaauuu

SEQ ID NO: 1600127 - RNA, 19 nt, Homo sapiens
  misc_RNA (1)...(19): siRNA sense strand
uaaaguggaaggaaguaaa

SEQ ID NO: 1600128 - RNA, 19 nt, Homo sapiens
  misc_RNA (1)...(19): siRNA sense strand
cagaaguaguccauauguu

SEQ ID NO: 1600129 - RNA, 19 nt, Homo sapiens
  misc_RNA (1)...(19): siRNA sense strand
ccaccuuccuccaauccua

SEQ ID NO: 1600130 - RNA, 19 nt, Homo sapiens
  misc_RNA (1)...(19): siRNA sense strand
cuggaaauauugggaagua

SEQ ID NO: 1600131 - RNA, 19 nt, Homo sapiens
  misc_RNA (1)...(19): siRNA sense strand
gaaauuccuaggcuugaga

SEQ ID NO: 1600132 - RNA, 19 nt, Homo sapiens
  misc_RNA (1)...(19): siRNA sense strand
ucacagaaucuaugggaaa

SEQ ID NO: 1600133 - RNA, 19 nt, Homo sapiens
  misc_RNA (1)...(19): siRNA sense strand
aaagaagagcacaagauuu

SEQ ID NO: 1600134 - RNA, 19 nt, Homo sapiens
  misc_RNA (1)...(19): siRNA sense strand
ucaaagacccauuggaaca

SEQ ID NO: 1600135 - RNA, 19 nt, Homo sapiens
  misc_RNA (1)...(19): siRNA sense strand
gaagagauuuuagauguca

SEQ ID NO: 1600136 - RNA, 19 nt, Homo sapiens
  misc_RNA (1)...(19): siRNA sense strand
aaaacgagcugcuuuaagu

SEQ ID NO: 1600137 - RNA, 19 nt, Homo sapiens
  misc_RNA (1)...(19): siRNA sense strand
gauggcacuucucaaauac

SEQ ID NO: 1600138 - RNA, 19 nt, Homo sapiens
  misc_RNA (1)...(19): siRNA sense strand
ugaaacagagcaucauaau

SEQ ID NO: 1600139 - RNA, 19 nt, Homo sapiens
  misc_RNA (1)...(19): siRNA sense strand
gaucacagagccuauuuac

SEQ ID NO: 1600140 - RNA, 19 nt, Homo sapiens
  misc_RNA (1)...(19): siRNA sense strand
gcagaguuacuggaaauau

SEQ ID NO: 1600141 - RNA, 19 nt, Homo sapiens
  misc_RNA (1)...(19): siRNA sense strand
ugacaacgcagcgaagauu

SEQ ID NO: 1600142 - RNA, 19 nt, Homo sapiens
  misc_RNA (1)...(19): siRNA sense strand
gcaacucaaagacccauug

SEQ ID NO: 1600143 - RNA, 19 nt, Homo sapiens
  misc_RNA (1)...(19): siRNA sense strand
cgagcugcuuuaagugaaa

SEQ ID NO: 1600144 - RNA, 19 nt, Homo sapiens
  misc_RNA (1)...(19): siRNA sense strand
gcgaagauucugcccauca

SEQ ID NO: 1600145 - RNA, 19 nt, Homo sapiens
  misc_RNA (1)...(19): siRNA sense strand
aaccuaauauagcgaagaa

SEQ ID NO: 1600146 - RNA, 19 nt, Homo sapiens
  misc_RNA (1)...(19): siRNA sense strand
ucauugaaccaucagaauu

SEQ ID NO: 1600147 - RNA, 19 nt, Homo sapiens
  misc_RNA (1)...(19): siRNA sense strand
aucuacagcuuguuuauga

SEQ ID NO: 1600148 - RNA, 19 nt, Homo sapiens
  misc_RNA (1)...(19): siRNA sense strand
acucaaagacccauuggaa

SEQ ID NO: 1600149 - RNA, 19 nt, Homo sapiens
  misc_RNA (1)...(19): siRNA sense strand
cgaagauucugcccaucau

SEQ ID NO: 1600150 - RNA, 19 nt, Homo sapiens
  misc_RNA (1)...(19): siRNA sense strand
cuccagauuuccaaccuaa

SEQ ID NO: 1600151 - RNA, 19 nt, Homo sapiens
  misc_RNA (1)...(19): siRNA sense strand
guuugcaguuaacauguuu

SEQ ID NO: 1600152 - RNA, 19 nt, Homo sapiens
  misc_RNA (1)...(19): siRNA sense strand
caaagacccauuggaacaa

SEQ ID NO: 1600153 - RNA, 19 nt, Homo sapiens
  misc_RNA (1)...(19): siRNA sense strand
uuuagagucuccagauuuc

SEQ ID NO: 1600154 - RNA, 19 nt, Homo sapiens
  misc_RNA (1)...(19): siRNA sense strand
ccagaaguaguccauaugu

SEQ ID NO: 1600155 - RNA, 19 nt, Homo sapiens
  misc_RNA (1)...(19): siRNA sense strand
cacagaaucuaugggaaau

SEQ ID NO: 1600156 - RNA, 19 nt, Homo sapiens
  misc_RNA (1)...(19): siRNA sense strand
ccuaauauagcgaagaaau

SEQ ID NO: 1600157 - RNA, 19 nt, Homo sapiens
  misc_RNA (1)...(19): siRNA sense strand
gaaccaucagaauuuguga

SEQ ID NO: 1600158 - RNA, 19 nt, Homo sapiens
  misc_RNA (1)...(19): siRNA sense strand
cucaaauacuggccaaaga

SEQ ID NO: 1600159 - RNA, 19 nt, Homo sapiens
  misc_RNA (1)...(19): siRNA sense strand
aagaagagcacaagauuuu

SEQ ID NO: 1600160 - RNA, 19 nt, Homo sapiens
  misc_RNA (1)...(19): siRNA sense strand
ugcuuuaagugaaauggua

SEQ ID NO: 1600161 - RNA, 19 nt, Homo sapiens
  misc_RNA (1)...(19): siRNA sense strand
cagaauuugugaagaucau

SEQ ID NO: 1600162 - RNA, 19 nt, Homo sapiens
  misc_RNA (1)...(19): siRNA sense strand
ccucaucuacagcuuguuu

SEQ ID NO: 1600163 - RNA, 19 nt, Homo sapiens
  misc_RNA (1)...(19): siRNA sense strand
ggaauuugacccggaggaa

SEQ ID NO: 1600164 - RNA, 19 nt, Homo sapiens
  misc_RNA (1)...(19): siRNA sense strand
gagccuauuuacccagaag

SEQ ID NO: 1600165 - RNA, 19 nt, Homo sapiens
  misc_RNA (1)...(19): siRNA sense strand
caaagugaaaucucugagu

SEQ ID NO: 1600166 - RNA, 19 nt, Homo sapiens
  misc_RNA (1)...(19): siRNA sense strand
cauagcagaguuacuggaa

SEQ ID NO: 1600167 - RNA, 19 nt, Homo sapiens
  misc_RNA (1)...(19): siRNA sense strand
uaauggcauagcagaguua

SEQ ID NO: 1600168 - RNA, 19 nt, Homo sapiens
  misc_RNA (1)...(19): siRNA sense strand
ugaagauccucgggagaga

SEQ ID NO: 1600169 - RNA, 19 nt, Homo sapiens
  misc_RNA (1)...(19): siRNA sense strand
guagaauauaucacccaua

SEQ ID NO: 1600170 - RNA, 19 nt, Homo sapiens
  misc_RNA (1)...(19): siRNA sense strand
gauucugcccaucauguuu

SEQ ID NO: 1600171 - RNA, 19 nt, Homo sapiens
  misc_RNA (1)...(19): siRNA sense strand
gaagauucugcccaucaug

SEQ ID NO: 1600172 - RNA, 19 nt, Homo sapiens
  misc_RNA (1)...(19): siRNA sense strand
ucuuugacuuuguuucuga

SEQ ID NO: 1600173 - RNA, 19 nt, Homo sapiens
  misc_RNA (1)...(19): siRNA sense strand
ccagcuggcauacugugua

SEQ ID NO: 1600174 - RNA, 19 nt, Homo sapiens
  misc_RNA (1)...(19): siRNA sense strand
agaguuacuggaaauauug

SEQ ID NO: 1600175 - RNA, 19 nt, Homo sapiens
  misc_RNA (1)...(19): siRNA sense strand
gagcuuacaucagaaaaca

SEQ ID NO: 1600176 - RNA, 19 nt, Homo sapiens
  misc_RNA (1)...(19): siRNA sense strand
aaguuuguauugcagcuuu

SEQ ID NO: 1600177 - RNA, 19 nt, Homo sapiens
  misc_RNA (1)...(19): siRNA sense strand
ggccucaucuacagcuugu

SEQ ID NO: 1600178 - RNA, 19 nt, Homo sapiens
  misc_RNA (1)...(19): siRNA sense strand
aagaugaaccaacguuaga

SEQ ID NO: 1600179 - RNA, 19 nt, Homo sapiens
  misc_RNA (1)...(19): siRNA sense strand
gagcugcuuuaagugaaau

SEQ ID NO: 1600180 - RNA, 19 nt, Homo sapiens
  misc_RNA (1)...(19): siRNA sense strand
cauguuuccuuccuuguac

SEQ ID NO: 1600181 - RNA, 19 nt, Homo sapiens
  misc_RNA (1)...(19): siRNA sense strand
cagcuggcauacuguguag

SEQ ID NO: 1600182 - RNA, 19 nt, Homo sapiens
  misc_RNA (1)...(19): siRNA sense strand
cuacgggagcggaauuuga

SEQ ID NO: 1600183 - RNA, 19 nt, Homo sapiens
  misc_RNA (1)...(19): siRNA sense strand
caacuccaaugggccuuuc

SEQ ID NO: 1600184 - RNA, 19 nt, Homo sapiens
  misc_RNA (1)...(19): siRNA sense strand
acccagaaguaguccauau

SEQ ID NO: 1600185 - RNA, 19 nt, Homo sapiens
  misc_RNA (1)...(19): siRNA sense strand
ucaugaguuuaaucaguga

SEQ ID NO: 1600186 - RNA, 19 nt, Homo sapiens
  misc_RNA (1)...(19): siRNA sense strand
uuucgaacauuaccaccuu

SEQ ID NO: 1600187 - RNA, 19 nt, Homo sapiens
  misc_RNA (1)...(19): siRNA sense strand
auaauggcauagcagaguu

SEQ ID NO: 1600188 - RNA, 19 nt, Homo sapiens
  misc_RNA (1)...(19): siRNA sense strand
aaaagaagagcacaagauu

SEQ ID NO: 1600189 - RNA, 19 nt, Homo sapiens
  misc_RNA (1)...(19): siRNA sense strand
gugaucacagagccuauuu

SEQ ID NO: 1600190 - RNA, 19 nt, Homo sapiens
  misc_RNA (1)...(19): siRNA sense strand
ucauguuuccuuccuugua

SEQ ID NO: 1600191 - RNA, 19 nt, Homo sapiens
  misc_RNA (1)...(19): siRNA sense strand
ugggaaguauaauuaaugg

SEQ ID NO: 1600192 - RNA, 19 nt, Homo sapiens
  misc_RNA (1)...(19): siRNA sense strand
cgugguccuucuccauauu

SEQ ID NO: 1600193 - RNA, 19 nt, Homo sapiens
  misc_RNA (1)...(19): siRNA sense strand
gcugaucaagagaagcuuu

SEQ ID NO: 1600194 - RNA, 19 nt, Homo sapiens
  misc_RNA (1)...(19): siRNA sense strand
gcaucauaauggcauagca

SEQ ID NO: 1600195 - RNA, 19 nt, Homo sapiens
  misc_RNA (1)...(19): siRNA sense strand
gauccucgggagagagauu

SEQ ID NO: 1600196 - RNA, 19 nt, Homo sapiens
  misc_RNA (1)...(19): siRNA sense strand
gauuuccaaccuaauauag

SEQ ID NO: 1600197 - RNA, 19 nt, Homo sapiens
  misc_RNA (1)...(19): siRNA sense strand
gaugaaccaacguuagaag

SEQ ID NO: 1600198 - RNA, 19 nt, Homo sapiens
  misc_RNA (1)...(19): siRNA sense strand
cauaauggcauagcagagu

SEQ ID NO: 1600199 - RNA, 19 nt, Homo sapiens
  misc_RNA (1)...(19): siRNA sense strand
agaaguuacgucaguguug

SEQ ID NO: 1600200 - RNA, 19 nt, Homo sapiens
  misc_RNA (1)...(19): siRNA sense strand
ggagagagauuuucuuaaa

SEQ ID NO: 1600201 - RNA, 19 nt, Homo sapiens
  misc_RNA (1)...(19): siRNA sense strand
ggaaauauugggaaguaua

SEQ ID NO: 1600202 - RNA, 19 nt, Homo sapiens
  misc_RNA (1)...(19): siRNA sense strand
ugauggcacuucucaaaua

SEQ ID NO: 1600203 - RNA, 19 nt, Homo sapiens
  misc_RNA (1)...(19): siRNA sense strand
gaaguaauguucuuaaacg

SEQ ID NO: 1600204 - RNA, 19 nt, Homo sapiens
  misc_RNA (1)...(19): siRNA sense strand
gaauauaucacccauaauc

SEQ ID NO: 1600205 - RNA, 19 nt, Homo sapiens
  misc_RNA (1)...(19): siRNA sense strand
uaagugaccuaaaguggaa

SEQ ID NO: 1600206 - RNA, 19 nt, Homo sapiens
  misc_RNA (1)...(19): siRNA sense strand
guccauauguuugcaguua

SEQ ID NO: 1600207 - RNA, 19 nt, Homo sapiens
  misc_RNA (1)...(19): siRNA sense strand
aaacagagcaucauaaugg

SEQ ID NO: 1600208 - RNA, 19 nt, Homo sapiens
  misc_RNA (1)...(19): siRNA sense strand
gcaguuaacauguuucgaa

SEQ ID NO: 1600209 - RNA, 19 nt, Homo sapiens
  misc_RNA (1)...(19): siRNA sense strand
gcgaagaaauauauugauc

SEQ ID NO: 1600210 - RNA, 19 nt, Homo sapiens
  misc_RNA (1)...(19): siRNA sense strand
ggaagaugaaccaacguua

SEQ ID NO: 1600211 - RNA, 19 nt, Homo sapiens
  misc_RNA (1)...(19): siRNA sense strand
cuugagagcuuacaucaga

SEQ ID NO: 1600212 - RNA, 19 nt, Homo sapiens
  misc_RNA (1)...(19): siRNA sense strand
caucagaauuugugaagau

SEQ ID NO: 1600213 - RNA, 19 nt, Homo sapiens
  misc_RNA (1)...(19): siRNA sense strand
gaaguaguccauauguuug

SEQ ID NO: 1600214 - RNA, 19 nt, Homo sapiens
  misc_RNA (1)...(19): siRNA sense strand
cagaguuacuggaaauauu

SEQ ID NO: 1600215 - RNA, 19 nt, Homo sapiens
  misc_RNA (1)...(19): siRNA sense strand
ugaaaucucugagugucua

SEQ ID NO: 1600216 - RNA, 19 nt, Homo sapiens
  misc_RNA (1)...(19): siRNA sense strand
agaaguaguccauauguuu

SEQ ID NO: 1600217 - RNA, 19 nt, Homo sapiens
  misc_RNA (1)...(19): siRNA sense strand
gaagcagccuggccucauc

SEQ ID NO: 1600218 - RNA, 19 nt, Homo sapiens
  misc_RNA (1)...(19): siRNA sense strand
ccagauuuccaaccuaaua

SEQ ID NO: 1600219 - RNA, 19 nt, Homo sapiens
  misc_RNA (1)...(19): siRNA sense strand
gaucagaaguuuguauugc

SEQ ID NO: 1600220 - RNA, 19 nt, Homo sapiens
  misc_RNA (1)...(19): siRNA sense strand
gaagaugaaccaacguuag

SEQ ID NO: 1600221 - RNA, 19 nt, Homo sapiens
  misc_RNA (1)...(19): siRNA sense strand
caucaugaguuuaaucagu

SEQ ID NO: 1600222 - RNA, 19 nt, Homo sapiens
  misc_RNA (1)...(19): siRNA sense strand
gaaacagagcaucauaaug

SEQ ID NO: 1600223 - RNA, 19 nt, Homo sapiens
  misc_RNA (1)...(19): siRNA sense strand
ggugauggcacuucucaaa

SEQ ID NO: 1600224 - RNA, 19 nt, Homo sapiens
  misc_RNA (1)...(19): siRNA sense strand
aaaccacccuucacagaau

SEQ ID NO: 1600225 - RNA, 19 nt, Homo sapiens
  misc_RNA (1)...(19): siRNA sense strand
uagcagaguuacuggaaau

SEQ ID NO: 1600226 - RNA, 19 nt, Homo sapiens
  misc_RNA (1)...(19): siRNA sense strand
cauugaaccaucagaauuu

SEQ ID NO: 1600227 - RNA, 19 nt, Homo sapiens
  misc_RNA (1)...(19): siRNA sense strand
uaaaguggaaggaaguaaa

SEQ ID NO: 1600228 - RNA, 19 nt, Homo sapiens
  misc_RNA (1)...(19): siRNA sense strand
cagaaguaguccauauguu

SEQ ID NO: 1600229 - RNA, 19 nt, Homo sapiens
  misc_RNA (1)...(19): siRNA sense strand
ccaccuuccuccaauccua

SEQ ID NO: 1600230 - RNA, 19 nt, Homo sapiens
  misc_RNA (1)...(19): siRNA sense strand
cuggaaauauugggaagua

SEQ ID NO: 1600231 - RNA, 19 nt, Homo sapiens
  misc_RNA (1)...(19): siRNA sense strand
gaaauuccuaggcuugaga

SEQ ID NO: 1600232 - RNA, 19 nt, Homo sapiens
  misc_RNA (1)...(19): siRNA sense strand
ucacagaaucuaugggaaa

SEQ ID NO: 1600233 - RNA, 19 nt, Homo sapiens
  misc_RNA (1)...(19): siRNA sense strand
aaagaagagcacaagauuu

SEQ ID NO: 1600234 - RNA, 19 nt, Homo sapiens
  misc_RNA (1)...(19): siRNA sense strand
ucaaagacccauuggaaca

SEQ ID NO: 1600235 - RNA, 19 nt, Homo sapiens
  misc_RNA (1)...(19): siRNA sense strand
gaagagauuuuagauguca

SEQ ID NO: 1600236 - RNA, 19 nt, Homo sapiens
  misc_RNA (1)...(19): siRNA sense strand
aaaacgagcugcuuuaagu

SEQ ID NO: 1600237 - RNA, 19 nt, Homo sapiens
  misc_RNA (1)...(19): siRNA sense strand
gauggcacuucucaaauac

SEQ ID NO: 1600238 - RNA, 19 nt, Homo sapiens
  misc_RNA (1)...(19): siRNA sense strand
ugaaacagagcaucauaau

SEQ ID NO: 1600239 - RNA, 19 nt, Homo sapiens
  misc_RNA (1)...(19): siRNA sense strand
gaucacagagccuauuuac

SEQ ID NO: 1600240 - RNA, 19 nt, Homo sapiens
  misc_RNA (1)...(19): siRNA sense strand
gcagaguuacuggaaauau

SEQ ID NO: 1600241 - RNA, 19 nt, Homo sapiens
  misc_RNA (1)...(19): siRNA sense strand
ugacaacgcagcgaagauu

SEQ ID NO: 1600242 - RNA, 19 nt, Homo sapiens
  misc_RNA (1)...(19): siRNA sense strand
gcaacucaaagacccauug

SEQ ID NO: 1600243 - RNA, 19 nt, Homo sapiens
  misc_RNA (1)...(19): siRNA sense strand
cgagcugcuuuaagugaaa

SEQ ID NO: 1600244 - RNA, 19 nt, Homo sapiens
  misc_RNA (1)...(19): siRNA sense strand
gcgaagauucugcccauca

SEQ ID NO: 1600245 - RNA, 19 nt, Homo sapiens
  misc_RNA (1)...(19): siRNA sense strand
aaccuaauauagcgaagaa

SEQ ID NO: 1600246 - RNA, 19 nt, Homo sapiens
  misc_RNA (1)...(19): siRNA sense strand
ucauugaaccaucagaauu

SEQ ID NO: 1600247 - RNA, 19 nt, Homo sapiens
  misc_RNA (1)...(19): siRNA sense strand
aucuacagcuuguuuauga

SEQ ID NO: 1600248 - RNA, 19 nt, Homo sapiens
  misc_RNA (1)...(19): siRNA sense strand
acucaaagacccauuggaa

SEQ ID NO: 1600249 - RNA, 19 nt, Homo sapiens
  misc_RNA (1)...(19): siRNA sense strand
cgaagauucugcccaucau

SEQ ID NO: 1600250 - RNA, 19 nt, Homo sapiens
  misc_RNA (1)...(19): siRNA sense strand
cuccagauuuccaaccuaa

SEQ ID NO: 1600251 - RNA, 19 nt, Homo sapiens
  misc_RNA (1)...(19): siRNA sense strand
guuugcaguuaacauguuu

SEQ ID NO: 1600252 - RNA, 19 nt, Homo sapiens
  misc_RNA (1)...(19): siRNA sense strand
caaagacccauuggaacaa

SEQ ID NO: 1600253 - RNA, 19 nt, Homo sapiens
  misc_RNA (1)...(19): siRNA sense strand
uuuagagucuccagauuuc

SEQ ID NO: 1600254 - RNA, 19 nt, Homo sapiens
  misc_RNA (1)...(19): siRNA sense strand
ccagaaguaguccauaugu

SEQ ID NO: 1600255 - RNA, 19 nt, Homo sapiens
  misc_RNA (1)...(19): siRNA sense strand
cacagaaucuaugggaaau

SEQ ID NO: 1600256 - RNA, 19 nt, Homo sapiens
  misc_RNA (1)...(19): siRNA sense strand
ccuaauauagcgaagaaau

SEQ ID NO: 1600257 - RNA, 19 nt, Homo sapiens
  misc_RNA (1)...(19): siRNA sense strand
gaaccaucagaauuuguga

SEQ ID NO: 1600258 - RNA, 19 nt, Homo sapiens
  misc_RNA (1)...(19): siRNA sense strand
cucaaauacuggccaaaga

SEQ ID NO: 1600259 - RNA, 19 nt, Homo sapiens
  misc_RNA (1)...(19): siRNA sense strand
aagaagagcacaagauuuu

SEQ ID NO: 1600260 - RNA, 19 nt, Homo sapiens
  misc_RNA (1)...(19): siRNA sense strand
ugcuuuaagugaaauggua

SEQ ID NO: 1600261 - RNA, 19 nt, Homo sapiens
  misc_RNA (1)...(19): siRNA sense strand
cagaauuugugaagaucau

SEQ ID NO: 1600262 - RNA, 19 nt, Homo sapiens
  misc_RNA (1)...(19): siRNA sense strand
ccucaucuacagcuuguuu

SEQ ID NO: 1600263 - RNA, 19 nt, Homo sapiens
  misc_RNA (1)...(19): siRNA sense strand
ggaauuugacccggaggaa

SEQ ID NO: 1600264 - RNA, 19 nt, Homo sapiens
  misc_RNA (1)...(19): siRNA sense strand
gagccuauuuacccagaag

SEQ ID NO: 1600265 - RNA, 19 nt, Homo sapiens
  misc_RNA (1)...(19): siRNA sense strand
caaagugaaaucucugagu

SEQ ID NO: 1600266 - RNA, 19 nt, Homo sapiens
  misc_RNA (1)...(19): siRNA sense strand
cauagcagaguuacuggaa

SEQ ID NO: 1600267 - RNA, 19 nt, Homo sapiens
  misc_RNA (1)...(19): siRNA sense strand
uaauggcauagcagaguua

SEQ ID NO: 1600268 - RNA, 19 nt, Homo sapiens
  misc_RNA (1)...(19): siRNA sense strand
ugaagauccucgggagaga

SEQ ID NO: 1600269 - RNA, 19 nt, Homo sapiens
  misc_RNA (1)...(19): siRNA sense strand
guagaauauaucacccaua

SEQ ID NO: 1600270 - RNA, 19 nt, Homo sapiens
  misc_RNA (1)...(19): siRNA sense strand
gauucugcccaucauguuu

SEQ ID NO: 1600271 - RNA, 19 nt, Homo sapiens
  misc_RNA (1)...(19): siRNA sense strand
gaagauucugcccaucaug

SEQ ID NO: 1600272 - RNA, 19 nt, Homo sapiens
  misc_RNA (1)...(19): siRNA sense strand
ucuuugacuuuguuucuga

SEQ ID NO: 1600273 - RNA, 19 nt, Homo sapiens
  misc_RNA (1)...(19): siRNA sense strand
ccagcuggcauacugugua

SEQ ID NO: 1600274 - RNA, 19 nt, Homo sapiens
  misc_RNA (1)...(19): siRNA sense strand
agaguuacuggaaauauug

SEQ ID NO: 1600275 - RNA, 19 nt, Homo sapiens
  misc_RNA (1)...(19): siRNA sense strand
gagcuuacaucagaaaaca

SEQ ID NO: 1600276 - RNA, 19 nt, Homo sapiens
  misc_RNA (1)...(19): siRNA sense strand
aaguuuguauugcagcuuu

SEQ ID NO: 1600277 - RNA, 19 nt, Homo sapiens
  misc_RNA (1)...(19): siRNA sense strand
ggccucaucuacagcuugu

SEQ ID NO: 1600278 - RNA, 19 nt, Homo sapiens
  misc_RNA (1)...(19): siRNA sense strand
aagaugaaccaacguuaga

SEQ ID NO: 1600279 - RNA, 19 nt, Homo sapiens
  misc_RNA (1)...(19): siRNA sense strand
gagcugcuuuaagugaaau

SEQ ID NO: 1600280 - RNA, 19 nt, Homo sapiens
  misc_RNA (1)...(19): siRNA sense strand
cauguuuccuuccuuguac

SEQ ID NO: 1600281 - RNA, 19 nt, Homo sapiens
  misc_RNA (1)...(19): siRNA sense strand
cagcuggcauacuguguag

SEQ ID NO: 1600282 - RNA, 19 nt, Homo sapiens
  misc_RNA (1)...(19): siRNA sense strand
cuacgggagcggaauuuga

SEQ ID NO: 1600283 - RNA, 19 nt, Homo sapiens
  misc_RNA (1)...(19): siRNA sense strand
caacuccaaugggccuuuc

SEQ ID NO: 1600284 - RNA, 19 nt, Homo sapiens
  misc_RNA (1)...(19): siRNA sense strand
acccagaaguaguccauau

SEQ ID NO: 1600285 - RNA, 19 nt, Homo sapiens
  misc_RNA (1)...(19): siRNA sense strand
ucaugaguuuaaucaguga

SEQ ID NO: 1600286 - RNA, 19 nt, Homo sapiens
  misc_RNA (1)...(19): siRNA sense strand
uuucgaacauuaccaccuu

SEQ ID NO: 1600287 - RNA, 19 nt, Homo sapiens
  misc_RNA (1)...(19): siRNA sense strand
auaauggcauagcagaguu

SEQ ID NO: 1600288 - RNA, 19 nt, Homo sapiens
  misc_RNA (1)...(19): siRNA sense strand
aaaagaagagcacaagauu

SEQ ID NO: 1600289 - RNA, 19 nt, Homo sapiens
  misc_RNA (1)...(19): siRNA sense strand
gugaucacagagccuauuu

SEQ ID NO: 1600290 - RNA, 19 nt, Homo sapiens
  misc_RNA (1)...(19): siRNA sense strand
ucauguuuccuuccuugua

SEQ ID NO: 1600291 - RNA, 19 nt, Homo sapiens
  misc_RNA (1)...(19): siRNA sense strand
ugggaaguauaauuaaugg

SEQ ID NO: 1600292 - RNA, 19 nt, Homo sapiens
  misc_RNA (1)...(19): siRNA sense strand
cgugguccuucuccauauu

SEQ ID NO: 1600293 - RNA, 19 nt, Homo sapiens
  misc_RNA (1)...(19): siRNA sense strand
gcugaucaagagaagcuuu

SEQ ID NO: 1600294 - RNA, 19 nt, Homo sapiens
  misc_RNA (1)...(19): siRNA sense strand
gcaucauaauggcauagca

SEQ ID NO: 1600295 - RNA, 19 nt, Homo sapiens
  misc_RNA (1)...(19): siRNA sense strand
gauccucgggagagagauu

SEQ ID NO: 1600296 - RNA, 19 nt, Homo sapiens
  misc_RNA (1)...(19): siRNA sense strand
gauuuccaaccuaauauag

SEQ ID NO: 1600297 - RNA, 19 nt, Homo sapiens
  misc_RNA (1)...(19): siRNA sense strand
gaugaaccaacguuagaag

SEQ ID NO: 1600298 - RNA, 19 nt, Homo sapiens
  misc_RNA (1)...(19): siRNA sense strand
cauaauggcauagcagagu

SEQ ID NO: 1600299 - RNA, 19 nt, Homo sapiens
  misc_RNA (1)...(19): siRNA sense strand
agaaguuacgucaguguug

SEQ ID NO: 1600300 - RNA, 19 nt, Homo sapiens
  misc_RNA (1)...(19): siRNA sense strand
ggagagagauuuucuuaaa

SEQ ID NO: 1600301 - RNA, 19 nt, Homo sapiens
  misc_RNA (1)...(19): siRNA sense strand
ggaaauauugggaaguaua

SEQ ID NO: 1600302 - RNA, 19 nt, Homo sapiens
  misc_RNA (1)...(19): siRNA sense strand
ugauggcacuucucaaaua

SEQ ID NO: 1600303 - RNA, 19 nt, Homo sapiens
  misc_RNA (1)...(19): siRNA sense strand
gaaguaauguucuuaaacg

SEQ ID NO: 1600304 - RNA, 19 nt, Homo sapiens
  misc_RNA (1)...(19): siRNA sense strand
gaauauaucacccauaauc

SEQ ID NO: 1600305 - RNA, 19 nt, Homo sapiens
  misc_RNA (1)...(19): siRNA sense strand
uaagugaccuaaaguggaa

SEQ ID NO: 1600306 - RNA, 19 nt, Homo sapiens
  misc_RNA (1)...(19): siRNA sense strand
guccauauguuugcaguua

SEQ ID NO: 1600307 - RNA, 19 nt, Homo sapiens
  misc_RNA (1)...(19): siRNA sense strand
aaacagagcaucauaaugg

SEQ ID NO: 1600308 - RNA, 19 nt, Homo sapiens
  misc_RNA (1)...(19): siRNA sense strand
gcaguuaacauguuucgaa

SEQ ID NO: 1600309 - RNA, 19 nt, Homo sapiens
  misc_RNA (1)...(19): siRNA sense strand
gcgaagaaauauauugauc

SEQ ID NO: 1600310 - RNA, 19 nt, Homo sapiens
  misc_RNA (1)...(19): siRNA sense strand
ggaagaugaaccaacguua

SEQ ID NO: 1600311 - RNA, 19 nt, Homo sapiens
  misc_RNA (1)...(19): siRNA sense strand
cuugagagcuuacaucaga

SEQ ID NO: 1600312 - RNA, 19 nt, Homo sapiens
  misc_RNA (1)...(19): siRNA sense strand
caucagaauuugugaagau

SEQ ID NO: 1600313 - RNA, 19 nt, Homo sapiens
  misc_RNA (1)...(19): siRNA sense strand
gaaguaguccauauguuug

SEQ ID NO: 1600314 - RNA, 19 nt, Homo sapiens
  misc_RNA (1)...(19): siRNA sense strand
cagaguuacuggaaauauu

SEQ ID NO: 1600315 - RNA, 19 nt, Homo sapiens
  misc_RNA (1)...(19): siRNA sense strand
ugaaaucucugagugucua

SEQ ID NO: 1600316 - RNA, 19 nt, Homo sapiens
  misc_RNA (1)...(19): siRNA sense strand
agaaguaguccauauguuu

SEQ ID NO: 1600317 - RNA, 19 nt, Homo sapiens
  misc_RNA (1)...(19): siRNA sense strand
gaagcagccuggccucauc

SEQ ID NO: 1600318 - RNA, 19 nt, Homo sapiens
  misc_RNA (1)...(19): siRNA sense strand
ccagauuuccaaccuaaua

SEQ ID NO: 1600319 - RNA, 19 nt, Homo sapiens
  misc_RNA (1)...(19): siRNA sense strand
gaucagaaguuuguauugc

SEQ ID NO: 1600320 - RNA, 19 nt, Homo sapiens
  misc_RNA (1)...(19): siRNA sense strand
gaagaugaaccaacguuag

SEQ ID NO: 1600321 - RNA, 19 nt, Homo sapiens
  misc_RNA (1)...(19): siRNA sense strand
caucaugaguuuaaucagu

SEQ ID NO: 1600322 - RNA, 19 nt, Homo sapiens
  misc_RNA (1)...(19): siRNA sense strand
gaaacagagcaucauaaug

SEQ ID NO: 1600323 - RNA, 19 nt, Homo sapiens
  misc_RNA (1)...(19): siRNA sense strand
ggugauggcacuucucaaa

SEQ ID NO: 1600324 - RNA, 19 nt, Homo sapiens
  misc_RNA (1)...(19): siRNA sense strand
aaaccacccuucacagaau

SEQ ID NO: 1600325 - RNA, 19 nt, Homo sapiens
  misc_RNA (1)...(19): siRNA sense strand
uagcagaguuacuggaaau

SEQ ID NO: 1600326 - RNA, 19 nt, Homo sapiens
  misc_RNA (1)...(19): siRNA sense strand
cauugaaccaucagaauuu

SEQ ID NO: 1600327 - RNA, 19 nt, Homo sapiens
  misc_RNA (1)...(19): siRNA sense strand
uaaaguggaaggaaguaaa

SEQ ID NO: 1600328 - RNA, 19 nt, Homo sapiens
  misc_RNA (1)...(19): siRNA sense strand
cagaaguaguccauauguu

SEQ ID NO: 1600329 - RNA, 19 nt, Homo sapiens
  misc_RNA (1)...(19): siRNA sense strand
ccaccuuccuccaauccua

SEQ ID NO: 1600330 - RNA, 19 nt, Homo sapiens
  misc_RNA (1)...(19): siRNA sense strand
cuggaaauauugggaagua

SEQ ID NO: 1600331 - RNA, 19 nt, Homo sapiens
  misc_RNA (1)...(19): siRNA sense strand
gaaauuccuaggcuugaga

SEQ ID NO: 1600332 - RNA, 19 nt, Homo sapiens
  misc_RNA (1)...(19): siRNA sense strand
ucacagaaucuaugggaaa

SEQ ID NO: 1600333 - RNA, 19 nt, Homo sapiens
  misc_RNA (1)...(19): siRNA sense strand
aaagaagagcacaagauuu

SEQ ID NO: 1600334 - RNA, 19 nt, Homo sapiens
  misc_RNA (1)...(19): siRNA sense strand
ucaaagacccauuggaaca

SEQ ID NO: 1600335 - RNA, 19 nt, Homo sapiens
  misc_RNA (1)...(19): siRNA sense strand
gaagagauuuuagauguca

SEQ ID NO: 1600336 - RNA, 19 nt, Homo sapiens
  misc_RNA (1)...(19): siRNA sense strand
aaaacgagcugcuuuaagu

SEQ ID NO: 1600337 - RNA, 19 nt, Homo sapiens
  misc_RNA (1)...(19): siRNA sense strand
gauggcacuucucaaauac

SEQ ID NO: 1600338 - RNA, 19 nt, Homo sapiens
  misc_RNA (1)...(19): siRNA sense strand
ugaaacagagcaucauaau

SEQ ID NO: 1600339 - RNA, 19 nt, Homo sapiens
  misc_RNA (1)...(19): siRNA sense strand
gaucacagagccuauuuac

SEQ ID NO: 1600340 - RNA, 19 nt, Homo sapiens
  misc_RNA (1)...(19): siRNA sense strand
gcagaguuacuggaaauau

SEQ ID NO: 1600341 - RNA, 19 nt, Homo sapiens
  misc_RNA (1)...(19): siRNA sense strand
ugacaacgcagcgaagauu

SEQ ID NO: 1600342 - RNA, 19 nt, Homo sapiens
  misc_RNA (1)...(19): siRNA sense strand
gcaacucaaagacccauug

SEQ ID NO: 1600343 - RNA, 19 nt, Homo sapiens
  misc_RNA (1)...(19): siRNA sense strand
cgagcugcuuuaagugaaa

SEQ ID NO: 1600344 - RNA, 19 nt, Homo sapiens
  misc_RNA (1)...(19): siRNA sense strand
gcgaagauucugcccauca

SEQ ID NO: 1600345 - RNA, 19 nt, Homo sapiens
  misc_RNA (1)...(19): siRNA sense strand
aaccuaauauagcgaagaa

SEQ ID NO: 1600346 - RNA, 19 nt, Homo sapiens
  misc_RNA (1)...(19): siRNA sense strand
ucauugaaccaucagaauu

SEQ ID NO: 1600347 - RNA, 19 nt, Homo sapiens
  misc_RNA (1)...(19): siRNA sense strand
aucuacagcuuguuuauga

SEQ ID NO: 1600348 - RNA, 19 nt, Homo sapiens
  misc_RNA (1)...(19): siRNA sense strand
acucaaagacccauuggaa

SEQ ID NO: 1600349 - RNA, 19 nt, Homo sapiens
  misc_RNA (1)...(19): siRNA sense strand
cgaagauucugcccaucau

SEQ ID NO: 1600350 - RNA, 19 nt, Homo sapiens
  misc_RNA (1)...(19): siRNA sense strand
cuccagauuuccaaccuaa

SEQ ID NO: 1600351 - RNA, 19 nt, Homo sapiens
  misc_RNA (1)...(19): siRNA sense strand
guuugcaguuaacauguuu

SEQ ID NO: 1600352 - RNA, 19 nt, Homo sapiens
  misc_RNA (1)...(19): siRNA sense strand
caaagacccauuggaacaa

SEQ ID NO: 1600353 - RNA, 19 nt, Homo sapiens
  misc_RNA (1)...(19): siRNA sense strand
uuuagagucuccagauuuc

SEQ ID NO: 1600354 - RNA, 19 nt, Homo sapiens
  misc_RNA (1)...(19): siRNA sense strand
ccagaaguaguccauaugu

SEQ ID NO: 1600355 - RNA, 19 nt, Homo sapiens
  misc_RNA (1)...(19): siRNA sense strand
cacagaaucuaugggaaau

SEQ ID NO: 1600356 - RNA, 19 nt, Homo sapiens
  misc_RNA (1)...(19): siRNA sense strand
ccuaauauagcgaagaaau

SEQ ID NO: 1600357 - RNA, 19 nt, Homo sapiens
  misc_RNA (1)...(19): siRNA sense strand
gaaccaucagaauuuguga

SEQ ID NO: 1600358 - RNA, 19 nt, Homo sapiens
  misc_RNA (1)...(19): siRNA sense strand
cucaaauacuggccaaaga

SEQ ID NO: 1600359 - RNA, 19 nt, Homo sapiens
  misc_RNA (1)...(19): siRNA sense strand
aagaagagcacaagauuuu

SEQ ID NO: 1600360 - RNA, 19 nt, Homo sapiens
  misc_RNA (1)...(19): siRNA sense strand
ugcuuuaagugaaauggua

SEQ ID NO: 1600361 - RNA, 19 nt, Homo sapiens
  misc_RNA (1)...(19): siRNA sense strand
cagaauuugugaagaucau

SEQ ID NO: 1600362 - RNA, 19 nt, Homo sapiens
  misc_RNA (1)...(19): siRNA sense strand
ccucaucuacagcuuguuu

SEQ ID NO: 1600363 - RNA, 19 nt, Homo sapiens
  misc_RNA (1)...(19): siRNA sense strand
ggaauuugacccggaggaa

SEQ ID NO: 1600364 - RNA, 19 nt, Homo sapiens
  misc_RNA (1)...(19): siRNA sense strand
gagccuauuuacccagaag

SEQ ID NO: 1600365 - RNA, 19 nt, Homo sapiens
  misc_RNA (1)...(19): siRNA sense strand
caaagugaaaucucugagu

SEQ ID NO: 1600366 - RNA, 19 nt, Homo sapiens
  misc_RNA (1)...(19): siRNA sense strand
cauagcagaguuacuggaa

SEQ ID NO: 1600367 - RNA, 19 nt, Homo sapiens
  misc_RNA (1)...(19): siRNA sense strand
uaauggcauagcagaguua

SEQ ID NO: 1600368 - RNA, 19 nt, Homo sapiens
  misc_RNA (1)...(19): siRNA sense strand
ugaagauccucgggagaga

SEQ ID NO: 1600369 - RNA, 19 nt, Homo sapiens
  misc_RNA (1)...(19): siRNA sense strand
guagaauauaucacccaua

SEQ ID NO: 1600370 - RNA, 19 nt, Homo sapiens
  misc_RNA (1)...(19): siRNA sense strand
gauucugcccaucauguuu

SEQ ID NO: 1600371 - RNA, 19 nt, Homo sapiens
  misc_RNA (1)...(19): siRNA sense strand
gaagauucugcccaucaug

SEQ ID NO: 1600372 - RNA, 19 nt, Homo sapiens
  misc_RNA (1)...(19): siRNA sense strand
ucuuugacuuuguuucuga

SEQ ID NO: 1600373 - RNA, 19 nt, Homo sapiens
  misc_RNA (1)...(19): siRNA sense strand
ccagcuggcauacugugua

SEQ ID NO: 1600374 - RNA, 19 nt, Homo sapiens
  misc_RNA (1)...(19): siRNA sense strand
agaguuacuggaaauauug

SEQ ID NO: 1600375 - RNA, 19 nt, Homo sapiens
  misc_RNA (1)...(19): siRNA sense strand
gagcuuacaucagaaaaca

SEQ ID NO: 1600376 - RNA, 19 nt, Homo sapiens
  misc_RNA (1)...(19): siRNA sense strand
aaguuuguauugcagcuuu

SEQ ID NO: 1600377 - RNA, 19 nt, Homo sapiens
  misc_RNA (1)...(19): siRNA sense strand
ggccucaucuacagcuugu

SEQ ID NO: 1600378 - RNA, 19 nt, Homo sapiens
  misc_RNA (1)...(19): siRNA sense strand
aagaugaaccaacguuaga

SEQ ID NO: 1600379 - RNA, 19 nt, Homo sapiens
  misc_RNA (1)...(19): siRNA sense strand
gagcugcuuuaagugaaau

SEQ ID NO: 1600380 - RNA, 19 nt, Homo sapiens
  misc_RNA (1)...(19): siRNA sense strand
cauguuuccuuccuuguac

SEQ ID NO: 1600381 - RNA, 19 nt, Homo sapiens
  misc_RNA (1)...(19): siRNA sense strand
cagcuggcauacuguguag

SEQ ID NO: 1600382 - RNA, 19 nt, Homo sapiens
  misc_RNA (1)...(19): siRNA sense strand
cuacgggagcggaauuuga

SEQ ID NO: 1600383 - RNA, 19 nt, Homo sapiens
  misc_RNA (1)...(19): siRNA sense strand
caacuccaaugggccuuuc

SEQ ID NO: 1600384 - RNA, 19 nt, Homo sapiens
  misc_RNA (1)...(19): siRNA sense strand
acccagaaguaguccauau

SEQ ID NO: 1600385 - RNA, 19 nt, Homo sapiens
  misc_RNA (1)...(19): siRNA sense strand
ucaugaguuuaaucaguga

SEQ ID NO: 1600386 - RNA, 19 nt, Homo sapiens
  misc_RNA (1)...(19): siRNA sense strand
uuucgaacauuaccaccuu

SEQ ID NO: 1600387 - RNA, 19 nt, Homo sapiens
  misc_RNA (1)...(19): siRNA sense strand
auaauggcauagcagaguu

SEQ ID NO: 1600388 - RNA, 19 nt, Homo sapiens
  misc_RNA (1)...(19): siRNA sense strand
aaaagaagagcacaagauu

SEQ ID NO: 1600389 - RNA, 19 nt, Homo sapiens
  misc_RNA (1)...(19): siRNA sense strand
gugaucacagagccuauuu

SEQ ID NO: 1600390 - RNA, 19 nt, Homo sapiens
  misc_RNA (1)...(19): siRNA sense strand
ucauguuuccuuccuugua

SEQ ID NO: 1600391 - RNA, 19 nt, Homo sapiens
  misc_RNA (1)...(19): siRNA sense strand
ugggaaguauaauuaaugg

SEQ ID NO: 1600392 - RNA, 19 nt, Homo sapiens
  misc_RNA (1)...(19): siRNA sense strand
cgugguccuucuccauauu

SEQ ID NO: 1600393 - RNA, 19 nt, Homo sapiens
  misc_RNA (1)...(19): siRNA sense strand
gcugaucaagagaagcuuu

SEQ ID NO: 1600394 - RNA, 19 nt, Homo sapiens
  misc_RNA (1)...(19): siRNA sense strand
gcaucauaauggcauagca

SEQ ID NO: 1600395 - RNA, 19 nt, Homo sapiens
  misc_RNA (1)...(19): siRNA sense strand
gauccucgggagagagauu

SEQ ID NO: 1600396 - RNA, 19 nt, Homo sapiens
  misc_RNA (1)...(19): siRNA sense strand
gauuuccaaccuaauauag

SEQ ID NO: 1600397 - RNA, 19 nt, Homo sapiens
  misc_RNA (1)...(19): siRNA sense strand
gaugaaccaacguuagaag

SEQ ID NO: 1600398 - RNA, 19 nt, Homo sapiens
  misc_RNA (1)...(19): siRNA sense strand
cauaauggcauagcagagu

SEQ ID NO: 1600399 - RNA, 19 nt, Homo sapiens
  misc_RNA (1)...(19): siRNA sense strand
agaaguuacgucaguguug

SEQ ID NO: 1600400 - RNA, 19 nt, Homo sapiens
  misc_RNA (1)...(19): siRNA sense strand
ggagagagauuuucuuaaa

SEQ ID NO: 1600401 - RNA, 19 nt, Homo sapiens
  misc_RNA (1)...(19): siRNA sense strand
ggaaauauugggaaguaua

SEQ ID NO: 1600402 - RNA, 19 nt, Homo sapiens
  misc_RNA (1)...(19): siRNA sense strand
ugauggcacuucucaaaua

SEQ ID NO: 1600403 - RNA, 19 nt, Homo sapiens
  misc_RNA (1)...(19): siRNA sense strand
gaaguaauguucuuaaacg

SEQ ID NO: 1600404 - RNA, 19 nt, Homo sapiens
  misc_RNA (1)...(19): siRNA sense strand
gaauauaucacccauaauc

SEQ ID NO: 1600405 - RNA, 19 nt, Homo sapiens
  misc_RNA (1)...(19): siRNA sense strand
uaagugaccuaaaguggaa

SEQ ID NO: 1600406 - RNA, 19 nt, Homo sapiens
  misc_RNA (1)...(19): siRNA sense strand
guccauauguuugcaguua

SEQ ID NO: 1600407 - RNA, 19 nt, Homo sapiens
  misc_RNA (1)...(19): siRNA sense strand
aaacagagcaucauaaugg

SEQ ID NO: 1600408 - RNA, 19 nt, Homo sapiens
  misc_RNA (1)...(19): siRNA sense strand
gcaguuaacauguuucgaa

SEQ ID NO: 1600409 - RNA, 19 nt, Homo sapiens
  misc_RNA (1)...(19): siRNA sense strand
gcgaagaaauauauugauc

SEQ ID NO: 1600410 - RNA, 19 nt, Homo sapiens
  misc_RNA (1)...(19): siRNA sense strand
ggaagaugaaccaacguua

SEQ ID NO: 1600411 - RNA, 19 nt, Homo sapiens
  misc_RNA (1)...(19): siRNA sense strand
cuugagagcuuacaucaga

SEQ ID NO: 1600412 - RNA, 19 nt, Homo sapiens
  misc_RNA (1)...(19): siRNA sense strand
caucagaauuugugaagau

SEQ ID NO: 1600413 - RNA, 19 nt, Homo sapiens
  misc_RNA (1)...(19): siRNA sense strand
gaaguaguccauauguuug

SEQ ID NO: 1600414 - RNA, 19 nt, Homo sapiens
  misc_RNA (1)...(19): siRNA sense strand
cagaguuacuggaaauauu

SEQ ID NO: 1600415 - RNA, 19 nt, Homo sapiens
  misc_RNA (1)...(19): siRNA sense strand
ugaaaucucugagugucua

SEQ ID NO: 1600416 - RNA, 19 nt, Homo sapiens
  misc_RNA (1)...(19): siRNA sense strand
agaaguaguccauauguuu

SEQ ID NO: 1600417 - RNA, 19 nt, Homo sapiens
  misc_RNA (1)...(19): siRNA sense strand
gaagcagccuggccucauc

SEQ ID NO: 1600418 - RNA, 19 nt, Homo sapiens
  misc_RNA (1)...(19): siRNA sense strand
ccagauuuccaaccuaaua

SEQ ID NO: 1600419 - RNA, 19 nt, Homo sapiens
  misc_RNA (1)...(19): siRNA sense strand
gaucagaaguuuguauugc

SEQ ID NO: 1600420 - RNA, 19 nt, Homo sapiens
  misc_RNA (1)...(19): siRNA sense strand
gaagaugaaccaacguuag

SEQ ID NO: 1600421 - RNA, 19 nt, Homo sapiens
  misc_RNA (1)...(19): siRNA sense strand
caucaugaguuuaaucagu

SEQ ID NO: 1600422 - RNA, 19 nt, Homo sapiens
  misc_RNA (1)...(19): siRNA sense strand
gaaacagagcaucauaaug

SEQ ID NO: 1600423 - RNA, 19 nt, Homo sapiens
  misc_RNA (1)...(19): siRNA sense strand
ggugauggcacuucucaaa

SEQ ID NO: 1600424 - RNA, 19 nt, Homo sapiens
  misc_RNA (1)...(19): siRNA sense strand
aaaccacccuucacagaau

SEQ ID NO: 1600425 - RNA, 19 nt, Homo sapiens
  misc_RNA (1)...(19): siRNA sense strand
uagcagaguuacuggaaau

SEQ ID NO: 1600426 - RNA, 19 nt, Homo sapiens
  misc_RNA (1)...(19): siRNA sense strand
cauugaaccaucagaauuu

SEQ ID NO: 1600427 - RNA, 19 nt, Homo sapiens
  misc_RNA (1)...(19): siRNA sense strand
uaaaguggaaggaaguaaa

SEQ ID NO: 1600428 - RNA, 19 nt, Homo sapiens
  misc_RNA (1)...(19): siRNA sense strand
cagaaguaguccauauguu

SEQ ID NO: 1600429 - RNA, 19 nt, Homo sapiens
  misc_RNA (1)...(19): siRNA sense strand
ccaccuuccuccaauccua

SEQ ID NO: 1600430 - RNA, 19 nt, Homo sapiens
  misc_RNA (1)...(19): siRNA sense strand
cuggaaauauugggaagua

SEQ ID NO: 1600431 - RNA, 19 nt, Homo sapiens
  misc_RNA (1)...(19): siRNA sense strand
gaaauuccuaggcuugaga

SEQ ID NO: 1600432 - RNA, 19 nt, Homo sapiens
  misc_RNA (1)...(19): siRNA sense strand
ucacagaaucuaugggaaa

SEQ ID NO: 1600433 - RNA, 19 nt, Homo sapiens
  misc_RNA (1)...(19): siRNA sense strand
aaagaagagcacaagauuu

SEQ ID NO: 1600434 - RNA, 19 nt, Homo sapiens
  misc_RNA (1)...(19): siRNA sense strand
ucaaagacccauuggaaca

SEQ ID NO: 1600435 - RNA, 19 nt, Homo sapiens
  misc_RNA (1)...(19): siRNA sense strand
gaagagauuuuagauguca

SEQ ID NO: 1600436 - RNA, 19 nt, Homo sapiens
  misc_RNA (1)...(19): siRNA sense strand
aaaacgagcugcuuuaagu

SEQ ID NO: 1600437 - RNA, 19 nt, Homo sapiens
  misc_RNA (1)...(19): siRNA sense strand
gauggcacuucucaaauac

SEQ ID NO: 1600438 - RNA, 19 nt, Homo sapiens
  misc_RNA (1)...(19): siRNA sense strand
ugaaacagagcaucauaau

SEQ ID NO: 1600439 - RNA, 19 nt, Homo sapiens
  misc_RNA (1)...(19): siRNA sense strand
gaucacagagccuauuuac

SEQ ID NO: 1600440 - RNA, 19 nt, Homo sapiens
  misc_RNA (1)...(19): siRNA sense strand
gcagaguuacuggaaauau

SEQ ID NO: 1600441 - RNA, 19 nt, Homo sapiens
  misc_RNA (1)...(19): siRNA sense strand
ugacaacgcagcgaagauu

SEQ ID NO: 1600442 - RNA, 19 nt, Homo sapiens
  misc_RNA (1)...(19): siRNA sense strand
gcaacucaaagacccauug

SEQ ID NO: 1600443 - RNA, 19 nt, Homo sapiens
  misc_RNA (1)...(19): siRNA sense strand
cgagcugcuuuaagugaaa

SEQ ID NO: 1600444 - RNA, 19 nt, Homo sapiens
  misc_RNA (1)...(19): siRNA sense strand
gcgaagauucugcccauca

SEQ ID NO: 1600445 - RNA, 19 nt, Homo sapiens
  misc_RNA (1)...(19): siRNA sense strand
aaccuaauauagcgaagaa

SEQ ID NO: 1600446 - RNA, 19 nt, Homo sapiens
  misc_RNA (1)...(19): siRNA sense strand
ucauugaaccaucagaauu

SEQ ID NO: 1600447 - RNA, 19 nt, Homo sapiens
  misc_RNA (1)...(19): siRNA sense strand
aucuacagcuuguuuauga

SEQ ID NO: 1600448 - RNA, 19 nt, Homo sapiens
  misc_RNA (1)...(19): siRNA sense strand
acucaaagacccauuggaa

SEQ ID NO: 1600449 - RNA, 19 nt, Homo sapiens
  misc_RNA (1)...(19): siRNA sense strand
cgaagauucugcccaucau

SEQ ID NO: 1600450 - RNA, 19 nt, Homo sapiens
  misc_RNA (1)...(19): siRNA sense strand
cuccagauuuccaaccuaa

SEQ ID NO: 1600451 - RNA, 19 nt, Homo sapiens
  misc_RNA (1)...(19): siRNA sense strand
guuugcaguuaacauguuu

SEQ ID NO: 1600452 - RNA, 19 nt, Homo sapiens
  misc_RNA (1)...(19): siRNA sense strand
caaagacccauuggaacaa

SEQ ID NO: 1600453 - RNA, 19 nt, Homo sapiens
  misc_RNA (1)...(19): siRNA sense strand
uuuagagucuccagauuuc

SEQ ID NO: 1600454 - RNA, 19 nt, Homo sapiens
  misc_RNA (1)...(19): siRNA sense strand
ccagaaguaguccauaugu

SEQ ID NO: 1600455 - RNA, 19 nt, Homo sapiens
  misc_RNA (1)...(19): siRNA sense strand
cacagaaucuaugggaaau

SEQ ID NO: 1600456 - RNA, 19 nt, Homo sapiens
  misc_RNA (1)...(19): siRNA sense strand
ccuaauauagcgaagaaau

SEQ ID NO: 1600457 - RNA, 19 nt, Homo sapiens
  misc_RNA (1)...(19): siRNA sense strand
gaaccaucagaauuuguga

SEQ ID NO: 1600458 - RNA, 19 nt, Homo sapiens
  misc_RNA (1)...(19): siRNA sense strand
cucaaauacuggccaaaga

SEQ ID NO: 1600459 - RNA, 19 nt, Homo sapiens
  misc_RNA (1)...(19): siRNA sense strand
aagaagagcacaagauuuu

SEQ ID NO: 1600460 - RNA, 19 nt, Homo sapiens
  misc_RNA (1)...(19): siRNA sense strand
ugcuuuaagugaaauggua

SEQ ID NO: 1600461 - RNA, 19 nt, Homo sapiens
  misc_RNA (1)...(19): siRNA sense strand
cagaauuugugaagaucau

SEQ ID NO: 1600462 - RNA, 19 nt, Homo sapiens
  misc_RNA (1)...(19): siRNA sense strand
ccucaucuacagcuuguuu

SEQ ID NO: 1600463 - RNA, 19 nt, Homo sapiens
  misc_RNA (1)...(19): siRNA sense strand
ggaauuugacccggaggaa

SEQ ID NO: 1600464 - RNA, 19 nt, Homo sapiens
  misc_RNA (1)...(19): siRNA sense strand
gagccuauuuacccagaag

SEQ ID NO: 1600465 - RNA, 19 nt, Homo sapiens
  misc_RNA (1)...(19): siRNA sense strand
caaagugaaaucucugagu

SEQ ID NO: 1600466 - RNA, 19 nt, Homo sapiens
  misc_RNA (1)...(19): siRNA sense strand
cauagcagaguuacuggaa

SEQ ID NO: 1600467 - RNA, 19 nt, Homo sapiens
  misc_RNA (1)...(19): siRNA sense strand
uaauggcauagcagaguua

SEQ ID NO: 1600468 - RNA, 19 nt, Homo sapiens
  misc_RNA (1)...(19): siRNA sense strand
ugaagauccucgggagaga

SEQ ID NO: 1600469 - RNA, 19 nt, Homo sapiens
  misc_RNA (1)...(19): siRNA sense strand
guagaauauaucacccaua

SEQ ID NO: 1600470 - RNA, 19 nt, Homo sapiens
  misc_RNA (1)...(19): siRNA sense strand
gauucugcccaucauguuu

SEQ ID NO: 1600471 - RNA, 19 nt, Homo sapiens
  misc_RNA (1)...(19): siRNA sense strand
gaagauucugcccaucaug

SEQ ID NO: 1600472 - RNA, 19 nt, Homo sapiens
  misc_RNA (1)...(19): siRNA sense strand
ucuuugacuuuguuucuga

SEQ ID NO: 1600473 - RNA, 19 nt, Homo sapiens
  misc_RNA (1)...(19): siRNA sense strand
ccagcuggcauacugugua

SEQ ID NO: 1600474 - RNA, 19 nt, Homo sapiens
  misc_RNA (1)...(19): siRNA sense strand
agaguuacuggaaauauug

SEQ ID NO: 1600475 - RNA, 19 nt, Homo sapiens
  misc_RNA (1)...(19): siRNA sense strand
gagcuuacaucagaaaaca

SEQ ID NO: 1600476 - RNA, 19 nt, Homo sapiens
  misc_RNA (1)...(19): siRNA sense strand
aaguuuguauugcagcuuu

SEQ ID NO: 1600477 - RNA, 19 nt, Homo sapiens
  misc_RNA (1)...(19): siRNA sense strand
ggccucaucuacagcuugu

SEQ ID NO: 1600478 - RNA, 19 nt, Homo sapiens
  misc_RNA (1)...(19): siRNA sense strand
aagaugaaccaacguuaga

SEQ ID NO: 1600479 - RNA, 19 nt, Homo sapiens
  misc_RNA (1)...(19): siRNA sense strand
gagcugcuuuaagugaaau

SEQ ID NO: 1600480 - RNA, 19 nt, Homo sapiens
  misc_RNA (1)...(19): siRNA sense strand
cauguuuccuuccuuguac

SEQ ID NO: 1600481 - RNA, 19 nt, Homo sapiens
  misc_RNA (1)...(19): siRNA sense strand
cagcuggcauacuguguag

SEQ ID NO: 1600482 - RNA, 19 nt, Homo sapiens
  misc_RNA (1)...(19): siRNA sense strand
cuacgggagcggaauuuga

SEQ ID NO: 1600483 - RNA, 19 nt, Homo sapiens
  misc_RNA (1)...(19): siRNA sense strand
caacuccaaugggccuuuc

SEQ ID NO: 1600484 - RNA, 19 nt, Homo sapiens
  misc_RNA (1)...(19): siRNA sense strand
acccagaaguaguccauau

SEQ ID NO: 1600485 - RNA, 19 nt, Homo sapiens
  misc_RNA (1)...(19): siRNA sense strand
ucaugaguuuaaucaguga

SEQ ID NO: 1600486 - RNA, 19 nt, Homo sapiens
  misc_RNA (1)...(19): siRNA sense strand
uuucgaacauuaccaccuu

SEQ ID NO: 1600487 - RNA, 19 nt, Homo sapiens
  misc_RNA (1)...(19): siRNA sense strand
auaauggcauagcagaguu

SEQ ID NO: 1600488 - RNA, 19 nt, Homo sapiens
  misc_RNA (1)...(19): siRNA sense strand
aaaagaagagcacaagauu

SEQ ID NO: 1600489 - RNA, 19 nt, Homo sapiens
  misc_RNA (1)...(19): siRNA sense strand
gugaucacagagccuauuu

SEQ ID NO: 1600490 - RNA, 19 nt, Homo sapiens
  misc_RNA (1)...(19): siRNA sense strand
ucauguuuccuuccuugua

SEQ ID NO: 1600491 - RNA, 19 nt, Homo sapiens
  misc_RNA (1)...(19): siRNA sense strand
ugggaaguauaauuaaugg

SEQ ID NO: 1600492 - RNA, 19 nt, Homo sapiens
  misc_RNA (1)...(19): siRNA sense strand
cgugguccuucuccauauu

SEQ ID NO: 1600493 - RNA, 19 nt, Homo sapiens
  misc_RNA (1)...(19): siRNA sense strand
gcugaucaagagaagcuuu

SEQ ID NO: 1600494 - RNA, 19 nt, Homo sapiens
  misc_RNA (1)...(19): siRNA sense strand
gcaucauaauggcauagca

SEQ ID NO: 1600495 - RNA, 19 nt, Homo sapiens
  misc_RNA (1)...(19): siRNA sense strand
gauccucgggagagagauu

SEQ ID NO: 1600496 - RNA, 19 nt, Homo sapiens
  misc_RNA (1)...(19): siRNA sense strand
gauuuccaaccuaauauag

SEQ ID NO: 1600497 - RNA, 19 nt, Homo sapiens
  misc_RNA (1)...(19): siRNA sense strand
gaugaaccaacguuagaag

SEQ ID NO: 1600498 - RNA, 19 nt, Homo sapiens
  misc_RNA (1)...(19): siRNA sense strand
cauaauggcauagcagagu

SEQ ID NO: 1600499 - RNA, 19 nt, Homo sapiens
  misc_RNA (1)...(19): siRNA sense strand
agaaguuacgucaguguug

SEQ ID NO: 1600500 - RNA, 19 nt, Homo sapiens
  misc_RNA (1)...(19): siRNA sense strand
gaucaugaguggcaccuuu

SEQ ID NO: 1600501 - RNA, 19 nt, Homo sapiens
  misc_RNA (1)...(19): siRNA sense strand
gaagacaaagcccuuauga

SEQ ID NO: 1600502 - RNA, 19 nt, Homo sapiens
  misc_RNA (1)...(19): siRNA sense strand
gcgaaaggcugaccagaag

SEQ ID NO: 1600503 - RNA, 19 nt, Homo sapiens
  misc_RNA (1)...(19): siRNA sense strand
gaacauccugcuugacaaa

SEQ ID NO: 1600504 - RNA, 19 nt, Homo sapiens
  misc_RNA (1)...(19): siRNA sense strand
agacaaagcccuuaugauc

SEQ ID NO: 1600505 - RNA, 19 nt, Homo sapiens
  misc_RNA (1)...(19): siRNA sense strand
gcccugagcuucacacuac

SEQ ID NO: 1600506 - RNA, 19 nt, Homo sapiens
  misc_RNA (1)...(19): siRNA sense strand
ugacuuccguguccuguug

SEQ ID NO: 1600507 - RNA, 19 nt, Homo sapiens
  misc_RNA (1)...(19): siRNA sense strand
gggcagagagcgaagugua

SEQ ID NO: 1600508 - RNA, 19 nt, Homo sapiens
  misc_RNA (1)...(19): siRNA sense strand
uggaacagaugaccaagga

SEQ ID NO: 1600509 - RNA, 19 nt, Homo sapiens
  misc_RNA (1)...(19): siRNA sense strand
ccacugagcgagaacuauu

SEQ ID NO: 1600510 - RNA, 19 nt, Homo sapiens
  misc_RNA (1)...(19): siRNA sense strand
acaggaagcucagcgaguu

SEQ ID NO: 1600511 - RNA, 19 nt, Homo sapiens
  misc_RNA (1)...(19): siRNA sense strand
ugacagaggcaucaucaug

SEQ ID NO: 1600512 - RNA, 19 nt, Homo sapiens
  misc_RNA (1)...(19): siRNA sense strand
gcaaucagcacggacaguu

SEQ ID NO: 1600513 - RNA, 19 nt, Homo sapiens
  misc_RNA (1)...(19): siRNA sense strand
gagaggugccuucgggauu

SEQ ID NO: 1600514 - RNA, 19 nt, Homo sapiens
  misc_RNA (1)...(19): siRNA sense strand
ggaagacaaagcccuuaug

SEQ ID NO: 1600515 - RNA, 19 nt, Homo sapiens
  misc_RNA (1)...(19): siRNA sense strand
gcaacagguucaacaagcu

SEQ ID NO: 1600516 - RNA, 19 nt, Homo sapiens
  misc_RNA (1)...(19): siRNA sense strand
gguaucgauuccuccauga

SEQ ID NO: 1600517 - RNA, 19 nt, Homo sapiens
  misc_RNA (1)...(19): siRNA sense strand
uggaugagacacacccuua

SEQ ID NO: 1600518 - RNA, 19 nt, Homo sapiens
  misc_RNA (1)...(19): siRNA sense strand
cagaacauccugcuugaca

SEQ ID NO: 1600519 - RNA, 19 nt, Homo sapiens
  misc_RNA (1)...(19): siRNA sense strand
cgaggucgauugggaagga

SEQ ID NO: 1600520 - RNA, 19 nt, Homo sapiens
  misc_RNA (1)...(19): siRNA sense strand
gcagucgggcacccuguaa

SEQ ID NO: 1600521 - RNA, 19 nt, Homo sapiens
  misc_RNA (1)...(19): siRNA sense strand
ugccaaugcucaacacaga

SEQ ID NO: 1600522 - RNA, 19 nt, Homo sapiens
  misc_RNA (1)...(19): siRNA sense strand
cccagaacauccugcuuga

SEQ ID NO: 1600523 - RNA, 19 nt, Homo sapiens
  misc_RNA (1)...(19): siRNA sense strand
gaggaggcccugagcuuca

SEQ ID NO: 1600524 - RNA, 19 nt, Homo sapiens
  misc_RNA (1)...(19): siRNA sense strand
ggagcaacagguucaacaa

SEQ ID NO: 1600525 - RNA, 19 nt, Homo sapiens
  misc_RNA (1)...(19): siRNA sense strand
ccaagauccuuagcagcaa

SEQ ID NO: 1600526 - RNA, 19 nt, Homo sapiens
  misc_RNA (1)...(19): siRNA sense strand
ugccuucacuguagcuauu

SEQ ID NO: 1600527 - RNA, 19 nt, Homo sapiens
  misc_RNA (1)...(19): siRNA sense strand
agaggugccuucgggauug

SEQ ID NO: 1600528 - RNA, 19 nt, Homo sapiens
  misc_RNA (1)...(19): siRNA sense strand
gaugagacacacccuuaca

SEQ ID NO: 1600529 - RNA, 19 nt, Homo sapiens
  misc_RNA (1)...(19): siRNA sense strand
ggccagugcaguuggauga

SEQ ID NO: 1600530 - RNA, 19 nt, Homo sapiens
  misc_RNA (1)...(19): siRNA sense strand
aguguccgcugcagaggua

SEQ ID NO: 1600531 - RNA, 19 nt, Homo sapiens
  misc_RNA (1)...(19): siRNA sense strand
ccagugcaguuggaugaga

SEQ ID NO: 1600532 - RNA, 19 nt, Homo sapiens
  misc_RNA (1)...(19): siRNA sense strand
gagccucugcugaguauag

SEQ ID NO: 1600533 - RNA, 19 nt, Homo sapiens
  misc_RNA (1)...(19): siRNA sense strand
gagcaacagguucaacaag

SEQ ID NO: 1600534 - RNA, 19 nt, Homo sapiens
  misc_RNA (1)...(19): siRNA sense strand
uaugaucgccauggaauau

SEQ ID NO: 1600535 - RNA, 19 nt, Homo sapiens
  misc_RNA (1)...(19): siRNA sense strand
ccugggcacugcucacuca

SEQ ID NO: 1600536 - RNA, 19 nt, Homo sapiens
  misc_RNA (1)...(19): siRNA sense strand
gaagcucagcgaguuguau

SEQ ID NO: 1600537 - RNA, 19 nt, Homo sapiens
  misc_RNA (1)...(19): siRNA sense strand
ggagcaggaccaccagugu

SEQ ID NO: 1600538 - RNA, 19 nt, Homo sapiens
  misc_RNA (1)...(19): siRNA sense strand
aggcuuugcugggcuauga

SEQ ID NO: 1600539 - RNA, 19 nt, Homo sapiens
  misc_RNA (1)...(19): siRNA sense strand
ggugauugcuacacuuuug

SEQ ID NO: 1600540 - RNA, 19 nt, Homo sapiens
  misc_RNA (1)...(19): siRNA sense strand
agaacauccugcuugacaa

SEQ ID NO: 1600541 - RNA, 19 nt, Homo sapiens
  misc_RNA (1)...(19): siRNA sense strand
gaaaggcugaccagaagcu

SEQ ID NO: 1600542 - RNA, 19 nt, Homo sapiens
  misc_RNA (1)...(19): siRNA sense strand
gugacugccucgggugauu

SEQ ID NO: 1600543 - RNA, 19 nt, Homo sapiens
  misc_RNA (1)...(19): siRNA sense strand
ggcaggcagcccagaauga

SEQ ID NO: 1600544 - RNA, 19 nt, Homo sapiens
  misc_RNA (1)...(19): siRNA sense strand
ggaagcucagcgaguugua

SEQ ID NO: 1600545 - RNA, 19 nt, Homo sapiens
  misc_RNA (1)...(19): siRNA sense strand
ccuacaaccagaagaguga

SEQ ID NO: 1600546 - RNA, 19 nt, Homo sapiens
  misc_RNA (1)...(19): siRNA sense strand
uucgaucggucacagauga

SEQ ID NO: 1600547 - RNA, 19 nt, Homo sapiens
  misc_RNA (1)...(19): siRNA sense strand
gauuucggcaucuccaaga

SEQ ID NO: 1600548 - RNA, 19 nt, Homo sapiens
  misc_RNA (1)...(19): siRNA sense strand
aggagccucugcugaguau

SEQ ID NO: 1600549 - RNA, 19 nt, Homo sapiens
  misc_RNA (1)...(19): siRNA sense strand
ccaggagccucugcugagu

SEQ ID NO: 1600550 - RNA, 19 nt, Homo sapiens
  misc_RNA (1)...(19): siRNA sense strand
cauggcagccucacugaca

SEQ ID NO: 1600551 - RNA, 19 nt, Homo sapiens
  misc_RNA (1)...(19): siRNA sense strand
ggggaugccuucacuguag

SEQ ID NO: 1600552 - RNA, 19 nt, Homo sapiens
  misc_RNA (1)...(19): siRNA sense strand
gggagcaacagguucaaca

SEQ ID NO: 1600553 - RNA, 19 nt, Homo sapiens
  misc_RNA (1)...(19): siRNA sense strand
agaccauccugcacuucuu

SEQ ID NO: 1600554 - RNA, 19 nt, Homo sapiens
  misc_RNA (1)...(19): siRNA sense strand
gcaggcagcccagaaugag

SEQ ID NO: 1600555 - RNA, 19 nt, Homo sapiens
  misc_RNA (1)...(19): siRNA sense strand
ucgucaagaucggugauuu

SEQ ID NO: 1600556 - RNA, 19 nt, Homo sapiens
  misc_RNA (1)...(19): siRNA sense strand
caggagccucugcugagua

SEQ ID NO: 1600557 - RNA, 19 nt, Homo sapiens
  misc_RNA (1)...(19): siRNA sense strand
gcaagcccuacaaccagaa

SEQ ID NO: 1600558 - RNA, 19 nt, Homo sapiens
  misc_RNA (1)...(19): siRNA sense strand
cgaguuguaugugguaucg

SEQ ID NO: 1600559 - RNA, 19 nt, Homo sapiens
  misc_RNA (1)...(19): siRNA sense strand
ucagccagcccaccauugu

SEQ ID NO: 1600560 - RNA, 19 nt, Homo sapiens
  misc_RNA (1)...(19): siRNA sense strand
ccaccacucagccacauca

SEQ ID NO: 1600561 - RNA, 19 nt, Homo sapiens
  misc_RNA (1)...(19): siRNA sense strand
cagcugguccugagucuac

SEQ ID NO: 1600562 - RNA, 19 nt, Homo sapiens
  misc_RNA (1)...(19): siRNA sense strand
uggcugaguucauccaaaa

SEQ ID NO: 1600563 - RNA, 19 nt, Homo sapiens
  misc_RNA (1)...(19): siRNA sense strand
gcagagagcgaaguguacu

SEQ ID NO: 1600564 - RNA, 19 nt, Homo sapiens
  misc_RNA (1)...(19): siRNA sense strand
caaucagcacggacaguug

SEQ ID NO: 1600565 - RNA, 19 nt, Homo sapiens
  misc_RNA (1)...(19): siRNA sense strand
gagaccauccugcacuucu

SEQ ID NO: 1600566 - RNA, 19 nt, Homo sapiens
  misc_RNA (1)...(19): siRNA sense strand
cagcgaguuguauguggua

SEQ ID NO: 1600567 - RNA, 19 nt, Homo sapiens
  misc_RNA (1)...(19): siRNA sense strand
caucagccagcccaccauu

SEQ ID NO: 1600568 - RNA, 19 nt, Homo sapiens
  misc_RNA (1)...(19): siRNA sense strand
ccuuugcaccuaucucuga

SEQ ID NO: 1600569 - RNA, 19 nt, Homo sapiens
  misc_RNA (1)...(19): siRNA sense strand
gaggugccuucgggauugu

SEQ ID NO: 1600570 - RNA, 19 nt, Homo sapiens
  misc_RNA (1)...(19): siRNA sense strand
ucauugaguacuacgagaa

SEQ ID NO: 1600571 - RNA, 19 nt, Homo sapiens
  misc_RNA (1)...(19): siRNA sense strand
gaccauccugcacuucuuc

SEQ ID NO: 1600572 - RNA, 19 nt, Homo sapiens
  misc_RNA (1)...(19): siRNA sense strand
cccaguucaucucgcguuu

SEQ ID NO: 1600573 - RNA, 19 nt, Homo sapiens
  misc_RNA (1)...(19): siRNA sense strand
uaaaguggcugguuaauuc

SEQ ID NO: 1600574 - RNA, 19 nt, Homo sapiens
  misc_RNA (1)...(19): siRNA sense strand
gaaagaacccucaaucaga

SEQ ID NO: 1600575 - RNA, 19 nt, Homo sapiens
  misc_RNA (1)...(19): siRNA sense strand
gcuaacaaguuugagcuua

SEQ ID NO: 1600576 - RNA, 19 nt, Homo sapiens
  misc_RNA (1)...(19): siRNA sense strand
gaacugaggcaucgcgaaa

SEQ ID NO: 1600577 - RNA, 19 nt, Homo sapiens
  misc_RNA (1)...(19): siRNA sense strand
caccaagccuguuugcuaa

SEQ ID NO: 1600578 - RNA, 19 nt, Homo sapiens
  misc_RNA (1)...(19): siRNA sense strand
ggaaaccucagagcuauaa

SEQ ID NO: 1600579 - RNA, 19 nt, Homo sapiens
  misc_RNA (1)...(19): siRNA sense strand
cuaacaaguuugagcuuaa

SEQ ID NO: 1600580 - RNA, 19 nt, Homo sapiens
  misc_RNA (1)...(19): siRNA sense strand
gcuauaaaguggagugaca

SEQ ID NO: 1600581 - RNA, 19 nt, Homo sapiens
  misc_RNA (1)...(19): siRNA sense strand
ucaccaagccuguuugcua

SEQ ID NO: 1600582 - RNA, 19 nt, Homo sapiens
  misc_RNA (1)...(19): siRNA sense strand
gagugaaacugcgauacaa

SEQ ID NO: 1600583 - RNA, 19 nt, Homo sapiens
  misc_RNA (1)...(19): siRNA sense strand
aguuugagcuuaauaccua

SEQ ID NO: 1600584 - RNA, 19 nt, Homo sapiens
  misc_RNA (1)...(19): siRNA sense strand
aaaguggagugacauggaa

SEQ ID NO: 1600585 - RNA, 19 nt, Homo sapiens
  misc_RNA (1)...(19): siRNA sense strand
gcgaaagaacccucaauca

SEQ ID NO: 1600586 - RNA, 19 nt, Homo sapiens
  misc_RNA (1)...(19): siRNA sense strand
cuauggaaacggagacuua

SEQ ID NO: 1600587 - RNA, 19 nt, Homo sapiens
  misc_RNA (1)...(19): siRNA sense strand
cuauguacaugguauuugu

SEQ ID NO: 1600588 - RNA, 19 nt, Homo sapiens
  misc_RNA (1)...(19): siRNA sense strand
cgaaagaacccucaaucag

SEQ ID NO: 1600589 - RNA, 19 nt, Homo sapiens
  misc_RNA (1)...(19): siRNA sense strand
caugguauuuguaucuaug

SEQ ID NO: 1600590 - RNA, 19 nt, Homo sapiens
  misc_RNA (1)...(19): siRNA sense strand
uaaaguggagugacaugga

SEQ ID NO: 1600591 - RNA, 19 nt, Homo sapiens
  misc_RNA (1)...(19): siRNA sense strand
gccacuauguacaugguau

SEQ ID NO: 1600592 - RNA, 19 nt, Homo sapiens
  misc_RNA (1)...(19): siRNA sense strand
cgauacaacccagcuggua

SEQ ID NO: 1600593 - RNA, 19 nt, Homo sapiens
  misc_RNA (1)...(19): siRNA sense strand
uaauucaccaagccuguuu

SEQ ID NO: 1600594 - RNA, 19 nt, Homo sapiens
  misc_RNA (1)...(19): siRNA sense strand
cuggaaaccucagagcuau

SEQ ID NO: 1600595 - RNA, 19 nt, Homo sapiens
  misc_RNA (1)...(19): siRNA sense strand
acugaggcaucgcgaaaga

SEQ ID NO: 1600596 - RNA, 19 nt, Homo sapiens
  misc_RNA (1)...(19): siRNA sense strand
gaacccucaaucagaguga

SEQ ID NO: 1600597 - RNA, 19 nt, Homo sapiens
  misc_RNA (1)...(19): siRNA sense strand
guggaaugccuagaacuga

SEQ ID NO: 1600598 - RNA, 19 nt, Homo sapiens
  misc_RNA (1)...(19): siRNA sense strand
uauggaaacggagacuuaa

SEQ ID NO: 1600599 - RNA, 19 nt, Homo sapiens
  misc_RNA (1)...(19): siRNA sense strand
ccacggccacuauguacau

SEQ ID NO: 1600600 - RNA, 19 nt, Homo sapiens
  misc_RNA (1)...(19): siRNA sense strand
gguauuuguaucuauggaa

SEQ ID NO: 1600601 - RNA, 19 nt, Homo sapiens
  misc_RNA (1)...(19): siRNA sense strand
acuggaaaccucagagcua

SEQ ID NO: 1600602 - RNA, 19 nt, Homo sapiens
  misc_RNA (1)...(19): siRNA sense strand
gaaaccucagagcuauaaa

SEQ ID NO: 1600603 - RNA, 19 nt, Homo sapiens
  misc_RNA (1)...(19): siRNA sense strand
ucagagugaaacugcgaua

SEQ ID NO: 1600604 - RNA, 19 nt, Homo sapiens
  misc_RNA (1)...(19): siRNA sense strand
ccacuauguacaugguauu

SEQ ID NO: 1600605 - RNA, 19 nt, Homo sapiens
  misc_RNA (1)...(19): siRNA sense strand
agagugaaacugcgauaca

SEQ ID NO: 1600606 - RNA, 19 nt, Homo sapiens
  misc_RNA (1)...(19): siRNA sense strand
uaaaguggcugguuaauuc

SEQ ID NO: 1600607 - RNA, 19 nt, Homo sapiens
  misc_RNA (1)...(19): siRNA sense strand
gaaagaacccucaaucaga

SEQ ID NO: 1600608 - RNA, 19 nt, Homo sapiens
  misc_RNA (1)...(19): siRNA sense strand
gcuaacaaguuugagcuua

SEQ ID NO: 1600609 - RNA, 19 nt, Homo sapiens
  misc_RNA (1)...(19): siRNA sense strand
gaacugaggcaucgcgaaa

SEQ ID NO: 1600610 - RNA, 19 nt, Homo sapiens
  misc_RNA (1)...(19): siRNA sense strand
caccaagccuguuugcuaa

SEQ ID NO: 1600611 - RNA, 19 nt, Homo sapiens
  misc_RNA (1)...(19): siRNA sense strand
ggaaaccucagagcuauaa

SEQ ID NO: 1600612 - RNA, 19 nt, Homo sapiens
  misc_RNA (1)...(19): siRNA sense strand
cuaacaaguuugagcuuaa

SEQ ID NO: 1600613 - RNA, 19 nt, Homo sapiens
  misc_RNA (1)...(19): siRNA sense strand
gcuauaaaguggagugaca

SEQ ID NO: 1600614 - RNA, 19 nt, Homo sapiens
  misc_RNA (1)...(19): siRNA sense strand
ucaccaagccuguuugcua

SEQ ID NO: 1600615 - RNA, 19 nt, Homo sapiens
  misc_RNA (1)...(19): siRNA sense strand
gagugaaacugcgauacaa

SEQ ID NO: 1600616 - RNA, 19 nt, Homo sapiens
  misc_RNA (1)...(19): siRNA sense strand
aguuugagcuuaauaccua

SEQ ID NO: 1600617 - RNA, 19 nt, Homo sapiens
  misc_RNA (1)...(19): siRNA sense strand
aaaguggagugacauggaa

SEQ ID NO: 1600618 - RNA, 19 nt, Homo sapiens
  misc_RNA (1)...(19): siRNA sense strand
gcgaaagaacccucaauca

SEQ ID NO: 1600619 - RNA, 19 nt, Homo sapiens
  misc_RNA (1)...(19): siRNA sense strand
cuauggaaacggagacuua

SEQ ID NO: 1600620 - RNA, 19 nt, Homo sapiens
  misc_RNA (1)...(19): siRNA sense strand
cuauguacaugguauuugu

SEQ ID NO: 1600621 - RNA, 19 nt, Homo sapiens
  misc_RNA (1)...(19): siRNA sense strand
cgaaagaacccucaaucag

SEQ ID NO: 1600622 - RNA, 19 nt, Homo sapiens
  misc_RNA (1)...(19): siRNA sense strand
caugguauuuguaucuaug

SEQ ID NO: 1600623 - RNA, 19 nt, Homo sapiens
  misc_RNA (1)...(19): siRNA sense strand
uaaaguggagugacaugga

SEQ ID NO: 1600624 - RNA, 19 nt, Homo sapiens
  misc_RNA (1)...(19): siRNA sense strand
gccacuauguacaugguau

SEQ ID NO: 1600625 - RNA, 19 nt, Homo sapiens
  misc_RNA (1)...(19): siRNA sense strand
cgauacaacccagcuggua

SEQ ID NO: 1600626 - RNA, 19 nt, Homo sapiens
  misc_RNA (1)...(19): siRNA sense strand
uaauucaccaagccuguuu

SEQ ID NO: 1600627 - RNA, 19 nt, Homo sapiens
  misc_RNA (1)...(19): siRNA sense strand
cuggaaaccucagagcuau

SEQ ID NO: 1600628 - RNA, 19 nt, Homo sapiens
  misc_RNA (1)...(19): siRNA sense strand
acugaggcaucgcgaaaga

SEQ ID NO: 1600629 - RNA, 19 nt, Homo sapiens
  misc_RNA (1)...(19): siRNA sense strand
gaacccucaaucagaguga

SEQ ID NO: 1600630 - RNA, 19 nt, Homo sapiens
  misc_RNA (1)...(19): siRNA sense strand
guggaaugccuagaacuga

SEQ ID NO: 1600631 - RNA, 19 nt, Homo sapiens
  misc_RNA (1)...(19): siRNA sense strand
uauggaaacggagacuuaa

SEQ ID NO: 1600632 - RNA, 19 nt, Homo sapiens
  misc_RNA (1)...(19): siRNA sense strand
ccacggccacuauguacau

SEQ ID NO: 1600633 - RNA, 19 nt, Homo sapiens
  misc_RNA (1)...(19): siRNA sense strand
gguauuuguaucuauggaa

SEQ ID NO: 1600634 - RNA, 19 nt, Homo sapiens
  misc_RNA (1)...(19): siRNA sense strand
acuggaaaccucagagcua

SEQ ID NO: 1600635 - RNA, 19 nt, Homo sapiens
  misc_RNA (1)...(19): siRNA sense strand
gaaaccucagagcuauaaa

SEQ ID NO: 1600636 - RNA, 19 nt, Homo sapiens
  misc_RNA (1)...(19): siRNA sense strand
ucagagugaaacugcgaua

SEQ ID NO: 1600637 - RNA, 19 nt, Homo sapiens
  misc_RNA (1)...(19): siRNA sense strand
ccacuauguacaugguauu

SEQ ID NO: 1600638 - RNA, 19 nt, Homo sapiens
  misc_RNA (1)...(19): siRNA sense strand
agagugaaacugcgauaca

SEQ ID NO: 1600639 - RNA, 19 nt, Homo sapiens
  misc_RNA (1)...(19): siRNA sense strand
uaaaguggcugguuaauuc

SEQ ID NO: 1600640 - RNA, 19 nt, Homo sapiens
  misc_RNA (1)...(19): siRNA sense strand
gaaagaacccucaaucaga

SEQ ID NO: 1600641 - RNA, 19 nt, Homo sapiens
  misc_RNA (1)...(19): siRNA sense strand
gcuaacaaguuugagcuua

SEQ ID NO: 1600642 - RNA, 19 nt, Homo sapiens
  misc_RNA (1)...(19): siRNA sense strand
gaacugaggcaucgcgaaa

SEQ ID NO: 1600643 - RNA, 19 nt, Homo sapiens
  misc_RNA (1)...(19): siRNA sense strand
caccaagccuguuugcuaa

SEQ ID NO: 1600644 - RNA, 19 nt, Homo sapiens
  misc_RNA (1)...(19): siRNA sense strand
ggaaaccucagagcuauaa

SEQ ID NO: 1600645 - RNA, 19 nt, Homo sapiens
  misc_RNA (1)...(19): siRNA sense strand
cuaacaaguuugagcuuaa

SEQ ID NO: 1600646 - RNA, 19 nt, Homo sapiens
  misc_RNA (1)...(19): siRNA sense strand
gcuauaaaguggagugaca

SEQ ID NO: 1600647 - RNA, 19 nt, Homo sapiens
  misc_RNA (1)...(19): siRNA sense strand
ucaccaagccuguuugcua

SEQ ID NO: 1600648 - RNA, 19 nt, Homo sapiens
  misc_RNA (1)...(19): siRNA sense strand
gagugaaacugcgauacaa

SEQ ID NO: 1600649 - RNA, 19 nt, Homo sapiens
  misc_RNA (1)...(19): siRNA sense strand
aguuugagcuuaauaccua

SEQ ID NO: 1600650 - RNA, 19 nt, Homo sapiens
  misc_RNA (1)...(19): siRNA sense strand
aaaguggagugacauggaa

SEQ ID NO: 1600651 - RNA, 19 nt, Homo sapiens
  misc_RNA (1)...(19): siRNA sense strand
gcgaaagaacccucaauca

SEQ ID NO: 1600652 - RNA, 19 nt, Homo sapiens
  misc_RNA (1)...(19): siRNA sense strand
cuauggaaacggagacuua

SEQ ID NO: 1600653 - RNA, 19 nt, Homo sapiens
  misc_RNA (1)...(19): siRNA sense strand
cuauguacaugguauuugu

SEQ ID NO: 1600654 - RNA, 19 nt, Homo sapiens
  misc_RNA (1)...(19): siRNA sense strand
cgaaagaacccucaaucag

SEQ ID NO: 1600655 - RNA, 19 nt, Homo sapiens
  misc_RNA (1)...(19): siRNA sense strand
caugguauuuguaucuaug

SEQ ID NO: 1600656 - RNA, 19 nt, Homo sapiens
  misc_RNA (1)...(19): siRNA sense strand
uaaaguggagugacaugga

SEQ ID NO: 1600657 - RNA, 19 nt, Homo sapiens
  misc_RNA (1)...(19): siRNA sense strand
gccacuauguacaugguau

SEQ ID NO: 1600658 - RNA, 19 nt, Homo sapiens
  misc_RNA (1)...(19): siRNA sense strand
cgauacaacccagcuggua

SEQ ID NO: 1600659 - RNA, 19 nt, Homo sapiens
  misc_RNA (1)...(19): siRNA sense strand
uaauucaccaagccuguuu

SEQ ID NO: 1600660 - RNA, 19 nt, Homo sapiens
  misc_RNA (1)...(19): siRNA sense strand
cuggaaaccucagagcuau

SEQ ID NO: 1600661 - RNA, 19 nt, Homo sapiens
  misc_RNA (1)...(19): siRNA sense strand
acugaggcaucgcgaaaga

SEQ ID NO: 1600662 - RNA, 19 nt, Homo sapiens
  misc_RNA (1)...(19): siRNA sense strand
gaacccucaaucagaguga

SEQ ID NO: 1600663 - RNA, 19 nt, Homo sapiens
  misc_RNA (1)...(19): siRNA sense strand
guggaaugccuagaacuga

SEQ ID NO: 1600664 - RNA, 19 nt, Homo sapiens
  misc_RNA (1)...(19): siRNA sense strand
uauggaaacggagacuuaa

SEQ ID NO: 1600665 - RNA, 19 nt, Homo sapiens
  misc_RNA (1)...(19): siRNA sense strand
ccacggccacuauguacau

SEQ ID NO: 1600666 - RNA, 19 nt, Homo sapiens
  misc_RNA (1)...(19): siRNA sense strand
gguauuuguaucuauggaa

SEQ ID NO: 1600667 - RNA, 19 nt, Homo sapiens
  misc_RNA (1)...(19): siRNA sense strand
acuggaaaccucagagcua

SEQ ID NO: 1600668 - RNA, 19 nt, Homo sapiens
  misc_RNA (1)...(19): siRNA sense strand
gaaaccucagagcuauaaa

SEQ ID NO: 1600669 - RNA, 19 nt, Homo sapiens
  misc_RNA (1)...(19): siRNA sense strand
ucagagugaaacugcgaua

SEQ ID NO: 1600670 - RNA, 19 nt, Homo sapiens
  misc_RNA (1)...(19): siRNA sense strand
ccacuauguacaugguauu

SEQ ID NO: 1600671 - RNA, 19 nt, Homo sapiens
  misc_RNA (1)...(19): siRNA sense strand
agagugaaacugcgauaca

SEQ ID NO: 1600672 - RNA, 19 nt, Homo sapiens
  misc_RNA (1)...(19): siRNA sense strand
agaaauugcugccgugaua

SEQ ID NO: 1600673 - RNA, 19 nt, Homo sapiens
  misc_RNA (1)...(19): siRNA sense strand
gcauucaucugcauagaga

SEQ ID NO: 1600674 - RNA, 19 nt, Homo sapiens
  misc_RNA (1)...(19): siRNA sense strand
ggacucagcgcuuuccuuu

SEQ ID NO: 1600675 - RNA, 19 nt, Homo sapiens
  misc_RNA (1)...(19): siRNA sense strand
gugcagaaauggagaguca

SEQ ID NO: 1600676 - RNA, 19 nt, Homo sapiens
  misc_RNA (1)...(19): siRNA sense strand
cauaugcagugaacacauu

SEQ ID NO: 1600677 - RNA, 19 nt, Homo sapiens
  misc_RNA (1)...(19): siRNA sense strand
ccauagagccggagcagaa

SEQ ID NO: 1600678 - RNA, 19 nt, Homo sapiens
  misc_RNA (1)...(19): siRNA sense strand
gagcaccaaugacuacauc

SEQ ID NO: 1600679 - RNA, 19 nt, Homo sapiens
  misc_RNA (1)...(19): siRNA sense strand
cgugauauuuggcuucuug

SEQ ID NO: 1600680 - RNA, 19 nt, Homo sapiens
  misc_RNA (1)...(19): siRNA sense strand
caaggucgcccaagugauc

SEQ ID NO: 1600681 - RNA, 19 nt, Homo sapiens
  misc_RNA (1)...(19): siRNA sense strand
acacuggacucagcgcuuu

SEQ ID NO: 1600682 - RNA, 19 nt, Homo sapiens
  misc_RNA (1)...(19): siRNA sense strand
acuggcgucuugcugauua

SEQ ID NO: 1600683 - RNA, 19 nt, Homo sapiens
  misc_RNA (1)...(19): siRNA sense strand
caaucguacuggcugcuuu

SEQ ID NO: 1600684 - RNA, 19 nt, Homo sapiens
  misc_RNA (1)...(19): siRNA sense strand
gcagagcaccaaugacuac

SEQ ID NO: 1600685 - RNA, 19 nt, Homo sapiens
  misc_RNA (1)...(19): siRNA sense strand
gugugaaggccucuacuuu

SEQ ID NO: 1600686 - RNA, 19 nt, Homo sapiens
  misc_RNA (1)...(19): siRNA sense strand
cguacuggcugcuuuaaac

SEQ ID NO: 1600687 - RNA, 19 nt, Homo sapiens
  misc_RNA (1)...(19): siRNA sense strand
gcacggaguccagggaugu

SEQ ID NO: 1600688 - RNA, 19 nt, Homo sapiens
  misc_RNA (1)...(19): siRNA sense strand
uguggugacuggcgucuug

SEQ ID NO: 1600689 - RNA, 19 nt, Homo sapiens
  misc_RNA (1)...(19): siRNA sense strand
gaaauugcugccgugauau

SEQ ID NO: 1600690 - RNA, 19 nt, Homo sapiens
  misc_RNA (1)...(19): siRNA sense strand
gcgucuugcugauuauguu

SEQ ID NO: 1600691 - RNA, 19 nt, Homo sapiens
  misc_RNA (1)...(19): siRNA sense strand
gagcugcagugcguuugug

SEQ ID NO: 1600692 - RNA, 19 nt, Homo sapiens
  misc_RNA (1)...(19): siRNA sense strand
cagcagagcaccaaugacu

SEQ ID NO: 1600693 - RNA, 19 nt, Homo sapiens
  misc_RNA (1)...(19): siRNA sense strand
gccagcagagcaccaauga

SEQ ID NO: 1600694 - RNA, 19 nt, Homo sapiens
  misc_RNA (1)...(19): siRNA sense strand
ggacagucgcccugagauc

SEQ ID NO: 1600695 - RNA, 19 nt, Homo sapiens
  misc_RNA (1)...(19): siRNA sense strand
gaucuuggcccugauugca

SEQ ID NO: 1600696 - RNA, 19 nt, Homo sapiens
  misc_RNA (1)...(19): siRNA sense strand
gcgcuuuccuuuucuuuau

SEQ ID NO: 1600697 - RNA, 19 nt, Homo sapiens
  misc_RNA (1)...(19): siRNA sense strand
ugacuggcgucuugcugau

SEQ ID NO: 1600698 - RNA, 19 nt, Homo sapiens
  misc_RNA (1)...(19): siRNA sense strand
gaucaacuggaaucugaca

SEQ ID NO: 1600699 - RNA, 19 nt, Homo sapiens
  misc_RNA (1)...(19): siRNA sense strand
ucgagcaccuccaugaucu

SEQ ID NO: 1600700 - RNA, 19 nt, Homo sapiens
  misc_RNA (1)...(19): siRNA sense strand
aaucguacuggcugcuuua

SEQ ID NO: 1600701 - RNA, 19 nt, Homo sapiens
  misc_RNA (1)...(19): siRNA sense strand
agucucaaccugcacauga

SEQ ID NO: 1600702 - RNA, 19 nt, Homo sapiens
  misc_RNA (1)...(19): siRNA sense strand
aaauugcugccgugauauu

SEQ ID NO: 1600703 - RNA, 19 nt, Homo sapiens
  misc_RNA (1)...(19): siRNA sense strand
ucuuggcccugauugcauu

SEQ ID NO: 1600704 - RNA, 19 nt, Homo sapiens
  misc_RNA (1)...(19): siRNA sense strand
acucagcgcuuuccuuuuc

SEQ ID NO: 1600705 - RNA, 19 nt, Homo sapiens
  misc_RNA (1)...(19): siRNA sense strand
uagagccggagcagaaauu

SEQ ID NO: 1600706 - RNA, 19 nt, Homo sapiens
  misc_RNA (1)...(19): siRNA sense strand
cauagagccggagcagaaa

SEQ ID NO: 1600707 - RNA, 19 nt, Homo sapiens
  misc_RNA (1)...(19): siRNA sense strand
gcauaugcagugaacacau

SEQ ID NO: 1600708 - RNA, 19 nt, Homo sapiens
  misc_RNA (1)...(19): siRNA sense strand
agaaauugcugccgugaua

SEQ ID NO: 1600709 - RNA, 19 nt, Homo sapiens
  misc_RNA (1)...(19): siRNA sense strand
gcauucaucugcauagaga

SEQ ID NO: 1600710 - RNA, 19 nt, Homo sapiens
  misc_RNA (1)...(19): siRNA sense strand
ggacucagcgcuuuccuuu

SEQ ID NO: 1600711 - RNA, 19 nt, Homo sapiens
  misc_RNA (1)...(19): siRNA sense strand
gugcagaaauggagaguca

SEQ ID NO: 1600712 - RNA, 19 nt, Homo sapiens
  misc_RNA (1)...(19): siRNA sense strand
cauaugcagugaacacauu

SEQ ID NO: 1600713 - RNA, 19 nt, Homo sapiens
  misc_RNA (1)...(19): siRNA sense strand
ccauagagccggagcagaa

SEQ ID NO: 1600714 - RNA, 19 nt, Homo sapiens
  misc_RNA (1)...(19): siRNA sense strand
gagcaccaaugacuacauc

SEQ ID NO: 1600715 - RNA, 19 nt, Homo sapiens
  misc_RNA (1)...(19): siRNA sense strand
cgugauauuuggcuucuug

SEQ ID NO: 1600716 - RNA, 19 nt, Homo sapiens
  misc_RNA (1)...(19): siRNA sense strand
caaggucgcccaagugauc

SEQ ID NO: 1600717 - RNA, 19 nt, Homo sapiens
  misc_RNA (1)...(19): siRNA sense strand
acacuggacucagcgcuuu

SEQ ID NO: 1600718 - RNA, 19 nt, Homo sapiens
  misc_RNA (1)...(19): siRNA sense strand
acuggcgucuugcugauua

SEQ ID NO: 1600719 - RNA, 19 nt, Homo sapiens
  misc_RNA (1)...(19): siRNA sense strand
caaucguacuggcugcuuu

SEQ ID NO: 1600720 - RNA, 19 nt, Homo sapiens
  misc_RNA (1)...(19): siRNA sense strand
gcagagcaccaaugacuac

SEQ ID NO: 1600721 - RNA, 19 nt, Homo sapiens
  misc_RNA (1)...(19): siRNA sense strand
gugugaaggccucuacuuu

SEQ ID NO: 1600722 - RNA, 19 nt, Homo sapiens
  misc_RNA (1)...(19): siRNA sense strand
cguacuggcugcuuuaaac

SEQ ID NO: 1600723 - RNA, 19 nt, Homo sapiens
  misc_RNA (1)...(19): siRNA sense strand
gcacggaguccagggaugu

SEQ ID NO: 1600724 - RNA, 19 nt, Homo sapiens
  misc_RNA (1)...(19): siRNA sense strand
uguggugacuggcgucuug

SEQ ID NO: 1600725 - RNA, 19 nt, Homo sapiens
  misc_RNA (1)...(19): siRNA sense strand
gaaauugcugccgugauau

SEQ ID NO: 1600726 - RNA, 19 nt, Homo sapiens
  misc_RNA (1)...(19): siRNA sense strand
gcgucuugcugauuauguu

SEQ ID NO: 1600727 - RNA, 19 nt, Homo sapiens
  misc_RNA (1)...(19): siRNA sense strand
gagcugcagugcguuugug

SEQ ID NO: 1600728 - RNA, 19 nt, Homo sapiens
  misc_RNA (1)...(19): siRNA sense strand
cagcagagcaccaaugacu

SEQ ID NO: 1600729 - RNA, 19 nt, Homo sapiens
  misc_RNA (1)...(19): siRNA sense strand
gccagcagagcaccaauga

SEQ ID NO: 1600730 - RNA, 19 nt, Homo sapiens
  misc_RNA (1)...(19): siRNA sense strand
ggacagucgcccugagauc

SEQ ID NO: 1600731 - RNA, 19 nt, Homo sapiens
  misc_RNA (1)...(19): siRNA sense strand
gaucuuggcccugauugca

SEQ ID NO: 1600732 - RNA, 19 nt, Homo sapiens
  misc_RNA (1)...(19): siRNA sense strand
gcgcuuuccuuuucuuuau

SEQ ID NO: 1600733 - RNA, 19 nt, Homo sapiens
  misc_RNA (1)...(19): siRNA sense strand
ugacuggcgucuugcugau

SEQ ID NO: 1600734 - RNA, 19 nt, Homo sapiens
  misc_RNA (1)...(19): siRNA sense strand
gaucaacuggaaucugaca

SEQ ID NO: 1600735 - RNA, 19 nt, Homo sapiens
  misc_RNA (1)...(19): siRNA sense strand
ucgagcaccuccaugaucu

SEQ ID NO: 1600736 - RNA, 19 nt, Homo sapiens
  misc_RNA (1)...(19): siRNA sense strand
aaucguacuggcugcuuua

SEQ ID NO: 1600737 - RNA, 19 nt, Homo sapiens
  misc_RNA (1)...(19): siRNA sense strand
agucucaaccugcacauga

SEQ ID NO: 1600738 - RNA, 19 nt, Homo sapiens
  misc_RNA (1)...(19): siRNA sense strand
aaauugcugccgugauauu

SEQ ID NO: 1600739 - RNA, 19 nt, Homo sapiens
  misc_RNA (1)...(19): siRNA sense strand
ucuuggcccugauugcauu

SEQ ID NO: 1600740 - RNA, 19 nt, Homo sapiens
  misc_RNA (1)...(19): siRNA sense strand
acucagcgcuuuccuuuuc

SEQ ID NO: 1600741 - RNA, 19 nt, Homo sapiens
  misc_RNA (1)...(19): siRNA sense strand
uagagccggagcagaaauu

SEQ ID NO: 1600742 - RNA, 19 nt, Homo sapiens
  misc_RNA (1)...(19): siRNA sense strand
cauagagccggagcagaaa

SEQ ID NO: 1600743 - RNA, 19 nt, Homo sapiens
  misc_RNA (1)...(19): siRNA sense strand
gcauaugcagugaacacau

SEQ ID NO: 1600744 - RNA, 19 nt, Homo sapiens
  misc_RNA (1)...(19): siRNA sense strand
gaaggaagccguccagaau

SEQ ID NO: 1600745 - RNA, 19 nt, Homo sapiens
  misc_RNA (1)...(19): siRNA sense strand
ccaaguacaucccagcuuu

SEQ ID NO: 1600746 - RNA, 19 nt, Homo sapiens
  misc_RNA (1)...(19): siRNA sense strand
ggacauggccgacuacagu

SEQ ID NO: 1600747 - RNA, 19 nt, Homo sapiens
  misc_RNA (1)...(19): siRNA sense strand
gcagaucgaugacaaugag

SEQ ID NO: 1600748 - RNA, 19 nt, Homo sapiens
  misc_RNA (1)...(19): siRNA sense strand
gagcagauccaguucauca

SEQ ID NO: 1600749 - RNA, 19 nt, Homo sapiens
  misc_RNA (1)...(19): siRNA sense strand
cgaagaagauugccagcau

SEQ ID NO: 1600750 - RNA, 19 nt, Homo sapiens
  misc_RNA (1)...(19): siRNA sense strand
ucaaagccaucaucuucuu

SEQ ID NO: 1600751 - RNA, 19 nt, Homo sapiens
  misc_RNA (1)...(19): siRNA sense strand
acaccacccuggaauuuga

SEQ ID NO: 1600752 - RNA, 19 nt, Homo sapiens
  misc_RNA (1)...(19): siRNA sense strand
ggaagaaccacauguacuc

SEQ ID NO: 1600753 - RNA, 19 nt, Homo sapiens
  misc_RNA (1)...(19): siRNA sense strand
gauccaugguguucaagga

SEQ ID NO: 1600754 - RNA, 19 nt, Homo sapiens
  misc_RNA (1)...(19): siRNA sense strand
gggcuggcaugaagaagga

SEQ ID NO: 1600755 - RNA, 19 nt, Homo sapiens
  misc_RNA (1)...(19): siRNA sense strand
ggaggagcgugcggaagaa

SEQ ID NO: 1600756 - RNA, 19 nt, Homo sapiens
  misc_RNA (1)...(19): siRNA sense strand
ccucaaagccaucaucuuc

SEQ ID NO: 1600757 - RNA, 19 nt, Homo sapiens
  misc_RNA (1)...(19): siRNA sense strand
cauguacuccugcagauuu

SEQ ID NO: 1600758 - RNA, 19 nt, Homo sapiens
  misc_RNA (1)...(19): siRNA sense strand
aggaagccguccagaauga

SEQ ID NO: 1600759 - RNA, 19 nt, Homo sapiens
  misc_RNA (1)...(19): siRNA sense strand
ucaacgaccgccaguauga

SEQ ID NO: 1600760 - RNA, 19 nt, Homo sapiens
  misc_RNA (1)...(19): siRNA sense strand
caucaacgaccgccaguau

SEQ ID NO: 1600761 - RNA, 19 nt, Homo sapiens
  misc_RNA (1)...(19): siRNA sense strand
caagagauccaugguguuc

SEQ ID NO: 1600762 - RNA, 19 nt, Homo sapiens
  misc_RNA (1)...(19): siRNA sense strand
gaguaugccuaccucaaag

SEQ ID NO: 1600763 - RNA, 19 nt, Homo sapiens
  misc_RNA (1)...(19): siRNA sense strand
cuacaccacccuggaauuu

SEQ ID NO: 1600764 - RNA, 19 nt, Homo sapiens
  misc_RNA (1)...(19): siRNA sense strand
agagauccaugguguucaa

SEQ ID NO: 1600765 - RNA, 19 nt, Homo sapiens
  misc_RNA (1)...(19): siRNA sense strand
gaucgaugacaaugaguau

SEQ ID NO: 1600766 - RNA, 19 nt, Homo sapiens
  misc_RNA (1)...(19): siRNA sense strand
ugacucgcguggccgcuuu

SEQ ID NO: 1600767 - RNA, 19 nt, Homo sapiens
  misc_RNA (1)...(19): siRNA sense strand
gcagauccaguucaucaag

SEQ ID NO: 1600768 - RNA, 19 nt, Homo sapiens
  misc_RNA (1)...(19): siRNA sense strand
acugcaggcucaagaaaug

SEQ ID NO: 1600769 - RNA, 19 nt, Homo sapiens
  misc_RNA (1)...(19): siRNA sense strand
gagcuuggaggacuacauc

SEQ ID NO: 1600770 - RNA, 19 nt, Homo sapiens
  misc_RNA (1)...(19): siRNA sense strand
agaaggaagccguccagaa

SEQ ID NO: 1600771 - RNA, 19 nt, Homo sapiens
  misc_RNA (1)...(19): siRNA sense strand
uccaggagcugcagaucga

SEQ ID NO: 1600772 - RNA, 19 nt, Homo sapiens
  misc_RNA (1)...(19): siRNA sense strand
ggcagugcgugguggacaa

SEQ ID NO: 1600773 - RNA, 19 nt, Homo sapiens
  misc_RNA (1)...(19): siRNA sense strand
gagaaugugcagguguuga

SEQ ID NO: 1600774 - RNA, 19 nt, Homo sapiens
  misc_RNA (1)...(19): siRNA sense strand
ggcagaugaucgagcagau

SEQ ID NO: 1600775 - RNA, 19 nt, Homo sapiens
  misc_RNA (1)...(19): siRNA sense strand
uugagaaugugcagguguu

SEQ ID NO: 1600776 - RNA, 19 nt, Homo sapiens
  misc_RNA (1)...(19): siRNA sense strand
cacauguacuccugcagau

SEQ ID NO: 1600777 - RNA, 19 nt, Homo sapiens
  misc_RNA (1)...(19): siRNA sense strand
gaugagccggguguccaua

SEQ ID NO: 1600778 - RNA, 19 nt, Homo sapiens
  misc_RNA (1)...(19): siRNA sense strand
ccaaaacccucgucgacau

SEQ ID NO: 1600779 - RNA, 19 nt, Homo sapiens
  misc_RNA (1)...(19): siRNA sense strand
cuacugcaggcucaagaaa

SEQ ID NO: 1600780 - RNA, 19 nt, Homo sapiens
  misc_RNA (1)...(19): siRNA sense strand
aagccaucaucuucuuuga

SEQ ID NO: 1600781 - RNA, 19 nt, Homo sapiens
  misc_RNA (1)...(19): siRNA sense strand
gcagugcgugguggacaaa

SEQ ID NO: 1600782 - RNA, 19 nt, Homo sapiens
  misc_RNA (1)...(19): siRNA sense strand
auguacuccugcagauuua

SEQ ID NO: 1600783 - RNA, 19 nt, Homo sapiens
  misc_RNA (1)...(19): siRNA sense strand
ucgagcagauccaguucau

SEQ ID NO: 1600784 - RNA, 19 nt, Homo sapiens
  misc_RNA (1)...(19): siRNA sense strand
uguugacgaugggcaauga

SEQ ID NO: 1600785 - RNA, 19 nt, Homo sapiens
  misc_RNA (1)...(19): siRNA sense strand
gcggaagaaccacauguac

SEQ ID NO: 1600786 - RNA, 19 nt, Homo sapiens
  misc_RNA (1)...(19): siRNA sense strand
ccaagagauccaugguguu

SEQ ID NO: 1600787 - RNA, 19 nt, Homo sapiens
  misc_RNA (1)...(19): siRNA sense strand
caaguacaucccagcuuuc

SEQ ID NO: 1600788 - RNA, 19 nt, Homo sapiens
  misc_RNA (1)...(19): siRNA sense strand
gggccacgggcaaacacua

SEQ ID NO: 1600789 - RNA, 19 nt, Homo sapiens
  misc_RNA (1)...(19): siRNA sense strand
gcuccuaggcaaugacuac

SEQ ID NO: 1600790 - RNA, 19 nt, Homo sapiens
  misc_RNA (1)...(19): siRNA sense strand
agccugcccuccaucaaug

SEQ ID NO: 1600791 - RNA, 19 nt, Homo sapiens
  misc_RNA (1)...(19): siRNA sense strand
gcuacugcaggcucaagaa

SEQ ID NO: 1600792 - RNA, 19 nt, Homo sapiens
  misc_RNA (1)...(19): siRNA sense strand
gaaggaagccguccagaau

SEQ ID NO: 1600793 - RNA, 19 nt, Homo sapiens
  misc_RNA (1)...(19): siRNA sense strand
ccaaguacaucccagcuuu

SEQ ID NO: 1600794 - RNA, 19 nt, Homo sapiens
  misc_RNA (1)...(19): siRNA sense strand
ggacauggccgacuacagu

SEQ ID NO: 1600795 - RNA, 19 nt, Homo sapiens
  misc_RNA (1)...(19): siRNA sense strand
gcagaucgaugacaaugag

SEQ ID NO: 1600796 - RNA, 19 nt, Homo sapiens
  misc_RNA (1)...(19): siRNA sense strand
gagcagauccaguucauca

SEQ ID NO: 1600797 - RNA, 19 nt, Homo sapiens
  misc_RNA (1)...(19): siRNA sense strand
cgaagaagauugccagcau

SEQ ID NO: 1600798 - RNA, 19 nt, Homo sapiens
  misc_RNA (1)...(19): siRNA sense strand
ucaaagccaucaucuucuu

SEQ ID NO: 1600799 - RNA, 19 nt, Homo sapiens
  misc_RNA (1)...(19): siRNA sense strand
acaccacccuggaauuuga

SEQ ID NO: 1600800 - RNA, 19 nt, Homo sapiens
  misc_RNA (1)...(19): siRNA sense strand
ggaagaaccacauguacuc

SEQ ID NO: 1600801 - RNA, 19 nt, Homo sapiens
  misc_RNA (1)...(19): siRNA sense strand
gauccaugguguucaagga

SEQ ID NO: 1600802 - RNA, 19 nt, Homo sapiens
  misc_RNA (1)...(19): siRNA sense strand
gggcuggcaugaagaagga

SEQ ID NO: 1600803 - RNA, 19 nt, Homo sapiens
  misc_RNA (1)...(19): siRNA sense strand
ggaggagcgugcggaagaa

SEQ ID NO: 1600804 - RNA, 19 nt, Homo sapiens
  misc_RNA (1)...(19): siRNA sense strand
ccucaaagccaucaucuuc

SEQ ID NO: 1600805 - RNA, 19 nt, Homo sapiens
  misc_RNA (1)...(19): siRNA sense strand
cauguacuccugcagauuu

SEQ ID NO: 1600806 - RNA, 19 nt, Homo sapiens
  misc_RNA (1)...(19): siRNA sense strand
aggaagccguccagaauga

SEQ ID NO: 1600807 - RNA, 19 nt, Homo sapiens
  misc_RNA (1)...(19): siRNA sense strand
ucaacgaccgccaguauga

SEQ ID NO: 1600808 - RNA, 19 nt, Homo sapiens
  misc_RNA (1)...(19): siRNA sense strand
caucaacgaccgccaguau

SEQ ID NO: 1600809 - RNA, 19 nt, Homo sapiens
  misc_RNA (1)...(19): siRNA sense strand
caagagauccaugguguuc

SEQ ID NO: 1600810 - RNA, 19 nt, Homo sapiens
  misc_RNA (1)...(19): siRNA sense strand
gaguaugccuaccucaaag

SEQ ID NO: 1600811 - RNA, 19 nt, Homo sapiens
  misc_RNA (1)...(19): siRNA sense strand
cuacaccacccuggaauuu

SEQ ID NO: 1600812 - RNA, 19 nt, Homo sapiens
  misc_RNA (1)...(19): siRNA sense strand
agagauccaugguguucaa

SEQ ID NO: 1600813 - RNA, 19 nt, Homo sapiens
  misc_RNA (1)...(19): siRNA sense strand
gaucgaugacaaugaguau

SEQ ID NO: 1600814 - RNA, 19 nt, Homo sapiens
  misc_RNA (1)...(19): siRNA sense strand
ugacucgcguggccgcuuu

SEQ ID NO: 1600815 - RNA, 19 nt, Homo sapiens
  misc_RNA (1)...(19): siRNA sense strand
gcagauccaguucaucaag

SEQ ID NO: 1600816 - RNA, 19 nt, Homo sapiens
  misc_RNA (1)...(19): siRNA sense strand
acugcaggcucaagaaaug

SEQ ID NO: 1600817 - RNA, 19 nt, Homo sapiens
  misc_RNA (1)...(19): siRNA sense strand
gagcuuggaggacuacauc

SEQ ID NO: 1600818 - RNA, 19 nt, Homo sapiens
  misc_RNA (1)...(19): siRNA sense strand
agaaggaagccguccagaa

SEQ ID NO: 1600819 - RNA, 19 nt, Homo sapiens
  misc_RNA (1)...(19): siRNA sense strand
uccaggagcugcagaucga

SEQ ID NO: 1600820 - RNA, 19 nt, Homo sapiens
  misc_RNA (1)...(19): siRNA sense strand
ggcagugcgugguggacaa

SEQ ID NO: 1600821 - RNA, 19 nt, Homo sapiens
  misc_RNA (1)...(19): siRNA sense strand
gagaaugugcagguguuga

SEQ ID NO: 1600822 - RNA, 19 nt, Homo sapiens
  misc_RNA (1)...(19): siRNA sense strand
ggcagaugaucgagcagau

SEQ ID NO: 1600823 - RNA, 19 nt, Homo sapiens
  misc_RNA (1)...(19): siRNA sense strand
uugagaaugugcagguguu

SEQ ID NO: 1600824 - RNA, 19 nt, Homo sapiens
  misc_RNA (1)...(19): siRNA sense strand
cacauguacuccugcagau

SEQ ID NO: 1600825 - RNA, 19 nt, Homo sapiens
  misc_RNA (1)...(19): siRNA sense strand
gaugagccggguguccaua

SEQ ID NO: 1600826 - RNA, 19 nt, Homo sapiens
  misc_RNA (1)...(19): siRNA sense strand
ccaaaacccucgucgacau

SEQ ID NO: 1600827 - RNA, 19 nt, Homo sapiens
  misc_RNA (1)...(19): siRNA sense strand
cuacugcaggcucaagaaa

SEQ ID NO: 1600828 - RNA, 19 nt, Homo sapiens
  misc_RNA (1)...(19): siRNA sense strand
aagccaucaucuucuuuga

SEQ ID NO: 1600829 - RNA, 19 nt, Homo sapiens
  misc_RNA (1)...(19): siRNA sense strand
gcagugcgugguggacaaa

SEQ ID NO: 1600830 - RNA, 19 nt, Homo sapiens
  misc_RNA (1)...(19): siRNA sense strand
auguacuccugcagauuua

SEQ ID NO: 1600831 - RNA, 19 nt, Homo sapiens
  misc_RNA (1)...(19): siRNA sense strand
ucgagcagauccaguucau

SEQ ID NO: 1600832 - RNA, 19 nt, Homo sapiens
  misc_RNA (1)...(19): siRNA sense strand
uguugacgaugggcaauga

SEQ ID NO: 1600833 - RNA, 19 nt, Homo sapiens
  misc_RNA (1)...(19): siRNA sense strand
gcggaagaaccacauguac

SEQ ID NO: 1600834 - RNA, 19 nt, Homo sapiens
  misc_RNA (1)...(19): siRNA sense strand
ccaagagauccaugguguu

SEQ ID NO: 1600835 - RNA, 19 nt, Homo sapiens
  misc_RNA (1)...(19): siRNA sense strand
caaguacaucccagcuuuc

SEQ ID NO: 1600836 - RNA, 19 nt, Homo sapiens
  misc_RNA (1)...(19): siRNA sense strand
gggccacgggcaaacacua

SEQ ID NO: 1600837 - RNA, 19 nt, Homo sapiens
  misc_RNA (1)...(19): siRNA sense strand
gcuccuaggcaaugacuac

SEQ ID NO: 1600838 - RNA, 19 nt, Homo sapiens
  misc_RNA (1)...(19): siRNA sense strand
agccugcccuccaucaaug

SEQ ID NO: 1600839 - RNA, 19 nt, Homo sapiens
  misc_RNA (1)...(19): siRNA sense strand
gcuacugcaggcucaagaa

SEQ ID NO: 1600840 - RNA, 19 nt, Homo sapiens
  misc_RNA (1)...(19): siRNA sense strand
gaaggaagccguccagaau

SEQ ID NO: 1600841 - RNA, 19 nt, Homo sapiens
  misc_RNA (1)...(19): siRNA sense strand
ccaaguacaucccagcuuu

SEQ ID NO: 1600842 - RNA, 19 nt, Homo sapiens
  misc_RNA (1)...(19): siRNA sense strand
ggacauggccgacuacagu

SEQ ID NO: 1600843 - RNA, 19 nt, Homo sapiens
  misc_RNA (1)...(19): siRNA sense strand
gcagaucgaugacaaugag

SEQ ID NO: 1600844 - RNA, 19 nt, Homo sapiens
  misc_RNA (1)...(19): siRNA sense strand
gagcagauccaguucauca

SEQ ID NO: 1600845 - RNA, 19 nt, Homo sapiens
  misc_RNA (1)...(19): siRNA sense strand
cgaagaagauugccagcau

SEQ ID NO: 1600846 - RNA, 19 nt, Homo sapiens
  misc_RNA (1)...(19): siRNA sense strand
ucaaagccaucaucuucuu

SEQ ID NO: 1600847 - RNA, 19 nt, Homo sapiens
  misc_RNA (1)...(19): siRNA sense strand
acaccacccuggaauuuga

SEQ ID NO: 1600848 - RNA, 19 nt, Homo sapiens
  misc_RNA (1)...(19): siRNA sense strand
ggaagaaccacauguacuc

SEQ ID NO: 1600849 - RNA, 19 nt, Homo sapiens
  misc_RNA (1)...(19): siRNA sense strand
gauccaugguguucaagga

SEQ ID NO: 1600850 - RNA, 19 nt, Homo sapiens
  misc_RNA (1)...(19): siRNA sense strand
gggcuggcaugaagaagga

SEQ ID NO: 1600851 - RNA, 19 nt, Homo sapiens
  misc_RNA (1)...(19): siRNA sense strand
ggaggagcgugcggaagaa

SEQ ID NO: 1600852 - RNA, 19 nt, Homo sapiens
  misc_RNA (1)...(19): siRNA sense strand
ccucaaagccaucaucuuc

SEQ ID NO: 1600853 - RNA, 19 nt, Homo sapiens
  misc_RNA (1)...(19): siRNA sense strand
cauguacuccugcagauuu

SEQ ID NO: 1600854 - RNA, 19 nt, Homo sapiens
  misc_RNA (1)...(19): siRNA sense strand
aggaagccguccagaauga

SEQ ID NO: 1600855 - RNA, 19 nt, Homo sapiens
  misc_RNA (1)...(19): siRNA sense strand
ucaacgaccgccaguauga

SEQ ID NO: 1600856 - RNA, 19 nt, Homo sapiens
  misc_RNA (1)...(19): siRNA sense strand
caucaacgaccgccaguau

SEQ ID NO: 1600857 - RNA, 19 nt, Homo sapiens
  misc_RNA (1)...(19): siRNA sense strand
caagagauccaugguguuc

SEQ ID NO: 1600858 - RNA, 19 nt, Homo sapiens
  misc_RNA (1)...(19): siRNA sense strand
gaguaugccuaccucaaag

SEQ ID NO: 1600859 - RNA, 19 nt, Homo sapiens
  misc_RNA (1)...(19): siRNA sense strand
cuacaccacccuggaauuu

SEQ ID NO: 1600860 - RNA, 19 nt, Homo sapiens
  misc_RNA (1)...(19): siRNA sense strand
agagauccaugguguucaa

SEQ ID NO: 1600861 - RNA, 19 nt, Homo sapiens
  misc_RNA (1)...(19): siRNA sense strand
gaucgaugacaaugaguau

SEQ ID NO: 1600862 - RNA, 19 nt, Homo sapiens
  misc_RNA (1)...(19): siRNA sense strand
ugacucgcguggccgcuuu

SEQ ID NO: 1600863 - RNA, 19 nt, Homo sapiens
  misc_RNA (1)...(19): siRNA sense strand
gcagauccaguucaucaag

SEQ ID NO: 1600864 - RNA, 19 nt, Homo sapiens
  misc_RNA (1)...(19): siRNA sense strand
acugcaggcucaagaaaug

SEQ ID NO: 1600865 - RNA, 19 nt, Homo sapiens
  misc_RNA (1)...(19): siRNA sense strand
gagcuuggaggacuacauc

SEQ ID NO: 1600866 - RNA, 19 nt, Homo sapiens
  misc_RNA (1)...(19): siRNA sense strand
agaaggaagccguccagaa

SEQ ID NO: 1600867 - RNA, 19 nt, Homo sapiens
  misc_RNA (1)...(19): siRNA sense strand
uccaggagcugcagaucga

SEQ ID NO: 1600868 - RNA, 19 nt, Homo sapiens
  misc_RNA (1)...(19): siRNA sense strand
ggcagugcgugguggacaa

SEQ ID NO: 1600869 - RNA, 19 nt, Homo sapiens
  misc_RNA (1)...(19): siRNA sense strand
gagaaugugcagguguuga

SEQ ID NO: 1600870 - RNA, 19 nt, Homo sapiens
  misc_RNA (1)...(19): siRNA sense strand
ggcagaugaucgagcagau

SEQ ID NO: 1600871 - RNA, 19 nt, Homo sapiens
  misc_RNA (1)...(19): siRNA sense strand
uugagaaugugcagguguu

SEQ ID NO: 1600872 - RNA, 19 nt, Homo sapiens
  misc_RNA (1)...(19): siRNA sense strand
cacauguacuccugcagau

SEQ ID NO: 1600873 - RNA, 19 nt, Homo sapiens
  misc_RNA (1)...(19): siRNA sense strand
gaugagccggguguccaua

SEQ ID NO: 1600874 - RNA, 19 nt, Homo sapiens
  misc_RNA (1)...(19): siRNA sense strand
ccaaaacccucgucgacau

SEQ ID NO: 1600875 - RNA, 19 nt, Homo sapiens
  misc_RNA (1)...(19): siRNA sense strand
cuacugcaggcucaagaaa

SEQ ID NO: 1600876 - RNA, 19 nt, Homo sapiens
  misc_RNA (1)...(19): siRNA sense strand
aagccaucaucuucuuuga

SEQ ID NO: 1600877 - RNA, 19 nt, Homo sapiens
  misc_RNA (1)...(19): siRNA sense strand
gcagugcgugguggacaaa

SEQ ID NO: 1600878 - RNA, 19 nt, Homo sapiens
  misc_RNA (1)...(19): siRNA sense strand
auguacuccugcagauuua

SEQ ID NO: 1600879 - RNA, 19 nt, Homo sapiens
  misc_RNA (1)...(19): siRNA sense strand
ucgagcagauccaguucau

SEQ ID NO: 1600880 - RNA, 19 nt, Homo sapiens
  misc_RNA (1)...(19): siRNA sense strand
uguugacgaugggcaauga

SEQ ID NO: 1600881 - RNA, 19 nt, Homo sapiens
  misc_RNA (1)...(19): siRNA sense strand
gcggaagaaccacauguac

SEQ ID NO: 1600882 - RNA, 19 nt, Homo sapiens
  misc_RNA (1)...(19): siRNA sense strand
ccaagagauccaugguguu

SEQ ID NO: 1600883 - RNA, 19 nt, Homo sapiens
  misc_RNA (1)...(19): siRNA sense strand
caaguacaucccagcuuuc

SEQ ID NO: 1600884 - RNA, 19 nt, Homo sapiens
  misc_RNA (1)...(19): siRNA sense strand
gggccacgggcaaacacua

SEQ ID NO: 1600885 - RNA, 19 nt, Homo sapiens
  misc_RNA (1)...(19): siRNA sense strand
gcuccuaggcaaugacuac

SEQ ID NO: 1600886 - RNA, 19 nt, Homo sapiens
  misc_RNA (1)...(19): siRNA sense strand
agccugcccuccaucaaug

SEQ ID NO: 1600887 - RNA, 19 nt, Homo sapiens
  misc_RNA (1)...(19): siRNA sense strand
gcuacugcaggcucaagaa

SEQ ID NO: 1600888 - RNA, 19 nt, Homo sapiens
  misc_RNA (1)...(19): siRNA sense strand
ucgaguugcuuaugaaauu

SEQ ID NO: 1600889 - RNA, 19 nt, Homo sapiens
  misc_RNA (1)...(19): siRNA sense strand
gaaauuaugcaaacacuac

SEQ ID NO: 1600890 - RNA, 19 nt, Homo sapiens
  misc_RNA (1)...(19): siRNA sense strand
cuaaaggugucaacaggaa

SEQ ID NO: 1600891 - RNA, 19 nt, Homo sapiens
  misc_RNA (1)...(19): siRNA sense strand
cacaaucgauacacagaaa

SEQ ID NO: 1600892 - RNA, 19 nt, Homo sapiens
  misc_RNA (1)...(19): siRNA sense strand
cuacaaaguucgagagaag

SEQ ID NO: 1600893 - RNA, 19 nt, Homo sapiens
  misc_RNA (1)...(19): siRNA sense strand
cugcaaacuuccauucuuu

SEQ ID NO: 1600894 - RNA, 19 nt, Homo sapiens
  misc_RNA (1)...(19): siRNA sense strand
cgaguugcuuaugaaauua

SEQ ID NO: 1600895 - RNA, 19 nt, Homo sapiens
  misc_RNA (1)...(19): siRNA sense strand
cagaugaaauucccaugga

SEQ ID NO: 1600896 - RNA, 19 nt, Homo sapiens
  misc_RNA (1)...(19): siRNA sense strand
cauggaaccuggagauauc

SEQ ID NO: 1600897 - RNA, 19 nt, Homo sapiens
  misc_RNA (1)...(19): siRNA sense strand
gaaccuggagauaucauug

SEQ ID NO: 1600898 - RNA, 19 nt, Homo sapiens
  misc_RNA (1)...(19): siRNA sense strand
gggaaggacgggccuauau

SEQ ID NO: 1600899 - RNA, 19 nt, Homo sapiens
  misc_RNA (1)...(19): siRNA sense strand
gauagaaacggucaaguac

SEQ ID NO: 1600900 - RNA, 19 nt, Homo sapiens
  misc_RNA (1)...(19): siRNA sense strand
agauagaaacggucaagua

SEQ ID NO: 1600901 - RNA, 19 nt, Homo sapiens
  misc_RNA (1)...(19): siRNA sense strand
cagaaugcccacaaucaaa

SEQ ID NO: 1600902 - RNA, 19 nt, Homo sapiens
  misc_RNA (1)...(19): siRNA sense strand
ggauggcuauucuaaaggu

SEQ ID NO: 1600903 - RNA, 19 nt, Homo sapiens
  misc_RNA (1)...(19): siRNA sense strand
gcacaaucgauacacagaa

SEQ ID NO: 1600904 - RNA, 19 nt, Homo sapiens
  misc_RNA (1)...(19): siRNA sense strand
ucccaggucugucgaguug

SEQ ID NO: 1600905 - RNA, 19 nt, Homo sapiens
  misc_RNA (1)...(19): siRNA sense strand
gcaaacuuccauucuuuag

SEQ ID NO: 1600906 - RNA, 19 nt, Homo sapiens
  misc_RNA (1)...(19): siRNA sense strand
gaaugcccacaaucaaauu

SEQ ID NO: 1600907 - RNA, 19 nt, Homo sapiens
  misc_RNA (1)...(19): siRNA sense strand
ggaaggacgggccuauauc

SEQ ID NO: 1600908 - RNA, 19 nt, Homo sapiens
  misc_RNA (1)...(19): siRNA sense strand
ugggauggcuauucuaaag

SEQ ID NO: 1600909 - RNA, 19 nt, Homo sapiens
  misc_RNA (1)...(19): siRNA sense strand
cagcuggacugcacaaucg

SEQ ID NO: 1600910 - RNA, 19 nt, Homo sapiens
  misc_RNA (1)...(19): siRNA sense strand
gaagauagaaacggucaag

SEQ ID NO: 1600911 - RNA, 19 nt, Homo sapiens
  misc_RNA (1)...(19): siRNA sense strand
cuauaucccuccuacaaag

SEQ ID NO: 1600912 - RNA, 19 nt, Homo sapiens
  misc_RNA (1)...(19): siRNA sense strand
ggauauacauuuucucucu

SEQ ID NO: 1600913 - RNA, 19 nt, Homo sapiens
  misc_RNA (1)...(19): siRNA sense strand
ccagaaugcccacaaucaa

SEQ ID NO: 1600914 - RNA, 19 nt, Homo sapiens
  misc_RNA (1)...(19): siRNA sense strand
gccagaaugcccacaauca

SEQ ID NO: 1600915 - RNA, 19 nt, Homo sapiens
  misc_RNA (1)...(19): siRNA sense strand
uauuuaggccuguaaguga

SEQ ID NO: 1600916 - RNA, 19 nt, Homo sapiens
  misc_RNA (1)...(19): siRNA sense strand
ggacugcacaaucgauaca

SEQ ID NO: 1600917 - RNA, 19 nt, Homo sapiens
  misc_RNA (1)...(19): siRNA sense strand
gccuauaucccuccuacaa

SEQ ID NO: 1600918 - RNA, 19 nt, Homo sapiens
  misc_RNA (1)...(19): siRNA sense strand
caaacuuccauucuuuaga

SEQ ID NO: 1600919 - RNA, 19 nt, Homo sapiens
  misc_RNA (1)...(19): siRNA sense strand
caggcagacuuccuagugu

SEQ ID NO: 1600920 - RNA, 19 nt, Homo sapiens
  misc_RNA (1)...(19): siRNA sense strand
caaaguucgagagaagaua

SEQ ID NO: 1600921 - RNA, 19 nt, Homo sapiens
  misc_RNA (1)...(19): siRNA sense strand
ugaugccucugcaaacuuc

SEQ ID NO: 1600922 - RNA, 19 nt, Homo sapiens
  misc_RNA (1)...(19): siRNA sense strand
uccugaggcugagaaauaa

SEQ ID NO: 1600923 - RNA, 19 nt, Homo sapiens
  misc_RNA (1)...(19): siRNA sense strand
ucauugguguggcuggaaa

SEQ ID NO: 1600924 - RNA, 19 nt, Homo sapiens
  misc_RNA (1)...(19): siRNA sense strand
ucugcaaacuuccauucuu

SEQ ID NO: 1600925 - RNA, 19 nt, Homo sapiens
  misc_RNA (1)...(19): siRNA sense strand
gcagacuuccuagugugua

SEQ ID NO: 1600926 - RNA, 19 nt, Homo sapiens
  misc_RNA (1)...(19): siRNA sense strand
guauuuaggccuguaagug

SEQ ID NO: 1600927 - RNA, 19 nt, Homo sapiens
  misc_RNA (1)...(19): siRNA sense strand
ccgaacugcagaugaaauu

SEQ ID NO: 1600928 - RNA, 19 nt, Homo sapiens
  misc_RNA (1)...(19): siRNA sense strand
ucugucgaguugcuuauga

SEQ ID NO: 1600929 - RNA, 19 nt, Homo sapiens
  misc_RNA (1)...(19): siRNA sense strand
auccugaggcugagaaaua

SEQ ID NO: 1600930 - RNA, 19 nt, Homo sapiens
  misc_RNA (1)...(19): siRNA sense strand
ucauugggauggcuauucu

SEQ ID NO: 1600931 - RNA, 19 nt, Homo sapiens
  misc_RNA (1)...(19): siRNA sense strand
ccauggaaccuggagauau

SEQ ID NO: 1600932 - RNA, 19 nt, Homo sapiens
  misc_RNA (1)...(19): siRNA sense strand
ggaaccuggagauaucauu

SEQ ID NO: 1600933 - RNA, 19 nt, Homo sapiens
  misc_RNA (1)...(19): siRNA sense strand
uaagugagacaugcacaga

SEQ ID NO: 1600934 - RNA, 19 nt, Homo sapiens
  misc_RNA (1)...(19): siRNA sense strand
gcaaacacuacauccugau

SEQ ID NO: 1600935 - RNA, 19 nt, Homo sapiens
  misc_RNA (1)...(19): siRNA sense strand
ccuacaaaguucgagagaa

SEQ ID NO: 1600936 - RNA, 19 nt, Homo sapiens
  misc_RNA (1)...(19): siRNA sense strand
ccuauaucccuccuacaaa

SEQ ID NO: 1600937 - RNA, 19 nt, Homo sapiens
  misc_RNA (1)...(19): siRNA sense strand
gaaggacgggccuauaucc

SEQ ID NO: 1600938 - RNA, 19 nt, Homo sapiens
  misc_RNA (1)...(19): siRNA sense strand
gaacugcagaugaaauucc

SEQ ID NO: 1600939 - RNA, 19 nt, Homo sapiens
  misc_RNA (1)...(19): siRNA sense strand
ucaggcagacuuccuagug

SEQ ID NO: 1600940 - RNA, 19 nt, Homo sapiens
  misc_RNA (1)...(19): siRNA sense strand
agaaugcccacaaucaaau

SEQ ID NO: 1600941 - RNA, 19 nt, Homo sapiens
  misc_RNA (1)...(19): siRNA sense strand
ugcaaacuuccauucuuua

SEQ ID NO: 1600942 - RNA, 19 nt, Homo sapiens
  misc_RNA (1)...(19): siRNA sense strand
agugagacaugcacagaca

SEQ ID NO: 1600943 - RNA, 19 nt, Homo sapiens
  misc_RNA (1)...(19): siRNA sense strand
uaaaggugucaacaggaaa

SEQ ID NO: 1600944 - RNA, 19 nt, Homo sapiens
  misc_RNA (1)...(19): siRNA sense strand
aacaggaaauugggaagga

SEQ ID NO: 1600945 - RNA, 19 nt, Homo sapiens
  misc_RNA (1)...(19): siRNA sense strand
agugauaacucuauuuccu

SEQ ID NO: 1600946 - RNA, 19 nt, Homo sapiens
  misc_RNA (1)...(19): siRNA sense strand
gacaugcacagacagaucu

SEQ ID NO: 1600947 - RNA, 19 nt, Homo sapiens
  misc_RNA (1)...(19): siRNA sense strand
ugagacaugcacagacaga

SEQ ID NO: 1600948 - RNA, 19 nt, Homo sapiens
  misc_RNA (1)...(19): siRNA sense strand
ucgaguugcuuaugaaauu

SEQ ID NO: 1600949 - RNA, 19 nt, Homo sapiens
  misc_RNA (1)...(19): siRNA sense strand
gaaauuaugcaaacacuac

SEQ ID NO: 1600950 - RNA, 19 nt, Homo sapiens
  misc_RNA (1)...(19): siRNA sense strand
cuaaaggugucaacaggaa

SEQ ID NO: 1600951 - RNA, 19 nt, Homo sapiens
  misc_RNA (1)...(19): siRNA sense strand
cacaaucgauacacagaaa

SEQ ID NO: 1600952 - RNA, 19 nt, Homo sapiens
  misc_RNA (1)...(19): siRNA sense strand
cuacaaaguucgagagaag

SEQ ID NO: 1600953 - RNA, 19 nt, Homo sapiens
  misc_RNA (1)...(19): siRNA sense strand
cugcaaacuuccauucuuu

SEQ ID NO: 1600954 - RNA, 19 nt, Homo sapiens
  misc_RNA (1)...(19): siRNA sense strand
cgaguugcuuaugaaauua

SEQ ID NO: 1600955 - RNA, 19 nt, Homo sapiens
  misc_RNA (1)...(19): siRNA sense strand
cagaugaaauucccaugga

SEQ ID NO: 1600956 - RNA, 19 nt, Homo sapiens
  misc_RNA (1)...(19): siRNA sense strand
cauggaaccuggagauauc

SEQ ID NO: 1600957 - RNA, 19 nt, Homo sapiens
  misc_RNA (1)...(19): siRNA sense strand
gaaccuggagauaucauug

SEQ ID NO: 1600958 - RNA, 19 nt, Homo sapiens
  misc_RNA (1)...(19): siRNA sense strand
gggaaggacgggccuauau

SEQ ID NO: 1600959 - RNA, 19 nt, Homo sapiens
  misc_RNA (1)...(19): siRNA sense strand
gauagaaacggucaaguac

SEQ ID NO: 1600960 - RNA, 19 nt, Homo sapiens
  misc_RNA (1)...(19): siRNA sense strand
agauagaaacggucaagua

SEQ ID NO: 1600961 - RNA, 19 nt, Homo sapiens
  misc_RNA (1)...(19): siRNA sense strand
cagaaugcccacaaucaaa

SEQ ID NO: 1600962 - RNA, 19 nt, Homo sapiens
  misc_RNA (1)...(19): siRNA sense strand
ggauggcuauucuaaaggu

SEQ ID NO: 1600963 - RNA, 19 nt, Homo sapiens
  misc_RNA (1)...(19): siRNA sense strand
gcacaaucgauacacagaa

SEQ ID NO: 1600964 - RNA, 19 nt, Homo sapiens
  misc_RNA (1)...(19): siRNA sense strand
ucccaggucugucgaguug

SEQ ID NO: 1600965 - RNA, 19 nt, Homo sapiens
  misc_RNA (1)...(19): siRNA sense strand
gcaaacuuccauucuuuag

SEQ ID NO: 1600966 - RNA, 19 nt, Homo sapiens
  misc_RNA (1)...(19): siRNA sense strand
gaaugcccacaaucaaauu

SEQ ID NO: 1600967 - RNA, 19 nt, Homo sapiens
  misc_RNA (1)...(19): siRNA sense strand
ggaaggacgggccuauauc

SEQ ID NO: 1600968 - RNA, 19 nt, Homo sapiens
  misc_RNA (1)...(19): siRNA sense strand
ugggauggcuauucuaaag

SEQ ID NO: 1600969 - RNA, 19 nt, Homo sapiens
  misc_RNA (1)...(19): siRNA sense strand
cagcuggacugcacaaucg

SEQ ID NO: 1600970 - RNA, 19 nt, Homo sapiens
  misc_RNA (1)...(19): siRNA sense strand
gaagauagaaacggucaag

SEQ ID NO: 1600971 - RNA, 19 nt, Homo sapiens
  misc_RNA (1)...(19): siRNA sense strand
cuauaucccuccuacaaag

SEQ ID NO: 1600972 - RNA, 19 nt, Homo sapiens
  misc_RNA (1)...(19): siRNA sense strand
ggauauacauuuucucucu

SEQ ID NO: 1600973 - RNA, 19 nt, Homo sapiens
  misc_RNA (1)...(19): siRNA sense strand
ccagaaugcccacaaucaa

SEQ ID NO: 1600974 - RNA, 19 nt, Homo sapiens
  misc_RNA (1)...(19): siRNA sense strand
gccagaaugcccacaauca

SEQ ID NO: 1600975 - RNA, 19 nt, Homo sapiens
  misc_RNA (1)...(19): siRNA sense strand
uauuuaggccuguaaguga

SEQ ID NO: 1600976 - RNA, 19 nt, Homo sapiens
  misc_RNA (1)...(19): siRNA sense strand
ggacugcacaaucgauaca

SEQ ID NO: 1600977 - RNA, 19 nt, Homo sapiens
  misc_RNA (1)...(19): siRNA sense strand
gccuauaucccuccuacaa

SEQ ID NO: 1600978 - RNA, 19 nt, Homo sapiens
  misc_RNA (1)...(19): siRNA sense strand
caaacuuccauucuuuaga

SEQ ID NO: 1600979 - RNA, 19 nt, Homo sapiens
  misc_RNA (1)...(19): siRNA sense strand
caggcagacuuccuagugu

SEQ ID NO: 1600980 - RNA, 19 nt, Homo sapiens
  misc_RNA (1)...(19): siRNA sense strand
caaaguucgagagaagaua

SEQ ID NO: 1600981 - RNA, 19 nt, Homo sapiens
  misc_RNA (1)...(19): siRNA sense strand
ugaugccucugcaaacuuc

SEQ ID NO: 1600982 - RNA, 19 nt, Homo sapiens
  misc_RNA (1)...(19): siRNA sense strand
uccugaggcugagaaauaa

SEQ ID NO: 1600983 - RNA, 19 nt, Homo sapiens
  misc_RNA (1)...(19): siRNA sense strand
ucauugguguggcuggaaa

SEQ ID NO: 1600984 - RNA, 19 nt, Homo sapiens
  misc_RNA (1)...(19): siRNA sense strand
ucugcaaacuuccauucuu

SEQ ID NO: 1600985 - RNA, 19 nt, Homo sapiens
  misc_RNA (1)...(19): siRNA sense strand
gcagacuuccuagugugua

SEQ ID NO: 1600986 - RNA, 19 nt, Homo sapiens
  misc_RNA (1)...(19): siRNA sense strand
guauuuaggccuguaagug

SEQ ID NO: 1600987 - RNA, 19 nt, Homo sapiens
  misc_RNA (1)...(19): siRNA sense strand
ccgaacugcagaugaaauu

SEQ ID NO: 1600988 - RNA, 19 nt, Homo sapiens
  misc_RNA (1)...(19): siRNA sense strand
ucugucgaguugcuuauga

SEQ ID NO: 1600989 - RNA, 19 nt, Homo sapiens
  misc_RNA (1)...(19): siRNA sense strand
auccugaggcugagaaaua

SEQ ID NO: 1600990 - RNA, 19 nt, Homo sapiens
  misc_RNA (1)...(19): siRNA sense strand
ucauugggauggcuauucu

SEQ ID NO: 1600991 - RNA, 19 nt, Homo sapiens
  misc_RNA (1)...(19): siRNA sense strand
ccauggaaccuggagauau

SEQ ID NO: 1600992 - RNA, 19 nt, Homo sapiens
  misc_RNA (1)...(19): siRNA sense strand
ggaaccuggagauaucauu

SEQ ID NO: 1600993 - RNA, 19 nt, Homo sapiens
  misc_RNA (1)...(19): siRNA sense strand
uaagugagacaugcacaga

SEQ ID NO: 1600994 - RNA, 19 nt, Homo sapiens
  misc_RNA (1)...(19): siRNA sense strand
gcaaacacuacauccugau

SEQ ID NO: 1600995 - RNA, 19 nt, Homo sapiens
  misc_RNA (1)...(19): siRNA sense strand
ccuacaaaguucgagagaa

SEQ ID NO: 1600996 - RNA, 19 nt, Homo sapiens
  misc_RNA (1)...(19): siRNA sense strand
ccuauaucccuccuacaaa

SEQ ID NO: 1600997 - RNA, 19 nt, Homo sapiens
  misc_RNA (1)...(19): siRNA sense strand
gaaggacgggccuauaucc

SEQ ID NO: 1600998 - RNA, 19 nt, Homo sapiens
  misc_RNA (1)...(19): siRNA sense strand
gaacugcagaugaaauucc

SEQ ID NO: 1600999 - RNA, 19 nt, Homo sapiens
  misc_RNA (1)...(19): siRNA sense strand
ucaggcagacuuccuagug

SEQ ID NO: 1601000 - RNA, 19 nt, Homo sapiens
  misc_RNA (1)...(19): siRNA sense strand
agaaugcccacaaucaaau

SEQ ID NO: 1601001 - RNA, 19 nt, Homo sapiens
  misc_RNA (1)...(19): siRNA sense strand
ugcaaacuuccauucuuua

SEQ ID NO: 1601002 - RNA, 19 nt, Homo sapiens
  misc_RNA (1)...(19): siRNA sense strand
agugagacaugcacagaca

SEQ ID NO: 1601003 - RNA, 19 nt, Homo sapiens
  misc_RNA (1)...(19): siRNA sense strand
uaaaggugucaacaggaaa

SEQ ID NO: 1601004 - RNA, 19 nt, Homo sapiens
  misc_RNA (1)...(19): siRNA sense strand
aacaggaaauugggaagga

SEQ ID NO: 1601005 - RNA, 19 nt, Homo sapiens
  misc_RNA (1)...(19): siRNA sense strand
agugauaacucuauuuccu

SEQ ID NO: 1601006 - RNA, 19 nt, Homo sapiens
  misc_RNA (1)...(19): siRNA sense strand
gacaugcacagacagaucu

SEQ ID NO: 1601007 - RNA, 19 nt, Homo sapiens
  misc_RNA (1)...(19): siRNA sense strand
ugagacaugcacagacaga

SEQ ID NO: 1601008 - RNA, 19 nt, Homo sapiens
  misc_RNA (1)...(19): siRNA sense strand
ucgaguugcuuaugaaauu

SEQ ID NO: 1601009 - RNA, 19 nt, Homo sapiens
  misc_RNA (1)...(19): siRNA sense strand
gaaauuaugcaaacacuac

SEQ ID NO: 1601010 - RNA, 19 nt, Homo sapiens
  misc_RNA (1)...(19): siRNA sense strand
cuaaaggugucaacaggaa

SEQ ID NO: 1601011 - RNA, 19 nt, Homo sapiens
  misc_RNA (1)...(19): siRNA sense strand
cacaaucgauacacagaaa

SEQ ID NO: 1601012 - RNA, 19 nt, Homo sapiens
  misc_RNA (1)...(19): siRNA sense strand
cuacaaaguucgagagaag

SEQ ID NO: 1601013 - RNA, 19 nt, Homo sapiens
  misc_RNA (1)...(19): siRNA sense strand
cugcaaacuuccauucuuu

SEQ ID NO: 1601014 - RNA, 19 nt, Homo sapiens
  misc_RNA (1)...(19): siRNA sense strand
cgaguugcuuaugaaauua

SEQ ID NO: 1601015 - RNA, 19 nt, Homo sapiens
  misc_RNA (1)...(19): siRNA sense strand
cagaugaaauucccaugga

SEQ ID NO: 1601016 - RNA, 19 nt, Homo sapiens
  misc_RNA (1)...(19): siRNA sense strand
cauggaaccuggagauauc

SEQ ID NO: 1601017 - RNA, 19 nt, Homo sapiens
  misc_RNA (1)...(19): siRNA sense strand
gaaccuggagauaucauug

SEQ ID NO: 1601018 - RNA, 19 nt, Homo sapiens
  misc_RNA (1)...(19): siRNA sense strand
gggaaggacgggccuauau

SEQ ID NO: 1601019 - RNA, 19 nt, Homo sapiens
  misc_RNA (1)...(19): siRNA sense strand
gauagaaacggucaaguac

SEQ ID NO: 1601020 - RNA, 19 nt, Homo sapiens
  misc_RNA (1)...(19): siRNA sense strand
agauagaaacggucaagua

SEQ ID NO: 1601021 - RNA, 19 nt, Homo sapiens
  misc_RNA (1)...(19): siRNA sense strand
cagaaugcccacaaucaaa

SEQ ID NO: 1601022 - RNA, 19 nt, Homo sapiens
  misc_RNA (1)...(19): siRNA sense strand
ggauggcuauucuaaaggu

SEQ ID NO: 1601023 - RNA, 19 nt, Homo sapiens
  misc_RNA (1)...(19): siRNA sense strand
gcacaaucgauacacagaa

SEQ ID NO: 1601024 - RNA, 19 nt, Homo sapiens
  misc_RNA (1)...(19): siRNA sense strand
ucccaggucugucgaguug

SEQ ID NO: 1601025 - RNA, 19 nt, Homo sapiens
  misc_RNA (1)...(19): siRNA sense strand
gcaaacuuccauucuuuag

SEQ ID NO: 1601026 - RNA, 19 nt, Homo sapiens
  misc_RNA (1)...(19): siRNA sense strand
gaaugcccacaaucaaauu

SEQ ID NO: 1601027 - RNA, 19 nt, Homo sapiens
  misc_RNA (1)...(19): siRNA sense strand
ggaaggacgggccuauauc

SEQ ID NO: 1601028 - RNA, 19 nt, Homo sapiens
  misc_RNA (1)...(19): siRNA sense strand
ugggauggcuauucuaaag

SEQ ID NO: 1601029 - RNA, 19 nt, Homo sapiens
  misc_RNA (1)...(19): siRNA sense strand
cagcuggacugcacaaucg

SEQ ID NO: 1601030 - RNA, 19 nt, Homo sapiens
  misc_RNA (1)...(19): siRNA sense strand
gaagauagaaacggucaag

SEQ ID NO: 1601031 - RNA, 19 nt, Homo sapiens
  misc_RNA (1)...(19): siRNA sense strand
cuauaucccuccuacaaag

SEQ ID NO: 1601032 - RNA, 19 nt, Homo sapiens
  misc_RNA (1)...(19): siRNA sense strand
ggauauacauuuucucucu

SEQ ID NO: 1601033 - RNA, 19 nt, Homo sapiens
  misc_RNA (1)...(19): siRNA sense strand
ccagaaugcccacaaucaa

SEQ ID NO: 1601034 - RNA, 19 nt, Homo sapiens
  misc_RNA (1)...(19): siRNA sense strand
gccagaaugcccacaauca

SEQ ID NO: 1601035 - RNA, 19 nt, Homo sapiens
  misc_RNA (1)...(19): siRNA sense strand
uauuuaggccuguaaguga

SEQ ID NO: 1601036 - RNA, 19 nt, Homo sapiens
  misc_RNA (1)...(19): siRNA sense strand
ggacugcacaaucgauaca

SEQ ID NO: 1601037 - RNA, 19 nt, Homo sapiens
  misc_RNA (1)...(19): siRNA sense strand
gccuauaucccuccuacaa

SEQ ID NO: 1601038 - RNA, 19 nt, Homo sapiens
  misc_RNA (1)...(19): siRNA sense strand
caaacuuccauucuuuaga

SEQ ID NO: 1601039 - RNA, 19 nt, Homo sapiens
  misc_RNA (1)...(19): siRNA sense strand
caggcagacuuccuagugu

SEQ ID NO: 1601040 - RNA, 19 nt, Homo sapiens
  misc_RNA (1)...(19): siRNA sense strand
caaaguucgagagaagaua

SEQ ID NO: 1601041 - RNA, 19 nt, Homo sapiens
  misc_RNA (1)...(19): siRNA sense strand
ugaugccucugcaaacuuc

SEQ ID NO: 1601042 - RNA, 19 nt, Homo sapiens
  misc_RNA (1)...(19): siRNA sense strand
uccugaggcugagaaauaa

SEQ ID NO: 1601043 - RNA, 19 nt, Homo sapiens
  misc_RNA (1)...(19): siRNA sense strand
ucauugguguggcuggaaa

SEQ ID NO: 1601044 - RNA, 19 nt, Homo sapiens
  misc_RNA (1)...(19): siRNA sense strand
ucugcaaacuuccauucuu

SEQ ID NO: 1601045 - RNA, 19 nt, Homo sapiens
  misc_RNA (1)...(19): siRNA sense strand
gcagacuuccuagugugua

SEQ ID NO: 1601046 - RNA, 19 nt, Homo sapiens
  misc_RNA (1)...(19): siRNA sense strand
guauuuaggccuguaagug

SEQ ID NO: 1601047 - RNA, 19 nt, Homo sapiens
  misc_RNA (1)...(19): siRNA sense strand
ccgaacugcagaugaaauu

SEQ ID NO: 1601048 - RNA, 19 nt, Homo sapiens
  misc_RNA (1)...(19): siRNA sense strand
ucugucgaguugcuuauga

SEQ ID NO: 1601049 - RNA, 19 nt, Homo sapiens
  misc_RNA (1)...(19): siRNA sense strand
auccugaggcugagaaaua

SEQ ID NO: 1601050 - RNA, 19 nt, Homo sapiens
  misc_RNA (1)...(19): siRNA sense strand
ucauugggauggcuauucu

SEQ ID NO: 1601051 - RNA, 19 nt, Homo sapiens
  misc_RNA (1)...(19): siRNA sense strand
ccauggaaccuggagauau

SEQ ID NO: 1601052 - RNA, 19 nt, Homo sapiens
  misc_RNA (1)...(19): siRNA sense strand
ggaaccuggagauaucauu

SEQ ID NO: 1601053 - RNA, 19 nt, Homo sapiens
  misc_RNA (1)...(19): siRNA sense strand
uaagugagacaugcacaga

SEQ ID NO: 1601054 - RNA, 19 nt, Homo sapiens
  misc_RNA (1)...(19): siRNA sense strand
gcaaacacuacauccugau

SEQ ID NO: 1601055 - RNA, 19 nt, Homo sapiens
  misc_RNA (1)...(19): siRNA sense strand
ccuacaaaguucgagagaa

SEQ ID NO: 1601056 - RNA, 19 nt, Homo sapiens
  misc_RNA (1)...(19): siRNA sense strand
ccuauaucccuccuacaaa

SEQ ID NO: 1601057 - RNA, 19 nt, Homo sapiens
  misc_RNA (1)...(19): siRNA sense strand
gaaggacgggccuauaucc

SEQ ID NO: 1601058 - RNA, 19 nt, Homo sapiens
  misc_RNA (1)...(19): siRNA sense strand
gaacugcagaugaaauucc

SEQ ID NO: 1601059 - RNA, 19 nt, Homo sapiens
  misc_RNA (1)...(19): siRNA sense strand
ucaggcagacuuccuagug

SEQ ID NO: 1601060 - RNA, 19 nt, Homo sapiens
  misc_RNA (1)...(19): siRNA sense strand
agaaugcccacaaucaaau

SEQ ID NO: 1601061 - RNA, 19 nt, Homo sapiens
  misc_RNA (1)...(19): siRNA sense strand
ugcaaacuuccauucuuua

SEQ ID NO: 1601062 - RNA, 19 nt, Homo sapiens
  misc_RNA (1)...(19): siRNA sense strand
agugagacaugcacagaca

SEQ ID NO: 1601063 - RNA, 19 nt, Homo sapiens
  misc_RNA (1)...(19): siRNA sense strand
uaaaggugucaacaggaaa

SEQ ID NO: 1601064 - RNA, 19 nt, Homo sapiens
  misc_RNA (1)...(19): siRNA sense strand
aacaggaaauugggaagga

SEQ ID NO: 1601065 - RNA, 19 nt, Homo sapiens
  misc_RNA (1)...(19): siRNA sense strand
agugauaacucuauuuccu

SEQ ID NO: 1601066 - RNA, 19 nt, Homo sapiens
  misc_RNA (1)...(19): siRNA sense strand
gacaugcacagacagaucu

SEQ ID NO: 1601067 - RNA, 19 nt, Homo sapiens
  misc_RNA (1)...(19): siRNA sense strand
ugagacaugcacagacaga

SEQ ID NO: 1601068 - RNA, 19 nt, Homo sapiens
  misc_RNA (1)...(19): siRNA sense strand
ucgaguugcuuaugaaauu

SEQ ID NO: 1601069 - RNA, 19 nt, Homo sapiens
  misc_RNA (1)...(19): siRNA sense strand
gaaauuaugcaaacacuac

SEQ ID NO: 1601070 - RNA, 19 nt, Homo sapiens
  misc_RNA (1)...(19): siRNA sense strand
cuaaaggugucaacaggaa

SEQ ID NO: 1601071 - RNA, 19 nt, Homo sapiens
  misc_RNA (1)...(19): siRNA sense strand
cacaaucgauacacagaaa

SEQ ID NO: 1601072 - RNA, 19 nt, Homo sapiens
  misc_RNA (1)...(19): siRNA sense strand
cuacaaaguucgagagaag

SEQ ID NO: 1601073 - RNA, 19 nt, Homo sapiens
  misc_RNA (1)...(19): siRNA sense strand
cugcaaacuuccauucuuu

SEQ ID NO: 1601074 - RNA, 19 nt, Homo sapiens
  misc_RNA (1)...(19): siRNA sense strand
cgaguugcuuaugaaauua

SEQ ID NO: 1601075 - RNA, 19 nt, Homo sapiens
  misc_RNA (1)...(19): siRNA sense strand
cagaugaaauucccaugga

SEQ ID NO: 1601076 - RNA, 19 nt, Homo sapiens
  misc_RNA (1)...(19): siRNA sense strand
cauggaaccuggagauauc

SEQ ID NO: 1601077 - RNA, 19 nt, Homo sapiens
  misc_RNA (1)...(19): siRNA sense strand
gaaccuggagauaucauug

SEQ ID NO: 1601078 - RNA, 19 nt, Homo sapiens
  misc_RNA (1)...(19): siRNA sense strand
gggaaggacgggccuauau

SEQ ID NO: 1601079 - RNA, 19 nt, Homo sapiens
  misc_RNA (1)...(19): siRNA sense strand
gauagaaacggucaaguac

SEQ ID NO: 1601080 - RNA, 19 nt, Homo sapiens
  misc_RNA (1)...(19): siRNA sense strand
agauagaaacggucaagua

SEQ ID NO: 1601081 - RNA, 19 nt, Homo sapiens
  misc_RNA (1)...(19): siRNA sense strand
cagaaugcccacaaucaaa

SEQ ID NO: 1601082 - RNA, 19 nt, Homo sapiens
  misc_RNA (1)...(19): siRNA sense strand
ggauggcuauucuaaaggu

SEQ ID NO: 1601083 - RNA, 19 nt, Homo sapiens
  misc_RNA (1)...(19): siRNA sense strand
gcacaaucgauacacagaa

SEQ ID NO: 1601084 - RNA, 19 nt, Homo sapiens
  misc_RNA (1)...(19): siRNA sense strand
ucccaggucugucgaguug

SEQ ID NO: 1601085 - RNA, 19 nt, Homo sapiens
  misc_RNA (1)...(19): siRNA sense strand
gcaaacuuccauucuuuag

SEQ ID NO: 1601086 - RNA, 19 nt, Homo sapiens
  misc_RNA (1)...(19): siRNA sense strand
gaaugcccacaaucaaauu

SEQ ID NO: 1601087 - RNA, 19 nt, Homo sapiens
  misc_RNA (1)...(19): siRNA sense strand
ggaaggacgggccuauauc

SEQ ID NO: 1601088 - RNA, 19 nt, Homo sapiens
  misc_RNA (1)...(19): siRNA sense strand
ugggauggcuauucuaaag

SEQ ID NO: 1601089 - RNA, 19 nt, Homo sapiens
  misc_RNA (1)...(19): siRNA sense strand
cagcuggacugcacaaucg

SEQ ID NO: 1601090 - RNA, 19 nt, Homo sapiens
  misc_RNA (1)...(19): siRNA sense strand
gaagauagaaacggucaag

SEQ ID NO: 1601091 - RNA, 19 nt, Homo sapiens
  misc_RNA (1)...(19): siRNA sense strand
cuauaucccuccuacaaag

SEQ ID NO: 1601092 - RNA, 19 nt, Homo sapiens
  misc_RNA (1)...(19): siRNA sense strand
ggauauacauuuucucucu

SEQ ID NO: 1601093 - RNA, 19 nt, Homo sapiens
  misc_RNA (1)...(19): siRNA sense strand
ccagaaugcccacaaucaa

SEQ ID NO: 1601094 - RNA, 19 nt, Homo sapiens
  misc_RNA (1)...(19): siRNA sense strand
gccagaaugcccacaauca

SEQ ID NO: 1601095 - RNA, 19 nt, Homo sapiens
  misc_RNA (1)...(19): siRNA sense strand
uauuuaggccuguaaguga

SEQ ID NO: 1601096 - RNA, 19 nt, Homo sapiens
  misc_RNA (1)...(19): siRNA sense strand
ggacugcacaaucgauaca

SEQ ID NO: 1601097 - RNA, 19 nt, Homo sapiens
  misc_RNA (1)...(19): siRNA sense strand
gccuauaucccuccuacaa

SEQ ID NO: 1601098 - RNA, 19 nt, Homo sapiens
  misc_RNA (1)...(19): siRNA sense strand
caaacuuccauucuuuaga

SEQ ID NO: 1601099 - RNA, 19 nt, Homo sapiens
  misc_RNA (1)...(19): siRNA sense strand
caggcagacuuccuagugu

SEQ ID NO: 1601100 - RNA, 19 nt, Homo sapiens
  misc_RNA (1)...(19): siRNA sense strand
caaaguucgagagaagaua

SEQ ID NO: 1601101 - RNA, 19 nt, Homo sapiens
  misc_RNA (1)...(19): siRNA sense strand
ugaugccucugcaaacuuc

SEQ ID NO: 1601102 - RNA, 19 nt, Homo sapiens
  misc_RNA (1)...(19): siRNA sense strand
uccugaggcugagaaauaa

SEQ ID NO: 1601103 - RNA, 19 nt, Homo sapiens
  misc_RNA (1)...(19): siRNA sense strand
ucauugguguggcuggaaa

SEQ ID NO: 1601104 - RNA, 19 nt, Homo sapiens
  misc_RNA (1)...(19): siRNA sense strand
ucugcaaacuuccauucuu

SEQ ID NO: 1601105 - RNA, 19 nt, Homo sapiens
  misc_RNA (1)...(19): siRNA sense strand
gcagacuuccuagugugua

SEQ ID NO: 1601106 - RNA, 19 nt, Homo sapiens
  misc_RNA (1)...(19): siRNA sense strand
guauuuaggccuguaagug

SEQ ID NO: 1601107 - RNA, 19 nt, Homo sapiens
  misc_RNA (1)...(19): siRNA sense strand
ccgaacugcagaugaaauu

SEQ ID NO: 1601108 - RNA, 19 nt, Homo sapiens
  misc_RNA (1)...(19): siRNA sense strand
ucugucgaguugcuuauga

SEQ ID NO: 1601109 - RNA, 19 nt, Homo sapiens
  misc_RNA (1)...(19): siRNA sense strand
auccugaggcugagaaaua

SEQ ID NO: 1601110 - RNA, 19 nt, Homo sapiens
  misc_RNA (1)...(19): siRNA sense strand
ucauugggauggcuauucu

SEQ ID NO: 1601111 - RNA, 19 nt, Homo sapiens
  misc_RNA (1)...(19): siRNA sense strand
ccauggaaccuggagauau

SEQ ID NO: 1601112 - RNA, 19 nt, Homo sapiens
  misc_RNA (1)...(19): siRNA sense strand
ggaaccuggagauaucauu

SEQ ID NO: 1601113 - RNA, 19 nt, Homo sapiens
  misc_RNA (1)...(19): siRNA sense strand
uaagugagacaugcacaga

SEQ ID NO: 1601114 - RNA, 19 nt, Homo sapiens
  misc_RNA (1)...(19): siRNA sense strand
gcaaacacuacauccugau

SEQ ID NO: 1601115 - RNA, 19 nt, Homo sapiens
  misc_RNA (1)...(19): siRNA sense strand
ccuacaaaguucgagagaa

SEQ ID NO: 1601116 - RNA, 19 nt, Homo sapiens
  misc_RNA (1)...(19): siRNA sense strand
ccuauaucccuccuacaaa

SEQ ID NO: 1601117 - RNA, 19 nt, Homo sapiens
  misc_RNA (1)...(19): siRNA sense strand
gaaggacgggccuauaucc

SEQ ID NO: 1601118 - RNA, 19 nt, Homo sapiens
  misc_RNA (1)...(19): siRNA sense strand
gaacugcagaugaaauucc

SEQ ID NO: 1601119 - RNA, 19 nt, Homo sapiens
  misc_RNA (1)...(19): siRNA sense strand
ucaggcagacuuccuagug

SEQ ID NO: 1601120 - RNA, 19 nt, Homo sapiens
  misc_RNA (1)...(19): siRNA sense strand
agaaugcccacaaucaaau

SEQ ID NO: 1601121 - RNA, 19 nt, Homo sapiens
  misc_RNA (1)...(19): siRNA sense strand
ugcaaacuuccauucuuua

SEQ ID NO: 1601122 - RNA, 19 nt, Homo sapiens
  misc_RNA (1)...(19): siRNA sense strand
agugagacaugcacagaca

SEQ ID NO: 1601123 - RNA, 19 nt, Homo sapiens
  misc_RNA (1)...(19): siRNA sense strand
uaaaggugucaacaggaaa

SEQ ID NO: 1601124 - RNA, 19 nt, Homo sapiens
  misc_RNA (1)...(19): siRNA sense strand
aacaggaaauugggaagga

SEQ ID NO: 1601125 - RNA, 19 nt, Homo sapiens
  misc_RNA (1)...(19): siRNA sense strand
agugauaacucuauuuccu

SEQ ID NO: 1601126 - RNA, 19 nt, Homo sapiens
  misc_RNA (1)...(19): siRNA sense strand
gacaugcacagacagaucu

SEQ ID NO: 1601127 - RNA, 19 nt, Homo sapiens
  misc_RNA (1)...(19): siRNA sense strand
ugagacaugcacagacaga

SEQ ID NO: 1601128 - RNA, 19 nt, Homo sapiens
  misc_RNA (1)...(19): siRNA sense strand
ucgaguugcuuaugaaauu

SEQ ID NO: 1601129 - RNA, 19 nt, Homo sapiens
  misc_RNA (1)...(19): siRNA sense strand
gaaauuaugcaaacacuac

SEQ ID NO: 1601130 - RNA, 19 nt, Homo sapiens
  misc_RNA (1)...(19): siRNA sense strand
cuaaaggugucaacaggaa

SEQ ID NO: 1601131 - RNA, 19 nt, Homo sapiens
  misc_RNA (1)...(19): siRNA sense strand
cacaaucgauacacagaaa

SEQ ID NO: 1601132 - RNA, 19 nt, Homo sapiens
  misc_RNA (1)...(19): siRNA sense strand
cuacaaaguucgagagaag

SEQ ID NO: 1601133 - RNA, 19 nt, Homo sapiens
  misc_RNA (1)...(19): siRNA sense strand
cugcaaacuuccauucuuu

SEQ ID NO: 1601134 - RNA, 19 nt, Homo sapiens
  misc_RNA (1)...(19): siRNA sense strand
cgaguugcuuaugaaauua

SEQ ID NO: 1601135 - RNA, 19 nt, Homo sapiens
  misc_RNA (1)...(19): siRNA sense strand
cagaugaaauucccaugga

SEQ ID NO: 1601136 - RNA, 19 nt, Homo sapiens
  misc_RNA (1)...(19): siRNA sense strand
cauggaaccuggagauauc

SEQ ID NO: 1601137 - RNA, 19 nt, Homo sapiens
  misc_RNA (1)...(19): siRNA sense strand
gaaccuggagauaucauug

SEQ ID NO: 1601138 - RNA, 19 nt, Homo sapiens
  misc_RNA (1)...(19): siRNA sense strand
gggaaggacgggccuauau

SEQ ID NO: 1601139 - RNA, 19 nt, Homo sapiens
  misc_RNA (1)...(19): siRNA sense strand
gauagaaacggucaaguac

SEQ ID NO: 1601140 - RNA, 19 nt, Homo sapiens
  misc_RNA (1)...(19): siRNA sense strand
agauagaaacggucaagua

SEQ ID NO: 1601141 - RNA, 19 nt, Homo sapiens
  misc_RNA (1)...(19): siRNA sense strand
cagaaugcccacaaucaaa

SEQ ID NO: 1601142 - RNA, 19 nt, Homo sapiens
  misc_RNA (1)...(19): siRNA sense strand
ggauggcuauucuaaaggu

SEQ ID NO: 1601143 - RNA, 19 nt, Homo sapiens
  misc_RNA (1)...(19): siRNA sense strand
gcacaaucgauacacagaa

SEQ ID NO: 1601144 - RNA, 19 nt, Homo sapiens
  misc_RNA (1)...(19): siRNA sense strand
ucccaggucugucgaguug

SEQ ID NO: 1601145 - RNA, 19 nt, Homo sapiens
  misc_RNA (1)...(19): siRNA sense strand
gcaaacuuccauucuuuag

SEQ ID NO: 1601146 - RNA, 19 nt, Homo sapiens
  misc_RNA (1)...(19): siRNA sense strand
gaaugcccacaaucaaauu

SEQ ID NO: 1601147 - RNA, 19 nt, Homo sapiens
  misc_RNA (1)...(19): siRNA sense strand
ggaaggacgggccuauauc

SEQ ID NO: 1601148 - RNA, 19 nt, Homo sapiens
  misc_RNA (1)...(19): siRNA sense strand
ugggauggcuauucuaaag

SEQ ID NO: 1601149 - RNA, 19 nt, Homo sapiens
  misc_RNA (1)...(19): siRNA sense strand
cagcuggacugcacaaucg

SEQ ID NO: 1601150 - RNA, 19 nt, Homo sapiens
  misc_RNA (1)...(19): siRNA sense strand
gaagauagaaacggucaag

SEQ ID NO: 1601151 - RNA, 19 nt, Homo sapiens
  misc_RNA (1)...(19): siRNA sense strand
cuauaucccuccuacaaag

SEQ ID NO: 1601152 - RNA, 19 nt, Homo sapiens
  misc_RNA (1)...(19): siRNA sense strand
ggauauacauuuucucucu

SEQ ID NO: 1601153 - RNA, 19 nt, Homo sapiens
  misc_RNA (1)...(19): siRNA sense strand
ccagaaugcccacaaucaa

SEQ ID NO: 1601154 - RNA, 19 nt, Homo sapiens
  misc_RNA (1)...(19): siRNA sense strand
gccagaaugcccacaauca

SEQ ID NO: 1601155 - RNA, 19 nt, Homo sapiens
  misc_RNA (1)...(19): siRNA sense strand
gccuauaucccuccuacaa

SEQ ID NO: 1601156 - RNA, 19 nt, Homo sapiens
  misc_RNA (1)...(19): siRNA sense strand
ggacugcacaaucgauaca

SEQ ID NO: 1601157 - RNA, 19 nt, Homo sapiens
  misc_RNA (1)...(19): siRNA sense strand
caaacuuccauucuuuaga

SEQ ID NO: 1601158 - RNA, 19 nt, Homo sapiens
  misc_RNA (1)...(19): siRNA sense strand
caggcagacuuccuagugu

SEQ ID NO: 1601159 - RNA, 19 nt, Homo sapiens
  misc_RNA (1)...(19): siRNA sense strand
caaaguucgagagaagaua

SEQ ID NO: 1601160 - RNA, 19 nt, Homo sapiens
  misc_RNA (1)...(19): siRNA sense strand
ugaugccucugcaaacuuc

SEQ ID NO: 1601161 - RNA, 19 nt, Homo sapiens
  misc_RNA (1)...(19): siRNA sense strand
uccugaggcugagaaauaa

SEQ ID NO: 1601162 - RNA, 19 nt, Homo sapiens
  misc_RNA (1)...(19): siRNA sense strand
ucauugguguggcuggaaa

SEQ ID NO: 1601163 - RNA, 19 nt, Homo sapiens
  misc_RNA (1)...(19): siRNA sense strand
ucugcaaacuuccauucuu

SEQ ID NO: 1601164 - RNA, 19 nt, Homo sapiens
  misc_RNA (1)...(19): siRNA sense strand
gcagacuuccuagugugua

SEQ ID NO: 1601165 - RNA, 19 nt, Homo sapiens
  misc_RNA (1)...(19): siRNA sense strand
ccgaacugcagaugaaauu

SEQ ID NO: 1601166 - RNA, 19 nt, Homo sapiens
  misc_RNA (1)...(19): siRNA sense strand
ucugucgaguugcuuauga

SEQ ID NO: 1601167 - RNA, 19 nt, Homo sapiens
  misc_RNA (1)...(19): siRNA sense strand
auccugaggcugagaaaua

SEQ ID NO: 1601168 - RNA, 19 nt, Homo sapiens
  misc_RNA (1)...(19): siRNA sense strand
ucauugggauggcuauucu

SEQ ID NO: 1601169 - RNA, 19 nt, Homo sapiens
  misc_RNA (1)...(19): siRNA sense strand
ccauggaaccuggagauau

SEQ ID NO: 1601170 - RNA, 19 nt, Homo sapiens
  misc_RNA (1)...(19): siRNA sense strand
ggaaccuggagauaucauu

SEQ ID NO: 1601171 - RNA, 19 nt, Homo sapiens
  misc_RNA (1)...(19): siRNA sense strand
gcaaacacuacauccugau

SEQ ID NO: 1601172 - RNA, 19 nt, Homo sapiens
  misc_RNA (1)...(19): siRNA sense strand
ccuacaaaguucgagagaa

SEQ ID NO: 1601173 - RNA, 19 nt, Homo sapiens
  misc_RNA (1)...(19): siRNA sense strand
ccuauaucccuccuacaaa

SEQ ID NO: 1601174 - RNA, 19 nt, Homo sapiens
  misc_RNA (1)...(19): siRNA sense strand
gaaggacgggccuauaucc

SEQ ID NO: 1601175 - RNA, 19 nt, Homo sapiens
  misc_RNA (1)...(19): siRNA sense strand
gaacugcagaugaaauucc

SEQ ID NO: 1601176 - RNA, 19 nt, Homo sapiens
  misc_RNA (1)...(19): siRNA sense strand
agaaugcccacaaucaaau

SEQ ID NO: 1601177 - RNA, 19 nt, Homo sapiens
  misc_RNA (1)...(19): siRNA sense strand
ucaggcagacuuccuagug

SEQ ID NO: 1601178 - RNA, 19 nt, Homo sapiens
  misc_RNA (1)...(19): siRNA sense strand
ugcaaacuuccauucuuua

SEQ ID NO: 1601179 - RNA, 19 nt, Homo sapiens
  misc_RNA (1)...(19): siRNA sense strand
uaaaggugucaacaggaaa

SEQ ID NO: 1601180 - RNA, 19 nt, Homo sapiens
  misc_RNA (1)...(19): siRNA sense strand
aacaggaaauugggaagga

SEQ ID NO: 1601181 - RNA, 19 nt, Homo sapiens
  misc_RNA (1)...(19): siRNA sense strand
agugauaacucuauuuccu

SEQ ID NO: 1601182 - RNA, 19 nt, Homo sapiens
  misc_RNA (1)...(19): siRNA sense strand
ggaggaagaugaagaggaa

SEQ ID NO: 1601183 - RNA, 19 nt, Homo sapiens
  misc_RNA (1)...(19): siRNA sense strand
ugacgcaucucaaggaaua

SEQ ID NO: 1601184 - RNA, 19 nt, Homo sapiens
  misc_RNA (1)...(19): siRNA sense strand
ugaagaaccugaagaggaa

SEQ ID NO: 1601185 - RNA, 19 nt, Homo sapiens
  misc_RNA (1)...(19): siRNA sense strand
ggagaaggcaggcaaauau

SEQ ID NO: 1601186 - RNA, 19 nt, Homo sapiens
  misc_RNA (1)...(19): siRNA sense strand
gaaguacaauuuccguuuc

SEQ ID NO: 1601187 - RNA, 19 nt, Homo sapiens
  misc_RNA (1)...(19): siRNA sense strand
gaacagaaguacaauuucc

SEQ ID NO: 1601188 - RNA, 19 nt, Homo sapiens
  misc_RNA (1)...(19): siRNA sense strand
gaacccagauucccugaag

SEQ ID NO: 1601189 - RNA, 19 nt, Homo sapiens
  misc_RNA (1)...(19): siRNA sense strand
gaaagaugccaccuucuau

SEQ ID NO: 1601190 - RNA, 19 nt, Homo sapiens
  misc_RNA (1)...(19): siRNA sense strand
gagaagcugcggaaaguaa

SEQ ID NO: 1601191 - RNA, 19 nt, Homo sapiens
  misc_RNA (1)...(19): siRNA sense strand
gaagaaacaggaggacuuu

SEQ ID NO: 1601192 - RNA, 19 nt, Homo sapiens
  misc_RNA (1)...(19): siRNA sense strand
agaaacagcucaaggaaag

SEQ ID NO: 1601193 - RNA, 19 nt, Homo sapiens
  misc_RNA (1)...(19): siRNA sense strand
ccauguaccugaaggacua

SEQ ID NO: 1601194 - RNA, 19 nt, Homo sapiens
  misc_RNA (1)...(19): siRNA sense strand
gaacgacccugaguuggau

SEQ ID NO: 1601195 - RNA, 19 nt, Homo sapiens
  misc_RNA (1)...(19): siRNA sense strand
ggaagguuaucuuggagaa

SEQ ID NO: 1601196 - RNA, 19 nt, Homo sapiens
  misc_RNA (1)...(19): siRNA sense strand
gaacagcaucgucaucaga

SEQ ID NO: 1601197 - RNA, 19 nt, Homo sapiens
  misc_RNA (1)...(19): siRNA sense strand
agacaucgucgcaaaguua

SEQ ID NO: 1601198 - RNA, 19 nt, Homo sapiens
  misc_RNA (1)...(19): siRNA sense strand
uaaagaagaccugcaugua

SEQ ID NO: 1601199 - RNA, 19 nt, Homo sapiens
  misc_RNA (1)...(19): siRNA sense strand
ugaaggaacugacgcaucu

SEQ ID NO: 1601200 - RNA, 19 nt, Homo sapiens
  misc_RNA (1)...(19): siRNA sense strand
gaggagaagccacaauuug

SEQ ID NO: 1601201 - RNA, 19 nt, Homo sapiens
  misc_RNA (1)...(19): siRNA sense strand
ggacgacuccucagacgaa

SEQ ID NO: 1601202 - RNA, 19 nt, Homo sapiens
  misc_RNA (1)...(19): siRNA sense strand
gcaaaguuauguggaggaa

SEQ ID NO: 1601203 - RNA, 19 nt, Homo sapiens
  misc_RNA (1)...(19): siRNA sense strand
aggaguaccuggaugagua

SEQ ID NO: 1601204 - RNA, 19 nt, Homo sapiens
  misc_RNA (1)...(19): siRNA sense strand
gaaaggagaagagggaaga

SEQ ID NO: 1601205 - RNA, 19 nt, Homo sapiens
  misc_RNA (1)...(19): siRNA sense strand
gaugccaccuucuauaaca

SEQ ID NO: 1601206 - RNA, 19 nt, Homo sapiens
  misc_RNA (1)...(19): siRNA sense strand
gauccucgcugcugacgau

SEQ ID NO: 1601207 - RNA, 19 nt, Homo sapiens
  misc_RNA (1)...(19): siRNA sense strand
ggaggagaagccacaauuu

SEQ ID NO: 1601208 - RNA, 19 nt, Homo sapiens
  misc_RNA (1)...(19): siRNA sense strand
caggagacaucgucgcaaa

SEQ ID NO: 1601209 - RNA, 19 nt, Homo sapiens
  misc_RNA (1)...(19): siRNA sense strand
acaagacguucgaggagua

SEQ ID NO: 1601210 - RNA, 19 nt, Homo sapiens
  misc_RNA (1)...(19): siRNA sense strand
gaaagaagagggagaaagc

SEQ ID NO: 1601211 - RNA, 19 nt, Homo sapiens
  misc_RNA (1)...(19): siRNA sense strand
gaaacaggaggacuuugaa

SEQ ID NO: 1601212 - RNA, 19 nt, Homo sapiens
  misc_RNA (1)...(19): siRNA sense strand
gaaggcaggcaaauauguu

SEQ ID NO: 1601213 - RNA, 19 nt, Homo sapiens
  misc_RNA (1)...(19): siRNA sense strand
gaagggacagaaagagauu

SEQ ID NO: 1601214 - RNA, 19 nt, Homo sapiens
  misc_RNA (1)...(19): siRNA sense strand
agaggaagguuaucuugga

SEQ ID NO: 1601215 - RNA, 19 nt, Homo sapiens
  misc_RNA (1)...(19): siRNA sense strand
ggaaauggaggaagagaag

SEQ ID NO: 1601216 - RNA, 19 nt, Homo sapiens
  misc_RNA (1)...(19): siRNA sense strand
ggaacgacccugaguugga

SEQ ID NO: 1601217 - RNA, 19 nt, Homo sapiens
  misc_RNA (1)...(19): siRNA sense strand
aaaguuauguggaggaaca

SEQ ID NO: 1601218 - RNA, 19 nt, Homo sapiens
  misc_RNA (1)...(19): siRNA sense strand
aaagaugccaccuucuaua

SEQ ID NO: 1601219 - RNA, 19 nt, Homo sapiens
  misc_RNA (1)...(19): siRNA sense strand
aagaagaccugcauguaca

SEQ ID NO: 1601220 - RNA, 19 nt, Homo sapiens
  misc_RNA (1)...(19): siRNA sense strand
gcccagaacucauggaaaa

SEQ ID NO: 1601221 - RNA, 19 nt, Homo sapiens
  misc_RNA (1)...(19): siRNA sense strand
ggaggaggccgacuacauc

SEQ ID NO: 1601222 - RNA, 19 nt, Homo sapiens
  misc_RNA (1)...(19): siRNA sense strand
ggaagaagaagggcuugaa

SEQ ID NO: 1601223 - RNA, 19 nt, Homo sapiens
  misc_RNA (1)...(19): siRNA sense strand
aagaggaaauggaggaaga

SEQ ID NO: 1601224 - RNA, 19 nt, Homo sapiens
  misc_RNA (1)...(19): siRNA sense strand
caacauggacgccgacuac

SEQ ID NO: 1601225 - RNA, 19 nt, Homo sapiens
  misc_RNA (1)...(19): siRNA sense strand
gagacaucgucgcaaaguu

SEQ ID NO: 1601226 - RNA, 19 nt, Homo sapiens
  misc_RNA (1)...(19): siRNA sense strand
gaccugcccugucgcuuca

SEQ ID NO: 1601227 - RNA, 19 nt, Homo sapiens
  misc_RNA (1)...(19): siRNA sense strand
caggaggacuuugaacaga

SEQ ID NO: 1601228 - RNA, 19 nt, Homo sapiens
  misc_RNA (1)...(19): siRNA sense strand
ggagaagcccguguucgaa

SEQ ID NO: 1601229 - RNA, 19 nt, Homo sapiens
  misc_RNA (1)...(19): siRNA sense strand
ggaggacuuugaacagaag

SEQ ID NO: 1601230 - RNA, 19 nt, Homo sapiens
  misc_RNA (1)...(19): siRNA sense strand
ucaagcagcugaagaaccu

SEQ ID NO: 1601231 - RNA, 19 nt, Homo sapiens
  misc_RNA (1)...(19): siRNA sense strand
ggacuacgaggacaucauc

SEQ ID NO: 1601232 - RNA, 19 nt, Homo sapiens
  misc_RNA (1)...(19): siRNA sense strand
gcaggcaaauauguugaug

SEQ ID NO: 1601233 - RNA, 19 nt, Homo sapiens
  misc_RNA (1)...(19): siRNA sense strand
gaagaagaagggcuugaag

SEQ ID NO: 1601234 - RNA, 19 nt, Homo sapiens
  misc_RNA (1)...(19): siRNA sense strand
agaaacaggaggacuuuga

SEQ ID NO: 1601235 - RNA, 19 nt, Homo sapiens
  misc_RNA (1)...(19): siRNA sense strand
gcuaugaggaggaggaaga

SEQ ID NO: 1601236 - RNA, 19 nt, Homo sapiens
  misc_RNA (1)...(19): siRNA sense strand
gagaaggcaggcaaauaug

SEQ ID NO: 1601237 - RNA, 19 nt, Homo sapiens
  misc_RNA (1)...(19): siRNA sense strand
gaagagggagaaagcaaag

SEQ ID NO: 1601238 - RNA, 19 nt, Homo sapiens
  misc_RNA (1)...(19): siRNA sense strand
agaaguacaauuuccguuu

SEQ ID NO: 1601239 - RNA, 19 nt, Homo sapiens
  misc_RNA (1)...(19): siRNA sense strand
aagaugccaccuucuauaa

SEQ ID NO: 1601240 - RNA, 19 nt, Homo sapiens
  misc_RNA (1)...(19): siRNA sense strand
uggagaagcugcggaaagu

SEQ ID NO: 1601241 - RNA, 19 nt, Homo sapiens
  misc_RNA (1)...(19): siRNA sense strand
cagaaacagcucaaggaaa

SEQ ID NO: 1601242 - RNA, 19 nt, Homo sapiens
  misc_RNA (1)...(19): siRNA sense strand
gaaagcuuccgggcauuug

SEQ ID NO: 1601243 - RNA, 19 nt, Homo sapiens
  misc_RNA (1)...(19): siRNA sense strand
gcaagaagaagcgcaaguc

SEQ ID NO: 1601244 - RNA, 19 nt, Homo sapiens
  misc_RNA (1)...(19): siRNA sense strand
ugaagaaacaggaggacuu

SEQ ID NO: 1601245 - RNA, 19 nt, Homo sapiens
  misc_RNA (1)...(19): siRNA sense strand
gagauucggaacccagauu

SEQ ID NO: 1601246 - RNA, 19 nt, Homo sapiens
  misc_RNA (1)...(19): siRNA sense strand
ggagaagccacaauuugag

SEQ ID NO: 1601247 - RNA, 19 nt, Homo sapiens
  misc_RNA (1)...(19): siRNA sense strand
guaccuggaugaguauuac

SEQ ID NO: 1601248 - RNA, 19 nt, Homo sapiens
  misc_RNA (1)...(19): siRNA sense strand
gaagccacaauuugaggaa

SEQ ID NO: 1601249 - RNA, 19 nt, Homo sapiens
  misc_RNA (1)...(19): siRNA sense strand
ggaggaagaggaggaggaa

SEQ ID NO: 1601250 - RNA, 19 nt, Homo sapiens
  misc_RNA (1)...(19): siRNA sense strand
ccagaaggcccagaacuca

SEQ ID NO: 1601251 - RNA, 19 nt, Homo sapiens
  misc_RNA (1)...(19): siRNA sense strand
aaagaagaccugcauguac

SEQ ID NO: 1601252 - RNA, 19 nt, Homo sapiens
  misc_RNA (1)...(19): siRNA sense strand
cgagaggaagguuaucuug

SEQ ID NO: 1601253 - RNA, 19 nt, Homo sapiens
  misc_RNA (1)...(19): siRNA sense strand
aggagaagccacaauuuga

SEQ ID NO: 1601254 - RNA, 19 nt, Homo sapiens
  misc_RNA (1)...(19): siRNA sense strand
aagcaaagaagcaggaaga

SEQ ID NO: 1601255 - RNA, 19 nt, Homo sapiens
  misc_RNA (1)...(19): siRNA sense strand
ggaagaugaagaggaaaug

SEQ ID NO: 1601256 - RNA, 19 nt, Homo sapiens
  misc_RNA (1)...(19): siRNA sense strand
ggaagccacagagagauga

SEQ ID NO: 1601257 - RNA, 19 nt, Homo sapiens
  misc_RNA (1)...(19): siRNA sense strand
cuaaagaagaccugcaugu

SEQ ID NO: 1601258 - RNA, 19 nt, Homo sapiens
  misc_RNA (1)...(19): siRNA sense strand
ggagaagcugcggaaagua

SEQ ID NO: 1601259 - RNA, 19 nt, Homo sapiens
  misc_RNA (1)...(19): siRNA sense strand
guaaggaugagcgcagaaa

SEQ ID NO: 1601260 - RNA, 19 nt, Homo sapiens
  misc_RNA (1)...(19): siRNA sense strand
ggagacaucgucgcaaagu

SEQ ID NO: 1601261 - RNA, 19 nt, Homo sapiens
  misc_RNA (1)...(19): siRNA sense strand
cagggaagccacagagaga

SEQ ID NO: 1601262 - RNA, 19 nt, Homo sapiens
  misc_RNA (1)...(19): siRNA sense strand
cagaagccuuggagaagca

SEQ ID NO: 1601263 - RNA, 19 nt, Homo sapiens
  misc_RNA (1)...(19): siRNA sense strand
ggacucagcaucggucaag

SEQ ID NO: 1601264 - RNA, 19 nt, Homo sapiens
  misc_RNA (1)...(19): siRNA sense strand
acgaccagcucaugcagaa

SEQ ID NO: 1601265 - RNA, 19 nt, Homo sapiens
  misc_RNA (1)...(19): siRNA sense strand
ggagacuuccaaucacaga

SEQ ID NO: 1601266 - RNA, 19 nt, Homo sapiens
  misc_RNA (1)...(19): siRNA sense strand
aggcaaauauguugaugag

SEQ ID NO: 1601267 - RNA, 19 nt, Homo sapiens
  misc_RNA (1)...(19): siRNA sense strand
gaaagcaaagaagcaggaa

SEQ ID NO: 1601268 - RNA, 19 nt, Homo sapiens
  misc_RNA (1)...(19): siRNA sense strand
uggagaagcagaagaaagu

SEQ ID NO: 1601269 - RNA, 19 nt, Homo sapiens
  misc_RNA (1)...(19): siRNA sense strand
aagaggaggaggaagauga

SEQ ID NO: 1601270 - RNA, 19 nt, Homo sapiens
  misc_RNA (1)...(19): siRNA sense strand
ggaagaggaggaggaagau

SEQ ID NO: 1601271 - RNA, 19 nt, Homo sapiens
  misc_RNA (1)...(19): siRNA sense strand
gauuacauccucaacaaac

SEQ ID NO: 1601272 - RNA, 19 nt, Homo sapiens
  misc_RNA (1)...(19): siRNA sense strand
gagcgguuccugcgggauu

SEQ ID NO: 1601273 - RNA, 19 nt, Homo sapiens
  misc_RNA (1)...(19): siRNA sense strand
ggaacugacgcaucucaag

SEQ ID NO: 1601274 - RNA, 19 nt, Homo sapiens
  misc_RNA (1)...(19): siRNA sense strand
gcuccaguuugcugcagaa

SEQ ID NO: 1601275 - RNA, 19 nt, Homo sapiens
  misc_RNA (1)...(19): siRNA sense strand
cagaacagcaucgucauca

SEQ ID NO: 1601276 - RNA, 19 nt, Homo sapiens
  misc_RNA (1)...(19): siRNA sense strand
ggaggaggaagaugaagag

SEQ ID NO: 1601277 - RNA, 19 nt, Homo sapiens
  misc_RNA (1)...(19): siRNA sense strand
acagaaacagcucaaggaa

SEQ ID NO: 1601278 - RNA, 19 nt, Homo sapiens
  misc_RNA (1)...(19): siRNA sense strand
ggaguaccuggaugaguau

SEQ ID NO: 1601279 - RNA, 19 nt, Homo sapiens
  misc_RNA (1)...(19): siRNA sense strand
gccacaauuugaggaagaa

SEQ ID NO: 1601280 - RNA, 19 nt, Homo sapiens
  misc_RNA (1)...(19): siRNA sense strand
uggagaaggcaggcaaaua

SEQ ID NO: 1601281 - RNA, 19 nt, Homo sapiens
  misc_RNA (1)...(19): siRNA sense strand
aggaggacuuugaacagaa

SEQ ID NO: 1601282 - RNA, 19 nt, Homo sapiens
  misc_RNA (1)...(19): siRNA sense strand
ggaggaagaugaagaggaa

SEQ ID NO: 1601283 - RNA, 19 nt, Homo sapiens
  misc_RNA (1)...(19): siRNA sense strand
ugacgcaucucaaggaaua

SEQ ID NO: 1601284 - RNA, 19 nt, Homo sapiens
  misc_RNA (1)...(19): siRNA sense strand
ugaagaaccugaagaggaa

SEQ ID NO: 1601285 - RNA, 19 nt, Homo sapiens
  misc_RNA (1)...(19): siRNA sense strand
ggagaaggcaggcaaauau

SEQ ID NO: 1601286 - RNA, 19 nt, Homo sapiens
  misc_RNA (1)...(19): siRNA sense strand
gaaguacaauuuccguuuc

SEQ ID NO: 1601287 - RNA, 19 nt, Homo sapiens
  misc_RNA (1)...(19): siRNA sense strand
gaacagaaguacaauuucc

SEQ ID NO: 1601288 - RNA, 19 nt, Homo sapiens
  misc_RNA (1)...(19): siRNA sense strand
gaacccagauucccugaag

SEQ ID NO: 1601289 - RNA, 19 nt, Homo sapiens
  misc_RNA (1)...(19): siRNA sense strand
agaaacagcucaaggaaag

SEQ ID NO: 1601290 - RNA, 19 nt, Homo sapiens
  misc_RNA (1)...(19): siRNA sense strand
gagaagcugcggaaaguaa

SEQ ID NO: 1601291 - RNA, 19 nt, Homo sapiens
  misc_RNA (1)...(19): siRNA sense strand
gaagaaacaggaggacuuu

SEQ ID NO: 1601292 - RNA, 19 nt, Homo sapiens
  misc_RNA (1)...(19): siRNA sense strand
ggaagguuaucuuggagaa

SEQ ID NO: 1601293 - RNA, 19 nt, Homo sapiens
  misc_RNA (1)...(19): siRNA sense strand
gaacgacccugaguuggau

SEQ ID NO: 1601294 - RNA, 19 nt, Homo sapiens
  misc_RNA (1)...(19): siRNA sense strand
agacaucgucgcaaaguua

SEQ ID NO: 1601295 - RNA, 19 nt, Homo sapiens
  misc_RNA (1)...(19): siRNA sense strand
uaaagaagaccugcaugua

SEQ ID NO: 1601296 - RNA, 19 nt, Homo sapiens
  misc_RNA (1)...(19): siRNA sense strand
ugaaggaacugacgcaucu

SEQ ID NO: 1601297 - RNA, 19 nt, Homo sapiens
  misc_RNA (1)...(19): siRNA sense strand
gaggagaagccacaauuug

SEQ ID NO: 1601298 - RNA, 19 nt, Homo sapiens
  misc_RNA (1)...(19): siRNA sense strand
ggacgacuccucagacgaa

SEQ ID NO: 1601299 - RNA, 19 nt, Homo sapiens
  misc_RNA (1)...(19): siRNA sense strand
gcaaaguuauguggaggaa

SEQ ID NO: 1601300 - RNA, 19 nt, Homo sapiens
  misc_RNA (1)...(19): siRNA sense strand
aggaguaccuggaugagua

SEQ ID NO: 1601301 - RNA, 19 nt, Homo sapiens
  misc_RNA (1)...(19): siRNA sense strand
gaaaggagaagagggaaga

SEQ ID NO: 1601302 - RNA, 19 nt, Homo sapiens
  misc_RNA (1)...(19): siRNA sense strand
ggaggagaagccacaauuu

SEQ ID NO: 1601303 - RNA, 19 nt, Homo sapiens
  misc_RNA (1)...(19): siRNA sense strand
gauccucgcugcugacgau

SEQ ID NO: 1601304 - RNA, 19 nt, Homo sapiens
  misc_RNA (1)...(19): siRNA sense strand
caggagacaucgucgcaaa

SEQ ID NO: 1601305 - RNA, 19 nt, Homo sapiens
  misc_RNA (1)...(19): siRNA sense strand
acaagacguucgaggagua

SEQ ID NO: 1601306 - RNA, 19 nt, Homo sapiens
  misc_RNA (1)...(19): siRNA sense strand
gaaagaagagggagaaagc

SEQ ID NO: 1601307 - RNA, 19 nt, Homo sapiens
  misc_RNA (1)...(19): siRNA sense strand
gaaacaggaggacuuugaa

SEQ ID NO: 1601308 - RNA, 19 nt, Homo sapiens
  misc_RNA (1)...(19): siRNA sense strand
gaagggacagaaagagauu

SEQ ID NO: 1601309 - RNA, 19 nt, Homo sapiens
  misc_RNA (1)...(19): siRNA sense strand
gaaggcaggcaaauauguu

SEQ ID NO: 1601310 - RNA, 19 nt, Homo sapiens
  misc_RNA (1)...(19): siRNA sense strand
aaaguuauguggaggaaca

SEQ ID NO: 1601311 - RNA, 19 nt, Homo sapiens
  misc_RNA (1)...(19): siRNA sense strand
ggaaauggaggaagagaag

SEQ ID NO: 1601312 - RNA, 19 nt, Homo sapiens
  misc_RNA (1)...(19): siRNA sense strand
ggaacgacccugaguugga

SEQ ID NO: 1601313 - RNA, 19 nt, Homo sapiens
  misc_RNA (1)...(19): siRNA sense strand
agaggaagguuaucuugga

SEQ ID NO: 1601314 - RNA, 19 nt, Homo sapiens
  misc_RNA (1)...(19): siRNA sense strand
aagaagaccugcauguaca

SEQ ID NO: 1601315 - RNA, 19 nt, Homo sapiens
  misc_RNA (1)...(19): siRNA sense strand
gcccagaacucauggaaaa

SEQ ID NO: 1601316 - RNA, 19 nt, Homo sapiens
  misc_RNA (1)...(19): siRNA sense strand
ggaggaggccgacuacauc

SEQ ID NO: 1601317 - RNA, 19 nt, Homo sapiens
  misc_RNA (1)...(19): siRNA sense strand
ggaagaagaagggcuugaa

SEQ ID NO: 1601318 - RNA, 19 nt, Homo sapiens
  misc_RNA (1)...(19): siRNA sense strand
aagaggaaauggaggaaga

SEQ ID NO: 1601319 - RNA, 19 nt, Homo sapiens
  misc_RNA (1)...(19): siRNA sense strand
caacauggacgccgacuac

SEQ ID NO: 1601320 - RNA, 19 nt, Homo sapiens
  misc_RNA (1)...(19): siRNA sense strand
gagacaucgucgcaaaguu

SEQ ID NO: 1601321 - RNA, 19 nt, Homo sapiens
  misc_RNA (1)...(19): siRNA sense strand
gaccugcccugucgcuuca

SEQ ID NO: 1601322 - RNA, 19 nt, Homo sapiens
  misc_RNA (1)...(19): siRNA sense strand
caggaggacuuugaacaga

SEQ ID NO: 1601323 - RNA, 19 nt, Homo sapiens
  misc_RNA (1)...(19): siRNA sense strand
ggagaagcccguguucgaa

SEQ ID NO: 1601324 - RNA, 19 nt, Homo sapiens
  misc_RNA (1)...(19): siRNA sense strand
ggaggacuuugaacagaag

SEQ ID NO: 1601325 - RNA, 19 nt, Homo sapiens
  misc_RNA (1)...(19): siRNA sense strand
ucaagcagcugaagaaccu

SEQ ID NO: 1601326 - RNA, 19 nt, Homo sapiens
  misc_RNA (1)...(19): siRNA sense strand
ggacuacgaggacaucauc

SEQ ID NO: 1601327 - RNA, 19 nt, Homo sapiens
  misc_RNA (1)...(19): siRNA sense strand
gcuaugaggaggaggaaga

SEQ ID NO: 1601328 - RNA, 19 nt, Homo sapiens
  misc_RNA (1)...(19): siRNA sense strand
gcaggcaaauauguugaug

SEQ ID NO: 1601329 - RNA, 19 nt, Homo sapiens
  misc_RNA (1)...(19): siRNA sense strand
gaagaagaagggcuugaag

SEQ ID NO: 1601330 - RNA, 19 nt, Homo sapiens
  misc_RNA (1)...(19): siRNA sense strand
agaaacaggaggacuuuga

SEQ ID NO: 1601331 - RNA, 19 nt, Homo sapiens
  misc_RNA (1)...(19): siRNA sense strand
gagaaggcaggcaaauaug

SEQ ID NO: 1601332 - RNA, 19 nt, Homo sapiens
  misc_RNA (1)...(19): siRNA sense strand
gaagagggagaaagcaaag

SEQ ID NO: 1601333 - RNA, 19 nt, Homo sapiens
  misc_RNA (1)...(19): siRNA sense strand
agaaguacaauuuccguuu

SEQ ID NO: 1601334 - RNA, 19 nt, Homo sapiens
  misc_RNA (1)...(19): siRNA sense strand
uggagaagcugcggaaagu

SEQ ID NO: 1601335 - RNA, 19 nt, Homo sapiens
  misc_RNA (1)...(19): siRNA sense strand
cagaaacagcucaaggaaa

SEQ ID NO: 1601336 - RNA, 19 nt, Homo sapiens
  misc_RNA (1)...(19): siRNA sense strand
gaaagcuuccgggcauuug

SEQ ID NO: 1601337 - RNA, 19 nt, Homo sapiens
  misc_RNA (1)...(19): siRNA sense strand
gcaagaagaagcgcaaguc

SEQ ID NO: 1601338 - RNA, 19 nt, Homo sapiens
  misc_RNA (1)...(19): siRNA sense strand
ugaagaaacaggaggacuu

SEQ ID NO: 1601339 - RNA, 19 nt, Homo sapiens
  misc_RNA (1)...(19): siRNA sense strand
gagauucggaacccagauu

SEQ ID NO: 1601340 - RNA, 19 nt, Homo sapiens
  misc_RNA (1)...(19): siRNA sense strand
ggagaagccacaauuugag

SEQ ID NO: 1601341 - RNA, 19 nt, Homo sapiens
  misc_RNA (1)...(19): siRNA sense strand
guaccuggaugaguauuac

SEQ ID NO: 1601342 - RNA, 19 nt, Homo sapiens
  misc_RNA (1)...(19): siRNA sense strand
gaagccacaauuugaggaa

SEQ ID NO: 1601343 - RNA, 19 nt, Homo sapiens
  misc_RNA (1)...(19): siRNA sense strand
ggaggaagaggaggaggaa

SEQ ID NO: 1601344 - RNA, 19 nt, Homo sapiens
  misc_RNA (1)...(19): siRNA sense strand
ccagaaggcccagaacuca

SEQ ID NO: 1601345 - RNA, 19 nt, Homo sapiens
  misc_RNA (1)...(19): siRNA sense strand
aaagaagaccugcauguac

SEQ ID NO: 1601346 - RNA, 19 nt, Homo sapiens
  misc_RNA (1)...(19): siRNA sense strand
aggagaagccacaauuuga

SEQ ID NO: 1601347 - RNA, 19 nt, Homo sapiens
  misc_RNA (1)...(19): siRNA sense strand
aagcaaagaagcaggaaga

SEQ ID NO: 1601348 - RNA, 19 nt, Homo sapiens
  misc_RNA (1)...(19): siRNA sense strand
cgagaggaagguuaucuug

SEQ ID NO: 1601349 - RNA, 19 nt, Homo sapiens
  misc_RNA (1)...(19): siRNA sense strand
ggaagaugaagaggaaaug

SEQ ID NO: 1601350 - RNA, 19 nt, Homo sapiens
  misc_RNA (1)...(19): siRNA sense strand
ggaagccacagagagauga

SEQ ID NO: 1601351 - RNA, 19 nt, Homo sapiens
  misc_RNA (1)...(19): siRNA sense strand
cuaaagaagaccugcaugu

SEQ ID NO: 1601352 - RNA, 19 nt, Homo sapiens
  misc_RNA (1)...(19): siRNA sense strand
ggagaagcugcggaaagua

SEQ ID NO: 1601353 - RNA, 19 nt, Homo sapiens
  misc_RNA (1)...(19): siRNA sense strand
guaaggaugagcgcagaaa

SEQ ID NO: 1601354 - RNA, 19 nt, Homo sapiens
  misc_RNA (1)...(19): siRNA sense strand
ggagacaucgucgcaaagu

SEQ ID NO: 1601355 - RNA, 19 nt, Homo sapiens
  misc_RNA (1)...(19): siRNA sense strand
cagggaagccacagagaga

SEQ ID NO: 1601356 - RNA, 19 nt, Homo sapiens
  misc_RNA (1)...(19): siRNA sense strand
ggacucagcaucggucaag

SEQ ID NO: 1601357 - RNA, 19 nt, Homo sapiens
  misc_RNA (1)...(19): siRNA sense strand
acgaccagcucaugcagaa

SEQ ID NO: 1601358 - RNA, 19 nt, Homo sapiens
  misc_RNA (1)...(19): siRNA sense strand
ggaacugacgcaucucaag

SEQ ID NO: 1601359 - RNA, 19 nt, Homo sapiens
  misc_RNA (1)...(19): siRNA sense strand
ggagacuuccaaucacaga

SEQ ID NO: 1601360 - RNA, 19 nt, Homo sapiens
  misc_RNA (1)...(19): siRNA sense strand
gaaagcaaagaagcaggaa

SEQ ID NO: 1601361 - RNA, 19 nt, Homo sapiens
  misc_RNA (1)...(19): siRNA sense strand
aggcaaauauguugaugag

SEQ ID NO: 1601362 - RNA, 19 nt, Homo sapiens
  misc_RNA (1)...(19): siRNA sense strand
gcuccaguuugcugcagaa

SEQ ID NO: 1601363 - RNA, 19 nt, Homo sapiens
  misc_RNA (1)...(19): siRNA sense strand
aagaggaggaggaagauga

SEQ ID NO: 1601364 - RNA, 19 nt, Homo sapiens
  misc_RNA (1)...(19): siRNA sense strand
ggaagaggaggaggaagau

SEQ ID NO: 1601365 - RNA, 19 nt, Homo sapiens
  misc_RNA (1)...(19): siRNA sense strand
gauuacauccucaacaaac

SEQ ID NO: 1601366 - RNA, 19 nt, Homo sapiens
  misc_RNA (1)...(19): siRNA sense strand
gagcgguuccugcgggauu

SEQ ID NO: 1601367 - RNA, 19 nt, Homo sapiens
  misc_RNA (1)...(19): siRNA sense strand
ggaggaggaagaugaagag

SEQ ID NO: 1601368 - RNA, 19 nt, Homo sapiens
  misc_RNA (1)...(19): siRNA sense strand
aggaggacuuugaacagaa

SEQ ID NO: 1601369 - RNA, 19 nt, Homo sapiens
  misc_RNA (1)...(19): siRNA sense strand
acagaaacagcucaaggaa

SEQ ID NO: 1601370 - RNA, 19 nt, Homo sapiens
  misc_RNA (1)...(19): siRNA sense strand
ggaguaccuggaugaguau

SEQ ID NO: 1601371 - RNA, 19 nt, Homo sapiens
  misc_RNA (1)...(19): siRNA sense strand
gccacaauuugaggaagaa

SEQ ID NO: 1601372 - RNA, 19 nt, Homo sapiens
  misc_RNA (1)...(19): siRNA sense strand
uggagaaggcaggcaaaua

SEQ ID NO: 1601373 - RNA, 19 nt, Homo sapiens
  misc_RNA (1)...(19): siRNA sense strand
gaccagcucaugcagaagu

SEQ ID NO: 1601374 - RNA, 19 nt, Homo sapiens
  misc_RNA (1)...(19): siRNA sense strand
cgguggugcucccuaaaga

SEQ ID NO: 1601375 - RNA, 19 nt, Homo sapiens
  misc_RNA (1)...(19): siRNA sense strand
acaauuugaggaagaagaa

SEQ ID NO: 1601376 - RNA, 19 nt, Homo sapiens
  misc_RNA (1)...(19): siRNA sense strand
gaagaugaagaggaaaugg

SEQ ID NO: 1601377 - RNA, 19 nt, Homo sapiens
  misc_RNA (1)...(19): siRNA sense strand
aagaagaagggcuugaaga

SEQ ID NO: 1601378 - RNA, 19 nt, Homo sapiens
  misc_RNA (1)...(19): siRNA sense strand
agaagagggagaaagcaaa

SEQ ID NO: 1601379 - RNA, 19 nt, Homo sapiens
  misc_RNA (1)...(19): siRNA sense strand
gaaggggagcuguuucuga

SEQ ID NO: 1601380 - RNA, 19 nt, Homo sapiens
  misc_RNA (1)...(19): siRNA sense strand
gcaggagaagcccguguuc

SEQ ID NO: 1601381 - RNA, 19 nt, Homo sapiens
  misc_RNA (1)...(19): siRNA sense strand
gggaagccacagagagaug

SEQ ID NO: 1601382 - RNA, 19 nt, Homo sapiens
  misc_RNA (1)...(19): siRNA sense strand
gaaggaagccguccagaau

SEQ ID NO: 1601383 - RNA, 19 nt, Homo sapiens
  misc_RNA (1)...(19): siRNA sense strand
ccaaguacaucccagcuuu

SEQ ID NO: 1601384 - RNA, 19 nt, Homo sapiens
  misc_RNA (1)...(19): siRNA sense strand
ggacauggccgacuacagu

SEQ ID NO: 1601385 - RNA, 19 nt, Homo sapiens
  misc_RNA (1)...(19): siRNA sense strand
gcagaucgaugacaaugag

SEQ ID NO: 1601386 - RNA, 19 nt, Homo sapiens
  misc_RNA (1)...(19): siRNA sense strand
gagcagauccaguucauca

SEQ ID NO: 1601387 - RNA, 19 nt, Homo sapiens
  misc_RNA (1)...(19): siRNA sense strand
cgaagaagauugccagcau

SEQ ID NO: 1601388 - RNA, 19 nt, Homo sapiens
  misc_RNA (1)...(19): siRNA sense strand
ucaaagccaucaucuucuu

SEQ ID NO: 1601389 - RNA, 19 nt, Homo sapiens
  misc_RNA (1)...(19): siRNA sense strand
acaccacccuggaauuuga

SEQ ID NO: 1601390 - RNA, 19 nt, Homo sapiens
  misc_RNA (1)...(19): siRNA sense strand
ggaagaaccacauguacuc

SEQ ID NO: 1601391 - RNA, 19 nt, Homo sapiens
  misc_RNA (1)...(19): siRNA sense strand
gauccaugguguucaagga

SEQ ID NO: 1601392 - RNA, 19 nt, Homo sapiens
  misc_RNA (1)...(19): siRNA sense strand
gggcuggcaugaagaagga

SEQ ID NO: 1601393 - RNA, 19 nt, Homo sapiens
  misc_RNA (1)...(19): siRNA sense strand
ggaggagcgugcggaagaa

SEQ ID NO: 1601394 - RNA, 19 nt, Homo sapiens
  misc_RNA (1)...(19): siRNA sense strand
ccucaaagccaucaucuuc

SEQ ID NO: 1601395 - RNA, 19 nt, Homo sapiens
  misc_RNA (1)...(19): siRNA sense strand
cauguacuccugcagauuu

SEQ ID NO: 1601396 - RNA, 19 nt, Homo sapiens
  misc_RNA (1)...(19): siRNA sense strand
aggaagccguccagaauga

SEQ ID NO: 1601397 - RNA, 19 nt, Homo sapiens
  misc_RNA (1)...(19): siRNA sense strand
ucaacgaccgccaguauga

SEQ ID NO: 1601398 - RNA, 19 nt, Homo sapiens
  misc_RNA (1)...(19): siRNA sense strand
caucaacgaccgccaguau

SEQ ID NO: 1601399 - RNA, 19 nt, Homo sapiens
  misc_RNA (1)...(19): siRNA sense strand
caagagauccaugguguuc

SEQ ID NO: 1601400 - RNA, 19 nt, Homo sapiens
  misc_RNA (1)...(19): siRNA sense strand
gaguaugccuaccucaaag

SEQ ID NO: 1601401 - RNA, 19 nt, Homo sapiens
  misc_RNA (1)...(19): siRNA sense strand
cuacaccacccuggaauuu

SEQ ID NO: 1601402 - RNA, 19 nt, Homo sapiens
  misc_RNA (1)...(19): siRNA sense strand
agagauccaugguguucaa

SEQ ID NO: 1601403 - RNA, 19 nt, Homo sapiens
  misc_RNA (1)...(19): siRNA sense strand
gaucgaugacaaugaguau

SEQ ID NO: 1601404 - RNA, 19 nt, Homo sapiens
  misc_RNA (1)...(19): siRNA sense strand
ugacucgcguggccgcuuu

SEQ ID NO: 1601405 - RNA, 19 nt, Homo sapiens
  misc_RNA (1)...(19): siRNA sense strand
gcagauccaguucaucaag

SEQ ID NO: 1601406 - RNA, 19 nt, Homo sapiens
  misc_RNA (1)...(19): siRNA sense strand
acugcaggcucaagaaaug

SEQ ID NO: 1601407 - RNA, 19 nt, Homo sapiens
  misc_RNA (1)...(19): siRNA sense strand
gagcuuggaggacuacauc

SEQ ID NO: 1601408 - RNA, 19 nt, Homo sapiens
  misc_RNA (1)...(19): siRNA sense strand
agaaggaagccguccagaa

SEQ ID NO: 1601409 - RNA, 19 nt, Homo sapiens
  misc_RNA (1)...(19): siRNA sense strand
uccaggagcugcagaucga

SEQ ID NO: 1601410 - RNA, 19 nt, Homo sapiens
  misc_RNA (1)...(19): siRNA sense strand
ggcagugcgugguggacaa

SEQ ID NO: 1601411 - RNA, 19 nt, Homo sapiens
  misc_RNA (1)...(19): siRNA sense strand
gagaaugugcagguguuga

SEQ ID NO: 1601412 - RNA, 19 nt, Homo sapiens
  misc_RNA (1)...(19): siRNA sense strand
ggcagaugaucgagcagau

SEQ ID NO: 1601413 - RNA, 19 nt, Homo sapiens
  misc_RNA (1)...(19): siRNA sense strand
uugagaaugugcagguguu

SEQ ID NO: 1601414 - RNA, 19 nt, Homo sapiens
  misc_RNA (1)...(19): siRNA sense strand
cacauguacuccugcagau

SEQ ID NO: 1601415 - RNA, 19 nt, Homo sapiens
  misc_RNA (1)...(19): siRNA sense strand
gaugagccggguguccaua

SEQ ID NO: 1601416 - RNA, 19 nt, Homo sapiens
  misc_RNA (1)...(19): siRNA sense strand
ccaaaacccucgucgacau

SEQ ID NO: 1601417 - RNA, 19 nt, Homo sapiens
  misc_RNA (1)...(19): siRNA sense strand
cuacugcaggcucaagaaa

SEQ ID NO: 1601418 - RNA, 19 nt, Homo sapiens
  misc_RNA (1)...(19): siRNA sense strand
aagccaucaucuucuuuga

SEQ ID NO: 1601419 - RNA, 19 nt, Homo sapiens
  misc_RNA (1)...(19): siRNA sense strand
gcagugcgugguggacaaa

SEQ ID NO: 1601420 - RNA, 19 nt, Homo sapiens
  misc_RNA (1)...(19): siRNA sense strand
auguacuccugcagauuua

SEQ ID NO: 1601421 - RNA, 19 nt, Homo sapiens
  misc_RNA (1)...(19): siRNA sense strand
ucgagcagauccaguucau

SEQ ID NO: 1601422 - RNA, 19 nt, Homo sapiens
  misc_RNA (1)...(19): siRNA sense strand
uguugacgaugggcaauga

SEQ ID NO: 1601423 - RNA, 19 nt, Homo sapiens
  misc_RNA (1)...(19): siRNA sense strand
gcggaagaaccacauguac

SEQ ID NO: 1601424 - RNA, 19 nt, Homo sapiens
  misc_RNA (1)...(19): siRNA sense strand
ccaagagauccaugguguu

SEQ ID NO: 1601425 - RNA, 19 nt, Homo sapiens
  misc_RNA (1)...(19): siRNA sense strand
caaguacaucccagcuuuc

SEQ ID NO: 1601426 - RNA, 19 nt, Homo sapiens
  misc_RNA (1)...(19): siRNA sense strand
gggccacgggcaaacacua

SEQ ID NO: 1601427 - RNA, 19 nt, Homo sapiens
  misc_RNA (1)...(19): siRNA sense strand
gcuccuaggcaaugacuac

SEQ ID NO: 1601428 - RNA, 19 nt, Homo sapiens
  misc_RNA (1)...(19): siRNA sense strand
agccugcccuccaucaaug

SEQ ID NO: 1601429 - RNA, 19 nt, Homo sapiens
  misc_RNA (1)...(19): siRNA sense strand
gcuacugcaggcucaagaa

SEQ ID NO: 1601430 - RNA, 19 nt, Homo sapiens
  misc_RNA (1)...(19): siRNA sense strand
gaaggaagccguccagaau

SEQ ID NO: 1601431 - RNA, 19 nt, Homo sapiens
  misc_RNA (1)...(19): siRNA sense strand
ccaaguacaucccagcuuu

SEQ ID NO: 1601432 - RNA, 19 nt, Homo sapiens
  misc_RNA (1)...(19): siRNA sense strand
ggacauggccgacuacagu

SEQ ID NO: 1601433 - RNA, 19 nt, Homo sapiens
  misc_RNA (1)...(19): siRNA sense strand
gcagaucgaugacaaugag

SEQ ID NO: 1601434 - RNA, 19 nt, Homo sapiens
  misc_RNA (1)...(19): siRNA sense strand
gagcagauccaguucauca

SEQ ID NO: 1601435 - RNA, 19 nt, Homo sapiens
  misc_RNA (1)...(19): siRNA sense strand
cgaagaagauugccagcau

SEQ ID NO: 1601436 - RNA, 19 nt, Homo sapiens
  misc_RNA (1)...(19): siRNA sense strand
ucaaagccaucaucuucuu

SEQ ID NO: 1601437 - RNA, 19 nt, Homo sapiens
  misc_RNA (1)...(19): siRNA sense strand
acaccacccuggaauuuga

SEQ ID NO: 1601438 - RNA, 19 nt, Homo sapiens
  misc_RNA (1)...(19): siRNA sense strand
ggaagaaccacauguacuc

SEQ ID NO: 1601439 - RNA, 19 nt, Homo sapiens
  misc_RNA (1)...(19): siRNA sense strand
gauccaugguguucaagga

SEQ ID NO: 1601440 - RNA, 19 nt, Homo sapiens
  misc_RNA (1)...(19): siRNA sense strand
gggcuggcaugaagaagga

SEQ ID NO: 1601441 - RNA, 19 nt, Homo sapiens
  misc_RNA (1)...(19): siRNA sense strand
ggaggagcgugcggaagaa

SEQ ID NO: 1601442 - RNA, 19 nt, Homo sapiens
  misc_RNA (1)...(19): siRNA sense strand
ccucaaagccaucaucuuc

SEQ ID NO: 1601443 - RNA, 19 nt, Homo sapiens
  misc_RNA (1)...(19): siRNA sense strand
cauguacuccugcagauuu

SEQ ID NO: 1601444 - RNA, 19 nt, Homo sapiens
  misc_RNA (1)...(19): siRNA sense strand
aggaagccguccagaauga

SEQ ID NO: 1601445 - RNA, 19 nt, Homo sapiens
  misc_RNA (1)...(19): siRNA sense strand
ucaacgaccgccaguauga

SEQ ID NO: 1601446 - RNA, 19 nt, Homo sapiens
  misc_RNA (1)...(19): siRNA sense strand
caucaacgaccgccaguau

SEQ ID NO: 1601447 - RNA, 19 nt, Homo sapiens
  misc_RNA (1)...(19): siRNA sense strand
caagagauccaugguguuc

SEQ ID NO: 1601448 - RNA, 19 nt, Homo sapiens
  misc_RNA (1)...(19): siRNA sense strand
gaguaugccuaccucaaag

SEQ ID NO: 1601449 - RNA, 19 nt, Homo sapiens
  misc_RNA (1)...(19): siRNA sense strand
cuacaccacccuggaauuu

SEQ ID NO: 1601450 - RNA, 19 nt, Homo sapiens
  misc_RNA (1)...(19): siRNA sense strand
agagauccaugguguucaa

SEQ ID NO: 1601451 - RNA, 19 nt, Homo sapiens
  misc_RNA (1)...(19): siRNA sense strand
gaucgaugacaaugaguau

SEQ ID NO: 1601452 - RNA, 19 nt, Homo sapiens
  misc_RNA (1)...(19): siRNA sense strand
ugacucgcguggccgcuuu

SEQ ID NO: 1601453 - RNA, 19 nt, Homo sapiens
  misc_RNA (1)...(19): siRNA sense strand
gcagauccaguucaucaag

SEQ ID NO: 1601454 - RNA, 19 nt, Homo sapiens
  misc_RNA (1)...(19): siRNA sense strand
acugcaggcucaagaaaug

SEQ ID NO: 1601455 - RNA, 19 nt, Homo sapiens
  misc_RNA (1)...(19): siRNA sense strand
gagcuuggaggacuacauc

SEQ ID NO: 1601456 - RNA, 19 nt, Homo sapiens
  misc_RNA (1)...(19): siRNA sense strand
agaaggaagccguccagaa

SEQ ID NO: 1601457 - RNA, 19 nt, Homo sapiens
  misc_RNA (1)...(19): siRNA sense strand
uccaggagcugcagaucga

SEQ ID NO: 1601458 - RNA, 19 nt, Homo sapiens
  misc_RNA (1)...(19): siRNA sense strand
ggcagugcgugguggacaa

SEQ ID NO: 1601459 - RNA, 19 nt, Homo sapiens
  misc_RNA (1)...(19): siRNA sense strand
gagaaugugcagguguuga

SEQ ID NO: 1601460 - RNA, 19 nt, Homo sapiens
  misc_RNA (1)...(19): siRNA sense strand
ggcagaugaucgagcagau

SEQ ID NO: 1601461 - RNA, 19 nt, Homo sapiens
  misc_RNA (1)...(19): siRNA sense strand
uugagaaugugcagguguu

SEQ ID NO: 1601462 - RNA, 19 nt, Homo sapiens
  misc_RNA (1)...(19): siRNA sense strand
cacauguacuccugcagau

SEQ ID NO: 1601463 - RNA, 19 nt, Homo sapiens
  misc_RNA (1)...(19): siRNA sense strand
gaugagccggguguccaua

SEQ ID NO: 1601464 - RNA, 19 nt, Homo sapiens
  misc_RNA (1)...(19): siRNA sense strand
ccaaaacccucgucgacau

SEQ ID NO: 1601465 - RNA, 19 nt, Homo sapiens
  misc_RNA (1)...(19): siRNA sense strand
cuacugcaggcucaagaaa

SEQ ID NO: 1601466 - RNA, 19 nt, Homo sapiens
  misc_RNA (1)...(19): siRNA sense strand
aagccaucaucuucuuuga

SEQ ID NO: 1601467 - RNA, 19 nt, Homo sapiens
  misc_RNA (1)...(19): siRNA sense strand
gcagugcgugguggacaaa

SEQ ID NO: 1601468 - RNA, 19 nt, Homo sapiens
  misc_RNA (1)...(19): siRNA sense strand
auguacuccugcagauuua

SEQ ID NO: 1601469 - RNA, 19 nt, Homo sapiens
  misc_RNA (1)...(19): siRNA sense strand
ucgagcagauccaguucau

SEQ ID NO: 1601470 - RNA, 19 nt, Homo sapiens
  misc_RNA (1)...(19): siRNA sense strand
uguugacgaugggcaauga

SEQ ID NO: 1601471 - RNA, 19 nt, Homo sapiens
  misc_RNA (1)...(19): siRNA sense strand
gcggaagaaccacauguac

SEQ ID NO: 1601472 - RNA, 19 nt, Homo sapiens
  misc_RNA (1)...(19): siRNA sense strand
ccaagagauccaugguguu

SEQ ID NO: 1601473 - RNA, 19 nt, Homo sapiens
  misc_RNA (1)...(19): siRNA sense strand
caaguacaucccagcuuuc

SEQ ID NO: 1601474 - RNA, 19 nt, Homo sapiens
  misc_RNA (1)...(19): siRNA sense strand
gggccacgggcaaacacua

SEQ ID NO: 1601475 - RNA, 19 nt, Homo sapiens
  misc_RNA (1)...(19): siRNA sense strand
gcuccuaggcaaugacuac

SEQ ID NO: 1601476 - RNA, 19 nt, Homo sapiens
  misc_RNA (1)...(19): siRNA sense strand
agccugcccuccaucaaug

SEQ ID NO: 1601477 - RNA, 19 nt, Homo sapiens
  misc_RNA (1)...(19): siRNA sense strand
gcuacugcaggcucaagaa

SEQ ID NO: 1601478 - RNA, 19 nt, Homo sapiens
  misc_RNA (1)...(19): siRNA sense strand
gaaggaagccguccagaau

SEQ ID NO: 1601479 - RNA, 19 nt, Homo sapiens
  misc_RNA (1)...(19): siRNA sense strand
ccaaguacaucccagcuuu

SEQ ID NO: 1601480 - RNA, 19 nt, Homo sapiens
  misc_RNA (1)...(19): siRNA sense strand
ggacauggccgacuacagu

SEQ ID NO: 1601481 - RNA, 19 nt, Homo sapiens
  misc_RNA (1)...(19): siRNA sense strand
gcagaucgaugacaaugag

SEQ ID NO: 1601482 - RNA, 19 nt, Homo sapiens
  misc_RNA (1)...(19): siRNA sense strand
gagcagauccaguucauca

SEQ ID NO: 1601483 - RNA, 19 nt, Homo sapiens
  misc_RNA (1)...(19): siRNA sense strand
cgaagaagauugccagcau

SEQ ID NO: 1601484 - RNA, 19 nt, Homo sapiens
  misc_RNA (1)...(19): siRNA sense strand
ucaaagccaucaucuucuu

SEQ ID NO: 1601485 - RNA, 19 nt, Homo sapiens
  misc_RNA (1)...(19): siRNA sense strand
acaccacccuggaauuuga

SEQ ID NO: 1601486 - RNA, 19 nt, Homo sapiens
  misc_RNA (1)...(19): siRNA sense strand
ggaagaaccacauguacuc

SEQ ID NO: 1601487 - RNA, 19 nt, Homo sapiens
  misc_RNA (1)...(19): siRNA sense strand
gauccaugguguucaagga

SEQ ID NO: 1601488 - RNA, 19 nt, Homo sapiens
  misc_RNA (1)...(19): siRNA sense strand
gggcuggcaugaagaagga

SEQ ID NO: 1601489 - RNA, 19 nt, Homo sapiens
  misc_RNA (1)...(19): siRNA sense strand
ggaggagcgugcggaagaa

SEQ ID NO: 1601490 - RNA, 19 nt, Homo sapiens
  misc_RNA (1)...(19): siRNA sense strand
ccucaaagccaucaucuuc

SEQ ID NO: 1601491 - RNA, 19 nt, Homo sapiens
  misc_RNA (1)...(19): siRNA sense strand
cauguacuccugcagauuu

SEQ ID NO: 1601492 - RNA, 19 nt, Homo sapiens
  misc_RNA (1)...(19): siRNA sense strand
aggaagccguccagaauga

SEQ ID NO: 1601493 - RNA, 19 nt, Homo sapiens
  misc_RNA (1)...(19): siRNA sense strand
ucaacgaccgccaguauga

SEQ ID NO: 1601494 - RNA, 19 nt, Homo sapiens
  misc_RNA (1)...(19): siRNA sense strand
caucaacgaccgccaguau

SEQ ID NO: 1601495 - RNA, 19 nt, Homo sapiens
  misc_RNA (1)...(19): siRNA sense strand
caagagauccaugguguuc

SEQ ID NO: 1601496 - RNA, 19 nt, Homo sapiens
  misc_RNA (1)...(19): siRNA sense strand
gaguaugccuaccucaaag

SEQ ID NO: 1601497 - RNA, 19 nt, Homo sapiens
  misc_RNA (1)...(19): siRNA sense strand
cuacaccacccuggaauuu

SEQ ID NO: 1601498 - RNA, 19 nt, Homo sapiens
  misc_RNA (1)...(19): siRNA sense strand
agagauccaugguguucaa

SEQ ID NO: 1601499 - RNA, 19 nt, Homo sapiens
  misc_RNA (1)...(19): siRNA sense strand
gaucgaugacaaugaguau

SEQ ID NO: 1601500 - RNA, 19 nt, Homo sapiens
  misc_RNA (1)...(19): siRNA sense strand
ugacucgcguggccgcuuu

SEQ ID NO: 1601501 - RNA, 19 nt, Homo sapiens
  misc_RNA (1)...(19): siRNA sense strand
gcagauccaguucaucaag

SEQ ID NO: 1601502 - RNA, 19 nt, Homo sapiens
  misc_RNA (1)...(19): siRNA sense strand
acugcaggcucaagaaaug

SEQ ID NO: 1601503 - RNA, 19 nt, Homo sapiens
  misc_RNA (1)...(19): siRNA sense strand
gagcuuggaggacuacauc

SEQ ID NO: 1601504 - RNA, 19 nt, Homo sapiens
  misc_RNA (1)...(19): siRNA sense strand
agaaggaagccguccagaa

SEQ ID NO: 1601505 - RNA, 19 nt, Homo sapiens
  misc_RNA (1)...(19): siRNA sense strand
uccaggagcugcagaucga

SEQ ID NO: 1601506 - RNA, 19 nt, Homo sapiens
  misc_RNA (1)...(19): siRNA sense strand
ggcagugcgugguggacaa

SEQ ID NO: 1601507 - RNA, 19 nt, Homo sapiens
  misc_RNA (1)...(19): siRNA sense strand
gagaaugugcagguguuga

SEQ ID NO: 1601508 - RNA, 19 nt, Homo sapiens
  misc_RNA (1)...(19): siRNA sense strand
ggcagaugaucgagcagau

SEQ ID NO: 1601509 - RNA, 19 nt, Homo sapiens
  misc_RNA (1)...(19): siRNA sense strand
uugagaaugugcagguguu

SEQ ID NO: 1601510 - RNA, 19 nt, Homo sapiens
  misc_RNA (1)...(19): siRNA sense strand
cacauguacuccugcagau

SEQ ID NO: 1601511 - RNA, 19 nt, Homo sapiens
  misc_RNA (1)...(19): siRNA sense strand
gaugagccggguguccaua

SEQ ID NO: 1601512 - RNA, 19 nt, Homo sapiens
  misc_RNA (1)...(19): siRNA sense strand
ccaaaacccucgucgacau

SEQ ID NO: 1601513 - RNA, 19 nt, Homo sapiens
  misc_RNA (1)...(19): siRNA sense strand
cuacugcaggcucaagaaa

SEQ ID NO: 1601514 - RNA, 19 nt, Homo sapiens
  misc_RNA (1)...(19): siRNA sense strand
aagccaucaucuucuuuga

SEQ ID NO: 1601515 - RNA, 19 nt, Homo sapiens
  misc_RNA (1)...(19): siRNA sense strand
gcagugcgugguggacaaa

SEQ ID NO: 1601516 - RNA, 19 nt, Homo sapiens
  misc_RNA (1)...(19): siRNA sense strand
auguacuccugcagauuua

SEQ ID NO: 1601517 - RNA, 19 nt, Homo sapiens
  misc_RNA (1)...(19): siRNA sense strand
ucgagcagauccaguucau

SEQ ID NO: 1601518 - RNA, 19 nt, Homo sapiens
  misc_RNA (1)...(19): siRNA sense strand
uguugacgaugggcaauga

SEQ ID NO: 1601519 - RNA, 19 nt, Homo sapiens
  misc_RNA (1)...(19): siRNA sense strand
gcggaagaaccacauguac

SEQ ID NO: 1601520 - RNA, 19 nt, Homo sapiens
  misc_RNA (1)...(19): siRNA sense strand
ccaagagauccaugguguu

SEQ ID NO: 1601521 - RNA, 19 nt, Homo sapiens
  misc_RNA (1)...(19): siRNA sense strand
caaguacaucccagcuuuc

SEQ ID NO: 1601522 - RNA, 19 nt, Homo sapiens
  misc_RNA (1)...(19): siRNA sense strand
gggccacgggcaaacacua

SEQ ID NO: 1601523 - RNA, 19 nt, Homo sapiens
  misc_RNA (1)...(19): siRNA sense strand
gcuccuaggcaaugacuac

SEQ ID NO: 1601524 - RNA, 19 nt, Homo sapiens
  misc_RNA (1)...(19): siRNA sense strand
agccugcccuccaucaaug

SEQ ID NO: 1601525 - RNA, 19 nt, Homo sapiens
  misc_RNA (1)...(19): siRNA sense strand
gcuacugcaggcucaagaa

SEQ ID NO: 1601526 - RNA, 19 nt, Homo sapiens
  misc_RNA (1)...(19): siRNA sense strand
ucgaguugcuuaugaaauu

SEQ ID NO: 1601527 - RNA, 19 nt, Homo sapiens
  misc_RNA (1)...(19): siRNA sense strand
gaaauuaugcaaacacuac

SEQ ID NO: 1601528 - RNA, 19 nt, Homo sapiens
  misc_RNA (1)...(19): siRNA sense strand
cuaaaggugucaacaggaa

SEQ ID NO: 1601529 - RNA, 19 nt, Homo sapiens
  misc_RNA (1)...(19): siRNA sense strand
cacaaucgauacacagaaa

SEQ ID NO: 1601530 - RNA, 19 nt, Homo sapiens
  misc_RNA (1)...(19): siRNA sense strand
cuacaaaguucgagagaag

SEQ ID NO: 1601531 - RNA, 19 nt, Homo sapiens
  misc_RNA (1)...(19): siRNA sense strand
cugcaaacuuccauucuuu

SEQ ID NO: 1601532 - RNA, 19 nt, Homo sapiens
  misc_RNA (1)...(19): siRNA sense strand
cgaguugcuuaugaaauua

SEQ ID NO: 1601533 - RNA, 19 nt, Homo sapiens
  misc_RNA (1)...(19): siRNA sense strand
cagaugaaauucccaugga

SEQ ID NO: 1601534 - RNA, 19 nt, Homo sapiens
  misc_RNA (1)...(19): siRNA sense strand
cauggaaccuggagauauc

SEQ ID NO: 1601535 - RNA, 19 nt, Homo sapiens
  misc_RNA (1)...(19): siRNA sense strand
gaaccuggagauaucauug

SEQ ID NO: 1601536 - RNA, 19 nt, Homo sapiens
  misc_RNA (1)...(19): siRNA sense strand
gggaaggacgggccuauau

SEQ ID NO: 1601537 - RNA, 19 nt, Homo sapiens
  misc_RNA (1)...(19): siRNA sense strand
gauagaaacggucaaguac

SEQ ID NO: 1601538 - RNA, 19 nt, Homo sapiens
  misc_RNA (1)...(19): siRNA sense strand
agauagaaacggucaagua

SEQ ID NO: 1601539 - RNA, 19 nt, Homo sapiens
  misc_RNA (1)...(19): siRNA sense strand
cagaaugcccacaaucaaa

SEQ ID NO: 1601540 - RNA, 19 nt, Homo sapiens
  misc_RNA (1)...(19): siRNA sense strand
ggauggcuauucuaaaggu

SEQ ID NO: 1601541 - RNA, 19 nt, Homo sapiens
  misc_RNA (1)...(19): siRNA sense strand
gcacaaucgauacacagaa

SEQ ID NO: 1601542 - RNA, 19 nt, Homo sapiens
  misc_RNA (1)...(19): siRNA sense strand
ucccaggucugucgaguug

SEQ ID NO: 1601543 - RNA, 19 nt, Homo sapiens
  misc_RNA (1)...(19): siRNA sense strand
gcaaacuuccauucuuuag

SEQ ID NO: 1601544 - RNA, 19 nt, Homo sapiens
  misc_RNA (1)...(19): siRNA sense strand
gaaugcccacaaucaaauu

SEQ ID NO: 1601545 - RNA, 19 nt, Homo sapiens
  misc_RNA (1)...(19): siRNA sense strand
ggaaggacgggccuauauc

SEQ ID NO: 1601546 - RNA, 19 nt, Homo sapiens
  misc_RNA (1)...(19): siRNA sense strand
ugggauggcuauucuaaag

SEQ ID NO: 1601547 - RNA, 19 nt, Homo sapiens
  misc_RNA (1)...(19): siRNA sense strand
cagcuggacugcacaaucg

SEQ ID NO: 1601548 - RNA, 19 nt, Homo sapiens
  misc_RNA (1)...(19): siRNA sense strand
gaagauagaaacggucaag

SEQ ID NO: 1601549 - RNA, 19 nt, Homo sapiens
  misc_RNA (1)...(19): siRNA sense strand
cuauaucccuccuacaaag

SEQ ID NO: 1601550 - RNA, 19 nt, Homo sapiens
  misc_RNA (1)...(19): siRNA sense strand
ggauauacauuuucucucu

SEQ ID NO: 1601551 - RNA, 19 nt, Homo sapiens
  misc_RNA (1)...(19): siRNA sense strand
ccagaaugcccacaaucaa

SEQ ID NO: 1601552 - RNA, 19 nt, Homo sapiens
  misc_RNA (1)...(19): siRNA sense strand
gccagaaugcccacaauca

SEQ ID NO: 1601553 - RNA, 19 nt, Homo sapiens
  misc_RNA (1)...(19): siRNA sense strand
uauuuaggccuguaaguga

SEQ ID NO: 1601554 - RNA, 19 nt, Homo sapiens
  misc_RNA (1)...(19): siRNA sense strand
ggacugcacaaucgauaca

SEQ ID NO: 1601555 - RNA, 19 nt, Homo sapiens
  misc_RNA (1)...(19): siRNA sense strand
gccuauaucccuccuacaa

SEQ ID NO: 1601556 - RNA, 19 nt, Homo sapiens
  misc_RNA (1)...(19): siRNA sense strand
caaacuuccauucuuuaga

SEQ ID NO: 1601557 - RNA, 19 nt, Homo sapiens
  misc_RNA (1)...(19): siRNA sense strand
caggcagacuuccuagugu

SEQ ID NO: 1601558 - RNA, 19 nt, Homo sapiens
  misc_RNA (1)...(19): siRNA sense strand
caaaguucgagagaagaua

SEQ ID NO: 1601559 - RNA, 19 nt, Homo sapiens
  misc_RNA (1)...(19): siRNA sense strand
ugaugccucugcaaacuuc

SEQ ID NO: 1601560 - RNA, 19 nt, Homo sapiens
  misc_RNA (1)...(19): siRNA sense strand
uccugaggcugagaaauaa

SEQ ID NO: 1601561 - RNA, 19 nt, Homo sapiens
  misc_RNA (1)...(19): siRNA sense strand
ucauugguguggcuggaaa

SEQ ID NO: 1601562 - RNA, 19 nt, Homo sapiens
  misc_RNA (1)...(19): siRNA sense strand
ucugcaaacuuccauucuu

SEQ ID NO: 1601563 - RNA, 19 nt, Homo sapiens
  misc_RNA (1)...(19): siRNA sense strand
gcagacuuccuagugugua

SEQ ID NO: 1601564 - RNA, 19 nt, Homo sapiens
  misc_RNA (1)...(19): siRNA sense strand
guauuuaggccuguaagug

SEQ ID NO: 1601565 - RNA, 19 nt, Homo sapiens
  misc_RNA (1)...(19): siRNA sense strand
ccgaacugcagaugaaauu

SEQ ID NO: 1601566 - RNA, 19 nt, Homo sapiens
  misc_RNA (1)...(19): siRNA sense strand
ucugucgaguugcuuauga

SEQ ID NO: 1601567 - RNA, 19 nt, Homo sapiens
  misc_RNA (1)...(19): siRNA sense strand
auccugaggcugagaaaua

SEQ ID NO: 1601568 - RNA, 19 nt, Homo sapiens
  misc_RNA (1)...(19): siRNA sense strand
ucauugggauggcuauucu

SEQ ID NO: 1601569 - RNA, 19 nt, Homo sapiens
  misc_RNA (1)...(19): siRNA sense strand
ccauggaaccuggagauau

SEQ ID NO: 1601570 - RNA, 19 nt, Homo sapiens
  misc_RNA (1)...(19): siRNA sense strand
ggaaccuggagauaucauu

SEQ ID NO: 1601571 - RNA, 19 nt, Homo sapiens
  misc_RNA (1)...(19): siRNA sense strand
uaagugagacaugcacaga

SEQ ID NO: 1601572 - RNA, 19 nt, Homo sapiens
  misc_RNA (1)...(19): siRNA sense strand
gcaaacacuacauccugau

SEQ ID NO: 1601573 - RNA, 19 nt, Homo sapiens
  misc_RNA (1)...(19): siRNA sense strand
ccuacaaaguucgagagaa

SEQ ID NO: 1601574 - RNA, 19 nt, Homo sapiens
  misc_RNA (1)...(19): siRNA sense strand
ccuauaucccuccuacaaa

SEQ ID NO: 1601575 - RNA, 19 nt, Homo sapiens
  misc_RNA (1)...(19): siRNA sense strand
gaaggacgggccuauaucc

SEQ ID NO: 1601576 - RNA, 19 nt, Homo sapiens
  misc_RNA (1)...(19): siRNA sense strand
gaacugcagaugaaauucc

SEQ ID NO: 1601577 - RNA, 19 nt, Homo sapiens
  misc_RNA (1)...(19): siRNA sense strand
ucaggcagacuuccuagug

SEQ ID NO: 1601578 - RNA, 19 nt, Homo sapiens
  misc_RNA (1)...(19): siRNA sense strand
agaaugcccacaaucaaau

SEQ ID NO: 1601579 - RNA, 19 nt, Homo sapiens
  misc_RNA (1)...(19): siRNA sense strand
ugcaaacuuccauucuuua

SEQ ID NO: 1601580 - RNA, 19 nt, Homo sapiens
  misc_RNA (1)...(19): siRNA sense strand
agugagacaugcacagaca

SEQ ID NO: 1601581 - RNA, 19 nt, Homo sapiens
  misc_RNA (1)...(19): siRNA sense strand
uaaaggugucaacaggaaa

SEQ ID NO: 1601582 - RNA, 19 nt, Homo sapiens
  misc_RNA (1)...(19): siRNA sense strand
aacaggaaauugggaagga

SEQ ID NO: 1601583 - RNA, 19 nt, Homo sapiens
  misc_RNA (1)...(19): siRNA sense strand
agugauaacucuauuuccu

SEQ ID NO: 1601584 - RNA, 19 nt, Homo sapiens
  misc_RNA (1)...(19): siRNA sense strand
gacaugcacagacagaucu

SEQ ID NO: 1601585 - RNA, 19 nt, Homo sapiens
  misc_RNA (1)...(19): siRNA sense strand
ugagacaugcacagacaga

SEQ ID NO: 1601586 - RNA, 19 nt, Homo sapiens
  misc_RNA (1)...(19): siRNA sense strand
ucgaguugcuuaugaaauu

SEQ ID NO: 1601587 - RNA, 19 nt, Homo sapiens
  misc_RNA (1)...(19): siRNA sense strand
gaaauuaugcaaacacuac

SEQ ID NO: 1601588 - RNA, 19 nt, Homo sapiens
  misc_RNA (1)...(19): siRNA sense strand
cuaaaggugucaacaggaa

SEQ ID NO: 1601589 - RNA, 19 nt, Homo sapiens
  misc_RNA (1)...(19): siRNA sense strand
cacaaucgauacacagaaa

SEQ ID NO: 1601590 - RNA, 19 nt, Homo sapiens
  misc_RNA (1)...(19): siRNA sense strand
cuacaaaguucgagagaag

SEQ ID NO: 1601591 - RNA, 19 nt, Homo sapiens
  misc_RNA (1)...(19): siRNA sense strand
cugcaaacuuccauucuuu

SEQ ID NO: 1601592 - RNA, 19 nt, Homo sapiens
  misc_RNA (1)...(19): siRNA sense strand
cgaguugcuuaugaaauua

SEQ ID NO: 1601593 - RNA, 19 nt, Homo sapiens
  misc_RNA (1)...(19): siRNA sense strand
cagaugaaauucccaugga

SEQ ID NO: 1601594 - RNA, 19 nt, Homo sapiens
  misc_RNA (1)...(19): siRNA sense strand
cauggaaccuggagauauc

SEQ ID NO: 1601595 - RNA, 19 nt, Homo sapiens
  misc_RNA (1)...(19): siRNA sense strand
gaaccuggagauaucauug

SEQ ID NO: 1601596 - RNA, 19 nt, Homo sapiens
  misc_RNA (1)...(19): siRNA sense strand
gggaaggacgggccuauau

SEQ ID NO: 1601597 - RNA, 19 nt, Homo sapiens
  misc_RNA (1)...(19): siRNA sense strand
gauagaaacggucaaguac

SEQ ID NO: 1601598 - RNA, 19 nt, Homo sapiens
  misc_RNA (1)...(19): siRNA sense strand
agauagaaacggucaagua

SEQ ID NO: 1601599 - RNA, 19 nt, Homo sapiens
  misc_RNA (1)...(19): siRNA sense strand
cagaaugcccacaaucaaa

SEQ ID NO: 1601600 - RNA, 19 nt, Homo sapiens
  misc_RNA (1)...(19): siRNA sense strand
ggauggcuauucuaaaggu

SEQ ID NO: 1601601 - RNA, 19 nt, Homo sapiens
  misc_RNA (1)...(19): siRNA sense strand
gcacaaucgauacacagaa

SEQ ID NO: 1601602 - RNA, 19 nt, Homo sapiens
  misc_RNA (1)...(19): siRNA sense strand
ucccaggucugucgaguug

SEQ ID NO: 1601603 - RNA, 19 nt, Homo sapiens
  misc_RNA (1)...(19): siRNA sense strand
gcaaacuuccauucuuuag

SEQ ID NO: 1601604 - RNA, 19 nt, Homo sapiens
  misc_RNA (1)...(19): siRNA sense strand
gaaugcccacaaucaaauu

SEQ ID NO: 1601605 - RNA, 19 nt, Homo sapiens
  misc_RNA (1)...(19): siRNA sense strand
ggaaggacgggccuauauc

SEQ ID NO: 1601606 - RNA, 19 nt, Homo sapiens
  misc_RNA (1)...(19): siRNA sense strand
ugggauggcuauucuaaag

SEQ ID NO: 1601607 - RNA, 19 nt, Homo sapiens
  misc_RNA (1)...(19): siRNA sense strand
cagcuggacugcacaaucg

SEQ ID NO: 1601608 - RNA, 19 nt, Homo sapiens
  misc_RNA (1)...(19): siRNA sense strand
gaagauagaaacggucaag

SEQ ID NO: 1601609 - RNA, 19 nt, Homo sapiens
  misc_RNA (1)...(19): siRNA sense strand
cuauaucccuccuacaaag

SEQ ID NO: 1601610 - RNA, 19 nt, Homo sapiens
  misc_RNA (1)...(19): siRNA sense strand
ggauauacauuuucucucu

SEQ ID NO: 1601611 - RNA, 19 nt, Homo sapiens
  misc_RNA (1)...(19): siRNA sense strand
ccagaaugcccacaaucaa

SEQ ID NO: 1601612 - RNA, 19 nt, Homo sapiens
  misc_RNA (1)...(19): siRNA sense strand
gccagaaugcccacaauca

SEQ ID NO: 1601613 - RNA, 19 nt, Homo sapiens
  misc_RNA (1)...(19): siRNA sense strand
uauuuaggccuguaaguga

SEQ ID NO: 1601614 - RNA, 19 nt, Homo sapiens
  misc_RNA (1)...(19): siRNA sense strand
ggacugcacaaucgauaca

SEQ ID NO: 1601615 - RNA, 19 nt, Homo sapiens
  misc_RNA (1)...(19): siRNA sense strand
gccuauaucccuccuacaa

SEQ ID NO: 1601616 - RNA, 19 nt, Homo sapiens
  misc_RNA (1)...(19): siRNA sense strand
caaacuuccauucuuuaga

SEQ ID NO: 1601617 - RNA, 19 nt, Homo sapiens
  misc_RNA (1)...(19): siRNA sense strand
caggcagacuuccuagugu

SEQ ID NO: 1601618 - RNA, 19 nt, Homo sapiens
  misc_RNA (1)...(19): siRNA sense strand
caaaguucgagagaagaua

SEQ ID NO: 1601619 - RNA, 19 nt, Homo sapiens
  misc_RNA (1)...(19): siRNA sense strand
ugaugccucugcaaacuuc

SEQ ID NO: 1601620 - RNA, 19 nt, Homo sapiens
  misc_RNA (1)...(19): siRNA sense strand
uccugaggcugagaaauaa

SEQ ID NO: 1601621 - RNA, 19 nt, Homo sapiens
  misc_RNA (1)...(19): siRNA sense strand
ucauugguguggcuggaaa

SEQ ID NO: 1601622 - RNA, 19 nt, Homo sapiens
  misc_RNA (1)...(19): siRNA sense strand
ucugcaaacuuccauucuu

SEQ ID NO: 1601623 - RNA, 19 nt, Homo sapiens
  misc_RNA (1)...(19): siRNA sense strand
gcagacuuccuagugugua

SEQ ID NO: 1601624 - RNA, 19 nt, Homo sapiens
  misc_RNA (1)...(19): siRNA sense strand
guauuuaggccuguaagug

SEQ ID NO: 1601625 - RNA, 19 nt, Homo sapiens
  misc_RNA (1)...(19): siRNA sense strand
ccgaacugcagaugaaauu

SEQ ID NO: 1601626 - RNA, 19 nt, Homo sapiens
  misc_RNA (1)...(19): siRNA sense strand
ucugucgaguugcuuauga

SEQ ID NO: 1601627 - RNA, 19 nt, Homo sapiens
  misc_RNA (1)...(19): siRNA sense strand
auccugaggcugagaaaua

SEQ ID NO: 1601628 - RNA, 19 nt, Homo sapiens
  misc_RNA (1)...(19): siRNA sense strand
ucauugggauggcuauucu

SEQ ID NO: 1601629 - RNA, 19 nt, Homo sapiens
  misc_RNA (1)...(19): siRNA sense strand
ccauggaaccuggagauau

SEQ ID NO: 1601630 - RNA, 19 nt, Homo sapiens
  misc_RNA (1)...(19): siRNA sense strand
ggaaccuggagauaucauu

SEQ ID NO: 1601631 - RNA, 19 nt, Homo sapiens
  misc_RNA (1)...(19): siRNA sense strand
uaagugagacaugcacaga

SEQ ID NO: 1601632 - RNA, 19 nt, Homo sapiens
  misc_RNA (1)...(19): siRNA sense strand
gcaaacacuacauccugau

SEQ ID NO: 1601633 - RNA, 19 nt, Homo sapiens
  misc_RNA (1)...(19): siRNA sense strand
ccuacaaaguucgagagaa

SEQ ID NO: 1601634 - RNA, 19 nt, Homo sapiens
  misc_RNA (1)...(19): siRNA sense strand
ccuauaucccuccuacaaa

SEQ ID NO: 1601635 - RNA, 19 nt, Homo sapiens
  misc_RNA (1)...(19): siRNA sense strand
gaaggacgggccuauaucc

SEQ ID NO: 1601636 - RNA, 19 nt, Homo sapiens
  misc_RNA (1)...(19): siRNA sense strand
gaacugcagaugaaauucc

SEQ ID NO: 1601637 - RNA, 19 nt, Homo sapiens
  misc_RNA (1)...(19): siRNA sense strand
ucaggcagacuuccuagug

SEQ ID NO: 1601638 - RNA, 19 nt, Homo sapiens
  misc_RNA (1)...(19): siRNA sense strand
agaaugcccacaaucaaau

SEQ ID NO: 1601639 - RNA, 19 nt, Homo sapiens
  misc_RNA (1)...(19): siRNA sense strand
ugcaaacuuccauucuuua

SEQ ID NO: 1601640 - RNA, 19 nt, Homo sapiens
  misc_RNA (1)...(19): siRNA sense strand
agugagacaugcacagaca

SEQ ID NO: 1601641 - RNA, 19 nt, Homo sapiens
  misc_RNA (1)...(19): siRNA sense strand
uaaaggugucaacaggaaa

SEQ ID NO: 1601642 - RNA, 19 nt, Homo sapiens
  misc_RNA (1)...(19): siRNA sense strand
aacaggaaauugggaagga

SEQ ID NO: 1601643 - RNA, 19 nt, Homo sapiens
  misc_RNA (1)...(19): siRNA sense strand
agugauaacucuauuuccu

SEQ ID NO: 1601644 - RNA, 19 nt, Homo sapiens
  misc_RNA (1)...(19): siRNA sense strand
gacaugcacagacagaucu

SEQ ID NO: 1601645 - RNA, 19 nt, Homo sapiens
  misc_RNA (1)...(19): siRNA sense strand
ugagacaugcacagacaga

SEQ ID NO: 1601646 - RNA, 19 nt, Homo sapiens
  misc_RNA (1)...(19): siRNA sense strand
ucgaguugcuuaugaaauu

SEQ ID NO: 1601647 - RNA, 19 nt, Homo sapiens
  misc_RNA (1)...(19): siRNA sense strand
gaaauuaugcaaacacuac

SEQ ID NO: 1601648 - RNA, 19 nt, Homo sapiens
  misc_RNA (1)...(19): siRNA sense strand
cuaaaggugucaacaggaa

SEQ ID NO: 1601649 - RNA, 19 nt, Homo sapiens
  misc_RNA (1)...(19): siRNA sense strand
cacaaucgauacacagaaa

SEQ ID NO: 1601650 - RNA, 19 nt, Homo sapiens
  misc_RNA (1)...(19): siRNA sense strand
cuacaaaguucgagagaag

SEQ ID NO: 1601651 - RNA, 19 nt, Homo sapiens
  misc_RNA (1)...(19): siRNA sense strand
cugcaaacuuccauucuuu

SEQ ID NO: 1601652 - RNA, 19 nt, Homo sapiens
  misc_RNA (1)...(19): siRNA sense strand
cgaguugcuuaugaaauua

SEQ ID NO: 1601653 - RNA, 19 nt, Homo sapiens
  misc_RNA (1)...(19): siRNA sense strand
cagaugaaauucccaugga

SEQ ID NO: 1601654 - RNA, 19 nt, Homo sapiens
  misc_RNA (1)...(19): siRNA sense strand
cauggaaccuggagauauc

SEQ ID NO: 1601655 - RNA, 19 nt, Homo sapiens
  misc_RNA (1)...(19): siRNA sense strand
gaaccuggagauaucauug

SEQ ID NO: 1601656 - RNA, 19 nt, Homo sapiens
  misc_RNA (1)...(19): siRNA sense strand
gggaaggacgggccuauau

SEQ ID NO: 1601657 - RNA, 19 nt, Homo sapiens
  misc_RNA (1)...(19): siRNA sense strand
gauagaaacggucaaguac

SEQ ID NO: 1601658 - RNA, 19 nt, Homo sapiens
  misc_RNA (1)...(19): siRNA sense strand
agauagaaacggucaagua

SEQ ID NO: 1601659 - RNA, 19 nt, Homo sapiens
  misc_RNA (1)...(19): siRNA sense strand
cagaaugcccacaaucaaa

SEQ ID NO: 1601660 - RNA, 19 nt, Homo sapiens
  misc_RNA (1)...(19): siRNA sense strand
ggauggcuauucuaaaggu

SEQ ID NO: 1601661 - RNA, 19 nt, Homo sapiens
  misc_RNA (1)...(19): siRNA sense strand
gcacaaucgauacacagaa

SEQ ID NO: 1601662 - RNA, 19 nt, Homo sapiens
  misc_RNA (1)...(19): siRNA sense strand
ucccaggucugucgaguug

SEQ ID NO: 1601663 - RNA, 19 nt, Homo sapiens
  misc_RNA (1)...(19): siRNA sense strand
gcaaacuuccauucuuuag

SEQ ID NO: 1601664 - RNA, 19 nt, Homo sapiens
  misc_RNA (1)...(19): siRNA sense strand
gaaugcccacaaucaaauu

SEQ ID NO: 1601665 - RNA, 19 nt, Homo sapiens
  misc_RNA (1)...(19): siRNA sense strand
ggaaggacgggccuauauc

SEQ ID NO: 1601666 - RNA, 19 nt, Homo sapiens
  misc_RNA (1)...(19): siRNA sense strand
ugggauggcuauucuaaag

SEQ ID NO: 1601667 - RNA, 19 nt, Homo sapiens
  misc_RNA (1)...(19): siRNA sense strand
cagcuggacugcacaaucg

SEQ ID NO: 1601668 - RNA, 19 nt, Homo sapiens
  misc_RNA (1)...(19): siRNA sense strand
gaagauagaaacggucaag

SEQ ID NO: 1601669 - RNA, 19 nt, Homo sapiens
  misc_RNA (1)...(19): siRNA sense strand
cuauaucccuccuacaaag

SEQ ID NO: 1601670 - RNA, 19 nt, Homo sapiens
  misc_RNA (1)...(19): siRNA sense strand
ggauauacauuuucucucu

SEQ ID NO: 1601671 - RNA, 19 nt, Homo sapiens
  misc_RNA (1)...(19): siRNA sense strand
ccagaaugcccacaaucaa

SEQ ID NO: 1601672 - RNA, 19 nt, Homo sapiens
  misc_RNA (1)...(19): siRNA sense strand
gccagaaugcccacaauca

SEQ ID NO: 1601673 - RNA, 19 nt, Homo sapiens
  misc_RNA (1)...(19): siRNA sense strand
uauuuaggccuguaaguga

SEQ ID NO: 1601674 - RNA, 19 nt, Homo sapiens
  misc_RNA (1)...(19): siRNA sense strand
ggacugcacaaucgauaca

SEQ ID NO: 1601675 - RNA, 19 nt, Homo sapiens
  misc_RNA (1)...(19): siRNA sense strand
gccuauaucccuccuacaa

SEQ ID NO: 1601676 - RNA, 19 nt, Homo sapiens
  misc_RNA (1)...(19): siRNA sense strand
caaacuuccauucuuuaga

SEQ ID NO: 1601677 - RNA, 19 nt, Homo sapiens
  misc_RNA (1)...(19): siRNA sense strand
caggcagacuuccuagugu

SEQ ID NO: 1601678 - RNA, 19 nt, Homo sapiens
  misc_RNA (1)...(19): siRNA sense strand
caaaguucgagagaagaua

SEQ ID NO: 1601679 - RNA, 19 nt, Homo sapiens
  misc_RNA (1)...(19): siRNA sense strand
ugaugccucugcaaacuuc

SEQ ID NO: 1601680 - RNA, 19 nt, Homo sapiens
  misc_RNA (1)...(19): siRNA sense strand
uccugaggcugagaaauaa

SEQ ID NO: 1601681 - RNA, 19 nt, Homo sapiens
  misc_RNA (1)...(19): siRNA sense strand
ucauugguguggcuggaaa

SEQ ID NO: 1601682 - RNA, 19 nt, Homo sapiens
  misc_RNA (1)...(19): siRNA sense strand
ucugcaaacuuccauucuu

SEQ ID NO: 1601683 - RNA, 19 nt, Homo sapiens
  misc_RNA (1)...(19): siRNA sense strand
gcagacuuccuagugugua

SEQ ID NO: 1601684 - RNA, 19 nt, Homo sapiens
  misc_RNA (1)...(19): siRNA sense strand
guauuuaggccuguaagug

SEQ ID NO: 1601685 - RNA, 19 nt, Homo sapiens
  misc_RNA (1)...(19): siRNA sense strand
ccgaacugcagaugaaauu

SEQ ID NO: 1601686 - RNA, 19 nt, Homo sapiens
  misc_RNA (1)...(19): siRNA sense strand
ucugucgaguugcuuauga

SEQ ID NO: 1601687 - RNA, 19 nt, Homo sapiens
  misc_RNA (1)...(19): siRNA sense strand
auccugaggcugagaaaua

SEQ ID NO: 1601688 - RNA, 19 nt, Homo sapiens
  misc_RNA (1)...(19): siRNA sense strand
ucauugggauggcuauucu

SEQ ID NO: 1601689 - RNA, 19 nt, Homo sapiens
  misc_RNA (1)...(19): siRNA sense strand
ccauggaaccuggagauau

SEQ ID NO: 1601690 - RNA, 19 nt, Homo sapiens
  misc_RNA (1)...(19): siRNA sense strand
ggaaccuggagauaucauu

SEQ ID NO: 1601691 - RNA, 19 nt, Homo sapiens
  misc_RNA (1)...(19): siRNA sense strand
uaagugagacaugcacaga

SEQ ID NO: 1601692 - RNA, 19 nt, Homo sapiens
  misc_RNA (1)...(19): siRNA sense strand
gcaaacacuacauccugau

SEQ ID NO: 1601693 - RNA, 19 nt, Homo sapiens
  misc_RNA (1)...(19): siRNA sense strand
ccuacaaaguucgagagaa

SEQ ID NO: 1601694 - RNA, 19 nt, Homo sapiens
  misc_RNA (1)...(19): siRNA sense strand
ccuauaucccuccuacaaa

SEQ ID NO: 1601695 - RNA, 19 nt, Homo sapiens
  misc_RNA (1)...(19): siRNA sense strand
gaaggacgggccuauaucc

SEQ ID NO: 1601696 - RNA, 19 nt, Homo sapiens
  misc_RNA (1)...(19): siRNA sense strand
gaacugcagaugaaauucc

SEQ ID NO: 1601697 - RNA, 19 nt, Homo sapiens
  misc_RNA (1)...(19): siRNA sense strand
ucaggcagacuuccuagug

SEQ ID NO: 1601698 - RNA, 19 nt, Homo sapiens
  misc_RNA (1)...(19): siRNA sense strand
agaaugcccacaaucaaau

SEQ ID NO: 1601699 - RNA, 19 nt, Homo sapiens
  misc_RNA (1)...(19): siRNA sense strand
ugcaaacuuccauucuuua

SEQ ID NO: 1601700 - RNA, 19 nt, Homo sapiens
  misc_RNA (1)...(19): siRNA sense strand
agugagacaugcacagaca

SEQ ID NO: 1601701 - RNA, 19 nt, Homo sapiens
  misc_RNA (1)...(19): siRNA sense strand
uaaaggugucaacaggaaa

SEQ ID NO: 1601702 - RNA, 19 nt, Homo sapiens
  misc_RNA (1)...(19): siRNA sense strand
aacaggaaauugggaagga

SEQ ID NO: 1601703 - RNA, 19 nt, Homo sapiens
  misc_RNA (1)...(19): siRNA sense strand
agugauaacucuauuuccu

SEQ ID NO: 1601704 - RNA, 19 nt, Homo sapiens
  misc_RNA (1)...(19): siRNA sense strand
gacaugcacagacagaucu

SEQ ID NO: 1601705 - RNA, 19 nt, Homo sapiens
  misc_RNA (1)...(19): siRNA sense strand
ugagacaugcacagacaga

SEQ ID NO: 1601706 - RNA, 19 nt, Homo sapiens
  misc_RNA (1)...(19): siRNA sense strand
ucgaguugcuuaugaaauu

SEQ ID NO: 1601707 - RNA, 19 nt, Homo sapiens
  misc_RNA (1)...(19): siRNA sense strand
gaaauuaugcaaacacuac

SEQ ID NO: 1601708 - RNA, 19 nt, Homo sapiens
  misc_RNA (1)...(19): siRNA sense strand
cuaaaggugucaacaggaa

SEQ ID NO: 1601709 - RNA, 19 nt, Homo sapiens
  misc_RNA (1)...(19): siRNA sense strand
cacaaucgauacacagaaa

SEQ ID NO: 1601710 - RNA, 19 nt, Homo sapiens
  misc_RNA (1)...(19): siRNA sense strand
cuacaaaguucgagagaag

SEQ ID NO: 1601711 - RNA, 19 nt, Homo sapiens
  misc_RNA (1)...(19): siRNA sense strand
cugcaaacuuccauucuuu

SEQ ID NO: 1601712 - RNA, 19 nt, Homo sapiens
  misc_RNA (1)...(19): siRNA sense strand
cgaguugcuuaugaaauua

SEQ ID NO: 1601713 - RNA, 19 nt, Homo sapiens
  misc_RNA (1)...(19): siRNA sense strand
cagaugaaauucccaugga

SEQ ID NO: 1601714 - RNA, 19 nt, Homo sapiens
  misc_RNA (1)...(19): siRNA sense strand
cauggaaccuggagauauc

SEQ ID NO: 1601715 - RNA, 19 nt, Homo sapiens
  misc_RNA (1)...(19): siRNA sense strand
gaaccuggagauaucauug

SEQ ID NO: 1601716 - RNA, 19 nt, Homo sapiens
  misc_RNA (1)...(19): siRNA sense strand
gggaaggacgggccuauau

SEQ ID NO: 1601717 - RNA, 19 nt, Homo sapiens
  misc_RNA (1)...(19): siRNA sense strand
gauagaaacggucaaguac

SEQ ID NO: 1601718 - RNA, 19 nt, Homo sapiens
  misc_RNA (1)...(19): siRNA sense strand
agauagaaacggucaagua

SEQ ID NO: 1601719 - RNA, 19 nt, Homo sapiens
  misc_RNA (1)...(19): siRNA sense strand
cagaaugcccacaaucaaa

SEQ ID NO: 1601720 - RNA, 19 nt, Homo sapiens
  misc_RNA (1)...(19): siRNA sense strand
ggauggcuauucuaaaggu

SEQ ID NO: 1601721 - RNA, 19 nt, Homo sapiens
  misc_RNA (1)...(19): siRNA sense strand
gcacaaucgauacacagaa

SEQ ID NO: 1601722 - RNA, 19 nt, Homo sapiens
  misc_RNA (1)...(19): siRNA sense strand
ucccaggucugucgaguug

SEQ ID NO: 1601723 - RNA, 19 nt, Homo sapiens
  misc_RNA (1)...(19): siRNA sense strand
gcaaacuuccauucuuuag

SEQ ID NO: 1601724 - RNA, 19 nt, Homo sapiens
  misc_RNA (1)...(19): siRNA sense strand
gaaugcccacaaucaaauu

SEQ ID NO: 1601725 - RNA, 19 nt, Homo sapiens
  misc_RNA (1)...(19): siRNA sense strand
ggaaggacgggccuauauc

SEQ ID NO: 1601726 - RNA, 19 nt, Homo sapiens
  misc_RNA (1)...(19): siRNA sense strand
ugggauggcuauucuaaag

SEQ ID NO: 1601727 - RNA, 19 nt, Homo sapiens
  misc_RNA (1)...(19): siRNA sense strand
cagcuggacugcacaaucg

SEQ ID NO: 1601728 - RNA, 19 nt, Homo sapiens
  misc_RNA (1)...(19): siRNA sense strand
gaagauagaaacggucaag

SEQ ID NO: 1601729 - RNA, 19 nt, Homo sapiens
  misc_RNA (1)...(19): siRNA sense strand
cuauaucccuccuacaaag

SEQ ID NO: 1601730 - RNA, 19 nt, Homo sapiens
  misc_RNA (1)...(19): siRNA sense strand
ggauauacauuuucucucu

SEQ ID NO: 1601731 - RNA, 19 nt, Homo sapiens
  misc_RNA (1)...(19): siRNA sense strand
ccagaaugcccacaaucaa

SEQ ID NO: 1601732 - RNA, 19 nt, Homo sapiens
  misc_RNA (1)...(19): siRNA sense strand
gccagaaugcccacaauca

SEQ ID NO: 1601733 - RNA, 19 nt, Homo sapiens
  misc_RNA (1)...(19): siRNA sense strand
uauuuaggccuguaaguga

SEQ ID NO: 1601734 - RNA, 19 nt, Homo sapiens
  misc_RNA (1)...(19): siRNA sense strand
ggacugcacaaucgauaca

SEQ ID NO: 1601735 - RNA, 19 nt, Homo sapiens
  misc_RNA (1)...(19): siRNA sense strand
gccuauaucccuccuacaa

SEQ ID NO: 1601736 - RNA, 19 nt, Homo sapiens
  misc_RNA (1)...(19): siRNA sense strand
caaacuuccauucuuuaga

SEQ ID NO: 1601737 - RNA, 19 nt, Homo sapiens
  misc_RNA (1)...(19): siRNA sense strand
caggcagacuuccuagugu

SEQ ID NO: 1601738 - RNA, 19 nt, Homo sapiens
  misc_RNA (1)...(19): siRNA sense strand
caaaguucgagagaagaua

SEQ ID NO: 1601739 - RNA, 19 nt, Homo sapiens
  misc_RNA (1)...(19): siRNA sense strand
ugaugccucugcaaacuuc

SEQ ID NO: 1601740 - RNA, 19 nt, Homo sapiens
  misc_RNA (1)...(19): siRNA sense strand
uccugaggcugagaaauaa

SEQ ID NO: 1601741 - RNA, 19 nt, Homo sapiens
  misc_RNA (1)...(19): siRNA sense strand
ucauugguguggcuggaaa

SEQ ID NO: 1601742 - RNA, 19 nt, Homo sapiens
  misc_RNA (1)...(19): siRNA sense strand
ucugcaaacuuccauucuu

SEQ ID NO: 1601743 - RNA, 19 nt, Homo sapiens
  misc_RNA (1)...(19): siRNA sense strand
gcagacuuccuagugugua

SEQ ID NO: 1601744 - RNA, 19 nt, Homo sapiens
  misc_RNA (1)...(19): siRNA sense strand
guauuuaggccuguaagug

SEQ ID NO: 1601745 - RNA, 19 nt, Homo sapiens
  misc_RNA (1)...(19): siRNA sense strand
ccgaacugcagaugaaauu

SEQ ID NO: 1601746 - RNA, 19 nt, Homo sapiens
  misc_RNA (1)...(19): siRNA sense strand
ucugucgaguugcuuauga

SEQ ID NO: 1601747 - RNA, 19 nt, Homo sapiens
  misc_RNA (1)...(19): siRNA sense strand
auccugaggcugagaaaua

SEQ ID NO: 1601748 - RNA, 19 nt, Homo sapiens
  misc_RNA (1)...(19): siRNA sense strand
ucauugggauggcuauucu

SEQ ID NO: 1601749 - RNA, 19 nt, Homo sapiens
  misc_RNA (1)...(19): siRNA sense strand
ccauggaaccuggagauau

SEQ ID NO: 1601750 - RNA, 19 nt, Homo sapiens
  misc_RNA (1)...(19): siRNA sense strand
ggaaccuggagauaucauu

SEQ ID NO: 1601751 - RNA, 19 nt, Homo sapiens
  misc_RNA (1)...(19): siRNA sense strand
uaagugagacaugcacaga

SEQ ID NO: 1601752 - RNA, 19 nt, Homo sapiens
  misc_RNA (1)...(19): siRNA sense strand
gcaaacacuacauccugau

SEQ ID NO: 1601753 - RNA, 19 nt, Homo sapiens
  misc_RNA (1)...(19): siRNA sense strand
ccuacaaaguucgagagaa

SEQ ID NO: 1601754 - RNA, 19 nt, Homo sapiens
  misc_RNA (1)...(19): siRNA sense strand
ccuauaucccuccuacaaa

SEQ ID NO: 1601755 - RNA, 19 nt, Homo sapiens
  misc_RNA (1)...(19): siRNA sense strand
gaaggacgggccuauaucc

SEQ ID NO: 1601756 - RNA, 19 nt, Homo sapiens
  misc_RNA (1)...(19): siRNA sense strand
gaacugcagaugaaauucc

SEQ ID NO: 1601757 - RNA, 19 nt, Homo sapiens
  misc_RNA (1)...(19): siRNA sense strand
ucaggcagacuuccuagug

SEQ ID NO: 1601758 - RNA, 19 nt, Homo sapiens
  misc_RNA (1)...(19): siRNA sense strand
agaaugcccacaaucaaau

SEQ ID NO: 1601759 - RNA, 19 nt, Homo sapiens
  misc_RNA (1)...(19): siRNA sense strand
ugcaaacuuccauucuuua

SEQ ID NO: 1601760 - RNA, 19 nt, Homo sapiens
  misc_RNA (1)...(19): siRNA sense strand
agugagacaugcacagaca

SEQ ID NO: 1601761 - RNA, 19 nt, Homo sapiens
  misc_RNA (1)...(19): siRNA sense strand
uaaaggugucaacaggaaa

SEQ ID NO: 1601762 - RNA, 19 nt, Homo sapiens
  misc_RNA (1)...(19): siRNA sense strand
aacaggaaauugggaagga

SEQ ID NO: 1601763 - RNA, 19 nt, Homo sapiens
  misc_RNA (1)...(19): siRNA sense strand
agugauaacucuauuuccu

SEQ ID NO: 1601764 - RNA, 19 nt, Homo sapiens
  misc_RNA (1)...(19): siRNA sense strand
gacaugcacagacagaucu

SEQ ID NO: 1601765 - RNA, 19 nt, Homo sapiens
  misc_RNA (1)...(19): siRNA sense strand
ugagacaugcacagacaga

SEQ ID NO: 1601766 - RNA, 19 nt, Homo sapiens
  misc_RNA (1)...(19): siRNA sense strand
ucgaguugcuuaugaaauu

SEQ ID NO: 1601767 - RNA, 19 nt, Homo sapiens
  misc_RNA (1)...(19): siRNA sense strand
gaaauuaugcaaacacuac

SEQ ID NO: 1601768 - RNA, 19 nt, Homo sapiens
  misc_RNA (1)...(19): siRNA sense strand
cuaaaggugucaacaggaa

SEQ ID NO: 1601769 - RNA, 19 nt, Homo sapiens
  misc_RNA (1)...(19): siRNA sense strand
cacaaucgauacacagaaa

SEQ ID NO: 1601770 - RNA, 19 nt, Homo sapiens
  misc_RNA (1)...(19): siRNA sense strand
cuacaaaguucgagagaag

SEQ ID NO: 1601771 - RNA, 19 nt, Homo sapiens
  misc_RNA (1)...(19): siRNA sense strand
cugcaaacuuccauucuuu

SEQ ID NO: 1601772 - RNA, 19 nt, Homo sapiens
  misc_RNA (1)...(19): siRNA sense strand
cgaguugcuuaugaaauua

SEQ ID NO: 1601773 - RNA, 19 nt, Homo sapiens
  misc_RNA (1)...(19): siRNA sense strand
cagaugaaauucccaugga

SEQ ID NO: 1601774 - RNA, 19 nt, Homo sapiens
  misc_RNA (1)...(19): siRNA sense strand
cauggaaccuggagauauc

SEQ ID NO: 1601775 - RNA, 19 nt, Homo sapiens
  misc_RNA (1)...(19): siRNA sense strand
gaaccuggagauaucauug

SEQ ID NO: 1601776 - RNA, 19 nt, Homo sapiens
  misc_RNA (1)...(19): siRNA sense strand
gggaaggacgggccuauau

SEQ ID NO: 1601777 - RNA, 19 nt, Homo sapiens
  misc_RNA (1)...(19): siRNA sense strand
gauagaaacggucaaguac

SEQ ID NO: 1601778 - RNA, 19 nt, Homo sapiens
  misc_RNA (1)...(19): siRNA sense strand
agauagaaacggucaagua

SEQ ID NO: 1601779 - RNA, 19 nt, Homo sapiens
  misc_RNA (1)...(19): siRNA sense strand
cagaaugcccacaaucaaa

SEQ ID NO: 1601780 - RNA, 19 nt, Homo sapiens
  misc_RNA (1)...(19): siRNA sense strand
ggauggcuauucuaaaggu

SEQ ID NO: 1601781 - RNA, 19 nt, Homo sapiens
  misc_RNA (1)...(19): siRNA sense strand
gcacaaucgauacacagaa

SEQ ID NO: 1601782 - RNA, 19 nt, Homo sapiens
  misc_RNA (1)...(19): siRNA sense strand
ucccaggucugucgaguug

SEQ ID NO: 1601783 - RNA, 19 nt, Homo sapiens
  misc_RNA (1)...(19): siRNA sense strand
gcaaacuuccauucuuuag

SEQ ID NO: 1601784 - RNA, 19 nt, Homo sapiens
  misc_RNA (1)...(19): siRNA sense strand
gaaugcccacaaucaaauu

SEQ ID NO: 1601785 - RNA, 19 nt, Homo sapiens
  misc_RNA (1)...(19): siRNA sense strand
ggaaggacgggccuauauc

SEQ ID NO: 1601786 - RNA, 19 nt, Homo sapiens
  misc_RNA (1)...(19): siRNA sense strand
ugggauggcuauucuaaag

SEQ ID NO: 1601787 - RNA, 19 nt, Homo sapiens
  misc_RNA (1)...(19): siRNA sense strand
cagcuggacugcacaaucg

SEQ ID NO: 1601788 - RNA, 19 nt, Homo sapiens
  misc_RNA (1)...(19): siRNA sense strand
gaagauagaaacggucaag

SEQ ID NO: 1601789 - RNA, 19 nt, Homo sapiens
  misc_RNA (1)...(19): siRNA sense strand
cuauaucccuccuacaaag

SEQ ID NO: 1601790 - RNA, 19 nt, Homo sapiens
  misc_RNA (1)...(19): siRNA sense strand
ggauauacauuuucucucu

SEQ ID NO: 1601791 - RNA, 19 nt, Homo sapiens
  misc_RNA (1)...(19): siRNA sense strand
ccagaaugcccacaaucaa

SEQ ID NO: 1601792 - RNA, 19 nt, Homo sapiens
  misc_RNA (1)...(19): siRNA sense strand
gccagaaugcccacaauca

SEQ ID NO: 1601793 - RNA, 19 nt, Homo sapiens
  misc_RNA (1)...(19): siRNA sense strand
gccuauaucccuccuacaa

SEQ ID NO: 1601794 - RNA, 19 nt, Homo sapiens
  misc_RNA (1)...(19): siRNA sense strand
ggacugcacaaucgauaca

SEQ ID NO: 1601795 - RNA, 19 nt, Homo sapiens
  misc_RNA (1)...(19): siRNA sense strand
caaacuuccauucuuuaga

SEQ ID NO: 1601796 - RNA, 19 nt, Homo sapiens
  misc_RNA (1)...(19): siRNA sense strand
caggcagacuuccuagugu

SEQ ID NO: 1601797 - RNA, 19 nt, Homo sapiens
  misc_RNA (1)...(19): siRNA sense strand
caaaguucgagagaagaua

SEQ ID NO: 1601798 - RNA, 19 nt, Homo sapiens
  misc_RNA (1)...(19): siRNA sense strand
ugaugccucugcaaacuuc

SEQ ID NO: 1601799 - RNA, 19 nt, Homo sapiens
  misc_RNA (1)...(19): siRNA sense strand
uccugaggcugagaaauaa

SEQ ID NO: 1601800 - RNA, 19 nt, Homo sapiens
  misc_RNA (1)...(19): siRNA sense strand
ucauugguguggcuggaaa

SEQ ID NO: 1601801 - RNA, 19 nt, Homo sapiens
  misc_RNA (1)...(19): siRNA sense strand
ucugcaaacuuccauucuu

SEQ ID NO: 1601802 - RNA, 19 nt, Homo sapiens
  misc_RNA (1)...(19): siRNA sense strand
gcagacuuccuagugugua

SEQ ID NO: 1601803 - RNA, 19 nt, Homo sapiens
  misc_RNA (1)...(19): siRNA sense strand
ccgaacugcagaugaaauu

SEQ ID NO: 1601804 - RNA, 19 nt, Homo sapiens
  misc_RNA (1)...(19): siRNA sense strand
ucugucgaguugcuuauga

SEQ ID NO: 1601805 - RNA, 19 nt, Homo sapiens
  misc_RNA (1)...(19): siRNA sense strand
auccugaggcugagaaaua

SEQ ID NO: 1601806 - RNA, 19 nt, Homo sapiens
  misc_RNA (1)...(19): siRNA sense strand
ucauugggauggcuauucu

SEQ ID NO: 1601807 - RNA, 19 nt, Homo sapiens
  misc_RNA (1)...(19): siRNA sense strand
ccauggaaccuggagauau

SEQ ID NO: 1601808 - RNA, 19 nt, Homo sapiens
  misc_RNA (1)...(19): siRNA sense strand
ggaaccuggagauaucauu

SEQ ID NO: 1601809 - RNA, 19 nt, Homo sapiens
  misc_RNA (1)...(19): siRNA sense strand
gcaaacacuacauccugau

SEQ ID NO: 1601810 - RNA, 19 nt, Homo sapiens
  misc_RNA (1)...(19): siRNA sense strand
ccuacaaaguucgagagaa

SEQ ID NO: 1601811 - RNA, 19 nt, Homo sapiens
  misc_RNA (1)...(19): siRNA sense strand
ccuauaucccuccuacaaa

SEQ ID NO: 1601812 - RNA, 19 nt, Homo sapiens
  misc_RNA (1)...(19): siRNA sense strand
gaaggacgggccuauaucc

SEQ ID NO: 1601813 - RNA, 19 nt, Homo sapiens
  misc_RNA (1)...(19): siRNA sense strand
gaacugcagaugaaauucc

SEQ ID NO: 1601814 - RNA, 19 nt, Homo sapiens
  misc_RNA (1)...(19): siRNA sense strand
agaaugcccacaaucaaau

SEQ ID NO: 1601815 - RNA, 19 nt, Homo sapiens
  misc_RNA (1)...(19): siRNA sense strand
ucaggcagacuuccuagug

SEQ ID NO: 1601816 - RNA, 19 nt, Homo sapiens
  misc_RNA (1)...(19): siRNA sense strand
ugcaaacuuccauucuuua

SEQ ID NO: 1601817 - RNA, 19 nt, Homo sapiens
  misc_RNA (1)...(19): siRNA sense strand
uaaaggugucaacaggaaa

SEQ ID NO: 1601818 - RNA, 19 nt, Homo sapiens
  misc_RNA (1)...(19): siRNA sense strand
aacaggaaauugggaagga

SEQ ID NO: 1601819 - RNA, 19 nt, Homo sapiens
  misc_RNA (1)...(19): siRNA sense strand
agugauaacucuauuuccu

SEQ ID NO: 1601820 - RNA, 19 nt, Homo sapiens
  misc_RNA (1)...(19): siRNA sense strand
ucgaguugcuuaugaaauu

SEQ ID NO: 1601821 - RNA, 19 nt, Homo sapiens
  misc_RNA (1)...(19): siRNA sense strand
gaaauuaugcaaacacuac

SEQ ID NO: 1601822 - RNA, 19 nt, Homo sapiens
  misc_RNA (1)...(19): siRNA sense strand
cuaaaggugucaacaggaa

SEQ ID NO: 1601823 - RNA, 19 nt, Homo sapiens
  misc_RNA (1)...(19): siRNA sense strand
cacaaucgauacacagaaa

SEQ ID NO: 1601824 - RNA, 19 nt, Homo sapiens
  misc_RNA (1)...(19): siRNA sense strand
cuacaaaguucgagagaag

SEQ ID NO: 1601825 - RNA, 19 nt, Homo sapiens
  misc_RNA (1)...(19): siRNA sense strand
cugcaaacuuccauucuuu

SEQ ID NO: 1601826 - RNA, 19 nt, Homo sapiens
  misc_RNA (1)...(19): siRNA sense strand
cgaguugcuuaugaaauua

SEQ ID NO: 1601827 - RNA, 19 nt, Homo sapiens
  misc_RNA (1)...(19): siRNA sense strand
cagaugaaauucccaugga

SEQ ID NO: 1601828 - RNA, 19 nt, Homo sapiens
  misc_RNA (1)...(19): siRNA sense strand
cauggaaccuggagauauc

SEQ ID NO: 1601829 - RNA, 19 nt, Homo sapiens
  misc_RNA (1)...(19): siRNA sense strand
gaaccuggagauaucauug

SEQ ID NO: 1601830 - RNA, 19 nt, Homo sapiens
  misc_RNA (1)...(19): siRNA sense strand
gggaaggacgggccuauau

SEQ ID NO: 1601831 - RNA, 19 nt, Homo sapiens
  misc_RNA (1)...(19): siRNA sense strand
gauagaaacggucaaguac

SEQ ID NO: 1601832 - RNA, 19 nt, Homo sapiens
  misc_RNA (1)...(19): siRNA sense strand
agauagaaacggucaagua

SEQ ID NO: 1601833 - RNA, 19 nt, Homo sapiens
  misc_RNA (1)...(19): siRNA sense strand
cagaaugcccacaaucaaa

SEQ ID NO: 1601834 - RNA, 19 nt, Homo sapiens
  misc_RNA (1)...(19): siRNA sense strand
ggauggcuauucuaaaggu

SEQ ID NO: 1601835 - RNA, 19 nt, Homo sapiens
  misc_RNA (1)...(19): siRNA sense strand
gcacaaucgauacacagaa

SEQ ID NO: 1601836 - RNA, 19 nt, Homo sapiens
  misc_RNA (1)...(19): siRNA sense strand
ucccaggucugucgaguug

SEQ ID NO: 1601837 - RNA, 19 nt, Homo sapiens
  misc_RNA (1)...(19): siRNA sense strand
gcaaacuuccauucuuuag

SEQ ID NO: 1601838 - RNA, 19 nt, Homo sapiens
  misc_RNA (1)...(19): siRNA sense strand
gaaugcccacaaucaaauu

SEQ ID NO: 1601839 - RNA, 19 nt, Homo sapiens
  misc_RNA (1)...(19): siRNA sense strand
ggaaggacgggccuauauc

SEQ ID NO: 1601840 - RNA, 19 nt, Homo sapiens
  misc_RNA (1)...(19): siRNA sense strand
ugggauggcuauucuaaag

SEQ ID NO: 1601841 - RNA, 19 nt, Homo sapiens
  misc_RNA (1)...(19): siRNA sense strand
cagcuggacugcacaaucg

SEQ ID NO: 1601842 - RNA, 19 nt, Homo sapiens
  misc_RNA (1)...(19): siRNA sense strand
gaagauagaaacggucaag

SEQ ID NO: 1601843 - RNA, 19 nt, Homo sapiens
  misc_RNA (1)...(19): siRNA sense strand
cuauaucccuccuacaaag

SEQ ID NO: 1601844 - RNA, 19 nt, Homo sapiens
  misc_RNA (1)...(19): siRNA sense strand
ggauauacauuuucucucu

SEQ ID NO: 1601845 - RNA, 19 nt, Homo sapiens
  misc_RNA (1)...(19): siRNA sense strand
ccagaaugcccacaaucaa

SEQ ID NO: 1601846 - RNA, 19 nt, Homo sapiens
  misc_RNA (1)...(19): siRNA sense strand
gccagaaugcccacaauca

SEQ ID NO: 1601847 - RNA, 19 nt, Homo sapiens
  misc_RNA (1)...(19): siRNA sense strand
uauuuaggccuguaaguga

SEQ ID NO: 1601848 - RNA, 19 nt, Homo sapiens
  misc_RNA (1)...(19): siRNA sense strand
ggacugcacaaucgauaca

SEQ ID NO: 1601849 - RNA, 19 nt, Homo sapiens
  misc_RNA (1)...(19): siRNA sense strand
gccuauaucccuccuacaa

SEQ ID NO: 1601850 - RNA, 19 nt, Homo sapiens
  misc_RNA (1)...(19): siRNA sense strand
caaacuuccauucuuuaga

SEQ ID NO: 1601851 - RNA, 19 nt, Homo sapiens
  misc_RNA (1)...(19): siRNA sense strand
caggcagacuuccuagugu

SEQ ID NO: 1601852 - RNA, 19 nt, Homo sapiens
  misc_RNA (1)...(19): siRNA sense strand
caaaguucgagagaagaua

SEQ ID NO: 1601853 - RNA, 19 nt, Homo sapiens
  misc_RNA (1)...(19): siRNA sense strand
ugaugccucugcaaacuuc

SEQ ID NO: 1601854 - RNA, 19 nt, Homo sapiens
  misc_RNA (1)...(19): siRNA sense strand
uccugaggcugagaaauaa

SEQ ID NO: 1601855 - RNA, 19 nt, Homo sapiens
  misc_RNA (1)...(19): siRNA sense strand
ucauugguguggcuggaaa

SEQ ID NO: 1601856 - RNA, 19 nt, Homo sapiens
  misc_RNA (1)...(19): siRNA sense strand
ucugcaaacuuccauucuu

SEQ ID NO: 1601857 - RNA, 19 nt, Homo sapiens
  misc_RNA (1)...(19): siRNA sense strand
gcagacuuccuagugugua

SEQ ID NO: 1601858 - RNA, 19 nt, Homo sapiens
  misc_RNA (1)...(19): siRNA sense strand
guauuuaggccuguaagug

SEQ ID NO: 1601859 - RNA, 19 nt, Homo sapiens
  misc_RNA (1)...(19): siRNA sense strand
ccgaacugcagaugaaauu

SEQ ID NO: 1601860 - RNA, 19 nt, Homo sapiens
  misc_RNA (1)...(19): siRNA sense strand
ucugucgaguugcuuauga

SEQ ID NO: 1601861 - RNA, 19 nt, Homo sapiens
  misc_RNA (1)...(19): siRNA sense strand
auccugaggcugagaaaua

SEQ ID NO: 1601862 - RNA, 19 nt, Homo sapiens
  misc_RNA (1)...(19): siRNA sense strand
ucauugggauggcuauucu

SEQ ID NO: 1601863 - RNA, 19 nt, Homo sapiens
  misc_RNA (1)...(19): siRNA sense strand
ccauggaaccuggagauau

SEQ ID NO: 1601864 - RNA, 19 nt, Homo sapiens
  misc_RNA (1)...(19): siRNA sense strand
ggaaccuggagauaucauu

SEQ ID NO: 1601865 - RNA, 19 nt, Homo sapiens
  misc_RNA (1)...(19): siRNA sense strand
uaagugagacaugcacaga

SEQ ID NO: 1601866 - RNA, 19 nt, Homo sapiens
  misc_RNA (1)...(19): siRNA sense strand
gcaaacacuacauccugau

SEQ ID NO: 1601867 - RNA, 19 nt, Homo sapiens
  misc_RNA (1)...(19): siRNA sense strand
ccuacaaaguucgagagaa

SEQ ID NO: 1601868 - RNA, 19 nt, Homo sapiens
  misc_RNA (1)...(19): siRNA sense strand
ccuauaucccuccuacaaa

SEQ ID NO: 1601869 - RNA, 19 nt, Homo sapiens
  misc_RNA (1)...(19): siRNA sense strand
gaaggacgggccuauaucc

SEQ ID NO: 1601870 - RNA, 19 nt, Homo sapiens
  misc_RNA (1)...(19): siRNA sense strand
gaacugcagaugaaauucc

SEQ ID NO: 1601871 - RNA, 19 nt, Homo sapiens
  misc_RNA (1)...(19): siRNA sense strand
ucaggcagacuuccuagug

SEQ ID NO: 1601872 - RNA, 19 nt, Homo sapiens
  misc_RNA (1)...(19): siRNA sense strand
agaaugcccacaaucaaau

SEQ ID NO: 1601873 - RNA, 19 nt, Homo sapiens
  misc_RNA (1)...(19): siRNA sense strand
ugcaaacuuccauucuuua

SEQ ID NO: 1601874 - RNA, 19 nt, Homo sapiens
  misc_RNA (1)...(19): siRNA sense strand
agugagacaugcacagaca

SEQ ID NO: 1601875 - RNA, 19 nt, Homo sapiens
  misc_RNA (1)...(19): siRNA sense strand
uaaaggugucaacaggaaa

SEQ ID NO: 1601876 - RNA, 19 nt, Homo sapiens
  misc_RNA (1)...(19): siRNA sense strand
aacaggaaauugggaagga

SEQ ID NO: 1601877 - RNA, 19 nt, Homo sapiens
  misc_RNA (1)...(19): siRNA sense strand
agugauaacucuauuuccu

SEQ ID NO: 1601878 - RNA, 19 nt, Homo sapiens
  misc_RNA (1)...(19): siRNA sense strand
gacaugcacagacagaucu

SEQ ID NO: 1601879 - RNA, 19 nt, Homo sapiens
  misc_RNA (1)...(19): siRNA sense strand
ugagacaugcacagacaga

SEQ ID NO: 1601880 - RNA, 19 nt, Homo sapiens
  misc_RNA (1)...(19): siRNA sense strand
ucgaguugcuuaugaaauu

SEQ ID NO: 1601881 - RNA, 19 nt, Homo sapiens
  misc_RNA (1)...(19): siRNA sense strand
gaaauuaugcaaacacuac

SEQ ID NO: 1601882 - RNA, 19 nt, Homo sapiens
  misc_RNA (1)...(19): siRNA sense strand
cuaaaggugucaacaggaa

SEQ ID NO: 1601883 - RNA, 19 nt, Homo sapiens
  misc_RNA (1)...(19): siRNA sense strand
cacaaucgauacacagaaa

SEQ ID NO: 1601884 - RNA, 19 nt, Homo sapiens
  misc_RNA (1)...(19): siRNA sense strand
cuacaaaguucgagagaag

SEQ ID NO: 1601885 - RNA, 19 nt, Homo sapiens
  misc_RNA (1)...(19): siRNA sense strand
cugcaaacuuccauucuuu

SEQ ID NO: 1601886 - RNA, 19 nt, Homo sapiens
  misc_RNA (1)...(19): siRNA sense strand
cgaguugcuuaugaaauua

SEQ ID NO: 1601887 - RNA, 19 nt, Homo sapiens
  misc_RNA (1)...(19): siRNA sense strand
cagaugaaauucccaugga

SEQ ID NO: 1601888 - RNA, 19 nt, Homo sapiens
  misc_RNA (1)...(19): siRNA sense strand
cauggaaccuggagauauc

SEQ ID NO: 1601889 - RNA, 19 nt, Homo sapiens
  misc_RNA (1)...(19): siRNA sense strand
gaaccuggagauaucauug

SEQ ID NO: 1601890 - RNA, 19 nt, Homo sapiens
  misc_RNA (1)...(19): siRNA sense strand
gggaaggacgggccuauau

SEQ ID NO: 1601891 - RNA, 19 nt, Homo sapiens
  misc_RNA (1)...(19): siRNA sense strand
gauagaaacggucaaguac

SEQ ID NO: 1601892 - RNA, 19 nt, Homo sapiens
  misc_RNA (1)...(19): siRNA sense strand
agauagaaacggucaagua

SEQ ID NO: 1601893 - RNA, 19 nt, Homo sapiens
  misc_RNA (1)...(19): siRNA sense strand
cagaaugcccacaaucaaa

SEQ ID NO: 1601894 - RNA, 19 nt, Homo sapiens
  misc_RNA (1)...(19): siRNA sense strand
ggauggcuauucuaaaggu

SEQ ID NO: 1601895 - RNA, 19 nt, Homo sapiens
  misc_RNA (1)...(19): siRNA sense strand
gcacaaucgauacacagaa

SEQ ID NO: 1601896 - RNA, 19 nt, Homo sapiens
  misc_RNA (1)...(19): siRNA sense strand
ucccaggucugucgaguug

SEQ ID NO: 1601897 - RNA, 19 nt, Homo sapiens
  misc_RNA (1)...(19): siRNA sense strand
gcaaacuuccauucuuuag

SEQ ID NO: 1601898 - RNA, 19 nt, Homo sapiens
  misc_RNA (1)...(19): siRNA sense strand
gaaugcccacaaucaaauu

SEQ ID NO: 1601899 - RNA, 19 nt, Homo sapiens
  misc_RNA (1)...(19): siRNA sense strand
ggaaggacgggccuauauc

SEQ ID NO: 1601900 - RNA, 19 nt, Homo sapiens
  misc_RNA (1)...(19): siRNA sense strand
ugggauggcuauucuaaag

SEQ ID NO: 1601901 - RNA, 19 nt, Homo sapiens
  misc_RNA (1)...(19): siRNA sense strand
cagcuggacugcacaaucg

SEQ ID NO: 1601902 - RNA, 19 nt, Homo sapiens
  misc_RNA (1)...(19): siRNA sense strand
gaagauagaaacggucaag

SEQ ID NO: 1601903 - RNA, 19 nt, Homo sapiens
  misc_RNA (1)...(19): siRNA sense strand
cuauaucccuccuacaaag

SEQ ID NO: 1601904 - RNA, 19 nt, Homo sapiens
  misc_RNA (1)...(19): siRNA sense strand
ggauauacauuuucucucu

SEQ ID NO: 1601905 - RNA, 19 nt, Homo sapiens
  misc_RNA (1)...(19): siRNA sense strand
ccagaaugcccacaaucaa

SEQ ID NO: 1601906 - RNA, 19 nt, Homo sapiens
  misc_RNA (1)...(19): siRNA sense strand
gccagaaugcccacaauca

SEQ ID NO: 1601907 - RNA, 19 nt, Homo sapiens
  misc_RNA (1)...(19): siRNA sense strand
uauuuaggccuguaaguga

SEQ ID NO: 1601908 - RNA, 19 nt, Homo sapiens
  misc_RNA (1)...(19): siRNA sense strand
ggacugcacaaucgauaca

SEQ ID NO: 1601909 - RNA, 19 nt, Homo sapiens
  misc_RNA (1)...(19): siRNA sense strand
gccuauaucccuccuacaa

SEQ ID NO: 1601910 - RNA, 19 nt, Homo sapiens
  misc_RNA (1)...(19): siRNA sense strand
caaacuuccauucuuuaga

SEQ ID NO: 1601911 - RNA, 19 nt, Homo sapiens
  misc_RNA (1)...(19): siRNA sense strand
caggcagacuuccuagugu

SEQ ID NO: 1601912 - RNA, 19 nt, Homo sapiens
  misc_RNA (1)...(19): siRNA sense strand
caaaguucgagagaagaua

SEQ ID NO: 1601913 - RNA, 19 nt, Homo sapiens
  misc_RNA (1)...(19): siRNA sense strand
ugaugccucugcaaacuuc

SEQ ID NO: 1601914 - RNA, 19 nt, Homo sapiens
  misc_RNA (1)...(19): siRNA sense strand
uccugaggcugagaaauaa

SEQ ID NO: 1601915 - RNA, 19 nt, Homo sapiens
  misc_RNA (1)...(19): siRNA sense strand
ucauugguguggcuggaaa

SEQ ID NO: 1601916 - RNA, 19 nt, Homo sapiens
  misc_RNA (1)...(19): siRNA sense strand
ucugcaaacuuccauucuu

SEQ ID NO: 1601917 - RNA, 19 nt, Homo sapiens
  misc_RNA (1)...(19): siRNA sense strand
gcagacuuccuagugugua

SEQ ID NO: 1601918 - RNA, 19 nt, Homo sapiens
  misc_RNA (1)...(19): siRNA sense strand
guauuuaggccuguaagug

SEQ ID NO: 1601919 - RNA, 19 nt, Homo sapiens
  misc_RNA (1)...(19): siRNA sense strand
ccgaacugcagaugaaauu

SEQ ID NO: 1601920 - RNA, 19 nt, Homo sapiens
  misc_RNA (1)...(19): siRNA sense strand
ucugucgaguugcuuauga

SEQ ID NO: 1601921 - RNA, 19 nt, Homo sapiens
  misc_RNA (1)...(19): siRNA sense strand
auccugaggcugagaaaua

SEQ ID NO: 1601922 - RNA, 19 nt, Homo sapiens
  misc_RNA (1)...(19): siRNA sense strand
ucauugggauggcuauucu

SEQ ID NO: 1601923 - RNA, 19 nt, Homo sapiens
  misc_RNA (1)...(19): siRNA sense strand
ccauggaaccuggagauau

SEQ ID NO: 1601924 - RNA, 19 nt, Homo sapiens
  misc_RNA (1)...(19): siRNA sense strand
ggaaccuggagauaucauu

SEQ ID NO: 1601925 - RNA, 19 nt, Homo sapiens
  misc_RNA (1)...(19): siRNA sense strand
uaagugagacaugcacaga

SEQ ID NO: 1601926 - RNA, 19 nt, Homo sapiens
  misc_RNA (1)...(19): siRNA sense strand
gcaaacacuacauccugau

SEQ ID NO: 1601927 - RNA, 19 nt, Homo sapiens
  misc_RNA (1)...(19): siRNA sense strand
ccuacaaaguucgagagaa

SEQ ID NO: 1601928 - RNA, 19 nt, Homo sapiens
  misc_RNA (1)...(19): siRNA sense strand
ccuauaucccuccuacaaa

SEQ ID NO: 1601929 - RNA, 19 nt, Homo sapiens
  misc_RNA (1)...(19): siRNA sense strand
gaaggacgggccuauaucc

SEQ ID NO: 1601930 - RNA, 19 nt, Homo sapiens
  misc_RNA (1)...(19): siRNA sense strand
gaacugcagaugaaauucc

SEQ ID NO: 1601931 - RNA, 19 nt, Homo sapiens
  misc_RNA (1)...(19): siRNA sense strand
ucaggcagacuuccuagug

SEQ ID NO: 1601932 - RNA, 19 nt, Homo sapiens
  misc_RNA (1)...(19): siRNA sense strand
agaaugcccacaaucaaau

SEQ ID NO: 1601933 - RNA, 19 nt, Homo sapiens
  misc_RNA (1)...(19): siRNA sense strand
ugcaaacuuccauucuuua

SEQ ID NO: 1601934 - RNA, 19 nt, Homo sapiens
  misc_RNA (1)...(19): siRNA sense strand
agugagacaugcacagaca

SEQ ID NO: 1601935 - RNA, 19 nt, Homo sapiens
  misc_RNA (1)...(19): siRNA sense strand
uaaaggugucaacaggaaa

SEQ ID NO: 1601936 - RNA, 19 nt, Homo sapiens
  misc_RNA (1)...(19): siRNA sense strand
aacaggaaauugggaagga

SEQ ID NO: 1601937 - RNA, 19 nt, Homo sapiens
  misc_RNA (1)...(19): siRNA sense strand
agugauaacucuauuuccu

SEQ ID NO: 1601938 - RNA, 19 nt, Homo sapiens
  misc_RNA (1)...(19): siRNA sense strand
gacaugcacagacagaucu

SEQ ID NO: 1601939 - RNA, 19 nt, Homo sapiens
  misc_RNA (1)...(19): siRNA sense strand
ugagacaugcacagacaga

SEQ ID NO: 1601940 - RNA, 19 nt, Homo sapiens
  misc_RNA (1)...(19): siRNA sense strand
ucgaguugcuuaugaaauu

SEQ ID NO: 1601941 - RNA, 19 nt, Homo sapiens
  misc_RNA (1)...(19): siRNA sense strand
gaaauuaugcaaacacuac

SEQ ID NO: 1601942 - RNA, 19 nt, Homo sapiens
  misc_RNA (1)...(19): siRNA sense strand
cuaaaggugucaacaggaa

SEQ ID NO: 1601943 - RNA, 19 nt, Homo sapiens
  misc_RNA (1)...(19): siRNA sense strand
cacaaucgauacacagaaa

SEQ ID NO: 1601944 - RNA, 19 nt, Homo sapiens
  misc_RNA (1)...(19): siRNA sense strand
cuacaaaguucgagagaag

SEQ ID NO: 1601945 - RNA, 19 nt, Homo sapiens
  misc_RNA (1)...(19): siRNA sense strand
cugcaaacuuccauucuuu

SEQ ID NO: 1601946 - RNA, 19 nt, Homo sapiens
  misc_RNA (1)...(19): siRNA sense strand
cgaguugcuuaugaaauua

SEQ ID NO: 1601947 - RNA, 19 nt, Homo sapiens
  misc_RNA (1)...(19): siRNA sense strand
cagaugaaauucccaugga

SEQ ID NO: 1601948 - RNA, 19 nt, Homo sapiens
  misc_RNA (1)...(19): siRNA sense strand
cauggaaccuggagauauc

SEQ ID NO: 1601949 - RNA, 19 nt, Homo sapiens
  misc_RNA (1)...(19): siRNA sense strand
gaaccuggagauaucauug

SEQ ID NO: 1601950 - RNA, 19 nt, Homo sapiens
  misc_RNA (1)...(19): siRNA sense strand
gggaaggacgggccuauau

SEQ ID NO: 1601951 - RNA, 19 nt, Homo sapiens
  misc_RNA (1)...(19): siRNA sense strand
gauagaaacggucaaguac

SEQ ID NO: 1601952 - RNA, 19 nt, Homo sapiens
  misc_RNA (1)...(19): siRNA sense strand
agauagaaacggucaagua

SEQ ID NO: 1601953 - RNA, 19 nt, Homo sapiens
  misc_RNA (1)...(19): siRNA sense strand
cagaaugcccacaaucaaa

SEQ ID NO: 1601954 - RNA, 19 nt, Homo sapiens
  misc_RNA (1)...(19): siRNA sense strand
ggauggcuauucuaaaggu

SEQ ID NO: 1601955 - RNA, 19 nt, Homo sapiens
  misc_RNA (1)...(19): siRNA sense strand
gcacaaucgauacacagaa

SEQ ID NO: 1601956 - RNA, 19 nt, Homo sapiens
  misc_RNA (1)...(19): siRNA sense strand
ucccaggucugucgaguug

SEQ ID NO: 1601957 - RNA, 19 nt, Homo sapiens
  misc_RNA (1)...(19): siRNA sense strand
gcaaacuuccauucuuuag

SEQ ID NO: 1601958 - RNA, 19 nt, Homo sapiens
  misc_RNA (1)...(19): siRNA sense strand
gaaugcccacaaucaaauu

SEQ ID NO: 1601959 - RNA, 19 nt, Homo sapiens
  misc_RNA (1)...(19): siRNA sense strand
ggaaggacgggccuauauc

SEQ ID NO: 1601960 - RNA, 19 nt, Homo sapiens
  misc_RNA (1)...(19): siRNA sense strand
ugggauggcuauucuaaag

SEQ ID NO: 1601961 - RNA, 19 nt, Homo sapiens
  misc_RNA (1)...(19): siRNA sense strand
cagcuggacugcacaaucg

SEQ ID NO: 1601962 - RNA, 19 nt, Homo sapiens
  misc_RNA (1)...(19): siRNA sense strand
gaagauagaaacggucaag

SEQ ID NO: 1601963 - RNA, 19 nt, Homo sapiens
  misc_RNA (1)...(19): siRNA sense strand
cuauaucccuccuacaaag

SEQ ID NO: 1601964 - RNA, 19 nt, Homo sapiens
  misc_RNA (1)...(19): siRNA sense strand
ggauauacauuuucucucu

SEQ ID NO: 1601965 - RNA, 19 nt, Homo sapiens
  misc_RNA (1)...(19): siRNA sense strand
ccagaaugcccacaaucaa

SEQ ID NO: 1601966 - RNA, 19 nt, Homo sapiens
  misc_RNA (1)...(19): siRNA sense strand
gccagaaugcccacaauca

SEQ ID NO: 1601967 - RNA, 19 nt, Homo sapiens
  misc_RNA (1)...(19): siRNA sense strand
uauuuaggccuguaaguga

SEQ ID NO: 1601968 - RNA, 19 nt, Homo sapiens
  misc_RNA (1)...(19): siRNA sense strand
ggacugcacaaucgauaca

SEQ ID NO: 1601969 - RNA, 19 nt, Homo sapiens
  misc_RNA (1)...(19): siRNA sense strand
gccuauaucccuccuacaa

SEQ ID NO: 1601970 - RNA, 19 nt, Homo sapiens
  misc_RNA (1)...(19): siRNA sense strand
caaacuuccauucuuuaga

SEQ ID NO: 1601971 - RNA, 19 nt, Homo sapiens
  misc_RNA (1)...(19): siRNA sense strand
caggcagacuuccuagugu

SEQ ID NO: 1601972 - RNA, 19 nt, Homo sapiens
  misc_RNA (1)...(19): siRNA sense strand
caaaguucgagagaagaua

SEQ ID NO: 1601973 - RNA, 19 nt, Homo sapiens
  misc_RNA (1)...(19): siRNA sense strand
ugaugccucugcaaacuuc

SEQ ID NO: 1601974 - RNA, 19 nt, Homo sapiens
  misc_RNA (1)...(19): siRNA sense strand
uccugaggcugagaaauaa

SEQ ID NO: 1601975 - RNA, 19 nt, Homo sapiens
  misc_RNA (1)...(19): siRNA sense strand
ucauugguguggcuggaaa

SEQ ID NO: 1601976 - RNA, 19 nt, Homo sapiens
  misc_RNA (1)...(19): siRNA sense strand
ucugcaaacuuccauucuu

SEQ ID NO: 1601977 - RNA, 19 nt, Homo sapiens
  misc_RNA (1)...(19): siRNA sense strand
gcagacuuccuagugugua

SEQ ID NO: 1601978 - RNA, 19 nt, Homo sapiens
  misc_RNA (1)...(19): siRNA sense strand
guauuuaggccuguaagug

SEQ ID NO: 1601979 - RNA, 19 nt, Homo sapiens
  misc_RNA (1)...(19): siRNA sense strand
ccgaacugcagaugaaauu

SEQ ID NO: 1601980 - RNA, 19 nt, Homo sapiens
  misc_RNA (1)...(19): siRNA sense strand
ucugucgaguugcuuauga

SEQ ID NO: 1601981 - RNA, 19 nt, Homo sapiens
  misc_RNA (1)...(19): siRNA sense strand
auccugaggcugagaaaua

SEQ ID NO: 1601982 - RNA, 19 nt, Homo sapiens
  misc_RNA (1)...(19): siRNA sense strand
ucauugggauggcuauucu

SEQ ID NO: 1601983 - RNA, 19 nt, Homo sapiens
  misc_RNA (1)...(19): siRNA sense strand
ccauggaaccuggagauau

SEQ ID NO: 1601984 - RNA, 19 nt, Homo sapiens
  misc_RNA (1)...(19): siRNA sense strand
ggaaccuggagauaucauu

SEQ ID NO: 1601985 - RNA, 19 nt, Homo sapiens
  misc_RNA (1)...(19): siRNA sense strand
uaagugagacaugcacaga

SEQ ID NO: 1601986 - RNA, 19 nt, Homo sapiens
  misc_RNA (1)...(19): siRNA sense strand
gcaaacacuacauccugau

SEQ ID NO: 1601987 - RNA, 19 nt, Homo sapiens
  misc_RNA (1)...(19): siRNA sense strand
ccuacaaaguucgagagaa

SEQ ID NO: 1601988 - RNA, 19 nt, Homo sapiens
  misc_RNA (1)...(19): siRNA sense strand
ccuauaucccuccuacaaa

SEQ ID NO: 1601989 - RNA, 19 nt, Homo sapiens
  misc_RNA (1)...(19): siRNA sense strand
gaaggacgggccuauaucc

SEQ ID NO: 1601990 - RNA, 19 nt, Homo sapiens
  misc_RNA (1)...(19): siRNA sense strand
gaacugcagaugaaauucc

SEQ ID NO: 1601991 - RNA, 19 nt, Homo sapiens
  misc_RNA (1)...(19): siRNA sense strand
ucaggcagacuuccuagug

SEQ ID NO: 1601992 - RNA, 19 nt, Homo sapiens
  misc_RNA (1)...(19): siRNA sense strand
agaaugcccacaaucaaau

SEQ ID NO: 1601993 - RNA, 19 nt, Homo sapiens
  misc_RNA (1)...(19): siRNA sense strand
ugcaaacuuccauucuuua

SEQ ID NO: 1601994 - RNA, 19 nt, Homo sapiens
  misc_RNA (1)...(19): siRNA sense strand
agugagacaugcacagaca

SEQ ID NO: 1601995 - RNA, 19 nt, Homo sapiens
  misc_RNA (1)...(19): siRNA sense strand
uaaaggugucaacaggaaa

SEQ ID NO: 1601996 - RNA, 19 nt, Homo sapiens
  misc_RNA (1)...(19): siRNA sense strand
aacaggaaauugggaagga

SEQ ID NO: 1601997 - RNA, 19 nt, Homo sapiens
  misc_RNA (1)...(19): siRNA sense strand
agugauaacucuauuuccu

SEQ ID NO: 1601998 - RNA, 19 nt, Homo sapiens
  misc_RNA (1)...(19): siRNA sense strand
gacaugcacagacagaucu

SEQ ID NO: 1601999 - RNA, 19 nt, Homo sapiens
  misc_RNA (1)...(19): siRNA sense strand
ugagacaugcacagacaga

SEQ ID NO: 1602000 - RNA, 19 nt, Homo sapiens
  misc_RNA (1)...(19): siRNA sense strand
ucgaguugcuuaugaaauu

SEQ ID NO: 1602001 - RNA, 19 nt, Homo sapiens
  misc_RNA (1)...(19): siRNA sense strand
gaaauuaugcaaacacuac

SEQ ID NO: 1602002 - RNA, 19 nt, Homo sapiens
  misc_RNA (1)...(19): siRNA sense strand
cuaaaggugucaacaggaa

SEQ ID NO: 1602003 - RNA, 19 nt, Homo sapiens
  misc_RNA (1)...(19): siRNA sense strand
cacaaucgauacacagaaa

SEQ ID NO: 1602004 - RNA, 19 nt, Homo sapiens
  misc_RNA (1)...(19): siRNA sense strand
cuacaaaguucgagagaag

SEQ ID NO: 1602005 - RNA, 19 nt, Homo sapiens
  misc_RNA (1)...(19): siRNA sense strand
cugcaaacuuccauucuuu

SEQ ID NO: 1602006 - RNA, 19 nt, Homo sapiens
  misc_RNA (1)...(19): siRNA sense strand
cgaguugcuuaugaaauua

SEQ ID NO: 1602007 - RNA, 19 nt, Homo sapiens
  misc_RNA (1)...(19): siRNA sense strand
cagaugaaauucccaugga

SEQ ID NO: 1602008 - RNA, 19 nt, Homo sapiens
  misc_RNA (1)...(19): siRNA sense strand
cauggaaccuggagauauc

SEQ ID NO: 1602009 - RNA, 19 nt, Homo sapiens
  misc_RNA (1)...(19): siRNA sense strand
gaaccuggagauaucauug

SEQ ID NO: 1602010 - RNA, 19 nt, Homo sapiens
  misc_RNA (1)...(19): siRNA sense strand
gggaaggacgggccuauau

SEQ ID NO: 1602011 - RNA, 19 nt, Homo sapiens
  misc_RNA (1)...(19): siRNA sense strand
gauagaaacggucaaguac

SEQ ID NO: 1602012 - RNA, 19 nt, Homo sapiens
  misc_RNA (1)...(19): siRNA sense strand
agauagaaacggucaagua

SEQ ID NO: 1602013 - RNA, 19 nt, Homo sapiens
  misc_RNA (1)...(19): siRNA sense strand
cagaaugcccacaaucaaa

SEQ ID NO: 1602014 - RNA, 19 nt, Homo sapiens
  misc_RNA (1)...(19): siRNA sense strand
ggauggcuauucuaaaggu

SEQ ID NO: 1602015 - RNA, 19 nt, Homo sapiens
  misc_RNA (1)...(19): siRNA sense strand
gcacaaucgauacacagaa

SEQ ID NO: 1602016 - RNA, 19 nt, Homo sapiens
  misc_RNA (1)...(19): siRNA sense strand
ucccaggucugucgaguug

SEQ ID NO: 1602017 - RNA, 19 nt, Homo sapiens
  misc_RNA (1)...(19): siRNA sense strand
gcaaacuuccauucuuuag

SEQ ID NO: 1602018 - RNA, 19 nt, Homo sapiens
  misc_RNA (1)...(19): siRNA sense strand
gaaugcccacaaucaaauu

SEQ ID NO: 1602019 - RNA, 19 nt, Homo sapiens
  misc_RNA (1)...(19): siRNA sense strand
ggaaggacgggccuauauc

SEQ ID NO: 1602020 - RNA, 19 nt, Homo sapiens
  misc_RNA (1)...(19): siRNA sense strand
ugggauggcuauucuaaag

SEQ ID NO: 1602021 - RNA, 19 nt, Homo sapiens
  misc_RNA (1)...(19): siRNA sense strand
cagcuggacugcacaaucg

SEQ ID NO: 1602022 - RNA, 19 nt, Homo sapiens
  misc_RNA (1)...(19): siRNA sense strand
gaagauagaaacggucaag

SEQ ID NO: 1602023 - RNA, 19 nt, Homo sapiens
  misc_RNA (1)...(19): siRNA sense strand
cuauaucccuccuacaaag

SEQ ID NO: 1602024 - RNA, 19 nt, Homo sapiens
  misc_RNA (1)...(19): siRNA sense strand
ggauauacauuuucucucu

SEQ ID NO: 1602025 - RNA, 19 nt, Homo sapiens
  misc_RNA (1)...(19): siRNA sense strand
ccagaaugcccacaaucaa

SEQ ID NO: 1602026 - RNA, 19 nt, Homo sapiens
  misc_RNA (1)...(19): siRNA sense strand
gccagaaugcccacaauca

SEQ ID NO: 1602027 - RNA, 19 nt, Homo sapiens
  misc_RNA (1)...(19): siRNA sense strand
uauuuaggccuguaaguga

SEQ ID NO: 1602028 - RNA, 19 nt, Homo sapiens
  misc_RNA (1)...(19): siRNA sense strand
ggacugcacaaucgauaca

SEQ ID NO: 1602029 - RNA, 19 nt, Homo sapiens
  misc_RNA (1)...(19): siRNA sense strand
gccuauaucccuccuacaa

SEQ ID NO: 1602030 - RNA, 19 nt, Homo sapiens
  misc_RNA (1)...(19): siRNA sense strand
caaacuuccauucuuuaga

SEQ ID NO: 1602031 - RNA, 19 nt, Homo sapiens
  misc_RNA (1)...(19): siRNA sense strand
caggcagacuuccuagugu

SEQ ID NO: 1602032 - RNA, 19 nt, Homo sapiens
  misc_RNA (1)...(19): siRNA sense strand
caaaguucgagagaagaua

SEQ ID NO: 1602033 - RNA, 19 nt, Homo sapiens
  misc_RNA (1)...(19): siRNA sense strand
ugaugccucugcaaacuuc

SEQ ID NO: 1602034 - RNA, 19 nt, Homo sapiens
  misc_RNA (1)...(19): siRNA sense strand
uccugaggcugagaaauaa

SEQ ID NO: 1602035 - RNA, 19 nt, Homo sapiens
  misc_RNA (1)...(19): siRNA sense strand
ucauugguguggcuggaaa

SEQ ID NO: 1602036 - RNA, 19 nt, Homo sapiens
  misc_RNA (1)...(19): siRNA sense strand
ucugcaaacuuccauucuu

SEQ ID NO: 1602037 - RNA, 19 nt, Homo sapiens
  misc_RNA (1)...(19): siRNA sense strand
gcagacuuccuagugugua

SEQ ID NO: 1602038 - RNA, 19 nt, Homo sapiens
  misc_RNA (1)...(19): siRNA sense strand
guauuuaggccuguaagug

SEQ ID NO: 1602039 - RNA, 19 nt, Homo sapiens
  misc_RNA (1)...(19): siRNA sense strand
ccgaacugcagaugaaauu

SEQ ID NO: 1602040 - RNA, 19 nt, Homo sapiens
  misc_RNA (1)...(19): siRNA sense strand
ucugucgaguugcuuauga

SEQ ID NO: 1602041 - RNA, 19 nt, Homo sapiens
  misc_RNA (1)...(19): siRNA sense strand
auccugaggcugagaaaua

SEQ ID NO: 1602042 - RNA, 19 nt, Homo sapiens
  misc_RNA (1)...(19): siRNA sense strand
ucauugggauggcuauucu

SEQ ID NO: 1602043 - RNA, 19 nt, Homo sapiens
  misc_RNA (1)...(19): siRNA sense strand
ccauggaaccuggagauau

SEQ ID NO: 1602044 - RNA, 19 nt, Homo sapiens
  misc_RNA (1)...(19): siRNA sense strand
ggaaccuggagauaucauu

SEQ ID NO: 1602045 - RNA, 19 nt, Homo sapiens
  misc_RNA (1)...(19): siRNA sense strand
uaagugagacaugcacaga

SEQ ID NO: 1602046 - RNA, 19 nt, Homo sapiens
  misc_RNA (1)...(19): siRNA sense strand
gcaaacacuacauccugau

SEQ ID NO: 1602047 - RNA, 19 nt, Homo sapiens
  misc_RNA (1)...(19): siRNA sense strand
ccuacaaaguucgagagaa

SEQ ID NO: 1602048 - RNA, 19 nt, Homo sapiens
  misc_RNA (1)...(19): siRNA sense strand
ccuauaucccuccuacaaa

SEQ ID NO: 1602049 - RNA, 19 nt, Homo sapiens
  misc_RNA (1)...(19): siRNA sense strand
gaaggacgggccuauaucc

SEQ ID NO: 1602050 - RNA, 19 nt, Homo sapiens
  misc_RNA (1)...(19): siRNA sense strand
gaacugcagaugaaauucc

SEQ ID NO: 1602051 - RNA, 19 nt, Homo sapiens
  misc_RNA (1)...(19): siRNA sense strand
ucaggcagacuuccuagug

SEQ ID NO: 1602052 - RNA, 19 nt, Homo sapiens
  misc_RNA (1)...(19): siRNA sense strand
agaaugcccacaaucaaau

SEQ ID NO: 1602053 - RNA, 19 nt, Homo sapiens
  misc_RNA (1)...(19): siRNA sense strand
ugcaaacuuccauucuuua

SEQ ID NO: 1602054 - RNA, 19 nt, Homo sapiens
  misc_RNA (1)...(19): siRNA sense strand
agugagacaugcacagaca

SEQ ID NO: 1602055 - RNA, 19 nt, Homo sapiens
  misc_RNA (1)...(19): siRNA sense strand
uaaaggugucaacaggaaa

SEQ ID NO: 1602056 - RNA, 19 nt, Homo sapiens
  misc_RNA (1)...(19): siRNA sense strand
aacaggaaauugggaagga

SEQ ID NO: 1602057 - RNA, 19 nt, Homo sapiens
  misc_RNA (1)...(19): siRNA sense strand
agugauaacucuauuuccu

SEQ ID NO: 1602058 - RNA, 19 nt, Homo sapiens
  misc_RNA (1)...(19): siRNA sense strand
gacaugcacagacagaucu

SEQ ID NO: 1602059 - RNA, 19 nt, Homo sapiens
  misc_RNA (1)...(19): siRNA sense strand
ugagacaugcacagacaga

SEQ ID NO: 1602060 - RNA, 19 nt, Homo sapiens
  misc_RNA (1)...(19): siRNA sense strand
ucgaguugcuuaugaaauu

SEQ ID NO: 1602061 - RNA, 19 nt, Homo sapiens
  misc_RNA (1)...(19): siRNA sense strand
gaaauuaugcaaacacuac

SEQ ID NO: 1602062 - RNA, 19 nt, Homo sapiens
  misc_RNA (1)...(19): siRNA sense strand
cuaaaggugucaacaggaa

SEQ ID NO: 1602063 - RNA, 19 nt, Homo sapiens
  misc_RNA (1)...(19): siRNA sense strand
cacaaucgauacacagaaa

SEQ ID NO: 1602064 - RNA, 19 nt, Homo sapiens
  misc_RNA (1)...(19): siRNA sense strand
cuacaaaguucgagagaag

SEQ ID NO: 1602065 - RNA, 19 nt, Homo sapiens
  misc_RNA (1)...(19): siRNA sense strand
cugcaaacuuccauucuuu

SEQ ID NO: 1602066 - RNA, 19 nt, Homo sapiens
  misc_RNA (1)...(19): siRNA sense strand
cgaguugcuuaugaaauua

SEQ ID NO: 1602067 - RNA, 19 nt, Homo sapiens
  misc_RNA (1)...(19): siRNA sense strand
cagaugaaauucccaugga

SEQ ID NO: 1602068 - RNA, 19 nt, Homo sapiens
  misc_RNA (1)...(19): siRNA sense strand
cauggaaccuggagauauc

SEQ ID NO: 1602069 - RNA, 19 nt, Homo sapiens
  misc_RNA (1)...(19): siRNA sense strand
gaaccuggagauaucauug

SEQ ID NO: 1602070 - RNA, 19 nt, Homo sapiens
  misc_RNA (1)...(19): siRNA sense strand
gggaaggacgggccuauau

SEQ ID NO: 1602071 - RNA, 19 nt, Homo sapiens
  misc_RNA (1)...(19): siRNA sense strand
gauagaaacggucaaguac

SEQ ID NO: 1602072 - RNA, 19 nt, Homo sapiens
  misc_RNA (1)...(19): siRNA sense strand
agauagaaacggucaagua

SEQ ID NO: 1602073 - RNA, 19 nt, Homo sapiens
  misc_RNA (1)...(19): siRNA sense strand
cagaaugcccacaaucaaa

SEQ ID NO: 1602074 - RNA, 19 nt, Homo sapiens
  misc_RNA (1)...(19): siRNA sense strand
ggauggcuauucuaaaggu

SEQ ID NO: 1602075 - RNA, 19 nt, Homo sapiens
  misc_RNA (1)...(19): siRNA sense strand
gcacaaucgauacacagaa

SEQ ID NO: 1602076 - RNA, 19 nt, Homo sapiens
  misc_RNA (1)...(19): siRNA sense strand
ucccaggucugucgaguug

SEQ ID NO: 1602077 - RNA, 19 nt, Homo sapiens
  misc_RNA (1)...(19): siRNA sense strand
gcaaacuuccauucuuuag

SEQ ID NO: 1602078 - RNA, 19 nt, Homo sapiens
  misc_RNA (1)...(19): siRNA sense strand
gaaugcccacaaucaaauu

SEQ ID NO: 1602079 - RNA, 19 nt, Homo sapiens
  misc_RNA (1)...(19): siRNA sense strand
ggaaggacgggccuauauc

SEQ ID NO: 1602080 - RNA, 19 nt, Homo sapiens
  misc_RNA (1)...(19): siRNA sense strand
ugggauggcuauucuaaag

SEQ ID NO: 1602081 - RNA, 19 nt, Homo sapiens
  misc_RNA (1)...(19): siRNA sense strand
cagcuggacugcacaaucg

SEQ ID NO: 1602082 - RNA, 19 nt, Homo sapiens
  misc_RNA (1)...(19): siRNA sense strand
gaagauagaaacggucaag

SEQ ID NO: 1602083 - RNA, 19 nt, Homo sapiens
  misc_RNA (1)...(19): siRNA sense strand
cuauaucccuccuacaaag

SEQ ID NO: 1602084 - RNA, 19 nt, Homo sapiens
  misc_RNA (1)...(19): siRNA sense strand
ggauauacauuuucucucu

SEQ ID NO: 1602085 - RNA, 19 nt, Homo sapiens
  misc_RNA (1)...(19): siRNA sense strand
ccagaaugcccacaaucaa

SEQ ID NO: 1602086 - RNA, 19 nt, Homo sapiens
  misc_RNA (1)...(19): siRNA sense strand
gccagaaugcccacaauca

SEQ ID NO: 1602087 - RNA, 19 nt, Homo sapiens
  misc_RNA (1)...(19): siRNA sense strand
gccuauaucccuccuacaa

SEQ ID NO: 1602088 - RNA, 19 nt, Homo sapiens
  misc_RNA (1)...(19): siRNA sense strand
ggacugcacaaucgauaca

SEQ ID NO: 1602089 - RNA, 19 nt, Homo sapiens
  misc_RNA (1)...(19): siRNA sense strand
caaacuuccauucuuuaga

SEQ ID NO: 1602090 - RNA, 19 nt, Homo sapiens
  misc_RNA (1)...(19): siRNA sense strand
caggcagacuuccuagugu

SEQ ID NO: 1602091 - RNA, 19 nt, Homo sapiens
  misc_RNA (1)...(19): siRNA sense strand
caaaguucgagagaagaua

SEQ ID NO: 1602092 - RNA, 19 nt, Homo sapiens
  misc_RNA (1)...(19): siRNA sense strand
ugaugccucugcaaacuuc

SEQ ID NO: 1602093 - RNA, 19 nt, Homo sapiens
  misc_RNA (1)...(19): siRNA sense strand
uccugaggcugagaaauaa

SEQ ID NO: 1602094 - RNA, 19 nt, Homo sapiens
  misc_RNA (1)...(19): siRNA sense strand
ucauugguguggcuggaaa

SEQ ID NO: 1602095 - RNA, 19 nt, Homo sapiens
  misc_RNA (1)...(19): siRNA sense strand
ucugcaaacuuccauucuu

SEQ ID NO: 1602096 - RNA, 19 nt, Homo sapiens
  misc_RNA (1)...(19): siRNA sense strand
gcagacuuccuagugugua

SEQ ID NO: 1602097 - RNA, 19 nt, Homo sapiens
  misc_RNA (1)...(19): siRNA sense strand
ccgaacugcagaugaaauu

SEQ ID NO: 1602098 - RNA, 19 nt, Homo sapiens
  misc_RNA (1)...(19): siRNA sense strand
ucugucgaguugcuuauga

SEQ ID NO: 1602099 - RNA, 19 nt, Homo sapiens
  misc_RNA (1)...(19): siRNA sense strand
auccugaggcugagaaaua

SEQ ID NO: 1602100 - RNA, 19 nt, Homo sapiens
  misc_RNA (1)...(19): siRNA sense strand
ucauugggauggcuauucu

SEQ ID NO: 1602101 - RNA, 19 nt, Homo sapiens
  misc_RNA (1)...(19): siRNA sense strand
ccauggaaccuggagauau

SEQ ID NO: 1602102 - RNA, 19 nt, Homo sapiens
  misc_RNA (1)...(19): siRNA sense strand
ggaaccuggagauaucauu

SEQ ID NO: 1602103 - RNA, 19 nt, Homo sapiens
  misc_RNA (1)...(19): siRNA sense strand
gcaaacacuacauccugau

SEQ ID NO: 1602104 - RNA, 19 nt, Homo sapiens
  misc_RNA (1)...(19): siRNA sense strand
ccuacaaaguucgagagaa

SEQ ID NO: 1602105 - RNA, 19 nt, Homo sapiens
  misc_RNA (1)...(19): siRNA sense strand
ccuauaucccuccuacaaa

SEQ ID NO: 1602106 - RNA, 19 nt, Homo sapiens
  misc_RNA (1)...(19): siRNA sense strand
gaaggacgggccuauaucc

SEQ ID NO: 1602107 - RNA, 19 nt, Homo sapiens
  misc_RNA (1)...(19): siRNA sense strand
gaacugcagaugaaauucc

SEQ ID NO: 1602108 - RNA, 19 nt, Homo sapiens
  misc_RNA (1)...(19): siRNA sense strand
agaaugcccacaaucaaau

SEQ ID NO: 1602109 - RNA, 19 nt, Homo sapiens
  misc_RNA (1)...(19): siRNA sense strand
ucaggcagacuuccuagug

SEQ ID NO: 1602110 - RNA, 19 nt, Homo sapiens
  misc_RNA (1)...(19): siRNA sense strand
ugcaaacuuccauucuuua

SEQ ID NO: 1602111 - RNA, 19 nt, Homo sapiens
  misc_RNA (1)...(19): siRNA sense strand
uaaaggugucaacaggaaa

SEQ ID NO: 1602112 - RNA, 19 nt, Homo sapiens
  misc_RNA (1)...(19): siRNA sense strand
aacaggaaauugggaagga

SEQ ID NO: 1602113 - RNA, 19 nt, Homo sapiens
  misc_RNA (1)...(19): siRNA sense strand
agugauaacucuauuuccu

SEQ ID NO: 1602114 - RNA, 19 nt, Homo sapiens
  misc_RNA (1)...(19): siRNA sense strand
gaaggaagccguccagaau

SEQ ID NO: 1602115 - RNA, 19 nt, Homo sapiens
  misc_RNA (1)...(19): siRNA sense strand
ccaaguacaucccagcuuu

SEQ ID NO: 1602116 - RNA, 19 nt, Homo sapiens
  misc_RNA (1)...(19): siRNA sense strand
ggacauggccgacuacagu

SEQ ID NO: 1602117 - RNA, 19 nt, Homo sapiens
  misc_RNA (1)...(19): siRNA sense strand
gcagaucgaugacaaugag

SEQ ID NO: 1602118 - RNA, 19 nt, Homo sapiens
  misc_RNA (1)...(19): siRNA sense strand
gagcagauccaguucauca

SEQ ID NO: 1602119 - RNA, 19 nt, Homo sapiens
  misc_RNA (1)...(19): siRNA sense strand
cgaagaagauugccagcau

SEQ ID NO: 1602120 - RNA, 19 nt, Homo sapiens
  misc_RNA (1)...(19): siRNA sense strand
ucaaagccaucaucuucuu

SEQ ID NO: 1602121 - RNA, 19 nt, Homo sapiens
  misc_RNA (1)...(19): siRNA sense strand
acaccacccuggaauuuga

SEQ ID NO: 1602122 - RNA, 19 nt, Homo sapiens
  misc_RNA (1)...(19): siRNA sense strand
ggaagaaccacauguacuc

SEQ ID NO: 1602123 - RNA, 19 nt, Homo sapiens
  misc_RNA (1)...(19): siRNA sense strand
gauccaugguguucaagga

SEQ ID NO: 1602124 - RNA, 19 nt, Homo sapiens
  misc_RNA (1)...(19): siRNA sense strand
gggcuggcaugaagaagga

SEQ ID NO: 1602125 - RNA, 19 nt, Homo sapiens
  misc_RNA (1)...(19): siRNA sense strand
ggaggagcgugcggaagaa

SEQ ID NO: 1602126 - RNA, 19 nt, Homo sapiens
  misc_RNA (1)...(19): siRNA sense strand
ccucaaagccaucaucuuc

SEQ ID NO: 1602127 - RNA, 19 nt, Homo sapiens
  misc_RNA (1)...(19): siRNA sense strand
cauguacuccugcagauuu

SEQ ID NO: 1602128 - RNA, 19 nt, Homo sapiens
  misc_RNA (1)...(19): siRNA sense strand
aggaagccguccagaauga

SEQ ID NO: 1602129 - RNA, 19 nt, Homo sapiens
  misc_RNA (1)...(19): siRNA sense strand
ucaacgaccgccaguauga

SEQ ID NO: 1602130 - RNA, 19 nt, Homo sapiens
  misc_RNA (1)...(19): siRNA sense strand
caucaacgaccgccaguau

SEQ ID NO: 1602131 - RNA, 19 nt, Homo sapiens
  misc_RNA (1)...(19): siRNA sense strand
caagagauccaugguguuc

SEQ ID NO: 1602132 - RNA, 19 nt, Homo sapiens
  misc_RNA (1)...(19): siRNA sense strand
gaguaugccuaccucaaag

SEQ ID NO: 1602133 - RNA, 19 nt, Homo sapiens
  misc_RNA (1)...(19): siRNA sense strand
cuacaccacccuggaauuu

SEQ ID NO: 1602134 - RNA, 19 nt, Homo sapiens
  misc_RNA (1)...(19): siRNA sense strand
agagauccaugguguucaa

SEQ ID NO: 1602135 - RNA, 19 nt, Homo sapiens
  misc_RNA (1)...(19): siRNA sense strand
gaucgaugacaaugaguau

SEQ ID NO: 1602136 - RNA, 19 nt, Homo sapiens
  misc_RNA (1)...(19): siRNA sense strand
ugacucgcguggccgcuuu

SEQ ID NO: 1602137 - RNA, 19 nt, Homo sapiens
  misc_RNA (1)...(19): siRNA sense strand
gcagauccaguucaucaag

SEQ ID NO: 1602138 - RNA, 19 nt, Homo sapiens
  misc_RNA (1)...(19): siRNA sense strand
acugcaggcucaagaaaug

SEQ ID NO: 1602139 - RNA, 19 nt, Homo sapiens
  misc_RNA (1)...(19): siRNA sense strand
gagcuuggaggacuacauc

SEQ ID NO: 1602140 - RNA, 19 nt, Homo sapiens
  misc_RNA (1)...(19): siRNA sense strand
agaaggaagccguccagaa

SEQ ID NO: 1602141 - RNA, 19 nt, Homo sapiens
  misc_RNA (1)...(19): siRNA sense strand
uccaggagcugcagaucga

SEQ ID NO: 1602142 - RNA, 19 nt, Homo sapiens
  misc_RNA (1)...(19): siRNA sense strand
ggcagugcgugguggacaa

SEQ ID NO: 1602143 - RNA, 19 nt, Homo sapiens
  misc_RNA (1)...(19): siRNA sense strand
gagaaugugcagguguuga

SEQ ID NO: 1602144 - RNA, 19 nt, Homo sapiens
  misc_RNA (1)...(19): siRNA sense strand
ggcagaugaucgagcagau

SEQ ID NO: 1602145 - RNA, 19 nt, Homo sapiens
  misc_RNA (1)...(19): siRNA sense strand
uugagaaugugcagguguu

SEQ ID NO: 1602146 - RNA, 19 nt, Homo sapiens
  misc_RNA (1)...(19): siRNA sense strand
cacauguacuccugcagau

SEQ ID NO: 1602147 - RNA, 19 nt, Homo sapiens
  misc_RNA (1)...(19): siRNA sense strand
gaugagccggguguccaua

SEQ ID NO: 1602148 - RNA, 19 nt, Homo sapiens
  misc_RNA (1)...(19): siRNA sense strand
ccaaaacccucgucgacau

SEQ ID NO: 1602149 - RNA, 19 nt, Homo sapiens
  misc_RNA (1)...(19): siRNA sense strand
cuacugcaggcucaagaaa

SEQ ID NO: 1602150 - RNA, 19 nt, Homo sapiens
  misc_RNA (1)...(19): siRNA sense strand
aagccaucaucuucuuuga

SEQ ID NO: 1602151 - RNA, 19 nt, Homo sapiens
  misc_RNA (1)...(19): siRNA sense strand
gcagugcgugguggacaaa

SEQ ID NO: 1602152 - RNA, 19 nt, Homo sapiens
  misc_RNA (1)...(19): siRNA sense strand
auguacuccugcagauuua

SEQ ID NO: 1602153 - RNA, 19 nt, Homo sapiens
  misc_RNA (1)...(19): siRNA sense strand
ucgagcagauccaguucau

SEQ ID NO: 1602154 - RNA, 19 nt, Homo sapiens
  misc_RNA (1)...(19): siRNA sense strand
uguugacgaugggcaauga

SEQ ID NO: 1602155 - RNA, 19 nt, Homo sapiens
  misc_RNA (1)...(19): siRNA sense strand
gcggaagaaccacauguac

SEQ ID NO: 1602156 - RNA, 19 nt, Homo sapiens
  misc_RNA (1)...(19): siRNA sense strand
ccaagagauccaugguguu

SEQ ID NO: 1602157 - RNA, 19 nt, Homo sapiens
  misc_RNA (1)...(19): siRNA sense strand
caaguacaucccagcuuuc

SEQ ID NO: 1602158 - RNA, 19 nt, Homo sapiens
  misc_RNA (1)...(19): siRNA sense strand
gggccacgggcaaacacua

SEQ ID NO: 1602159 - RNA, 19 nt, Homo sapiens
  misc_RNA (1)...(19): siRNA sense strand
gcuccuaggcaaugacuac

SEQ ID NO: 1602160 - RNA, 19 nt, Homo sapiens
  misc_RNA (1)...(19): siRNA sense strand
agccugcccuccaucaaug

SEQ ID NO: 1602161 - RNA, 19 nt, Homo sapiens
  misc_RNA (1)...(19): siRNA sense strand
gcuacugcaggcucaagaa

SEQ ID NO: 1602162 - RNA, 19 nt, Homo sapiens
  misc_RNA (1)...(19): siRNA sense strand
gaaggaagccguccagaau

SEQ ID NO: 1602163 - RNA, 19 nt, Homo sapiens
  misc_RNA (1)...(19): siRNA sense strand
ccaaguacaucccagcuuu

SEQ ID NO: 1602164 - RNA, 19 nt, Homo sapiens
  misc_RNA (1)...(19): siRNA sense strand
ggacauggccgacuacagu

SEQ ID NO: 1602165 - RNA, 19 nt, Homo sapiens
  misc_RNA (1)...(19): siRNA sense strand
gcagaucgaugacaaugag

SEQ ID NO: 1602166 - RNA, 19 nt, Homo sapiens
  misc_RNA (1)...(19): siRNA sense strand
gagcagauccaguucauca

SEQ ID NO: 1602167 - RNA, 19 nt, Homo sapiens
  misc_RNA (1)...(19): siRNA sense strand
cgaagaagauugccagcau

SEQ ID NO: 1602168 - RNA, 19 nt, Homo sapiens
  misc_RNA (1)...(19): siRNA sense strand
ucaaagccaucaucuucuu

SEQ ID NO: 1602169 - RNA, 19 nt, Homo sapiens
  misc_RNA (1)...(19): siRNA sense strand
acaccacccuggaauuuga

SEQ ID NO: 1602170 - RNA, 19 nt, Homo sapiens
  misc_RNA (1)...(19): siRNA sense strand
ggaagaaccacauguacuc

SEQ ID NO: 1602171 - RNA, 19 nt, Homo sapiens
  misc_RNA (1)...(19): siRNA sense strand
gauccaugguguucaagga

SEQ ID NO: 1602172 - RNA, 19 nt, Homo sapiens
  misc_RNA (1)...(19): siRNA sense strand
gggcuggcaugaagaagga

SEQ ID NO: 1602173 - RNA, 19 nt, Homo sapiens
  misc_RNA (1)...(19): siRNA sense strand
ggaggagcgugcggaagaa

SEQ ID NO: 1602174 - RNA, 19 nt, Homo sapiens
  misc_RNA (1)...(19): siRNA sense strand
ccucaaagccaucaucuuc

SEQ ID NO: 1602175 - RNA, 19 nt, Homo sapiens
  misc_RNA (1)...(19): siRNA sense strand
cauguacuccugcagauuu

SEQ ID NO: 1602176 - RNA, 19 nt, Homo sapiens
  misc_RNA (1)...(19): siRNA sense strand
aggaagccguccagaauga

SEQ ID NO: 1602177 - RNA, 19 nt, Homo sapiens
  misc_RNA (1)...(19): siRNA sense strand
ucaacgaccgccaguauga

SEQ ID NO: 1602178 - RNA, 19 nt, Homo sapiens
  misc_RNA (1)...(19): siRNA sense strand
caucaacgaccgccaguau

SEQ ID NO: 1602179 - RNA, 19 nt, Homo sapiens
  misc_RNA (1)...(19): siRNA sense strand
caagagauccaugguguuc

SEQ ID NO: 1602180 - RNA, 19 nt, Homo sapiens
  misc_RNA (1)...(19): siRNA sense strand
gaguaugccuaccucaaag

SEQ ID NO: 1602181 - RNA, 19 nt, Homo sapiens
  misc_RNA (1)...(19): siRNA sense strand
cuacaccacccuggaauuu

SEQ ID NO: 1602182 - RNA, 19 nt, Homo sapiens
  misc_RNA (1)...(19): siRNA sense strand
agagauccaugguguucaa

SEQ ID NO: 1602183 - RNA, 19 nt, Homo sapiens
  misc_RNA (1)...(19): siRNA sense strand
gaucgaugacaaugaguau

SEQ ID NO: 1602184 - RNA, 19 nt, Homo sapiens
  misc_RNA (1)...(19): siRNA sense strand
ugacucgcguggccgcuuu

SEQ ID NO: 1602185 - RNA, 19 nt, Homo sapiens
  misc_RNA (1)...(19): siRNA sense strand
gcagauccaguucaucaag

SEQ ID NO: 1602186 - RNA, 19 nt, Homo sapiens
  misc_RNA (1)...(19): siRNA sense strand
acugcaggcucaagaaaug

SEQ ID NO: 1602187 - RNA, 19 nt, Homo sapiens
  misc_RNA (1)...(19): siRNA sense strand
gagcuuggaggacuacauc

SEQ ID NO: 1602188 - RNA, 19 nt, Homo sapiens
  misc_RNA (1)...(19): siRNA sense strand
agaaggaagccguccagaa

SEQ ID NO: 1602189 - RNA, 19 nt, Homo sapiens
  misc_RNA (1)...(19): siRNA sense strand
uccaggagcugcagaucga

SEQ ID NO: 1602190 - RNA, 19 nt, Homo sapiens
  misc_RNA (1)...(19): siRNA sense strand
ggcagugcgugguggacaa

SEQ ID NO: 1602191 - RNA, 19 nt, Homo sapiens
  misc_RNA (1)...(19): siRNA sense strand
gagaaugugcagguguuga

SEQ ID NO: 1602192 - RNA, 19 nt, Homo sapiens
  misc_RNA (1)...(19): siRNA sense strand
ggcagaugaucgagcagau

SEQ ID NO: 1602193 - RNA, 19 nt, Homo sapiens
  misc_RNA (1)...(19): siRNA sense strand
uugagaaugugcagguguu

SEQ ID NO: 1602194 - RNA, 19 nt, Homo sapiens
  misc_RNA (1)...(19): siRNA sense strand
cacauguacuccugcagau

SEQ ID NO: 1602195 - RNA, 19 nt, Homo sapiens
  misc_RNA (1)...(19): siRNA sense strand
gaugagccggguguccaua

SEQ ID NO: 1602196 - RNA, 19 nt, Homo sapiens
  misc_RNA (1)...(19): siRNA sense strand
ccaaaacccucgucgacau

SEQ ID NO: 1602197 - RNA, 19 nt, Homo sapiens
  misc_RNA (1)...(19): siRNA sense strand
cuacugcaggcucaagaaa

SEQ ID NO: 1602198 - RNA, 19 nt, Homo sapiens
  misc_RNA (1)...(19): siRNA sense strand
aagccaucaucuucuuuga

SEQ ID NO: 1602199 - RNA, 19 nt, Homo sapiens
  misc_RNA (1)...(19): siRNA sense strand
gcagugcgugguggacaaa

SEQ ID NO: 1602200 - RNA, 19 nt, Homo sapiens
  misc_RNA (1)...(19): siRNA sense strand
auguacuccugcagauuua

SEQ ID NO: 1602201 - RNA, 19 nt, Homo sapiens
  misc_RNA (1)...(19): siRNA sense strand
ucgagcagauccaguucau

SEQ ID NO: 1602202 - RNA, 19 nt, Homo sapiens
  misc_RNA (1)...(19): siRNA sense strand
uguugacgaugggcaauga

SEQ ID NO: 1602203 - RNA, 19 nt, Homo sapiens
  misc_RNA (1)...(19): siRNA sense strand
gcggaagaaccacauguac

SEQ ID NO: 1602204 - RNA, 19 nt, Homo sapiens
  misc_RNA (1)...(19): siRNA sense strand
ccaagagauccaugguguu

SEQ ID NO: 1602205 - RNA, 19 nt, Homo sapiens
  misc_RNA (1)...(19): siRNA sense strand
caaguacaucccagcuuuc

SEQ ID NO: 1602206 - RNA, 19 nt, Homo sapiens
  misc_RNA (1)...(19): siRNA sense strand
gggccacgggcaaacacua

SEQ ID NO: 1602207 - RNA, 19 nt, Homo sapiens
  misc_RNA (1)...(19): siRNA sense strand
gcuccuaggcaaugacuac

SEQ ID NO: 1602208 - RNA, 19 nt, Homo sapiens
  misc_RNA (1)...(19): siRNA sense strand
agccugcccuccaucaaug

SEQ ID NO: 1602209 - RNA, 19 nt, Homo sapiens
  misc_RNA (1)...(19): siRNA sense strand
gcuacugcaggcucaagaa

SEQ ID NO: 1602210 - RNA, 19 nt, Homo sapiens
  misc_RNA (1)...(19): siRNA sense strand
gaaggaagccguccagaau

SEQ ID NO: 1602211 - RNA, 19 nt, Homo sapiens
  misc_RNA (1)...(19): siRNA sense strand
ccaaguacaucccagcuuu

SEQ ID NO: 1602212 - RNA, 19 nt, Homo sapiens
  misc_RNA (1)...(19): siRNA sense strand
ggacauggccgacuacagu

SEQ ID NO: 1602213 - RNA, 19 nt, Homo sapiens
  misc_RNA (1)...(19): siRNA sense strand
gcagaucgaugacaaugag

SEQ ID NO: 1602214 - RNA, 19 nt, Homo sapiens
  misc_RNA (1)...(19): siRNA sense strand
gagcagauccaguucauca

SEQ ID NO: 1602215 - RNA, 19 nt, Homo sapiens
  misc_RNA (1)...(19): siRNA sense strand
cgaagaagauugccagcau

SEQ ID NO: 1602216 - RNA, 19 nt, Homo sapiens
  misc_RNA (1)...(19): siRNA sense strand
ucaaagccaucaucuucuu

SEQ ID NO: 1602217 - RNA, 19 nt, Homo sapiens
  misc_RNA (1)...(19): siRNA sense strand
acaccacccuggaauuuga

SEQ ID NO: 1602218 - RNA, 19 nt, Homo sapiens
  misc_RNA (1)...(19): siRNA sense strand
ggaagaaccacauguacuc

SEQ ID NO: 1602219 - RNA, 19 nt, Homo sapiens
  misc_RNA (1)...(19): siRNA sense strand
gauccaugguguucaagga

SEQ ID NO: 1602220 - RNA, 19 nt, Homo sapiens
  misc_RNA (1)...(19): siRNA sense strand
gggcuggcaugaagaagga

SEQ ID NO: 1602221 - RNA, 19 nt, Homo sapiens
  misc_RNA (1)...(19): siRNA sense strand
ggaggagcgugcggaagaa

SEQ ID NO: 1602222 - RNA, 19 nt, Homo sapiens
  misc_RNA (1)...(19): siRNA sense strand
ccucaaagccaucaucuuc

SEQ ID NO: 1602223 - RNA, 19 nt, Homo sapiens
  misc_RNA (1)...(19): siRNA sense strand
cauguacuccugcagauuu

SEQ ID NO: 1602224 - RNA, 19 nt, Homo sapiens
  misc_RNA (1)...(19): siRNA sense strand
aggaagccguccagaauga

SEQ ID NO: 1602225 - RNA, 19 nt, Homo sapiens
  misc_RNA (1)...(19): siRNA sense strand
ucaacgaccgccaguauga

SEQ ID NO: 1602226 - RNA, 19 nt, Homo sapiens
  misc_RNA (1)...(19): siRNA sense strand
caucaacgaccgccaguau

SEQ ID NO: 1602227 - RNA, 19 nt, Homo sapiens
  misc_RNA (1)...(19): siRNA sense strand
caagagauccaugguguuc

SEQ ID NO: 1602228 - RNA, 19 nt, Homo sapiens
  misc_RNA (1)...(19): siRNA sense strand
gaguaugccuaccucaaag

SEQ ID NO: 1602229 - RNA, 19 nt, Homo sapiens
  misc_RNA (1)...(19): siRNA sense strand
cuacaccacccuggaauuu

SEQ ID NO: 1602230 - RNA, 19 nt, Homo sapiens
  misc_RNA (1)...(19): siRNA sense strand
agagauccaugguguucaa

SEQ ID NO: 1602231 - RNA, 19 nt, Homo sapiens
  misc_RNA (1)...(19): siRNA sense strand
gaucgaugacaaugaguau

SEQ ID NO: 1602232 - RNA, 19 nt, Homo sapiens
  misc_RNA (1)...(19): siRNA sense strand
ugacucgcguggccgcuuu

SEQ ID NO: 1602233 - RNA, 19 nt, Homo sapiens
  misc_RNA (1)...(19): siRNA sense strand
gcagauccaguucaucaag

SEQ ID NO: 1602234 - RNA, 19 nt, Homo sapiens
  misc_RNA (1)...(19): siRNA sense strand
acugcaggcucaagaaaug

SEQ ID NO: 1602235 - RNA, 19 nt, Homo sapiens
  misc_RNA (1)...(19): siRNA sense strand
gagcuuggaggacuacauc

SEQ ID NO: 1602236 - RNA, 19 nt, Homo sapiens
  misc_RNA (1)...(19): siRNA sense strand
agaaggaagccguccagaa

SEQ ID NO: 1602237 - RNA, 19 nt, Homo sapiens
  misc_RNA (1)...(19): siRNA sense strand
uccaggagcugcagaucga

SEQ ID NO: 1602238 - RNA, 19 nt, Homo sapiens
  misc_RNA (1)...(19): siRNA sense strand
ggcagugcgugguggacaa

SEQ ID NO: 1602239 - RNA, 19 nt, Homo sapiens
  misc_RNA (1)...(19): siRNA sense strand
gagaaugugcagguguuga

SEQ ID NO: 1602240 - RNA, 19 nt, Homo sapiens
  misc_RNA (1)...(19): siRNA sense strand
ggcagaugaucgagcagau

SEQ ID NO: 1602241 - RNA, 19 nt, Homo sapiens
  misc_RNA (1)...(19): siRNA sense strand
uugagaaugugcagguguu

SEQ ID NO: 1602242 - RNA, 19 nt, Homo sapiens
  misc_RNA (1)...(19): siRNA sense strand
cacauguacuccugcagau

SEQ ID NO: 1602243 - RNA, 19 nt, Homo sapiens
  misc_RNA (1)...(19): siRNA sense strand
gaugagccggguguccaua

SEQ ID NO: 1602244 - RNA, 19 nt, Homo sapiens
  misc_RNA (1)...(19): siRNA sense strand
ccaaaacccucgucgacau

SEQ ID NO: 1602245 - RNA, 19 nt, Homo sapiens
  misc_RNA (1)...(19): siRNA sense strand
cuacugcaggcucaagaaa

SEQ ID NO: 1602246 - RNA, 19 nt, Homo sapiens
  misc_RNA (1)...(19): siRNA sense strand
aagccaucaucuucuuuga

SEQ ID NO: 1602247 - RNA, 19 nt, Homo sapiens
  misc_RNA (1)...(19): siRNA sense strand
gcagugcgugguggacaaa

SEQ ID NO: 1602248 - RNA, 19 nt, Homo sapiens
  misc_RNA (1)...(19): siRNA sense strand
auguacuccugcagauuua

SEQ ID NO: 1602249 - RNA, 19 nt, Homo sapiens
  misc_RNA (1)...(19): siRNA sense strand
ucgagcagauccaguucau

SEQ ID NO: 1602250 - RNA, 19 nt, Homo sapiens
  misc_RNA (1)...(19): siRNA sense strand
uguugacgaugggcaauga

SEQ ID NO: 1602251 - RNA, 19 nt, Homo sapiens
  misc_RNA (1)...(19): siRNA sense strand
gcggaagaaccacauguac

SEQ ID NO: 1602252 - RNA, 19 nt, Homo sapiens
  misc_RNA (1)...(19): siRNA sense strand
ccaagagauccaugguguu

SEQ ID NO: 1602253 - RNA, 19 nt, Homo sapiens
  misc_RNA (1)...(19): siRNA sense strand
caaguacaucccagcuuuc

SEQ ID NO: 1602254 - RNA, 19 nt, Homo sapiens
  misc_RNA (1)...(19): siRNA sense strand
gggccacgggcaaacacua

SEQ ID NO: 1602255 - RNA, 19 nt, Homo sapiens
  misc_RNA (1)...(19): siRNA sense strand
gcuccuaggcaaugacuac

SEQ ID NO: 1602256 - RNA, 19 nt, Homo sapiens
  misc_RNA (1)...(19): siRNA sense strand
agccugcccuccaucaaug

SEQ ID NO: 1602257 - RNA, 19 nt, Homo sapiens
  misc_RNA (1)...(19): siRNA sense strand
gcuacugcaggcucaagaa

SEQ ID NO: 1602258 - RNA, 19 nt, Homo sapiens
  misc_RNA (1)...(19): siRNA sense strand
gcagugccuucgucuugua

SEQ ID NO: 1602259 - RNA, 19 nt, Homo sapiens
  misc_RNA (1)...(19): siRNA sense strand
ggucauguuuguagcugua

SEQ ID NO: 1602260 - RNA, 19 nt, Homo sapiens
  misc_RNA (1)...(19): siRNA sense strand
gcauuuggcugggucaugu

SEQ ID NO: 1602261 - RNA, 19 nt, Homo sapiens
  misc_RNA (1)...(19): siRNA sense strand
gagggacagucacaacuuc

SEQ ID NO: 1602262 - RNA, 19 nt, Homo sapiens
  misc_RNA (1)...(19): siRNA sense strand
guaccucucugccgcuguu

SEQ ID NO: 1602263 - RNA, 19 nt, Homo sapiens
  misc_RNA (1)...(19): siRNA sense strand
cugcugguauggacgcuua

SEQ ID NO: 1602264 - RNA, 19 nt, Homo sapiens
  misc_RNA (1)...(19): siRNA sense strand
cugcuacgcuggaaauaca

SEQ ID NO: 1602265 - RNA, 19 nt, Homo sapiens
  misc_RNA (1)...(19): siRNA sense strand
cagugggccugugcuuuaa

SEQ ID NO: 1602266 - RNA, 19 nt, Homo sapiens
  misc_RNA (1)...(19): siRNA sense strand
ggagauccaggaccauaca

SEQ ID NO: 1602267 - RNA, 19 nt, Homo sapiens
  misc_RNA (1)...(19): siRNA sense strand
gguccucaccgucuucuuc

SEQ ID NO: 1602268 - RNA, 19 nt, Homo sapiens
  misc_RNA (1)...(19): siRNA sense strand
gcagcagcuucgccuacga

SEQ ID NO: 1602269 - RNA, 19 nt, Homo sapiens
  misc_RNA (1)...(19): siRNA sense strand
caucguggccgagaucguu

SEQ ID NO: 1602270 - RNA, 19 nt, Homo sapiens
  misc_RNA (1)...(19): siRNA sense strand
cauguuuguagcuguauuu

SEQ ID NO: 1602271 - RNA, 19 nt, Homo sapiens
  misc_RNA (1)...(19): siRNA sense strand
gcuacgcuggaaauacaua

SEQ ID NO: 1602272 - RNA, 19 nt, Homo sapiens
  misc_RNA (1)...(19): siRNA sense strand
ccagcuccuucgcagagaa

SEQ ID NO: 1602273 - RNA, 19 nt, Homo sapiens
  misc_RNA (1)...(19): siRNA sense strand
cuuccucauuaucuacaua

SEQ ID NO: 1602274 - RNA, 19 nt, Homo sapiens
  misc_RNA (1)...(19): siRNA sense strand
accgucuucuuccucauua

SEQ ID NO: 1602275 - RNA, 19 nt, Homo sapiens
  misc_RNA (1)...(19): siRNA sense strand
caucugcuacgcuggaaau

SEQ ID NO: 1602276 - RNA, 19 nt, Homo sapiens
  misc_RNA (1)...(19): siRNA sense strand
guuuguagcuguauuuuac

SEQ ID NO: 1602277 - RNA, 19 nt, Homo sapiens
  misc_RNA (1)...(19): siRNA sense strand
gagagggacagucacaacu

SEQ ID NO: 1602278 - RNA, 19 nt, Homo sapiens
  misc_RNA (1)...(19): siRNA sense strand
ccucucugccgcuguugua

SEQ ID NO: 1602279 - RNA, 19 nt, Homo sapiens
  misc_RNA (1)...(19): siRNA sense strand
ggacagucacaacuucaac

SEQ ID NO: 1602280 - RNA, 19 nt, Homo sapiens
  misc_RNA (1)...(19): siRNA sense strand
uaacuugucuccaugauuu

SEQ ID NO: 1602281 - RNA, 19 nt, Homo sapiens
  misc_RNA (1)...(19): siRNA sense strand
caacuggucugucaacgua

SEQ ID NO: 1602282 - RNA, 19 nt, Homo sapiens
  misc_RNA (1)...(19): siRNA sense strand
gaagaaagccaagaaggua

SEQ ID NO: 1602283 - RNA, 19 nt, Homo sapiens
  misc_RNA (1)...(19): siRNA sense strand
gagcaaguccucacugaua

SEQ ID NO: 1602284 - RNA, 19 nt, Homo sapiens
  misc_RNA (1)...(19): siRNA sense strand
gauaagacauccaggaaca

SEQ ID NO: 1602285 - RNA, 19 nt, Homo sapiens
  misc_RNA (1)...(19): siRNA sense strand
caagagcccugguccuaug

SEQ ID NO: 1602286 - RNA, 19 nt, Homo sapiens
  misc_RNA (1)...(19): siRNA sense strand
gaaaaugaaugccgaguca

SEQ ID NO: 1602287 - RNA, 19 nt, Homo sapiens
  misc_RNA (1)...(19): siRNA sense strand
gagauaagacauccaggaa

SEQ ID NO: 1602288 - RNA, 19 nt, Homo sapiens
  misc_RNA (1)...(19): siRNA sense strand
gcuaugcucaggaugauuu

SEQ ID NO: 1602289 - RNA, 19 nt, Homo sapiens
  misc_RNA (1)...(19): siRNA sense strand
ucucugagguuccaccaaa

SEQ ID NO: 1602290 - RNA, 19 nt, Homo sapiens
  misc_RNA (1)...(19): siRNA sense strand
gaaaacagguaacuugucu

SEQ ID NO: 1602291 - RNA, 19 nt, Homo sapiens
  misc_RNA (1)...(19): siRNA sense strand
guacguuucuaccgcaaug

SEQ ID NO: 1602292 - RNA, 19 nt, Homo sapiens
  misc_RNA (1)...(19): siRNA sense strand
gcuuggugauuccauguaa

SEQ ID NO: 1602293 - RNA, 19 nt, Homo sapiens
  misc_RNA (1)...(19): siRNA sense strand
aaacaucugccaauaugaa

SEQ ID NO: 1602294 - RNA, 19 nt, Homo sapiens
  misc_RNA (1)...(19): siRNA sense strand
ggagugcguuacauuuaca

SEQ ID NO: 1602295 - RNA, 19 nt, Homo sapiens
  misc_RNA (1)...(19): siRNA sense strand
gaugaugauguguuuauug

SEQ ID NO: 1602296 - RNA, 19 nt, Homo sapiens
  misc_RNA (1)...(19): siRNA sense strand
ccucagacaacuucuuuaa

SEQ ID NO: 1602297 - RNA, 19 nt, Homo sapiens
  misc_RNA (1)...(19): siRNA sense strand
ggaagcacaaggaccugua

SEQ ID NO: 1602298 - RNA, 19 nt, Homo sapiens
  misc_RNA (1)...(19): siRNA sense strand
gccaagagcccugguccua

SEQ ID NO: 1602299 - RNA, 19 nt, Homo sapiens
  misc_RNA (1)...(19): siRNA sense strand
gggagugcguuacauuuac

SEQ ID NO: 1602300 - RNA, 19 nt, Homo sapiens
  misc_RNA (1)...(19): siRNA sense strand
acagguaacuugucuccau

SEQ ID NO: 1602301 - RNA, 19 nt, Homo sapiens
  misc_RNA (1)...(19): siRNA sense strand
uaucacagaagccaucaaa

SEQ ID NO: 1602302 - RNA, 19 nt, Homo sapiens
  misc_RNA (1)...(19): siRNA sense strand
gaagaucggaagcauggau

SEQ ID NO: 1602303 - RNA, 19 nt, Homo sapiens
  misc_RNA (1)...(19): siRNA sense strand
ucacagaagccaucaaacu

SEQ ID NO: 1602304 - RNA, 19 nt, Homo sapiens
  misc_RNA (1)...(19): siRNA sense strand
uaagcagucucccaucucu

SEQ ID NO: 1602305 - RNA, 19 nt, Homo sapiens
  misc_RNA (1)...(19): siRNA sense strand
caugauuucuuuggugaug

SEQ ID NO: 1602306 - RNA, 19 nt, Homo sapiens
  misc_RNA (1)...(19): siRNA sense strand
ucuacacucuggauggaaa

SEQ ID NO: 1602307 - RNA, 19 nt, Homo sapiens
  misc_RNA (1)...(19): siRNA sense strand
gugaugaugauguguuuau

SEQ ID NO: 1602308 - RNA, 19 nt, Homo sapiens
  misc_RNA (1)...(19): siRNA sense strand
augcgaggcucccggauga

SEQ ID NO: 1602309 - RNA, 19 nt, Homo sapiens
  misc_RNA (1)...(19): siRNA sense strand
aaucccaacuggucuguca

SEQ ID NO: 1602310 - RNA, 19 nt, Homo sapiens
  misc_RNA (1)...(19): siRNA sense strand
ccaggaagaucggaagcau

SEQ ID NO: 1602311 - RNA, 19 nt, Homo sapiens
  misc_RNA (1)...(19): siRNA sense strand
gaccugacgcgaucucugu

SEQ ID NO: 1602312 - RNA, 19 nt, Homo sapiens
  misc_RNA (1)...(19): siRNA sense strand
gcacugaguaaugagaaga

SEQ ID NO: 1602313 - RNA, 19 nt, Homo sapiens
  misc_RNA (1)...(19): siRNA sense strand
ugcaggcacugaguaauga

SEQ ID NO: 1602314 - RNA, 19 nt, Homo sapiens
  misc_RNA (1)...(19): siRNA sense strand
caagaagacagcccacucu

SEQ ID NO: 1602315 - RNA, 19 nt, Homo sapiens
  misc_RNA (1)...(19): siRNA sense strand
gcguuacauuuacaccauu

SEQ ID NO: 1602316 - RNA, 19 nt, Homo sapiens
  misc_RNA (1)...(19): siRNA sense strand
agggagugcguuacauuua

SEQ ID NO: 1602317 - RNA, 19 nt, Homo sapiens
  misc_RNA (1)...(19): siRNA sense strand
cagggagugcguuacauuu

SEQ ID NO: 1602318 - RNA, 19 nt, Homo sapiens
  misc_RNA (1)...(19): siRNA sense strand
gcacaggccagggagaaca

SEQ ID NO: 1602319 - RNA, 19 nt, Homo sapiens
  misc_RNA (1)...(19): siRNA sense strand
guaacuugucuccaugauu

SEQ ID NO: 1602320 - RNA, 19 nt, Homo sapiens
  misc_RNA (1)...(19): siRNA sense strand
gguaacuugucuccaugau

SEQ ID NO: 1602321 - RNA, 19 nt, Homo sapiens
  misc_RNA (1)...(19): siRNA sense strand
ucagggagugcguuacauu

SEQ ID NO: 1602322 - RNA, 19 nt, Homo sapiens
  misc_RNA (1)...(19): siRNA sense strand
cacagaagccaucaaacug

SEQ ID NO: 1602323 - RNA, 19 nt, Homo sapiens
  misc_RNA (1)...(19): siRNA sense strand
ccagggagaacaaggacuu

SEQ ID NO: 1602324 - RNA, 19 nt, Homo sapiens
  misc_RNA (1)...(19): siRNA sense strand
gccgagucaugaagggaaa

SEQ ID NO: 1602325 - RNA, 19 nt, Homo sapiens
  misc_RNA (1)...(19): siRNA sense strand
uggugaugaugauguguuu

SEQ ID NO: 1602326 - RNA, 19 nt, Homo sapiens
  misc_RNA (1)...(19): siRNA sense strand
ugacgaaagagauaagaca

SEQ ID NO: 1602327 - RNA, 19 nt, Homo sapiens
  misc_RNA (1)...(19): siRNA sense strand
uaagacauccaggaacaug

SEQ ID NO: 1602328 - RNA, 19 nt, Homo sapiens
  misc_RNA (1)...(19): siRNA sense strand
cggacucgcuuggugauuc

SEQ ID NO: 1602329 - RNA, 19 nt, Homo sapiens
  misc_RNA (1)...(19): siRNA sense strand
agcaaguccucacugauau

SEQ ID NO: 1602330 - RNA, 19 nt, Homo sapiens
  misc_RNA (1)...(19): siRNA sense strand
uggaguacaccaagaaugu

SEQ ID NO: 1602331 - RNA, 19 nt, Homo sapiens
  misc_RNA (1)...(19): siRNA sense strand
gaucggaagcauggaugaa

SEQ ID NO: 1602332 - RNA, 19 nt, Homo sapiens
  misc_RNA (1)...(19): siRNA sense strand
agaagaaagccaagaaggu

SEQ ID NO: 1602333 - RNA, 19 nt, Homo sapiens
  misc_RNA (1)...(19): siRNA sense strand
ucuaagcagucucccaucu

SEQ ID NO: 1602334 - RNA, 19 nt, Homo sapiens
  misc_RNA (1)...(19): siRNA sense strand
ccucacugauaucacagaa

SEQ ID NO: 1602335 - RNA, 19 nt, Homo sapiens
  misc_RNA (1)...(19): siRNA sense strand
auugauggauccaggaaga

SEQ ID NO: 1602336 - RNA, 19 nt, Homo sapiens
  misc_RNA (1)...(19): siRNA sense strand
uguacgcuguguccucuga

SEQ ID NO: 1602337 - RNA, 19 nt, Homo sapiens
  misc_RNA (1)...(19): siRNA sense strand
gaguacaccaagaauguca

SEQ ID NO: 1602338 - RNA, 19 nt, Homo sapiens
  misc_RNA (1)...(19): siRNA sense strand
gcaaguccucacugauauc

SEQ ID NO: 1602339 - RNA, 19 nt, Homo sapiens
  misc_RNA (1)...(19): siRNA sense strand
ccaagagcccugguccuau

SEQ ID NO: 1602340 - RNA, 19 nt, Homo sapiens
  misc_RNA (1)...(19): siRNA sense strand
aagccaagaagguacguuu

SEQ ID NO: 1602341 - RNA, 19 nt, Homo sapiens
  misc_RNA (1)...(19): siRNA sense strand
gggaaagcuaugucuguuc

SEQ ID NO: 1602342 - RNA, 19 nt, Homo sapiens
  misc_RNA (1)...(19): siRNA sense strand
gggauuguguacgcugugu

SEQ ID NO: 1602343 - RNA, 19 nt, Homo sapiens
  misc_RNA (1)...(19): siRNA sense strand
ccuaugcgccgaagcaagu

SEQ ID NO: 1602344 - RNA, 19 nt, Homo sapiens
  misc_RNA (1)...(19): siRNA sense strand
caaguccucacugauauca

SEQ ID NO: 1602345 - RNA, 19 nt, Homo sapiens
  misc_RNA (1)...(19): siRNA sense strand
guacaccaagaaugucaau

SEQ ID NO: 1602346 - RNA, 19 nt, Homo sapiens
  misc_RNA (1)...(19): siRNA sense strand
cguuacauuuacaccauug

SEQ ID NO: 1602347 - RNA, 19 nt, Homo sapiens
  misc_RNA (1)...(19): siRNA sense strand
gaccuguaccugccucugu

SEQ ID NO: 1602348 - RNA, 19 nt, Homo sapiens
  misc_RNA (1)...(19): siRNA sense strand
gacgaaagagauaagacau

SEQ ID NO: 1602349 - RNA, 19 nt, Homo sapiens
  misc_RNA (1)...(19): siRNA sense strand
ggggaaagcuaugucuguu

SEQ ID NO: 1602350 - RNA, 19 nt, Homo sapiens
  misc_RNA (1)...(19): siRNA sense strand
ugcgugugcuucugaacaa

SEQ ID NO: 1602351 - RNA, 19 nt, Homo sapiens
  misc_RNA (1)...(19): siRNA sense strand
gaagcacaaggaccuguac

SEQ ID NO: 1602352 - RNA, 19 nt, Homo sapiens
  misc_RNA (1)...(19): siRNA sense strand
aguccucacugauaucaca

SEQ ID NO: 1602353 - RNA, 19 nt, Homo sapiens
  misc_RNA (1)...(19): siRNA sense strand
acuggucugucaacguaaa

SEQ ID NO: 1602354 - RNA, 19 nt, Homo sapiens
  misc_RNA (1)...(19): siRNA sense strand
ggacucgcuuggugauucc

SEQ ID NO: 1602355 - RNA, 19 nt, Homo sapiens
  misc_RNA (1)...(19): siRNA sense strand
ugauuucuuuggugaugau

SEQ ID NO: 1602356 - RNA, 19 nt, Homo sapiens
  misc_RNA (1)...(19): siRNA sense strand
gcugugcgugugcuucuga

SEQ ID NO: 1602357 - RNA, 19 nt, Homo sapiens
  misc_RNA (1)...(19): siRNA sense strand
uaacuugucuccaugauuu

SEQ ID NO: 1602358 - RNA, 19 nt, Homo sapiens
  misc_RNA (1)...(19): siRNA sense strand
caacuggucugucaacgua

SEQ ID NO: 1602359 - RNA, 19 nt, Homo sapiens
  misc_RNA (1)...(19): siRNA sense strand
gaagaaagccaagaaggua

SEQ ID NO: 1602360 - RNA, 19 nt, Homo sapiens
  misc_RNA (1)...(19): siRNA sense strand
gagcaaguccucacugaua

SEQ ID NO: 1602361 - RNA, 19 nt, Homo sapiens
  misc_RNA (1)...(19): siRNA sense strand
gauaagacauccaggaaca

SEQ ID NO: 1602362 - RNA, 19 nt, Homo sapiens
  misc_RNA (1)...(19): siRNA sense strand
caagagcccugguccuaug

SEQ ID NO: 1602363 - RNA, 19 nt, Homo sapiens
  misc_RNA (1)...(19): siRNA sense strand
gaaaaugaaugccgaguca

SEQ ID NO: 1602364 - RNA, 19 nt, Homo sapiens
  misc_RNA (1)...(19): siRNA sense strand
gagauaagacauccaggaa

SEQ ID NO: 1602365 - RNA, 19 nt, Homo sapiens
  misc_RNA (1)...(19): siRNA sense strand
gcuaugcucaggaugauuu

SEQ ID NO: 1602366 - RNA, 19 nt, Homo sapiens
  misc_RNA (1)...(19): siRNA sense strand
gaaaacagguaacuugucu

SEQ ID NO: 1602367 - RNA, 19 nt, Homo sapiens
  misc_RNA (1)...(19): siRNA sense strand
guacguuucuaccgcaaug

SEQ ID NO: 1602368 - RNA, 19 nt, Homo sapiens
  misc_RNA (1)...(19): siRNA sense strand
gcuuggugauuccauguaa

SEQ ID NO: 1602369 - RNA, 19 nt, Homo sapiens
  misc_RNA (1)...(19): siRNA sense strand
aaacaucugccaauaugaa

SEQ ID NO: 1602370 - RNA, 19 nt, Homo sapiens
  misc_RNA (1)...(19): siRNA sense strand
ggagugcguuacauuuaca

SEQ ID NO: 1602371 - RNA, 19 nt, Homo sapiens
  misc_RNA (1)...(19): siRNA sense strand
gaugaugauguguuuauug

SEQ ID NO: 1602372 - RNA, 19 nt, Homo sapiens
  misc_RNA (1)...(19): siRNA sense strand
ccucagacaacuucuuuaa

SEQ ID NO: 1602373 - RNA, 19 nt, Homo sapiens
  misc_RNA (1)...(19): siRNA sense strand
ggaagcacaaggaccugua

SEQ ID NO: 1602374 - RNA, 19 nt, Homo sapiens
  misc_RNA (1)...(19): siRNA sense strand
gccaagagcccugguccua

SEQ ID NO: 1602375 - RNA, 19 nt, Homo sapiens
  misc_RNA (1)...(19): siRNA sense strand
gggagugcguuacauuuac

SEQ ID NO: 1602376 - RNA, 19 nt, Homo sapiens
  misc_RNA (1)...(19): siRNA sense strand
acagguaacuugucuccau

SEQ ID NO: 1602377 - RNA, 19 nt, Homo sapiens
  misc_RNA (1)...(19): siRNA sense strand
uaucacagaagccaucaaa

SEQ ID NO: 1602378 - RNA, 19 nt, Homo sapiens
  misc_RNA (1)...(19): siRNA sense strand
gaagaucggaagcauggau

SEQ ID NO: 1602379 - RNA, 19 nt, Homo sapiens
  misc_RNA (1)...(19): siRNA sense strand
ucacagaagccaucaaacu

SEQ ID NO: 1602380 - RNA, 19 nt, Homo sapiens
  misc_RNA (1)...(19): siRNA sense strand
uaagcagucucccaucucu

SEQ ID NO: 1602381 - RNA, 19 nt, Homo sapiens
  misc_RNA (1)...(19): siRNA sense strand
caugauuucuuuggugaug

SEQ ID NO: 1602382 - RNA, 19 nt, Homo sapiens
  misc_RNA (1)...(19): siRNA sense strand
ucuacacucuggauggaaa

SEQ ID NO: 1602383 - RNA, 19 nt, Homo sapiens
  misc_RNA (1)...(19): siRNA sense strand
gugaugaugauguguuuau

SEQ ID NO: 1602384 - RNA, 19 nt, Homo sapiens
  misc_RNA (1)...(19): siRNA sense strand
gcacugaguaaugagaaga

SEQ ID NO: 1602385 - RNA, 19 nt, Homo sapiens
  misc_RNA (1)...(19): siRNA sense strand
augcgaggcucccggauga

SEQ ID NO: 1602386 - RNA, 19 nt, Homo sapiens
  misc_RNA (1)...(19): siRNA sense strand
aaucccaacuggucuguca

SEQ ID NO: 1602387 - RNA, 19 nt, Homo sapiens
  misc_RNA (1)...(19): siRNA sense strand
ccaggaagaucggaagcau

SEQ ID NO: 1602388 - RNA, 19 nt, Homo sapiens
  misc_RNA (1)...(19): siRNA sense strand
gaccugacgcgaucucugu

SEQ ID NO: 1602389 - RNA, 19 nt, Homo sapiens
  misc_RNA (1)...(19): siRNA sense strand
ugcaggcacugaguaauga

SEQ ID NO: 1602390 - RNA, 19 nt, Homo sapiens
  misc_RNA (1)...(19): siRNA sense strand
caagaagacagcccacucu

SEQ ID NO: 1602391 - RNA, 19 nt, Homo sapiens
  misc_RNA (1)...(19): siRNA sense strand
gcguuacauuuacaccauu

SEQ ID NO: 1602392 - RNA, 19 nt, Homo sapiens
  misc_RNA (1)...(19): siRNA sense strand
agggagugcguuacauuua

SEQ ID NO: 1602393 - RNA, 19 nt, Homo sapiens
  misc_RNA (1)...(19): siRNA sense strand
cagggagugcguuacauuu

SEQ ID NO: 1602394 - RNA, 19 nt, Homo sapiens
  misc_RNA (1)...(19): siRNA sense strand
gcacaggccagggagaaca

SEQ ID NO: 1602395 - RNA, 19 nt, Homo sapiens
  misc_RNA (1)...(19): siRNA sense strand
guaacuugucuccaugauu

SEQ ID NO: 1602396 - RNA, 19 nt, Homo sapiens
  misc_RNA (1)...(19): siRNA sense strand
gguaacuugucuccaugau

SEQ ID NO: 1602397 - RNA, 19 nt, Homo sapiens
  misc_RNA (1)...(19): siRNA sense strand
ucagggagugcguuacauu

SEQ ID NO: 1602398 - RNA, 19 nt, Homo sapiens
  misc_RNA (1)...(19): siRNA sense strand
cacagaagccaucaaacug

SEQ ID NO: 1602399 - RNA, 19 nt, Homo sapiens
  misc_RNA (1)...(19): siRNA sense strand
ccagggagaacaaggacuu

SEQ ID NO: 1602400 - RNA, 19 nt, Homo sapiens
  misc_RNA (1)...(19): siRNA sense strand
ugacgaaagagauaagaca

SEQ ID NO: 1602401 - RNA, 19 nt, Homo sapiens
  misc_RNA (1)...(19): siRNA sense strand
gccgagucaugaagggaaa

SEQ ID NO: 1602402 - RNA, 19 nt, Homo sapiens
  misc_RNA (1)...(19): siRNA sense strand
uggugaugaugauguguuu

SEQ ID NO: 1602403 - RNA, 19 nt, Homo sapiens
  misc_RNA (1)...(19): siRNA sense strand
gaucggaagcauggaugaa

SEQ ID NO: 1602404 - RNA, 19 nt, Homo sapiens
  misc_RNA (1)...(19): siRNA sense strand
cggacucgcuuggugauuc

SEQ ID NO: 1602405 - RNA, 19 nt, Homo sapiens
  misc_RNA (1)...(19): siRNA sense strand
uaagacauccaggaacaug

SEQ ID NO: 1602406 - RNA, 19 nt, Homo sapiens
  misc_RNA (1)...(19): siRNA sense strand
agcaaguccucacugauau

SEQ ID NO: 1602407 - RNA, 19 nt, Homo sapiens
  misc_RNA (1)...(19): siRNA sense strand
uggaguacaccaagaaugu

SEQ ID NO: 1602408 - RNA, 19 nt, Homo sapiens
  misc_RNA (1)...(19): siRNA sense strand
auugauggauccaggaaga

SEQ ID NO: 1602409 - RNA, 19 nt, Homo sapiens
  misc_RNA (1)...(19): siRNA sense strand
ucuaagcagucucccaucu

SEQ ID NO: 1602410 - RNA, 19 nt, Homo sapiens
  misc_RNA (1)...(19): siRNA sense strand
ccucacugauaucacagaa

SEQ ID NO: 1602411 - RNA, 19 nt, Homo sapiens
  misc_RNA (1)...(19): siRNA sense strand
agaagaaagccaagaaggu

SEQ ID NO: 1602412 - RNA, 19 nt, Homo sapiens
  misc_RNA (1)...(19): siRNA sense strand
uguacgcuguguccucuga

SEQ ID NO: 1602413 - RNA, 19 nt, Homo sapiens
  misc_RNA (1)...(19): siRNA sense strand
gaguacaccaagaauguca

SEQ ID NO: 1602414 - RNA, 19 nt, Homo sapiens
  misc_RNA (1)...(19): siRNA sense strand
gcaaguccucacugauauc

SEQ ID NO: 1602415 - RNA, 19 nt, Homo sapiens
  misc_RNA (1)...(19): siRNA sense strand
ccaagagcccugguccuau

SEQ ID NO: 1602416 - RNA, 19 nt, Homo sapiens
  misc_RNA (1)...(19): siRNA sense strand
gggaaagcuaugucuguuc

SEQ ID NO: 1602417 - RNA, 19 nt, Homo sapiens
  misc_RNA (1)...(19): siRNA sense strand
aagccaagaagguacguuu

SEQ ID NO: 1602418 - RNA, 19 nt, Homo sapiens
  misc_RNA (1)...(19): siRNA sense strand
gggauuguguacgcugugu

SEQ ID NO: 1602419 - RNA, 19 nt, Homo sapiens
  misc_RNA (1)...(19): siRNA sense strand
ccuaugcgccgaagcaagu

SEQ ID NO: 1602420 - RNA, 19 nt, Homo sapiens
  misc_RNA (1)...(19): siRNA sense strand
caaguccucacugauauca

SEQ ID NO: 1602421 - RNA, 19 nt, Homo sapiens
  misc_RNA (1)...(19): siRNA sense strand
guacaccaagaaugucaau

SEQ ID NO: 1602422 - RNA, 19 nt, Homo sapiens
  misc_RNA (1)...(19): siRNA sense strand
cguuacauuuacaccauug

SEQ ID NO: 1602423 - RNA, 19 nt, Homo sapiens
  misc_RNA (1)...(19): siRNA sense strand
gaccuguaccugccucugu

SEQ ID NO: 1602424 - RNA, 19 nt, Homo sapiens
  misc_RNA (1)...(19): siRNA sense strand
gacgaaagagauaagacau

SEQ ID NO: 1602425 - RNA, 19 nt, Homo sapiens
  misc_RNA (1)...(19): siRNA sense strand
ggggaaagcuaugucuguu

SEQ ID NO: 1602426 - RNA, 19 nt, Homo sapiens
  misc_RNA (1)...(19): siRNA sense strand
ugcgugugcuucugaacaa

SEQ ID NO: 1602427 - RNA, 19 nt, Homo sapiens
  misc_RNA (1)...(19): siRNA sense strand
gaagcacaaggaccuguac

SEQ ID NO: 1602428 - RNA, 19 nt, Homo sapiens
  misc_RNA (1)...(19): siRNA sense strand
aguccucacugauaucaca

SEQ ID NO: 1602429 - RNA, 19 nt, Homo sapiens
  misc_RNA (1)...(19): siRNA sense strand
acuggucugucaacguaaa

SEQ ID NO: 1602430 - RNA, 19 nt, Homo sapiens
  misc_RNA (1)...(19): siRNA sense strand
ggacucgcuuggugauucc

SEQ ID NO: 1602431 - RNA, 19 nt, Homo sapiens
  misc_RNA (1)...(19): siRNA sense strand
ugauuucuuuggugaugau

SEQ ID NO: 1602432 - RNA, 19 nt, Homo sapiens
  misc_RNA (1)...(19): siRNA sense strand
gcugugcgugugcuucuga

SEQ ID NO: 1602433 - RNA, 19 nt, Homo sapiens
  misc_RNA (1)...(19): siRNA sense strand
uaacuugucuccaugauuu

SEQ ID NO: 1602434 - RNA, 19 nt, Homo sapiens
  misc_RNA (1)...(19): siRNA sense strand
caacuggucugucaacgua

SEQ ID NO: 1602435 - RNA, 19 nt, Homo sapiens
  misc_RNA (1)...(19): siRNA sense strand
gaagaaagccaagaaggua

SEQ ID NO: 1602436 - RNA, 19 nt, Homo sapiens
  misc_RNA (1)...(19): siRNA sense strand
gagcaaguccucacugaua

SEQ ID NO: 1602437 - RNA, 19 nt, Homo sapiens
  misc_RNA (1)...(19): siRNA sense strand
gauaagacauccaggaaca

SEQ ID NO: 1602438 - RNA, 19 nt, Homo sapiens
  misc_RNA (1)...(19): siRNA sense strand
caagagcccugguccuaug

SEQ ID NO: 1602439 - RNA, 19 nt, Homo sapiens
  misc_RNA (1)...(19): siRNA sense strand
gaaaaugaaugccgaguca

SEQ ID NO: 1602440 - RNA, 19 nt, Homo sapiens
  misc_RNA (1)...(19): siRNA sense strand
gagauaagacauccaggaa

SEQ ID NO: 1602441 - RNA, 19 nt, Homo sapiens
  misc_RNA (1)...(19): siRNA sense strand
gcuaugcucaggaugauuu

SEQ ID NO: 1602442 - RNA, 19 nt, Homo sapiens
  misc_RNA (1)...(19): siRNA sense strand
gaaaacagguaacuugucu

SEQ ID NO: 1602443 - RNA, 19 nt, Homo sapiens
  misc_RNA (1)...(19): siRNA sense strand
guacguuucuaccgcaaug

SEQ ID NO: 1602444 - RNA, 19 nt, Homo sapiens
  misc_RNA (1)...(19): siRNA sense strand
gcuuggugauuccauguaa

SEQ ID NO: 1602445 - RNA, 19 nt, Homo sapiens
  misc_RNA (1)...(19): siRNA sense strand
aaacaucugccaauaugaa

SEQ ID NO: 1602446 - RNA, 19 nt, Homo sapiens
  misc_RNA (1)...(19): siRNA sense strand
ggagugcguuacauuuaca

SEQ ID NO: 1602447 - RNA, 19 nt, Homo sapiens
  misc_RNA (1)...(19): siRNA sense strand
gaugaugauguguuuauug

SEQ ID NO: 1602448 - RNA, 19 nt, Homo sapiens
  misc_RNA (1)...(19): siRNA sense strand
ccucagacaacuucuuuaa

SEQ ID NO: 1602449 - RNA, 19 nt, Homo sapiens
  misc_RNA (1)...(19): siRNA sense strand
ggaagcacaaggaccugua

SEQ ID NO: 1602450 - RNA, 19 nt, Homo sapiens
  misc_RNA (1)...(19): siRNA sense strand
gccaagagcccugguccua

SEQ ID NO: 1602451 - RNA, 19 nt, Homo sapiens
  misc_RNA (1)...(19): siRNA sense strand
gggagugcguuacauuuac

SEQ ID NO: 1602452 - RNA, 19 nt, Homo sapiens
  misc_RNA (1)...(19): siRNA sense strand
acagguaacuugucuccau

SEQ ID NO: 1602453 - RNA, 19 nt, Homo sapiens
  misc_RNA (1)...(19): siRNA sense strand
uaucacagaagccaucaaa

SEQ ID NO: 1602454 - RNA, 19 nt, Homo sapiens
  misc_RNA (1)...(19): siRNA sense strand
gaagaucggaagcauggau

SEQ ID NO: 1602455 - RNA, 19 nt, Homo sapiens
  misc_RNA (1)...(19): siRNA sense strand
ucacagaagccaucaaacu

SEQ ID NO: 1602456 - RNA, 19 nt, Homo sapiens
  misc_RNA (1)...(19): siRNA sense strand
uaagcagucucccaucucu

SEQ ID NO: 1602457 - RNA, 19 nt, Homo sapiens
  misc_RNA (1)...(19): siRNA sense strand
caugauuucuuuggugaug

SEQ ID NO: 1602458 - RNA, 19 nt, Homo sapiens
  misc_RNA (1)...(19): siRNA sense strand
ucuacacucuggauggaaa

SEQ ID NO: 1602459 - RNA, 19 nt, Homo sapiens
  misc_RNA (1)...(19): siRNA sense strand
gugaugaugauguguuuau

SEQ ID NO: 1602460 - RNA, 19 nt, Homo sapiens
  misc_RNA (1)...(19): siRNA sense strand
gcacugaguaaugagaaga

SEQ ID NO: 1602461 - RNA, 19 nt, Homo sapiens
  misc_RNA (1)...(19): siRNA sense strand
augcgaggcucccggauga

SEQ ID NO: 1602462 - RNA, 19 nt, Homo sapiens
  misc_RNA (1)...(19): siRNA sense strand
aaucccaacuggucuguca

SEQ ID NO: 1602463 - RNA, 19 nt, Homo sapiens
  misc_RNA (1)...(19): siRNA sense strand
ccaggaagaucggaagcau

SEQ ID NO: 1602464 - RNA, 19 nt, Homo sapiens
  misc_RNA (1)...(19): siRNA sense strand
gaccugacgcgaucucugu

SEQ ID NO: 1602465 - RNA, 19 nt, Homo sapiens
  misc_RNA (1)...(19): siRNA sense strand
ugcaggcacugaguaauga

SEQ ID NO: 1602466 - RNA, 19 nt, Homo sapiens
  misc_RNA (1)...(19): siRNA sense strand
caagaagacagcccacucu

SEQ ID NO: 1602467 - RNA, 19 nt, Homo sapiens
  misc_RNA (1)...(19): siRNA sense strand
gcguuacauuuacaccauu

SEQ ID NO: 1602468 - RNA, 19 nt, Homo sapiens
  misc_RNA (1)...(19): siRNA sense strand
agggagugcguuacauuua

SEQ ID NO: 1602469 - RNA, 19 nt, Homo sapiens
  misc_RNA (1)...(19): siRNA sense strand
cagggagugcguuacauuu

SEQ ID NO: 1602470 - RNA, 19 nt, Homo sapiens
  misc_RNA (1)...(19): siRNA sense strand
gcacaggccagggagaaca

SEQ ID NO: 1602471 - RNA, 19 nt, Homo sapiens
  misc_RNA (1)...(19): siRNA sense strand
guaacuugucuccaugauu

SEQ ID NO: 1602472 - RNA, 19 nt, Homo sapiens
  misc_RNA (1)...(19): siRNA sense strand
gguaacuugucuccaugau

SEQ ID NO: 1602473 - RNA, 19 nt, Homo sapiens
  misc_RNA (1)...(19): siRNA sense strand
ucagggagugcguuacauu

SEQ ID NO: 1602474 - RNA, 19 nt, Homo sapiens
  misc_RNA (1)...(19): siRNA sense strand
cacagaagccaucaaacug

SEQ ID NO: 1602475 - RNA, 19 nt, Homo sapiens
  misc_RNA (1)...(19): siRNA sense strand
ccagggagaacaaggacuu

SEQ ID NO: 1602476 - RNA, 19 nt, Homo sapiens
  misc_RNA (1)...(19): siRNA sense strand
ugacgaaagagauaagaca

SEQ ID NO: 1602477 - RNA, 19 nt, Homo sapiens
  misc_RNA (1)...(19): siRNA sense strand
gccgagucaugaagggaaa

SEQ ID NO: 1602478 - RNA, 19 nt, Homo sapiens
  misc_RNA (1)...(19): siRNA sense strand
uggugaugaugauguguuu

SEQ ID NO: 1602479 - RNA, 19 nt, Homo sapiens
  misc_RNA (1)...(19): siRNA sense strand
gaucggaagcauggaugaa

SEQ ID NO: 1602480 - RNA, 19 nt, Homo sapiens
  misc_RNA (1)...(19): siRNA sense strand
cggacucgcuuggugauuc

SEQ ID NO: 1602481 - RNA, 19 nt, Homo sapiens
  misc_RNA (1)...(19): siRNA sense strand
uaagacauccaggaacaug

SEQ ID NO: 1602482 - RNA, 19 nt, Homo sapiens
  misc_RNA (1)...(19): siRNA sense strand
agcaaguccucacugauau

SEQ ID NO: 1602483 - RNA, 19 nt, Homo sapiens
  misc_RNA (1)...(19): siRNA sense strand
uggaguacaccaagaaugu

SEQ ID NO: 1602484 - RNA, 19 nt, Homo sapiens
  misc_RNA (1)...(19): siRNA sense strand
auugauggauccaggaaga

SEQ ID NO: 1602485 - RNA, 19 nt, Homo sapiens
  misc_RNA (1)...(19): siRNA sense strand
ucuaagcagucucccaucu

SEQ ID NO: 1602486 - RNA, 19 nt, Homo sapiens
  misc_RNA (1)...(19): siRNA sense strand
ccucacugauaucacagaa

SEQ ID NO: 1602487 - RNA, 19 nt, Homo sapiens
  misc_RNA (1)...(19): siRNA sense strand
agaagaaagccaagaaggu

SEQ ID NO: 1602488 - RNA, 19 nt, Homo sapiens
  misc_RNA (1)...(19): siRNA sense strand
uguacgcuguguccucuga

SEQ ID NO: 1602489 - RNA, 19 nt, Homo sapiens
  misc_RNA (1)...(19): siRNA sense strand
gaguacaccaagaauguca

SEQ ID NO: 1602490 - RNA, 19 nt, Homo sapiens
  misc_RNA (1)...(19): siRNA sense strand
gcaaguccucacugauauc

SEQ ID NO: 1602491 - RNA, 19 nt, Homo sapiens
  misc_RNA (1)...(19): siRNA sense strand
ccaagagcccugguccuau

SEQ ID NO: 1602492 - RNA, 19 nt, Homo sapiens
  misc_RNA (1)...(19): siRNA sense strand
gggaaagcuaugucuguuc

SEQ ID NO: 1602493 - RNA, 19 nt, Homo sapiens
  misc_RNA (1)...(19): siRNA sense strand
aagccaagaagguacguuu

SEQ ID NO: 1602494 - RNA, 19 nt, Homo sapiens
  misc_RNA (1)...(19): siRNA sense strand
gggauuguguacgcugugu

SEQ ID NO: 1602495 - RNA, 19 nt, Homo sapiens
  misc_RNA (1)...(19): siRNA sense strand
ccuaugcgccgaagcaagu

SEQ ID NO: 1602496 - RNA, 19 nt, Homo sapiens
  misc_RNA (1)...(19): siRNA sense strand
caaguccucacugauauca

SEQ ID NO: 1602497 - RNA, 19 nt, Homo sapiens
  misc_RNA (1)...(19): siRNA sense strand
guacaccaagaaugucaau

SEQ ID NO: 1602498 - RNA, 19 nt, Homo sapiens
  misc_RNA (1)...(19): siRNA sense strand
cguuacauuuacaccauug

SEQ ID NO: 1602499 - RNA, 19 nt, Homo sapiens
  misc_RNA (1)...(19): siRNA sense strand
gaccuguaccugccucugu

SEQ ID NO: 1602500 - RNA, 19 nt, Homo sapiens
  misc_RNA (1)...(19): siRNA sense strand
gacgaaagagauaagacau

SEQ ID NO: 1602501 - RNA, 19 nt, Homo sapiens
  misc_RNA (1)...(19): siRNA sense strand
ggggaaagcuaugucuguu

SEQ ID NO: 1602502 - RNA, 19 nt, Homo sapiens
  misc_RNA (1)...(19): siRNA sense strand
ugcgugugcuucugaacaa

SEQ ID NO: 1602503 - RNA, 19 nt, Homo sapiens
  misc_RNA (1)...(19): siRNA sense strand
gaagcacaaggaccuguac

SEQ ID NO: 1602504 - RNA, 19 nt, Homo sapiens
  misc_RNA (1)...(19): siRNA sense strand
aguccucacugauaucaca

SEQ ID NO: 1602505 - RNA, 19 nt, Homo sapiens
  misc_RNA (1)...(19): siRNA sense strand
acuggucugucaacguaaa

SEQ ID NO: 1602506 - RNA, 19 nt, Homo sapiens
  misc_RNA (1)...(19): siRNA sense strand
ggacucgcuuggugauucc

SEQ ID NO: 1602507 - RNA, 19 nt, Homo sapiens
  misc_RNA (1)...(19): siRNA sense strand
ugauuucuuuggugaugau

SEQ ID NO: 1602508 - RNA, 19 nt, Homo sapiens
  misc_RNA (1)...(19): siRNA sense strand
gcugugcgugugcuucuga

SEQ ID NO: 1602509 - RNA, 19 nt, Homo sapiens
  misc_RNA (1)...(19): siRNA sense strand
uaacuugucuccaugauuu

SEQ ID NO: 1602510 - RNA, 19 nt, Homo sapiens
  misc_RNA (1)...(19): siRNA sense strand
caacuggucugucaacgua

SEQ ID NO: 1602511 - RNA, 19 nt, Homo sapiens
  misc_RNA (1)...(19): siRNA sense strand
gaagaaagccaagaaggua

SEQ ID NO: 1602512 - RNA, 19 nt, Homo sapiens
  misc_RNA (1)...(19): siRNA sense strand
gagcaaguccucacugaua

SEQ ID NO: 1602513 - RNA, 19 nt, Homo sapiens
  misc_RNA (1)...(19): siRNA sense strand
gauaagacauccaggaaca

SEQ ID NO: 1602514 - RNA, 19 nt, Homo sapiens
  misc_RNA (1)...(19): siRNA sense strand
caagagcccugguccuaug

SEQ ID NO: 1602515 - RNA, 19 nt, Homo sapiens
  misc_RNA (1)...(19): siRNA sense strand
gaaaaugaaugccgaguca

SEQ ID NO: 1602516 - RNA, 19 nt, Homo sapiens
  misc_RNA (1)...(19): siRNA sense strand
gagauaagacauccaggaa

SEQ ID NO: 1602517 - RNA, 19 nt, Homo sapiens
  misc_RNA (1)...(19): siRNA sense strand
gcuaugcucaggaugauuu

SEQ ID NO: 1602518 - RNA, 19 nt, Homo sapiens
  misc_RNA (1)...(19): siRNA sense strand
gaaaacagguaacuugucu

SEQ ID NO: 1602519 - RNA, 19 nt, Homo sapiens
  misc_RNA (1)...(19): siRNA sense strand
guacguuucuaccgcaaug

SEQ ID NO: 1602520 - RNA, 19 nt, Homo sapiens
  misc_RNA (1)...(19): siRNA sense strand
gcuuggugauuccauguaa

SEQ ID NO: 1602521 - RNA, 19 nt, Homo sapiens
  misc_RNA (1)...(19): siRNA sense strand
aaacaucugccaauaugaa

SEQ ID NO: 1602522 - RNA, 19 nt, Homo sapiens
  misc_RNA (1)...(19): siRNA sense strand
ggagugcguuacauuuaca

SEQ ID NO: 1602523 - RNA, 19 nt, Homo sapiens
  misc_RNA (1)...(19): siRNA sense strand
gaugaugauguguuuauug

SEQ ID NO: 1602524 - RNA, 19 nt, Homo sapiens
  misc_RNA (1)...(19): siRNA sense strand
ccucagacaacuucuuuaa

SEQ ID NO: 1602525 - RNA, 19 nt, Homo sapiens
  misc_RNA (1)...(19): siRNA sense strand
ggaagcacaaggaccugua

SEQ ID NO: 1602526 - RNA, 19 nt, Homo sapiens
  misc_RNA (1)...(19): siRNA sense strand
gccaagagcccugguccua

SEQ ID NO: 1602527 - RNA, 19 nt, Homo sapiens
  misc_RNA (1)...(19): siRNA sense strand
gggagugcguuacauuuac

SEQ ID NO: 1602528 - RNA, 19 nt, Homo sapiens
  misc_RNA (1)...(19): siRNA sense strand
acagguaacuugucuccau

SEQ ID NO: 1602529 - RNA, 19 nt, Homo sapiens
  misc_RNA (1)...(19): siRNA sense strand
uaucacagaagccaucaaa

SEQ ID NO: 1602530 - RNA, 19 nt, Homo sapiens
  misc_RNA (1)...(19): siRNA sense strand
gaagaucggaagcauggau

SEQ ID NO: 1602531 - RNA, 19 nt, Homo sapiens
  misc_RNA (1)...(19): siRNA sense strand
ucacagaagccaucaaacu

SEQ ID NO: 1602532 - RNA, 19 nt, Homo sapiens
  misc_RNA (1)...(19): siRNA sense strand
uaagcagucucccaucucu

SEQ ID NO: 1602533 - RNA, 19 nt, Homo sapiens
  misc_RNA (1)...(19): siRNA sense strand
caugauuucuuuggugaug

SEQ ID NO: 1602534 - RNA, 19 nt, Homo sapiens
  misc_RNA (1)...(19): siRNA sense strand
ucuacacucuggauggaaa

SEQ ID NO: 1602535 - RNA, 19 nt, Homo sapiens
  misc_RNA (1)...(19): siRNA sense strand
gugaugaugauguguuuau

SEQ ID NO: 1602536 - RNA, 19 nt, Homo sapiens
  misc_RNA (1)...(19): siRNA sense strand
gcacugaguaaugagaaga

SEQ ID NO: 1602537 - RNA, 19 nt, Homo sapiens
  misc_RNA (1)...(19): siRNA sense strand
augcgaggcucccggauga

SEQ ID NO: 1602538 - RNA, 19 nt, Homo sapiens
  misc_RNA (1)...(19): siRNA sense strand
aaucccaacuggucuguca

SEQ ID NO: 1602539 - RNA, 19 nt, Homo sapiens
  misc_RNA (1)...(19): siRNA sense strand
ccaggaagaucggaagcau

SEQ ID NO: 1602540 - RNA, 19 nt, Homo sapiens
  misc_RNA (1)...(19): siRNA sense strand
gaccugacgcgaucucugu

SEQ ID NO: 1602541 - RNA, 19 nt, Homo sapiens
  misc_RNA (1)...(19): siRNA sense strand
ugcaggcacugaguaauga

SEQ ID NO: 1602542 - RNA, 19 nt, Homo sapiens
  misc_RNA (1)...(19): siRNA sense strand
caagaagacagcccacucu

SEQ ID NO: 1602543 - RNA, 19 nt, Homo sapiens
  misc_RNA (1)...(19): siRNA sense strand
gcguuacauuuacaccauu

SEQ ID NO: 1602544 - RNA, 19 nt, Homo sapiens
  misc_RNA (1)...(19): siRNA sense strand
agggagugcguuacauuua

SEQ ID NO: 1602545 - RNA, 19 nt, Homo sapiens
  misc_RNA (1)...(19): siRNA sense strand
cagggagugcguuacauuu

SEQ ID NO: 1602546 - RNA, 19 nt, Homo sapiens
  misc_RNA (1)...(19): siRNA sense strand
gcacaggccagggagaaca

SEQ ID NO: 1602547 - RNA, 19 nt, Homo sapiens
  misc_RNA (1)...(19): siRNA sense strand
guaacuugucuccaugauu

SEQ ID NO: 1602548 - RNA, 19 nt, Homo sapiens
  misc_RNA (1)...(19): siRNA sense strand
gguaacuugucuccaugau

SEQ ID NO: 1602549 - RNA, 19 nt, Homo sapiens
  misc_RNA (1)...(19): siRNA sense strand
ucagggagugcguuacauu

SEQ ID NO: 1602550 - RNA, 19 nt, Homo sapiens
  misc_RNA (1)...(19): siRNA sense strand
cacagaagccaucaaacug

SEQ ID NO: 1602551 - RNA, 19 nt, Homo sapiens
  misc_RNA (1)...(19): siRNA sense strand
ccagggagaacaaggacuu

SEQ ID NO: 1602552 - RNA, 19 nt, Homo sapiens
  misc_RNA (1)...(19): siRNA sense strand
ugacgaaagagauaagaca

SEQ ID NO: 1602553 - RNA, 19 nt, Homo sapiens
  misc_RNA (1)...(19): siRNA sense strand
gccgagucaugaagggaaa

SEQ ID NO: 1602554 - RNA, 19 nt, Homo sapiens
  misc_RNA (1)...(19): siRNA sense strand
uggugaugaugauguguuu

SEQ ID NO: 1602555 - RNA, 19 nt, Homo sapiens
  misc_RNA (1)...(19): siRNA sense strand
gaucggaagcauggaugaa

SEQ ID NO: 1602556 - RNA, 19 nt, Homo sapiens
  misc_RNA (1)...(19): siRNA sense strand
cggacucgcuuggugauuc

SEQ ID NO: 1602557 - RNA, 19 nt, Homo sapiens
  misc_RNA (1)...(19): siRNA sense strand
uaagacauccaggaacaug

SEQ ID NO: 1602558 - RNA, 19 nt, Homo sapiens
  misc_RNA (1)...(19): siRNA sense strand
agcaaguccucacugauau

SEQ ID NO: 1602559 - RNA, 19 nt, Homo sapiens
  misc_RNA (1)...(19): siRNA sense strand
uggaguacaccaagaaugu

SEQ ID NO: 1602560 - RNA, 19 nt, Homo sapiens
  misc_RNA (1)...(19): siRNA sense strand
auugauggauccaggaaga

SEQ ID NO: 1602561 - RNA, 19 nt, Homo sapiens
  misc_RNA (1)...(19): siRNA sense strand
ucuaagcagucucccaucu

SEQ ID NO: 1602562 - RNA, 19 nt, Homo sapiens
  misc_RNA (1)...(19): siRNA sense strand
ccucacugauaucacagaa

SEQ ID NO: 1602563 - RNA, 19 nt, Homo sapiens
  misc_RNA (1)...(19): siRNA sense strand
agaagaaagccaagaaggu

SEQ ID NO: 1602564 - RNA, 19 nt, Homo sapiens
  misc_RNA (1)...(19): siRNA sense strand
uguacgcuguguccucuga

SEQ ID NO: 1602565 - RNA, 19 nt, Homo sapiens
  misc_RNA (1)...(19): siRNA sense strand
gaguacaccaagaauguca

SEQ ID NO: 1602566 - RNA, 19 nt, Homo sapiens
  misc_RNA (1)...(19): siRNA sense strand
gcaaguccucacugauauc

SEQ ID NO: 1602567 - RNA, 19 nt, Homo sapiens
  misc_RNA (1)...(19): siRNA sense strand
ccaagagcccugguccuau

SEQ ID NO: 1602568 - RNA, 19 nt, Homo sapiens
  misc_RNA (1)...(19): siRNA sense strand
gggaaagcuaugucuguuc

SEQ ID NO: 1602569 - RNA, 19 nt, Homo sapiens
  misc_RNA (1)...(19): siRNA sense strand
aagccaagaagguacguuu

SEQ ID NO: 1602570 - RNA, 19 nt, Homo sapiens
  misc_RNA (1)...(19): siRNA sense strand
gggauuguguacgcugugu

SEQ ID NO: 1602571 - RNA, 19 nt, Homo sapiens
  misc_RNA (1)...(19): siRNA sense strand
ccuaugcgccgaagcaagu

SEQ ID NO: 1602572 - RNA, 19 nt, Homo sapiens
  misc_RNA (1)...(19): siRNA sense strand
caaguccucacugauauca

SEQ ID NO: 1602573 - RNA, 19 nt, Homo sapiens
  misc_RNA (1)...(19): siRNA sense strand
guacaccaagaaugucaau

SEQ ID NO: 1602574 - RNA, 19 nt, Homo sapiens
  misc_RNA (1)...(19): siRNA sense strand
cguuacauuuacaccauug

SEQ ID NO: 1602575 - RNA, 19 nt, Homo sapiens
  misc_RNA (1)...(19): siRNA sense strand
gaccuguaccugccucugu

SEQ ID NO: 1602576 - RNA, 19 nt, Homo sapiens
  misc_RNA (1)...(19): siRNA sense strand
gacgaaagagauaagacau

SEQ ID NO: 1602577 - RNA, 19 nt, Homo sapiens
  misc_RNA (1)...(19): siRNA sense strand
ggggaaagcuaugucuguu

SEQ ID NO: 1602578 - RNA, 19 nt, Homo sapiens
  misc_RNA (1)...(19): siRNA sense strand
ugcgugugcuucugaacaa

SEQ ID NO: 1602579 - RNA, 19 nt, Homo sapiens
  misc_RNA (1)...(19): siRNA sense strand
gaagcacaaggaccuguac

SEQ ID NO: 1602580 - RNA, 19 nt, Homo sapiens
  misc_RNA (1)...(19): siRNA sense strand
aguccucacugauaucaca

SEQ ID NO: 1602581 - RNA, 19 nt, Homo sapiens
  misc_RNA (1)...(19): siRNA sense strand
acuggucugucaacguaaa

SEQ ID NO: 1602582 - RNA, 19 nt, Homo sapiens
  misc_RNA (1)...(19): siRNA sense strand
ggacucgcuuggugauucc

SEQ ID NO: 1602583 - RNA, 19 nt, Homo sapiens
  misc_RNA (1)...(19): siRNA sense strand
ugauuucuuuggugaugau

SEQ ID NO: 1602584 - RNA, 19 nt, Homo sapiens
  misc_RNA (1)...(19): siRNA sense strand
gcugugcgugugcuucuga

SEQ ID NO: 1602585 - RNA, 19 nt, Homo sapiens
  misc_RNA (1)...(19): siRNA sense strand
ucgaguugcuuaugaaauu

SEQ ID NO: 1602586 - RNA, 19 nt, Homo sapiens
  misc_RNA (1)...(19): siRNA sense strand
gaaauuaugcaaacacuac

SEQ ID NO: 1602587 - RNA, 19 nt, Homo sapiens
  misc_RNA (1)...(19): siRNA sense strand
cuaaaggugucaacaggaa

SEQ ID NO: 1602588 - RNA, 19 nt, Homo sapiens
  misc_RNA (1)...(19): siRNA sense strand
cacaaucgauacacagaaa

SEQ ID NO: 1602589 - RNA, 19 nt, Homo sapiens
  misc_RNA (1)...(19): siRNA sense strand
cuacaaaguucgagagaag

SEQ ID NO: 1602590 - RNA, 19 nt, Homo sapiens
  misc_RNA (1)...(19): siRNA sense strand
cugcaaacuuccauucuuu

SEQ ID NO: 1602591 - RNA, 19 nt, Homo sapiens
  misc_RNA (1)...(19): siRNA sense strand
cgaguugcuuaugaaauua

SEQ ID NO: 1602592 - RNA, 19 nt, Homo sapiens
  misc_RNA (1)...(19): siRNA sense strand
cagaugaaauucccaugga

SEQ ID NO: 1602593 - RNA, 19 nt, Homo sapiens
  misc_RNA (1)...(19): siRNA sense strand
cauggaaccuggagauauc

SEQ ID NO: 1602594 - RNA, 19 nt, Homo sapiens
  misc_RNA (1)...(19): siRNA sense strand
gaaccuggagauaucauug

SEQ ID NO: 1602595 - RNA, 19 nt, Homo sapiens
  misc_RNA (1)...(19): siRNA sense strand
gggaaggacgggccuauau

SEQ ID NO: 1602596 - RNA, 19 nt, Homo sapiens
  misc_RNA (1)...(19): siRNA sense strand
gauagaaacggucaaguac

SEQ ID NO: 1602597 - RNA, 19 nt, Homo sapiens
  misc_RNA (1)...(19): siRNA sense strand
agauagaaacggucaagua

SEQ ID NO: 1602598 - RNA, 19 nt, Homo sapiens
  misc_RNA (1)...(19): siRNA sense strand
cagaaugcccacaaucaaa

SEQ ID NO: 1602599 - RNA, 19 nt, Homo sapiens
  misc_RNA (1)...(19): siRNA sense strand
ggauggcuauucuaaaggu

SEQ ID NO: 1602600 - RNA, 19 nt, Homo sapiens
  misc_RNA (1)...(19): siRNA sense strand
gcacaaucgauacacagaa

SEQ ID NO: 1602601 - RNA, 19 nt, Homo sapiens
  misc_RNA (1)...(19): siRNA sense strand
ucccaggucugucgaguug

SEQ ID NO: 1602602 - RNA, 19 nt, Homo sapiens
  misc_RNA (1)...(19): siRNA sense strand
gcaaacuuccauucuuuag

SEQ ID NO: 1602603 - RNA, 19 nt, Homo sapiens
  misc_RNA (1)...(19): siRNA sense strand
gaaugcccacaaucaaauu

SEQ ID NO: 1602604 - RNA, 19 nt, Homo sapiens
  misc_RNA (1)...(19): siRNA sense strand
ggaaggacgggccuauauc

SEQ ID NO: 1602605 - RNA, 19 nt, Homo sapiens
  misc_RNA (1)...(19): siRNA sense strand
ugggauggcuauucuaaag

SEQ ID NO: 1602606 - RNA, 19 nt, Homo sapiens
  misc_RNA (1)...(19): siRNA sense strand
cagcuggacugcacaaucg

SEQ ID NO: 1602607 - RNA, 19 nt, Homo sapiens
  misc_RNA (1)...(19): siRNA sense strand
gaagauagaaacggucaag

SEQ ID NO: 1602608 - RNA, 19 nt, Homo sapiens
  misc_RNA (1)...(19): siRNA sense strand
cuauaucccuccuacaaag

SEQ ID NO: 1602609 - RNA, 19 nt, Homo sapiens
  misc_RNA (1)...(19): siRNA sense strand
ggauauacauuuucucucu

SEQ ID NO: 1602610 - RNA, 19 nt, Homo sapiens
  misc_RNA (1)...(19): siRNA sense strand
ccagaaugcccacaaucaa

SEQ ID NO: 1602611 - RNA, 19 nt, Homo sapiens
  misc_RNA (1)...(19): siRNA sense strand
gccagaaugcccacaauca

SEQ ID NO: 1602612 - RNA, 19 nt, Homo sapiens
  misc_RNA (1)...(19): siRNA sense strand
uauuuaggccuguaaguga

SEQ ID NO: 1602613 - RNA, 19 nt, Homo sapiens
  misc_RNA (1)...(19): siRNA sense strand
ggacugcacaaucgauaca

SEQ ID NO: 1602614 - RNA, 19 nt, Homo sapiens
  misc_RNA (1)...(19): siRNA sense strand
gccuauaucccuccuacaa

SEQ ID NO: 1602615 - RNA, 19 nt, Homo sapiens
  misc_RNA (1)...(19): siRNA sense strand
caaacuuccauucuuuaga

SEQ ID NO: 1602616 - RNA, 19 nt, Homo sapiens
  misc_RNA (1)...(19): siRNA sense strand
caggcagacuuccuagugu

SEQ ID NO: 1602617 - RNA, 19 nt, Homo sapiens
  misc_RNA (1)...(19): siRNA sense strand
caaaguucgagagaagaua

SEQ ID NO: 1602618 - RNA, 19 nt, Homo sapiens
  misc_RNA (1)...(19): siRNA sense strand
ugaugccucugcaaacuuc

SEQ ID NO: 1602619 - RNA, 19 nt, Homo sapiens
  misc_RNA (1)...(19): siRNA sense strand
uccugaggcugagaaauaa

SEQ ID NO: 1602620 - RNA, 19 nt, Homo sapiens
  misc_RNA (1)...(19): siRNA sense strand
ucauugguguggcuggaaa

SEQ ID NO: 1602621 - RNA, 19 nt, Homo sapiens
  misc_RNA (1)...(19): siRNA sense strand
ucugcaaacuuccauucuu

SEQ ID NO: 1602622 - RNA, 19 nt, Homo sapiens
  misc_RNA (1)...(19): siRNA sense strand
gcagacuuccuagugugua

SEQ ID NO: 1602623 - RNA, 19 nt, Homo sapiens
  misc_RNA (1)...(19): siRNA sense strand
guauuuaggccuguaagug

SEQ ID NO: 1602624 - RNA, 19 nt, Homo sapiens
  misc_RNA (1)...(19): siRNA sense strand
ccgaacugcagaugaaauu

SEQ ID NO: 1602625 - RNA, 19 nt, Homo sapiens
  misc_RNA (1)...(19): siRNA sense strand
ucugucgaguugcuuauga

SEQ ID NO: 1602626 - RNA, 19 nt, Homo sapiens
  misc_RNA (1)...(19): siRNA sense strand
auccugaggcugagaaaua

SEQ ID NO: 1602627 - RNA, 19 nt, Homo sapiens
  misc_RNA (1)...(19): siRNA sense strand
ucauugggauggcuauucu

SEQ ID NO: 1602628 - RNA, 19 nt, Homo sapiens
  misc_RNA (1)...(19): siRNA sense strand
ccauggaaccuggagauau

SEQ ID NO: 1602629 - RNA, 19 nt, Homo sapiens
  misc_RNA (1)...(19): siRNA sense strand
ggaaccuggagauaucauu

SEQ ID NO: 1602630 - RNA, 19 nt, Homo sapiens
  misc_RNA (1)...(19): siRNA sense strand
uaagugagacaugcacaga

SEQ ID NO: 1602631 - RNA, 19 nt, Homo sapiens
  misc_RNA (1)...(19): siRNA sense strand
gcaaacacuacauccugau

SEQ ID NO: 1602632 - RNA, 19 nt, Homo sapiens
  misc_RNA (1)...(19): siRNA sense strand
ccuacaaaguucgagagaa

SEQ ID NO: 1602633 - RNA, 19 nt, Homo sapiens
  misc_RNA (1)...(19): siRNA sense strand
ccuauaucccuccuacaaa

SEQ ID NO: 1602634 - RNA, 19 nt, Homo sapiens
  misc_RNA (1)...(19): siRNA sense strand
gaaggacgggccuauaucc

SEQ ID NO: 1602635 - RNA, 19 nt, Homo sapiens
  misc_RNA (1)...(19): siRNA sense strand
gaacugcagaugaaauucc

SEQ ID NO: 1602636 - RNA, 19 nt, Homo sapiens
  misc_RNA (1)...(19): siRNA sense strand
ucaggcagacuuccuagug

SEQ ID NO: 1602637 - RNA, 19 nt, Homo sapiens
  misc_RNA (1)...(19): siRNA sense strand
agaaugcccacaaucaaau

SEQ ID NO: 1602638 - RNA, 19 nt, Homo sapiens
  misc_RNA (1)...(19): siRNA sense strand
ugcaaacuuccauucuuua

SEQ ID NO: 1602639 - RNA, 19 nt, Homo sapiens
  misc_RNA (1)...(19): siRNA sense strand
agugagacaugcacagaca

SEQ ID NO: 1602640 - RNA, 19 nt, Homo sapiens
  misc_RNA (1)...(19): siRNA sense strand
uaaaggugucaacaggaaa

SEQ ID NO: 1602641 - RNA, 19 nt, Homo sapiens
  misc_RNA (1)...(19): siRNA sense strand
aacaggaaauugggaagga

SEQ ID NO: 1602642 - RNA, 19 nt, Homo sapiens
  misc_RNA (1)...(19): siRNA sense strand
agugauaacucuauuuccu

SEQ ID NO: 1602643 - RNA, 19 nt, Homo sapiens
  misc_RNA (1)...(19): siRNA sense strand
gacaugcacagacagaucu

SEQ ID NO: 1602644 - RNA, 19 nt, Homo sapiens
  misc_RNA (1)...(19): siRNA sense strand
ugagacaugcacagacaga

SEQ ID NO: 1602645 - RNA, 19 nt, Homo sapiens
  misc_RNA (1)...(19): siRNA sense strand
ucgaguugcuuaugaaauu

SEQ ID NO: 1602646 - RNA, 19 nt, Homo sapiens
  misc_RNA (1)...(19): siRNA sense strand
gaaauuaugcaaacacuac

SEQ ID NO: 1602647 - RNA, 19 nt, Homo sapiens
  misc_RNA (1)...(19): siRNA sense strand
cuaaaggugucaacaggaa

SEQ ID NO: 1602648 - RNA, 19 nt, Homo sapiens
  misc_RNA (1)...(19): siRNA sense strand
cacaaucgauacacagaaa

SEQ ID NO: 1602649 - RNA, 19 nt, Homo sapiens
  misc_RNA (1)...(19): siRNA sense strand
cuacaaaguucgagagaag

SEQ ID NO: 1602650 - RNA, 19 nt, Homo sapiens
  misc_RNA (1)...(19): siRNA sense strand
cugcaaacuuccauucuuu

SEQ ID NO: 1602651 - RNA, 19 nt, Homo sapiens
  misc_RNA (1)...(19): siRNA sense strand
cgaguugcuuaugaaauua

SEQ ID NO: 1602652 - RNA, 19 nt, Homo sapiens
  misc_RNA (1)...(19): siRNA sense strand
cagaugaaauucccaugga

SEQ ID NO: 1602653 - RNA, 19 nt, Homo sapiens
  misc_RNA (1)...(19): siRNA sense strand
cauggaaccuggagauauc

SEQ ID NO: 1602654 - RNA, 19 nt, Homo sapiens
  misc_RNA (1)...(19): siRNA sense strand
gaaccuggagauaucauug

SEQ ID NO: 1602655 - RNA, 19 nt, Homo sapiens
  misc_RNA (1)...(19): siRNA sense strand
gggaaggacgggccuauau

SEQ ID NO: 1602656 - RNA, 19 nt, Homo sapiens
  misc_RNA (1)...(19): siRNA sense strand
gauagaaacggucaaguac

SEQ ID NO: 1602657 - RNA, 19 nt, Homo sapiens
  misc_RNA (1)...(19): siRNA sense strand
agauagaaacggucaagua

SEQ ID NO: 1602658 - RNA, 19 nt, Homo sapiens
  misc_RNA (1)...(19): siRNA sense strand
cagaaugcccacaaucaaa

SEQ ID NO: 1602659 - RNA, 19 nt, Homo sapiens
  misc_RNA (1)...(19): siRNA sense strand
ggauggcuauucuaaaggu

SEQ ID NO: 1602660 - RNA, 19 nt, Homo sapiens
  misc_RNA (1)...(19): siRNA sense strand
gcacaaucgauacacagaa

SEQ ID NO: 1602661 - RNA, 19 nt, Homo sapiens
  misc_RNA (1)...(19): siRNA sense strand
ucccaggucugucgaguug

SEQ ID NO: 1602662 - RNA, 19 nt, Homo sapiens
  misc_RNA (1)...(19): siRNA sense strand
gcaaacuuccauucuuuag

SEQ ID NO: 1602663 - RNA, 19 nt, Homo sapiens
  misc_RNA (1)...(19): siRNA sense strand
gaaugcccacaaucaaauu

SEQ ID NO: 1602664 - RNA, 19 nt, Homo sapiens
  misc_RNA (1)...(19): siRNA sense strand
ggaaggacgggccuauauc

SEQ ID NO: 1602665 - RNA, 19 nt, Homo sapiens
  misc_RNA (1)...(19): siRNA sense strand
ugggauggcuauucuaaag

SEQ ID NO: 1602666 - RNA, 19 nt, Homo sapiens
  misc_RNA (1)...(19): siRNA sense strand
cagcuggacugcacaaucg

SEQ ID NO: 1602667 - RNA, 19 nt, Homo sapiens
  misc_RNA (1)...(19): siRNA sense strand
gaagauagaaacggucaag

SEQ ID NO: 1602668 - RNA, 19 nt, Homo sapiens
  misc_RNA (1)...(19): siRNA sense strand
cuauaucccuccuacaaag

SEQ ID NO: 1602669 - RNA, 19 nt, Homo sapiens
  misc_RNA (1)...(19): siRNA sense strand
ggauauacauuuucucucu

SEQ ID NO: 1602670 - RNA, 19 nt, Homo sapiens
  misc_RNA (1)...(19): siRNA sense strand
ccagaaugcccacaaucaa

SEQ ID NO: 1602671 - RNA, 19 nt, Homo sapiens
  misc_RNA (1)...(19): siRNA sense strand
gccagaaugcccacaauca

SEQ ID NO: 1602672 - RNA, 19 nt, Homo sapiens
  misc_RNA (1)...(19): siRNA sense strand
uauuuaggccuguaaguga

SEQ ID NO: 1602673 - RNA, 19 nt, Homo sapiens
  misc_RNA (1)...(19): siRNA sense strand
ggacugcacaaucgauaca

SEQ ID NO: 1602674 - RNA, 19 nt, Homo sapiens
  misc_RNA (1)...(19): siRNA sense strand
gccuauaucccuccuacaa

SEQ ID NO: 1602675 - RNA, 19 nt, Homo sapiens
  misc_RNA (1)...(19): siRNA sense strand
caaacuuccauucuuuaga

SEQ ID NO: 1602676 - RNA, 19 nt, Homo sapiens
  misc_RNA (1)...(19): siRNA sense strand
caggcagacuuccuagugu

SEQ ID NO: 1602677 - RNA, 19 nt, Homo sapiens
  misc_RNA (1)...(19): siRNA sense strand
caaaguucgagagaagaua

SEQ ID NO: 1602678 - RNA, 19 nt, Homo sapiens
  misc_RNA (1)...(19): siRNA sense strand
ugaugccucugcaaacuuc

SEQ ID NO: 1602679 - RNA, 19 nt, Homo sapiens
  misc_RNA (1)...(19): siRNA sense strand
uccugaggcugagaaauaa

SEQ ID NO: 1602680 - RNA, 19 nt, Homo sapiens
  misc_RNA (1)...(19): siRNA sense strand
ucauugguguggcuggaaa

SEQ ID NO: 1602681 - RNA, 19 nt, Homo sapiens
  misc_RNA (1)...(19): siRNA sense strand
ucugcaaacuuccauucuu

SEQ ID NO: 1602682 - RNA, 19 nt, Homo sapiens
  misc_RNA (1)...(19): siRNA sense strand
gcagacuuccuagugugua

SEQ ID NO: 1602683 - RNA, 19 nt, Homo sapiens
  misc_RNA (1)...(19): siRNA sense strand
guauuuaggccuguaagug

SEQ ID NO: 1602684 - RNA, 19 nt, Homo sapiens
  misc_RNA (1)...(19): siRNA sense strand
ccgaacugcagaugaaauu

SEQ ID NO: 1602685 - RNA, 19 nt, Homo sapiens
  misc_RNA (1)...(19): siRNA sense strand
ucugucgaguugcuuauga

SEQ ID NO: 1602686 - RNA, 19 nt, Homo sapiens
  misc_RNA (1)...(19): siRNA sense strand
auccugaggcugagaaaua

SEQ ID NO: 1602687 - RNA, 19 nt, Homo sapiens
  misc_RNA (1)...(19): siRNA sense strand
ucauugggauggcuauucu

SEQ ID NO: 1602688 - RNA, 19 nt, Homo sapiens
  misc_RNA (1)...(19): siRNA sense strand
ccauggaaccuggagauau

SEQ ID NO: 1602689 - RNA, 19 nt, Homo sapiens
  misc_RNA (1)...(19): siRNA sense strand
ggaaccuggagauaucauu

SEQ ID NO: 1602690 - RNA, 19 nt, Homo sapiens
  misc_RNA (1)...(19): siRNA sense strand
uaagugagacaugcacaga

SEQ ID NO: 1602691 - RNA, 19 nt, Homo sapiens
  misc_RNA (1)...(19): siRNA sense strand
gcaaacacuacauccugau

SEQ ID NO: 1602692 - RNA, 19 nt, Homo sapiens
  misc_RNA (1)...(19): siRNA sense strand
ccuacaaaguucgagagaa

SEQ ID NO: 1602693 - RNA, 19 nt, Homo sapiens
  misc_RNA (1)...(19): siRNA sense strand
ccuauaucccuccuacaaa

SEQ ID NO: 1602694 - RNA, 19 nt, Homo sapiens
  misc_RNA (1)...(19): siRNA sense strand
gaaggacgggccuauaucc

SEQ ID NO: 1602695 - RNA, 19 nt, Homo sapiens
  misc_RNA (1)...(19): siRNA sense strand
gaacugcagaugaaauucc

SEQ ID NO: 1602696 - RNA, 19 nt, Homo sapiens
  misc_RNA (1)...(19): siRNA sense strand
ucaggcagacuuccuagug

SEQ ID NO: 1602697 - RNA, 19 nt, Homo sapiens
  misc_RNA (1)...(19): siRNA sense strand
agaaugcccacaaucaaau

SEQ ID NO: 1602698 - RNA, 19 nt, Homo sapiens
  misc_RNA (1)...(19): siRNA sense strand
ugcaaacuuccauucuuua

SEQ ID NO: 1602699 - RNA, 19 nt, Homo sapiens
  misc_RNA (1)...(19): siRNA sense strand
agugagacaugcacagaca

SEQ ID NO: 1602700 - RNA, 19 nt, Homo sapiens
  misc_RNA (1)...(19): siRNA sense strand
uaaaggugucaacaggaaa

SEQ ID NO: 1602701 - RNA, 19 nt, Homo sapiens
  misc_RNA (1)...(19): siRNA sense strand
aacaggaaauugggaagga

SEQ ID NO: 1602702 - RNA, 19 nt, Homo sapiens
  misc_RNA (1)...(19): siRNA sense strand
agugauaacucuauuuccu

SEQ ID NO: 1602703 - RNA, 19 nt, Homo sapiens
  misc_RNA (1)...(19): siRNA sense strand
gacaugcacagacagaucu

SEQ ID NO: 1602704 - RNA, 19 nt, Homo sapiens
  misc_RNA (1)...(19): siRNA sense strand
ugagacaugcacagacaga

SEQ ID NO: 1602705 - RNA, 19 nt, Homo sapiens
  misc_RNA (1)...(19): siRNA sense strand
ucgaguugcuuaugaaauu

SEQ ID NO: 1602706 - RNA, 19 nt, Homo sapiens
  misc_RNA (1)...(19): siRNA sense strand
gaaauuaugcaaacacuac

SEQ ID NO: 1602707 - RNA, 19 nt, Homo sapiens
  misc_RNA (1)...(19): siRNA sense strand
cuaaaggugucaacaggaa

SEQ ID NO: 1602708 - RNA, 19 nt, Homo sapiens
  misc_RNA (1)...(19): siRNA sense strand
cacaaucgauacacagaaa

SEQ ID NO: 1602709 - RNA, 19 nt, Homo sapiens
  misc_RNA (1)...(19): siRNA sense strand
cuacaaaguucgagagaag

SEQ ID NO: 1602710 - RNA, 19 nt, Homo sapiens
  misc_RNA (1)...(19): siRNA sense strand
cugcaaacuuccauucuuu

SEQ ID NO: 1602711 - RNA, 19 nt, Homo sapiens
  misc_RNA (1)...(19): siRNA sense strand
cgaguugcuuaugaaauua

SEQ ID NO: 1602712 - RNA, 19 nt, Homo sapiens
  misc_RNA (1)...(19): siRNA sense strand
cagaugaaauucccaugga

SEQ ID NO: 1602713 - RNA, 19 nt, Homo sapiens
  misc_RNA (1)...(19): siRNA sense strand
cauggaaccuggagauauc

SEQ ID NO: 1602714 - RNA, 19 nt, Homo sapiens
  misc_RNA (1)...(19): siRNA sense strand
gaaccuggagauaucauug

SEQ ID NO: 1602715 - RNA, 19 nt, Homo sapiens
  misc_RNA (1)...(19): siRNA sense strand
gggaaggacgggccuauau

SEQ ID NO: 1602716 - RNA, 19 nt, Homo sapiens
  misc_RNA (1)...(19): siRNA sense strand
gauagaaacggucaaguac

SEQ ID NO: 1602717 - RNA, 19 nt, Homo sapiens
  misc_RNA (1)...(19): siRNA sense strand
agauagaaacggucaagua

SEQ ID NO: 1602718 - RNA, 19 nt, Homo sapiens
  misc_RNA (1)...(19): siRNA sense strand
cagaaugcccacaaucaaa

SEQ ID NO: 1602719 - RNA, 19 nt, Homo sapiens
  misc_RNA (1)...(19): siRNA sense strand
ggauggcuauucuaaaggu

SEQ ID NO: 1602720 - RNA, 19 nt, Homo sapiens
  misc_RNA (1)...(19): siRNA sense strand
gcacaaucgauacacagaa

SEQ ID NO: 1602721 - RNA, 19 nt, Homo sapiens
  misc_RNA (1)...(19): siRNA sense strand
ucccaggucugucgaguug

SEQ ID NO: 1602722 - RNA, 19 nt, Homo sapiens
  misc_RNA (1)...(19): siRNA sense strand
gcaaacuuccauucuuuag

SEQ ID NO: 1602723 - RNA, 19 nt, Homo sapiens
  misc_RNA (1)...(19): siRNA sense strand
gaaugcccacaaucaaauu

SEQ ID NO: 1602724 - RNA, 19 nt, Homo sapiens
  misc_RNA (1)...(19): siRNA sense strand
ggaaggacgggccuauauc

SEQ ID NO: 1602725 - RNA, 19 nt, Homo sapiens
  misc_RNA (1)...(19): siRNA sense strand
ugggauggcuauucuaaag

SEQ ID NO: 1602726 - RNA, 19 nt, Homo sapiens
  misc_RNA (1)...(19): siRNA sense strand
cagcuggacugcacaaucg

SEQ ID NO: 1602727 - RNA, 19 nt, Homo sapiens
  misc_RNA (1)...(19): siRNA sense strand
gaagauagaaacggucaag

SEQ ID NO: 1602728 - RNA, 19 nt, Homo sapiens
  misc_RNA (1)...(19): siRNA sense strand
cuauaucccuccuacaaag

SEQ ID NO: 1602729 - RNA, 19 nt, Homo sapiens
  misc_RNA (1)...(19): siRNA sense strand
ggauauacauuuucucucu

SEQ ID NO: 1602730 - RNA, 19 nt, Homo sapiens
  misc_RNA (1)...(19): siRNA sense strand
ccagaaugcccacaaucaa

SEQ ID NO: 1602731 - RNA, 19 nt, Homo sapiens
  misc_RNA (1)...(19): siRNA sense strand
gccagaaugcccacaauca

SEQ ID NO: 1602732 - RNA, 19 nt, Homo sapiens
  misc_RNA (1)...(19): siRNA sense strand
uauuuaggccuguaaguga

SEQ ID NO: 1602733 - RNA, 19 nt, Homo sapiens
  misc_RNA (1)...(19): siRNA sense strand
ggacugcacaaucgauaca

SEQ ID NO: 1602734 - RNA, 19 nt, Homo sapiens
  misc_RNA (1)...(19): siRNA sense strand
gccuauaucccuccuacaa

SEQ ID NO: 1602735 - RNA, 19 nt, Homo sapiens
  misc_RNA (1)...(19): siRNA sense strand
caaacuuccauucuuuaga

SEQ ID NO: 1602736 - RNA, 19 nt, Homo sapiens
  misc_RNA (1)...(19): siRNA sense strand
caggcagacuuccuagugu

SEQ ID NO: 1602737 - RNA, 19 nt, Homo sapiens
  misc_RNA (1)...(19): siRNA sense strand
caaaguucgagagaagaua

SEQ ID NO: 1602738 - RNA, 19 nt, Homo sapiens
  misc_RNA (1)...(19): siRNA sense strand
ugaugccucugcaaacuuc

SEQ ID NO: 1602739 - RNA, 19 nt, Homo sapiens
  misc_RNA (1)...(19): siRNA sense strand
uccugaggcugagaaauaa

SEQ ID NO: 1602740 - RNA, 19 nt, Homo sapiens
  misc_RNA (1)...(19): siRNA sense strand
ucauugguguggcuggaaa

SEQ ID NO: 1602741 - RNA, 19 nt, Homo sapiens
  misc_RNA (1)...(19): siRNA sense strand
ucugcaaacuuccauucuu

SEQ ID NO: 1602742 - RNA, 19 nt, Homo sapiens
  misc_RNA (1)...(19): siRNA sense strand
gcagacuuccuagugugua

SEQ ID NO: 1602743 - RNA, 19 nt, Homo sapiens
  misc_RNA (1)...(19): siRNA sense strand
guauuuaggccuguaagug

SEQ ID NO: 1602744 - RNA, 19 nt, Homo sapiens
  misc_RNA (1)...(19): siRNA sense strand
ccgaacugcagaugaaauu

SEQ ID NO: 1602745 - RNA, 19 nt, Homo sapiens
  misc_RNA (1)...(19): siRNA sense strand
ucugucgaguugcuuauga

SEQ ID NO: 1602746 - RNA, 19 nt, Homo sapiens
  misc_RNA (1)...(19): siRNA sense strand
auccugaggcugagaaaua

SEQ ID NO: 1602747 - RNA, 19 nt, Homo sapiens
  misc_RNA (1)...(19): siRNA sense strand
ucauugggauggcuauucu

SEQ ID NO: 1602748 - RNA, 19 nt, Homo sapiens
  misc_RNA (1)...(19): siRNA sense strand
ccauggaaccuggagauau

SEQ ID NO: 1602749 - RNA, 19 nt, Homo sapiens
  misc_RNA (1)...(19): siRNA sense strand
ggaaccuggagauaucauu

SEQ ID NO: 1602750 - RNA, 19 nt, Homo sapiens
  misc_RNA (1)...(19): siRNA sense strand
uaagugagacaugcacaga

SEQ ID NO: 1602751 - RNA, 19 nt, Homo sapiens
  misc_RNA (1)...(19): siRNA sense strand
gcaaacacuacauccugau

SEQ ID NO: 1602752 - RNA, 19 nt, Homo sapiens
  misc_RNA (1)...(19): siRNA sense strand
ccuacaaaguucgagagaa

SEQ ID NO: 1602753 - RNA, 19 nt, Homo sapiens
  misc_RNA (1)...(19): siRNA sense strand
ccuauaucccuccuacaaa

SEQ ID NO: 1602754 - RNA, 19 nt, Homo sapiens
  misc_RNA (1)...(19): siRNA sense strand
gaaggacgggccuauaucc

SEQ ID NO: 1602755 - RNA, 19 nt, Homo sapiens
  misc_RNA (1)...(19): siRNA sense strand
gaacugcagaugaaauucc

SEQ ID NO: 1602756 - RNA, 19 nt, Homo sapiens
  misc_RNA (1)...(19): siRNA sense strand
ucaggcagacuuccuagug

SEQ ID NO: 1602757 - RNA, 19 nt, Homo sapiens
  misc_RNA (1)...(19): siRNA sense strand
agaaugcccacaaucaaau

SEQ ID NO: 1602758 - RNA, 19 nt, Homo sapiens
  misc_RNA (1)...(19): siRNA sense strand
ugcaaacuuccauucuuua

SEQ ID NO: 1602759 - RNA, 19 nt, Homo sapiens
  misc_RNA (1)...(19): siRNA sense strand
agugagacaugcacagaca

SEQ ID NO: 1602760 - RNA, 19 nt, Homo sapiens
  misc_RNA (1)...(19): siRNA sense strand
uaaaggugucaacaggaaa

SEQ ID NO: 1602761 - RNA, 19 nt, Homo sapiens
  misc_RNA (1)...(19): siRNA sense strand
aacaggaaauugggaagga

SEQ ID NO: 1602762 - RNA, 19 nt, Homo sapiens
  misc_RNA (1)...(19): siRNA sense strand
agugauaacucuauuuccu

SEQ ID NO: 1602763 - RNA, 19 nt, Homo sapiens
  misc_RNA (1)...(19): siRNA sense strand
gacaugcacagacagaucu

SEQ ID NO: 1602764 - RNA, 19 nt, Homo sapiens
  misc_RNA (1)...(19): siRNA sense strand
ugagacaugcacagacaga

SEQ ID NO: 1602765 - RNA, 19 nt, Homo sapiens
  misc_RNA (1)...(19): siRNA sense strand
ucgaguugcuuaugaaauu

SEQ ID NO: 1602766 - RNA, 19 nt, Homo sapiens
  misc_RNA (1)...(19): siRNA sense strand
gaaauuaugcaaacacuac

SEQ ID NO: 1602767 - RNA, 19 nt, Homo sapiens
  misc_RNA (1)...(19): siRNA sense strand
cuaaaggugucaacaggaa

SEQ ID NO: 1602768 - RNA, 19 nt, Homo sapiens
  misc_RNA (1)...(19): siRNA sense strand
cacaaucgauacacagaaa

SEQ ID NO: 1602769 - RNA, 19 nt, Homo sapiens
  misc_RNA (1)...(19): siRNA sense strand
cuacaaaguucgagagaag

SEQ ID NO: 1602770 - RNA, 19 nt, Homo sapiens
  misc_RNA (1)...(19): siRNA sense strand
cugcaaacuuccauucuuu

SEQ ID NO: 1602771 - RNA, 19 nt, Homo sapiens
  misc_RNA (1)...(19): siRNA sense strand
cgaguugcuuaugaaauua

SEQ ID NO: 1602772 - RNA, 19 nt, Homo sapiens
  misc_RNA (1)...(19): siRNA sense strand
cagaugaaauucccaugga

SEQ ID NO: 1602773 - RNA, 19 nt, Homo sapiens
  misc_RNA (1)...(19): siRNA sense strand
cauggaaccuggagauauc

SEQ ID NO: 1602774 - RNA, 19 nt, Homo sapiens
  misc_RNA (1)...(19): siRNA sense strand
gaaccuggagauaucauug

SEQ ID NO: 1602775 - RNA, 19 nt, Homo sapiens
  misc_RNA (1)...(19): siRNA sense strand
gggaaggacgggccuauau

SEQ ID NO: 1602776 - RNA, 19 nt, Homo sapiens
  misc_RNA (1)...(19): siRNA sense strand
gauagaaacggucaaguac

SEQ ID NO: 1602777 - RNA, 19 nt, Homo sapiens
  misc_RNA (1)...(19): siRNA sense strand
agauagaaacggucaagua

SEQ ID NO: 1602778 - RNA, 19 nt, Homo sapiens
  misc_RNA (1)...(19): siRNA sense strand
cagaaugcccacaaucaaa

SEQ ID NO: 1602779 - RNA, 19 nt, Homo sapiens
  misc_RNA (1)...(19): siRNA sense strand
ggauggcuauucuaaaggu

SEQ ID NO: 1602780 - RNA, 19 nt, Homo sapiens
  misc_RNA (1)...(19): siRNA sense strand
gcacaaucgauacacagaa

SEQ ID NO: 1602781 - RNA, 19 nt, Homo sapiens
  misc_RNA (1)...(19): siRNA sense strand
ucccaggucugucgaguug

SEQ ID NO: 1602782 - RNA, 19 nt, Homo sapiens
  misc_RNA (1)...(19): siRNA sense strand
gcaaacuuccauucuuuag

SEQ ID NO: 1602783 - RNA, 19 nt, Homo sapiens
  misc_RNA (1)...(19): siRNA sense strand
gaaugcccacaaucaaauu

SEQ ID NO: 1602784 - RNA, 19 nt, Homo sapiens
  misc_RNA (1)...(19): siRNA sense strand
ggaaggacgggccuauauc

SEQ ID NO: 1602785 - RNA, 19 nt, Homo sapiens
  misc_RNA (1)...(19): siRNA sense strand
ugggauggcuauucuaaag

SEQ ID NO: 1602786 - RNA, 19 nt, Homo sapiens
  misc_RNA (1)...(19): siRNA sense strand
cagcuggacugcacaaucg

SEQ ID NO: 1602787 - RNA, 19 nt, Homo sapiens
  misc_RNA (1)...(19): siRNA sense strand
gaagauagaaacggucaag

SEQ ID NO: 1602788 - RNA, 19 nt, Homo sapiens
  misc_RNA (1)...(19): siRNA sense strand
cuauaucccuccuacaaag

SEQ ID NO: 1602789 - RNA, 19 nt, Homo sapiens
  misc_RNA (1)...(19): siRNA sense strand
ggauauacauuuucucucu

SEQ ID NO: 1602790 - RNA, 19 nt, Homo sapiens
  misc_RNA (1)...(19): siRNA sense strand
ccagaaugcccacaaucaa

SEQ ID NO: 1602791 - RNA, 19 nt, Homo sapiens
  misc_RNA (1)...(19): siRNA sense strand
gccagaaugcccacaauca

SEQ ID NO: 1602792 - RNA, 19 nt, Homo sapiens
  misc_RNA (1)...(19): siRNA sense strand
uauuuaggccuguaaguga

SEQ ID NO: 1602793 - RNA, 19 nt, Homo sapiens
  misc_RNA (1)...(19): siRNA sense strand
ggacugcacaaucgauaca

SEQ ID NO: 1602794 - RNA, 19 nt, Homo sapiens
  misc_RNA (1)...(19): siRNA sense strand
gccuauaucccuccuacaa

SEQ ID NO: 1602795 - RNA, 19 nt, Homo sapiens
  misc_RNA (1)...(19): siRNA sense strand
caaacuuccauucuuuaga

SEQ ID NO: 1602796 - RNA, 19 nt, Homo sapiens
  misc_RNA (1)...(19): siRNA sense strand
caggcagacuuccuagugu

SEQ ID NO: 1602797 - RNA, 19 nt, Homo sapiens
  misc_RNA (1)...(19): siRNA sense strand
caaaguucgagagaagaua

SEQ ID NO: 1602798 - RNA, 19 nt, Homo sapiens
  misc_RNA (1)...(19): siRNA sense strand
ugaugccucugcaaacuuc

SEQ ID NO: 1602799 - RNA, 19 nt, Homo sapiens
  misc_RNA (1)...(19): siRNA sense strand
uccugaggcugagaaauaa

SEQ ID NO: 1602800 - RNA, 19 nt, Homo sapiens
  misc_RNA (1)...(19): siRNA sense strand
ucauugguguggcuggaaa

SEQ ID NO: 1602801 - RNA, 19 nt, Homo sapiens
  misc_RNA (1)...(19): siRNA sense strand
ucugcaaacuuccauucuu

SEQ ID NO: 1602802 - RNA, 19 nt, Homo sapiens
  misc_RNA (1)...(19): siRNA sense strand
gcagacuuccuagugugua

SEQ ID NO: 1602803 - RNA, 19 nt, Homo sapiens
  misc_RNA (1)...(19): siRNA sense strand
guauuuaggccuguaagug

SEQ ID NO: 1602804 - RNA, 19 nt, Homo sapiens
  misc_RNA (1)...(19): siRNA sense strand
ccgaacugcagaugaaauu

SEQ ID NO: 1602805 - RNA, 19 nt, Homo sapiens
  misc_RNA (1)...(19): siRNA sense strand
ucugucgaguugcuuauga

SEQ ID NO: 1602806 - RNA, 19 nt, Homo sapiens
  misc_RNA (1)...(19): siRNA sense strand
auccugaggcugagaaaua

SEQ ID NO: 1602807 - RNA, 19 nt, Homo sapiens
  misc_RNA (1)...(19): siRNA sense strand
ucauugggauggcuauucu

SEQ ID NO: 1602808 - RNA, 19 nt, Homo sapiens
  misc_RNA (1)...(19): siRNA sense strand
ccauggaaccuggagauau

SEQ ID NO: 1602809 - RNA, 19 nt, Homo sapiens
  misc_RNA (1)...(19): siRNA sense strand
ggaaccuggagauaucauu

SEQ ID NO: 1602810 - RNA, 19 nt, Homo sapiens
  misc_RNA (1)...(19): siRNA sense strand
uaagugagacaugcacaga

SEQ ID NO: 1602811 - RNA, 19 nt, Homo sapiens
  misc_RNA (1)...(19): siRNA sense strand
gcaaacacuacauccugau

SEQ ID NO: 1602812 - RNA, 19 nt, Homo sapiens
  misc_RNA (1)...(19): siRNA sense strand
ccuacaaaguucgagagaa

SEQ ID NO: 1602813 - RNA, 19 nt, Homo sapiens
  misc_RNA (1)...(19): siRNA sense strand
ccuauaucccuccuacaaa

SEQ ID NO: 1602814 - RNA, 19 nt, Homo sapiens
  misc_RNA (1)...(19): siRNA sense strand
gaaggacgggccuauaucc

SEQ ID NO: 1602815 - RNA, 19 nt, Homo sapiens
  misc_RNA (1)...(19): siRNA sense strand
gaacugcagaugaaauucc

SEQ ID NO: 1602816 - RNA, 19 nt, Homo sapiens
  misc_RNA (1)...(19): siRNA sense strand
ucaggcagacuuccuagug

SEQ ID NO: 1602817 - RNA, 19 nt, Homo sapiens
  misc_RNA (1)...(19): siRNA sense strand
agaaugcccacaaucaaau

SEQ ID NO: 1602818 - RNA, 19 nt, Homo sapiens
  misc_RNA (1)...(19): siRNA sense strand
ugcaaacuuccauucuuua

SEQ ID NO: 1602819 - RNA, 19 nt, Homo sapiens
  misc_RNA (1)...(19): siRNA sense strand
agugagacaugcacagaca

SEQ ID NO: 1602820 - RNA, 19 nt, Homo sapiens
  misc_RNA (1)...(19): siRNA sense strand
uaaaggugucaacaggaaa

SEQ ID NO: 1602821 - RNA, 19 nt, Homo sapiens
  misc_RNA (1)...(19): siRNA sense strand
aacaggaaauugggaagga

SEQ ID NO: 1602822 - RNA, 19 nt, Homo sapiens
  misc_RNA (1)...(19): siRNA sense strand
agugauaacucuauuuccu

SEQ ID NO: 1602823 - RNA, 19 nt, Homo sapiens
  misc_RNA (1)...(19): siRNA sense strand
gacaugcacagacagaucu

SEQ ID NO: 1602824 - RNA, 19 nt, Homo sapiens
  misc_RNA (1)...(19): siRNA sense strand
ugagacaugcacagacaga

SEQ ID NO: 1602825 - RNA, 19 nt, Homo sapiens
  misc_RNA (1)...(19): siRNA sense strand
ucgaguugcuuaugaaauu

SEQ ID NO: 1602826 - RNA, 19 nt, Homo sapiens
  misc_RNA (1)...(19): siRNA sense strand
gaaauuaugcaaacacuac

SEQ ID NO: 1602827 - RNA, 19 nt, Homo sapiens
  misc_RNA (1)...(19): siRNA sense strand
cuaaaggugucaacaggaa

SEQ ID NO: 1602828 - RNA, 19 nt, Homo sapiens
  misc_RNA (1)...(19): siRNA sense strand
cacaaucgauacacagaaa

SEQ ID NO: 1602829 - RNA, 19 nt, Homo sapiens
  misc_RNA (1)...(19): siRNA sense strand
cuacaaaguucgagagaag

SEQ ID NO: 1602830 - RNA, 19 nt, Homo sapiens
  misc_RNA (1)...(19): siRNA sense strand
cugcaaacuuccauucuuu

SEQ ID NO: 1602831 - RNA, 19 nt, Homo sapiens
  misc_RNA (1)...(19): siRNA sense strand
cgaguugcuuaugaaauua

SEQ ID NO: 1602832 - RNA, 19 nt, Homo sapiens
  misc_RNA (1)...(19): siRNA sense strand
cagaugaaauucccaugga

SEQ ID NO: 1602833 - RNA, 19 nt, Homo sapiens
  misc_RNA (1)...(19): siRNA sense strand
cauggaaccuggagauauc

SEQ ID NO: 1602834 - RNA, 19 nt, Homo sapiens
  misc_RNA (1)...(19): siRNA sense strand
gaaccuggagauaucauug

SEQ ID NO: 1602835 - RNA, 19 nt, Homo sapiens
  misc_RNA (1)...(19): siRNA sense strand
gggaaggacgggccuauau

SEQ ID NO: 1602836 - RNA, 19 nt, Homo sapiens
  misc_RNA (1)...(19): siRNA sense strand
gauagaaacggucaaguac

SEQ ID NO: 1602837 - RNA, 19 nt, Homo sapiens
  misc_RNA (1)...(19): siRNA sense strand
agauagaaacggucaagua

SEQ ID NO: 1602838 - RNA, 19 nt, Homo sapiens
  misc_RNA (1)...(19): siRNA sense strand
cagaaugcccacaaucaaa

SEQ ID NO: 1602839 - RNA, 19 nt, Homo sapiens
  misc_RNA (1)...(19): siRNA sense strand
ggauggcuauucuaaaggu

SEQ ID NO: 1602840 - RNA, 19 nt, Homo sapiens
  misc_RNA (1)...(19): siRNA sense strand
gcacaaucgauacacagaa

SEQ ID NO: 1602841 - RNA, 19 nt, Homo sapiens
  misc_RNA (1)...(19): siRNA sense strand
ucccaggucugucgaguug

SEQ ID NO: 1602842 - RNA, 19 nt, Homo sapiens
  misc_RNA (1)...(19): siRNA sense strand
gcaaacuuccauucuuuag

SEQ ID NO: 1602843 - RNA, 19 nt, Homo sapiens
  misc_RNA (1)...(19): siRNA sense strand
gaaugcccacaaucaaauu

SEQ ID NO: 1602844 - RNA, 19 nt, Homo sapiens
  misc_RNA (1)...(19): siRNA sense strand
ggaaggacgggccuauauc

SEQ ID NO: 1602845 - RNA, 19 nt, Homo sapiens
  misc_RNA (1)...(19): siRNA sense strand
ugggauggcuauucuaaag

SEQ ID NO: 1602846 - RNA, 19 nt, Homo sapiens
  misc_RNA (1)...(19): siRNA sense strand
cagcuggacugcacaaucg

SEQ ID NO: 1602847 - RNA, 19 nt, Homo sapiens
  misc_RNA (1)...(19): siRNA sense strand
gaagauagaaacggucaag

SEQ ID NO: 1602848 - RNA, 19 nt, Homo sapiens
  misc_RNA (1)...(19): siRNA sense strand
cuauaucccuccuacaaag

SEQ ID NO: 1602849 - RNA, 19 nt, Homo sapiens
  misc_RNA (1)...(19): siRNA sense strand
ggauauacauuuucucucu

SEQ ID NO: 1602850 - RNA, 19 nt, Homo sapiens
  misc_RNA (1)...(19): siRNA sense strand
ccagaaugcccacaaucaa

SEQ ID NO: 1602851 - RNA, 19 nt, Homo sapiens
  misc_RNA (1)...(19): siRNA sense strand
gccagaaugcccacaauca

SEQ ID NO: 1602852 - RNA, 19 nt, Homo sapiens
  misc_RNA (1)...(19): siRNA sense strand
gccuauaucccuccuacaa

SEQ ID NO: 1602853 - RNA, 19 nt, Homo sapiens
  misc_RNA (1)...(19): siRNA sense strand
ggacugcacaaucgauaca

SEQ ID NO: 1602854 - RNA, 19 nt, Homo sapiens
  misc_RNA (1)...(19): siRNA sense strand
caaacuuccauucuuuaga

SEQ ID NO: 1602855 - RNA, 19 nt, Homo sapiens
  misc_RNA (1)...(19): siRNA sense strand
caggcagacuuccuagugu

SEQ ID NO: 1602856 - RNA, 19 nt, Homo sapiens
  misc_RNA (1)...(19): siRNA sense strand
caaaguucgagagaagaua

SEQ ID NO: 1602857 - RNA, 19 nt, Homo sapiens
  misc_RNA (1)...(19): siRNA sense strand
ugaugccucugcaaacuuc

SEQ ID NO: 1602858 - RNA, 19 nt, Homo sapiens
  misc_RNA (1)...(19): siRNA sense strand
uccugaggcugagaaauaa

SEQ ID NO: 1602859 - RNA, 19 nt, Homo sapiens
  misc_RNA (1)...(19): siRNA sense strand
ucauugguguggcuggaaa

SEQ ID NO: 1602860 - RNA, 19 nt, Homo sapiens
  misc_RNA (1)...(19): siRNA sense strand
ucugcaaacuuccauucuu

SEQ ID NO: 1602861 - RNA, 19 nt, Homo sapiens
  misc_RNA (1)...(19): siRNA sense strand
gcagacuuccuagugugua

SEQ ID NO: 1602862 - RNA, 19 nt, Homo sapiens
  misc_RNA (1)...(19): siRNA sense strand
ccgaacugcagaugaaauu

SEQ ID NO: 1602863 - RNA, 19 nt, Homo sapiens
  misc_RNA (1)...(19): siRNA sense strand
ucugucgaguugcuuauga

SEQ ID NO: 1602864 - RNA, 19 nt, Homo sapiens
  misc_RNA (1)...(19): siRNA sense strand
auccugaggcugagaaaua

SEQ ID NO: 1602865 - RNA, 19 nt, Homo sapiens
  misc_RNA (1)...(19): siRNA sense strand
ucauugggauggcuauucu

SEQ ID NO: 1602866 - RNA, 19 nt, Homo sapiens
  misc_RNA (1)...(19): siRNA sense strand
ccauggaaccuggagauau

SEQ ID NO: 1602867 - RNA, 19 nt, Homo sapiens
  misc_RNA (1)...(19): siRNA sense strand
ggaaccuggagauaucauu

SEQ ID NO: 1602868 - RNA, 19 nt, Homo sapiens
  misc_RNA (1)...(19): siRNA sense strand
gcaaacacuacauccugau

SEQ ID NO: 1602869 - RNA, 19 nt, Homo sapiens
  misc_RNA (1)...(19): siRNA sense strand
ccuacaaaguucgagagaa

SEQ ID NO: 1602870 - RNA, 19 nt, Homo sapiens
  misc_RNA (1)...(19): siRNA sense strand
ccuauaucccuccuacaaa

SEQ ID NO: 1602871 - RNA, 19 nt, Homo sapiens
  misc_RNA (1)...(19): siRNA sense strand
gaaggacgggccuauaucc

SEQ ID NO: 1602872 - RNA, 19 nt, Homo sapiens
  misc_RNA (1)...(19): siRNA sense strand
gaacugcagaugaaauucc

SEQ ID NO: 1602873 - RNA, 19 nt, Homo sapiens
  misc_RNA (1)...(19): siRNA sense strand
agaaugcccacaaucaaau

SEQ ID NO: 1602874 - RNA, 19 nt, Homo sapiens
  misc_RNA (1)...(19): siRNA sense strand
ucaggcagacuuccuagug

SEQ ID NO: 1602875 - RNA, 19 nt, Homo sapiens
  misc_RNA (1)...(19): siRNA sense strand
ugcaaacuuccauucuuua

SEQ ID NO: 1602876 - RNA, 19 nt, Homo sapiens
  misc_RNA (1)...(19): siRNA sense strand
uaaaggugucaacaggaaa

SEQ ID NO: 1602877 - RNA, 19 nt, Homo sapiens
  misc_RNA (1)...(19): siRNA sense strand
aacaggaaauugggaagga

SEQ ID NO: 1602878 - RNA, 19 nt, Homo sapiens
  misc_RNA (1)...(19): siRNA sense strand
agugauaacucuauuuccu

SEQ ID NO: 1602879 - RNA, 19 nt, Homo sapiens
  misc_RNA (1)...(19): siRNA sense strand
ucaccgaguucgaccagua

SEQ ID NO: 1602880 - RNA, 19 nt, Homo sapiens
  misc_RNA (1)...(19): siRNA sense strand
gaggagagcagccugaucu

SEQ ID NO: 1602881 - RNA, 19 nt, Homo sapiens
  misc_RNA (1)...(19): siRNA sense strand
ccagcagcgcggucuauua

SEQ ID NO: 1602882 - RNA, 19 nt, Homo sapiens
  misc_RNA (1)...(19): siRNA sense strand
gcaagaugcugggcaaagc

SEQ ID NO: 1602883 - RNA, 19 nt, Homo sapiens
  misc_RNA (1)...(19): siRNA sense strand
gcagcgcggucuauuacag

SEQ ID NO: 1602884 - RNA, 19 nt, Homo sapiens
  misc_RNA (1)...(19): siRNA sense strand
cagcagcgcggucuauuac

SEQ ID NO: 1602885 - RNA, 19 nt, Homo sapiens
  misc_RNA (1)...(19): siRNA sense strand
acguggaccucaccgaguu

SEQ ID NO: 1602886 - RNA, 19 nt, Homo sapiens
  misc_RNA (1)...(19): siRNA sense strand
gagaagagauggcaagaaa

SEQ ID NO: 1602887 - RNA, 19 nt, Homo sapiens
  misc_RNA (1)...(19): siRNA sense strand
caacaaaggugucauagga

SEQ ID NO: 1602888 - RNA, 19 nt, Homo sapiens
  misc_RNA (1)...(19): siRNA sense strand
gaucaaagcuuaccgagau

SEQ ID NO: 1602889 - RNA, 19 nt, Homo sapiens
  misc_RNA (1)...(19): siRNA sense strand
gggcaaugcuggcacgaua

SEQ ID NO: 1602890 - RNA, 19 nt, Homo sapiens
  misc_RNA (1)...(19): siRNA sense strand
gaccaaggaggacaaauua

SEQ ID NO: 1602891 - RNA, 19 nt, Homo sapiens
  misc_RNA (1)...(19): siRNA sense strand
gaagagauggcaagaaaga

SEQ ID NO: 1602892 - RNA, 19 nt, Homo sapiens
  misc_RNA (1)...(19): siRNA sense strand
gagagggacuucagagaug

SEQ ID NO: 1602893 - RNA, 19 nt, Homo sapiens
  misc_RNA (1)...(19): siRNA sense strand
ccaaggaggacaaauuaaa

SEQ ID NO: 1602894 - RNA, 19 nt, Homo sapiens
  misc_RNA (1)...(19): siRNA sense strand
gcuacgccuucaucgaaua

SEQ ID NO: 1602895 - RNA, 19 nt, Homo sapiens
  misc_RNA (1)...(19): siRNA sense strand
gcugauggccugguuauug

SEQ ID NO: 1602896 - RNA, 19 nt, Homo sapiens
  misc_RNA (1)...(19): siRNA sense strand
gaaggaaagaggcaaguag

SEQ ID NO: 1602897 - RNA, 19 nt, Homo sapiens
  misc_RNA (1)...(19): siRNA sense strand
ugaccagcaugagauauuu

SEQ ID NO: 1602898 - RNA, 19 nt, Homo sapiens
  misc_RNA (1)...(19): siRNA sense strand
gggcuacgccuucaucgaa

SEQ ID NO: 1602899 - RNA, 19 nt, Homo sapiens
  misc_RNA (1)...(19): siRNA sense strand
gacaagggaucgagaccau

SEQ ID NO: 1602900 - RNA, 19 nt, Homo sapiens
  misc_RNA (1)...(19): siRNA sense strand
gugccgugaucaaagcuua

SEQ ID NO: 1602901 - RNA, 19 nt, Homo sapiens
  misc_RNA (1)...(19): siRNA sense strand
cugauggccugguuauuga

SEQ ID NO: 1602902 - RNA, 19 nt, Homo sapiens
  misc_RNA (1)...(19): siRNA sense strand
caagggaucgagaccauga

SEQ ID NO: 1602903 - RNA, 19 nt, Homo sapiens
  misc_RNA (1)...(19): siRNA sense strand
gggacuuggucacagguuu

SEQ ID NO: 1602904 - RNA, 19 nt, Homo sapiens
  misc_RNA (1)...(19): siRNA sense strand
ggaggacaaauuaaaggaa

SEQ ID NO: 1602905 - RNA, 19 nt, Homo sapiens
  misc_RNA (1)...(19): siRNA sense strand
gcauugauggcaccgauga

SEQ ID NO: 1602906 - RNA, 19 nt, Homo sapiens
  misc_RNA (1)...(19): siRNA sense strand
ggagggagaagaaggaaag

SEQ ID NO: 1602907 - RNA, 19 nt, Homo sapiens
  misc_RNA (1)...(19): siRNA sense strand
ggguguggcccgacaauga

SEQ ID NO: 1602908 - RNA, 19 nt, Homo sapiens
  misc_RNA (1)...(19): siRNA sense strand
gcaaugcuggcacgauaug

SEQ ID NO: 1602909 - RNA, 19 nt, Homo sapiens
  misc_RNA (1)...(19): siRNA sense strand
gagagagggacuucagaga

SEQ ID NO: 1602910 - RNA, 19 nt, Homo sapiens
  misc_RNA (1)...(19): siRNA sense strand
gacuaaacuugcagaccaa

SEQ ID NO: 1602911 - RNA, 19 nt, Homo sapiens
  misc_RNA (1)...(19): siRNA sense strand
agaccaaggaggacaaauu

SEQ ID NO: 1602912 - RNA, 19 nt, Homo sapiens
  misc_RNA (1)...(19): siRNA sense strand
caaggaggacaaauuaaag

SEQ ID NO: 1602913 - RNA, 19 nt, Homo sapiens
  misc_RNA (1)...(19): siRNA sense strand
ucgaaaaccuauuaacuug

SEQ ID NO: 1602914 - RNA, 19 nt, Homo sapiens
  misc_RNA (1)...(19): siRNA sense strand
ggagaagagauggcaagaa

SEQ ID NO: 1602915 - RNA, 19 nt, Homo sapiens
  misc_RNA (1)...(19): siRNA sense strand
ggagagagagagggacuuc

SEQ ID NO: 1602916 - RNA, 19 nt, Homo sapiens
  misc_RNA (1)...(19): siRNA sense strand
acucaaagcgggcagcauu

SEQ ID NO: 1602917 - RNA, 19 nt, Homo sapiens
  misc_RNA (1)...(19): siRNA sense strand
ugagauauuuguggacuac

SEQ ID NO: 1602918 - RNA, 19 nt, Homo sapiens
  misc_RNA (1)...(19): siRNA sense strand
gagagagagggacuucaga

SEQ ID NO: 1602919 - RNA, 19 nt, Homo sapiens
  misc_RNA (1)...(19): siRNA sense strand
aaaggagucugggcaacug

SEQ ID NO: 1602920 - RNA, 19 nt, Homo sapiens
  misc_RNA (1)...(19): siRNA sense strand
agagggacuucagagauga

SEQ ID NO: 1602921 - RNA, 19 nt, Homo sapiens
  misc_RNA (1)...(19): siRNA sense strand
ggagcgugccgugaucaaa

SEQ ID NO: 1602922 - RNA, 19 nt, Homo sapiens
  misc_RNA (1)...(19): siRNA sense strand
agagauggcaagaaagaga

SEQ ID NO: 1602923 - RNA, 19 nt, Homo sapiens
  misc_RNA (1)...(19): siRNA sense strand
gagcuggaaaggacucuca

SEQ ID NO: 1602924 - RNA, 19 nt, Homo sapiens
  misc_RNA (1)...(19): siRNA sense strand
gagcgugccgugaucaaag

SEQ ID NO: 1602925 - RNA, 19 nt, Homo sapiens
  misc_RNA (1)...(19): siRNA sense strand
guuauugaccagcaugaga

SEQ ID NO: 1602926 - RNA, 19 nt, Homo sapiens
  misc_RNA (1)...(19): siRNA sense strand
ggacaaauuaaaggaaguc

SEQ ID NO: 1602927 - RNA, 19 nt, Homo sapiens
  misc_RNA (1)...(19): siRNA sense strand
cgacaaugacugggagaga

SEQ ID NO: 1602928 - RNA, 19 nt, Homo sapiens
  misc_RNA (1)...(19): siRNA sense strand
gcccaucgccaaggaguau

SEQ ID NO: 1602929 - RNA, 19 nt, Homo sapiens
  misc_RNA (1)...(19): siRNA sense strand
gcuggaaaggacucucaaa

SEQ ID NO: 1602930 - RNA, 19 nt, Homo sapiens
  misc_RNA (1)...(19): siRNA sense strand
gcagaccaaggaggacaaa

SEQ ID NO: 1602931 - RNA, 19 nt, Homo sapiens
  misc_RNA (1)...(19): siRNA sense strand
ggucagggacuuggucaca

SEQ ID NO: 1602932 - RNA, 19 nt, Homo sapiens
  misc_RNA (1)...(19): siRNA sense strand
agagagggacuucagagau

SEQ ID NO: 1602933 - RNA, 19 nt, Homo sapiens
  misc_RNA (1)...(19): siRNA sense strand
guggaucccucggcgacuu

SEQ ID NO: 1602934 - RNA, 19 nt, Homo sapiens
  misc_RNA (1)...(19): siRNA sense strand
ggacuacgagcuggaaagg

SEQ ID NO: 1602935 - RNA, 19 nt, Homo sapiens
  misc_RNA (1)...(19): siRNA sense strand
aaagcgggcagcauugaug

SEQ ID NO: 1602936 - RNA, 19 nt, Homo sapiens
  misc_RNA (1)...(19): siRNA sense strand
agaaggaaagaggcaagua

SEQ ID NO: 1602937 - RNA, 19 nt, Homo sapiens
  misc_RNA (1)...(19): siRNA sense strand
cgacuuggaggcggucuug

SEQ ID NO: 1602938 - RNA, 19 nt, Homo sapiens
  misc_RNA (1)...(19): siRNA sense strand
gaccagcaugagauauuug

SEQ ID NO: 1602939 - RNA, 19 nt, Homo sapiens
  misc_RNA (1)...(19): siRNA sense strand
gaugcugauggccugguua

SEQ ID NO: 1602940 - RNA, 19 nt, Homo sapiens
  misc_RNA (1)...(19): siRNA sense strand
ggcuacgccuucaucgaau

SEQ ID NO: 1602941 - RNA, 19 nt, Homo sapiens
  misc_RNA (1)...(19): siRNA sense strand
gaaaggcgggagcgaucuc

SEQ ID NO: 1602942 - RNA, 19 nt, Homo sapiens
  misc_RNA (1)...(19): siRNA sense strand
agauauuuguggacuacga

SEQ ID NO: 1602943 - RNA, 19 nt, Homo sapiens
  misc_RNA (1)...(19): siRNA sense strand
caaagcgggcagcauugau

SEQ ID NO: 1602944 - RNA, 19 nt, Homo sapiens
  misc_RNA (1)...(19): siRNA sense strand
gagaagagauggcaagaaa

SEQ ID NO: 1602945 - RNA, 19 nt, Homo sapiens
  misc_RNA (1)...(19): siRNA sense strand
caacaaaggugucauagga

SEQ ID NO: 1602946 - RNA, 19 nt, Homo sapiens
  misc_RNA (1)...(19): siRNA sense strand
gaucaaagcuuaccgagau

SEQ ID NO: 1602947 - RNA, 19 nt, Homo sapiens
  misc_RNA (1)...(19): siRNA sense strand
gggcaaugcuggcacgaua

SEQ ID NO: 1602948 - RNA, 19 nt, Homo sapiens
  misc_RNA (1)...(19): siRNA sense strand
gaccaaggaggacaaauua

SEQ ID NO: 1602949 - RNA, 19 nt, Homo sapiens
  misc_RNA (1)...(19): siRNA sense strand
gaagagauggcaagaaaga

SEQ ID NO: 1602950 - RNA, 19 nt, Homo sapiens
  misc_RNA (1)...(19): siRNA sense strand
gagagggacuucagagaug

SEQ ID NO: 1602951 - RNA, 19 nt, Homo sapiens
  misc_RNA (1)...(19): siRNA sense strand
ccaaggaggacaaauuaaa

SEQ ID NO: 1602952 - RNA, 19 nt, Homo sapiens
  misc_RNA (1)...(19): siRNA sense strand
gcuacgccuucaucgaaua

SEQ ID NO: 1602953 - RNA, 19 nt, Homo sapiens
  misc_RNA (1)...(19): siRNA sense strand
gcugauggccugguuauug

SEQ ID NO: 1602954 - RNA, 19 nt, Homo sapiens
  misc_RNA (1)...(19): siRNA sense strand
gaaggaaagaggcaaguag

SEQ ID NO: 1602955 - RNA, 19 nt, Homo sapiens
  misc_RNA (1)...(19): siRNA sense strand
ugaccagcaugagauauuu

SEQ ID NO: 1602956 - RNA, 19 nt, Homo sapiens
  misc_RNA (1)...(19): siRNA sense strand
gggcuacgccuucaucgaa

SEQ ID NO: 1602957 - RNA, 19 nt, Homo sapiens
  misc_RNA (1)...(19): siRNA sense strand
gacaagggaucgagaccau

SEQ ID NO: 1602958 - RNA, 19 nt, Homo sapiens
  misc_RNA (1)...(19): siRNA sense strand
gugccgugaucaaagcuua

SEQ ID NO: 1602959 - RNA, 19 nt, Homo sapiens
  misc_RNA (1)...(19): siRNA sense strand
cugauggccugguuauuga

SEQ ID NO: 1602960 - RNA, 19 nt, Homo sapiens
  misc_RNA (1)...(19): siRNA sense strand
caagggaucgagaccauga

SEQ ID NO: 1602961 - RNA, 19 nt, Homo sapiens
  misc_RNA (1)...(19): siRNA sense strand
gggacuuggucacagguuu

SEQ ID NO: 1602962 - RNA, 19 nt, Homo sapiens
  misc_RNA (1)...(19): siRNA sense strand
ggaggacaaauuaaaggaa

SEQ ID NO: 1602963 - RNA, 19 nt, Homo sapiens
  misc_RNA (1)...(19): siRNA sense strand
gcauugauggcaccgauga

SEQ ID NO: 1602964 - RNA, 19 nt, Homo sapiens
  misc_RNA (1)...(19): siRNA sense strand
ggagggagaagaaggaaag

SEQ ID NO: 1602965 - RNA, 19 nt, Homo sapiens
  misc_RNA (1)...(19): siRNA sense strand
ggguguggcccgacaauga

SEQ ID NO: 1602966 - RNA, 19 nt, Homo sapiens
  misc_RNA (1)...(19): siRNA sense strand
gcaaugcuggcacgauaug

SEQ ID NO: 1602967 - RNA, 19 nt, Homo sapiens
  misc_RNA (1)...(19): siRNA sense strand
gagagagggacuucagaga

SEQ ID NO: 1602968 - RNA, 19 nt, Homo sapiens
  misc_RNA (1)...(19): siRNA sense strand
gacuaaacuugcagaccaa

SEQ ID NO: 1602969 - RNA, 19 nt, Homo sapiens
  misc_RNA (1)...(19): siRNA sense strand
agaccaaggaggacaaauu

SEQ ID NO: 1602970 - RNA, 19 nt, Homo sapiens
  misc_RNA (1)...(19): siRNA sense strand
caaggaggacaaauuaaag

SEQ ID NO: 1602971 - RNA, 19 nt, Homo sapiens
  misc_RNA (1)...(19): siRNA sense strand
ucgaaaaccuauuaacuug

SEQ ID NO: 1602972 - RNA, 19 nt, Homo sapiens
  misc_RNA (1)...(19): siRNA sense strand
ggagaagagauggcaagaa

SEQ ID NO: 1602973 - RNA, 19 nt, Homo sapiens
  misc_RNA (1)...(19): siRNA sense strand
ggagagagagagggacuuc

SEQ ID NO: 1602974 - RNA, 19 nt, Homo sapiens
  misc_RNA (1)...(19): siRNA sense strand
acucaaagcgggcagcauu

SEQ ID NO: 1602975 - RNA, 19 nt, Homo sapiens
  misc_RNA (1)...(19): siRNA sense strand
ugagauauuuguggacuac

SEQ ID NO: 1602976 - RNA, 19 nt, Homo sapiens
  misc_RNA (1)...(19): siRNA sense strand
gagagagagggacuucaga

SEQ ID NO: 1602977 - RNA, 19 nt, Homo sapiens
  misc_RNA (1)...(19): siRNA sense strand
aaaggagucugggcaacug

SEQ ID NO: 1602978 - RNA, 19 nt, Homo sapiens
  misc_RNA (1)...(19): siRNA sense strand
agagggacuucagagauga

SEQ ID NO: 1602979 - RNA, 19 nt, Homo sapiens
  misc_RNA (1)...(19): siRNA sense strand
ggagcgugccgugaucaaa

SEQ ID NO: 1602980 - RNA, 19 nt, Homo sapiens
  misc_RNA (1)...(19): siRNA sense strand
agagauggcaagaaagaga

SEQ ID NO: 1602981 - RNA, 19 nt, Homo sapiens
  misc_RNA (1)...(19): siRNA sense strand
gagcuggaaaggacucuca

SEQ ID NO: 1602982 - RNA, 19 nt, Homo sapiens
  misc_RNA (1)...(19): siRNA sense strand
gagcgugccgugaucaaag

SEQ ID NO: 1602983 - RNA, 19 nt, Homo sapiens
  misc_RNA (1)...(19): siRNA sense strand
guuauugaccagcaugaga

SEQ ID NO: 1602984 - RNA, 19 nt, Homo sapiens
  misc_RNA (1)...(19): siRNA sense strand
ggacaaauuaaaggaaguc

SEQ ID NO: 1602985 - RNA, 19 nt, Homo sapiens
  misc_RNA (1)...(19): siRNA sense strand
cgacaaugacugggagaga

SEQ ID NO: 1602986 - RNA, 19 nt, Homo sapiens
  misc_RNA (1)...(19): siRNA sense strand
gcccaucgccaaggaguau

SEQ ID NO: 1602987 - RNA, 19 nt, Homo sapiens
  misc_RNA (1)...(19): siRNA sense strand
gcuggaaaggacucucaaa

SEQ ID NO: 1602988 - RNA, 19 nt, Homo sapiens
  misc_RNA (1)...(19): siRNA sense strand
gcagaccaaggaggacaaa

SEQ ID NO: 1602989 - RNA, 19 nt, Homo sapiens
  misc_RNA (1)...(19): siRNA sense strand
ggucagggacuuggucaca

SEQ ID NO: 1602990 - RNA, 19 nt, Homo sapiens
  misc_RNA (1)...(19): siRNA sense strand
agagagggacuucagagau

SEQ ID NO: 1602991 - RNA, 19 nt, Homo sapiens
  misc_RNA (1)...(19): siRNA sense strand
guggaucccucggcgacuu

SEQ ID NO: 1602992 - RNA, 19 nt, Homo sapiens
  misc_RNA (1)...(19): siRNA sense strand
ggacuacgagcuggaaagg

SEQ ID NO: 1602993 - RNA, 19 nt, Homo sapiens
  misc_RNA (1)...(19): siRNA sense strand
aaagcgggcagcauugaug

SEQ ID NO: 1602994 - RNA, 19 nt, Homo sapiens
  misc_RNA (1)...(19): siRNA sense strand
agaaggaaagaggcaagua

SEQ ID NO: 1602995 - RNA, 19 nt, Homo sapiens
  misc_RNA (1)...(19): siRNA sense strand
cgacuuggaggcggucuug

SEQ ID NO: 1602996 - RNA, 19 nt, Homo sapiens
  misc_RNA (1)...(19): siRNA sense strand
gaccagcaugagauauuug

SEQ ID NO: 1602997 - RNA, 19 nt, Homo sapiens
  misc_RNA (1)...(19): siRNA sense strand
gaugcugauggccugguua

SEQ ID NO: 1602998 - RNA, 19 nt, Homo sapiens
  misc_RNA (1)...(19): siRNA sense strand
ggcuacgccuucaucgaau

SEQ ID NO: 1602999 - RNA, 19 nt, Homo sapiens
  misc_RNA (1)...(19): siRNA sense strand
gaaaggcgggagcgaucuc

SEQ ID NO: 1603000 - RNA, 19 nt, Homo sapiens
  misc_RNA (1)...(19): siRNA sense strand
agauauuuguggacuacga

SEQ ID NO: 1603001 - RNA, 19 nt, Homo sapiens
  misc_RNA (1)...(19): siRNA sense strand
caaagcgggcagcauugau

SEQ ID NO: 1603002 - RNA, 19 nt, Homo sapiens
  misc_RNA (1)...(19): siRNA sense strand
gagaagagauggcaagaaa

SEQ ID NO: 1603003 - RNA, 19 nt, Homo sapiens
  misc_RNA (1)...(19): siRNA sense strand
caacaaaggugucauagga

SEQ ID NO: 1603004 - RNA, 19 nt, Homo sapiens
  misc_RNA (1)...(19): siRNA sense strand
gaucaaagcuuaccgagau

SEQ ID NO: 1603005 - RNA, 19 nt, Homo sapiens
  misc_RNA (1)...(19): siRNA sense strand
gggcaaugcuggcacgaua

SEQ ID NO: 1603006 - RNA, 19 nt, Homo sapiens
  misc_RNA (1)...(19): siRNA sense strand
gaccaaggaggacaaauua

SEQ ID NO: 1603007 - RNA, 19 nt, Homo sapiens
  misc_RNA (1)...(19): siRNA sense strand
gaagagauggcaagaaaga

SEQ ID NO: 1603008 - RNA, 19 nt, Homo sapiens
  misc_RNA (1)...(19): siRNA sense strand
gagagggacuucagagaug

SEQ ID NO: 1603009 - RNA, 19 nt, Homo sapiens
  misc_RNA (1)...(19): siRNA sense strand
ccaaggaggacaaauuaaa

SEQ ID NO: 1603010 - RNA, 19 nt, Homo sapiens
  misc_RNA (1)...(19): siRNA sense strand
gcuacgccuucaucgaaua

SEQ ID NO: 1603011 - RNA, 19 nt, Homo sapiens
  misc_RNA (1)...(19): siRNA sense strand
gcugauggccugguuauug

SEQ ID NO: 1603012 - RNA, 19 nt, Homo sapiens
  misc_RNA (1)...(19): siRNA sense strand
gaaggaaagaggcaaguag

SEQ ID NO: 1603013 - RNA, 19 nt, Homo sapiens
  misc_RNA (1)...(19): siRNA sense strand
ugaccagcaugagauauuu

SEQ ID NO: 1603014 - RNA, 19 nt, Homo sapiens
  misc_RNA (1)...(19): siRNA sense strand
gggcuacgccuucaucgaa

SEQ ID NO: 1603015 - RNA, 19 nt, Homo sapiens
  misc_RNA (1)...(19): siRNA sense strand
gacaagggaucgagaccau

SEQ ID NO: 1603016 - RNA, 19 nt, Homo sapiens
  misc_RNA (1)...(19): siRNA sense strand
gugccgugaucaaagcuua

SEQ ID NO: 1603017 - RNA, 19 nt, Homo sapiens
  misc_RNA (1)...(19): siRNA sense strand
cugauggccugguuauuga

SEQ ID NO: 1603018 - RNA, 19 nt, Homo sapiens
  misc_RNA (1)...(19): siRNA sense strand
caagggaucgagaccauga

SEQ ID NO: 1603019 - RNA, 19 nt, Homo sapiens
  misc_RNA (1)...(19): siRNA sense strand
gggacuuggucacagguuu

SEQ ID NO: 1603020 - RNA, 19 nt, Homo sapiens
  misc_RNA (1)...(19): siRNA sense strand
ggaggacaaauuaaaggaa

SEQ ID NO: 1603021 - RNA, 19 nt, Homo sapiens
  misc_RNA (1)...(19): siRNA sense strand
gcauugauggcaccgauga

SEQ ID NO: 1603022 - RNA, 19 nt, Homo sapiens
  misc_RNA (1)...(19): siRNA sense strand
ggagggagaagaaggaaag

SEQ ID NO: 1603023 - RNA, 19 nt, Homo sapiens
  misc_RNA (1)...(19): siRNA sense strand
ggguguggcccgacaauga

SEQ ID NO: 1603024 - RNA, 19 nt, Homo sapiens
  misc_RNA (1)...(19): siRNA sense strand
gcaaugcuggcacgauaug

SEQ ID NO: 1603025 - RNA, 19 nt, Homo sapiens
  misc_RNA (1)...(19): siRNA sense strand
gagagagggacuucagaga

SEQ ID NO: 1603026 - RNA, 19 nt, Homo sapiens
  misc_RNA (1)...(19): siRNA sense strand
gacuaaacuugcagaccaa

SEQ ID NO: 1603027 - RNA, 19 nt, Homo sapiens
  misc_RNA (1)...(19): siRNA sense strand
agaccaaggaggacaaauu

SEQ ID NO: 1603028 - RNA, 19 nt, Homo sapiens
  misc_RNA (1)...(19): siRNA sense strand
caaggaggacaaauuaaag

SEQ ID NO: 1603029 - RNA, 19 nt, Homo sapiens
  misc_RNA (1)...(19): siRNA sense strand
ucgaaaaccuauuaacuug

SEQ ID NO: 1603030 - RNA, 19 nt, Homo sapiens
  misc_RNA (1)...(19): siRNA sense strand
ggagaagagauggcaagaa

SEQ ID NO: 1603031 - RNA, 19 nt, Homo sapiens
  misc_RNA (1)...(19): siRNA sense strand
ggagagagagagggacuuc

SEQ ID NO: 1603032 - RNA, 19 nt, Homo sapiens
  misc_RNA (1)...(19): siRNA sense strand
acucaaagcgggcagcauu

SEQ ID NO: 1603033 - RNA, 19 nt, Homo sapiens
  misc_RNA (1)...(19): siRNA sense strand
ugagauauuuguggacuac

SEQ ID NO: 1603034 - RNA, 19 nt, Homo sapiens
  misc_RNA (1)...(19): siRNA sense strand
gagagagagggacuucaga

SEQ ID NO: 1603035 - RNA, 19 nt, Homo sapiens
  misc_RNA (1)...(19): siRNA sense strand
aaaggagucugggcaacug

SEQ ID NO: 1603036 - RNA, 19 nt, Homo sapiens
  misc_RNA (1)...(19): siRNA sense strand
agagggacuucagagauga

SEQ ID NO: 1603037 - RNA, 19 nt, Homo sapiens
  misc_RNA (1)...(19): siRNA sense strand
ggagcgugccgugaucaaa

SEQ ID NO: 1603038 - RNA, 19 nt, Homo sapiens
  misc_RNA (1)...(19): siRNA sense strand
agagauggcaagaaagaga

SEQ ID NO: 1603039 - RNA, 19 nt, Homo sapiens
  misc_RNA (1)...(19): siRNA sense strand
gagcuggaaaggacucuca

SEQ ID NO: 1603040 - RNA, 19 nt, Homo sapiens
  misc_RNA (1)...(19): siRNA sense strand
gagcgugccgugaucaaag

SEQ ID NO: 1603041 - RNA, 19 nt, Homo sapiens
  misc_RNA (1)...(19): siRNA sense strand
guuauugaccagcaugaga

SEQ ID NO: 1603042 - RNA, 19 nt, Homo sapiens
  misc_RNA (1)...(19): siRNA sense strand
ggacaaauuaaaggaaguc

SEQ ID NO: 1603043 - RNA, 19 nt, Homo sapiens
  misc_RNA (1)...(19): siRNA sense strand
cgacaaugacugggagaga

SEQ ID NO: 1603044 - RNA, 19 nt, Homo sapiens
  misc_RNA (1)...(19): siRNA sense strand
gcccaucgccaaggaguau

SEQ ID NO: 1603045 - RNA, 19 nt, Homo sapiens
  misc_RNA (1)...(19): siRNA sense strand
gcuggaaaggacucucaaa

SEQ ID NO: 1603046 - RNA, 19 nt, Homo sapiens
  misc_RNA (1)...(19): siRNA sense strand
gcagaccaaggaggacaaa

SEQ ID NO: 1603047 - RNA, 19 nt, Homo sapiens
  misc_RNA (1)...(19): siRNA sense strand
ggucagggacuuggucaca

SEQ ID NO: 1603048 - RNA, 19 nt, Homo sapiens
  misc_RNA (1)...(19): siRNA sense strand
agagagggacuucagagau

SEQ ID NO: 1603049 - RNA, 19 nt, Homo sapiens
  misc_RNA (1)...(19): siRNA sense strand
guggaucccucggcgacuu

SEQ ID NO: 1603050 - RNA, 19 nt, Homo sapiens
  misc_RNA (1)...(19): siRNA sense strand
ggacuacgagcuggaaagg

SEQ ID NO: 1603051 - RNA, 19 nt, Homo sapiens
  misc_RNA (1)...(19): siRNA sense strand
aaagcgggcagcauugaug

SEQ ID NO: 1603052 - RNA, 19 nt, Homo sapiens
  misc_RNA (1)...(19): siRNA sense strand
agaaggaaagaggcaagua

SEQ ID NO: 1603053 - RNA, 19 nt, Homo sapiens
  misc_RNA (1)...(19): siRNA sense strand
cgacuuggaggcggucuug

SEQ ID NO: 1603054 - RNA, 19 nt, Homo sapiens
  misc_RNA (1)...(19): siRNA sense strand
gaccagcaugagauauuug

SEQ ID NO: 1603055 - RNA, 19 nt, Homo sapiens
  misc_RNA (1)...(19): siRNA sense strand
gaugcugauggccugguua

SEQ ID NO: 1603056 - RNA, 19 nt, Homo sapiens
  misc_RNA (1)...(19): siRNA sense strand
ggcuacgccuucaucgaau

SEQ ID NO: 1603057 - RNA, 19 nt, Homo sapiens
  misc_RNA (1)...(19): siRNA sense strand
gaaaggcgggagcgaucuc

SEQ ID NO: 1603058 - RNA, 19 nt, Homo sapiens
  misc_RNA (1)...(19): siRNA sense strand
agauauuuguggacuacga

SEQ ID NO: 1603059 - RNA, 19 nt, Homo sapiens
  misc_RNA (1)...(19): siRNA sense strand
caaagcgggcagcauugau

SEQ ID NO: 1603060 - RNA, 19 nt, Homo sapiens
  misc_RNA (1)...(19): siRNA sense strand
gagaagagauggcaagaaa

SEQ ID NO: 1603061 - RNA, 19 nt, Homo sapiens
  misc_RNA (1)...(19): siRNA sense strand
caacaaaggugucauagga

SEQ ID NO: 1603062 - RNA, 19 nt, Homo sapiens
  misc_RNA (1)...(19): siRNA sense strand
gaucaaagcuuaccgagau

SEQ ID NO: 1603063 - RNA, 19 nt, Homo sapiens
  misc_RNA (1)...(19): siRNA sense strand
gggcaaugcuggcacgaua

SEQ ID NO: 1603064 - RNA, 19 nt, Homo sapiens
  misc_RNA (1)...(19): siRNA sense strand
gaccaaggaggacaaauua

SEQ ID NO: 1603065 - RNA, 19 nt, Homo sapiens
  misc_RNA (1)...(19): siRNA sense strand
gaagagauggcaagaaaga

SEQ ID NO: 1603066 - RNA, 19 nt, Homo sapiens
  misc_RNA (1)...(19): siRNA sense strand
gagagggacuucagagaug

SEQ ID NO: 1603067 - RNA, 19 nt, Homo sapiens
  misc_RNA (1)...(19): siRNA sense strand
ccaaggaggacaaauuaaa

SEQ ID NO: 1603068 - RNA, 19 nt, Homo sapiens
  misc_RNA (1)...(19): siRNA sense strand
gcuacgccuucaucgaaua

SEQ ID NO: 1603069 - RNA, 19 nt, Homo sapiens
  misc_RNA (1)...(19): siRNA sense strand
gcugauggccugguuauug

SEQ ID NO: 1603070 - RNA, 19 nt, Homo sapiens
  misc_RNA (1)...(19): siRNA sense strand
gaaggaaagaggcaaguag

SEQ ID NO: 1603071 - RNA, 19 nt, Homo sapiens
  misc_RNA (1)...(19): siRNA sense strand
ugaccagcaugagauauuu

SEQ ID NO: 1603072 - RNA, 19 nt, Homo sapiens
  misc_RNA (1)...(19): siRNA sense strand
gggcuacgccuucaucgaa

SEQ ID NO: 1603073 - RNA, 19 nt, Homo sapiens
  misc_RNA (1)...(19): siRNA sense strand
gacaagggaucgagaccau

SEQ ID NO: 1603074 - RNA, 19 nt, Homo sapiens
  misc_RNA (1)...(19): siRNA sense strand
gugccgugaucaaagcuua

SEQ ID NO: 1603075 - RNA, 19 nt, Homo sapiens
  misc_RNA (1)...(19): siRNA sense strand
cugauggccugguuauuga

SEQ ID NO: 1603076 - RNA, 19 nt, Homo sapiens
  misc_RNA (1)...(19): siRNA sense strand
caagggaucgagaccauga

SEQ ID NO: 1603077 - RNA, 19 nt, Homo sapiens
  misc_RNA (1)...(19): siRNA sense strand
gggacuuggucacagguuu

SEQ ID NO: 1603078 - RNA, 19 nt, Homo sapiens
  misc_RNA (1)...(19): siRNA sense strand
ggaggacaaauuaaaggaa

SEQ ID NO: 1603079 - RNA, 19 nt, Homo sapiens
  misc_RNA (1)...(19): siRNA sense strand
gcauugauggcaccgauga

SEQ ID NO: 1603080 - RNA, 19 nt, Homo sapiens
  misc_RNA (1)...(19): siRNA sense strand
ggagggagaagaaggaaag

SEQ ID NO: 1603081 - RNA, 19 nt, Homo sapiens
  misc_RNA (1)...(19): siRNA sense strand
ggguguggcccgacaauga

SEQ ID NO: 1603082 - RNA, 19 nt, Homo sapiens
  misc_RNA (1)...(19): siRNA sense strand
gcaaugcuggcacgauaug

SEQ ID NO: 1603083 - RNA, 19 nt, Homo sapiens
  misc_RNA (1)...(19): siRNA sense strand
gagagagggacuucagaga

SEQ ID NO: 1603084 - RNA, 19 nt, Homo sapiens
  misc_RNA (1)...(19): siRNA sense strand
gacuaaacuugcagaccaa

SEQ ID NO: 1603085 - RNA, 19 nt, Homo sapiens
  misc_RNA (1)...(19): siRNA sense strand
agaccaaggaggacaaauu

SEQ ID NO: 1603086 - RNA, 19 nt, Homo sapiens
  misc_RNA (1)...(19): siRNA sense strand
caaggaggacaaauuaaag

SEQ ID NO: 1603087 - RNA, 19 nt, Homo sapiens
  misc_RNA (1)...(19): siRNA sense strand
ucgaaaaccuauuaacuug

SEQ ID NO: 1603088 - RNA, 19 nt, Homo sapiens
  misc_RNA (1)...(19): siRNA sense strand
ggagaagagauggcaagaa

SEQ ID NO: 1603089 - RNA, 19 nt, Homo sapiens
  misc_RNA (1)...(19): siRNA sense strand
ggagagagagagggacuuc

SEQ ID NO: 1603090 - RNA, 19 nt, Homo sapiens
  misc_RNA (1)...(19): siRNA sense strand
acucaaagcgggcagcauu

SEQ ID NO: 1603091 - RNA, 19 nt, Homo sapiens
  misc_RNA (1)...(19): siRNA sense strand
ugagauauuuguggacuac

SEQ ID NO: 1603092 - RNA, 19 nt, Homo sapiens
  misc_RNA (1)...(19): siRNA sense strand
gagagagagggacuucaga

SEQ ID NO: 1603093 - RNA, 19 nt, Homo sapiens
  misc_RNA (1)...(19): siRNA sense strand
aaaggagucugggcaacug

SEQ ID NO: 1603094 - RNA, 19 nt, Homo sapiens
  misc_RNA (1)...(19): siRNA sense strand
agagggacuucagagauga

SEQ ID NO: 1603095 - RNA, 19 nt, Homo sapiens
  misc_RNA (1)...(19): siRNA sense strand
ggagcgugccgugaucaaa

SEQ ID NO: 1603096 - RNA, 19 nt, Homo sapiens
  misc_RNA (1)...(19): siRNA sense strand
agagauggcaagaaagaga

SEQ ID NO: 1603097 - RNA, 19 nt, Homo sapiens
  misc_RNA (1)...(19): siRNA sense strand
gagcuggaaaggacucuca

SEQ ID NO: 1603098 - RNA, 19 nt, Homo sapiens
  misc_RNA (1)...(19): siRNA sense strand
gagcgugccgugaucaaag

SEQ ID NO: 1603099 - RNA, 19 nt, Homo sapiens
  misc_RNA (1)...(19): siRNA sense strand
guuauugaccagcaugaga

SEQ ID NO: 1603100 - RNA, 19 nt, Homo sapiens
  misc_RNA (1)...(19): siRNA sense strand
ggacaaauuaaaggaaguc

SEQ ID NO: 1603101 - RNA, 19 nt, Homo sapiens
  misc_RNA (1)...(19): siRNA sense strand
cgacaaugacugggagaga

SEQ ID NO: 1603102 - RNA, 19 nt, Homo sapiens
  misc_RNA (1)...(19): siRNA sense strand
gcccaucgccaaggaguau

SEQ ID NO: 1603103 - RNA, 19 nt, Homo sapiens
  misc_RNA (1)...(19): siRNA sense strand
gcuggaaaggacucucaaa

SEQ ID NO: 1603104 - RNA, 19 nt, Homo sapiens
  misc_RNA (1)...(19): siRNA sense strand
gcagaccaaggaggacaaa

SEQ ID NO: 1603105 - RNA, 19 nt, Homo sapiens
  misc_RNA (1)...(19): siRNA sense strand
ggucagggacuuggucaca

SEQ ID NO: 1603106 - RNA, 19 nt, Homo sapiens
  misc_RNA (1)...(19): siRNA sense strand
agagagggacuucagagau

SEQ ID NO: 1603107 - RNA, 19 nt, Homo sapiens
  misc_RNA (1)...(19): siRNA sense strand
guggaucccucggcgacuu

SEQ ID NO: 1603108 - RNA, 19 nt, Homo sapiens
  misc_RNA (1)...(19): siRNA sense strand
ggacuacgagcuggaaagg

SEQ ID NO: 1603109 - RNA, 19 nt, Homo sapiens
  misc_RNA (1)...(19): siRNA sense strand
aaagcgggcagcauugaug

SEQ ID NO: 1603110 - RNA, 19 nt, Homo sapiens
  misc_RNA (1)...(19): siRNA sense strand
agaaggaaagaggcaagua

SEQ ID NO: 1603111 - RNA, 19 nt, Homo sapiens
  misc_RNA (1)...(19): siRNA sense strand
cgacuuggaggcggucuug

SEQ ID NO: 1603112 - RNA, 19 nt, Homo sapiens
  misc_RNA (1)...(19): siRNA sense strand
gaccagcaugagauauuug

SEQ ID NO: 1603113 - RNA, 19 nt, Homo sapiens
  misc_RNA (1)...(19): siRNA sense strand
gaugcugauggccugguua

SEQ ID NO: 1603114 - RNA, 19 nt, Homo sapiens
  misc_RNA (1)...(19): siRNA sense strand
ggcuacgccuucaucgaau

SEQ ID NO: 1603115 - RNA, 19 nt, Homo sapiens
  misc_RNA (1)...(19): siRNA sense strand
gaaaggcgggagcgaucuc

SEQ ID NO: 1603116 - RNA, 19 nt, Homo sapiens
  misc_RNA (1)...(19): siRNA sense strand
agauauuuguggacuacga

SEQ ID NO: 1603117 - RNA, 19 nt, Homo sapiens
  misc_RNA (1)...(19): siRNA sense strand
caaagcgggcagcauugau

SEQ ID NO: 1603118 - RNA, 19 nt, Homo sapiens
  misc_RNA (1)...(19): siRNA sense strand
gagaagagauggcaagaaa

SEQ ID NO: 1603119 - RNA, 19 nt, Homo sapiens
  misc_RNA (1)...(19): siRNA sense strand
caacaaaggugucauagga

SEQ ID NO: 1603120 - RNA, 19 nt, Homo sapiens
  misc_RNA (1)...(19): siRNA sense strand
gaucaaagcuuaccgagau

SEQ ID NO: 1603121 - RNA, 19 nt, Homo sapiens
  misc_RNA (1)...(19): siRNA sense strand
gggcaaugcuggcacgaua

SEQ ID NO: 1603122 - RNA, 19 nt, Homo sapiens
  misc_RNA (1)...(19): siRNA sense strand
gaccaaggaggacaaauua

SEQ ID NO: 1603123 - RNA, 19 nt, Homo sapiens
  misc_RNA (1)...(19): siRNA sense strand
gaagagauggcaagaaaga

SEQ ID NO: 1603124 - RNA, 19 nt, Homo sapiens
  misc_RNA (1)...(19): siRNA sense strand
gagagggacuucagagaug

SEQ ID NO: 1603125 - RNA, 19 nt, Homo sapiens
  misc_RNA (1)...(19): siRNA sense strand
ccaaggaggacaaauuaaa

SEQ ID NO: 1603126 - RNA, 19 nt, Homo sapiens
  misc_RNA (1)...(19): siRNA sense strand
gcuacgccuucaucgaaua

SEQ ID NO: 1603127 - RNA, 19 nt, Homo sapiens
  misc_RNA (1)...(19): siRNA sense strand
gcugauggccugguuauug

SEQ ID NO: 1603128 - RNA, 19 nt, Homo sapiens
  misc_RNA (1)...(19): siRNA sense strand
gaaggaaagaggcaaguag

SEQ ID NO: 1603129 - RNA, 19 nt, Homo sapiens
  misc_RNA (1)...(19): siRNA sense strand
ugaccagcaugagauauuu

SEQ ID NO: 1603130 - RNA, 19 nt, Homo sapiens
  misc_RNA (1)...(19): siRNA sense strand
gggcuacgccuucaucgaa

SEQ ID NO: 1603131 - RNA, 19 nt, Homo sapiens
  misc_RNA (1)...(19): siRNA sense strand
gacaagggaucgagaccau

SEQ ID NO: 1603132 - RNA, 19 nt, Homo sapiens
  misc_RNA (1)...(19): siRNA sense strand
gugccgugaucaaagcuua

SEQ ID NO: 1603133 - RNA, 19 nt, Homo sapiens
  misc_RNA (1)...(19): siRNA sense strand
cugauggccugguuauuga

SEQ ID NO: 1603134 - RNA, 19 nt, Homo sapiens
  misc_RNA (1)...(19): siRNA sense strand
caagggaucgagaccauga

SEQ ID NO: 1603135 - RNA, 19 nt, Homo sapiens
  misc_RNA (1)...(19): siRNA sense strand
gggacuuggucacagguuu

SEQ ID NO: 1603136 - RNA, 19 nt, Homo sapiens
  misc_RNA (1)...(19): siRNA sense strand
ggaggacaaauuaaaggaa

SEQ ID NO: 1603137 - RNA, 19 nt, Homo sapiens
  misc_RNA (1)...(19): siRNA sense strand
gcauugauggcaccgauga

SEQ ID NO: 1603138 - RNA, 19 nt, Homo sapiens
  misc_RNA (1)...(19): siRNA sense strand
ggagggagaagaaggaaag

SEQ ID NO: 1603139 - RNA, 19 nt, Homo sapiens
  misc_RNA (1)...(19): siRNA sense strand
ggguguggcccgacaauga

SEQ ID NO: 1603140 - RNA, 19 nt, Homo sapiens
  misc_RNA (1)...(19): siRNA sense strand
gcaaugcuggcacgauaug

SEQ ID NO: 1603141 - RNA, 19 nt, Homo sapiens
  misc_RNA (1)...(19): siRNA sense strand
gagagagggacuucagaga

SEQ ID NO: 1603142 - RNA, 19 nt, Homo sapiens
  misc_RNA (1)...(19): siRNA sense strand
gacuaaacuugcagaccaa

SEQ ID NO: 1603143 - RNA, 19 nt, Homo sapiens
  misc_RNA (1)...(19): siRNA sense strand
agaccaaggaggacaaauu

SEQ ID NO: 1603144 - RNA, 19 nt, Homo sapiens
  misc_RNA (1)...(19): siRNA sense strand
caaggaggacaaauuaaag

SEQ ID NO: 1603145 - RNA, 19 nt, Homo sapiens
  misc_RNA (1)...(19): siRNA sense strand
ucgaaaaccuauuaacuug

SEQ ID NO: 1603146 - RNA, 19 nt, Homo sapiens
  misc_RNA (1)...(19): siRNA sense strand
ggagaagagauggcaagaa

SEQ ID NO: 1603147 - RNA, 19 nt, Homo sapiens
  misc_RNA (1)...(19): siRNA sense strand
ggagagagagagggacuuc

SEQ ID NO: 1603148 - RNA, 19 nt, Homo sapiens
  misc_RNA (1)...(19): siRNA sense strand
acucaaagcgggcagcauu

SEQ ID NO: 1603149 - RNA, 19 nt, Homo sapiens
  misc_RNA (1)...(19): siRNA sense strand
ugagauauuuguggacuac

SEQ ID NO: 1603150 - RNA, 19 nt, Homo sapiens
  misc_RNA (1)...(19): siRNA sense strand
gagagagagggacuucaga

SEQ ID NO: 1603151 - RNA, 19 nt, Homo sapiens
  misc_RNA (1)...(19): siRNA sense strand
aaaggagucugggcaacug

SEQ ID NO: 1603152 - RNA, 19 nt, Homo sapiens
  misc_RNA (1)...(19): siRNA sense strand
agagggacuucagagauga

SEQ ID NO: 1603153 - RNA, 19 nt, Homo sapiens
  misc_RNA (1)...(19): siRNA sense strand
ggagcgugccgugaucaaa

SEQ ID NO: 1603154 - RNA, 19 nt, Homo sapiens
  misc_RNA (1)...(19): siRNA sense strand
agagauggcaagaaagaga

SEQ ID NO: 1603155 - RNA, 19 nt, Homo sapiens
  misc_RNA (1)...(19): siRNA sense strand
gagcuggaaaggacucuca

SEQ ID NO: 1603156 - RNA, 19 nt, Homo sapiens
  misc_RNA (1)...(19): siRNA sense strand
gagcgugccgugaucaaag

SEQ ID NO: 1603157 - RNA, 19 nt, Homo sapiens
  misc_RNA (1)...(19): siRNA sense strand
guuauugaccagcaugaga

SEQ ID NO: 1603158 - RNA, 19 nt, Homo sapiens
  misc_RNA (1)...(19): siRNA sense strand
ggacaaauuaaaggaaguc

SEQ ID NO: 1603159 - RNA, 19 nt, Homo sapiens
  misc_RNA (1)...(19): siRNA sense strand
cgacaaugacugggagaga

SEQ ID NO: 1603160 - RNA, 19 nt, Homo sapiens
  misc_RNA (1)...(19): siRNA sense strand
gcccaucgccaaggaguau

SEQ ID NO: 1603161 - RNA, 19 nt, Homo sapiens
  misc_RNA (1)...(19): siRNA sense strand
gcuggaaaggacucucaaa

SEQ ID NO: 1603162 - RNA, 19 nt, Homo sapiens
  misc_RNA (1)...(19): siRNA sense strand
gcagaccaaggaggacaaa

SEQ ID NO: 1603163 - RNA, 19 nt, Homo sapiens
  misc_RNA (1)...(19): siRNA sense strand
ggucagggacuuggucaca

SEQ ID NO: 1603164 - RNA, 19 nt, Homo sapiens
  misc_RNA (1)...(19): siRNA sense strand
agagagggacuucagagau

SEQ ID NO: 1603165 - RNA, 19 nt, Homo sapiens
  misc_RNA (1)...(19): siRNA sense strand
guggaucccucggcgacuu

SEQ ID NO: 1603166 - RNA, 19 nt, Homo sapiens
  misc_RNA (1)...(19): siRNA sense strand
ggacuacgagcuggaaagg

SEQ ID NO: 1603167 - RNA, 19 nt, Homo sapiens
  misc_RNA (1)...(19): siRNA sense strand
aaagcgggcagcauugaug

SEQ ID NO: 1603168 - RNA, 19 nt, Homo sapiens
  misc_RNA (1)...(19): siRNA sense strand
agaaggaaagaggcaagua

SEQ ID NO: 1603169 - RNA, 19 nt, Homo sapiens
  misc_RNA (1)...(19): siRNA sense strand
cgacuuggaggcggucuug

SEQ ID NO: 1603170 - RNA, 19 nt, Homo sapiens
  misc_RNA (1)...(19): siRNA sense strand
gaccagcaugagauauuug

SEQ ID NO: 1603171 - RNA, 19 nt, Homo sapiens
  misc_RNA (1)...(19): siRNA sense strand
gaugcugauggccugguua

SEQ ID NO: 1603172 - RNA, 19 nt, Homo sapiens
  misc_RNA (1)...(19): siRNA sense strand
ggcuacgccuucaucgaau

SEQ ID NO: 1603173 - RNA, 19 nt, Homo sapiens
  misc_RNA (1)...(19): siRNA sense strand
gaaaggcgggagcgaucuc

SEQ ID NO: 1603174 - RNA, 19 nt, Homo sapiens
  misc_RNA (1)...(19): siRNA sense strand
agauauuuguggacuacga

SEQ ID NO: 1603175 - RNA, 19 nt, Homo sapiens
  misc_RNA (1)...(19): siRNA sense strand
caaagcgggcagcauugau

SEQ ID NO: 1603176 - RNA, 19 nt, Homo sapiens
  misc_RNA (1)...(19): siRNA sense strand
gagaagagauggcaagaaa

SEQ ID NO: 1603177 - RNA, 19 nt, Homo sapiens
  misc_RNA (1)...(19): siRNA sense strand
caacaaaggugucauagga

SEQ ID NO: 1603178 - RNA, 19 nt, Homo sapiens
  misc_RNA (1)...(19): siRNA sense strand
gaucaaagcuuaccgagau

SEQ ID NO: 1603179 - RNA, 19 nt, Homo sapiens
  misc_RNA (1)...(19): siRNA sense strand
gggcaaugcuggcacgaua

SEQ ID NO: 1603180 - RNA, 19 nt, Homo sapiens
  misc_RNA (1)...(19): siRNA sense strand
gaccaaggaggacaaauua

SEQ ID NO: 1603181 - RNA, 19 nt, Homo sapiens
  misc_RNA (1)...(19): siRNA sense strand
gaagagauggcaagaaaga

SEQ ID NO: 1603182 - RNA, 19 nt, Homo sapiens
  misc_RNA (1)...(19): siRNA sense strand
gagagggacuucagagaug

SEQ ID NO: 1603183 - RNA, 19 nt, Homo sapiens
  misc_RNA (1)...(19): siRNA sense strand
ccaaggaggacaaauuaaa

SEQ ID NO: 1603184 - RNA, 19 nt, Homo sapiens
  misc_RNA (1)...(19): siRNA sense strand
gcuacgccuucaucgaaua

SEQ ID NO: 1603185 - RNA, 19 nt, Homo sapiens
  misc_RNA (1)...(19): siRNA sense strand
gcugauggccugguuauug

SEQ ID NO: 1603186 - RNA, 19 nt, Homo sapiens
  misc_RNA (1)...(19): siRNA sense strand
gaaggaaagaggcaaguag

SEQ ID NO: 1603187 - RNA, 19 nt, Homo sapiens
  misc_RNA (1)...(19): siRNA sense strand
ugaccagcaugagauauuu

SEQ ID NO: 1603188 - RNA, 19 nt, Homo sapiens
  misc_RNA (1)...(19): siRNA sense strand
gggcuacgccuucaucgaa

SEQ ID NO: 1603189 - RNA, 19 nt, Homo sapiens
  misc_RNA (1)...(19): siRNA sense strand
gacaagggaucgagaccau

SEQ ID NO: 1603190 - RNA, 19 nt, Homo sapiens
  misc_RNA (1)...(19): siRNA sense strand
gugccgugaucaaagcuua

SEQ ID NO: 1603191 - RNA, 19 nt, Homo sapiens
  misc_RNA (1)...(19): siRNA sense strand
cugauggccugguuauuga

SEQ ID NO: 1603192 - RNA, 19 nt, Homo sapiens
  misc_RNA (1)...(19): siRNA sense strand
caagggaucgagaccauga

SEQ ID NO: 1603193 - RNA, 19 nt, Homo sapiens
  misc_RNA (1)...(19): siRNA sense strand
gggacuuggucacagguuu

SEQ ID NO: 1603194 - RNA, 19 nt, Homo sapiens
  misc_RNA (1)...(19): siRNA sense strand
ggaggacaaauuaaaggaa

SEQ ID NO: 1603195 - RNA, 19 nt, Homo sapiens
  misc_RNA (1)...(19): siRNA sense strand
gcauugauggcaccgauga

SEQ ID NO: 1603196 - RNA, 19 nt, Homo sapiens
  misc_RNA (1)...(19): siRNA sense strand
ggagggagaagaaggaaag

SEQ ID NO: 1603197 - RNA, 19 nt, Homo sapiens
  misc_RNA (1)...(19): siRNA sense strand
ggguguggcccgacaauga

SEQ ID NO: 1603198 - RNA, 19 nt, Homo sapiens
  misc_RNA (1)...(19): siRNA sense strand
gcaaugcuggcacgauaug

SEQ ID NO: 1603199 - RNA, 19 nt, Homo sapiens
  misc_RNA (1)...(19): siRNA sense strand
gagagagggacuucagaga

SEQ ID NO: 1603200 - RNA, 19 nt, Homo sapiens
  misc_RNA (1)...(19): siRNA sense strand
gacuaaacuugcagaccaa

SEQ ID NO: 1603201 - RNA, 19 nt, Homo sapiens
  misc_RNA (1)...(19): siRNA sense strand
agaccaaggaggacaaauu

SEQ ID NO: 1603202 - RNA, 19 nt, Homo sapiens
  misc_RNA (1)...(19): siRNA sense strand
caaggaggacaaauuaaag

SEQ ID NO: 1603203 - RNA, 19 nt, Homo sapiens
  misc_RNA (1)...(19): siRNA sense strand
ucgaaaaccuauuaacuug

SEQ ID NO: 1603204 - RNA, 19 nt, Homo sapiens
  misc_RNA (1)...(19): siRNA sense strand
ggagaagagauggcaagaa

SEQ ID NO: 1603205 - RNA, 19 nt, Homo sapiens
  misc_RNA (1)...(19): siRNA sense strand
ggagagagagagggacuuc

SEQ ID NO: 1603206 - RNA, 19 nt, Homo sapiens
  misc_RNA (1)...(19): siRNA sense strand
acucaaagcgggcagcauu

SEQ ID NO: 1603207 - RNA, 19 nt, Homo sapiens
  misc_RNA (1)...(19): siRNA sense strand
ugagauauuuguggacuac

SEQ ID NO: 1603208 - RNA, 19 nt, Homo sapiens
  misc_RNA (1)...(19): siRNA sense strand
gagagagagggacuucaga

SEQ ID NO: 1603209 - RNA, 19 nt, Homo sapiens
  misc_RNA (1)...(19): siRNA sense strand
aaaggagucugggcaacug

SEQ ID NO: 1603210 - RNA, 19 nt, Homo sapiens
  misc_RNA (1)...(19): siRNA sense strand
agagggacuucagagauga

SEQ ID NO: 1603211 - RNA, 19 nt, Homo sapiens
  misc_RNA (1)...(19): siRNA sense strand
ggagcgugccgugaucaaa

SEQ ID NO: 1603212 - RNA, 19 nt, Homo sapiens
  misc_RNA (1)...(19): siRNA sense strand
agagauggcaagaaagaga

SEQ ID NO: 1603213 - RNA, 19 nt, Homo sapiens
  misc_RNA (1)...(19): siRNA sense strand
gagcuggaaaggacucuca

SEQ ID NO: 1603214 - RNA, 19 nt, Homo sapiens
  misc_RNA (1)...(19): siRNA sense strand
gagcgugccgugaucaaag

SEQ ID NO: 1603215 - RNA, 19 nt, Homo sapiens
  misc_RNA (1)...(19): siRNA sense strand
guuauugaccagcaugaga

SEQ ID NO: 1603216 - RNA, 19 nt, Homo sapiens
  misc_RNA (1)...(19): siRNA sense strand
ggacaaauuaaaggaaguc

SEQ ID NO: 1603217 - RNA, 19 nt, Homo sapiens
  misc_RNA (1)...(19): siRNA sense strand
cgacaaugacugggagaga

SEQ ID NO: 1603218 - RNA, 19 nt, Homo sapiens
  misc_RNA (1)...(19): siRNA sense strand
gcccaucgccaaggaguau

SEQ ID NO: 1603219 - RNA, 19 nt, Homo sapiens
  misc_RNA (1)...(19): siRNA sense strand
gcuggaaaggacucucaaa

SEQ ID NO: 1603220 - RNA, 19 nt, Homo sapiens
  misc_RNA (1)...(19): siRNA sense strand
gcagaccaaggaggacaaa

SEQ ID NO: 1603221 - RNA, 19 nt, Homo sapiens
  misc_RNA (1)...(19): siRNA sense strand
ggucagggacuuggucaca

SEQ ID NO: 1603222 - RNA, 19 nt, Homo sapiens
  misc_RNA (1)...(19): siRNA sense strand
agagagggacuucagagau

SEQ ID NO: 1603223 - RNA, 19 nt, Homo sapiens
  misc_RNA (1)...(19): siRNA sense strand
guggaucccucggcgacuu

SEQ ID NO: 1603224 - RNA, 19 nt, Homo sapiens
  misc_RNA (1)...(19): siRNA sense strand
ggacuacgagcuggaaagg

SEQ ID NO: 1603225 - RNA, 19 nt, Homo sapiens
  misc_RNA (1)...(19): siRNA sense strand
aaagcgggcagcauugaug

SEQ ID NO: 1603226 - RNA, 19 nt, Homo sapiens
  misc_RNA (1)...(19): siRNA sense strand
agaaggaaagaggcaagua

SEQ ID NO: 1603227 - RNA, 19 nt, Homo sapiens
  misc_RNA (1)...(19): siRNA sense strand
cgacuuggaggcggucuug

SEQ ID NO: 1603228 - RNA, 19 nt, Homo sapiens
  misc_RNA (1)...(19): siRNA sense strand
gaccagcaugagauauuug

SEQ ID NO: 1603229 - RNA, 19 nt, Homo sapiens
  misc_RNA (1)...(19): siRNA sense strand
gaugcugauggccugguua

SEQ ID NO: 1603230 - RNA, 19 nt, Homo sapiens
  misc_RNA (1)...(19): siRNA sense strand
ggcuacgccuucaucgaau

SEQ ID NO: 1603231 - RNA, 19 nt, Homo sapiens
  misc_RNA (1)...(19): siRNA sense strand
gaaaggcgggagcgaucuc

SEQ ID NO: 1603232 - RNA, 19 nt, Homo sapiens
  misc_RNA (1)...(19): siRNA sense strand
agauauuuguggacuacga

SEQ ID NO: 1603233 - RNA, 19 nt, Homo sapiens
  misc_RNA (1)...(19): siRNA sense strand
caaagcgggcagcauugau

SEQ ID NO: 1603234 - RNA, 19 nt, Homo sapiens
  misc_RNA (1)...(19): siRNA sense strand
gagaagagauggcaagaaa

SEQ ID NO: 1603235 - RNA, 19 nt, Homo sapiens
  misc_RNA (1)...(19): siRNA sense strand
caacaaaggugucauagga

SEQ ID NO: 1603236 - RNA, 19 nt, Homo sapiens
  misc_RNA (1)...(19): siRNA sense strand
gaucaaagcuuaccgagau

SEQ ID NO: 1603237 - RNA, 19 nt, Homo sapiens
  misc_RNA (1)...(19): siRNA sense strand
gggcaaugcuggcacgaua

SEQ ID NO: 1603238 - RNA, 19 nt, Homo sapiens
  misc_RNA (1)...(19): siRNA sense strand
gaccaaggaggacaaauua

SEQ ID NO: 1603239 - RNA, 19 nt, Homo sapiens
  misc_RNA (1)...(19): siRNA sense strand
gaagagauggcaagaaaga

SEQ ID NO: 1603240 - RNA, 19 nt, Homo sapiens
  misc_RNA (1)...(19): siRNA sense strand
gagagggacuucagagaug

SEQ ID NO: 1603241 - RNA, 19 nt, Homo sapiens
  misc_RNA (1)...(19): siRNA sense strand
ccaaggaggacaaauuaaa

SEQ ID NO: 1603242 - RNA, 19 nt, Homo sapiens
  misc_RNA (1)...(19): siRNA sense strand
gcuacgccuucaucgaaua

SEQ ID NO: 1603243 - RNA, 19 nt, Homo sapiens
  misc_RNA (1)...(19): siRNA sense strand
gcugauggccugguuauug

SEQ ID NO: 1603244 - RNA, 19 nt, Homo sapiens
  misc_RNA (1)...(19): siRNA sense strand
gaaggaaagaggcaaguag

SEQ ID NO: 1603245 - RNA, 19 nt, Homo sapiens
  misc_RNA (1)...(19): siRNA sense strand
ugaccagcaugagauauuu

SEQ ID NO: 1603246 - RNA, 19 nt, Homo sapiens
  misc_RNA (1)...(19): siRNA sense strand
gggcuacgccuucaucgaa

SEQ ID NO: 1603247 - RNA, 19 nt, Homo sapiens
  misc_RNA (1)...(19): siRNA sense strand
gacaagggaucgagaccau

SEQ ID NO: 1603248 - RNA, 19 nt, Homo sapiens
  misc_RNA (1)...(19): siRNA sense strand
gugccgugaucaaagcuua

SEQ ID NO: 1603249 - RNA, 19 nt, Homo sapiens
  misc_RNA (1)...(19): siRNA sense strand
cugauggccugguuauuga

SEQ ID NO: 1603250 - RNA, 19 nt, Homo sapiens
  misc_RNA (1)...(19): siRNA sense strand
caagggaucgagaccauga

SEQ ID NO: 1603251 - RNA, 19 nt, Homo sapiens
  misc_RNA (1)...(19): siRNA sense strand
gggacuuggucacagguuu

SEQ ID NO: 1603252 - RNA, 19 nt, Homo sapiens
  misc_RNA (1)...(19): siRNA sense strand
ggaggacaaauuaaaggaa

SEQ ID NO: 1603253 - RNA, 19 nt, Homo sapiens
  misc_RNA (1)...(19): siRNA sense strand
gcauugauggcaccgauga

SEQ ID NO: 1603254 - RNA, 19 nt, Homo sapiens
  misc_RNA (1)...(19): siRNA sense strand
ggagggagaagaaggaaag

SEQ ID NO: 1603255 - RNA, 19 nt, Homo sapiens
  misc_RNA (1)...(19): siRNA sense strand
ggguguggcccgacaauga

SEQ ID NO: 1603256 - RNA, 19 nt, Homo sapiens
  misc_RNA (1)...(19): siRNA sense strand
gcaaugcuggcacgauaug

SEQ ID NO: 1603257 - RNA, 19 nt, Homo sapiens
  misc_RNA (1)...(19): siRNA sense strand
gagagagggacuucagaga

SEQ ID NO: 1603258 - RNA, 19 nt, Homo sapiens
  misc_RNA (1)...(19): siRNA sense strand
gacuaaacuugcagaccaa

SEQ ID NO: 1603259 - RNA, 19 nt, Homo sapiens
  misc_RNA (1)...(19): siRNA sense strand
agaccaaggaggacaaauu

SEQ ID NO: 1603260 - RNA, 19 nt, Homo sapiens
  misc_RNA (1)...(19): siRNA sense strand
caaggaggacaaauuaaag

SEQ ID NO: 1603261 - RNA, 19 nt, Homo sapiens
  misc_RNA (1)...(19): siRNA sense strand
ucgaaaaccuauuaacuug

SEQ ID NO: 1603262 - RNA, 19 nt, Homo sapiens
  misc_RNA (1)...(19): siRNA sense strand
ggagaagagauggcaagaa

SEQ ID NO: 1603263 - RNA, 19 nt, Homo sapiens
  misc_RNA (1)...(19): siRNA sense strand
ggagagagagagggacuuc

SEQ ID NO: 1603264 - RNA, 19 nt, Homo sapiens
  misc_RNA (1)...(19): siRNA sense strand
acucaaagcgggcagcauu

SEQ ID NO: 1603265 - RNA, 19 nt, Homo sapiens
  misc_RNA (1)...(19): siRNA sense strand
ugagauauuuguggacuac

SEQ ID NO: 1603266 - RNA, 19 nt, Homo sapiens
  misc_RNA (1)...(19): siRNA sense strand
gagagagagggacuucaga

SEQ ID NO: 1603267 - RNA, 19 nt, Homo sapiens
  misc_RNA (1)...(19): siRNA sense strand
aaaggagucugggcaacug

SEQ ID NO: 1603268 - RNA, 19 nt, Homo sapiens
  misc_RNA (1)...(19): siRNA sense strand
agagggacuucagagauga

SEQ ID NO: 1603269 - RNA, 19 nt, Homo sapiens
  misc_RNA (1)...(19): siRNA sense strand
ggagcgugccgugaucaaa

SEQ ID NO: 1603270 - RNA, 19 nt, Homo sapiens
  misc_RNA (1)...(19): siRNA sense strand
agagauggcaagaaagaga

SEQ ID NO: 1603271 - RNA, 19 nt, Homo sapiens
  misc_RNA (1)...(19): siRNA sense strand
gagcuggaaaggacucuca

SEQ ID NO: 1603272 - RNA, 19 nt, Homo sapiens
  misc_RNA (1)...(19): siRNA sense strand
gagcgugccgugaucaaag

SEQ ID NO: 1603273 - RNA, 19 nt, Homo sapiens
  misc_RNA (1)...(19): siRNA sense strand
guuauugaccagcaugaga

SEQ ID NO: 1603274 - RNA, 19 nt, Homo sapiens
  misc_RNA (1)...(19): siRNA sense strand
ggacaaauuaaaggaaguc

SEQ ID NO: 1603275 - RNA, 19 nt, Homo sapiens
  misc_RNA (1)...(19): siRNA sense strand
cgacaaugacugggagaga

SEQ ID NO: 1603276 - RNA, 19 nt, Homo sapiens
  misc_RNA (1)...(19): siRNA sense strand
gcccaucgccaaggaguau

SEQ ID NO: 1603277 - RNA, 19 nt, Homo sapiens
  misc_RNA (1)...(19): siRNA sense strand
gcuggaaaggacucucaaa

SEQ ID NO: 1603278 - RNA, 19 nt, Homo sapiens
  misc_RNA (1)...(19): siRNA sense strand
gcagaccaaggaggacaaa

SEQ ID NO: 1603279 - RNA, 19 nt, Homo sapiens
  misc_RNA (1)...(19): siRNA sense strand
ggucagggacuuggucaca

SEQ ID NO: 1603280 - RNA, 19 nt, Homo sapiens
  misc_RNA (1)...(19): siRNA sense strand
agagagggacuucagagau

SEQ ID NO: 1603281 - RNA, 19 nt, Homo sapiens
  misc_RNA (1)...(19): siRNA sense strand
guggaucccucggcgacuu

SEQ ID NO: 1603282 - RNA, 19 nt, Homo sapiens
  misc_RNA (1)...(19): siRNA sense strand
ggacuacgagcuggaaagg

SEQ ID NO: 1603283 - RNA, 19 nt, Homo sapiens
  misc_RNA (1)...(19): siRNA sense strand
aaagcgggcagcauugaug

SEQ ID NO: 1603284 - RNA, 19 nt, Homo sapiens
  misc_RNA (1)...(19): siRNA sense strand
agaaggaaagaggcaagua

SEQ ID NO: 1603285 - RNA, 19 nt, Homo sapiens
  misc_RNA (1)...(19): siRNA sense strand
cgacuuggaggcggucuug

SEQ ID NO: 1603286 - RNA, 19 nt, Homo sapiens
  misc_RNA (1)...(19): siRNA sense strand
gaccagcaugagauauuug

SEQ ID NO: 1603287 - RNA, 19 nt, Homo sapiens
  misc_RNA (1)...(19): siRNA sense strand
gaugcugauggccugguua

SEQ ID NO: 1603288 - RNA, 19 nt, Homo sapiens
  misc_RNA (1)...(19): siRNA sense strand
ggcuacgccuucaucgaau

SEQ ID NO: 1603289 - RNA, 19 nt, Homo sapiens
  misc_RNA (1)...(19): siRNA sense strand
gaaaggcgggagcgaucuc

SEQ ID NO: 1603290 - RNA, 19 nt, Homo sapiens
  misc_RNA (1)...(19): siRNA sense strand
agauauuuguggacuacga

SEQ ID NO: 1603291 - RNA, 19 nt, Homo sapiens
  misc_RNA (1)...(19): siRNA sense strand
caaagcgggcagcauugau

SEQ ID NO: 1603292 - RNA, 19 nt, Homo sapiens
  misc_RNA (1)...(19): siRNA sense strand
gagaagagauggcaagaaa

SEQ ID NO: 1603293 - RNA, 19 nt, Homo sapiens
  misc_RNA (1)...(19): siRNA sense strand
caacaaaggugucauagga

SEQ ID NO: 1603294 - RNA, 19 nt, Homo sapiens
  misc_RNA (1)...(19): siRNA sense strand
gaucaaagcuuaccgagau

SEQ ID NO: 1603295 - RNA, 19 nt, Homo sapiens
  misc_RNA (1)...(19): siRNA sense strand
gggcaaugcuggcacgaua

SEQ ID NO: 1603296 - RNA, 19 nt, Homo sapiens
  misc_RNA (1)...(19): siRNA sense strand
gaccaaggaggacaaauua

SEQ ID NO: 1603297 - RNA, 19 nt, Homo sapiens
  misc_RNA (1)...(19): siRNA sense strand
gaagagauggcaagaaaga

SEQ ID NO: 1603298 - RNA, 19 nt, Homo sapiens
  misc_RNA (1)...(19): siRNA sense strand
gagagggacuucagagaug

SEQ ID NO: 1603299 - RNA, 19 nt, Homo sapiens
  misc_RNA (1)...(19): siRNA sense strand
ccaaggaggacaaauuaaa

SEQ ID NO: 1603300 - RNA, 19 nt, Homo sapiens
  misc_RNA (1)...(19): siRNA sense strand
gcuacgccuucaucgaaua

SEQ ID NO: 1603301 - RNA, 19 nt, Homo sapiens
  misc_RNA (1)...(19): siRNA sense strand
gcugauggccugguuauug

SEQ ID NO: 1603302 - RNA, 19 nt, Homo sapiens
  misc_RNA (1)...(19): siRNA sense strand
gaaggaaagaggcaaguag

SEQ ID NO: 1603303 - RNA, 19 nt, Homo sapiens
  misc_RNA (1)...(19): siRNA sense strand
ugaccagcaugagauauuu

SEQ ID NO: 1603304 - RNA, 19 nt, Homo sapiens
  misc_RNA (1)...(19): siRNA sense strand
gggcuacgccuucaucgaa

SEQ ID NO: 1603305 - RNA, 19 nt, Homo sapiens
  misc_RNA (1)...(19): siRNA sense strand
gacaagggaucgagaccau

SEQ ID NO: 1603306 - RNA, 19 nt, Homo sapiens
  misc_RNA (1)...(19): siRNA sense strand
gugccgugaucaaagcuua

SEQ ID NO: 1603307 - RNA, 19 nt, Homo sapiens
  misc_RNA (1)...(19): siRNA sense strand
cugauggccugguuauuga

SEQ ID NO: 1603308 - RNA, 19 nt, Homo sapiens
  misc_RNA (1)...(19): siRNA sense strand
caagggaucgagaccauga

SEQ ID NO: 1603309 - RNA, 19 nt, Homo sapiens
  misc_RNA (1)...(19): siRNA sense strand
gggacuuggucacagguuu

SEQ ID NO: 1603310 - RNA, 19 nt, Homo sapiens
  misc_RNA (1)...(19): siRNA sense strand
ggaggacaaauuaaaggaa

SEQ ID NO: 1603311 - RNA, 19 nt, Homo sapiens
  misc_RNA (1)...(19): siRNA sense strand
gcauugauggcaccgauga

SEQ ID NO: 1603312 - RNA, 19 nt, Homo sapiens
  misc_RNA (1)...(19): siRNA sense strand
ggagggagaagaaggaaag

SEQ ID NO: 1603313 - RNA, 19 nt, Homo sapiens
  misc_RNA (1)...(19): siRNA sense strand
ggguguggcccgacaauga

SEQ ID NO: 1603314 - RNA, 19 nt, Homo sapiens
  misc_RNA (1)...(19): siRNA sense strand
gcaaugcuggcacgauaug

SEQ ID NO: 1603315 - RNA, 19 nt, Homo sapiens
  misc_RNA (1)...(19): siRNA sense strand
gagagagggacuucagaga

SEQ ID NO: 1603316 - RNA, 19 nt, Homo sapiens
  misc_RNA (1)...(19): siRNA sense strand
gacuaaacuugcagaccaa

SEQ ID NO: 1603317 - RNA, 19 nt, Homo sapiens
  misc_RNA (1)...(19): siRNA sense strand
agaccaaggaggacaaauu

SEQ ID NO: 1603318 - RNA, 19 nt, Homo sapiens
  misc_RNA (1)...(19): siRNA sense strand
caaggaggacaaauuaaag

SEQ ID NO: 1603319 - RNA, 19 nt, Homo sapiens
  misc_RNA (1)...(19): siRNA sense strand
ucgaaaaccuauuaacuug

SEQ ID NO: 1603320 - RNA, 19 nt, Homo sapiens
  misc_RNA (1)...(19): siRNA sense strand
ggagaagagauggcaagaa

SEQ ID NO: 1603321 - RNA, 19 nt, Homo sapiens
  misc_RNA (1)...(19): siRNA sense strand
ggagagagagagggacuuc

SEQ ID NO: 1603322 - RNA, 19 nt, Homo sapiens
  misc_RNA (1)...(19): siRNA sense strand
acucaaagcgggcagcauu

SEQ ID NO: 1603323 - RNA, 19 nt, Homo sapiens
  misc_RNA (1)...(19): siRNA sense strand
ugagauauuuguggacuac

SEQ ID NO: 1603324 - RNA, 19 nt, Homo sapiens
  misc_RNA (1)...(19): siRNA sense strand
gagagagagggacuucaga

SEQ ID NO: 1603325 - RNA, 19 nt, Homo sapiens
  misc_RNA (1)...(19): siRNA sense strand
aaaggagucugggcaacug

SEQ ID NO: 1603326 - RNA, 19 nt, Homo sapiens
  misc_RNA (1)...(19): siRNA sense strand
agagggacuucagagauga

SEQ ID NO: 1603327 - RNA, 19 nt, Homo sapiens
  misc_RNA (1)...(19): siRNA sense strand
ggagcgugccgugaucaaa

SEQ ID NO: 1603328 - RNA, 19 nt, Homo sapiens
  misc_RNA (1)...(19): siRNA sense strand
agagauggcaagaaagaga

SEQ ID NO: 1603329 - RNA, 19 nt, Homo sapiens
  misc_RNA (1)...(19): siRNA sense strand
gagcuggaaaggacucuca

SEQ ID NO: 1603330 - RNA, 19 nt, Homo sapiens
  misc_RNA (1)...(19): siRNA sense strand
gagcgugccgugaucaaag

SEQ ID NO: 1603331 - RNA, 19 nt, Homo sapiens
  misc_RNA (1)...(19): siRNA sense strand
guuauugaccagcaugaga

SEQ ID NO: 1603332 - RNA, 19 nt, Homo sapiens
  misc_RNA (1)...(19): siRNA sense strand
ggacaaauuaaaggaaguc

SEQ ID NO: 1603333 - RNA, 19 nt, Homo sapiens
  misc_RNA (1)...(19): siRNA sense strand
cgacaaugacugggagaga

SEQ ID NO: 1603334 - RNA, 19 nt, Homo sapiens
  misc_RNA (1)...(19): siRNA sense strand
gcccaucgccaaggaguau

SEQ ID NO: 1603335 - RNA, 19 nt, Homo sapiens
  misc_RNA (1)...(19): siRNA sense strand
gcuggaaaggacucucaaa

SEQ ID NO: 1603336 - RNA, 19 nt, Homo sapiens
  misc_RNA (1)...(19): siRNA sense strand
gcagaccaaggaggacaaa

SEQ ID NO: 1603337 - RNA, 19 nt, Homo sapiens
  misc_RNA (1)...(19): siRNA sense strand
ggucagggacuuggucaca

SEQ ID NO: 1603338 - RNA, 19 nt, Homo sapiens
  misc_RNA (1)...(19): siRNA sense strand
agagagggacuucagagau

SEQ ID NO: 1603339 - RNA, 19 nt, Homo sapiens
  misc_RNA (1)...(19): siRNA sense strand
guggaucccucggcgacuu

SEQ ID NO: 1603340 - RNA, 19 nt, Homo sapiens
  misc_RNA (1)...(19): siRNA sense strand
ggacuacgagcuggaaagg

SEQ ID NO: 1603341 - RNA, 19 nt, Homo sapiens
  misc_RNA (1)...(19): siRNA sense strand
aaagcgggcagcauugaug

SEQ ID NO: 1603342 - RNA, 19 nt, Homo sapiens
  misc_RNA (1)...(19): siRNA sense strand
agaaggaaagaggcaagua

SEQ ID NO: 1603343 - RNA, 19 nt, Homo sapiens
  misc_RNA (1)...(19): siRNA sense strand
cgacuuggaggcggucuug

SEQ ID NO: 1603344 - RNA, 19 nt, Homo sapiens
  misc_RNA (1)...(19): siRNA sense strand
gaccagcaugagauauuug

SEQ ID NO: 1603345 - RNA, 19 nt, Homo sapiens
  misc_RNA (1)...(19): siRNA sense strand
gaugcugauggccugguua

SEQ ID NO: 1603346 - RNA, 19 nt, Homo sapiens
  misc_RNA (1)...(19): siRNA sense strand
ggcuacgccuucaucgaau

SEQ ID NO: 1603347 - RNA, 19 nt, Homo sapiens
  misc_RNA (1)...(19): siRNA sense strand
gaaaggcgggagcgaucuc

SEQ ID NO: 1603348 - RNA, 19 nt, Homo sapiens
  misc_RNA (1)...(19): siRNA sense strand
agauauuuguggacuacga

SEQ ID NO: 1603349 - RNA, 19 nt, Homo sapiens
  misc_RNA (1)...(19): siRNA sense strand
caaagcgggcagcauugau

SEQ ID NO: 1603350 - RNA, 19 nt, Homo sapiens
  misc_RNA (1)...(19): siRNA sense strand
ucaacgagaugguggagua

SEQ ID NO: 1603351 - RNA, 19 nt, Homo sapiens
  misc_RNA (1)...(19): siRNA sense strand
ugaaugagcuggaggagau

SEQ ID NO: 1603352 - RNA, 19 nt, Homo sapiens
  misc_RNA (1)...(19): siRNA sense strand
gagcgggacuuccucaaga

SEQ ID NO: 1603353 - RNA, 19 nt, Homo sapiens
  misc_RNA (1)...(19): siRNA sense strand
ccaaggaggugauguucuu

SEQ ID NO: 1603354 - RNA, 19 nt, Homo sapiens
  misc_RNA (1)...(19): siRNA sense strand
gaggugauguucuugaaug

SEQ ID NO: 1603355 - RNA, 19 nt, Homo sapiens
  misc_RNA (1)...(19): siRNA sense strand
ucagugaccucaaauucaa

SEQ ID NO: 1603356 - RNA, 19 nt, Homo sapiens
  misc_RNA (1)...(19): siRNA sense strand
guacaucgaccagaaguuu

SEQ ID NO: 1603357 - RNA, 19 nt, Homo sapiens
  misc_RNA (1)...(19): siRNA sense strand
ccagugcuguguccucuuu

SEQ ID NO: 1603358 - RNA, 19 nt, Homo sapiens
  misc_RNA (1)...(19): siRNA sense strand
uccauggacugaucuauaa

SEQ ID NO: 1603359 - RNA, 19 nt, Homo sapiens
  misc_RNA (1)...(19): siRNA sense strand
agaaguacaucgaccagaa

SEQ ID NO: 1603360 - RNA, 19 nt, Homo sapiens
  misc_RNA (1)...(19): siRNA sense strand
gaacaagacaauccaugga

SEQ ID NO: 1603361 - RNA, 19 nt, Homo sapiens
  misc_RNA (1)...(19): siRNA sense strand
gggcaggacucaacgagau

SEQ ID NO: 1603362 - RNA, 19 nt, Homo sapiens
  misc_RNA (1)...(19): siRNA sense strand
ugacugagccgguaauugu

SEQ ID NO: 1603363 - RNA, 19 nt, Homo sapiens
  misc_RNA (1)...(19): siRNA sense strand
ucgcaucuauggcaaguuu

SEQ ID NO: 1603364 - RNA, 19 nt, Homo sapiens
  misc_RNA (1)...(19): siRNA sense strand
uaaaagacaucaagaagga

SEQ ID NO: 1603365 - RNA, 19 nt, Homo sapiens
  misc_RNA (1)...(19): siRNA sense strand
uaaagaagagcacaagaug

SEQ ID NO: 1603366 - RNA, 19 nt, Homo sapiens
  misc_RNA (1)...(19): siRNA sense strand
gaaggaaagggaagagaug

SEQ ID NO: 1603367 - RNA, 19 nt, Homo sapiens
  misc_RNA (1)...(19): siRNA sense strand
gaagaggacuguggagacu

SEQ ID NO: 1603368 - RNA, 19 nt, Homo sapiens
  misc_RNA (1)...(19): siRNA sense strand
ucaugagccugauaaguga

SEQ ID NO: 1603369 - RNA, 19 nt, Homo sapiens
  misc_RNA (1)...(19): siRNA sense strand
gaaguuguuuauggaaaug

SEQ ID NO: 1603370 - RNA, 19 nt, Homo sapiens
  misc_RNA (1)...(19): siRNA sense strand
gacaauccauggacugauc

SEQ ID NO: 1603371 - RNA, 19 nt, Homo sapiens
  misc_RNA (1)...(19): siRNA sense strand
aagaagagcacaagauguu

SEQ ID NO: 1603372 - RNA, 19 nt, Homo sapiens
  misc_RNA (1)...(19): siRNA sense strand
gaggacauccagcuucuga

SEQ ID NO: 1603373 - RNA, 19 nt, Homo sapiens
  misc_RNA (1)...(19): siRNA sense strand
cauacugugugguacaauu

SEQ ID NO: 1603374 - RNA, 19 nt, Homo sapiens
  misc_RNA (1)...(19): siRNA sense strand
uaugaguucuucuuacguu

SEQ ID NO: 1603375 - RNA, 19 nt, Homo sapiens
  misc_RNA (1)...(19): siRNA sense strand
caaacauagccaagaagua

SEQ ID NO: 1603376 - RNA, 19 nt, Homo sapiens
  misc_RNA (1)...(19): siRNA sense strand
gagaaggagagcagucuga

SEQ ID NO: 1603377 - RNA, 19 nt, Homo sapiens
  misc_RNA (1)...(19): siRNA sense strand
guaggcagaucaaccacau

SEQ ID NO: 1603378 - RNA, 19 nt, Homo sapiens
  misc_RNA (1)...(19): siRNA sense strand
ucaagucccugagugucua

SEQ ID NO: 1603379 - RNA, 19 nt, Homo sapiens
  misc_RNA (1)...(19): siRNA sense strand
gggaagagauguggcaaaa

SEQ ID NO: 1603380 - RNA, 19 nt, Homo sapiens
  misc_RNA (1)...(19): siRNA sense strand
ugaaucagaagcuguuuga

SEQ ID NO: 1603381 - RNA, 19 nt, Homo sapiens
  misc_RNA (1)...(19): siRNA sense strand
ggacgucauugaaccuucu

SEQ ID NO: 1603382 - RNA, 19 nt, Homo sapiens
  misc_RNA (1)...(19): siRNA sense strand
aaacauagccaagaaguac

SEQ ID NO: 1603383 - RNA, 19 nt, Homo sapiens
  misc_RNA (1)...(19): siRNA sense strand
ccucauccguguccuacuu

SEQ ID NO: 1603384 - RNA, 19 nt, Homo sapiens
  misc_RNA (1)...(19): siRNA sense strand
agaggacuguggagacuga

SEQ ID NO: 1603385 - RNA, 19 nt, Homo sapiens
  misc_RNA (1)...(19): siRNA sense strand
gcucguguaugaguucuuc

SEQ ID NO: 1603386 - RNA, 19 nt, Homo sapiens
  misc_RNA (1)...(19): siRNA sense strand
ucauugaaccuucugaguu

SEQ ID NO: 1603387 - RNA, 19 nt, Homo sapiens
  misc_RNA (1)...(19): siRNA sense strand
uggaguacaucacccauag

SEQ ID NO: 1603388 - RNA, 19 nt, Homo sapiens
  misc_RNA (1)...(19): siRNA sense strand
gcuguguccucuuugacuu

SEQ ID NO: 1603389 - RNA, 19 nt, Homo sapiens
  misc_RNA (1)...(19): siRNA sense strand
cauguucccugcacucuac

SEQ ID NO: 1603390 - RNA, 19 nt, Homo sapiens
  misc_RNA (1)...(19): siRNA sense strand
guaauugugggacuucuca

SEQ ID NO: 1603391 - RNA, 19 nt, Homo sapiens
  misc_RNA (1)...(19): siRNA sense strand
aagagccacuggaacaaga

SEQ ID NO: 1603392 - RNA, 19 nt, Homo sapiens
  misc_RNA (1)...(19): siRNA sense strand
gcuggcauacuguguggua

SEQ ID NO: 1603393 - RNA, 19 nt, Homo sapiens
  misc_RNA (1)...(19): siRNA sense strand
gcugccaccuucaucgaau

SEQ ID NO: 1603394 - RNA, 19 nt, Homo sapiens
  misc_RNA (1)...(19): siRNA sense strand
uuaaagaagagcacaagau

SEQ ID NO: 1603395 - RNA, 19 nt, Homo sapiens
  misc_RNA (1)...(19): siRNA sense strand
gaucaaccacaucuucuac

SEQ ID NO: 1603396 - RNA, 19 nt, Homo sapiens
  misc_RNA (1)...(19): siRNA sense strand
gaaguacaucgaccagaag

SEQ ID NO: 1603397 - RNA, 19 nt, Homo sapiens
  misc_RNA (1)...(19): siRNA sense strand
agccaaacauagccaagaa

SEQ ID NO: 1603398 - RNA, 19 nt, Homo sapiens
  misc_RNA (1)...(19): siRNA sense strand
guuuguacuugcucuccua

SEQ ID NO: 1603399 - RNA, 19 nt, Homo sapiens
  misc_RNA (1)...(19): siRNA sense strand
gaaugaaggaaagggaaga

SEQ ID NO: 1603400 - RNA, 19 nt, Homo sapiens
  misc_RNA (1)...(19): siRNA sense strand
gagcaucacaacgggauug

SEQ ID NO: 1603401 - RNA, 19 nt, Homo sapiens
  misc_RNA (1)...(19): siRNA sense strand
ugacugcacacaacaauac

SEQ ID NO: 1603402 - RNA, 19 nt, Homo sapiens
  misc_RNA (1)...(19): siRNA sense strand
uguacucgauggagacaga

SEQ ID NO: 1603403 - RNA, 19 nt, Homo sapiens
  misc_RNA (1)...(19): siRNA sense strand
cguguaugaguucuucuua

SEQ ID NO: 1603404 - RNA, 19 nt, Homo sapiens
  misc_RNA (1)...(19): siRNA sense strand
gaugacugcacacaacaau

SEQ ID NO: 1603405 - RNA, 19 nt, Homo sapiens
  misc_RNA (1)...(19): siRNA sense strand
ccaaacauagccaagaagu

SEQ ID NO: 1603406 - RNA, 19 nt, Homo sapiens
  misc_RNA (1)...(19): siRNA sense strand
ccuugagucuccugauuuc

SEQ ID NO: 1603407 - RNA, 19 nt, Homo sapiens
  misc_RNA (1)...(19): siRNA sense strand
ccauagccgugauguuguc

SEQ ID NO: 1603408 - RNA, 19 nt, Homo sapiens
  misc_RNA (1)...(19): siRNA sense strand
ggacguguacaccaucaag

SEQ ID NO: 1603409 - RNA, 19 nt, Homo sapiens
  misc_RNA (1)...(19): siRNA sense strand
ggagauucuggacgucauu

SEQ ID NO: 1603410 - RNA, 19 nt, Homo sapiens
  misc_RNA (1)...(19): siRNA sense strand
ggcauacugugugguacaa

SEQ ID NO: 1603411 - RNA, 19 nt, Homo sapiens
  misc_RNA (1)...(19): siRNA sense strand
ucuauuacuggaacaauga

SEQ ID NO: 1603412 - RNA, 19 nt, Homo sapiens
  misc_RNA (1)...(19): siRNA sense strand
aaaugaaucagaagcuguu

SEQ ID NO: 1603413 - RNA, 19 nt, Homo sapiens
  misc_RNA (1)...(19): siRNA sense strand
ugauuuccagccaaacaua

SEQ ID NO: 1603414 - RNA, 19 nt, Homo sapiens
  misc_RNA (1)...(19): siRNA sense strand
gaagcgggcaggacucaac

SEQ ID NO: 1603415 - RNA, 19 nt, Homo sapiens
  misc_RNA (1)...(19): siRNA sense strand
cagcaucaucaauggcuuu

SEQ ID NO: 1603416 - RNA, 19 nt, Homo sapiens
  misc_RNA (1)...(19): siRNA sense strand
gauucuggacgucauugaa

SEQ ID NO: 1603417 - RNA, 19 nt, Homo sapiens
  misc_RNA (1)...(19): siRNA sense strand
ggaggugauguucuugaau

SEQ ID NO: 1603418 - RNA, 19 nt, Homo sapiens
  misc_RNA (1)...(19): siRNA sense strand
ucaaccacaucuucuacag

SEQ ID NO: 1603419 - RNA, 19 nt, Homo sapiens
  misc_RNA (1)...(19): siRNA sense strand
ugaaggaaagggaagagau

SEQ ID NO: 1603420 - RNA, 19 nt, Homo sapiens
  misc_RNA (1)...(19): siRNA sense strand
ccugauaagugacaaugcu

SEQ ID NO: 1603421 - RNA, 19 nt, Homo sapiens
  misc_RNA (1)...(19): siRNA sense strand
ccacaggggcugaguuuga

SEQ ID NO: 1603422 - RNA, 19 nt, Homo sapiens
  misc_RNA (1)...(19): siRNA sense strand
aggaggugauguucuugaa

SEQ ID NO: 1603423 - RNA, 19 nt, Homo sapiens
  misc_RNA (1)...(19): siRNA sense strand
aaagaagagcacaagaugu

SEQ ID NO: 1603424 - RNA, 19 nt, Homo sapiens
  misc_RNA (1)...(19): siRNA sense strand
ggacgcugccaccuucauc

SEQ ID NO: 1603425 - RNA, 19 nt, Homo sapiens
  misc_RNA (1)...(19): siRNA sense strand
cagaagcuguuugaugacu

SEQ ID NO: 1603426 - RNA, 19 nt, Homo sapiens
  misc_RNA (1)...(19): siRNA sense strand
acccauagccgugauguug

SEQ ID NO: 1603427 - RNA, 19 nt, Homo sapiens
  misc_RNA (1)...(19): siRNA sense strand
guggaguacaucacccaua

SEQ ID NO: 1603428 - RNA, 19 nt, Homo sapiens
  misc_RNA (1)...(19): siRNA sense strand
ggagcuguuuauccagaag

SEQ ID NO: 1603429 - RNA, 19 nt, Homo sapiens
  misc_RNA (1)...(19): siRNA sense strand
cuucuuacguuuccuugag

SEQ ID NO: 1603430 - RNA, 19 nt, Homo sapiens
  misc_RNA (1)...(19): siRNA sense strand
caacaauacaaggcagaga

SEQ ID NO: 1603431 - RNA, 19 nt, Homo sapiens
  misc_RNA (1)...(19): siRNA sense strand
cugaggcugucaccauguu

SEQ ID NO: 1603432 - RNA, 19 nt, Homo sapiens
  misc_RNA (1)...(19): siRNA sense strand
caucgcaucuauggcaagu

SEQ ID NO: 1603433 - RNA, 19 nt, Homo sapiens
  misc_RNA (1)...(19): siRNA sense strand
gggacuuccucaagaccau

SEQ ID NO: 1603434 - RNA, 19 nt, Homo sapiens
  misc_RNA (1)...(19): siRNA sense strand
caggacguguacaccauca

SEQ ID NO: 1603435 - RNA, 19 nt, Homo sapiens
  misc_RNA (1)...(19): siRNA sense strand
cauggacugaucuauaaug

SEQ ID NO: 1603436 - RNA, 19 nt, Homo sapiens
  misc_RNA (1)...(19): siRNA sense strand
ccaagagccacuggaacaa

SEQ ID NO: 1603437 - RNA, 19 nt, Homo sapiens
  misc_RNA (1)...(19): siRNA sense strand
acccucagcuggcauacug

SEQ ID NO: 1603438 - RNA, 19 nt, Homo sapiens
  misc_RNA (1)...(19): siRNA sense strand
guguaugaguucuucuuac

SEQ ID NO: 1603439 - RNA, 19 nt, Homo sapiens
  misc_RNA (1)...(19): siRNA sense strand
uguaugaguucuucuuacg

SEQ ID NO: 1603440 - RNA, 19 nt, Homo sapiens
  misc_RNA (1)...(19): siRNA sense strand
acucagugaccucaaauuc

SEQ ID NO: 1603441 - RNA, 19 nt, Homo sapiens
  misc_RNA (1)...(19): siRNA sense strand
ugaguuugacccagaggaa

SEQ ID NO: 1603442 - RNA, 19 nt, Homo sapiens
  misc_RNA (1)...(19): siRNA sense strand
aacaauacaaggcagagaa

SEQ ID NO: 1603443 - RNA, 19 nt, Homo sapiens
  misc_RNA (1)...(19): siRNA sense strand
ucaacgagaugguggagua

SEQ ID NO: 1603444 - RNA, 19 nt, Homo sapiens
  misc_RNA (1)...(19): siRNA sense strand
ugaaugagcuggaggagau

SEQ ID NO: 1603445 - RNA, 19 nt, Homo sapiens
  misc_RNA (1)...(19): siRNA sense strand
gagcgggacuuccucaaga

SEQ ID NO: 1603446 - RNA, 19 nt, Homo sapiens
  misc_RNA (1)...(19): siRNA sense strand
ccaaggaggugauguucuu

SEQ ID NO: 1603447 - RNA, 19 nt, Homo sapiens
  misc_RNA (1)...(19): siRNA sense strand
gaggugauguucuugaaug

SEQ ID NO: 1603448 - RNA, 19 nt, Homo sapiens
  misc_RNA (1)...(19): siRNA sense strand
ucagugaccucaaauucaa

SEQ ID NO: 1603449 - RNA, 19 nt, Homo sapiens
  misc_RNA (1)...(19): siRNA sense strand
guacaucgaccagaaguuu

SEQ ID NO: 1603450 - RNA, 19 nt, Homo sapiens
  misc_RNA (1)...(19): siRNA sense strand
ccagugcuguguccucuuu

SEQ ID NO: 1603451 - RNA, 19 nt, Homo sapiens
  misc_RNA (1)...(19): siRNA sense strand
uccauggacugaucuauaa

SEQ ID NO: 1603452 - RNA, 19 nt, Homo sapiens
  misc_RNA (1)...(19): siRNA sense strand
agaaguacaucgaccagaa

SEQ ID NO: 1603453 - RNA, 19 nt, Homo sapiens
  misc_RNA (1)...(19): siRNA sense strand
gaacaagacaauccaugga

SEQ ID NO: 1603454 - RNA, 19 nt, Homo sapiens
  misc_RNA (1)...(19): siRNA sense strand
gggcaggacucaacgagau

SEQ ID NO: 1603455 - RNA, 19 nt, Homo sapiens
  misc_RNA (1)...(19): siRNA sense strand
ugacugagccgguaauugu

SEQ ID NO: 1603456 - RNA, 19 nt, Homo sapiens
  misc_RNA (1)...(19): siRNA sense strand
ucgcaucuauggcaaguuu

SEQ ID NO: 1603457 - RNA, 19 nt, Homo sapiens
  misc_RNA (1)...(19): siRNA sense strand
uaaaagacaucaagaagga

SEQ ID NO: 1603458 - RNA, 19 nt, Homo sapiens
  misc_RNA (1)...(19): siRNA sense strand
uaaagaagagcacaagaug

SEQ ID NO: 1603459 - RNA, 19 nt, Homo sapiens
  misc_RNA (1)...(19): siRNA sense strand
gaaggaaagggaagagaug

SEQ ID NO: 1603460 - RNA, 19 nt, Homo sapiens
  misc_RNA (1)...(19): siRNA sense strand
gaagaggacuguggagacu

SEQ ID NO: 1603461 - RNA, 19 nt, Homo sapiens
  misc_RNA (1)...(19): siRNA sense strand
ucaugagccugauaaguga

SEQ ID NO: 1603462 - RNA, 19 nt, Homo sapiens
  misc_RNA (1)...(19): siRNA sense strand
gaaguuguuuauggaaaug

SEQ ID NO: 1603463 - RNA, 19 nt, Homo sapiens
  misc_RNA (1)...(19): siRNA sense strand
gacaauccauggacugauc

SEQ ID NO: 1603464 - RNA, 19 nt, Homo sapiens
  misc_RNA (1)...(19): siRNA sense strand
aagaagagcacaagauguu

SEQ ID NO: 1603465 - RNA, 19 nt, Homo sapiens
  misc_RNA (1)...(19): siRNA sense strand
gaggacauccagcuucuga

SEQ ID NO: 1603466 - RNA, 19 nt, Homo sapiens
  misc_RNA (1)...(19): siRNA sense strand
cauacugugugguacaauu

SEQ ID NO: 1603467 - RNA, 19 nt, Homo sapiens
  misc_RNA (1)...(19): siRNA sense strand
uaugaguucuucuuacguu

SEQ ID NO: 1603468 - RNA, 19 nt, Homo sapiens
  misc_RNA (1)...(19): siRNA sense strand
caaacauagccaagaagua

SEQ ID NO: 1603469 - RNA, 19 nt, Homo sapiens
  misc_RNA (1)...(19): siRNA sense strand
gagaaggagagcagucuga

SEQ ID NO: 1603470 - RNA, 19 nt, Homo sapiens
  misc_RNA (1)...(19): siRNA sense strand
guaggcagaucaaccacau

SEQ ID NO: 1603471 - RNA, 19 nt, Homo sapiens
  misc_RNA (1)...(19): siRNA sense strand
ucaagucccugagugucua

SEQ ID NO: 1603472 - RNA, 19 nt, Homo sapiens
  misc_RNA (1)...(19): siRNA sense strand
gggaagagauguggcaaaa

SEQ ID NO: 1603473 - RNA, 19 nt, Homo sapiens
  misc_RNA (1)...(19): siRNA sense strand
ugaaucagaagcuguuuga

SEQ ID NO: 1603474 - RNA, 19 nt, Homo sapiens
  misc_RNA (1)...(19): siRNA sense strand
ggacgucauugaaccuucu

SEQ ID NO: 1603475 - RNA, 19 nt, Homo sapiens
  misc_RNA (1)...(19): siRNA sense strand
aaacauagccaagaaguac

SEQ ID NO: 1603476 - RNA, 19 nt, Homo sapiens
  misc_RNA (1)...(19): siRNA sense strand
ccucauccguguccuacuu

SEQ ID NO: 1603477 - RNA, 19 nt, Homo sapiens
  misc_RNA (1)...(19): siRNA sense strand
agaggacuguggagacuga

SEQ ID NO: 1603478 - RNA, 19 nt, Homo sapiens
  misc_RNA (1)...(19): siRNA sense strand
gcucguguaugaguucuuc

SEQ ID NO: 1603479 - RNA, 19 nt, Homo sapiens
  misc_RNA (1)...(19): siRNA sense strand
ucauugaaccuucugaguu

SEQ ID NO: 1603480 - RNA, 19 nt, Homo sapiens
  misc_RNA (1)...(19): siRNA sense strand
uggaguacaucacccauag

SEQ ID NO: 1603481 - RNA, 19 nt, Homo sapiens
  misc_RNA (1)...(19): siRNA sense strand
gcuguguccucuuugacuu

SEQ ID NO: 1603482 - RNA, 19 nt, Homo sapiens
  misc_RNA (1)...(19): siRNA sense strand
cauguucccugcacucuac

SEQ ID NO: 1603483 - RNA, 19 nt, Homo sapiens
  misc_RNA (1)...(19): siRNA sense strand
guaauugugggacuucuca

SEQ ID NO: 1603484 - RNA, 19 nt, Homo sapiens
  misc_RNA (1)...(19): siRNA sense strand
aagagccacuggaacaaga

SEQ ID NO: 1603485 - RNA, 19 nt, Homo sapiens
  misc_RNA (1)...(19): siRNA sense strand
gcuggcauacuguguggua

SEQ ID NO: 1603486 - RNA, 19 nt, Homo sapiens
  misc_RNA (1)...(19): siRNA sense strand
gcugccaccuucaucgaau

SEQ ID NO: 1603487 - RNA, 19 nt, Homo sapiens
  misc_RNA (1)...(19): siRNA sense strand
uuaaagaagagcacaagau

SEQ ID NO: 1603488 - RNA, 19 nt, Homo sapiens
  misc_RNA (1)...(19): siRNA sense strand
gaucaaccacaucuucuac

SEQ ID NO: 1603489 - RNA, 19 nt, Homo sapiens
  misc_RNA (1)...(19): siRNA sense strand
gaaguacaucgaccagaag

SEQ ID NO: 1603490 - RNA, 19 nt, Homo sapiens
  misc_RNA (1)...(19): siRNA sense strand
agccaaacauagccaagaa

SEQ ID NO: 1603491 - RNA, 19 nt, Homo sapiens
  misc_RNA (1)...(19): siRNA sense strand
guuuguacuugcucuccua

SEQ ID NO: 1603492 - RNA, 19 nt, Homo sapiens
  misc_RNA (1)...(19): siRNA sense strand
gaaugaaggaaagggaaga

SEQ ID NO: 1603493 - RNA, 19 nt, Homo sapiens
  misc_RNA (1)...(19): siRNA sense strand
gagcaucacaacgggauug

SEQ ID NO: 1603494 - RNA, 19 nt, Homo sapiens
  misc_RNA (1)...(19): siRNA sense strand
ugacugcacacaacaauac

SEQ ID NO: 1603495 - RNA, 19 nt, Homo sapiens
  misc_RNA (1)...(19): siRNA sense strand
uguacucgauggagacaga

SEQ ID NO: 1603496 - RNA, 19 nt, Homo sapiens
  misc_RNA (1)...(19): siRNA sense strand
cguguaugaguucuucuua

SEQ ID NO: 1603497 - RNA, 19 nt, Homo sapiens
  misc_RNA (1)...(19): siRNA sense strand
gaugacugcacacaacaau

SEQ ID NO: 1603498 - RNA, 19 nt, Homo sapiens
  misc_RNA (1)...(19): siRNA sense strand
ccaaacauagccaagaagu

SEQ ID NO: 1603499 - RNA, 19 nt, Homo sapiens
  misc_RNA (1)...(19): siRNA sense strand
ccuugagucuccugauuuc

SEQ ID NO: 1603500 - RNA, 19 nt, Homo sapiens
  misc_RNA (1)...(19): siRNA sense strand
ccauagccgugauguuguc

SEQ ID NO: 1603501 - RNA, 19 nt, Homo sapiens
  misc_RNA (1)...(19): siRNA sense strand
ggacguguacaccaucaag

SEQ ID NO: 1603502 - RNA, 19 nt, Homo sapiens
  misc_RNA (1)...(19): siRNA sense strand
ggagauucuggacgucauu

SEQ ID NO: 1603503 - RNA, 19 nt, Homo sapiens
  misc_RNA (1)...(19): siRNA sense strand
ggcauacugugugguacaa

SEQ ID NO: 1603504 - RNA, 19 nt, Homo sapiens
  misc_RNA (1)...(19): siRNA sense strand
ucuauuacuggaacaauga

SEQ ID NO: 1603505 - RNA, 19 nt, Homo sapiens
  misc_RNA (1)...(19): siRNA sense strand
aaaugaaucagaagcuguu

SEQ ID NO: 1603506 - RNA, 19 nt, Homo sapiens
  misc_RNA (1)...(19): siRNA sense strand
ugauuuccagccaaacaua

SEQ ID NO: 1603507 - RNA, 19 nt, Homo sapiens
  misc_RNA (1)...(19): siRNA sense strand
gaagcgggcaggacucaac

SEQ ID NO: 1603508 - RNA, 19 nt, Homo sapiens
  misc_RNA (1)...(19): siRNA sense strand
cagcaucaucaauggcuuu

SEQ ID NO: 1603509 - RNA, 19 nt, Homo sapiens
  misc_RNA (1)...(19): siRNA sense strand
gauucuggacgucauugaa

SEQ ID NO: 1603510 - RNA, 19 nt, Homo sapiens
  misc_RNA (1)...(19): siRNA sense strand
ggaggugauguucuugaau

SEQ ID NO: 1603511 - RNA, 19 nt, Homo sapiens
  misc_RNA (1)...(19): siRNA sense strand
ucaaccacaucuucuacag

SEQ ID NO: 1603512 - RNA, 19 nt, Homo sapiens
  misc_RNA (1)...(19): siRNA sense strand
ugaaggaaagggaagagau

SEQ ID NO: 1603513 - RNA, 19 nt, Homo sapiens
  misc_RNA (1)...(19): siRNA sense strand
ccugauaagugacaaugcu

SEQ ID NO: 1603514 - RNA, 19 nt, Homo sapiens
  misc_RNA (1)...(19): siRNA sense strand
ccacaggggcugaguuuga

SEQ ID NO: 1603515 - RNA, 19 nt, Homo sapiens
  misc_RNA (1)...(19): siRNA sense strand
aggaggugauguucuugaa

SEQ ID NO: 1603516 - RNA, 19 nt, Homo sapiens
  misc_RNA (1)...(19): siRNA sense strand
aaagaagagcacaagaugu

SEQ ID NO: 1603517 - RNA, 19 nt, Homo sapiens
  misc_RNA (1)...(19): siRNA sense strand
ggacgcugccaccuucauc

SEQ ID NO: 1603518 - RNA, 19 nt, Homo sapiens
  misc_RNA (1)...(19): siRNA sense strand
cagaagcuguuugaugacu

SEQ ID NO: 1603519 - RNA, 19 nt, Homo sapiens
  misc_RNA (1)...(19): siRNA sense strand
acccauagccgugauguug

SEQ ID NO: 1603520 - RNA, 19 nt, Homo sapiens
  misc_RNA (1)...(19): siRNA sense strand
guggaguacaucacccaua

SEQ ID NO: 1603521 - RNA, 19 nt, Homo sapiens
  misc_RNA (1)...(19): siRNA sense strand
ggagcuguuuauccagaag

SEQ ID NO: 1603522 - RNA, 19 nt, Homo sapiens
  misc_RNA (1)...(19): siRNA sense strand
cuucuuacguuuccuugag

SEQ ID NO: 1603523 - RNA, 19 nt, Homo sapiens
  misc_RNA (1)...(19): siRNA sense strand
caacaauacaaggcagaga

SEQ ID NO: 1603524 - RNA, 19 nt, Homo sapiens
  misc_RNA (1)...(19): siRNA sense strand
cugaggcugucaccauguu

SEQ ID NO: 1603525 - RNA, 19 nt, Homo sapiens
  misc_RNA (1)...(19): siRNA sense strand
caucgcaucuauggcaagu

SEQ ID NO: 1603526 - RNA, 19 nt, Homo sapiens
  misc_RNA (1)...(19): siRNA sense strand
gggacuuccucaagaccau

SEQ ID NO: 1603527 - RNA, 19 nt, Homo sapiens
  misc_RNA (1)...(19): siRNA sense strand
caggacguguacaccauca

SEQ ID NO: 1603528 - RNA, 19 nt, Homo sapiens
  misc_RNA (1)...(19): siRNA sense strand
cauggacugaucuauaaug

SEQ ID NO: 1603529 - RNA, 19 nt, Homo sapiens
  misc_RNA (1)...(19): siRNA sense strand
ccaagagccacuggaacaa

SEQ ID NO: 1603530 - RNA, 19 nt, Homo sapiens
  misc_RNA (1)...(19): siRNA sense strand
acccucagcuggcauacug

SEQ ID NO: 1603531 - RNA, 19 nt, Homo sapiens
  misc_RNA (1)...(19): siRNA sense strand
guguaugaguucuucuuac

SEQ ID NO: 1603532 - RNA, 19 nt, Homo sapiens
  misc_RNA (1)...(19): siRNA sense strand
uguaugaguucuucuuacg

SEQ ID NO: 1603533 - RNA, 19 nt, Homo sapiens
  misc_RNA (1)...(19): siRNA sense strand
acucagugaccucaaauuc

SEQ ID NO: 1603534 - RNA, 19 nt, Homo sapiens
  misc_RNA (1)...(19): siRNA sense strand
ugaguuugacccagaggaa

SEQ ID NO: 1603535 - RNA, 19 nt, Homo sapiens
  misc_RNA (1)...(19): siRNA sense strand
aacaauacaaggcagagaa

SEQ ID NO: 1603536 - RNA, 19 nt, Homo sapiens
  misc_RNA (1)...(19): siRNA sense strand
ucaacgagaugguggagua

SEQ ID NO: 1603537 - RNA, 19 nt, Homo sapiens
  misc_RNA (1)...(19): siRNA sense strand
ugaaugagcuggaggagau

SEQ ID NO: 1603538 - RNA, 19 nt, Homo sapiens
  misc_RNA (1)...(19): siRNA sense strand
gagcgggacuuccucaaga

SEQ ID NO: 1603539 - RNA, 19 nt, Homo sapiens
  misc_RNA (1)...(19): siRNA sense strand
ccaaggaggugauguucuu

SEQ ID NO: 1603540 - RNA, 19 nt, Homo sapiens
  misc_RNA (1)...(19): siRNA sense strand
gaggugauguucuugaaug

SEQ ID NO: 1603541 - RNA, 19 nt, Homo sapiens
  misc_RNA (1)...(19): siRNA sense strand
ucagugaccucaaauucaa

SEQ ID NO: 1603542 - RNA, 19 nt, Homo sapiens
  misc_RNA (1)...(19): siRNA sense strand
guacaucgaccagaaguuu

SEQ ID NO: 1603543 - RNA, 19 nt, Homo sapiens
  misc_RNA (1)...(19): siRNA sense strand
ccagugcuguguccucuuu

SEQ ID NO: 1603544 - RNA, 19 nt, Homo sapiens
  misc_RNA (1)...(19): siRNA sense strand
uccauggacugaucuauaa

SEQ ID NO: 1603545 - RNA, 19 nt, Homo sapiens
  misc_RNA (1)...(19): siRNA sense strand
agaaguacaucgaccagaa

SEQ ID NO: 1603546 - RNA, 19 nt, Homo sapiens
  misc_RNA (1)...(19): siRNA sense strand
gaacaagacaauccaugga

SEQ ID NO: 1603547 - RNA, 19 nt, Homo sapiens
  misc_RNA (1)...(19): siRNA sense strand
gggcaggacucaacgagau

SEQ ID NO: 1603548 - RNA, 19 nt, Homo sapiens
  misc_RNA (1)...(19): siRNA sense strand
ugacugagccgguaauugu

SEQ ID NO: 1603549 - RNA, 19 nt, Homo sapiens
  misc_RNA (1)...(19): siRNA sense strand
ucgcaucuauggcaaguuu

SEQ ID NO: 1603550 - RNA, 19 nt, Homo sapiens
  misc_RNA (1)...(19): siRNA sense strand
uaaaagacaucaagaagga

SEQ ID NO: 1603551 - RNA, 19 nt, Homo sapiens
  misc_RNA (1)...(19): siRNA sense strand
uaaagaagagcacaagaug

SEQ ID NO: 1603552 - RNA, 19 nt, Homo sapiens
  misc_RNA (1)...(19): siRNA sense strand
gaaggaaagggaagagaug

SEQ ID NO: 1603553 - RNA, 19 nt, Homo sapiens
  misc_RNA (1)...(19): siRNA sense strand
gaagaggacuguggagacu

SEQ ID NO: 1603554 - RNA, 19 nt, Homo sapiens
  misc_RNA (1)...(19): siRNA sense strand
ucaugagccugauaaguga

SEQ ID NO: 1603555 - RNA, 19 nt, Homo sapiens
  misc_RNA (1)...(19): siRNA sense strand
gaaguuguuuauggaaaug

SEQ ID NO: 1603556 - RNA, 19 nt, Homo sapiens
  misc_RNA (1)...(19): siRNA sense strand
gacaauccauggacugauc

SEQ ID NO: 1603557 - RNA, 19 nt, Homo sapiens
  misc_RNA (1)...(19): siRNA sense strand
aagaagagcacaagauguu

SEQ ID NO: 1603558 - RNA, 19 nt, Homo sapiens
  misc_RNA (1)...(19): siRNA sense strand
gaggacauccagcuucuga

SEQ ID NO: 1603559 - RNA, 19 nt, Homo sapiens
  misc_RNA (1)...(19): siRNA sense strand
cauacugugugguacaauu

SEQ ID NO: 1603560 - RNA, 19 nt, Homo sapiens
  misc_RNA (1)...(19): siRNA sense strand
uaugaguucuucuuacguu

SEQ ID NO: 1603561 - RNA, 19 nt, Homo sapiens
  misc_RNA (1)...(19): siRNA sense strand
caaacauagccaagaagua

SEQ ID NO: 1603562 - RNA, 19 nt, Homo sapiens
  misc_RNA (1)...(19): siRNA sense strand
gagaaggagagcagucuga

SEQ ID NO: 1603563 - RNA, 19 nt, Homo sapiens
  misc_RNA (1)...(19): siRNA sense strand
guaggcagaucaaccacau

SEQ ID NO: 1603564 - RNA, 19 nt, Homo sapiens
  misc_RNA (1)...(19): siRNA sense strand
ucaagucccugagugucua

SEQ ID NO: 1603565 - RNA, 19 nt, Homo sapiens
  misc_RNA (1)...(19): siRNA sense strand
gggaagagauguggcaaaa

SEQ ID NO: 1603566 - RNA, 19 nt, Homo sapiens
  misc_RNA (1)...(19): siRNA sense strand
ugaaucagaagcuguuuga

SEQ ID NO: 1603567 - RNA, 19 nt, Homo sapiens
  misc_RNA (1)...(19): siRNA sense strand
ggacgucauugaaccuucu

SEQ ID NO: 1603568 - RNA, 19 nt, Homo sapiens
  misc_RNA (1)...(19): siRNA sense strand
aaacauagccaagaaguac

SEQ ID NO: 1603569 - RNA, 19 nt, Homo sapiens
  misc_RNA (1)...(19): siRNA sense strand
ccucauccguguccuacuu

SEQ ID NO: 1603570 - RNA, 19 nt, Homo sapiens
  misc_RNA (1)...(19): siRNA sense strand
agaggacuguggagacuga

SEQ ID NO: 1603571 - RNA, 19 nt, Homo sapiens
  misc_RNA (1)...(19): siRNA sense strand
gcucguguaugaguucuuc

SEQ ID NO: 1603572 - RNA, 19 nt, Homo sapiens
  misc_RNA (1)...(19): siRNA sense strand
ucauugaaccuucugaguu

SEQ ID NO: 1603573 - RNA, 19 nt, Homo sapiens
  misc_RNA (1)...(19): siRNA sense strand
uggaguacaucacccauag

SEQ ID NO: 1603574 - RNA, 19 nt, Homo sapiens
  misc_RNA (1)...(19): siRNA sense strand
gcuguguccucuuugacuu

SEQ ID NO: 1603575 - RNA, 19 nt, Homo sapiens
  misc_RNA (1)...(19): siRNA sense strand
cauguucccugcacucuac

SEQ ID NO: 1603576 - RNA, 19 nt, Homo sapiens
  misc_RNA (1)...(19): siRNA sense strand
guaauugugggacuucuca

SEQ ID NO: 1603577 - RNA, 19 nt, Homo sapiens
  misc_RNA (1)...(19): siRNA sense strand
aagagccacuggaacaaga

SEQ ID NO: 1603578 - RNA, 19 nt, Homo sapiens
  misc_RNA (1)...(19): siRNA sense strand
gcuggcauacuguguggua

SEQ ID NO: 1603579 - RNA, 19 nt, Homo sapiens
  misc_RNA (1)...(19): siRNA sense strand
gcugccaccuucaucgaau

SEQ ID NO: 1603580 - RNA, 19 nt, Homo sapiens
  misc_RNA (1)...(19): siRNA sense strand
uuaaagaagagcacaagau

SEQ ID NO: 1603581 - RNA, 19 nt, Homo sapiens
  misc_RNA (1)...(19): siRNA sense strand
gaucaaccacaucuucuac

SEQ ID NO: 1603582 - RNA, 19 nt, Homo sapiens
  misc_RNA (1)...(19): siRNA sense strand
gaaguacaucgaccagaag

SEQ ID NO: 1603583 - RNA, 19 nt, Homo sapiens
  misc_RNA (1)...(19): siRNA sense strand
agccaaacauagccaagaa

SEQ ID NO: 1603584 - RNA, 19 nt, Homo sapiens
  misc_RNA (1)...(19): siRNA sense strand
guuuguacuugcucuccua

SEQ ID NO: 1603585 - RNA, 19 nt, Homo sapiens
  misc_RNA (1)...(19): siRNA sense strand
gaaugaaggaaagggaaga

SEQ ID NO: 1603586 - RNA, 19 nt, Homo sapiens
  misc_RNA (1)...(19): siRNA sense strand
gagcaucacaacgggauug

SEQ ID NO: 1603587 - RNA, 19 nt, Homo sapiens
  misc_RNA (1)...(19): siRNA sense strand
ugacugcacacaacaauac

SEQ ID NO: 1603588 - RNA, 19 nt, Homo sapiens
  misc_RNA (1)...(19): siRNA sense strand
uguacucgauggagacaga

SEQ ID NO: 1603589 - RNA, 19 nt, Homo sapiens
  misc_RNA (1)...(19): siRNA sense strand
cguguaugaguucuucuua

SEQ ID NO: 1603590 - RNA, 19 nt, Homo sapiens
  misc_RNA (1)...(19): siRNA sense strand
gaugacugcacacaacaau

SEQ ID NO: 1603591 - RNA, 19 nt, Homo sapiens
  misc_RNA (1)...(19): siRNA sense strand
ccaaacauagccaagaagu

SEQ ID NO: 1603592 - RNA, 19 nt, Homo sapiens
  misc_RNA (1)...(19): siRNA sense strand
ccuugagucuccugauuuc

SEQ ID NO: 1603593 - RNA, 19 nt, Homo sapiens
  misc_RNA (1)...(19): siRNA sense strand
ccauagccgugauguuguc

SEQ ID NO: 1603594 - RNA, 19 nt, Homo sapiens
  misc_RNA (1)...(19): siRNA sense strand
ggacguguacaccaucaag

SEQ ID NO: 1603595 - RNA, 19 nt, Homo sapiens
  misc_RNA (1)...(19): siRNA sense strand
ggagauucuggacgucauu

SEQ ID NO: 1603596 - RNA, 19 nt, Homo sapiens
  misc_RNA (1)...(19): siRNA sense strand
ggcauacugugugguacaa

SEQ ID NO: 1603597 - RNA, 19 nt, Homo sapiens
  misc_RNA (1)...(19): siRNA sense strand
ucuauuacuggaacaauga

SEQ ID NO: 1603598 - RNA, 19 nt, Homo sapiens
  misc_RNA (1)...(19): siRNA sense strand
aaaugaaucagaagcuguu

SEQ ID NO: 1603599 - RNA, 19 nt, Homo sapiens
  misc_RNA (1)...(19): siRNA sense strand
ugauuuccagccaaacaua

SEQ ID NO: 1603600 - RNA, 19 nt, Homo sapiens
  misc_RNA (1)...(19): siRNA sense strand
gaagcgggcaggacucaac

SEQ ID NO: 1603601 - RNA, 19 nt, Homo sapiens
  misc_RNA (1)...(19): siRNA sense strand
cagcaucaucaauggcuuu

SEQ ID NO: 1603602 - RNA, 19 nt, Homo sapiens
  misc_RNA (1)...(19): siRNA sense strand
gauucuggacgucauugaa

SEQ ID NO: 1603603 - RNA, 19 nt, Homo sapiens
  misc_RNA (1)...(19): siRNA sense strand
ggaggugauguucuugaau

SEQ ID NO: 1603604 - RNA, 19 nt, Homo sapiens
  misc_RNA (1)...(19): siRNA sense strand
ucaaccacaucuucuacag

SEQ ID NO: 1603605 - RNA, 19 nt, Homo sapiens
  misc_RNA (1)...(19): siRNA sense strand
ugaaggaaagggaagagau

SEQ ID NO: 1603606 - RNA, 19 nt, Homo sapiens
  misc_RNA (1)...(19): siRNA sense strand
ccugauaagugacaaugcu

SEQ ID NO: 1603607 - RNA, 19 nt, Homo sapiens
  misc_RNA (1)...(19): siRNA sense strand
ccacaggggcugaguuuga

SEQ ID NO: 1603608 - RNA, 19 nt, Homo sapiens
  misc_RNA (1)...(19): siRNA sense strand
aggaggugauguucuugaa

SEQ ID NO: 1603609 - RNA, 19 nt, Homo sapiens
  misc_RNA (1)...(19): siRNA sense strand
aaagaagagcacaagaugu

SEQ ID NO: 1603610 - RNA, 19 nt, Homo sapiens
  misc_RNA (1)...(19): siRNA sense strand
ggacgcugccaccuucauc

SEQ ID NO: 1603611 - RNA, 19 nt, Homo sapiens
  misc_RNA (1)...(19): siRNA sense strand
cagaagcuguuugaugacu

SEQ ID NO: 1603612 - RNA, 19 nt, Homo sapiens
  misc_RNA (1)...(19): siRNA sense strand
acccauagccgugauguug

SEQ ID NO: 1603613 - RNA, 19 nt, Homo sapiens
  misc_RNA (1)...(19): siRNA sense strand
guggaguacaucacccaua

SEQ ID NO: 1603614 - RNA, 19 nt, Homo sapiens
  misc_RNA (1)...(19): siRNA sense strand
ggagcuguuuauccagaag

SEQ ID NO: 1603615 - RNA, 19 nt, Homo sapiens
  misc_RNA (1)...(19): siRNA sense strand
cuucuuacguuuccuugag

SEQ ID NO: 1603616 - RNA, 19 nt, Homo sapiens
  misc_RNA (1)...(19): siRNA sense strand
caacaauacaaggcagaga

SEQ ID NO: 1603617 - RNA, 19 nt, Homo sapiens
  misc_RNA (1)...(19): siRNA sense strand
cugaggcugucaccauguu

SEQ ID NO: 1603618 - RNA, 19 nt, Homo sapiens
  misc_RNA (1)...(19): siRNA sense strand
caucgcaucuauggcaagu

SEQ ID NO: 1603619 - RNA, 19 nt, Homo sapiens
  misc_RNA (1)...(19): siRNA sense strand
gggacuuccucaagaccau

SEQ ID NO: 1603620 - RNA, 19 nt, Homo sapiens
  misc_RNA (1)...(19): siRNA sense strand
caggacguguacaccauca

SEQ ID NO: 1603621 - RNA, 19 nt, Homo sapiens
  misc_RNA (1)...(19): siRNA sense strand
cauggacugaucuauaaug

SEQ ID NO: 1603622 - RNA, 19 nt, Homo sapiens
  misc_RNA (1)...(19): siRNA sense strand
ccaagagccacuggaacaa

SEQ ID NO: 1603623 - RNA, 19 nt, Homo sapiens
  misc_RNA (1)...(19): siRNA sense strand
acccucagcuggcauacug

SEQ ID NO: 1603624 - RNA, 19 nt, Homo sapiens
  misc_RNA (1)...(19): siRNA sense strand
guguaugaguucuucuuac

SEQ ID NO: 1603625 - RNA, 19 nt, Homo sapiens
  misc_RNA (1)...(19): siRNA sense strand
uguaugaguucuucuuacg

SEQ ID NO: 1603626 - RNA, 19 nt, Homo sapiens
  misc_RNA (1)...(19): siRNA sense strand
acucagugaccucaaauuc

SEQ ID NO: 1603627 - RNA, 19 nt, Homo sapiens
  misc_RNA (1)...(19): siRNA sense strand
ugaguuugacccagaggaa

SEQ ID NO: 1603628 - RNA, 19 nt, Homo sapiens
  misc_RNA (1)...(19): siRNA sense strand
aacaauacaaggcagagaa

SEQ ID NO: 1603629 - RNA, 19 nt, Homo sapiens
  misc_RNA (1)...(19): siRNA sense strand
uaacuugucuccaugauuu

SEQ ID NO: 1603630 - RNA, 19 nt, Homo sapiens
  misc_RNA (1)...(19): siRNA sense strand
caacuggucugucaacgua

SEQ ID NO: 1603631 - RNA, 19 nt, Homo sapiens
  misc_RNA (1)...(19): siRNA sense strand
gaagaaagccaagaaggua

SEQ ID NO: 1603632 - RNA, 19 nt, Homo sapiens
  misc_RNA (1)...(19): siRNA sense strand
gagcaaguccucacugaua

SEQ ID NO: 1603633 - RNA, 19 nt, Homo sapiens
  misc_RNA (1)...(19): siRNA sense strand
gauaagacauccaggaaca

SEQ ID NO: 1603634 - RNA, 19 nt, Homo sapiens
  misc_RNA (1)...(19): siRNA sense strand
caagagcccugguccuaug

SEQ ID NO: 1603635 - RNA, 19 nt, Homo sapiens
  misc_RNA (1)...(19): siRNA sense strand
gaaaaugaaugccgaguca

SEQ ID NO: 1603636 - RNA, 19 nt, Homo sapiens
  misc_RNA (1)...(19): siRNA sense strand
gagauaagacauccaggaa

SEQ ID NO: 1603637 - RNA, 19 nt, Homo sapiens
  misc_RNA (1)...(19): siRNA sense strand
gcuaugcucaggaugauuu

SEQ ID NO: 1603638 - RNA, 19 nt, Homo sapiens
  misc_RNA (1)...(19): siRNA sense strand
ucucugagguuccaccaaa

SEQ ID NO: 1603639 - RNA, 19 nt, Homo sapiens
  misc_RNA (1)...(19): siRNA sense strand
gaaaacagguaacuugucu

SEQ ID NO: 1603640 - RNA, 19 nt, Homo sapiens
  misc_RNA (1)...(19): siRNA sense strand
guacguuucuaccgcaaug

SEQ ID NO: 1603641 - RNA, 19 nt, Homo sapiens
  misc_RNA (1)...(19): siRNA sense strand
gcuuggugauuccauguaa

SEQ ID NO: 1603642 - RNA, 19 nt, Homo sapiens
  misc_RNA (1)...(19): siRNA sense strand
aaacaucugccaauaugaa

SEQ ID NO: 1603643 - RNA, 19 nt, Homo sapiens
  misc_RNA (1)...(19): siRNA sense strand
ggagugcguuacauuuaca

SEQ ID NO: 1603644 - RNA, 19 nt, Homo sapiens
  misc_RNA (1)...(19): siRNA sense strand
gaugaugauguguuuauug

SEQ ID NO: 1603645 - RNA, 19 nt, Homo sapiens
  misc_RNA (1)...(19): siRNA sense strand
ccucagacaacuucuuuaa

SEQ ID NO: 1603646 - RNA, 19 nt, Homo sapiens
  misc_RNA (1)...(19): siRNA sense strand
ggaagcacaaggaccugua

SEQ ID NO: 1603647 - RNA, 19 nt, Homo sapiens
  misc_RNA (1)...(19): siRNA sense strand
gccaagagcccugguccua

SEQ ID NO: 1603648 - RNA, 19 nt, Homo sapiens
  misc_RNA (1)...(19): siRNA sense strand
gggagugcguuacauuuac

SEQ ID NO: 1603649 - RNA, 19 nt, Homo sapiens
  misc_RNA (1)...(19): siRNA sense strand
acagguaacuugucuccau

SEQ ID NO: 1603650 - RNA, 19 nt, Homo sapiens
  misc_RNA (1)...(19): siRNA sense strand
uaucacagaagccaucaaa

SEQ ID NO: 1603651 - RNA, 19 nt, Homo sapiens
  misc_RNA (1)...(19): siRNA sense strand
gaagaucggaagcauggau

SEQ ID NO: 1603652 - RNA, 19 nt, Homo sapiens
  misc_RNA (1)...(19): siRNA sense strand
ucacagaagccaucaaacu

SEQ ID NO: 1603653 - RNA, 19 nt, Homo sapiens
  misc_RNA (1)...(19): siRNA sense strand
uaagcagucucccaucucu

SEQ ID NO: 1603654 - RNA, 19 nt, Homo sapiens
  misc_RNA (1)...(19): siRNA sense strand
caugauuucuuuggugaug

SEQ ID NO: 1603655 - RNA, 19 nt, Homo sapiens
  misc_RNA (1)...(19): siRNA sense strand
ucuacacucuggauggaaa

SEQ ID NO: 1603656 - RNA, 19 nt, Homo sapiens
  misc_RNA (1)...(19): siRNA sense strand
gugaugaugauguguuuau

SEQ ID NO: 1603657 - RNA, 19 nt, Homo sapiens
  misc_RNA (1)...(19): siRNA sense strand
augcgaggcucccggauga

SEQ ID NO: 1603658 - RNA, 19 nt, Homo sapiens
  misc_RNA (1)...(19): siRNA sense strand
aaucccaacuggucuguca

SEQ ID NO: 1603659 - RNA, 19 nt, Homo sapiens
  misc_RNA (1)...(19): siRNA sense strand
ccaggaagaucggaagcau

SEQ ID NO: 1603660 - RNA, 19 nt, Homo sapiens
  misc_RNA (1)...(19): siRNA sense strand
gaccugacgcgaucucugu

SEQ ID NO: 1603661 - RNA, 19 nt, Homo sapiens
  misc_RNA (1)...(19): siRNA sense strand
gcacugaguaaugagaaga

SEQ ID NO: 1603662 - RNA, 19 nt, Homo sapiens
  misc_RNA (1)...(19): siRNA sense strand
ugcaggcacugaguaauga

SEQ ID NO: 1603663 - RNA, 19 nt, Homo sapiens
  misc_RNA (1)...(19): siRNA sense strand
caagaagacagcccacucu

SEQ ID NO: 1603664 - RNA, 19 nt, Homo sapiens
  misc_RNA (1)...(19): siRNA sense strand
gcguuacauuuacaccauu

SEQ ID NO: 1603665 - RNA, 19 nt, Homo sapiens
  misc_RNA (1)...(19): siRNA sense strand
agggagugcguuacauuua

SEQ ID NO: 1603666 - RNA, 19 nt, Homo sapiens
  misc_RNA (1)...(19): siRNA sense strand
cagggagugcguuacauuu

SEQ ID NO: 1603667 - RNA, 19 nt, Homo sapiens
  misc_RNA (1)...(19): siRNA sense strand
gcacaggccagggagaaca

SEQ ID NO: 1603668 - RNA, 19 nt, Homo sapiens
  misc_RNA (1)...(19): siRNA sense strand
guaacuugucuccaugauu

SEQ ID NO: 1603669 - RNA, 19 nt, Homo sapiens
  misc_RNA (1)...(19): siRNA sense strand
gguaacuugucuccaugau

SEQ ID NO: 1603670 - RNA, 19 nt, Homo sapiens
  misc_RNA (1)...(19): siRNA sense strand
ucagggagugcguuacauu

SEQ ID NO: 1603671 - RNA, 19 nt, Homo sapiens
  misc_RNA (1)...(19): siRNA sense strand
cacagaagccaucaaacug

SEQ ID NO: 1603672 - RNA, 19 nt, Homo sapiens
  misc_RNA (1)...(19): siRNA sense strand
ccagggagaacaaggacuu

SEQ ID NO: 1603673 - RNA, 19 nt, Homo sapiens
  misc_RNA (1)...(19): siRNA sense strand
gccgagucaugaagggaaa

SEQ ID NO: 1603674 - RNA, 19 nt, Homo sapiens
  misc_RNA (1)...(19): siRNA sense strand
uggugaugaugauguguuu

SEQ ID NO: 1603675 - RNA, 19 nt, Homo sapiens
  misc_RNA (1)...(19): siRNA sense strand
ugacgaaagagauaagaca

SEQ ID NO: 1603676 - RNA, 19 nt, Homo sapiens
  misc_RNA (1)...(19): siRNA sense strand
uaagacauccaggaacaug

SEQ ID NO: 1603677 - RNA, 19 nt, Homo sapiens
  misc_RNA (1)...(19): siRNA sense strand
cggacucgcuuggugauuc

SEQ ID NO: 1603678 - RNA, 19 nt, Homo sapiens
  misc_RNA (1)...(19): siRNA sense strand
agcaaguccucacugauau

SEQ ID NO: 1603679 - RNA, 19 nt, Homo sapiens
  misc_RNA (1)...(19): siRNA sense strand
uggaguacaccaagaaugu

SEQ ID NO: 1603680 - RNA, 19 nt, Homo sapiens
  misc_RNA (1)...(19): siRNA sense strand
gaucggaagcauggaugaa

SEQ ID NO: 1603681 - RNA, 19 nt, Homo sapiens
  misc_RNA (1)...(19): siRNA sense strand
agaagaaagccaagaaggu

SEQ ID NO: 1603682 - RNA, 19 nt, Homo sapiens
  misc_RNA (1)...(19): siRNA sense strand
ucuaagcagucucccaucu

SEQ ID NO: 1603683 - RNA, 19 nt, Homo sapiens
  misc_RNA (1)...(19): siRNA sense strand
ccucacugauaucacagaa

SEQ ID NO: 1603684 - RNA, 19 nt, Homo sapiens
  misc_RNA (1)...(19): siRNA sense strand
auugauggauccaggaaga

SEQ ID NO: 1603685 - RNA, 19 nt, Homo sapiens
  misc_RNA (1)...(19): siRNA sense strand
uguacgcuguguccucuga

SEQ ID NO: 1603686 - RNA, 19 nt, Homo sapiens
  misc_RNA (1)...(19): siRNA sense strand
gaguacaccaagaauguca

SEQ ID NO: 1603687 - RNA, 19 nt, Homo sapiens
  misc_RNA (1)...(19): siRNA sense strand
gcaaguccucacugauauc

SEQ ID NO: 1603688 - RNA, 19 nt, Homo sapiens
  misc_RNA (1)...(19): siRNA sense strand
ccaagagcccugguccuau

SEQ ID NO: 1603689 - RNA, 19 nt, Homo sapiens
  misc_RNA (1)...(19): siRNA sense strand
aagccaagaagguacguuu

SEQ ID NO: 1603690 - RNA, 19 nt, Homo sapiens
  misc_RNA (1)...(19): siRNA sense strand
gggaaagcuaugucuguuc

SEQ ID NO: 1603691 - RNA, 19 nt, Homo sapiens
  misc_RNA (1)...(19): siRNA sense strand
gggauuguguacgcugugu

SEQ ID NO: 1603692 - RNA, 19 nt, Homo sapiens
  misc_RNA (1)...(19): siRNA sense strand
ccuaugcgccgaagcaagu

SEQ ID NO: 1603693 - RNA, 19 nt, Homo sapiens
  misc_RNA (1)...(19): siRNA sense strand
caaguccucacugauauca

SEQ ID NO: 1603694 - RNA, 19 nt, Homo sapiens
  misc_RNA (1)...(19): siRNA sense strand
guacaccaagaaugucaau

SEQ ID NO: 1603695 - RNA, 19 nt, Homo sapiens
  misc_RNA (1)...(19): siRNA sense strand
cguuacauuuacaccauug

SEQ ID NO: 1603696 - RNA, 19 nt, Homo sapiens
  misc_RNA (1)...(19): siRNA sense strand
gaccuguaccugccucugu

SEQ ID NO: 1603697 - RNA, 19 nt, Homo sapiens
  misc_RNA (1)...(19): siRNA sense strand
gacgaaagagauaagacau

SEQ ID NO: 1603698 - RNA, 19 nt, Homo sapiens
  misc_RNA (1)...(19): siRNA sense strand
ggggaaagcuaugucuguu

SEQ ID NO: 1603699 - RNA, 19 nt, Homo sapiens
  misc_RNA (1)...(19): siRNA sense strand
ugcgugugcuucugaacaa

SEQ ID NO: 1603700 - RNA, 19 nt, Homo sapiens
  misc_RNA (1)...(19): siRNA sense strand
gaagcacaaggaccuguac

SEQ ID NO: 1603701 - RNA, 19 nt, Homo sapiens
  misc_RNA (1)...(19): siRNA sense strand
aguccucacugauaucaca

SEQ ID NO: 1603702 - RNA, 19 nt, Homo sapiens
  misc_RNA (1)...(19): siRNA sense strand
acuggucugucaacguaaa

SEQ ID NO: 1603703 - RNA, 19 nt, Homo sapiens
  misc_RNA (1)...(19): siRNA sense strand
ggacucgcuuggugauucc

SEQ ID NO: 1603704 - RNA, 19 nt, Homo sapiens
  misc_RNA (1)...(19): siRNA sense strand
ugauuucuuuggugaugau

SEQ ID NO: 1603705 - RNA, 19 nt, Homo sapiens
  misc_RNA (1)...(19): siRNA sense strand
gcugugcgugugcuucuga

SEQ ID NO: 1603706 - RNA, 19 nt, Homo sapiens
  misc_RNA (1)...(19): siRNA sense strand
uaacuugucuccaugauuu

SEQ ID NO: 1603707 - RNA, 19 nt, Homo sapiens
  misc_RNA (1)...(19): siRNA sense strand
caacuggucugucaacgua

SEQ ID NO: 1603708 - RNA, 19 nt, Homo sapiens
  misc_RNA (1)...(19): siRNA sense strand
gaagaaagccaagaaggua

SEQ ID NO: 1603709 - RNA, 19 nt, Homo sapiens
  misc_RNA (1)...(19): siRNA sense strand
gagcaaguccucacugaua

SEQ ID NO: 1603710 - RNA, 19 nt, Homo sapiens
  misc_RNA (1)...(19): siRNA sense strand
gauaagacauccaggaaca

SEQ ID NO: 1603711 - RNA, 19 nt, Homo sapiens
  misc_RNA (1)...(19): siRNA sense strand
caagagcccugguccuaug

SEQ ID NO: 1603712 - RNA, 19 nt, Homo sapiens
  misc_RNA (1)...(19): siRNA sense strand
gaaaaugaaugccgaguca

SEQ ID NO: 1603713 - RNA, 19 nt, Homo sapiens
  misc_RNA (1)...(19): siRNA sense strand
gagauaagacauccaggaa

SEQ ID NO: 1603714 - RNA, 19 nt, Homo sapiens
  misc_RNA (1)...(19): siRNA sense strand
gcuaugcucaggaugauuu

SEQ ID NO: 1603715 - RNA, 19 nt, Homo sapiens
  misc_RNA (1)...(19): siRNA sense strand
gaaaacagguaacuugucu

SEQ ID NO: 1603716 - RNA, 19 nt, Homo sapiens
  misc_RNA (1)...(19): siRNA sense strand
guacguuucuaccgcaaug

SEQ ID NO: 1603717 - RNA, 19 nt, Homo sapiens
  misc_RNA (1)...(19): siRNA sense strand
gcuuggugauuccauguaa

SEQ ID NO: 1603718 - RNA, 19 nt, Homo sapiens
  misc_RNA (1)...(19): siRNA sense strand
aaacaucugccaauaugaa

SEQ ID NO: 1603719 - RNA, 19 nt, Homo sapiens
  misc_RNA (1)...(19): siRNA sense strand
ggagugcguuacauuuaca

SEQ ID NO: 1603720 - RNA, 19 nt, Homo sapiens
  misc_RNA (1)...(19): siRNA sense strand
gaugaugauguguuuauug

SEQ ID NO: 1603721 - RNA, 19 nt, Homo sapiens
  misc_RNA (1)...(19): siRNA sense strand
ccucagacaacuucuuuaa

SEQ ID NO: 1603722 - RNA, 19 nt, Homo sapiens
  misc_RNA (1)...(19): siRNA sense strand
ggaagcacaaggaccugua

SEQ ID NO: 1603723 - RNA, 19 nt, Homo sapiens
  misc_RNA (1)...(19): siRNA sense strand
gccaagagcccugguccua

SEQ ID NO: 1603724 - RNA, 19 nt, Homo sapiens
  misc_RNA (1)...(19): siRNA sense strand
gggagugcguuacauuuac

SEQ ID NO: 1603725 - RNA, 19 nt, Homo sapiens
  misc_RNA (1)...(19): siRNA sense strand
acagguaacuugucuccau

SEQ ID NO: 1603726 - RNA, 19 nt, Homo sapiens
  misc_RNA (1)...(19): siRNA sense strand
uaucacagaagccaucaaa

SEQ ID NO: 1603727 - RNA, 19 nt, Homo sapiens
  misc_RNA (1)...(19): siRNA sense strand
gaagaucggaagcauggau

SEQ ID NO: 1603728 - RNA, 19 nt, Homo sapiens
  misc_RNA (1)...(19): siRNA sense strand
ucacagaagccaucaaacu

SEQ ID NO: 1603729 - RNA, 19 nt, Homo sapiens
  misc_RNA (1)...(19): siRNA sense strand
uaagcagucucccaucucu

SEQ ID NO: 1603730 - RNA, 19 nt, Homo sapiens
  misc_RNA (1)...(19): siRNA sense strand
caugauuucuuuggugaug

SEQ ID NO: 1603731 - RNA, 19 nt, Homo sapiens
  misc_RNA (1)...(19): siRNA sense strand
ucuacacucuggauggaaa

SEQ ID NO: 1603732 - RNA, 19 nt, Homo sapiens
  misc_RNA (1)...(19): siRNA sense strand
gugaugaugauguguuuau

SEQ ID NO: 1603733 - RNA, 19 nt, Homo sapiens
  misc_RNA (1)...(19): siRNA sense strand
gcacugaguaaugagaaga

SEQ ID NO: 1603734 - RNA, 19 nt, Homo sapiens
  misc_RNA (1)...(19): siRNA sense strand
augcgaggcucccggauga

SEQ ID NO: 1603735 - RNA, 19 nt, Homo sapiens
  misc_RNA (1)...(19): siRNA sense strand
aaucccaacuggucuguca

SEQ ID NO: 1603736 - RNA, 19 nt, Homo sapiens
  misc_RNA (1)...(19): siRNA sense strand
ccaggaagaucggaagcau

SEQ ID NO: 1603737 - RNA, 19 nt, Homo sapiens
  misc_RNA (1)...(19): siRNA sense strand
gaccugacgcgaucucugu

SEQ ID NO: 1603738 - RNA, 19 nt, Homo sapiens
  misc_RNA (1)...(19): siRNA sense strand
ugcaggcacugaguaauga

SEQ ID NO: 1603739 - RNA, 19 nt, Homo sapiens
  misc_RNA (1)...(19): siRNA sense strand
caagaagacagcccacucu

SEQ ID NO: 1603740 - RNA, 19 nt, Homo sapiens
  misc_RNA (1)...(19): siRNA sense strand
gcguuacauuuacaccauu

SEQ ID NO: 1603741 - RNA, 19 nt, Homo sapiens
  misc_RNA (1)...(19): siRNA sense strand
agggagugcguuacauuua

SEQ ID NO: 1603742 - RNA, 19 nt, Homo sapiens
  misc_RNA (1)...(19): siRNA sense strand
cagggagugcguuacauuu

SEQ ID NO: 1603743 - RNA, 19 nt, Homo sapiens
  misc_RNA (1)...(19): siRNA sense strand
gcacaggccagggagaaca

SEQ ID NO: 1603744 - RNA, 19 nt, Homo sapiens
  misc_RNA (1)...(19): siRNA sense strand
guaacuugucuccaugauu

SEQ ID NO: 1603745 - RNA, 19 nt, Homo sapiens
  misc_RNA (1)...(19): siRNA sense strand
gguaacuugucuccaugau

SEQ ID NO: 1603746 - RNA, 19 nt, Homo sapiens
  misc_RNA (1)...(19): siRNA sense strand
ucagggagugcguuacauu

SEQ ID NO: 1603747 - RNA, 19 nt, Homo sapiens
  misc_RNA (1)...(19): siRNA sense strand
cacagaagccaucaaacug

SEQ ID NO: 1603748 - RNA, 19 nt, Homo sapiens
  misc_RNA (1)...(19): siRNA sense strand
ccagggagaacaaggacuu

SEQ ID NO: 1603749 - RNA, 19 nt, Homo sapiens
  misc_RNA (1)...(19): siRNA sense strand
ugacgaaagagauaagaca

SEQ ID NO: 1603750 - RNA, 19 nt, Homo sapiens
  misc_RNA (1)...(19): siRNA sense strand
gccgagucaugaagggaaa

SEQ ID NO: 1603751 - RNA, 19 nt, Homo sapiens
  misc_RNA (1)...(19): siRNA sense strand
uggugaugaugauguguuu

SEQ ID NO: 1603752 - RNA, 19 nt, Homo sapiens
  misc_RNA (1)...(19): siRNA sense strand
gaucggaagcauggaugaa

SEQ ID NO: 1603753 - RNA, 19 nt, Homo sapiens
  misc_RNA (1)...(19): siRNA sense strand
cggacucgcuuggugauuc

SEQ ID NO: 1603754 - RNA, 19 nt, Homo sapiens
  misc_RNA (1)...(19): siRNA sense strand
uaagacauccaggaacaug

SEQ ID NO: 1603755 - RNA, 19 nt, Homo sapiens
  misc_RNA (1)...(19): siRNA sense strand
agcaaguccucacugauau

SEQ ID NO: 1603756 - RNA, 19 nt, Homo sapiens
  misc_RNA (1)...(19): siRNA sense strand
uggaguacaccaagaaugu

SEQ ID NO: 1603757 - RNA, 19 nt, Homo sapiens
  misc_RNA (1)...(19): siRNA sense strand
auugauggauccaggaaga

SEQ ID NO: 1603758 - RNA, 19 nt, Homo sapiens
  misc_RNA (1)...(19): siRNA sense strand
ucuaagcagucucccaucu

SEQ ID NO: 1603759 - RNA, 19 nt, Homo sapiens
  misc_RNA (1)...(19): siRNA sense strand
ccucacugauaucacagaa

SEQ ID NO: 1603760 - RNA, 19 nt, Homo sapiens
  misc_RNA (1)...(19): siRNA sense strand
agaagaaagccaagaaggu

SEQ ID NO: 1603761 - RNA, 19 nt, Homo sapiens
  misc_RNA (1)...(19): siRNA sense strand
uguacgcuguguccucuga

SEQ ID NO: 1603762 - RNA, 19 nt, Homo sapiens
  misc_RNA (1)...(19): siRNA sense strand
gaguacaccaagaauguca

SEQ ID NO: 1603763 - RNA, 19 nt, Homo sapiens
  misc_RNA (1)...(19): siRNA sense strand
gcaaguccucacugauauc

SEQ ID NO: 1603764 - RNA, 19 nt, Homo sapiens
  misc_RNA (1)...(19): siRNA sense strand
ccaagagcccugguccuau

SEQ ID NO: 1603765 - RNA, 19 nt, Homo sapiens
  misc_RNA (1)...(19): siRNA sense strand
gggaaagcuaugucuguuc

SEQ ID NO: 1603766 - RNA, 19 nt, Homo sapiens
  misc_RNA (1)...(19): siRNA sense strand
aagccaagaagguacguuu

SEQ ID NO: 1603767 - RNA, 19 nt, Homo sapiens
  misc_RNA (1)...(19): siRNA sense strand
gggauuguguacgcugugu

SEQ ID NO: 1603768 - RNA, 19 nt, Homo sapiens
  misc_RNA (1)...(19): siRNA sense strand
ccuaugcgccgaagcaagu

SEQ ID NO: 1603769 - RNA, 19 nt, Homo sapiens
  misc_RNA (1)...(19): siRNA sense strand
caaguccucacugauauca

SEQ ID NO: 1603770 - RNA, 19 nt, Homo sapiens
  misc_RNA (1)...(19): siRNA sense strand
guacaccaagaaugucaau

SEQ ID NO: 1603771 - RNA, 19 nt, Homo sapiens
  misc_RNA (1)...(19): siRNA sense strand
cguuacauuuacaccauug

SEQ ID NO: 1603772 - RNA, 19 nt, Homo sapiens
  misc_RNA (1)...(19): siRNA sense strand
gaccuguaccugccucugu

SEQ ID NO: 1603773 - RNA, 19 nt, Homo sapiens
  misc_RNA (1)...(19): siRNA sense strand
gacgaaagagauaagacau

SEQ ID NO: 1603774 - RNA, 19 nt, Homo sapiens
  misc_RNA (1)...(19): siRNA sense strand
ggggaaagcuaugucuguu

SEQ ID NO: 1603775 - RNA, 19 nt, Homo sapiens
  misc_RNA (1)...(19): siRNA sense strand
ugcgugugcuucugaacaa

SEQ ID NO: 1603776 - RNA, 19 nt, Homo sapiens
  misc_RNA (1)...(19): siRNA sense strand
gaagcacaaggaccuguac

SEQ ID NO: 1603777 - RNA, 19 nt, Homo sapiens
  misc_RNA (1)...(19): siRNA sense strand
aguccucacugauaucaca

SEQ ID NO: 1603778 - RNA, 19 nt, Homo sapiens
  misc_RNA (1)...(19): siRNA sense strand
acuggucugucaacguaaa

SEQ ID NO: 1603779 - RNA, 19 nt, Homo sapiens
  misc_RNA (1)...(19): siRNA sense strand
ggacucgcuuggugauucc

SEQ ID NO: 1603780 - RNA, 19 nt, Homo sapiens
  misc_RNA (1)...(19): siRNA sense strand
ugauuucuuuggugaugau

SEQ ID NO: 1603781 - RNA, 19 nt, Homo sapiens
  misc_RNA (1)...(19): siRNA sense strand
gcugugcgugugcuucuga

SEQ ID NO: 1603782 - RNA, 19 nt, Homo sapiens
  misc_RNA (1)...(19): siRNA sense strand
uaacuugucuccaugauuu

SEQ ID NO: 1603783 - RNA, 19 nt, Homo sapiens
  misc_RNA (1)...(19): siRNA sense strand
caacuggucugucaacgua

SEQ ID NO: 1603784 - RNA, 19 nt, Homo sapiens
  misc_RNA (1)...(19): siRNA sense strand
gaagaaagccaagaaggua

SEQ ID NO: 1603785 - RNA, 19 nt, Homo sapiens
  misc_RNA (1)...(19): siRNA sense strand
gagcaaguccucacugaua

SEQ ID NO: 1603786 - RNA, 19 nt, Homo sapiens
  misc_RNA (1)...(19): siRNA sense strand
gauaagacauccaggaaca

SEQ ID NO: 1603787 - RNA, 19 nt, Homo sapiens
  misc_RNA (1)...(19): siRNA sense strand
caagagcccugguccuaug

SEQ ID NO: 1603788 - RNA, 19 nt, Homo sapiens
  misc_RNA (1)...(19): siRNA sense strand
gaaaaugaaugccgaguca

SEQ ID NO: 1603789 - RNA, 19 nt, Homo sapiens
  misc_RNA (1)...(19): siRNA sense strand
gagauaagacauccaggaa

SEQ ID NO: 1603790 - RNA, 19 nt, Homo sapiens
  misc_RNA (1)...(19): siRNA sense strand
gcuaugcucaggaugauuu

SEQ ID NO: 1603791 - RNA, 19 nt, Homo sapiens
  misc_RNA (1)...(19): siRNA sense strand
gaaaacagguaacuugucu

SEQ ID NO: 1603792 - RNA, 19 nt, Homo sapiens
  misc_RNA (1)...(19): siRNA sense strand
guacguuucuaccgcaaug

SEQ ID NO: 1603793 - RNA, 19 nt, Homo sapiens
  misc_RNA (1)...(19): siRNA sense strand
gcuuggugauuccauguaa

SEQ ID NO: 1603794 - RNA, 19 nt, Homo sapiens
  misc_RNA (1)...(19): siRNA sense strand
aaacaucugccaauaugaa

SEQ ID NO: 1603795 - RNA, 19 nt, Homo sapiens
  misc_RNA (1)...(19): siRNA sense strand
ggagugcguuacauuuaca

SEQ ID NO: 1603796 - RNA, 19 nt, Homo sapiens
  misc_RNA (1)...(19): siRNA sense strand
gaugaugauguguuuauug

SEQ ID NO: 1603797 - RNA, 19 nt, Homo sapiens
  misc_RNA (1)...(19): siRNA sense strand
ccucagacaacuucuuuaa

SEQ ID NO: 1603798 - RNA, 19 nt, Homo sapiens
  misc_RNA (1)...(19): siRNA sense strand
ggaagcacaaggaccugua

SEQ ID NO: 1603799 - RNA, 19 nt, Homo sapiens
  misc_RNA (1)...(19): siRNA sense strand
gccaagagcccugguccua

SEQ ID NO: 1603800 - RNA, 19 nt, Homo sapiens
  misc_RNA (1)...(19): siRNA sense strand
gggagugcguuacauuuac

SEQ ID NO: 1603801 - RNA, 19 nt, Homo sapiens
  misc_RNA (1)...(19): siRNA sense strand
acagguaacuugucuccau

SEQ ID NO: 1603802 - RNA, 19 nt, Homo sapiens
  misc_RNA (1)...(19): siRNA sense strand
uaucacagaagccaucaaa

SEQ ID NO: 1603803 - RNA, 19 nt, Homo sapiens
  misc_RNA (1)...(19): siRNA sense strand
gaagaucggaagcauggau

SEQ ID NO: 1603804 - RNA, 19 nt, Homo sapiens
  misc_RNA (1)...(19): siRNA sense strand
ucacagaagccaucaaacu

SEQ ID NO: 1603805 - RNA, 19 nt, Homo sapiens
  misc_RNA (1)...(19): siRNA sense strand
uaagcagucucccaucucu

SEQ ID NO: 1603806 - RNA, 19 nt, Homo sapiens
  misc_RNA (1)...(19): siRNA sense strand
caugauuucuuuggugaug

SEQ ID NO: 1603807 - RNA, 19 nt, Homo sapiens
  misc_RNA (1)...(19): siRNA sense strand
ucuacacucuggauggaaa

SEQ ID NO: 1603808 - RNA, 19 nt, Homo sapiens
  misc_RNA (1)...(19): siRNA sense strand
gugaugaugauguguuuau

SEQ ID NO: 1603809 - RNA, 19 nt, Homo sapiens
  misc_RNA (1)...(19): siRNA sense strand
gcacugaguaaugagaaga

SEQ ID NO: 1603810 - RNA, 19 nt, Homo sapiens
  misc_RNA (1)...(19): siRNA sense strand
augcgaggcucccggauga

SEQ ID NO: 1603811 - RNA, 19 nt, Homo sapiens
  misc_RNA (1)...(19): siRNA sense strand
aaucccaacuggucuguca

SEQ ID NO: 1603812 - RNA, 19 nt, Homo sapiens
  misc_RNA (1)...(19): siRNA sense strand
ccaggaagaucggaagcau

SEQ ID NO: 1603813 - RNA, 19 nt, Homo sapiens
  misc_RNA (1)...(19): siRNA sense strand
gaccugacgcgaucucugu

SEQ ID NO: 1603814 - RNA, 19 nt, Homo sapiens
  misc_RNA (1)...(19): siRNA sense strand
ugcaggcacugaguaauga

SEQ ID NO: 1603815 - RNA, 19 nt, Homo sapiens
  misc_RNA (1)...(19): siRNA sense strand
caagaagacagcccacucu

SEQ ID NO: 1603816 - RNA, 19 nt, Homo sapiens
  misc_RNA (1)...(19): siRNA sense strand
gcguuacauuuacaccauu

SEQ ID NO: 1603817 - RNA, 19 nt, Homo sapiens
  misc_RNA (1)...(19): siRNA sense strand
agggagugcguuacauuua

SEQ ID NO: 1603818 - RNA, 19 nt, Homo sapiens
  misc_RNA (1)...(19): siRNA sense strand
cagggagugcguuacauuu

SEQ ID NO: 1603819 - RNA, 19 nt, Homo sapiens
  misc_RNA (1)...(19): siRNA sense strand
gcacaggccagggagaaca

SEQ ID NO: 1603820 - RNA, 19 nt, Homo sapiens
  misc_RNA (1)...(19): siRNA sense strand
guaacuugucuccaugauu

SEQ ID NO: 1603821 - RNA, 19 nt, Homo sapiens
  misc_RNA (1)...(19): siRNA sense strand
gguaacuugucuccaugau

SEQ ID NO: 1603822 - RNA, 19 nt, Homo sapiens
  misc_RNA (1)...(19): siRNA sense strand
ucagggagugcguuacauu

SEQ ID NO: 1603823 - RNA, 19 nt, Homo sapiens
  misc_RNA (1)...(19): siRNA sense strand
cacagaagccaucaaacug

SEQ ID NO: 1603824 - RNA, 19 nt, Homo sapiens
  misc_RNA (1)...(19): siRNA sense strand
ccagggagaacaaggacuu

SEQ ID NO: 1603825 - RNA, 19 nt, Homo sapiens
  misc_RNA (1)...(19): siRNA sense strand
ugacgaaagagauaagaca

SEQ ID NO: 1603826 - RNA, 19 nt, Homo sapiens
  misc_RNA (1)...(19): siRNA sense strand
gccgagucaugaagggaaa

SEQ ID NO: 1603827 - RNA, 19 nt, Homo sapiens
  misc_RNA (1)...(19): siRNA sense strand
uggugaugaugauguguuu

SEQ ID NO: 1603828 - RNA, 19 nt, Homo sapiens
  misc_RNA (1)...(19): siRNA sense strand
gaucggaagcauggaugaa

SEQ ID NO: 1603829 - RNA, 19 nt, Homo sapiens
  misc_RNA (1)...(19): siRNA sense strand
cggacucgcuuggugauuc

SEQ ID NO: 1603830 - RNA, 19 nt, Homo sapiens
  misc_RNA (1)...(19): siRNA sense strand
uaagacauccaggaacaug

SEQ ID NO: 1603831 - RNA, 19 nt, Homo sapiens
  misc_RNA (1)...(19): siRNA sense strand
agcaaguccucacugauau

SEQ ID NO: 1603832 - RNA, 19 nt, Homo sapiens
  misc_RNA (1)...(19): siRNA sense strand
uggaguacaccaagaaugu

SEQ ID NO: 1603833 - RNA, 19 nt, Homo sapiens
  misc_RNA (1)...(19): siRNA sense strand
auugauggauccaggaaga

SEQ ID NO: 1603834 - RNA, 19 nt, Homo sapiens
  misc_RNA (1)...(19): siRNA sense strand
ucuaagcagucucccaucu

SEQ ID NO: 1603835 - RNA, 19 nt, Homo sapiens
  misc_RNA (1)...(19): siRNA sense strand
ccucacugauaucacagaa

SEQ ID NO: 1603836 - RNA, 19 nt, Homo sapiens
  misc_RNA (1)...(19): siRNA sense strand
agaagaaagccaagaaggu

SEQ ID NO: 1603837 - RNA, 19 nt, Homo sapiens
  misc_RNA (1)...(19): siRNA sense strand
uguacgcuguguccucuga

SEQ ID NO: 1603838 - RNA, 19 nt, Homo sapiens
  misc_RNA (1)...(19): siRNA sense strand
gaguacaccaagaauguca

SEQ ID NO: 1603839 - RNA, 19 nt, Homo sapiens
  misc_RNA (1)...(19): siRNA sense strand
gcaaguccucacugauauc

SEQ ID NO: 1603840 - RNA, 19 nt, Homo sapiens
  misc_RNA (1)...(19): siRNA sense strand
ccaagagcccugguccuau

SEQ ID NO: 1603841 - RNA, 19 nt, Homo sapiens
  misc_RNA (1)...(19): siRNA sense strand
gggaaagcuaugucuguuc

SEQ ID NO: 1603842 - RNA, 19 nt, Homo sapiens
  misc_RNA (1)...(19): siRNA sense strand
aagccaagaagguacguuu

SEQ ID NO: 1603843 - RNA, 19 nt, Homo sapiens
  misc_RNA (1)...(19): siRNA sense strand
gggauuguguacgcugugu

SEQ ID NO: 1603844 - RNA, 19 nt, Homo sapiens
  misc_RNA (1)...(19): siRNA sense strand
ccuaugcgccgaagcaagu

SEQ ID NO: 1603845 - RNA, 19 nt, Homo sapiens
  misc_RNA (1)...(19): siRNA sense strand
caaguccucacugauauca

SEQ ID NO: 1603846 - RNA, 19 nt, Homo sapiens
  misc_RNA (1)...(19): siRNA sense strand
guacaccaagaaugucaau

SEQ ID NO: 1603847 - RNA, 19 nt, Homo sapiens
  misc_RNA (1)...(19): siRNA sense strand
cguuacauuuacaccauug

SEQ ID NO: 1603848 - RNA, 19 nt, Homo sapiens
  misc_RNA (1)...(19): siRNA sense strand
gaccuguaccugccucugu

SEQ ID NO: 1603849 - RNA, 19 nt, Homo sapiens
  misc_RNA (1)...(19): siRNA sense strand
gacgaaagagauaagacau

SEQ ID NO: 1603850 - RNA, 19 nt, Homo sapiens
  misc_RNA (1)...(19): siRNA sense strand
ggggaaagcuaugucuguu

SEQ ID NO: 1603851 - RNA, 19 nt, Homo sapiens
  misc_RNA (1)...(19): siRNA sense strand
ugcgugugcuucugaacaa

SEQ ID NO: 1603852 - RNA, 19 nt, Homo sapiens
  misc_RNA (1)...(19): siRNA sense strand
gaagcacaaggaccuguac

SEQ ID NO: 1603853 - RNA, 19 nt, Homo sapiens
  misc_RNA (1)...(19): siRNA sense strand
aguccucacugauaucaca

SEQ ID NO: 1603854 - RNA, 19 nt, Homo sapiens
  misc_RNA (1)...(19): siRNA sense strand
acuggucugucaacguaaa

SEQ ID NO: 1603855 - RNA, 19 nt, Homo sapiens
  misc_RNA (1)...(19): siRNA sense strand
ggacucgcuuggugauucc

SEQ ID NO: 1603856 - RNA, 19 nt, Homo sapiens
  misc_RNA (1)...(19): siRNA sense strand
ugauuucuuuggugaugau

SEQ ID NO: 1603857 - RNA, 19 nt, Homo sapiens
  misc_RNA (1)...(19): siRNA sense strand
gcugugcgugugcuucuga

SEQ ID NO: 1603858 - RNA, 19 nt, Homo sapiens
  misc_RNA (1)...(19): siRNA sense strand
uaacuugucuccaugauuu

SEQ ID NO: 1603859 - RNA, 19 nt, Homo sapiens
  misc_RNA (1)...(19): siRNA sense strand
caacuggucugucaacgua

SEQ ID NO: 1603860 - RNA, 19 nt, Homo sapiens
  misc_RNA (1)...(19): siRNA sense strand
gaagaaagccaagaaggua

SEQ ID NO: 1603861 - RNA, 19 nt, Homo sapiens
  misc_RNA (1)...(19): siRNA sense strand
gagcaaguccucacugaua

SEQ ID NO: 1603862 - RNA, 19 nt, Homo sapiens
  misc_RNA (1)...(19): siRNA sense strand
gauaagacauccaggaaca

SEQ ID NO: 1603863 - RNA, 19 nt, Homo sapiens
  misc_RNA (1)...(19): siRNA sense strand
caagagcccugguccuaug

SEQ ID NO: 1603864 - RNA, 19 nt, Homo sapiens
  misc_RNA (1)...(19): siRNA sense strand
gaaaaugaaugccgaguca

SEQ ID NO: 1603865 - RNA, 19 nt, Homo sapiens
  misc_RNA (1)...(19): siRNA sense strand
gagauaagacauccaggaa

SEQ ID NO: 1603866 - RNA, 19 nt, Homo sapiens
  misc_RNA (1)...(19): siRNA sense strand
gcuaugcucaggaugauuu

SEQ ID NO: 1603867 - RNA, 19 nt, Homo sapiens
  misc_RNA (1)...(19): siRNA sense strand
gaaaacagguaacuugucu

SEQ ID NO: 1603868 - RNA, 19 nt, Homo sapiens
  misc_RNA (1)...(19): siRNA sense strand
guacguuucuaccgcaaug

SEQ ID NO: 1603869 - RNA, 19 nt, Homo sapiens
  misc_RNA (1)...(19): siRNA sense strand
gcuuggugauuccauguaa

SEQ ID NO: 1603870 - RNA, 19 nt, Homo sapiens
  misc_RNA (1)...(19): siRNA sense strand
aaacaucugccaauaugaa

SEQ ID NO: 1603871 - RNA, 19 nt, Homo sapiens
  misc_RNA (1)...(19): siRNA sense strand
ggagugcguuacauuuaca

SEQ ID NO: 1603872 - RNA, 19 nt, Homo sapiens
  misc_RNA (1)...(19): siRNA sense strand
gaugaugauguguuuauug

SEQ ID NO: 1603873 - RNA, 19 nt, Homo sapiens
  misc_RNA (1)...(19): siRNA sense strand
ccucagacaacuucuuuaa

SEQ ID NO: 1603874 - RNA, 19 nt, Homo sapiens
  misc_RNA (1)...(19): siRNA sense strand
ggaagcacaaggaccugua

SEQ ID NO: 1603875 - RNA, 19 nt, Homo sapiens
  misc_RNA (1)...(19): siRNA sense strand
gccaagagcccugguccua

SEQ ID NO: 1603876 - RNA, 19 nt, Homo sapiens
  misc_RNA (1)...(19): siRNA sense strand
gggagugcguuacauuuac

SEQ ID NO: 1603877 - RNA, 19 nt, Homo sapiens
  misc_RNA (1)...(19): siRNA sense strand
acagguaacuugucuccau

SEQ ID NO: 1603878 - RNA, 19 nt, Homo sapiens
  misc_RNA (1)...(19): siRNA sense strand
uaucacagaagccaucaaa

SEQ ID NO: 1603879 - RNA, 19 nt, Homo sapiens
  misc_RNA (1)...(19): siRNA sense strand
gaagaucggaagcauggau

SEQ ID NO: 1603880 - RNA, 19 nt, Homo sapiens
  misc_RNA (1)...(19): siRNA sense strand
ucacagaagccaucaaacu

SEQ ID NO: 1603881 - RNA, 19 nt, Homo sapiens
  misc_RNA (1)...(19): siRNA sense strand
uaagcagucucccaucucu

SEQ ID NO: 1603882 - RNA, 19 nt, Homo sapiens
  misc_RNA (1)...(19): siRNA sense strand
caugauuucuuuggugaug

SEQ ID NO: 1603883 - RNA, 19 nt, Homo sapiens
  misc_RNA (1)...(19): siRNA sense strand
ucuacacucuggauggaaa

SEQ ID NO: 1603884 - RNA, 19 nt, Homo sapiens
  misc_RNA (1)...(19): siRNA sense strand
gugaugaugauguguuuau

SEQ ID NO: 1603885 - RNA, 19 nt, Homo sapiens
  misc_RNA (1)...(19): siRNA sense strand
gcacugaguaaugagaaga

SEQ ID NO: 1603886 - RNA, 19 nt, Homo sapiens
  misc_RNA (1)...(19): siRNA sense strand
augcgaggcucccggauga

SEQ ID NO: 1603887 - RNA, 19 nt, Homo sapiens
  misc_RNA (1)...(19): siRNA sense strand
aaucccaacuggucuguca

SEQ ID NO: 1603888 - RNA, 19 nt, Homo sapiens
  misc_RNA (1)...(19): siRNA sense strand
ccaggaagaucggaagcau

SEQ ID NO: 1603889 - RNA, 19 nt, Homo sapiens
  misc_RNA (1)...(19): siRNA sense strand
gaccugacgcgaucucugu

SEQ ID NO: 1603890 - RNA, 19 nt, Homo sapiens
  misc_RNA (1)...(19): siRNA sense strand
ugcaggcacugaguaauga

SEQ ID NO: 1603891 - RNA, 19 nt, Homo sapiens
  misc_RNA (1)...(19): siRNA sense strand
caagaagacagcccacucu

SEQ ID NO: 1603892 - RNA, 19 nt, Homo sapiens
  misc_RNA (1)...(19): siRNA sense strand
gcguuacauuuacaccauu

SEQ ID NO: 1603893 - RNA, 19 nt, Homo sapiens
  misc_RNA (1)...(19): siRNA sense strand
agggagugcguuacauuua

SEQ ID NO: 1603894 - RNA, 19 nt, Homo sapiens
  misc_RNA (1)...(19): siRNA sense strand
cagggagugcguuacauuu

SEQ ID NO: 1603895 - RNA, 19 nt, Homo sapiens
  misc_RNA (1)...(19): siRNA sense strand
gcacaggccagggagaaca

SEQ ID NO: 1603896 - RNA, 19 nt, Homo sapiens
  misc_RNA (1)...(19): siRNA sense strand
guaacuugucuccaugauu

SEQ ID NO: 1603897 - RNA, 19 nt, Homo sapiens
  misc_RNA (1)...(19): siRNA sense strand
gguaacuugucuccaugau

SEQ ID NO: 1603898 - RNA, 19 nt, Homo sapiens
  misc_RNA (1)...(19): siRNA sense strand
ucagggagugcguuacauu

SEQ ID NO: 1603899 - RNA, 19 nt, Homo sapiens
  misc_RNA (1)...(19): siRNA sense strand
cacagaagccaucaaacug

SEQ ID NO: 1603900 - RNA, 19 nt, Homo sapiens
  misc_RNA (1)...(19): siRNA sense strand
ccagggagaacaaggacuu

SEQ ID NO: 1603901 - RNA, 19 nt, Homo sapiens
  misc_RNA (1)...(19): siRNA sense strand
ugacgaaagagauaagaca

SEQ ID NO: 1603902 - RNA, 19 nt, Homo sapiens
  misc_RNA (1)...(19): siRNA sense strand
gccgagucaugaagggaaa

SEQ ID NO: 1603903 - RNA, 19 nt, Homo sapiens
  misc_RNA (1)...(19): siRNA sense strand
uggugaugaugauguguuu

SEQ ID NO: 1603904 - RNA, 19 nt, Homo sapiens
  misc_RNA (1)...(19): siRNA sense strand
gaucggaagcauggaugaa

SEQ ID NO: 1603905 - RNA, 19 nt, Homo sapiens
  misc_RNA (1)...(19): siRNA sense strand
cggacucgcuuggugauuc

SEQ ID NO: 1603906 - RNA, 19 nt, Homo sapiens
  misc_RNA (1)...(19): siRNA sense strand
uaagacauccaggaacaug

SEQ ID NO: 1603907 - RNA, 19 nt, Homo sapiens
  misc_RNA (1)...(19): siRNA sense strand
agcaaguccucacugauau

SEQ ID NO: 1603908 - RNA, 19 nt, Homo sapiens
  misc_RNA (1)...(19): siRNA sense strand
uggaguacaccaagaaugu

SEQ ID NO: 1603909 - RNA, 19 nt, Homo sapiens
  misc_RNA (1)...(19): siRNA sense strand
auugauggauccaggaaga

SEQ ID NO: 1603910 - RNA, 19 nt, Homo sapiens
  misc_RNA (1)...(19): siRNA sense strand
ucuaagcagucucccaucu

SEQ ID NO: 1603911 - RNA, 19 nt, Homo sapiens
  misc_RNA (1)...(19): siRNA sense strand
ccucacugauaucacagaa

SEQ ID NO: 1603912 - RNA, 19 nt, Homo sapiens
  misc_RNA (1)...(19): siRNA sense strand
agaagaaagccaagaaggu

SEQ ID NO: 1603913 - RNA, 19 nt, Homo sapiens
  misc_RNA (1)...(19): siRNA sense strand
uguacgcuguguccucuga

SEQ ID NO: 1603914 - RNA, 19 nt, Homo sapiens
  misc_RNA (1)...(19): siRNA sense strand
gaguacaccaagaauguca

SEQ ID NO: 1603915 - RNA, 19 nt, Homo sapiens
  misc_RNA (1)...(19): siRNA sense strand
gcaaguccucacugauauc

SEQ ID NO: 1603916 - RNA, 19 nt, Homo sapiens
  misc_RNA (1)...(19): siRNA sense strand
ccaagagcccugguccuau

SEQ ID NO: 1603917 - RNA, 19 nt, Homo sapiens
  misc_RNA (1)...(19): siRNA sense strand
gggaaagcuaugucuguuc

SEQ ID NO: 1603918 - RNA, 19 nt, Homo sapiens
  misc_RNA (1)...(19): siRNA sense strand
aagccaagaagguacguuu

SEQ ID NO: 1603919 - RNA, 19 nt, Homo sapiens
  misc_RNA (1)...(19): siRNA sense strand
gggauuguguacgcugugu

SEQ ID NO: 1603920 - RNA, 19 nt, Homo sapiens
  misc_RNA (1)...(19): siRNA sense strand
ccuaugcgccgaagcaagu

SEQ ID NO: 1603921 - RNA, 19 nt, Homo sapiens
  misc_RNA (1)...(19): siRNA sense strand
caaguccucacugauauca

SEQ ID NO: 1603922 - RNA, 19 nt, Homo sapiens
  misc_RNA (1)...(19): siRNA sense strand
guacaccaagaaugucaau

SEQ ID NO: 1603923 - RNA, 19 nt, Homo sapiens
  misc_RNA (1)...(19): siRNA sense strand
cguuacauuuacaccauug

SEQ ID NO: 1603924 - RNA, 19 nt, Homo sapiens
  misc_RNA (1)...(19): siRNA sense strand
gaccuguaccugccucugu

SEQ ID NO: 1603925 - RNA, 19 nt, Homo sapiens
  misc_RNA (1)...(19): siRNA sense strand
gacgaaagagauaagacau

SEQ ID NO: 1603926 - RNA, 19 nt, Homo sapiens
  misc_RNA (1)...(19): siRNA sense strand
ggggaaagcuaugucuguu

SEQ ID NO: 1603927 - RNA, 19 nt, Homo sapiens
  misc_RNA (1)...(19): siRNA sense strand
ugcgugugcuucugaacaa

SEQ ID NO: 1603928 - RNA, 19 nt, Homo sapiens
  misc_RNA (1)...(19): siRNA sense strand
gaagcacaaggaccuguac

SEQ ID NO: 1603929 - RNA, 19 nt, Homo sapiens
  misc_RNA (1)...(19): siRNA sense strand
aguccucacugauaucaca

SEQ ID NO: 1603930 - RNA, 19 nt, Homo sapiens
  misc_RNA (1)...(19): siRNA sense strand
acuggucugucaacguaaa

SEQ ID NO: 1603931 - RNA, 19 nt, Homo sapiens
  misc_RNA (1)...(19): siRNA sense strand
ggacucgcuuggugauucc

SEQ ID NO: 1603932 - RNA, 19 nt, Homo sapiens
  misc_RNA (1)...(19): siRNA sense strand
ugauuucuuuggugaugau

SEQ ID NO: 1603933 - RNA, 19 nt, Homo sapiens
  misc_RNA (1)...(19): siRNA sense strand
gcugugcgugugcuucuga

SEQ ID NO: 1603934 - RNA, 19 nt, Homo sapiens
  misc_RNA (1)...(19): siRNA sense strand
uaacuugucuccaugauuu

SEQ ID NO: 1603935 - RNA, 19 nt, Homo sapiens
  misc_RNA (1)...(19): siRNA sense strand
caacuggucugucaacgua

SEQ ID NO: 1603936 - RNA, 19 nt, Homo sapiens
  misc_RNA (1)...(19): siRNA sense strand
gaagaaagccaagaaggua

SEQ ID NO: 1603937 - RNA, 19 nt, Homo sapiens
  misc_RNA (1)...(19): siRNA sense strand
gagcaaguccucacugaua

SEQ ID NO: 1603938 - RNA, 19 nt, Homo sapiens
  misc_RNA (1)...(19): siRNA sense strand
gauaagacauccaggaaca

SEQ ID NO: 1603939 - RNA, 19 nt, Homo sapiens
  misc_RNA (1)...(19): siRNA sense strand
caagagcccugguccuaug

SEQ ID NO: 1603940 - RNA, 19 nt, Homo sapiens
  misc_RNA (1)...(19): siRNA sense strand
gaaaaugaaugccgaguca

SEQ ID NO: 1603941 - RNA, 19 nt, Homo sapiens
  misc_RNA (1)...(19): siRNA sense strand
gagauaagacauccaggaa

SEQ ID NO: 1603942 - RNA, 19 nt, Homo sapiens
  misc_RNA (1)...(19): siRNA sense strand
gcuaugcucaggaugauuu

SEQ ID NO: 1603943 - RNA, 19 nt, Homo sapiens
  misc_RNA (1)...(19): siRNA sense strand
ucucugagguuccaccaaa

SEQ ID NO: 1603944 - RNA, 19 nt, Homo sapiens
  misc_RNA (1)...(19): siRNA sense strand
gaaaacagguaacuugucu

SEQ ID NO: 1603945 - RNA, 19 nt, Homo sapiens
  misc_RNA (1)...(19): siRNA sense strand
guacguuucuaccgcaaug

SEQ ID NO: 1603946 - RNA, 19 nt, Homo sapiens
  misc_RNA (1)...(19): siRNA sense strand
gcuuggugauuccauguaa

SEQ ID NO: 1603947 - RNA, 19 nt, Homo sapiens
  misc_RNA (1)...(19): siRNA sense strand
aaacaucugccaauaugaa

SEQ ID NO: 1603948 - RNA, 19 nt, Homo sapiens
  misc_RNA (1)...(19): siRNA sense strand
ggagugcguuacauuuaca

SEQ ID NO: 1603949 - RNA, 19 nt, Homo sapiens
  misc_RNA (1)...(19): siRNA sense strand
gaugaugauguguuuauug

SEQ ID NO: 1603950 - RNA, 19 nt, Homo sapiens
  misc_RNA (1)...(19): siRNA sense strand
ccucagacaacuucuuuaa

SEQ ID NO: 1603951 - RNA, 19 nt, Homo sapiens
  misc_RNA (1)...(19): siRNA sense strand
ggaagcacaaggaccugua

SEQ ID NO: 1603952 - RNA, 19 nt, Homo sapiens
  misc_RNA (1)...(19): siRNA sense strand
gccaagagcccugguccua

SEQ ID NO: 1603953 - RNA, 19 nt, Homo sapiens
  misc_RNA (1)...(19): siRNA sense strand
gggagugcguuacauuuac

SEQ ID NO: 1603954 - RNA, 19 nt, Homo sapiens
  misc_RNA (1)...(19): siRNA sense strand
acagguaacuugucuccau

SEQ ID NO: 1603955 - RNA, 19 nt, Homo sapiens
  misc_RNA (1)...(19): siRNA sense strand
uaucacagaagccaucaaa

SEQ ID NO: 1603956 - RNA, 19 nt, Homo sapiens
  misc_RNA (1)...(19): siRNA sense strand
gaagaucggaagcauggau

SEQ ID NO: 1603957 - RNA, 19 nt, Homo sapiens
  misc_RNA (1)...(19): siRNA sense strand
ucacagaagccaucaaacu

SEQ ID NO: 1603958 - RNA, 19 nt, Homo sapiens
  misc_RNA (1)...(19): siRNA sense strand
uaagcagucucccaucucu

SEQ ID NO: 1603959 - RNA, 19 nt, Homo sapiens
  misc_RNA (1)...(19): siRNA sense strand
caugauuucuuuggugaug

SEQ ID NO: 1603960 - RNA, 19 nt, Homo sapiens
  misc_RNA (1)...(19): siRNA sense strand
ucuacacucuggauggaaa

SEQ ID NO: 1603961 - RNA, 19 nt, Homo sapiens
  misc_RNA (1)...(19): siRNA sense strand
gugaugaugauguguuuau

SEQ ID NO: 1603962 - RNA, 19 nt, Homo sapiens
  misc_RNA (1)...(19): siRNA sense strand
augcgaggcucccggauga

SEQ ID NO: 1603963 - RNA, 19 nt, Homo sapiens
  misc_RNA (1)...(19): siRNA sense strand
aaucccaacuggucuguca

SEQ ID NO: 1603964 - RNA, 19 nt, Homo sapiens
  misc_RNA (1)...(19): siRNA sense strand
ccaggaagaucggaagcau

SEQ ID NO: 1603965 - RNA, 19 nt, Homo sapiens
  misc_RNA (1)...(19): siRNA sense strand
gaccugacgcgaucucugu

SEQ ID NO: 1603966 - RNA, 19 nt, Homo sapiens
  misc_RNA (1)...(19): siRNA sense strand
gcacugaguaaugagaaga

SEQ ID NO: 1603967 - RNA, 19 nt, Homo sapiens
  misc_RNA (1)...(19): siRNA sense strand
ugcaggcacugaguaauga

SEQ ID NO: 1603968 - RNA, 19 nt, Homo sapiens
  misc_RNA (1)...(19): siRNA sense strand
caagaagacagcccacucu

SEQ ID NO: 1603969 - RNA, 19 nt, Homo sapiens
  misc_RNA (1)...(19): siRNA sense strand
gcguuacauuuacaccauu

SEQ ID NO: 1603970 - RNA, 19 nt, Homo sapiens
  misc_RNA (1)...(19): siRNA sense strand
agggagugcguuacauuua

SEQ ID NO: 1603971 - RNA, 19 nt, Homo sapiens
  misc_RNA (1)...(19): siRNA sense strand
cagggagugcguuacauuu

SEQ ID NO: 1603972 - RNA, 19 nt, Homo sapiens
  misc_RNA (1)...(19): siRNA sense strand
gcacaggccagggagaaca

SEQ ID NO: 1603973 - RNA, 19 nt, Homo sapiens
  misc_RNA (1)...(19): siRNA sense strand
guaacuugucuccaugauu

SEQ ID NO: 1603974 - RNA, 19 nt, Homo sapiens
  misc_RNA (1)...(19): siRNA sense strand
gguaacuugucuccaugau

SEQ ID NO: 1603975 - RNA, 19 nt, Homo sapiens
  misc_RNA (1)...(19): siRNA sense strand
ucagggagugcguuacauu

SEQ ID NO: 1603976 - RNA, 19 nt, Homo sapiens
  misc_RNA (1)...(19): siRNA sense strand
cacagaagccaucaaacug

SEQ ID NO: 1603977 - RNA, 19 nt, Homo sapiens
  misc_RNA (1)...(19): siRNA sense strand
ccagggagaacaaggacuu

SEQ ID NO: 1603978 - RNA, 19 nt, Homo sapiens
  misc_RNA (1)...(19): siRNA sense strand
gccgagucaugaagggaaa

SEQ ID NO: 1603979 - RNA, 19 nt, Homo sapiens
  misc_RNA (1)...(19): siRNA sense strand
uggugaugaugauguguuu

SEQ ID NO: 1603980 - RNA, 19 nt, Homo sapiens
  misc_RNA (1)...(19): siRNA sense strand
ugacgaaagagauaagaca

SEQ ID NO: 1603981 - RNA, 19 nt, Homo sapiens
  misc_RNA (1)...(19): siRNA sense strand
uaagacauccaggaacaug

SEQ ID NO: 1603982 - RNA, 19 nt, Homo sapiens
  misc_RNA (1)...(19): siRNA sense strand
cggacucgcuuggugauuc

SEQ ID NO: 1603983 - RNA, 19 nt, Homo sapiens
  misc_RNA (1)...(19): siRNA sense strand
agcaaguccucacugauau

SEQ ID NO: 1603984 - RNA, 19 nt, Homo sapiens
  misc_RNA (1)...(19): siRNA sense strand
uggaguacaccaagaaugu

SEQ ID NO: 1603985 - RNA, 19 nt, Homo sapiens
  misc_RNA (1)...(19): siRNA sense strand
gaucggaagcauggaugaa

SEQ ID NO: 1603986 - RNA, 19 nt, Homo sapiens
  misc_RNA (1)...(19): siRNA sense strand
agaagaaagccaagaaggu

SEQ ID NO: 1603987 - RNA, 19 nt, Homo sapiens
  misc_RNA (1)...(19): siRNA sense strand
ucuaagcagucucccaucu

SEQ ID NO: 1603988 - RNA, 19 nt, Homo sapiens
  misc_RNA (1)...(19): siRNA sense strand
ccucacugauaucacagaa

SEQ ID NO: 1603989 - RNA, 19 nt, Homo sapiens
  misc_RNA (1)...(19): siRNA sense strand
auugauggauccaggaaga

SEQ ID NO: 1603990 - RNA, 19 nt, Homo sapiens
  misc_RNA (1)...(19): siRNA sense strand
uguacgcuguguccucuga

SEQ ID NO: 1603991 - RNA, 19 nt, Homo sapiens
  misc_RNA (1)...(19): siRNA sense strand
gaguacaccaagaauguca

SEQ ID NO: 1603992 - RNA, 19 nt, Homo sapiens
  misc_RNA (1)...(19): siRNA sense strand
gcaaguccucacugauauc

SEQ ID NO: 1603993 - RNA, 19 nt, Homo sapiens
  misc_RNA (1)...(19): siRNA sense strand
ccaagagcccugguccuau

SEQ ID NO: 1603994 - RNA, 19 nt, Homo sapiens
  misc_RNA (1)...(19): siRNA sense strand
aagccaagaagguacguuu

SEQ ID NO: 1603995 - RNA, 19 nt, Homo sapiens
  misc_RNA (1)...(19): siRNA sense strand
gggaaagcuaugucuguuc

SEQ ID NO: 1603996 - RNA, 19 nt, Homo sapiens
  misc_RNA (1)...(19): siRNA sense strand
gggauuguguacgcugugu

SEQ ID NO: 1603997 - RNA, 19 nt, Homo sapiens
  misc_RNA (1)...(19): siRNA sense strand
ccuaugcgccgaagcaagu

SEQ ID NO: 1603998 - RNA, 19 nt, Homo sapiens
  misc_RNA (1)...(19): siRNA sense strand
caaguccucacugauauca

SEQ ID NO: 1603999 - RNA, 19 nt, Homo sapiens
  misc_RNA (1)...(19): siRNA sense strand
guacaccaagaaugucaau

SEQ ID NO: 1604000 - RNA, 19 nt, Homo sapiens
  misc_RNA (1)...(19): siRNA sense strand
cguuacauuuacaccauug

SEQ ID NO: 1604001 - RNA, 19 nt, Homo sapiens
  misc_RNA (1)...(19): siRNA sense strand
gaccuguaccugccucugu

SEQ ID NO: 1604002 - RNA, 19 nt, Homo sapiens
  misc_RNA (1)...(19): siRNA sense strand
gacgaaagagauaagacau

SEQ ID NO: 1604003 - RNA, 19 nt, Homo sapiens
  misc_RNA (1)...(19): siRNA sense strand
ggggaaagcuaugucuguu

SEQ ID NO: 1604004 - RNA, 19 nt, Homo sapiens
  misc_RNA (1)...(19): siRNA sense strand
ugcgugugcuucugaacaa

SEQ ID NO: 1604005 - RNA, 19 nt, Homo sapiens
  misc_RNA (1)...(19): siRNA sense strand
gaagcacaaggaccuguac

SEQ ID NO: 1604006 - RNA, 19 nt, Homo sapiens
  misc_RNA (1)...(19): siRNA sense strand
aguccucacugauaucaca

SEQ ID NO: 1604007 - RNA, 19 nt, Homo sapiens
  misc_RNA (1)...(19): siRNA sense strand
acuggucugucaacguaaa

SEQ ID NO: 1604008 - RNA, 19 nt, Homo sapiens
  misc_RNA (1)...(19): siRNA sense strand
ggacucgcuuggugauucc

SEQ ID NO: 1604009 - RNA, 19 nt, Homo sapiens
  misc_RNA (1)...(19): siRNA sense strand
ugauuucuuuggugaugau

SEQ ID NO: 1604010 - RNA, 19 nt, Homo sapiens
  misc_RNA (1)...(19): siRNA sense strand
gcugugcgugugcuucuga

SEQ ID NO: 1604011 - RNA, 19 nt, Homo sapiens
  misc_RNA (1)...(19): siRNA sense strand
uaacuugucuccaugauuu

SEQ ID NO: 1604012 - RNA, 19 nt, Homo sapiens
  misc_RNA (1)...(19): siRNA sense strand
caacuggucugucaacgua

SEQ ID NO: 1604013 - RNA, 19 nt, Homo sapiens
  misc_RNA (1)...(19): siRNA sense strand
gaagaaagccaagaaggua

SEQ ID NO: 1604014 - RNA, 19 nt, Homo sapiens
  misc_RNA (1)...(19): siRNA sense strand
gagcaaguccucacugaua

SEQ ID NO: 1604015 - RNA, 19 nt, Homo sapiens
  misc_RNA (1)...(19): siRNA sense strand
gauaagacauccaggaaca

SEQ ID NO: 1604016 - RNA, 19 nt, Homo sapiens
  misc_RNA (1)...(19): siRNA sense strand
caagagcccugguccuaug

SEQ ID NO: 1604017 - RNA, 19 nt, Homo sapiens
  misc_RNA (1)...(19): siRNA sense strand
gaaaaugaaugccgaguca

SEQ ID NO: 1604018 - RNA, 19 nt, Homo sapiens
  misc_RNA (1)...(19): siRNA sense strand
gagauaagacauccaggaa

SEQ ID NO: 1604019 - RNA, 19 nt, Homo sapiens
  misc_RNA (1)...(19): siRNA sense strand
gcuaugcucaggaugauuu

SEQ ID NO: 1604020 - RNA, 19 nt, Homo sapiens
  misc_RNA (1)...(19): siRNA sense strand
gaaaacagguaacuugucu

SEQ ID NO: 1604021 - RNA, 19 nt, Homo sapiens
  misc_RNA (1)...(19): siRNA sense strand
guacguuucuaccgcaaug

SEQ ID NO: 1604022 - RNA, 19 nt, Homo sapiens
  misc_RNA (1)...(19): siRNA sense strand
gcuuggugauuccauguaa

SEQ ID NO: 1604023 - RNA, 19 nt, Homo sapiens
  misc_RNA (1)...(19): siRNA sense strand
aaacaucugccaauaugaa

SEQ ID NO: 1604024 - RNA, 19 nt, Homo sapiens
  misc_RNA (1)...(19): siRNA sense strand
ggagugcguuacauuuaca

SEQ ID NO: 1604025 - RNA, 19 nt, Homo sapiens
  misc_RNA (1)...(19): siRNA sense strand
gaugaugauguguuuauug

SEQ ID NO: 1604026 - RNA, 19 nt, Homo sapiens
  misc_RNA (1)...(19): siRNA sense strand
ccucagacaacuucuuuaa

SEQ ID NO: 1604027 - RNA, 19 nt, Homo sapiens
  misc_RNA (1)...(19): siRNA sense strand
ggaagcacaaggaccugua

SEQ ID NO: 1604028 - RNA, 19 nt, Homo sapiens
  misc_RNA (1)...(19): siRNA sense strand
gccaagagcccugguccua

SEQ ID NO: 1604029 - RNA, 19 nt, Homo sapiens
  misc_RNA (1)...(19): siRNA sense strand
gggagugcguuacauuuac

SEQ ID NO: 1604030 - RNA, 19 nt, Homo sapiens
  misc_RNA (1)...(19): siRNA sense strand
acagguaacuugucuccau

SEQ ID NO: 1604031 - RNA, 19 nt, Homo sapiens
  misc_RNA (1)...(19): siRNA sense strand
uaucacagaagccaucaaa

SEQ ID NO: 1604032 - RNA, 19 nt, Homo sapiens
  misc_RNA (1)...(19): siRNA sense strand
gaagaucggaagcauggau

SEQ ID NO: 1604033 - RNA, 19 nt, Homo sapiens
  misc_RNA (1)...(19): siRNA sense strand
ucacagaagccaucaaacu

SEQ ID NO: 1604034 - RNA, 19 nt, Homo sapiens
  misc_RNA (1)...(19): siRNA sense strand
uaagcagucucccaucucu

SEQ ID NO: 1604035 - RNA, 19 nt, Homo sapiens
  misc_RNA (1)...(19): siRNA sense strand
caugauuucuuuggugaug

SEQ ID NO: 1604036 - RNA, 19 nt, Homo sapiens
  misc_RNA (1)...(19): siRNA sense strand
ucuacacucuggauggaaa

SEQ ID NO: 1604037 - RNA, 19 nt, Homo sapiens
  misc_RNA (1)...(19): siRNA sense strand
gugaugaugauguguuuau

SEQ ID NO: 1604038 - RNA, 19 nt, Homo sapiens
  misc_RNA (1)...(19): siRNA sense strand
gcacugaguaaugagaaga

SEQ ID NO: 1604039 - RNA, 19 nt, Homo sapiens
  misc_RNA (1)...(19): siRNA sense strand
augcgaggcucccggauga

SEQ ID NO: 1604040 - RNA, 19 nt, Homo sapiens
  misc_RNA (1)...(19): siRNA sense strand
aaucccaacuggucuguca

SEQ ID NO: 1604041 - RNA, 19 nt, Homo sapiens
  misc_RNA (1)...(19): siRNA sense strand
ccaggaagaucggaagcau

SEQ ID NO: 1604042 - RNA, 19 nt, Homo sapiens
  misc_RNA (1)...(19): siRNA sense strand
gaccugacgcgaucucugu

SEQ ID NO: 1604043 - RNA, 19 nt, Homo sapiens
  misc_RNA (1)...(19): siRNA sense strand
ugcaggcacugaguaauga

SEQ ID NO: 1604044 - RNA, 19 nt, Homo sapiens
  misc_RNA (1)...(19): siRNA sense strand
caagaagacagcccacucu

SEQ ID NO: 1604045 - RNA, 19 nt, Homo sapiens
  misc_RNA (1)...(19): siRNA sense strand
gcguuacauuuacaccauu

SEQ ID NO: 1604046 - RNA, 19 nt, Homo sapiens
  misc_RNA (1)...(19): siRNA sense strand
agggagugcguuacauuua

SEQ ID NO: 1604047 - RNA, 19 nt, Homo sapiens
  misc_RNA (1)...(19): siRNA sense strand
cagggagugcguuacauuu

SEQ ID NO: 1604048 - RNA, 19 nt, Homo sapiens
  misc_RNA (1)...(19): siRNA sense strand
gcacaggccagggagaaca

SEQ ID NO: 1604049 - RNA, 19 nt, Homo sapiens
  misc_RNA (1)...(19): siRNA sense strand
guaacuugucuccaugauu

SEQ ID NO: 1604050 - RNA, 19 nt, Homo sapiens
  misc_RNA (1)...(19): siRNA sense strand
gguaacuugucuccaugau

SEQ ID NO: 1604051 - RNA, 19 nt, Homo sapiens
  misc_RNA (1)...(19): siRNA sense strand
ucagggagugcguuacauu

SEQ ID NO: 1604052 - RNA, 19 nt, Homo sapiens
  misc_RNA (1)...(19): siRNA sense strand
cacagaagccaucaaacug

SEQ ID NO: 1604053 - RNA, 19 nt, Homo sapiens
  misc_RNA (1)...(19): siRNA sense strand
ccagggagaacaaggacuu

SEQ ID NO: 1604054 - RNA, 19 nt, Homo sapiens
  misc_RNA (1)...(19): siRNA sense strand
ugacgaaagagauaagaca

SEQ ID NO: 1604055 - RNA, 19 nt, Homo sapiens
  misc_RNA (1)...(19): siRNA sense strand
gccgagucaugaagggaaa

SEQ ID NO: 1604056 - RNA, 19 nt, Homo sapiens
  misc_RNA (1)...(19): siRNA sense strand
uggugaugaugauguguuu

SEQ ID NO: 1604057 - RNA, 19 nt, Homo sapiens
  misc_RNA (1)...(19): siRNA sense strand
gaucggaagcauggaugaa

SEQ ID NO: 1604058 - RNA, 19 nt, Homo sapiens
  misc_RNA (1)...(19): siRNA sense strand
cggacucgcuuggugauuc

SEQ ID NO: 1604059 - RNA, 19 nt, Homo sapiens
  misc_RNA (1)...(19): siRNA sense strand
uaagacauccaggaacaug

SEQ ID NO: 1604060 - RNA, 19 nt, Homo sapiens
  misc_RNA (1)...(19): siRNA sense strand
agcaaguccucacugauau

SEQ ID NO: 1604061 - RNA, 19 nt, Homo sapiens
  misc_RNA (1)...(19): siRNA sense strand
uggaguacaccaagaaugu

SEQ ID NO: 1604062 - RNA, 19 nt, Homo sapiens
  misc_RNA (1)...(19): siRNA sense strand
auugauggauccaggaaga

SEQ ID NO: 1604063 - RNA, 19 nt, Homo sapiens
  misc_RNA (1)...(19): siRNA sense strand
ucuaagcagucucccaucu

SEQ ID NO: 1604064 - RNA, 19 nt, Homo sapiens
  misc_RNA (1)...(19): siRNA sense strand
ccucacugauaucacagaa

SEQ ID NO: 1604065 - RNA, 19 nt, Homo sapiens
  misc_RNA (1)...(19): siRNA sense strand
agaagaaagccaagaaggu

SEQ ID NO: 1604066 - RNA, 19 nt, Homo sapiens
  misc_RNA (1)...(19): siRNA sense strand
uguacgcuguguccucuga

SEQ ID NO: 1604067 - RNA, 19 nt, Homo sapiens
  misc_RNA (1)...(19): siRNA sense strand
gaguacaccaagaauguca

SEQ ID NO: 1604068 - RNA, 19 nt, Homo sapiens
  misc_RNA (1)...(19): siRNA sense strand
gcaaguccucacugauauc

SEQ ID NO: 1604069 - RNA, 19 nt, Homo sapiens
  misc_RNA (1)...(19): siRNA sense strand
ccaagagcccugguccuau

SEQ ID NO: 1604070 - RNA, 19 nt, Homo sapiens
  misc_RNA (1)...(19): siRNA sense strand
gggaaagcuaugucuguuc

SEQ ID NO: 1604071 - RNA, 19 nt, Homo sapiens
  misc_RNA (1)...(19): siRNA sense strand
aagccaagaagguacguuu

SEQ ID NO: 1604072 - RNA, 19 nt, Homo sapiens
  misc_RNA (1)...(19): siRNA sense strand
gggauuguguacgcugugu

SEQ ID NO: 1604073 - RNA, 19 nt, Homo sapiens
  misc_RNA (1)...(19): siRNA sense strand
ccuaugcgccgaagcaagu

SEQ ID NO: 1604074 - RNA, 19 nt, Homo sapiens
  misc_RNA (1)...(19): siRNA sense strand
caaguccucacugauauca

SEQ ID NO: 1604075 - RNA, 19 nt, Homo sapiens
  misc_RNA (1)...(19): siRNA sense strand
guacaccaagaaugucaau

SEQ ID NO: 1604076 - RNA, 19 nt, Homo sapiens
  misc_RNA (1)...(19): siRNA sense strand
cguuacauuuacaccauug

SEQ ID NO: 1604077 - RNA, 19 nt, Homo sapiens
  misc_RNA (1)...(19): siRNA sense strand
gaccuguaccugccucugu

SEQ ID NO: 1604078 - RNA, 19 nt, Homo sapiens
  misc_RNA (1)...(19): siRNA sense strand
gacgaaagagauaagacau

SEQ ID NO: 1604079 - RNA, 19 nt, Homo sapiens
  misc_RNA (1)...(19): siRNA sense strand
ggggaaagcuaugucuguu

SEQ ID NO: 1604080 - RNA, 19 nt, Homo sapiens
  misc_RNA (1)...(19): siRNA sense strand
ugcgugugcuucugaacaa

SEQ ID NO: 1604081 - RNA, 19 nt, Homo sapiens
  misc_RNA (1)...(19): siRNA sense strand
gaagcacaaggaccuguac

SEQ ID NO: 1604082 - RNA, 19 nt, Homo sapiens
  misc_RNA (1)...(19): siRNA sense strand
aguccucacugauaucaca

SEQ ID NO: 1604083 - RNA, 19 nt, Homo sapiens
  misc_RNA (1)...(19): siRNA sense strand
acuggucugucaacguaaa

SEQ ID NO: 1604084 - RNA, 19 nt, Homo sapiens
  misc_RNA (1)...(19): siRNA sense strand
ggacucgcuuggugauucc

SEQ ID NO: 1604085 - RNA, 19 nt, Homo sapiens
  misc_RNA (1)...(19): siRNA sense strand
ugauuucuuuggugaugau

SEQ ID NO: 1604086 - RNA, 19 nt, Homo sapiens
  misc_RNA (1)...(19): siRNA sense strand
gcugugcgugugcuucuga

SEQ ID NO: 1604087 - RNA, 19 nt, Homo sapiens
  misc_RNA (1)...(19): siRNA sense strand
uaacuugucuccaugauuu

SEQ ID NO: 1604088 - RNA, 19 nt, Homo sapiens
  misc_RNA (1)...(19): siRNA sense strand
caacuggucugucaacgua

SEQ ID NO: 1604089 - RNA, 19 nt, Homo sapiens
  misc_RNA (1)...(19): siRNA sense strand
gaagaaagccaagaaggua

SEQ ID NO: 1604090 - RNA, 19 nt, Homo sapiens
  misc_RNA (1)...(19): siRNA sense strand
gagcaaguccucacugaua

SEQ ID NO: 1604091 - RNA, 19 nt, Homo sapiens
  misc_RNA (1)...(19): siRNA sense strand
gauaagacauccaggaaca

SEQ ID NO: 1604092 - RNA, 19 nt, Homo sapiens
  misc_RNA (1)...(19): siRNA sense strand
caagagcccugguccuaug

SEQ ID NO: 1604093 - RNA, 19 nt, Homo sapiens
  misc_RNA (1)...(19): siRNA sense strand
gaaaaugaaugccgaguca

SEQ ID NO: 1604094 - RNA, 19 nt, Homo sapiens
  misc_RNA (1)...(19): siRNA sense strand
gagauaagacauccaggaa

SEQ ID NO: 1604095 - RNA, 19 nt, Homo sapiens
  misc_RNA (1)...(19): siRNA sense strand
gcuaugcucaggaugauuu

SEQ ID NO: 1604096 - RNA, 19 nt, Homo sapiens
  misc_RNA (1)...(19): siRNA sense strand
gaaaacagguaacuugucu

SEQ ID NO: 1604097 - RNA, 19 nt, Homo sapiens
  misc_RNA (1)...(19): siRNA sense strand
guacguuucuaccgcaaug

SEQ ID NO: 1604098 - RNA, 19 nt, Homo sapiens
  misc_RNA (1)...(19): siRNA sense strand
gcuuggugauuccauguaa

SEQ ID NO: 1604099 - RNA, 19 nt, Homo sapiens
  misc_RNA (1)...(19): siRNA sense strand
aaacaucugccaauaugaa

SEQ ID NO: 1604100 - RNA, 19 nt, Homo sapiens
  misc_RNA (1)...(19): siRNA sense strand
ggagugcguuacauuuaca

SEQ ID NO: 1604101 - RNA, 19 nt, Homo sapiens
  misc_RNA (1)...(19): siRNA sense strand
gaugaugauguguuuauug

SEQ ID NO: 1604102 - RNA, 19 nt, Homo sapiens
  misc_RNA (1)...(19): siRNA sense strand
ccucagacaacuucuuuaa

SEQ ID NO: 1604103 - RNA, 19 nt, Homo sapiens
  misc_RNA (1)...(19): siRNA sense strand
ggaagcacaaggaccugua

SEQ ID NO: 1604104 - RNA, 19 nt, Homo sapiens
  misc_RNA (1)...(19): siRNA sense strand
gccaagagcccugguccua

SEQ ID NO: 1604105 - RNA, 19 nt, Homo sapiens
  misc_RNA (1)...(19): siRNA sense strand
gggagugcguuacauuuac

SEQ ID NO: 1604106 - RNA, 19 nt, Homo sapiens
  misc_RNA (1)...(19): siRNA sense strand
acagguaacuugucuccau

SEQ ID NO: 1604107 - RNA, 19 nt, Homo sapiens
  misc_RNA (1)...(19): siRNA sense strand
uaucacagaagccaucaaa

SEQ ID NO: 1604108 - RNA, 19 nt, Homo sapiens
  misc_RNA (1)...(19): siRNA sense strand
gaagaucggaagcauggau

SEQ ID NO: 1604109 - RNA, 19 nt, Homo sapiens
  misc_RNA (1)...(19): siRNA sense strand
ucacagaagccaucaaacu

SEQ ID NO: 1604110 - RNA, 19 nt, Homo sapiens
  misc_RNA (1)...(19): siRNA sense strand
uaagcagucucccaucucu

SEQ ID NO: 1604111 - RNA, 19 nt, Homo sapiens
  misc_RNA (1)...(19): siRNA sense strand
caugauuucuuuggugaug

SEQ ID NO: 1604112 - RNA, 19 nt, Homo sapiens
  misc_RNA (1)...(19): siRNA sense strand
ucuacacucuggauggaaa

SEQ ID NO: 1604113 - RNA, 19 nt, Homo sapiens
  misc_RNA (1)...(19): siRNA sense strand
gugaugaugauguguuuau

SEQ ID NO: 1604114 - RNA, 19 nt, Homo sapiens
  misc_RNA (1)...(19): siRNA sense strand
gcacugaguaaugagaaga

SEQ ID NO: 1604115 - RNA, 19 nt, Homo sapiens
  misc_RNA (1)...(19): siRNA sense strand
augcgaggcucccggauga

SEQ ID NO: 1604116 - RNA, 19 nt, Homo sapiens
  misc_RNA (1)...(19): siRNA sense strand
aaucccaacuggucuguca

SEQ ID NO: 1604117 - RNA, 19 nt, Homo sapiens
  misc_RNA (1)...(19): siRNA sense strand
ccaggaagaucggaagcau

SEQ ID NO: 1604118 - RNA, 19 nt, Homo sapiens
  misc_RNA (1)...(19): siRNA sense strand
gaccugacgcgaucucugu

SEQ ID NO: 1604119 - RNA, 19 nt, Homo sapiens
  misc_RNA (1)...(19): siRNA sense strand
ugcaggcacugaguaauga

SEQ ID NO: 1604120 - RNA, 19 nt, Homo sapiens
  misc_RNA (1)...(19): siRNA sense strand
caagaagacagcccacucu

SEQ ID NO: 1604121 - RNA, 19 nt, Homo sapiens
  misc_RNA (1)...(19): siRNA sense strand
gcguuacauuuacaccauu

SEQ ID NO: 1604122 - RNA, 19 nt, Homo sapiens
  misc_RNA (1)...(19): siRNA sense strand
agggagugcguuacauuua

SEQ ID NO: 1604123 - RNA, 19 nt, Homo sapiens
  misc_RNA (1)...(19): siRNA sense strand
cagggagugcguuacauuu

SEQ ID NO: 1604124 - RNA, 19 nt, Homo sapiens
  misc_RNA (1)...(19): siRNA sense strand
gcacaggccagggagaaca

SEQ ID NO: 1604125 - RNA, 19 nt, Homo sapiens
  misc_RNA (1)...(19): siRNA sense strand
guaacuugucuccaugauu

SEQ ID NO: 1604126 - RNA, 19 nt, Homo sapiens
  misc_RNA (1)...(19): siRNA sense strand
gguaacuugucuccaugau

SEQ ID NO: 1604127 - RNA, 19 nt, Homo sapiens
  misc_RNA (1)...(19): siRNA sense strand
ucagggagugcguuacauu

SEQ ID NO: 1604128 - RNA, 19 nt, Homo sapiens
  misc_RNA (1)...(19): siRNA sense strand
cacagaagccaucaaacug

SEQ ID NO: 1604129 - RNA, 19 nt, Homo sapiens
  misc_RNA (1)...(19): siRNA sense strand
ccagggagaacaaggacuu

SEQ ID NO: 1604130 - RNA, 19 nt, Homo sapiens
  misc_RNA (1)...(19): siRNA sense strand
ugacgaaagagauaagaca

SEQ ID NO: 1604131 - RNA, 19 nt, Homo sapiens
  misc_RNA (1)...(19): siRNA sense strand
gccgagucaugaagggaaa

SEQ ID NO: 1604132 - RNA, 19 nt, Homo sapiens
  misc_RNA (1)...(19): siRNA sense strand
uggugaugaugauguguuu

SEQ ID NO: 1604133 - RNA, 19 nt, Homo sapiens
  misc_RNA (1)...(19): siRNA sense strand
gaucggaagcauggaugaa

SEQ ID NO: 1604134 - RNA, 19 nt, Homo sapiens
  misc_RNA (1)...(19): siRNA sense strand
cggacucgcuuggugauuc

SEQ ID NO: 1604135 - RNA, 19 nt, Homo sapiens
  misc_RNA (1)...(19): siRNA sense strand
uaagacauccaggaacaug

SEQ ID NO: 1604136 - RNA, 19 nt, Homo sapiens
  misc_RNA (1)...(19): siRNA sense strand
agcaaguccucacugauau

SEQ ID NO: 1604137 - RNA, 19 nt, Homo sapiens
  misc_RNA (1)...(19): siRNA sense strand
uggaguacaccaagaaugu

SEQ ID NO: 1604138 - RNA, 19 nt, Homo sapiens
  misc_RNA (1)...(19): siRNA sense strand
auugauggauccaggaaga

SEQ ID NO: 1604139 - RNA, 19 nt, Homo sapiens
  misc_RNA (1)...(19): siRNA sense strand
ucuaagcagucucccaucu

SEQ ID NO: 1604140 - RNA, 19 nt, Homo sapiens
  misc_RNA (1)...(19): siRNA sense strand
ccucacugauaucacagaa

SEQ ID NO: 1604141 - RNA, 19 nt, Homo sapiens
  misc_RNA (1)...(19): siRNA sense strand
agaagaaagccaagaaggu

SEQ ID NO: 1604142 - RNA, 19 nt, Homo sapiens
  misc_RNA (1)...(19): siRNA sense strand
uguacgcuguguccucuga

SEQ ID NO: 1604143 - RNA, 19 nt, Homo sapiens
  misc_RNA (1)...(19): siRNA sense strand
gaguacaccaagaauguca

SEQ ID NO: 1604144 - RNA, 19 nt, Homo sapiens
  misc_RNA (1)...(19): siRNA sense strand
gcaaguccucacugauauc

SEQ ID NO: 1604145 - RNA, 19 nt, Homo sapiens
  misc_RNA (1)...(19): siRNA sense strand
ccaagagcccugguccuau

SEQ ID NO: 1604146 - RNA, 19 nt, Homo sapiens
  misc_RNA (1)...(19): siRNA sense strand
gggaaagcuaugucuguuc

SEQ ID NO: 1604147 - RNA, 19 nt, Homo sapiens
  misc_RNA (1)...(19): siRNA sense strand
aagccaagaagguacguuu

SEQ ID NO: 1604148 - RNA, 19 nt, Homo sapiens
  misc_RNA (1)...(19): siRNA sense strand
gggauuguguacgcugugu

SEQ ID NO: 1604149 - RNA, 19 nt, Homo sapiens
  misc_RNA (1)...(19): siRNA sense strand
ccuaugcgccgaagcaagu

SEQ ID NO: 1604150 - RNA, 19 nt, Homo sapiens
  misc_RNA (1)...(19): siRNA sense strand
caaguccucacugauauca

SEQ ID NO: 1604151 - RNA, 19 nt, Homo sapiens
  misc_RNA (1)...(19): siRNA sense strand
guacaccaagaaugucaau

SEQ ID NO: 1604152 - RNA, 19 nt, Homo sapiens
  misc_RNA (1)...(19): siRNA sense strand
cguuacauuuacaccauug

SEQ ID NO: 1604153 - RNA, 19 nt, Homo sapiens
  misc_RNA (1)...(19): siRNA sense strand
gaccuguaccugccucugu

SEQ ID NO: 1604154 - RNA, 19 nt, Homo sapiens
  misc_RNA (1)...(19): siRNA sense strand
gacgaaagagauaagacau

SEQ ID NO: 1604155 - RNA, 19 nt, Homo sapiens
  misc_RNA (1)...(19): siRNA sense strand
ggggaaagcuaugucuguu

SEQ ID NO: 1604156 - RNA, 19 nt, Homo sapiens
  misc_RNA (1)...(19): siRNA sense strand
ugcgugugcuucugaacaa

SEQ ID NO: 1604157 - RNA, 19 nt, Homo sapiens
  misc_RNA (1)...(19): siRNA sense strand
gaagcacaaggaccuguac

SEQ ID NO: 1604158 - RNA, 19 nt, Homo sapiens
  misc_RNA (1)...(19): siRNA sense strand
aguccucacugauaucaca

SEQ ID NO: 1604159 - RNA, 19 nt, Homo sapiens
  misc_RNA (1)...(19): siRNA sense strand
acuggucugucaacguaaa

SEQ ID NO: 1604160 - RNA, 19 nt, Homo sapiens
  misc_RNA (1)...(19): siRNA sense strand
ggacucgcuuggugauucc

SEQ ID NO: 1604161 - RNA, 19 nt, Homo sapiens
  misc_RNA (1)...(19): siRNA sense strand
ugauuucuuuggugaugau

SEQ ID NO: 1604162 - RNA, 19 nt, Homo sapiens
  misc_RNA (1)...(19): siRNA sense strand
gcugugcgugugcuucuga

SEQ ID NO: 1604163 - RNA, 19 nt, Homo sapiens
  misc_RNA (1)...(19): siRNA sense strand
uaacuugucuccaugauuu

SEQ ID NO: 1604164 - RNA, 19 nt, Homo sapiens
  misc_RNA (1)...(19): siRNA sense strand
caacuggucugucaacgua

SEQ ID NO: 1604165 - RNA, 19 nt, Homo sapiens
  misc_RNA (1)...(19): siRNA sense strand
gaagaaagccaagaaggua

SEQ ID NO: 1604166 - RNA, 19 nt, Homo sapiens
  misc_RNA (1)...(19): siRNA sense strand
gagcaaguccucacugaua

SEQ ID NO: 1604167 - RNA, 19 nt, Homo sapiens
  misc_RNA (1)...(19): siRNA sense strand
gauaagacauccaggaaca

SEQ ID NO: 1604168 - RNA, 19 nt, Homo sapiens
  misc_RNA (1)...(19): siRNA sense strand
caagagcccugguccuaug

SEQ ID NO: 1604169 - RNA, 19 nt, Homo sapiens
  misc_RNA (1)...(19): siRNA sense strand
gaaaaugaaugccgaguca

SEQ ID NO: 1604170 - RNA, 19 nt, Homo sapiens
  misc_RNA (1)...(19): siRNA sense strand
gagauaagacauccaggaa

SEQ ID NO: 1604171 - RNA, 19 nt, Homo sapiens
  misc_RNA (1)...(19): siRNA sense strand
gcuaugcucaggaugauuu

SEQ ID NO: 1604172 - RNA, 19 nt, Homo sapiens
  misc_RNA (1)...(19): siRNA sense strand
gaaaacagguaacuugucu

SEQ ID NO: 1604173 - RNA, 19 nt, Homo sapiens
  misc_RNA (1)...(19): siRNA sense strand
guacguuucuaccgcaaug

SEQ ID NO: 1604174 - RNA, 19 nt, Homo sapiens
  misc_RNA (1)...(19): siRNA sense strand
gcuuggugauuccauguaa

SEQ ID NO: 1604175 - RNA, 19 nt, Homo sapiens
  misc_RNA (1)...(19): siRNA sense strand
aaacaucugccaauaugaa

SEQ ID NO: 1604176 - RNA, 19 nt, Homo sapiens
  misc_RNA (1)...(19): siRNA sense strand
ggagugcguuacauuuaca

SEQ ID NO: 1604177 - RNA, 19 nt, Homo sapiens
  misc_RNA (1)...(19): siRNA sense strand
gaugaugauguguuuauug

SEQ ID NO: 1604178 - RNA, 19 nt, Homo sapiens
  misc_RNA (1)...(19): siRNA sense strand
ccucagacaacuucuuuaa

SEQ ID NO: 1604179 - RNA, 19 nt, Homo sapiens
  misc_RNA (1)...(19): siRNA sense strand
ggaagcacaaggaccugua

SEQ ID NO: 1604180 - RNA, 19 nt, Homo sapiens
  misc_RNA (1)...(19): siRNA sense strand
gccaagagcccugguccua

SEQ ID NO: 1604181 - RNA, 19 nt, Homo sapiens
  misc_RNA (1)...(19): siRNA sense strand
gggagugcguuacauuuac

SEQ ID NO: 1604182 - RNA, 19 nt, Homo sapiens
  misc_RNA (1)...(19): siRNA sense strand
acagguaacuugucuccau

SEQ ID NO: 1604183 - RNA, 19 nt, Homo sapiens
  misc_RNA (1)...(19): siRNA sense strand
uaucacagaagccaucaaa

SEQ ID NO: 1604184 - RNA, 19 nt, Homo sapiens
  misc_RNA (1)...(19): siRNA sense strand
gaagaucggaagcauggau

SEQ ID NO: 1604185 - RNA, 19 nt, Homo sapiens
  misc_RNA (1)...(19): siRNA sense strand
ucacagaagccaucaaacu

SEQ ID NO: 1604186 - RNA, 19 nt, Homo sapiens
  misc_RNA (1)...(19): siRNA sense strand
uaagcagucucccaucucu

SEQ ID NO: 1604187 - RNA, 19 nt, Homo sapiens
  misc_RNA (1)...(19): siRNA sense strand
caugauuucuuuggugaug

SEQ ID NO: 1604188 - RNA, 19 nt, Homo sapiens
  misc_RNA (1)...(19): siRNA sense strand
ucuacacucuggauggaaa

SEQ ID NO: 1604189 - RNA, 19 nt, Homo sapiens
  misc_RNA (1)...(19): siRNA sense strand
gugaugaugauguguuuau

SEQ ID NO: 1604190 - RNA, 19 nt, Homo sapiens
  misc_RNA (1)...(19): siRNA sense strand
gcacugaguaaugagaaga

SEQ ID NO: 1604191 - RNA, 19 nt, Homo sapiens
  misc_RNA (1)...(19): siRNA sense strand
augcgaggcucccggauga

SEQ ID NO: 1604192 - RNA, 19 nt, Homo sapiens
  misc_RNA (1)...(19): siRNA sense strand
aaucccaacuggucuguca

SEQ ID NO: 1604193 - RNA, 19 nt, Homo sapiens
  misc_RNA (1)...(19): siRNA sense strand
ccaggaagaucggaagcau

SEQ ID NO: 1604194 - RNA, 19 nt, Homo sapiens
  misc_RNA (1)...(19): siRNA sense strand
gaccugacgcgaucucugu

SEQ ID NO: 1604195 - RNA, 19 nt, Homo sapiens
  misc_RNA (1)...(19): siRNA sense strand
ugcaggcacugaguaauga

SEQ ID NO: 1604196 - RNA, 19 nt, Homo sapiens
  misc_RNA (1)...(19): siRNA sense strand
caagaagacagcccacucu

SEQ ID NO: 1604197 - RNA, 19 nt, Homo sapiens
  misc_RNA (1)...(19): siRNA sense strand
gcguuacauuuacaccauu

SEQ ID NO: 1604198 - RNA, 19 nt, Homo sapiens
  misc_RNA (1)...(19): siRNA sense strand
agggagugcguuacauuua

SEQ ID NO: 1604199 - RNA, 19 nt, Homo sapiens
  misc_RNA (1)...(19): siRNA sense strand
cagggagugcguuacauuu

SEQ ID NO: 1604200 - RNA, 19 nt, Homo sapiens
  misc_RNA (1)...(19): siRNA sense strand
gcacaggccagggagaaca

SEQ ID NO: 1604201 - RNA, 19 nt, Homo sapiens
  misc_RNA (1)...(19): siRNA sense strand
guaacuugucuccaugauu

SEQ ID NO: 1604202 - RNA, 19 nt, Homo sapiens
  misc_RNA (1)...(19): siRNA sense strand
gguaacuugucuccaugau

SEQ ID NO: 1604203 - RNA, 19 nt, Homo sapiens
  misc_RNA (1)...(19): siRNA sense strand
ucagggagugcguuacauu

SEQ ID NO: 1604204 - RNA, 19 nt, Homo sapiens
  misc_RNA (1)...(19): siRNA sense strand
cacagaagccaucaaacug

SEQ ID NO: 1604205 - RNA, 19 nt, Homo sapiens
  misc_RNA (1)...(19): siRNA sense strand
ccagggagaacaaggacuu

SEQ ID NO: 1604206 - RNA, 19 nt, Homo sapiens
  misc_RNA (1)...(19): siRNA sense strand
ugacgaaagagauaagaca

SEQ ID NO: 1604207 - RNA, 19 nt, Homo sapiens
  misc_RNA (1)...(19): siRNA sense strand
gccgagucaugaagggaaa

SEQ ID NO: 1604208 - RNA, 19 nt, Homo sapiens
  misc_RNA (1)...(19): siRNA sense strand
uggugaugaugauguguuu

SEQ ID NO: 1604209 - RNA, 19 nt, Homo sapiens
  misc_RNA (1)...(19): siRNA sense strand
gaucggaagcauggaugaa

SEQ ID NO: 1604210 - RNA, 19 nt, Homo sapiens
  misc_RNA (1)...(19): siRNA sense strand
cggacucgcuuggugauuc

SEQ ID NO: 1604211 - RNA, 19 nt, Homo sapiens
  misc_RNA (1)...(19): siRNA sense strand
uaagacauccaggaacaug

SEQ ID NO: 1604212 - RNA, 19 nt, Homo sapiens
  misc_RNA (1)...(19): siRNA sense strand
agcaaguccucacugauau

SEQ ID NO: 1604213 - RNA, 19 nt, Homo sapiens
  misc_RNA (1)...(19): siRNA sense strand
uggaguacaccaagaaugu

SEQ ID NO: 1604214 - RNA, 19 nt, Homo sapiens
  misc_RNA (1)...(19): siRNA sense strand
auugauggauccaggaaga

SEQ ID NO: 1604215 - RNA, 19 nt, Homo sapiens
  misc_RNA (1)...(19): siRNA sense strand
ucuaagcagucucccaucu

SEQ ID NO: 1604216 - RNA, 19 nt, Homo sapiens
  misc_RNA (1)...(19): siRNA sense strand
ccucacugauaucacagaa

SEQ ID NO: 1604217 - RNA, 19 nt, Homo sapiens
  misc_RNA (1)...(19): siRNA sense strand
agaagaaagccaagaaggu

SEQ ID NO: 1604218 - RNA, 19 nt, Homo sapiens
  misc_RNA (1)...(19): siRNA sense strand
uguacgcuguguccucuga

SEQ ID NO: 1604219 - RNA, 19 nt, Homo sapiens
  misc_RNA (1)...(19): siRNA sense strand
gaguacaccaagaauguca

SEQ ID NO: 1604220 - RNA, 19 nt, Homo sapiens
  misc_RNA (1)...(19): siRNA sense strand
gcaaguccucacugauauc

SEQ ID NO: 1604221 - RNA, 19 nt, Homo sapiens
  misc_RNA (1)...(19): siRNA sense strand
ccaagagcccugguccuau

SEQ ID NO: 1604222 - RNA, 19 nt, Homo sapiens
  misc_RNA (1)...(19): siRNA sense strand
gggaaagcuaugucuguuc

SEQ ID NO: 1604223 - RNA, 19 nt, Homo sapiens
  misc_RNA (1)...(19): siRNA sense strand
aagccaagaagguacguuu

SEQ ID NO: 1604224 - RNA, 19 nt, Homo sapiens
  misc_RNA (1)...(19): siRNA sense strand
gggauuguguacgcugugu

SEQ ID NO: 1604225 - RNA, 19 nt, Homo sapiens
  misc_RNA (1)...(19): siRNA sense strand
ccuaugcgccgaagcaagu

SEQ ID NO: 1604226 - RNA, 19 nt, Homo sapiens
  misc_RNA (1)...(19): siRNA sense strand
caaguccucacugauauca

SEQ ID NO: 1604227 - RNA, 19 nt, Homo sapiens
  misc_RNA (1)...(19): siRNA sense strand
guacaccaagaaugucaau

SEQ ID NO: 1604228 - RNA, 19 nt, Homo sapiens
  misc_RNA (1)...(19): siRNA sense strand
cguuacauuuacaccauug

SEQ ID NO: 1604229 - RNA, 19 nt, Homo sapiens
  misc_RNA (1)...(19): siRNA sense strand
gaccuguaccugccucugu

SEQ ID NO: 1604230 - RNA, 19 nt, Homo sapiens
  misc_RNA (1)...(19): siRNA sense strand
gacgaaagagauaagacau

SEQ ID NO: 1604231 - RNA, 19 nt, Homo sapiens
  misc_RNA (1)...(19): siRNA sense strand
ggggaaagcuaugucuguu

SEQ ID NO: 1604232 - RNA, 19 nt, Homo sapiens
  misc_RNA (1)...(19): siRNA sense strand
ugcgugugcuucugaacaa

SEQ ID NO: 1604233 - RNA, 19 nt, Homo sapiens
  misc_RNA (1)...(19): siRNA sense strand
gaagcacaaggaccuguac

SEQ ID NO: 1604234 - RNA, 19 nt, Homo sapiens
  misc_RNA (1)...(19): siRNA sense strand
aguccucacugauaucaca

SEQ ID NO: 1604235 - RNA, 19 nt, Homo sapiens
  misc_RNA (1)...(19): siRNA sense strand
acuggucugucaacguaaa

SEQ ID NO: 1604236 - RNA, 19 nt, Homo sapiens
  misc_RNA (1)...(19): siRNA sense strand
ggacucgcuuggugauucc

SEQ ID NO: 1604237 - RNA, 19 nt, Homo sapiens
  misc_RNA (1)...(19): siRNA sense strand
ugauuucuuuggugaugau

SEQ ID NO: 1604238 - RNA, 19 nt, Homo sapiens
  misc_RNA (1)...(19): siRNA sense strand
gcugugcgugugcuucuga

SEQ ID NO: 1604239 - RNA, 19 nt, Homo sapiens
  misc_RNA (1)...(19): siRNA sense strand
gcacgucccuugaggcuua

SEQ ID NO: 1604240 - RNA, 19 nt, Homo sapiens
  misc_RNA (1)...(19): siRNA sense strand
acacauaccugcugcugaa

SEQ ID NO: 1604241 - RNA, 19 nt, Homo sapiens
  misc_RNA (1)...(19): siRNA sense strand
gagcggauccgaaggagaa

SEQ ID NO: 1604242 - RNA, 19 nt, Homo sapiens
  misc_RNA (1)...(19): siRNA sense strand
cagccacgcucuacugguu

SEQ ID NO: 1604243 - RNA, 19 nt, Homo sapiens
  misc_RNA (1)...(19): siRNA sense strand
gcuaugcgcucggccauca

SEQ ID NO: 1604244 - RNA, 19 nt, Homo sapiens
  misc_RNA (1)...(19): siRNA sense strand
guggaccgcuuccucauca

SEQ ID NO: 1604245 - RNA, 19 nt, Homo sapiens
  misc_RNA (1)...(19): siRNA sense strand
gcaacacuguggucugcau

SEQ ID NO: 1604246 - RNA, 19 nt, Homo sapiens
  misc_RNA (1)...(19): siRNA sense strand
ucaacacgguccgcaagaa

SEQ ID NO: 1604247 - RNA, 19 nt, Homo sapiens
  misc_RNA (1)...(19): siRNA sense strand
gcgccuacguggucaccuu

SEQ ID NO: 1604248 - RNA, 19 nt, Homo sapiens
  misc_RNA (1)...(19): siRNA sense strand
gcaacagcacgucccuuga

SEQ ID NO: 1604249 - RNA, 19 nt, Homo sapiens
  misc_RNA (1)...(19): siRNA sense strand
caacagcacgucccuugag

SEQ ID NO: 1604250 - RNA, 19 nt, Homo sapiens
  misc_RNA (1)...(19): siRNA sense strand
ccuugaggcuuacacauac

SEQ ID NO: 1604251 - RNA, 19 nt, Homo sapiens
  misc_RNA (1)...(19): siRNA sense strand
ggccuucuccgacaucaug

SEQ ID NO: 1604252 - RNA, 19 nt, Homo sapiens
  misc_RNA (1)...(19): siRNA sense strand
ccaccauccugauccucuu

SEQ ID NO: 1604253 - RNA, 19 nt, Homo sapiens
  misc_RNA (1)...(19): siRNA sense strand
cagucuacgugugcaauga

SEQ ID NO: 1604254 - RNA, 19 nt, Homo sapiens
  misc_RNA (1)...(19): siRNA sense strand
ccacuucugccgccucuca

SEQ ID NO: 1604255 - RNA, 19 nt, Homo sapiens
  misc_RNA (1)...(19): siRNA sense strand
cccuugaggcuuacacaua

SEQ ID NO: 1604256 - RNA, 19 nt, Homo sapiens
  misc_RNA (1)...(19): siRNA sense strand
ccauagugaugcugcugau

SEQ ID NO: 1604257 - RNA, 19 nt, Homo sapiens
  misc_RNA (1)...(19): siRNA sense strand
auagugaugcugcugauga

SEQ ID NO: 1604258 - RNA, 19 nt, Homo sapiens
  misc_RNA (1)...(19): siRNA sense strand
gucuacugcuggagaauca

SEQ ID NO: 1604259 - RNA, 19 nt, Homo sapiens
  misc_RNA (1)...(19): siRNA sense strand
ccaaggccuucaccaccau

SEQ ID NO: 1604260 - RNA, 19 nt, Homo sapiens
  misc_RNA (1)...(19): siRNA sense strand
ggugguggccguguucuuc

SEQ ID NO: 1604261 - RNA, 19 nt, Homo sapiens
  misc_RNA (1)...(19): siRNA sense strand
gucuacgugugcaaugaaa

SEQ ID NO: 1604262 - RNA, 19 nt, Homo sapiens
  misc_RNA (1)...(19): siRNA sense strand
ggaccgcuuccucaucauc

SEQ ID NO: 1604263 - RNA, 19 nt, Homo sapiens
  misc_RNA (1)...(19): siRNA sense strand
cgcgaggccugcauagagu

SEQ ID NO: 1604264 - RNA, 19 nt, Homo sapiens
  misc_RNA (1)...(19): siRNA sense strand
caacacgguccgcaagaac

SEQ ID NO: 1604265 - RNA, 19 nt, Homo sapiens
  misc_RNA (1)...(19): siRNA sense strand
ggaucuccuuggccauagu

SEQ ID NO: 1604266 - RNA, 19 nt, Homo sapiens
  misc_RNA (1)...(19): siRNA sense strand
ucaacgagaugguggagua

SEQ ID NO: 1604267 - RNA, 19 nt, Homo sapiens
  misc_RNA (1)...(19): siRNA sense strand
ugaaugagcuggaggagau

SEQ ID NO: 1604268 - RNA, 19 nt, Homo sapiens
  misc_RNA (1)...(19): siRNA sense strand
gagcgggacuuccucaaga

SEQ ID NO: 1604269 - RNA, 19 nt, Homo sapiens
  misc_RNA (1)...(19): siRNA sense strand
ccaaggaggugauguucuu

SEQ ID NO: 1604270 - RNA, 19 nt, Homo sapiens
  misc_RNA (1)...(19): siRNA sense strand
gaggugauguucuugaaug

SEQ ID NO: 1604271 - RNA, 19 nt, Homo sapiens
  misc_RNA (1)...(19): siRNA sense strand
ucagugaccucaaauucaa

SEQ ID NO: 1604272 - RNA, 19 nt, Homo sapiens
  misc_RNA (1)...(19): siRNA sense strand
guacaucgaccagaaguuu

SEQ ID NO: 1604273 - RNA, 19 nt, Homo sapiens
  misc_RNA (1)...(19): siRNA sense strand
ccagugcuguguccucuuu

SEQ ID NO: 1604274 - RNA, 19 nt, Homo sapiens
  misc_RNA (1)...(19): siRNA sense strand
uccauggacugaucuauaa

SEQ ID NO: 1604275 - RNA, 19 nt, Homo sapiens
  misc_RNA (1)...(19): siRNA sense strand
agaaguacaucgaccagaa

SEQ ID NO: 1604276 - RNA, 19 nt, Homo sapiens
  misc_RNA (1)...(19): siRNA sense strand
gaacaagacaauccaugga

SEQ ID NO: 1604277 - RNA, 19 nt, Homo sapiens
  misc_RNA (1)...(19): siRNA sense strand
gggcaggacucaacgagau

SEQ ID NO: 1604278 - RNA, 19 nt, Homo sapiens
  misc_RNA (1)...(19): siRNA sense strand
ugacugagccgguaauugu

SEQ ID NO: 1604279 - RNA, 19 nt, Homo sapiens
  misc_RNA (1)...(19): siRNA sense strand
ucgcaucuauggcaaguuu

SEQ ID NO: 1604280 - RNA, 19 nt, Homo sapiens
  misc_RNA (1)...(19): siRNA sense strand
uaaaagacaucaagaagga

SEQ ID NO: 1604281 - RNA, 19 nt, Homo sapiens
  misc_RNA (1)...(19): siRNA sense strand
uaaagaagagcacaagaug

SEQ ID NO: 1604282 - RNA, 19 nt, Homo sapiens
  misc_RNA (1)...(19): siRNA sense strand
gaaggaaagggaagagaug

SEQ ID NO: 1604283 - RNA, 19 nt, Homo sapiens
  misc_RNA (1)...(19): siRNA sense strand
gaagaggacuguggagacu

SEQ ID NO: 1604284 - RNA, 19 nt, Homo sapiens
  misc_RNA (1)...(19): siRNA sense strand
ucaugagccugauaaguga

SEQ ID NO: 1604285 - RNA, 19 nt, Homo sapiens
  misc_RNA (1)...(19): siRNA sense strand
gaaguuguuuauggaaaug

SEQ ID NO: 1604286 - RNA, 19 nt, Homo sapiens
  misc_RNA (1)...(19): siRNA sense strand
gacaauccauggacugauc

SEQ ID NO: 1604287 - RNA, 19 nt, Homo sapiens
  misc_RNA (1)...(19): siRNA sense strand
aagaagagcacaagauguu

SEQ ID NO: 1604288 - RNA, 19 nt, Homo sapiens
  misc_RNA (1)...(19): siRNA sense strand
gaggacauccagcuucuga

SEQ ID NO: 1604289 - RNA, 19 nt, Homo sapiens
  misc_RNA (1)...(19): siRNA sense strand
cauacugugugguacaauu

SEQ ID NO: 1604290 - RNA, 19 nt, Homo sapiens
  misc_RNA (1)...(19): siRNA sense strand
uaugaguucuucuuacguu

SEQ ID NO: 1604291 - RNA, 19 nt, Homo sapiens
  misc_RNA (1)...(19): siRNA sense strand
caaacauagccaagaagua

SEQ ID NO: 1604292 - RNA, 19 nt, Homo sapiens
  misc_RNA (1)...(19): siRNA sense strand
gagaaggagagcagucuga

SEQ ID NO: 1604293 - RNA, 19 nt, Homo sapiens
  misc_RNA (1)...(19): siRNA sense strand
guaggcagaucaaccacau

SEQ ID NO: 1604294 - RNA, 19 nt, Homo sapiens
  misc_RNA (1)...(19): siRNA sense strand
ucaagucccugagugucua

SEQ ID NO: 1604295 - RNA, 19 nt, Homo sapiens
  misc_RNA (1)...(19): siRNA sense strand
gggaagagauguggcaaaa

SEQ ID NO: 1604296 - RNA, 19 nt, Homo sapiens
  misc_RNA (1)...(19): siRNA sense strand
ugaaucagaagcuguuuga

SEQ ID NO: 1604297 - RNA, 19 nt, Homo sapiens
  misc_RNA (1)...(19): siRNA sense strand
ggacgucauugaaccuucu

SEQ ID NO: 1604298 - RNA, 19 nt, Homo sapiens
  misc_RNA (1)...(19): siRNA sense strand
aaacauagccaagaaguac

SEQ ID NO: 1604299 - RNA, 19 nt, Homo sapiens
  misc_RNA (1)...(19): siRNA sense strand
ccucauccguguccuacuu

SEQ ID NO: 1604300 - RNA, 19 nt, Homo sapiens
  misc_RNA (1)...(19): siRNA sense strand
agaggacuguggagacuga

SEQ ID NO: 1604301 - RNA, 19 nt, Homo sapiens
  misc_RNA (1)...(19): siRNA sense strand
gcucguguaugaguucuuc

SEQ ID NO: 1604302 - RNA, 19 nt, Homo sapiens
  misc_RNA (1)...(19): siRNA sense strand
ucauugaaccuucugaguu

SEQ ID NO: 1604303 - RNA, 19 nt, Homo sapiens
  misc_RNA (1)...(19): siRNA sense strand
uggaguacaucacccauag

SEQ ID NO: 1604304 - RNA, 19 nt, Homo sapiens
  misc_RNA (1)...(19): siRNA sense strand
gcuguguccucuuugacuu

SEQ ID NO: 1604305 - RNA, 19 nt, Homo sapiens
  misc_RNA (1)...(19): siRNA sense strand
cauguucccugcacucuac

SEQ ID NO: 1604306 - RNA, 19 nt, Homo sapiens
  misc_RNA (1)...(19): siRNA sense strand
guaauugugggacuucuca

SEQ ID NO: 1604307 - RNA, 19 nt, Homo sapiens
  misc_RNA (1)...(19): siRNA sense strand
aagagccacuggaacaaga

SEQ ID NO: 1604308 - RNA, 19 nt, Homo sapiens
  misc_RNA (1)...(19): siRNA sense strand
gcuggcauacuguguggua

SEQ ID NO: 1604309 - RNA, 19 nt, Homo sapiens
  misc_RNA (1)...(19): siRNA sense strand
gcugccaccuucaucgaau

SEQ ID NO: 1604310 - RNA, 19 nt, Homo sapiens
  misc_RNA (1)...(19): siRNA sense strand
uuaaagaagagcacaagau

SEQ ID NO: 1604311 - RNA, 19 nt, Homo sapiens
  misc_RNA (1)...(19): siRNA sense strand
gaucaaccacaucuucuac

SEQ ID NO: 1604312 - RNA, 19 nt, Homo sapiens
  misc_RNA (1)...(19): siRNA sense strand
gaaguacaucgaccagaag

SEQ ID NO: 1604313 - RNA, 19 nt, Homo sapiens
  misc_RNA (1)...(19): siRNA sense strand
agccaaacauagccaagaa

SEQ ID NO: 1604314 - RNA, 19 nt, Homo sapiens
  misc_RNA (1)...(19): siRNA sense strand
guuuguacuugcucuccua

SEQ ID NO: 1604315 - RNA, 19 nt, Homo sapiens
  misc_RNA (1)...(19): siRNA sense strand
gaaugaaggaaagggaaga

SEQ ID NO: 1604316 - RNA, 19 nt, Homo sapiens
  misc_RNA (1)...(19): siRNA sense strand
gagcaucacaacgggauug

SEQ ID NO: 1604317 - RNA, 19 nt, Homo sapiens
  misc_RNA (1)...(19): siRNA sense strand
ugacugcacacaacaauac

SEQ ID NO: 1604318 - RNA, 19 nt, Homo sapiens
  misc_RNA (1)...(19): siRNA sense strand
uguacucgauggagacaga

SEQ ID NO: 1604319 - RNA, 19 nt, Homo sapiens
  misc_RNA (1)...(19): siRNA sense strand
cguguaugaguucuucuua

SEQ ID NO: 1604320 - RNA, 19 nt, Homo sapiens
  misc_RNA (1)...(19): siRNA sense strand
gaugacugcacacaacaau

SEQ ID NO: 1604321 - RNA, 19 nt, Homo sapiens
  misc_RNA (1)...(19): siRNA sense strand
ccaaacauagccaagaagu

SEQ ID NO: 1604322 - RNA, 19 nt, Homo sapiens
  misc_RNA (1)...(19): siRNA sense strand
ccuugagucuccugauuuc

SEQ ID NO: 1604323 - RNA, 19 nt, Homo sapiens
  misc_RNA (1)...(19): siRNA sense strand
ccauagccgugauguuguc

SEQ ID NO: 1604324 - RNA, 19 nt, Homo sapiens
  misc_RNA (1)...(19): siRNA sense strand
ggacguguacaccaucaag

SEQ ID NO: 1604325 - RNA, 19 nt, Homo sapiens
  misc_RNA (1)...(19): siRNA sense strand
ggagauucuggacgucauu

SEQ ID NO: 1604326 - RNA, 19 nt, Homo sapiens
  misc_RNA (1)...(19): siRNA sense strand
ggcauacugugugguacaa

SEQ ID NO: 1604327 - RNA, 19 nt, Homo sapiens
  misc_RNA (1)...(19): siRNA sense strand
ucuauuacuggaacaauga

SEQ ID NO: 1604328 - RNA, 19 nt, Homo sapiens
  misc_RNA (1)...(19): siRNA sense strand
aaaugaaucagaagcuguu

SEQ ID NO: 1604329 - RNA, 19 nt, Homo sapiens
  misc_RNA (1)...(19): siRNA sense strand
ugauuuccagccaaacaua

SEQ ID NO: 1604330 - RNA, 19 nt, Homo sapiens
  misc_RNA (1)...(19): siRNA sense strand
gaagcgggcaggacucaac

SEQ ID NO: 1604331 - RNA, 19 nt, Homo sapiens
  misc_RNA (1)...(19): siRNA sense strand
cagcaucaucaauggcuuu

SEQ ID NO: 1604332 - RNA, 19 nt, Homo sapiens
  misc_RNA (1)...(19): siRNA sense strand
gauucuggacgucauugaa

SEQ ID NO: 1604333 - RNA, 19 nt, Homo sapiens
  misc_RNA (1)...(19): siRNA sense strand
ggaggugauguucuugaau

SEQ ID NO: 1604334 - RNA, 19 nt, Homo sapiens
  misc_RNA (1)...(19): siRNA sense strand
ucaaccacaucuucuacag

SEQ ID NO: 1604335 - RNA, 19 nt, Homo sapiens
  misc_RNA (1)...(19): siRNA sense strand
ugaaggaaagggaagagau

SEQ ID NO: 1604336 - RNA, 19 nt, Homo sapiens
  misc_RNA (1)...(19): siRNA sense strand
ccugauaagugacaaugcu

SEQ ID NO: 1604337 - RNA, 19 nt, Homo sapiens
  misc_RNA (1)...(19): siRNA sense strand
ccacaggggcugaguuuga

SEQ ID NO: 1604338 - RNA, 19 nt, Homo sapiens
  misc_RNA (1)...(19): siRNA sense strand
aggaggugauguucuugaa

SEQ ID NO: 1604339 - RNA, 19 nt, Homo sapiens
  misc_RNA (1)...(19): siRNA sense strand
aaagaagagcacaagaugu

SEQ ID NO: 1604340 - RNA, 19 nt, Homo sapiens
  misc_RNA (1)...(19): siRNA sense strand
ggacgcugccaccuucauc

SEQ ID NO: 1604341 - RNA, 19 nt, Homo sapiens
  misc_RNA (1)...(19): siRNA sense strand
cagaagcuguuugaugacu

SEQ ID NO: 1604342 - RNA, 19 nt, Homo sapiens
  misc_RNA (1)...(19): siRNA sense strand
acccauagccgugauguug

SEQ ID NO: 1604343 - RNA, 19 nt, Homo sapiens
  misc_RNA (1)...(19): siRNA sense strand
guggaguacaucacccaua

SEQ ID NO: 1604344 - RNA, 19 nt, Homo sapiens
  misc_RNA (1)...(19): siRNA sense strand
ggagcuguuuauccagaag

SEQ ID NO: 1604345 - RNA, 19 nt, Homo sapiens
  misc_RNA (1)...(19): siRNA sense strand
cuucuuacguuuccuugag

SEQ ID NO: 1604346 - RNA, 19 nt, Homo sapiens
  misc_RNA (1)...(19): siRNA sense strand
caacaauacaaggcagaga

SEQ ID NO: 1604347 - RNA, 19 nt, Homo sapiens
  misc_RNA (1)...(19): siRNA sense strand
cugaggcugucaccauguu

SEQ ID NO: 1604348 - RNA, 19 nt, Homo sapiens
  misc_RNA (1)...(19): siRNA sense strand
caucgcaucuauggcaagu

SEQ ID NO: 1604349 - RNA, 19 nt, Homo sapiens
  misc_RNA (1)...(19): siRNA sense strand
gggacuuccucaagaccau

SEQ ID NO: 1604350 - RNA, 19 nt, Homo sapiens
  misc_RNA (1)...(19): siRNA sense strand
caggacguguacaccauca

SEQ ID NO: 1604351 - RNA, 19 nt, Homo sapiens
  misc_RNA (1)...(19): siRNA sense strand
cauggacugaucuauaaug

SEQ ID NO: 1604352 - RNA, 19 nt, Homo sapiens
  misc_RNA (1)...(19): siRNA sense strand
ccaagagccacuggaacaa

SEQ ID NO: 1604353 - RNA, 19 nt, Homo sapiens
  misc_RNA (1)...(19): siRNA sense strand
acccucagcuggcauacug

SEQ ID NO: 1604354 - RNA, 19 nt, Homo sapiens
  misc_RNA (1)...(19): siRNA sense strand
guguaugaguucuucuuac

SEQ ID NO: 1604355 - RNA, 19 nt, Homo sapiens
  misc_RNA (1)...(19): siRNA sense strand
uguaugaguucuucuuacg

SEQ ID NO: 1604356 - RNA, 19 nt, Homo sapiens
  misc_RNA (1)...(19): siRNA sense strand
acucagugaccucaaauuc

SEQ ID NO: 1604357 - RNA, 19 nt, Homo sapiens
  misc_RNA (1)...(19): siRNA sense strand
ugaguuugacccagaggaa

SEQ ID NO: 1604358 - RNA, 19 nt, Homo sapiens
  misc_RNA (1)...(19): siRNA sense strand
aacaauacaaggcagagaa

SEQ ID NO: 1604359 - RNA, 19 nt, Homo sapiens
  misc_RNA (1)...(19): siRNA sense strand
ucaacgagaugguggagua

SEQ ID NO: 1604360 - RNA, 19 nt, Homo sapiens
  misc_RNA (1)...(19): siRNA sense strand
ugaaugagcuggaggagau

SEQ ID NO: 1604361 - RNA, 19 nt, Homo sapiens
  misc_RNA (1)...(19): siRNA sense strand
gagcgggacuuccucaaga

SEQ ID NO: 1604362 - RNA, 19 nt, Homo sapiens
  misc_RNA (1)...(19): siRNA sense strand
ccaaggaggugauguucuu

SEQ ID NO: 1604363 - RNA, 19 nt, Homo sapiens
  misc_RNA (1)...(19): siRNA sense strand
gaggugauguucuugaaug

SEQ ID NO: 1604364 - RNA, 19 nt, Homo sapiens
  misc_RNA (1)...(19): siRNA sense strand
ucagugaccucaaauucaa

SEQ ID NO: 1604365 - RNA, 19 nt, Homo sapiens
  misc_RNA (1)...(19): siRNA sense strand
guacaucgaccagaaguuu

SEQ ID NO: 1604366 - RNA, 19 nt, Homo sapiens
  misc_RNA (1)...(19): siRNA sense strand
ccagugcuguguccucuuu

SEQ ID NO: 1604367 - RNA, 19 nt, Homo sapiens
  misc_RNA (1)...(19): siRNA sense strand
uccauggacugaucuauaa

SEQ ID NO: 1604368 - RNA, 19 nt, Homo sapiens
  misc_RNA (1)...(19): siRNA sense strand
agaaguacaucgaccagaa

SEQ ID NO: 1604369 - RNA, 19 nt, Homo sapiens
  misc_RNA (1)...(19): siRNA sense strand
gaacaagacaauccaugga

SEQ ID NO: 1604370 - RNA, 19 nt, Homo sapiens
  misc_RNA (1)...(19): siRNA sense strand
gggcaggacucaacgagau

SEQ ID NO: 1604371 - RNA, 19 nt, Homo sapiens
  misc_RNA (1)...(19): siRNA sense strand
ugacugagccgguaauugu

SEQ ID NO: 1604372 - RNA, 19 nt, Homo sapiens
  misc_RNA (1)...(19): siRNA sense strand
ucgcaucuauggcaaguuu

SEQ ID NO: 1604373 - RNA, 19 nt, Homo sapiens
  misc_RNA (1)...(19): siRNA sense strand
uaaaagacaucaagaagga

SEQ ID NO: 1604374 - RNA, 19 nt, Homo sapiens
  misc_RNA (1)...(19): siRNA sense strand
uaaagaagagcacaagaug

SEQ ID NO: 1604375 - RNA, 19 nt, Homo sapiens
  misc_RNA (1)...(19): siRNA sense strand
gaaggaaagggaagagaug

SEQ ID NO: 1604376 - RNA, 19 nt, Homo sapiens
  misc_RNA (1)...(19): siRNA sense strand
gaagaggacuguggagacu

SEQ ID NO: 1604377 - RNA, 19 nt, Homo sapiens
  misc_RNA (1)...(19): siRNA sense strand
ucaugagccugauaaguga

SEQ ID NO: 1604378 - RNA, 19 nt, Homo sapiens
  misc_RNA (1)...(19): siRNA sense strand
gaaguuguuuauggaaaug

SEQ ID NO: 1604379 - RNA, 19 nt, Homo sapiens
  misc_RNA (1)...(19): siRNA sense strand
gacaauccauggacugauc

SEQ ID NO: 1604380 - RNA, 19 nt, Homo sapiens
  misc_RNA (1)...(19): siRNA sense strand
aagaagagcacaagauguu

SEQ ID NO: 1604381 - RNA, 19 nt, Homo sapiens
  misc_RNA (1)...(19): siRNA sense strand
gaggacauccagcuucuga

SEQ ID NO: 1604382 - RNA, 19 nt, Homo sapiens
  misc_RNA (1)...(19): siRNA sense strand
cauacugugugguacaauu

SEQ ID NO: 1604383 - RNA, 19 nt, Homo sapiens
  misc_RNA (1)...(19): siRNA sense strand
uaugaguucuucuuacguu

SEQ ID NO: 1604384 - RNA, 19 nt, Homo sapiens
  misc_RNA (1)...(19): siRNA sense strand
caaacauagccaagaagua

SEQ ID NO: 1604385 - RNA, 19 nt, Homo sapiens
  misc_RNA (1)...(19): siRNA sense strand
gagaaggagagcagucuga

SEQ ID NO: 1604386 - RNA, 19 nt, Homo sapiens
  misc_RNA (1)...(19): siRNA sense strand
guaggcagaucaaccacau

SEQ ID NO: 1604387 - RNA, 19 nt, Homo sapiens
  misc_RNA (1)...(19): siRNA sense strand
ucaagucccugagugucua

SEQ ID NO: 1604388 - RNA, 19 nt, Homo sapiens
  misc_RNA (1)...(19): siRNA sense strand
gggaagagauguggcaaaa

SEQ ID NO: 1604389 - RNA, 19 nt, Homo sapiens
  misc_RNA (1)...(19): siRNA sense strand
ugaaucagaagcuguuuga

SEQ ID NO: 1604390 - RNA, 19 nt, Homo sapiens
  misc_RNA (1)...(19): siRNA sense strand
ggacgucauugaaccuucu

SEQ ID NO: 1604391 - RNA, 19 nt, Homo sapiens
  misc_RNA (1)...(19): siRNA sense strand
aaacauagccaagaaguac

SEQ ID NO: 1604392 - RNA, 19 nt, Homo sapiens
  misc_RNA (1)...(19): siRNA sense strand
ccucauccguguccuacuu

SEQ ID NO: 1604393 - RNA, 19 nt, Homo sapiens
  misc_RNA (1)...(19): siRNA sense strand
agaggacuguggagacuga

SEQ ID NO: 1604394 - RNA, 19 nt, Homo sapiens
  misc_RNA (1)...(19): siRNA sense strand
gcucguguaugaguucuuc

SEQ ID NO: 1604395 - RNA, 19 nt, Homo sapiens
  misc_RNA (1)...(19): siRNA sense strand
ucauugaaccuucugaguu

SEQ ID NO: 1604396 - RNA, 19 nt, Homo sapiens
  misc_RNA (1)...(19): siRNA sense strand
uggaguacaucacccauag

SEQ ID NO: 1604397 - RNA, 19 nt, Homo sapiens
  misc_RNA (1)...(19): siRNA sense strand
gcuguguccucuuugacuu

SEQ ID NO: 1604398 - RNA, 19 nt, Homo sapiens
  misc_RNA (1)...(19): siRNA sense strand
cauguucccugcacucuac

SEQ ID NO: 1604399 - RNA, 19 nt, Homo sapiens
  misc_RNA (1)...(19): siRNA sense strand
guaauugugggacuucuca

SEQ ID NO: 1604400 - RNA, 19 nt, Homo sapiens
  misc_RNA (1)...(19): siRNA sense strand
aagagccacuggaacaaga

SEQ ID NO: 1604401 - RNA, 19 nt, Homo sapiens
  misc_RNA (1)...(19): siRNA sense strand
gcuggcauacuguguggua

SEQ ID NO: 1604402 - RNA, 19 nt, Homo sapiens
  misc_RNA (1)...(19): siRNA sense strand
gcugccaccuucaucgaau

SEQ ID NO: 1604403 - RNA, 19 nt, Homo sapiens
  misc_RNA (1)...(19): siRNA sense strand
uuaaagaagagcacaagau

SEQ ID NO: 1604404 - RNA, 19 nt, Homo sapiens
  misc_RNA (1)...(19): siRNA sense strand
gaucaaccacaucuucuac

SEQ ID NO: 1604405 - RNA, 19 nt, Homo sapiens
  misc_RNA (1)...(19): siRNA sense strand
gaaguacaucgaccagaag

SEQ ID NO: 1604406 - RNA, 19 nt, Homo sapiens
  misc_RNA (1)...(19): siRNA sense strand
agccaaacauagccaagaa

SEQ ID NO: 1604407 - RNA, 19 nt, Homo sapiens
  misc_RNA (1)...(19): siRNA sense strand
guuuguacuugcucuccua

SEQ ID NO: 1604408 - RNA, 19 nt, Homo sapiens
  misc_RNA (1)...(19): siRNA sense strand
gaaugaaggaaagggaaga

SEQ ID NO: 1604409 - RNA, 19 nt, Homo sapiens
  misc_RNA (1)...(19): siRNA sense strand
gagcaucacaacgggauug

SEQ ID NO: 1604410 - RNA, 19 nt, Homo sapiens
  misc_RNA (1)...(19): siRNA sense strand
ugacugcacacaacaauac

SEQ ID NO: 1604411 - RNA, 19 nt, Homo sapiens
  misc_RNA (1)...(19): siRNA sense strand
uguacucgauggagacaga

SEQ ID NO: 1604412 - RNA, 19 nt, Homo sapiens
  misc_RNA (1)...(19): siRNA sense strand
cguguaugaguucuucuua

SEQ ID NO: 1604413 - RNA, 19 nt, Homo sapiens
  misc_RNA (1)...(19): siRNA sense strand
gaugacugcacacaacaau

SEQ ID NO: 1604414 - RNA, 19 nt, Homo sapiens
  misc_RNA (1)...(19): siRNA sense strand
ccaaacauagccaagaagu

SEQ ID NO: 1604415 - RNA, 19 nt, Homo sapiens
  misc_RNA (1)...(19): siRNA sense strand
ccuugagucuccugauuuc

SEQ ID NO: 1604416 - RNA, 19 nt, Homo sapiens
  misc_RNA (1)...(19): siRNA sense strand
ccauagccgugauguuguc

SEQ ID NO: 1604417 - RNA, 19 nt, Homo sapiens
  misc_RNA (1)...(19): siRNA sense strand
ggacguguacaccaucaag

SEQ ID NO: 1604418 - RNA, 19 nt, Homo sapiens
  misc_RNA (1)...(19): siRNA sense strand
ggagauucuggacgucauu

SEQ ID NO: 1604419 - RNA, 19 nt, Homo sapiens
  misc_RNA (1)...(19): siRNA sense strand
ggcauacugugugguacaa

SEQ ID NO: 1604420 - RNA, 19 nt, Homo sapiens
  misc_RNA (1)...(19): siRNA sense strand
ucuauuacuggaacaauga

SEQ ID NO: 1604421 - RNA, 19 nt, Homo sapiens
  misc_RNA (1)...(19): siRNA sense strand
aaaugaaucagaagcuguu

SEQ ID NO: 1604422 - RNA, 19 nt, Homo sapiens
  misc_RNA (1)...(19): siRNA sense strand
ugauuuccagccaaacaua

SEQ ID NO: 1604423 - RNA, 19 nt, Homo sapiens
  misc_RNA (1)...(19): siRNA sense strand
gaagcgggcaggacucaac

SEQ ID NO: 1604424 - RNA, 19 nt, Homo sapiens
  misc_RNA (1)...(19): siRNA sense strand
cagcaucaucaauggcuuu

SEQ ID NO: 1604425 - RNA, 19 nt, Homo sapiens
  misc_RNA (1)...(19): siRNA sense strand
gauucuggacgucauugaa

SEQ ID NO: 1604426 - RNA, 19 nt, Homo sapiens
  misc_RNA (1)...(19): siRNA sense strand
ggaggugauguucuugaau

SEQ ID NO: 1604427 - RNA, 19 nt, Homo sapiens
  misc_RNA (1)...(19): siRNA sense strand
ucaaccacaucuucuacag

SEQ ID NO: 1604428 - RNA, 19 nt, Homo sapiens
  misc_RNA (1)...(19): siRNA sense strand
ugaaggaaagggaagagau

SEQ ID NO: 1604429 - RNA, 19 nt, Homo sapiens
  misc_RNA (1)...(19): siRNA sense strand
ccugauaagugacaaugcu

SEQ ID NO: 1604430 - RNA, 19 nt, Homo sapiens
  misc_RNA (1)...(19): siRNA sense strand
ccacaggggcugaguuuga

SEQ ID NO: 1604431 - RNA, 19 nt, Homo sapiens
  misc_RNA (1)...(19): siRNA sense strand
aggaggugauguucuugaa

SEQ ID NO: 1604432 - RNA, 19 nt, Homo sapiens
  misc_RNA (1)...(19): siRNA sense strand
aaagaagagcacaagaugu

SEQ ID NO: 1604433 - RNA, 19 nt, Homo sapiens
  misc_RNA (1)...(19): siRNA sense strand
ggacgcugccaccuucauc

SEQ ID NO: 1604434 - RNA, 19 nt, Homo sapiens
  misc_RNA (1)...(19): siRNA sense strand
cagaagcuguuugaugacu

SEQ ID NO: 1604435 - RNA, 19 nt, Homo sapiens
  misc_RNA (1)...(19): siRNA sense strand
acccauagccgugauguug

SEQ ID NO: 1604436 - RNA, 19 nt, Homo sapiens
  misc_RNA (1)...(19): siRNA sense strand
guggaguacaucacccaua

SEQ ID NO: 1604437 - RNA, 19 nt, Homo sapiens
  misc_RNA (1)...(19): siRNA sense strand
ggagcuguuuauccagaag

SEQ ID NO: 1604438 - RNA, 19 nt, Homo sapiens
  misc_RNA (1)...(19): siRNA sense strand
cuucuuacguuuccuugag

SEQ ID NO: 1604439 - RNA, 19 nt, Homo sapiens
  misc_RNA (1)...(19): siRNA sense strand
caacaauacaaggcagaga

SEQ ID NO: 1604440 - RNA, 19 nt, Homo sapiens
  misc_RNA (1)...(19): siRNA sense strand
cugaggcugucaccauguu

SEQ ID NO: 1604441 - RNA, 19 nt, Homo sapiens
  misc_RNA (1)...(19): siRNA sense strand
caucgcaucuauggcaagu

SEQ ID NO: 1604442 - RNA, 19 nt, Homo sapiens
  misc_RNA (1)...(19): siRNA sense strand
gggacuuccucaagaccau

SEQ ID NO: 1604443 - RNA, 19 nt, Homo sapiens
  misc_RNA (1)...(19): siRNA sense strand
caggacguguacaccauca

SEQ ID NO: 1604444 - RNA, 19 nt, Homo sapiens
  misc_RNA (1)...(19): siRNA sense strand
cauggacugaucuauaaug

SEQ ID NO: 1604445 - RNA, 19 nt, Homo sapiens
  misc_RNA (1)...(19): siRNA sense strand
ccaagagccacuggaacaa

SEQ ID NO: 1604446 - RNA, 19 nt, Homo sapiens
  misc_RNA (1)...(19): siRNA sense strand
acccucagcuggcauacug

SEQ ID NO: 1604447 - RNA, 19 nt, Homo sapiens
  misc_RNA (1)...(19): siRNA sense strand
guguaugaguucuucuuac

SEQ ID NO: 1604448 - RNA, 19 nt, Homo sapiens
  misc_RNA (1)...(19): siRNA sense strand
uguaugaguucuucuuacg

SEQ ID NO: 1604449 - RNA, 19 nt, Homo sapiens
  misc_RNA (1)...(19): siRNA sense strand
acucagugaccucaaauuc

SEQ ID NO: 1604450 - RNA, 19 nt, Homo sapiens
  misc_RNA (1)...(19): siRNA sense strand
ugaguuugacccagaggaa

SEQ ID NO: 1604451 - RNA, 19 nt, Homo sapiens
  misc_RNA (1)...(19): siRNA sense strand
aacaauacaaggcagagaa

SEQ ID NO: 1604452 - RNA, 19 nt, Homo sapiens
  misc_RNA (1)...(19): siRNA sense strand
ucaacgagaugguggagua

SEQ ID NO: 1604453 - RNA, 19 nt, Homo sapiens
  misc_RNA (1)...(19): siRNA sense strand
ugaaugagcuggaggagau

SEQ ID NO: 1604454 - RNA, 19 nt, Homo sapiens
  misc_RNA (1)...(19): siRNA sense strand
gagcgggacuuccucaaga

SEQ ID NO: 1604455 - RNA, 19 nt, Homo sapiens
  misc_RNA (1)...(19): siRNA sense strand
ccaaggaggugauguucuu

SEQ ID NO: 1604456 - RNA, 19 nt, Homo sapiens
  misc_RNA (1)...(19): siRNA sense strand
gaggugauguucuugaaug

SEQ ID NO: 1604457 - RNA, 19 nt, Homo sapiens
  misc_RNA (1)...(19): siRNA sense strand
ucagugaccucaaauucaa

SEQ ID NO: 1604458 - RNA, 19 nt, Homo sapiens
  misc_RNA (1)...(19): siRNA sense strand
guacaucgaccagaaguuu

SEQ ID NO: 1604459 - RNA, 19 nt, Homo sapiens
  misc_RNA (1)...(19): siRNA sense strand
ccagugcuguguccucuuu

SEQ ID NO: 1604460 - RNA, 19 nt, Homo sapiens
  misc_RNA (1)...(19): siRNA sense strand
uccauggacugaucuauaa

SEQ ID NO: 1604461 - RNA, 19 nt, Homo sapiens
  misc_RNA (1)...(19): siRNA sense strand
agaaguacaucgaccagaa

SEQ ID NO: 1604462 - RNA, 19 nt, Homo sapiens
  misc_RNA (1)...(19): siRNA sense strand
gaacaagacaauccaugga

SEQ ID NO: 1604463 - RNA, 19 nt, Homo sapiens
  misc_RNA (1)...(19): siRNA sense strand
gggcaggacucaacgagau

SEQ ID NO: 1604464 - RNA, 19 nt, Homo sapiens
  misc_RNA (1)...(19): siRNA sense strand
ugacugagccgguaauugu

SEQ ID NO: 1604465 - RNA, 19 nt, Homo sapiens
  misc_RNA (1)...(19): siRNA sense strand
ucgcaucuauggcaaguuu

SEQ ID NO: 1604466 - RNA, 19 nt, Homo sapiens
  misc_RNA (1)...(19): siRNA sense strand
uaaaagacaucaagaagga

SEQ ID NO: 1604467 - RNA, 19 nt, Homo sapiens
  misc_RNA (1)...(19): siRNA sense strand
uaaagaagagcacaagaug

SEQ ID NO: 1604468 - RNA, 19 nt, Homo sapiens
  misc_RNA (1)...(19): siRNA sense strand
gaaggaaagggaagagaug

SEQ ID NO: 1604469 - RNA, 19 nt, Homo sapiens
  misc_RNA (1)...(19): siRNA sense strand
gaagaggacuguggagacu

SEQ ID NO: 1604470 - RNA, 19 nt, Homo sapiens
  misc_RNA (1)...(19): siRNA sense strand
ucaugagccugauaaguga

SEQ ID NO: 1604471 - RNA, 19 nt, Homo sapiens
  misc_RNA (1)...(19): siRNA sense strand
gaaguuguuuauggaaaug

SEQ ID NO: 1604472 - RNA, 19 nt, Homo sapiens
  misc_RNA (1)...(19): siRNA sense strand
gacaauccauggacugauc

SEQ ID NO: 1604473 - RNA, 19 nt, Homo sapiens
  misc_RNA (1)...(19): siRNA sense strand
aagaagagcacaagauguu

SEQ ID NO: 1604474 - RNA, 19 nt, Homo sapiens
  misc_RNA (1)...(19): siRNA sense strand
gaggacauccagcuucuga

SEQ ID NO: 1604475 - RNA, 19 nt, Homo sapiens
  misc_RNA (1)...(19): siRNA sense strand
cauacugugugguacaauu

SEQ ID NO: 1604476 - RNA, 19 nt, Homo sapiens
  misc_RNA (1)...(19): siRNA sense strand
uaugaguucuucuuacguu

SEQ ID NO: 1604477 - RNA, 19 nt, Homo sapiens
  misc_RNA (1)...(19): siRNA sense strand
caaacauagccaagaagua

SEQ ID NO: 1604478 - RNA, 19 nt, Homo sapiens
  misc_RNA (1)...(19): siRNA sense strand
gagaaggagagcagucuga

SEQ ID NO: 1604479 - RNA, 19 nt, Homo sapiens
  misc_RNA (1)...(19): siRNA sense strand
guaggcagaucaaccacau

SEQ ID NO: 1604480 - RNA, 19 nt, Homo sapiens
  misc_RNA (1)...(19): siRNA sense strand
ucaagucccugagugucua

SEQ ID NO: 1604481 - RNA, 19 nt, Homo sapiens
  misc_RNA (1)...(19): siRNA sense strand
gggaagagauguggcaaaa

SEQ ID NO: 1604482 - RNA, 19 nt, Homo sapiens
  misc_RNA (1)...(19): siRNA sense strand
ugaaucagaagcuguuuga

SEQ ID NO: 1604483 - RNA, 19 nt, Homo sapiens
  misc_RNA (1)...(19): siRNA sense strand
ggacgucauugaaccuucu

SEQ ID NO: 1604484 - RNA, 19 nt, Homo sapiens
  misc_RNA (1)...(19): siRNA sense strand
aaacauagccaagaaguac

SEQ ID NO: 1604485 - RNA, 19 nt, Homo sapiens
  misc_RNA (1)...(19): siRNA sense strand
ccucauccguguccuacuu

SEQ ID NO: 1604486 - RNA, 19 nt, Homo sapiens
  misc_RNA (1)...(19): siRNA sense strand
agaggacuguggagacuga

SEQ ID NO: 1604487 - RNA, 19 nt, Homo sapiens
  misc_RNA (1)...(19): siRNA sense strand
gcucguguaugaguucuuc

SEQ ID NO: 1604488 - RNA, 19 nt, Homo sapiens
  misc_RNA (1)...(19): siRNA sense strand
ucauugaaccuucugaguu

SEQ ID NO: 1604489 - RNA, 19 nt, Homo sapiens
  misc_RNA (1)...(19): siRNA sense strand
uggaguacaucacccauag

SEQ ID NO: 1604490 - RNA, 19 nt, Homo sapiens
  misc_RNA (1)...(19): siRNA sense strand
gcuguguccucuuugacuu

SEQ ID NO: 1604491 - RNA, 19 nt, Homo sapiens
  misc_RNA (1)...(19): siRNA sense strand
cauguucccugcacucuac

SEQ ID NO: 1604492 - RNA, 19 nt, Homo sapiens
  misc_RNA (1)...(19): siRNA sense strand
guaauugugggacuucuca

SEQ ID NO: 1604493 - RNA, 19 nt, Homo sapiens
  misc_RNA (1)...(19): siRNA sense strand
aagagccacuggaacaaga

SEQ ID NO: 1604494 - RNA, 19 nt, Homo sapiens
  misc_RNA (1)...(19): siRNA sense strand
gcuggcauacuguguggua

SEQ ID NO: 1604495 - RNA, 19 nt, Homo sapiens
  misc_RNA (1)...(19): siRNA sense strand
gcugccaccuucaucgaau

SEQ ID NO: 1604496 - RNA, 19 nt, Homo sapiens
  misc_RNA (1)...(19): siRNA sense strand
uuaaagaagagcacaagau

SEQ ID NO: 1604497 - RNA, 19 nt, Homo sapiens
  misc_RNA (1)...(19): siRNA sense strand
gaucaaccacaucuucuac

SEQ ID NO: 1604498 - RNA, 19 nt, Homo sapiens
  misc_RNA (1)...(19): siRNA sense strand
gaaguacaucgaccagaag

SEQ ID NO: 1604499 - RNA, 19 nt, Homo sapiens
  misc_RNA (1)...(19): siRNA sense strand
agccaaacauagccaagaa

SEQ ID NO: 1604500 - RNA, 19 nt, Homo sapiens
  misc_RNA (1)...(19): siRNA sense strand
guuuguacuugcucuccua

SEQ ID NO: 1604501 - RNA, 19 nt, Homo sapiens
  misc_RNA (1)...(19): siRNA sense strand
gaaugaaggaaagggaaga

SEQ ID NO: 1604502 - RNA, 19 nt, Homo sapiens
  misc_RNA (1)...(19): siRNA sense strand
gagcaucacaacgggauug

SEQ ID NO: 1604503 - RNA, 19 nt, Homo sapiens
  misc_RNA (1)...(19): siRNA sense strand
ugacugcacacaacaauac

SEQ ID NO: 1604504 - RNA, 19 nt, Homo sapiens
  misc_RNA (1)...(19): siRNA sense strand
uguacucgauggagacaga

SEQ ID NO: 1604505 - RNA, 19 nt, Homo sapiens
  misc_RNA (1)...(19): siRNA sense strand
cguguaugaguucuucuua

SEQ ID NO: 1604506 - RNA, 19 nt, Homo sapiens
  misc_RNA (1)...(19): siRNA sense strand
gaugacugcacacaacaau

SEQ ID NO: 1604507 - RNA, 19 nt, Homo sapiens
  misc_RNA (1)...(19): siRNA sense strand
ccaaacauagccaagaagu

SEQ ID NO: 1604508 - RNA, 19 nt, Homo sapiens
  misc_RNA (1)...(19): siRNA sense strand
ccuugagucuccugauuuc

SEQ ID NO: 1604509 - RNA, 19 nt, Homo sapiens
  misc_RNA (1)...(19): siRNA sense strand
ccauagccgugauguuguc

SEQ ID NO: 1604510 - RNA, 19 nt, Homo sapiens
  misc_RNA (1)...(19): siRNA sense strand
ggacguguacaccaucaag

SEQ ID NO: 1604511 - RNA, 19 nt, Homo sapiens
  misc_RNA (1)...(19): siRNA sense strand
ggagauucuggacgucauu

SEQ ID NO: 1604512 - RNA, 19 nt, Homo sapiens
  misc_RNA (1)...(19): siRNA sense strand
ggcauacugugugguacaa

SEQ ID NO: 1604513 - RNA, 19 nt, Homo sapiens
  misc_RNA (1)...(19): siRNA sense strand
ucuauuacuggaacaauga

SEQ ID NO: 1604514 - RNA, 19 nt, Homo sapiens
  misc_RNA (1)...(19): siRNA sense strand
aaaugaaucagaagcuguu

SEQ ID NO: 1604515 - RNA, 19 nt, Homo sapiens
  misc_RNA (1)...(19): siRNA sense strand
ugauuuccagccaaacaua

SEQ ID NO: 1604516 - RNA, 19 nt, Homo sapiens
  misc_RNA (1)...(19): siRNA sense strand
gaagcgggcaggacucaac

SEQ ID NO: 1604517 - RNA, 19 nt, Homo sapiens
  misc_RNA (1)...(19): siRNA sense strand
cagcaucaucaauggcuuu

SEQ ID NO: 1604518 - RNA, 19 nt, Homo sapiens
  misc_RNA (1)...(19): siRNA sense strand
gauucuggacgucauugaa

SEQ ID NO: 1604519 - RNA, 19 nt, Homo sapiens
  misc_RNA (1)...(19): siRNA sense strand
ggaggugauguucuugaau

SEQ ID NO: 1604520 - RNA, 19 nt, Homo sapiens
  misc_RNA (1)...(19): siRNA sense strand
ucaaccacaucuucuacag

SEQ ID NO: 1604521 - RNA, 19 nt, Homo sapiens
  misc_RNA (1)...(19): siRNA sense strand
ugaaggaaagggaagagau

SEQ ID NO: 1604522 - RNA, 19 nt, Homo sapiens
  misc_RNA (1)...(19): siRNA sense strand
ccugauaagugacaaugcu

SEQ ID NO: 1604523 - RNA, 19 nt, Homo sapiens
  misc_RNA (1)...(19): siRNA sense strand
ccacaggggcugaguuuga

SEQ ID NO: 1604524 - RNA, 19 nt, Homo sapiens
  misc_RNA (1)...(19): siRNA sense strand
aggaggugauguucuugaa

SEQ ID NO: 1604525 - RNA, 19 nt, Homo sapiens
  misc_RNA (1)...(19): siRNA sense strand
aaagaagagcacaagaugu

SEQ ID NO: 1604526 - RNA, 19 nt, Homo sapiens
  misc_RNA (1)...(19): siRNA sense strand
ggacgcugccaccuucauc

SEQ ID NO: 1604527 - RNA, 19 nt, Homo sapiens
  misc_RNA (1)...(19): siRNA sense strand
cagaagcuguuugaugacu

SEQ ID NO: 1604528 - RNA, 19 nt, Homo sapiens
  misc_RNA (1)...(19): siRNA sense strand
acccauagccgugauguug

SEQ ID NO: 1604529 - RNA, 19 nt, Homo sapiens
  misc_RNA (1)...(19): siRNA sense strand
guggaguacaucacccaua

SEQ ID NO: 1604530 - RNA, 19 nt, Homo sapiens
  misc_RNA (1)...(19): siRNA sense strand
ggagcuguuuauccagaag

SEQ ID NO: 1604531 - RNA, 19 nt, Homo sapiens
  misc_RNA (1)...(19): siRNA sense strand
cuucuuacguuuccuugag

SEQ ID NO: 1604532 - RNA, 19 nt, Homo sapiens
  misc_RNA (1)...(19): siRNA sense strand
caacaauacaaggcagaga

SEQ ID NO: 1604533 - RNA, 19 nt, Homo sapiens
  misc_RNA (1)...(19): siRNA sense strand
cugaggcugucaccauguu

SEQ ID NO: 1604534 - RNA, 19 nt, Homo sapiens
  misc_RNA (1)...(19): siRNA sense strand
caucgcaucuauggcaagu

SEQ ID NO: 1604535 - RNA, 19 nt, Homo sapiens
  misc_RNA (1)...(19): siRNA sense strand
gggacuuccucaagaccau

SEQ ID NO: 1604536 - RNA, 19 nt, Homo sapiens
  misc_RNA (1)...(19): siRNA sense strand
caggacguguacaccauca

SEQ ID NO: 1604537 - RNA, 19 nt, Homo sapiens
  misc_RNA (1)...(19): siRNA sense strand
cauggacugaucuauaaug

SEQ ID NO: 1604538 - RNA, 19 nt, Homo sapiens
  misc_RNA (1)...(19): siRNA sense strand
ccaagagccacuggaacaa

SEQ ID NO: 1604539 - RNA, 19 nt, Homo sapiens
  misc_RNA (1)...(19): siRNA sense strand
acccucagcuggcauacug

SEQ ID NO: 1604540 - RNA, 19 nt, Homo sapiens
  misc_RNA (1)...(19): siRNA sense strand
guguaugaguucuucuuac

SEQ ID NO: 1604541 - RNA, 19 nt, Homo sapiens
  misc_RNA (1)...(19): siRNA sense strand
uguaugaguucuucuuacg

SEQ ID NO: 1604542 - RNA, 19 nt, Homo sapiens
  misc_RNA (1)...(19): siRNA sense strand
acucagugaccucaaauuc

SEQ ID NO: 1604543 - RNA, 19 nt, Homo sapiens
  misc_RNA (1)...(19): siRNA sense strand
ugaguuugacccagaggaa

SEQ ID NO: 1604544 - RNA, 19 nt, Homo sapiens
  misc_RNA (1)...(19): siRNA sense strand
aacaauacaaggcagagaa

SEQ ID NO: 1604545 - RNA, 19 nt, Homo sapiens
  misc_RNA (1)...(19): siRNA sense strand
ucaacgagaugguggagua

SEQ ID NO: 1604546 - RNA, 19 nt, Homo sapiens
  misc_RNA (1)...(19): siRNA sense strand
ugaaugagcuggaggagau

SEQ ID NO: 1604547 - RNA, 19 nt, Homo sapiens
  misc_RNA (1)...(19): siRNA sense strand
gagcgggacuuccucaaga

SEQ ID NO: 1604548 - RNA, 19 nt, Homo sapiens
  misc_RNA (1)...(19): siRNA sense strand
ccaaggaggugauguucuu

SEQ ID NO: 1604549 - RNA, 19 nt, Homo sapiens
  misc_RNA (1)...(19): siRNA sense strand
gaggugauguucuugaaug

SEQ ID NO: 1604550 - RNA, 19 nt, Homo sapiens
  misc_RNA (1)...(19): siRNA sense strand
ucagugaccucaaauucaa

SEQ ID NO: 1604551 - RNA, 19 nt, Homo sapiens
  misc_RNA (1)...(19): siRNA sense strand
guacaucgaccagaaguuu

SEQ ID NO: 1604552 - RNA, 19 nt, Homo sapiens
  misc_RNA (1)...(19): siRNA sense strand
ccagugcuguguccucuuu

SEQ ID NO: 1604553 - RNA, 19 nt, Homo sapiens
  misc_RNA (1)...(19): siRNA sense strand
uccauggacugaucuauaa

SEQ ID NO: 1604554 - RNA, 19 nt, Homo sapiens
  misc_RNA (1)...(19): siRNA sense strand
agaaguacaucgaccagaa

SEQ ID NO: 1604555 - RNA, 19 nt, Homo sapiens
  misc_RNA (1)...(19): siRNA sense strand
gaacaagacaauccaugga

SEQ ID NO: 1604556 - RNA, 19 nt, Homo sapiens
  misc_RNA (1)...(19): siRNA sense strand
gggcaggacucaacgagau

SEQ ID NO: 1604557 - RNA, 19 nt, Homo sapiens
  misc_RNA (1)...(19): siRNA sense strand
ugacugagccgguaauugu

SEQ ID NO: 1604558 - RNA, 19 nt, Homo sapiens
  misc_RNA (1)...(19): siRNA sense strand
ucgcaucuauggcaaguuu

SEQ ID NO: 1604559 - RNA, 19 nt, Homo sapiens
  misc_RNA (1)...(19): siRNA sense strand
uaaaagacaucaagaagga

SEQ ID NO: 1604560 - RNA, 19 nt, Homo sapiens
  misc_RNA (1)...(19): siRNA sense strand
uaaagaagagcacaagaug

SEQ ID NO: 1604561 - RNA, 19 nt, Homo sapiens
  misc_RNA (1)...(19): siRNA sense strand
gaaggaaagggaagagaug

SEQ ID NO: 1604562 - RNA, 19 nt, Homo sapiens
  misc_RNA (1)...(19): siRNA sense strand
gaagaggacuguggagacu

SEQ ID NO: 1604563 - RNA, 19 nt, Homo sapiens
  misc_RNA (1)...(19): siRNA sense strand
ucaugagccugauaaguga

SEQ ID NO: 1604564 - RNA, 19 nt, Homo sapiens
  misc_RNA (1)...(19): siRNA sense strand
gaaguuguuuauggaaaug

SEQ ID NO: 1604565 - RNA, 19 nt, Homo sapiens
  misc_RNA (1)...(19): siRNA sense strand
gacaauccauggacugauc

SEQ ID NO: 1604566 - RNA, 19 nt, Homo sapiens
  misc_RNA (1)...(19): siRNA sense strand
aagaagagcacaagauguu

SEQ ID NO: 1604567 - RNA, 19 nt, Homo sapiens
  misc_RNA (1)...(19): siRNA sense strand
gaggacauccagcuucuga

SEQ ID NO: 1604568 - RNA, 19 nt, Homo sapiens
  misc_RNA (1)...(19): siRNA sense strand
cauacugugugguacaauu

SEQ ID NO: 1604569 - RNA, 19 nt, Homo sapiens
  misc_RNA (1)...(19): siRNA sense strand
uaugaguucuucuuacguu

SEQ ID NO: 1604570 - RNA, 19 nt, Homo sapiens
  misc_RNA (1)...(19): siRNA sense strand
caaacauagccaagaagua

SEQ ID NO: 1604571 - RNA, 19 nt, Homo sapiens
  misc_RNA (1)...(19): siRNA sense strand
gagaaggagagcagucuga

SEQ ID NO: 1604572 - RNA, 19 nt, Homo sapiens
  misc_RNA (1)...(19): siRNA sense strand
guaggcagaucaaccacau

SEQ ID NO: 1604573 - RNA, 19 nt, Homo sapiens
  misc_RNA (1)...(19): siRNA sense strand
ucaagucccugagugucua

SEQ ID NO: 1604574 - RNA, 19 nt, Homo sapiens
  misc_RNA (1)...(19): siRNA sense strand
gggaagagauguggcaaaa

SEQ ID NO: 1604575 - RNA, 19 nt, Homo sapiens
  misc_RNA (1)...(19): siRNA sense strand
ugaaucagaagcuguuuga

SEQ ID NO: 1604576 - RNA, 19 nt, Homo sapiens
  misc_RNA (1)...(19): siRNA sense strand
ggacgucauugaaccuucu

SEQ ID NO: 1604577 - RNA, 19 nt, Homo sapiens
  misc_RNA (1)...(19): siRNA sense strand
aaacauagccaagaaguac

SEQ ID NO: 1604578 - RNA, 19 nt, Homo sapiens
  misc_RNA (1)...(19): siRNA sense strand
ccucauccguguccuacuu

SEQ ID NO: 1604579 - RNA, 19 nt, Homo sapiens
  misc_RNA (1)...(19): siRNA sense strand
agaggacuguggagacuga

SEQ ID NO: 1604580 - RNA, 19 nt, Homo sapiens
  misc_RNA (1)...(19): siRNA sense strand
gcucguguaugaguucuuc

SEQ ID NO: 1604581 - RNA, 19 nt, Homo sapiens
  misc_RNA (1)...(19): siRNA sense strand
ucauugaaccuucugaguu

SEQ ID NO: 1604582 - RNA, 19 nt, Homo sapiens
  misc_RNA (1)...(19): siRNA sense strand
uggaguacaucacccauag

SEQ ID NO: 1604583 - RNA, 19 nt, Homo sapiens
  misc_RNA (1)...(19): siRNA sense strand
gcuguguccucuuugacuu

SEQ ID NO: 1604584 - RNA, 19 nt, Homo sapiens
  misc_RNA (1)...(19): siRNA sense strand
cauguucccugcacucuac

SEQ ID NO: 1604585 - RNA, 19 nt, Homo sapiens
  misc_RNA (1)...(19): siRNA sense strand
guaauugugggacuucuca

SEQ ID NO: 1604586 - RNA, 19 nt, Homo sapiens
  misc_RNA (1)...(19): siRNA sense strand
aagagccacuggaacaaga

SEQ ID NO: 1604587 - RNA, 19 nt, Homo sapiens
  misc_RNA (1)...(19): siRNA sense strand
gcuggcauacuguguggua

SEQ ID NO: 1604588 - RNA, 19 nt, Homo sapiens
  misc_RNA (1)...(19): siRNA sense strand
gcugccaccuucaucgaau

SEQ ID NO: 1604589 - RNA, 19 nt, Homo sapiens
  misc_RNA (1)...(19): siRNA sense strand
uuaaagaagagcacaagau

SEQ ID NO: 1604590 - RNA, 19 nt, Homo sapiens
  misc_RNA (1)...(19): siRNA sense strand
gaucaaccacaucuucuac

SEQ ID NO: 1604591 - RNA, 19 nt, Homo sapiens
  misc_RNA (1)...(19): siRNA sense strand
gaaguacaucgaccagaag

SEQ ID NO: 1604592 - RNA, 19 nt, Homo sapiens
  misc_RNA (1)...(19): siRNA sense strand
agccaaacauagccaagaa

SEQ ID NO: 1604593 - RNA, 19 nt, Homo sapiens
  misc_RNA (1)...(19): siRNA sense strand
guuuguacuugcucuccua

SEQ ID NO: 1604594 - RNA, 19 nt, Homo sapiens
  misc_RNA (1)...(19): siRNA sense strand
gaaugaaggaaagggaaga

SEQ ID NO: 1604595 - RNA, 19 nt, Homo sapiens
  misc_RNA (1)...(19): siRNA sense strand
gagcaucacaacgggauug

SEQ ID NO: 1604596 - RNA, 19 nt, Homo sapiens
  misc_RNA (1)...(19): siRNA sense strand
ugacugcacacaacaauac

SEQ ID NO: 1604597 - RNA, 19 nt, Homo sapiens
  misc_RNA (1)...(19): siRNA sense strand
uguacucgauggagacaga

SEQ ID NO: 1604598 - RNA, 19 nt, Homo sapiens
  misc_RNA (1)...(19): siRNA sense strand
cguguaugaguucuucuua

SEQ ID NO: 1604599 - RNA, 19 nt, Homo sapiens
  misc_RNA (1)...(19): siRNA sense strand
gaugacugcacacaacaau

SEQ ID NO: 1604600 - RNA, 19 nt, Homo sapiens
  misc_RNA (1)...(19): siRNA sense strand
ccaaacauagccaagaagu

SEQ ID NO: 1604601 - RNA, 19 nt, Homo sapiens
  misc_RNA (1)...(19): siRNA sense strand
ccuugagucuccugauuuc

SEQ ID NO: 1604602 - RNA, 19 nt, Homo sapiens
  misc_RNA (1)...(19): siRNA sense strand
ccauagccgugauguuguc

SEQ ID NO: 1604603 - RNA, 19 nt, Homo sapiens
  misc_RNA (1)...(19): siRNA sense strand
ggacguguacaccaucaag

SEQ ID NO: 1604604 - RNA, 19 nt, Homo sapiens
  misc_RNA (1)...(19): siRNA sense strand
ggagauucuggacgucauu

SEQ ID NO: 1604605 - RNA, 19 nt, Homo sapiens
  misc_RNA (1)...(19): siRNA sense strand
ggcauacugugugguacaa

SEQ ID NO: 1604606 - RNA, 19 nt, Homo sapiens
  misc_RNA (1)...(19): siRNA sense strand
ucuauuacuggaacaauga

SEQ ID NO: 1604607 - RNA, 19 nt, Homo sapiens
  misc_RNA (1)...(19): siRNA sense strand
aaaugaaucagaagcuguu

SEQ ID NO: 1604608 - RNA, 19 nt, Homo sapiens
  misc_RNA (1)...(19): siRNA sense strand
ugauuuccagccaaacaua

SEQ ID NO: 1604609 - RNA, 19 nt, Homo sapiens
  misc_RNA (1)...(19): siRNA sense strand
gaagcgggcaggacucaac

SEQ ID NO: 1604610 - RNA, 19 nt, Homo sapiens
  misc_RNA (1)...(19): siRNA sense strand
cagcaucaucaauggcuuu

SEQ ID NO: 1604611 - RNA, 19 nt, Homo sapiens
  misc_RNA (1)...(19): siRNA sense strand
gauucuggacgucauugaa

SEQ ID NO: 1604612 - RNA, 19 nt, Homo sapiens
  misc_RNA (1)...(19): siRNA sense strand
ggaggugauguucuugaau

SEQ ID NO: 1604613 - RNA, 19 nt, Homo sapiens
  misc_RNA (1)...(19): siRNA sense strand
ucaaccacaucuucuacag

SEQ ID NO: 1604614 - RNA, 19 nt, Homo sapiens
  misc_RNA (1)...(19): siRNA sense strand
ugaaggaaagggaagagau

SEQ ID NO: 1604615 - RNA, 19 nt, Homo sapiens
  misc_RNA (1)...(19): siRNA sense strand
ccugauaagugacaaugcu

SEQ ID NO: 1604616 - RNA, 19 nt, Homo sapiens
  misc_RNA (1)...(19): siRNA sense strand
ccacaggggcugaguuuga

SEQ ID NO: 1604617 - RNA, 19 nt, Homo sapiens
  misc_RNA (1)...(19): siRNA sense strand
aggaggugauguucuugaa

SEQ ID NO: 1604618 - RNA, 19 nt, Homo sapiens
  misc_RNA (1)...(19): siRNA sense strand
aaagaagagcacaagaugu

SEQ ID NO: 1604619 - RNA, 19 nt, Homo sapiens
  misc_RNA (1)...(19): siRNA sense strand
ggacgcugccaccuucauc

SEQ ID NO: 1604620 - RNA, 19 nt, Homo sapiens
  misc_RNA (1)...(19): siRNA sense strand
cagaagcuguuugaugacu

SEQ ID NO: 1604621 - RNA, 19 nt, Homo sapiens
  misc_RNA (1)...(19): siRNA sense strand
acccauagccgugauguug

SEQ ID NO: 1604622 - RNA, 19 nt, Homo sapiens
  misc_RNA (1)...(19): siRNA sense strand
guggaguacaucacccaua

SEQ ID NO: 1604623 - RNA, 19 nt, Homo sapiens
  misc_RNA (1)...(19): siRNA sense strand
ggagcuguuuauccagaag

SEQ ID NO: 1604624 - RNA, 19 nt, Homo sapiens
  misc_RNA (1)...(19): siRNA sense strand
cuucuuacguuuccuugag

SEQ ID NO: 1604625 - RNA, 19 nt, Homo sapiens
  misc_RNA (1)...(19): siRNA sense strand
caacaauacaaggcagaga

SEQ ID NO: 1604626 - RNA, 19 nt, Homo sapiens
  misc_RNA (1)...(19): siRNA sense strand
cugaggcugucaccauguu

SEQ ID NO: 1604627 - RNA, 19 nt, Homo sapiens
  misc_RNA (1)...(19): siRNA sense strand
caucgcaucuauggcaagu

SEQ ID NO: 1604628 - RNA, 19 nt, Homo sapiens
  misc_RNA (1)...(19): siRNA sense strand
gggacuuccucaagaccau

SEQ ID NO: 1604629 - RNA, 19 nt, Homo sapiens
  misc_RNA (1)...(19): siRNA sense strand
caggacguguacaccauca

SEQ ID NO: 1604630 - RNA, 19 nt, Homo sapiens
  misc_RNA (1)...(19): siRNA sense strand
cauggacugaucuauaaug

SEQ ID NO: 1604631 - RNA, 19 nt, Homo sapiens
  misc_RNA (1)...(19): siRNA sense strand
ccaagagccacuggaacaa

SEQ ID NO: 1604632 - RNA, 19 nt, Homo sapiens
  misc_RNA (1)...(19): siRNA sense strand
acccucagcuggcauacug

SEQ ID NO: 1604633 - RNA, 19 nt, Homo sapiens
  misc_RNA (1)...(19): siRNA sense strand
guguaugaguucuucuuac

SEQ ID NO: 1604634 - RNA, 19 nt, Homo sapiens
  misc_RNA (1)...(19): siRNA sense strand
uguaugaguucuucuuacg

SEQ ID NO: 1604635 - RNA, 19 nt, Homo sapiens
  misc_RNA (1)...(19): siRNA sense strand
acucagugaccucaaauuc

SEQ ID NO: 1604636 - RNA, 19 nt, Homo sapiens
  misc_RNA (1)...(19): siRNA sense strand
ugaguuugacccagaggaa

SEQ ID NO: 1604637 - RNA, 19 nt, Homo sapiens
  misc_RNA (1)...(19): siRNA sense strand
aacaauacaaggcagagaa

SEQ ID NO: 1604638 - RNA, 19 nt, Homo sapiens
  misc_RNA (1)...(19): siRNA sense strand
ucaacgagaugguggagua

SEQ ID NO: 1604639 - RNA, 19 nt, Homo sapiens
  misc_RNA (1)...(19): siRNA sense strand
ugaaugagcuggaggagau

SEQ ID NO: 1604640 - RNA, 19 nt, Homo sapiens
  misc_RNA (1)...(19): siRNA sense strand
gagcgggacuuccucaaga

SEQ ID NO: 1604641 - RNA, 19 nt, Homo sapiens
  misc_RNA (1)...(19): siRNA sense strand
ccaaggaggugauguucuu

SEQ ID NO: 1604642 - RNA, 19 nt, Homo sapiens
  misc_RNA (1)...(19): siRNA sense strand
gaggugauguucuugaaug

SEQ ID NO: 1604643 - RNA, 19 nt, Homo sapiens
  misc_RNA (1)...(19): siRNA sense strand
ucagugaccucaaauucaa

SEQ ID NO: 1604644 - RNA, 19 nt, Homo sapiens
  misc_RNA (1)...(19): siRNA sense strand
guacaucgaccagaaguuu

SEQ ID NO: 1604645 - RNA, 19 nt, Homo sapiens
  misc_RNA (1)...(19): siRNA sense strand
ccagugcuguguccucuuu

SEQ ID NO: 1604646 - RNA, 19 nt, Homo sapiens
  misc_RNA (1)...(19): siRNA sense strand
uccauggacugaucuauaa

SEQ ID NO: 1604647 - RNA, 19 nt, Homo sapiens
  misc_RNA (1)...(19): siRNA sense strand
agaaguacaucgaccagaa

SEQ ID NO: 1604648 - RNA, 19 nt, Homo sapiens
  misc_RNA (1)...(19): siRNA sense strand
gaacaagacaauccaugga

SEQ ID NO: 1604649 - RNA, 19 nt, Homo sapiens
  misc_RNA (1)...(19): siRNA sense strand
gggcaggacucaacgagau

SEQ ID NO: 1604650 - RNA, 19 nt, Homo sapiens
  misc_RNA (1)...(19): siRNA sense strand
ugacugagccgguaauugu

SEQ ID NO: 1604651 - RNA, 19 nt, Homo sapiens
  misc_RNA (1)...(19): siRNA sense strand
ucgcaucuauggcaaguuu

SEQ ID NO: 1604652 - RNA, 19 nt, Homo sapiens
  misc_RNA (1)...(19): siRNA sense strand
uaaaagacaucaagaagga

SEQ ID NO: 1604653 - RNA, 19 nt, Homo sapiens
  misc_RNA (1)...(19): siRNA sense strand
uaaagaagagcacaagaug

SEQ ID NO: 1604654 - RNA, 19 nt, Homo sapiens
  misc_RNA (1)...(19): siRNA sense strand
gaaggaaagggaagagaug

SEQ ID NO: 1604655 - RNA, 19 nt, Homo sapiens
  misc_RNA (1)...(19): siRNA sense strand
gaagaggacuguggagacu

SEQ ID NO: 1604656 - RNA, 19 nt, Homo sapiens
  misc_RNA (1)...(19): siRNA sense strand
ucaugagccugauaaguga

SEQ ID NO: 1604657 - RNA, 19 nt, Homo sapiens
  misc_RNA (1)...(19): siRNA sense strand
gaaguuguuuauggaaaug

SEQ ID NO: 1604658 - RNA, 19 nt, Homo sapiens
  misc_RNA (1)...(19): siRNA sense strand
gacaauccauggacugauc

SEQ ID NO: 1604659 - RNA, 19 nt, Homo sapiens
  misc_RNA (1)...(19): siRNA sense strand
aagaagagcacaagauguu

SEQ ID NO: 1604660 - RNA, 19 nt, Homo sapiens
  misc_RNA (1)...(19): siRNA sense strand
gaggacauccagcuucuga

SEQ ID NO: 1604661 - RNA, 19 nt, Homo sapiens
  misc_RNA (1)...(19): siRNA sense strand
cauacugugugguacaauu

SEQ ID NO: 1604662 - RNA, 19 nt, Homo sapiens
  misc_RNA (1)...(19): siRNA sense strand
uaugaguucuucuuacguu

SEQ ID NO: 1604663 - RNA, 19 nt, Homo sapiens
  misc_RNA (1)...(19): siRNA sense strand
caaacauagccaagaagua

SEQ ID NO: 1604664 - RNA, 19 nt, Homo sapiens
  misc_RNA (1)...(19): siRNA sense strand
gagaaggagagcagucuga

SEQ ID NO: 1604665 - RNA, 19 nt, Homo sapiens
  misc_RNA (1)...(19): siRNA sense strand
guaggcagaucaaccacau

SEQ ID NO: 1604666 - RNA, 19 nt, Homo sapiens
  misc_RNA (1)...(19): siRNA sense strand
ucaagucccugagugucua

SEQ ID NO: 1604667 - RNA, 19 nt, Homo sapiens
  misc_RNA (1)...(19): siRNA sense strand
gggaagagauguggcaaaa

SEQ ID NO: 1604668 - RNA, 19 nt, Homo sapiens
  misc_RNA (1)...(19): siRNA sense strand
ugaaucagaagcuguuuga

SEQ ID NO: 1604669 - RNA, 19 nt, Homo sapiens
  misc_RNA (1)...(19): siRNA sense strand
ggacgucauugaaccuucu

SEQ ID NO: 1604670 - RNA, 19 nt, Homo sapiens
  misc_RNA (1)...(19): siRNA sense strand
aaacauagccaagaaguac

SEQ ID NO: 1604671 - RNA, 19 nt, Homo sapiens
  misc_RNA (1)...(19): siRNA sense strand
ccucauccguguccuacuu

SEQ ID NO: 1604672 - RNA, 19 nt, Homo sapiens
  misc_RNA (1)...(19): siRNA sense strand
agaggacuguggagacuga

SEQ ID NO: 1604673 - RNA, 19 nt, Homo sapiens
  misc_RNA (1)...(19): siRNA sense strand
gcucguguaugaguucuuc

SEQ ID NO: 1604674 - RNA, 19 nt, Homo sapiens
  misc_RNA (1)...(19): siRNA sense strand
ucauugaaccuucugaguu

SEQ ID NO: 1604675 - RNA, 19 nt, Homo sapiens
  misc_RNA (1)...(19): siRNA sense strand
uggaguacaucacccauag

SEQ ID NO: 1604676 - RNA, 19 nt, Homo sapiens
  misc_RNA (1)...(19): siRNA sense strand
gcuguguccucuuugacuu

SEQ ID NO: 1604677 - RNA, 19 nt, Homo sapiens
  misc_RNA (1)...(19): siRNA sense strand
cauguucccugcacucuac

SEQ ID NO: 1604678 - RNA, 19 nt, Homo sapiens
  misc_RNA (1)...(19): siRNA sense strand
guaauugugggacuucuca

SEQ ID NO: 1604679 - RNA, 19 nt, Homo sapiens
  misc_RNA (1)...(19): siRNA sense strand
aagagccacuggaacaaga

SEQ ID NO: 1604680 - RNA, 19 nt, Homo sapiens
  misc_RNA (1)...(19): siRNA sense strand
gcuggcauacuguguggua

SEQ ID NO: 1604681 - RNA, 19 nt, Homo sapiens
  misc_RNA (1)...(19): siRNA sense strand
gcugccaccuucaucgaau

SEQ ID NO: 1604682 - RNA, 19 nt, Homo sapiens
  misc_RNA (1)...(19): siRNA sense strand
uuaaagaagagcacaagau

SEQ ID NO: 1604683 - RNA, 19 nt, Homo sapiens
  misc_RNA (1)...(19): siRNA sense strand
gaucaaccacaucuucuac

SEQ ID NO: 1604684 - RNA, 19 nt, Homo sapiens
  misc_RNA (1)...(19): siRNA sense strand
gaaguacaucgaccagaag

SEQ ID NO: 1604685 - RNA, 19 nt, Homo sapiens
  misc_RNA (1)...(19): siRNA sense strand
agccaaacauagccaagaa

SEQ ID NO: 1604686 - RNA, 19 nt, Homo sapiens
  misc_RNA (1)...(19): siRNA sense strand
guuuguacuugcucuccua

SEQ ID NO: 1604687 - RNA, 19 nt, Homo sapiens
  misc_RNA (1)...(19): siRNA sense strand
gaaugaaggaaagggaaga

SEQ ID NO: 1604688 - RNA, 19 nt, Homo sapiens
  misc_RNA (1)...(19): siRNA sense strand
gagcaucacaacgggauug

SEQ ID NO: 1604689 - RNA, 19 nt, Homo sapiens
  misc_RNA (1)...(19): siRNA sense strand
ugacugcacacaacaauac

SEQ ID NO: 1604690 - RNA, 19 nt, Homo sapiens
  misc_RNA (1)...(19): siRNA sense strand
uguacucgauggagacaga

SEQ ID NO: 1604691 - RNA, 19 nt, Homo sapiens
  misc_RNA (1)...(19): siRNA sense strand
cguguaugaguucuucuua

SEQ ID NO: 1604692 - RNA, 19 nt, Homo sapiens
  misc_RNA (1)...(19): siRNA sense strand
gaugacugcacacaacaau

SEQ ID NO: 1604693 - RNA, 19 nt, Homo sapiens
  misc_RNA (1)...(19): siRNA sense strand
ccaaacauagccaagaagu

SEQ ID NO: 1604694 - RNA, 19 nt, Homo sapiens
  misc_RNA (1)...(19): siRNA sense strand
ccuugagucuccugauuuc

SEQ ID NO: 1604695 - RNA, 19 nt, Homo sapiens
  misc_RNA (1)...(19): siRNA sense strand
ccauagccgugauguuguc

SEQ ID NO: 1604696 - RNA, 19 nt, Homo sapiens
  misc_RNA (1)...(19): siRNA sense strand
ggacguguacaccaucaag

SEQ ID NO: 1604697 - RNA, 19 nt, Homo sapiens
  misc_RNA (1)...(19): siRNA sense strand
ggagauucuggacgucauu

SEQ ID NO: 1604698 - RNA, 19 nt, Homo sapiens
  misc_RNA (1)...(19): siRNA sense strand
ggcauacugugugguacaa

SEQ ID NO: 1604699 - RNA, 19 nt, Homo sapiens
  misc_RNA (1)...(19): siRNA sense strand
ucuauuacuggaacaauga

SEQ ID NO: 1604700 - RNA, 19 nt, Homo sapiens
  misc_RNA (1)...(19): siRNA sense strand
aaaugaaucagaagcuguu

SEQ ID NO: 1604701 - RNA, 19 nt, Homo sapiens
  misc_RNA (1)...(19): siRNA sense strand
ugauuuccagccaaacaua

SEQ ID NO: 1604702 - RNA, 19 nt, Homo sapiens
  misc_RNA (1)...(19): siRNA sense strand
gaagcgggcaggacucaac

SEQ ID NO: 1604703 - RNA, 19 nt, Homo sapiens
  misc_RNA (1)...(19): siRNA sense strand
cagcaucaucaauggcuuu

SEQ ID NO: 1604704 - RNA, 19 nt, Homo sapiens
  misc_RNA (1)...(19): siRNA sense strand
gauucuggacgucauugaa

SEQ ID NO: 1604705 - RNA, 19 nt, Homo sapiens
  misc_RNA (1)...(19): siRNA sense strand
ggaggugauguucuugaau

SEQ ID NO: 1604706 - RNA, 19 nt, Homo sapiens
  misc_RNA (1)...(19): siRNA sense strand
ucaaccacaucuucuacag

SEQ ID NO: 1604707 - RNA, 19 nt, Homo sapiens
  misc_RNA (1)...(19): siRNA sense strand
ugaaggaaagggaagagau

SEQ ID NO: 1604708 - RNA, 19 nt, Homo sapiens
  misc_RNA (1)...(19): siRNA sense strand
ccugauaagugacaaugcu

SEQ ID NO: 1604709 - RNA, 19 nt, Homo sapiens
  misc_RNA (1)...(19): siRNA sense strand
ccacaggggcugaguuuga

SEQ ID NO: 1604710 - RNA, 19 nt, Homo sapiens
  misc_RNA (1)...(19): siRNA sense strand
aggaggugauguucuugaa

SEQ ID NO: 1604711 - RNA, 19 nt, Homo sapiens
  misc_RNA (1)...(19): siRNA sense strand
aaagaagagcacaagaugu

SEQ ID NO: 1604712 - RNA, 19 nt, Homo sapiens
  misc_RNA (1)...(19): siRNA sense strand
ggacgcugccaccuucauc

SEQ ID NO: 1604713 - RNA, 19 nt, Homo sapiens
  misc_RNA (1)...(19): siRNA sense strand
cagaagcuguuugaugacu

SEQ ID NO: 1604714 - RNA, 19 nt, Homo sapiens
  misc_RNA (1)...(19): siRNA sense strand
acccauagccgugauguug

SEQ ID NO: 1604715 - RNA, 19 nt, Homo sapiens
  misc_RNA (1)...(19): siRNA sense strand
guggaguacaucacccaua

SEQ ID NO: 1604716 - RNA, 19 nt, Homo sapiens
  misc_RNA (1)...(19): siRNA sense strand
ggagcuguuuauccagaag

SEQ ID NO: 1604717 - RNA, 19 nt, Homo sapiens
  misc_RNA (1)...(19): siRNA sense strand
cuucuuacguuuccuugag

SEQ ID NO: 1604718 - RNA, 19 nt, Homo sapiens
  misc_RNA (1)...(19): siRNA sense strand
caacaauacaaggcagaga

SEQ ID NO: 1604719 - RNA, 19 nt, Homo sapiens
  misc_RNA (1)...(19): siRNA sense strand
cugaggcugucaccauguu

SEQ ID NO: 1604720 - RNA, 19 nt, Homo sapiens
  misc_RNA (1)...(19): siRNA sense strand
caucgcaucuauggcaagu

SEQ ID NO: 1604721 - RNA, 19 nt, Homo sapiens
  misc_RNA (1)...(19): siRNA sense strand
gggacuuccucaagaccau

SEQ ID NO: 1604722 - RNA, 19 nt, Homo sapiens
  misc_RNA (1)...(19): siRNA sense strand
caggacguguacaccauca

SEQ ID NO: 1604723 - RNA, 19 nt, Homo sapiens
  misc_RNA (1)...(19): siRNA sense strand
cauggacugaucuauaaug

SEQ ID NO: 1604724 - RNA, 19 nt, Homo sapiens
  misc_RNA (1)...(19): siRNA sense strand
ccaagagccacuggaacaa

SEQ ID NO: 1604725 - RNA, 19 nt, Homo sapiens
  misc_RNA (1)...(19): siRNA sense strand
acccucagcuggcauacug

SEQ ID NO: 1604726 - RNA, 19 nt, Homo sapiens
  misc_RNA (1)...(19): siRNA sense strand
guguaugaguucuucuuac

SEQ ID NO: 1604727 - RNA, 19 nt, Homo sapiens
  misc_RNA (1)...(19): siRNA sense strand
uguaugaguucuucuuacg

SEQ ID NO: 1604728 - RNA, 19 nt, Homo sapiens
  misc_RNA (1)...(19): siRNA sense strand
acucagugaccucaaauuc

SEQ ID NO: 1604729 - RNA, 19 nt, Homo sapiens
  misc_RNA (1)...(19): siRNA sense strand
ugaguuugacccagaggaa

SEQ ID NO: 1604730 - RNA, 19 nt, Homo sapiens
  misc_RNA (1)...(19): siRNA sense strand
aacaauacaaggcagagaa

SEQ ID NO: 1604731 - RNA, 19 nt, Homo sapiens
  misc_RNA (1)...(19): siRNA sense strand
ucaacgagaugguggagua

SEQ ID NO: 1604732 - RNA, 19 nt, Homo sapiens
  misc_RNA (1)...(19): siRNA sense strand
ugaaugagcuggaggagau

SEQ ID NO: 1604733 - RNA, 19 nt, Homo sapiens
  misc_RNA (1)...(19): siRNA sense strand
gagcgggacuuccucaaga

SEQ ID NO: 1604734 - RNA, 19 nt, Homo sapiens
  misc_RNA (1)...(19): siRNA sense strand
ccaaggaggugauguucuu

SEQ ID NO: 1604735 - RNA, 19 nt, Homo sapiens
  misc_RNA (1)...(19): siRNA sense strand
gaggugauguucuugaaug

SEQ ID NO: 1604736 - RNA, 19 nt, Homo sapiens
  misc_RNA (1)...(19): siRNA sense strand
ucagugaccucaaauucaa

SEQ ID NO: 1604737 - RNA, 19 nt, Homo sapiens
  misc_RNA (1)...(19): siRNA sense strand
guacaucgaccagaaguuu

SEQ ID NO: 1604738 - RNA, 19 nt, Homo sapiens
  misc_RNA (1)...(19): siRNA sense strand
ccagugcuguguccucuuu

SEQ ID NO: 1604739 - RNA, 19 nt, Homo sapiens
  misc_RNA (1)...(19): siRNA sense strand
uccauggacugaucuauaa

SEQ ID NO: 1604740 - RNA, 19 nt, Homo sapiens
  misc_RNA (1)...(19): siRNA sense strand
agaaguacaucgaccagaa

SEQ ID NO: 1604741 - RNA, 19 nt, Homo sapiens
  misc_RNA (1)...(19): siRNA sense strand
gaacaagacaauccaugga

SEQ ID NO: 1604742 - RNA, 19 nt, Homo sapiens
  misc_RNA (1)...(19): siRNA sense strand
gggcaggacucaacgagau

SEQ ID NO: 1604743 - RNA, 19 nt, Homo sapiens
  misc_RNA (1)...(19): siRNA sense strand
ugacugagccgguaauugu

SEQ ID NO: 1604744 - RNA, 19 nt, Homo sapiens
  misc_RNA (1)...(19): siRNA sense strand
ucgcaucuauggcaaguuu

SEQ ID NO: 1604745 - RNA, 19 nt, Homo sapiens
  misc_RNA (1)...(19): siRNA sense strand
uaaaagacaucaagaagga

SEQ ID NO: 1604746 - RNA, 19 nt, Homo sapiens
  misc_RNA (1)...(19): siRNA sense strand
uaaagaagagcacaagaug

SEQ ID NO: 1604747 - RNA, 19 nt, Homo sapiens
  misc_RNA (1)...(19): siRNA sense strand
gaaggaaagggaagagaug

SEQ ID NO: 1604748 - RNA, 19 nt, Homo sapiens
  misc_RNA (1)...(19): siRNA sense strand
gaagaggacuguggagacu

SEQ ID NO: 1604749 - RNA, 19 nt, Homo sapiens
  misc_RNA (1)...(19): siRNA sense strand
ucaugagccugauaaguga

SEQ ID NO: 1604750 - RNA, 19 nt, Homo sapiens
  misc_RNA (1)...(19): siRNA sense strand
gaaguuguuuauggaaaug

SEQ ID NO: 1604751 - RNA, 19 nt, Homo sapiens
  misc_RNA (1)...(19): siRNA sense strand
gacaauccauggacugauc

SEQ ID NO: 1604752 - RNA, 19 nt, Homo sapiens
  misc_RNA (1)...(19): siRNA sense strand
aagaagagcacaagauguu

SEQ ID NO: 1604753 - RNA, 19 nt, Homo sapiens
  misc_RNA (1)...(19): siRNA sense strand
gaggacauccagcuucuga

SEQ ID NO: 1604754 - RNA, 19 nt, Homo sapiens
  misc_RNA (1)...(19): siRNA sense strand
cauacugugugguacaauu

SEQ ID NO: 1604755 - RNA, 19 nt, Homo sapiens
  misc_RNA (1)...(19): siRNA sense strand
uaugaguucuucuuacguu

SEQ ID NO: 1604756 - RNA, 19 nt, Homo sapiens
  misc_RNA (1)...(19): siRNA sense strand
caaacauagccaagaagua

SEQ ID NO: 1604757 - RNA, 19 nt, Homo sapiens
  misc_RNA (1)...(19): siRNA sense strand
gagaaggagagcagucuga

SEQ ID NO: 1604758 - RNA, 19 nt, Homo sapiens
  misc_RNA (1)...(19): siRNA sense strand
guaggcagaucaaccacau

SEQ ID NO: 1604759 - RNA, 19 nt, Homo sapiens
  misc_RNA (1)...(19): siRNA sense strand
ucaagucccugagugucua

SEQ ID NO: 1604760 - RNA, 19 nt, Homo sapiens
  misc_RNA (1)...(19): siRNA sense strand
gggaagagauguggcaaaa

SEQ ID NO: 1604761 - RNA, 19 nt, Homo sapiens
  misc_RNA (1)...(19): siRNA sense strand
ugaaucagaagcuguuuga

SEQ ID NO: 1604762 - RNA, 19 nt, Homo sapiens
  misc_RNA (1)...(19): siRNA sense strand
ggacgucauugaaccuucu

SEQ ID NO: 1604763 - RNA, 19 nt, Homo sapiens
  misc_RNA (1)...(19): siRNA sense strand
aaacauagccaagaaguac

SEQ ID NO: 1604764 - RNA, 19 nt, Homo sapiens
  misc_RNA (1)...(19): siRNA sense strand
ccucauccguguccuacuu

SEQ ID NO: 1604765 - RNA, 19 nt, Homo sapiens
  misc_RNA (1)...(19): siRNA sense strand
agaggacuguggagacuga

SEQ ID NO: 1604766 - RNA, 19 nt, Homo sapiens
  misc_RNA (1)...(19): siRNA sense strand
gcucguguaugaguucuuc

SEQ ID NO: 1604767 - RNA, 19 nt, Homo sapiens
  misc_RNA (1)...(19): siRNA sense strand
ucauugaaccuucugaguu

SEQ ID NO: 1604768 - RNA, 19 nt, Homo sapiens
  misc_RNA (1)...(19): siRNA sense strand
uggaguacaucacccauag

SEQ ID NO: 1604769 - RNA, 19 nt, Homo sapiens
  misc_RNA (1)...(19): siRNA sense strand
gcuguguccucuuugacuu

SEQ ID NO: 1604770 - RNA, 19 nt, Homo sapiens
  misc_RNA (1)...(19): siRNA sense strand
cauguucccugcacucuac

SEQ ID NO: 1604771 - RNA, 19 nt, Homo sapiens
  misc_RNA (1)...(19): siRNA sense strand
guaauugugggacuucuca

SEQ ID NO: 1604772 - RNA, 19 nt, Homo sapiens
  misc_RNA (1)...(19): siRNA sense strand
aagagccacuggaacaaga

SEQ ID NO: 1604773 - RNA, 19 nt, Homo sapiens
  misc_RNA (1)...(19): siRNA sense strand
gcuggcauacuguguggua

SEQ ID NO: 1604774 - RNA, 19 nt, Homo sapiens
  misc_RNA (1)...(19): siRNA sense strand
gcugccaccuucaucgaau

SEQ ID NO: 1604775 - RNA, 19 nt, Homo sapiens
  misc_RNA (1)...(19): siRNA sense strand
uuaaagaagagcacaagau

SEQ ID NO: 1604776 - RNA, 19 nt, Homo sapiens
  misc_RNA (1)...(19): siRNA sense strand
gaucaaccacaucuucuac

SEQ ID NO: 1604777 - RNA, 19 nt, Homo sapiens
  misc_RNA (1)...(19): siRNA sense strand
gaaguacaucgaccagaag

SEQ ID NO: 1604778 - RNA, 19 nt, Homo sapiens
  misc_RNA (1)...(19): siRNA sense strand
agccaaacauagccaagaa

SEQ ID NO: 1604779 - RNA, 19 nt, Homo sapiens
  misc_RNA (1)...(19): siRNA sense strand
guuuguacuugcucuccua

SEQ ID NO: 1604780 - RNA, 19 nt, Homo sapiens
  misc_RNA (1)...(19): siRNA sense strand
gaaugaaggaaagggaaga

SEQ ID NO: 1604781 - RNA, 19 nt, Homo sapiens
  misc_RNA (1)...(19): siRNA sense strand
gagcaucacaacgggauug

SEQ ID NO: 1604782 - RNA, 19 nt, Homo sapiens
  misc_RNA (1)...(19): siRNA sense strand
ugacugcacacaacaauac

SEQ ID NO: 1604783 - RNA, 19 nt, Homo sapiens
  misc_RNA (1)...(19): siRNA sense strand
uguacucgauggagacaga

SEQ ID NO: 1604784 - RNA, 19 nt, Homo sapiens
  misc_RNA (1)...(19): siRNA sense strand
cguguaugaguucuucuua

SEQ ID NO: 1604785 - RNA, 19 nt, Homo sapiens
  misc_RNA (1)...(19): siRNA sense strand
gaugacugcacacaacaau

SEQ ID NO: 1604786 - RNA, 19 nt, Homo sapiens
  misc_RNA (1)...(19): siRNA sense strand
ccaaacauagccaagaagu

SEQ ID NO: 1604787 - RNA, 19 nt, Homo sapiens
  misc_RNA (1)...(19): siRNA sense strand
ccuugagucuccugauuuc

SEQ ID NO: 1604788 - RNA, 19 nt, Homo sapiens
  misc_RNA (1)...(19): siRNA sense strand
ccauagccgugauguuguc

SEQ ID NO: 1604789 - RNA, 19 nt, Homo sapiens
  misc_RNA (1)...(19): siRNA sense strand
ggacguguacaccaucaag

SEQ ID NO: 1604790 - RNA, 19 nt, Homo sapiens
  misc_RNA (1)...(19): siRNA sense strand
ggagauucuggacgucauu

SEQ ID NO: 1604791 - RNA, 19 nt, Homo sapiens
  misc_RNA (1)...(19): siRNA sense strand
ggcauacugugugguacaa

SEQ ID NO: 1604792 - RNA, 19 nt, Homo sapiens
  misc_RNA (1)...(19): siRNA sense strand
ucuauuacuggaacaauga

SEQ ID NO: 1604793 - RNA, 19 nt, Homo sapiens
  misc_RNA (1)...(19): siRNA sense strand
aaaugaaucagaagcuguu

SEQ ID NO: 1604794 - RNA, 19 nt, Homo sapiens
  misc_RNA (1)...(19): siRNA sense strand
ugauuuccagccaaacaua

SEQ ID NO: 1604795 - RNA, 19 nt, Homo sapiens
  misc_RNA (1)...(19): siRNA sense strand
gaagcgggcaggacucaac

SEQ ID NO: 1604796 - RNA, 19 nt, Homo sapiens
  misc_RNA (1)...(19): siRNA sense strand
cagcaucaucaauggcuuu

SEQ ID NO: 1604797 - RNA, 19 nt, Homo sapiens
  misc_RNA (1)...(19): siRNA sense strand
gauucuggacgucauugaa

SEQ ID NO: 1604798 - RNA, 19 nt, Homo sapiens
  misc_RNA (1)...(19): siRNA sense strand
ggaggugauguucuugaau

SEQ ID NO: 1604799 - RNA, 19 nt, Homo sapiens
  misc_RNA (1)...(19): siRNA sense strand
ucaaccacaucuucuacag

SEQ ID NO: 1604800 - RNA, 19 nt, Homo sapiens
  misc_RNA (1)...(19): siRNA sense strand
ugaaggaaagggaagagau

SEQ ID NO: 1604801 - RNA, 19 nt, Homo sapiens
  misc_RNA (1)...(19): siRNA sense strand
ccugauaagugacaaugcu

SEQ ID NO: 1604802 - RNA, 19 nt, Homo sapiens
  misc_RNA (1)...(19): siRNA sense strand
ccacaggggcugaguuuga

SEQ ID NO: 1604803 - RNA, 19 nt, Homo sapiens
  misc_RNA (1)...(19): siRNA sense strand
aggaggugauguucuugaa

SEQ ID NO: 1604804 - RNA, 19 nt, Homo sapiens
  misc_RNA (1)...(19): siRNA sense strand
aaagaagagcacaagaugu

SEQ ID NO: 1604805 - RNA, 19 nt, Homo sapiens
  misc_RNA (1)...(19): siRNA sense strand
ggacgcugccaccuucauc

SEQ ID NO: 1604806 - RNA, 19 nt, Homo sapiens
  misc_RNA (1)...(19): siRNA sense strand
cagaagcuguuugaugacu

SEQ ID NO: 1604807 - RNA, 19 nt, Homo sapiens
  misc_RNA (1)...(19): siRNA sense strand
acccauagccgugauguug

SEQ ID NO: 1604808 - RNA, 19 nt, Homo sapiens
  misc_RNA (1)...(19): siRNA sense strand
guggaguacaucacccaua

SEQ ID NO: 1604809 - RNA, 19 nt, Homo sapiens
  misc_RNA (1)...(19): siRNA sense strand
ggagcuguuuauccagaag

SEQ ID NO: 1604810 - RNA, 19 nt, Homo sapiens
  misc_RNA (1)...(19): siRNA sense strand
cuucuuacguuuccuugag

SEQ ID NO: 1604811 - RNA, 19 nt, Homo sapiens
  misc_RNA (1)...(19): siRNA sense strand
caacaauacaaggcagaga

SEQ ID NO: 1604812 - RNA, 19 nt, Homo sapiens
  misc_RNA (1)...(19): siRNA sense strand
cugaggcugucaccauguu

SEQ ID NO: 1604813 - RNA, 19 nt, Homo sapiens
  misc_RNA (1)...(19): siRNA sense strand
caucgcaucuauggcaagu

SEQ ID NO: 1604814 - RNA, 19 nt, Homo sapiens
  misc_RNA (1)...(19): siRNA sense strand
gggacuuccucaagaccau

SEQ ID NO: 1604815 - RNA, 19 nt, Homo sapiens
  misc_RNA (1)...(19): siRNA sense strand
caggacguguacaccauca

SEQ ID NO: 1604816 - RNA, 19 nt, Homo sapiens
  misc_RNA (1)...(19): siRNA sense strand
cauggacugaucuauaaug

SEQ ID NO: 1604817 - RNA, 19 nt, Homo sapiens
  misc_RNA (1)...(19): siRNA sense strand
ccaagagccacuggaacaa

SEQ ID NO: 1604818 - RNA, 19 nt, Homo sapiens
  misc_RNA (1)...(19): siRNA sense strand
acccucagcuggcauacug

SEQ ID NO: 1604819 - RNA, 19 nt, Homo sapiens
  misc_RNA (1)...(19): siRNA sense strand
guguaugaguucuucuuac

SEQ ID NO: 1604820 - RNA, 19 nt, Homo sapiens
  misc_RNA (1)...(19): siRNA sense strand
uguaugaguucuucuuacg

SEQ ID NO: 1604821 - RNA, 19 nt, Homo sapiens
  misc_RNA (1)...(19): siRNA sense strand
acucagugaccucaaauuc

SEQ ID NO: 1604822 - RNA, 19 nt, Homo sapiens
  misc_RNA (1)...(19): siRNA sense strand
ugaguuugacccagaggaa

SEQ ID NO: 1604823 - RNA, 19 nt, Homo sapiens
  misc_RNA (1)...(19): siRNA sense strand
aacaauacaaggcagagaa

SEQ ID NO: 1604824 - RNA, 19 nt, Homo sapiens
  misc_RNA (1)...(19): siRNA sense strand
ggaaauggacgcuggauua

SEQ ID NO: 1604825 - RNA, 19 nt, Homo sapiens
  misc_RNA (1)...(19): siRNA sense strand
gaacaaaggaagcaggaaa

SEQ ID NO: 1604826 - RNA, 19 nt, Homo sapiens
  misc_RNA (1)...(19): siRNA sense strand
gcaggaaaaugcucuuaaa

SEQ ID NO: 1604827 - RNA, 19 nt, Homo sapiens
  misc_RNA (1)...(19): siRNA sense strand
aauggacgcuggauuacaa

SEQ ID NO: 1604828 - RNA, 19 nt, Homo sapiens
  misc_RNA (1)...(19): siRNA sense strand
gaaguugcaggaagaacaa

SEQ ID NO: 1604829 - RNA, 19 nt, Homo sapiens
  misc_RNA (1)...(19): siRNA sense strand
gaaauggacgcuggauuac

SEQ ID NO: 1604830 - RNA, 19 nt, Homo sapiens
  misc_RNA (1)...(19): siRNA sense strand
uuuagggacuguucucuuc

SEQ ID NO: 1604831 - RNA, 19 nt, Homo sapiens
  misc_RNA (1)...(19): siRNA sense strand
gaguuguacugcugucaca

SEQ ID NO: 1604832 - RNA, 19 nt, Homo sapiens
  misc_RNA (1)...(19): siRNA sense strand
gcagaaguugcaggaagaa

SEQ ID NO: 1604833 - RNA, 19 nt, Homo sapiens
  misc_RNA (1)...(19): siRNA sense strand
agcagaaguugcaggaaga

SEQ ID NO: 1604834 - RNA, 19 nt, Homo sapiens
  misc_RNA (1)...(19): siRNA sense strand
gacgcuggauuacaagcau

SEQ ID NO: 1604835 - RNA, 19 nt, Homo sapiens
  misc_RNA (1)...(19): siRNA sense strand
gcucaggcagcagaaguug

SEQ ID NO: 1604836 - RNA, 19 nt, Homo sapiens
  misc_RNA (1)...(19): siRNA sense strand
uuuagggacuguucucuuc

SEQ ID NO: 1604837 - RNA, 19 nt, Homo sapiens
  misc_RNA (1)...(19): siRNA sense strand
ggaaauggacgcuggauua

SEQ ID NO: 1604838 - RNA, 19 nt, Homo sapiens
  misc_RNA (1)...(19): siRNA sense strand
gaacaaaggaagcaggaaa

SEQ ID NO: 1604839 - RNA, 19 nt, Homo sapiens
  misc_RNA (1)...(19): siRNA sense strand
gcaggaaaaugcucuuaaa

SEQ ID NO: 1604840 - RNA, 19 nt, Homo sapiens
  misc_RNA (1)...(19): siRNA sense strand
aauggacgcuggauuacaa

SEQ ID NO: 1604841 - RNA, 19 nt, Homo sapiens
  misc_RNA (1)...(19): siRNA sense strand
gaaguugcaggaagaacaa

SEQ ID NO: 1604842 - RNA, 19 nt, Homo sapiens
  misc_RNA (1)...(19): siRNA sense strand
gaaauggacgcuggauuac

SEQ ID NO: 1604843 - RNA, 19 nt, Homo sapiens
  misc_RNA (1)...(19): siRNA sense strand
uuuagggacuguucucuuc

SEQ ID NO: 1604844 - RNA, 19 nt, Homo sapiens
  misc_RNA (1)...(19): siRNA sense strand
gaguuguacugcugucaca

SEQ ID NO: 1604845 - RNA, 19 nt, Homo sapiens
  misc_RNA (1)...(19): siRNA sense strand
gcagaaguugcaggaagaa

SEQ ID NO: 1604846 - RNA, 19 nt, Homo sapiens
  misc_RNA (1)...(19): siRNA sense strand
agcagaaguugcaggaaga

SEQ ID NO: 1604847 - RNA, 19 nt, Homo sapiens
  misc_RNA (1)...(19): siRNA sense strand
gacgcuggauuacaagcau

SEQ ID NO: 1604848 - RNA, 19 nt, Homo sapiens
  misc_RNA (1)...(19): siRNA sense strand
gcucaggcagcagaaguug

SEQ ID NO: 1604849 - RNA, 19 nt, Homo sapiens
  misc_RNA (1)...(19): siRNA sense strand
ggaaauggacgcuggauua

SEQ ID NO: 1604850 - RNA, 19 nt, Homo sapiens
  misc_RNA (1)...(19): siRNA sense strand
gaacaaaggaagcaggaaa

SEQ ID NO: 1604851 - RNA, 19 nt, Homo sapiens
  misc_RNA (1)...(19): siRNA sense strand
gcaggaaaaugcucuuaaa

SEQ ID NO: 1604852 - RNA, 19 nt, Homo sapiens
  misc_RNA (1)...(19): siRNA sense strand
aauggacgcuggauuacaa

SEQ ID NO: 1604853 - RNA, 19 nt, Homo sapiens
  misc_RNA (1)...(19): siRNA sense strand
gaaguugcaggaagaacaa

SEQ ID NO: 1604854 - RNA, 19 nt, Homo sapiens
  misc_RNA (1)...(19): siRNA sense strand
gaaauggacgcuggauuac

SEQ ID NO: 1604855 - RNA, 19 nt, Homo sapiens
  misc_RNA (1)...(19): siRNA sense strand
gaguuguacugcugucaca

SEQ ID NO: 1604856 - RNA, 19 nt, Homo sapiens
  misc_RNA (1)...(19): siRNA sense strand
gcagaaguugcaggaagaa

SEQ ID NO: 1604857 - RNA, 19 nt, Homo sapiens
  misc_RNA (1)...(19): siRNA sense strand
agcagaaguugcaggaaga

SEQ ID NO: 1604858 - RNA, 19 nt, Homo sapiens
  misc_RNA (1)...(19): siRNA sense strand
gacgcuggauuacaagcau

SEQ ID NO: 1604859 - RNA, 19 nt, Homo sapiens
  misc_RNA (1)...(19): siRNA sense strand
gcucaggcagcagaaguug

SEQ ID NO: 1604860 - RNA, 19 nt, Homo sapiens
  misc_RNA (1)...(19): siRNA sense strand
ggaaauggacgcuggauua

SEQ ID NO: 1604861 - RNA, 19 nt, Homo sapiens
  misc_RNA (1)...(19): siRNA sense strand
gaacaaaggaagcaggaaa

SEQ ID NO: 1604862 - RNA, 19 nt, Homo sapiens
  misc_RNA (1)...(19): siRNA sense strand
gcaggaaaaugcucuuaaa

SEQ ID NO: 1604863 - RNA, 19 nt, Homo sapiens
  misc_RNA (1)...(19): siRNA sense strand
aauggacgcuggauuacaa

SEQ ID NO: 1604864 - RNA, 19 nt, Homo sapiens
  misc_RNA (1)...(19): siRNA sense strand
gaaguugcaggaagaacaa

SEQ ID NO: 1604865 - RNA, 19 nt, Homo sapiens
  misc_RNA (1)...(19): siRNA sense strand
gaaauggacgcuggauuac

SEQ ID NO: 1604866 - RNA, 19 nt, Homo sapiens
  misc_RNA (1)...(19): siRNA sense strand
gaguuguacugcugucaca

SEQ ID NO: 1604867 - RNA, 19 nt, Homo sapiens
  misc_RNA (1)...(19): siRNA sense strand
gcagaaguugcaggaagaa

SEQ ID NO: 1604868 - RNA, 19 nt, Homo sapiens
  misc_RNA (1)...(19): siRNA sense strand
agcagaaguugcaggaaga

SEQ ID NO: 1604869 - RNA, 19 nt, Homo sapiens
  misc_RNA (1)...(19): siRNA sense strand
gacgcuggauuacaagcau

SEQ ID NO: 1604870 - RNA, 19 nt, Homo sapiens
  misc_RNA (1)...(19): siRNA sense strand
gcucaggcagcagaaguug

SEQ ID NO: 1604871 - RNA, 19 nt, Homo sapiens
  misc_RNA (1)...(19): siRNA sense strand
ggaaauggacgcuggauua

SEQ ID NO: 1604872 - RNA, 19 nt, Homo sapiens
  misc_RNA (1)...(19): siRNA sense strand
gaacaaaggaagcaggaaa

SEQ ID NO: 1604873 - RNA, 19 nt, Homo sapiens
  misc_RNA (1)...(19): siRNA sense strand
gcaggaaaaugcucuuaaa

SEQ ID NO: 1604874 - RNA, 19 nt, Homo sapiens
  misc_RNA (1)...(19): siRNA sense strand
aauggacgcuggauuacaa

SEQ ID NO: 1604875 - RNA, 19 nt, Homo sapiens
  misc_RNA (1)...(19): siRNA sense strand
gaaguugcaggaagaacaa

SEQ ID NO: 1604876 - RNA, 19 nt, Homo sapiens
  misc_RNA (1)...(19): siRNA sense strand
gaaauggacgcuggauuac

SEQ ID NO: 1604877 - RNA, 19 nt, Homo sapiens
  misc_RNA (1)...(19): siRNA sense strand
gaguuguacugcugucaca

SEQ ID NO: 1604878 - RNA, 19 nt, Homo sapiens
  misc_RNA (1)...(19): siRNA sense strand
gcagaaguugcaggaagaa

SEQ ID NO: 1604879 - RNA, 19 nt, Homo sapiens
  misc_RNA (1)...(19): siRNA sense strand
agcagaaguugcaggaaga

SEQ ID NO: 1604880 - RNA, 19 nt, Homo sapiens
  misc_RNA (1)...(19): siRNA sense strand
gacgcuggauuacaagcau

SEQ ID NO: 1604881 - RNA, 19 nt, Homo sapiens
  misc_RNA (1)...(19): siRNA sense strand
gcucaggcagcagaaguug

SEQ ID NO: 1604882 - RNA, 19 nt, Homo sapiens
  misc_RNA (1)...(19): siRNA sense strand
ggaaauggacgcuggauua

SEQ ID NO: 1604883 - RNA, 19 nt, Homo sapiens
  misc_RNA (1)...(19): siRNA sense strand
gaacaaaggaagcaggaaa

SEQ ID NO: 1604884 - RNA, 19 nt, Homo sapiens
  misc_RNA (1)...(19): siRNA sense strand
aauggacgcuggauuacaa

SEQ ID NO: 1604885 - RNA, 19 nt, Homo sapiens
  misc_RNA (1)...(19): siRNA sense strand
gaaguugcaggaagaacaa

SEQ ID NO: 1604886 - RNA, 19 nt, Homo sapiens
  misc_RNA (1)...(19): siRNA sense strand
gaaauggacgcuggauuac

SEQ ID NO: 1604887 - RNA, 19 nt, Homo sapiens
  misc_RNA (1)...(19): siRNA sense strand
uuuagggacuguucucuuc

SEQ ID NO: 1604888 - RNA, 19 nt, Homo sapiens
  misc_RNA (1)...(19): siRNA sense strand
gaguuguacugcugucaca

SEQ ID NO: 1604889 - RNA, 19 nt, Homo sapiens
  misc_RNA (1)...(19): siRNA sense strand
gcagaaguugcaggaagaa

SEQ ID NO: 1604890 - RNA, 19 nt, Homo sapiens
  misc_RNA (1)...(19): siRNA sense strand
agcagaaguugcaggaaga

SEQ ID NO: 1604891 - RNA, 19 nt, Homo sapiens
  misc_RNA (1)...(19): siRNA sense strand
gacgcuggauuacaagcau

SEQ ID NO: 1604892 - RNA, 19 nt, Homo sapiens
  misc_RNA (1)...(19): siRNA sense strand
gcucaggcagcagaaguug

SEQ ID NO: 1604893 - RNA, 19 nt, Homo sapiens
  misc_RNA (1)...(19): siRNA sense strand
cauaagaccuccguguuua

SEQ ID NO: 1604894 - RNA, 19 nt, Homo sapiens
  misc_RNA (1)...(19): siRNA sense strand
gaacaaauuuaggguggaa

SEQ ID NO: 1604895 - RNA, 19 nt, Homo sapiens
  misc_RNA (1)...(19): siRNA sense strand
cgacaccgguucucuauca

SEQ ID NO: 1604896 - RNA, 19 nt, Homo sapiens
  misc_RNA (1)...(19): siRNA sense strand
gcaaguccauucagaaguc

SEQ ID NO: 1604897 - RNA, 19 nt, Homo sapiens
  misc_RNA (1)...(19): siRNA sense strand
ugaagucgcucaguacauu

SEQ ID NO: 1604898 - RNA, 19 nt, Homo sapiens
  misc_RNA (1)...(19): siRNA sense strand
ggaagaaagagaaauaauc

SEQ ID NO: 1604899 - RNA, 19 nt, Homo sapiens
  misc_RNA (1)...(19): siRNA sense strand
gaagaagggacucugauca

SEQ ID NO: 1604900 - RNA, 19 nt, Homo sapiens
  misc_RNA (1)...(19): siRNA sense strand
uaaucaaacugaccaugaa

SEQ ID NO: 1604901 - RNA, 19 nt, Homo sapiens
  misc_RNA (1)...(19): siRNA sense strand
gaagaggaagaaagagaaa

SEQ ID NO: 1604902 - RNA, 19 nt, Homo sapiens
  misc_RNA (1)...(19): siRNA sense strand
gacagcaaguccauucaga

SEQ ID NO: 1604903 - RNA, 19 nt, Homo sapiens
  misc_RNA (1)...(19): siRNA sense strand
ggccacuucuacaaucaua

SEQ ID NO: 1604904 - RNA, 19 nt, Homo sapiens
  misc_RNA (1)...(19): siRNA sense strand
gaagucgcucaguacauua

SEQ ID NO: 1604905 - RNA, 19 nt, Homo sapiens
  misc_RNA (1)...(19): siRNA sense strand
gcgaguacccgcugauuuc

SEQ ID NO: 1604906 - RNA, 19 nt, Homo sapiens
  misc_RNA (1)...(19): siRNA sense strand
gaggaagaaagagaaauaa

SEQ ID NO: 1604907 - RNA, 19 nt, Homo sapiens
  misc_RNA (1)...(19): siRNA sense strand
agaggaagaaagagaaaua

SEQ ID NO: 1604908 - RNA, 19 nt, Homo sapiens
  misc_RNA (1)...(19): siRNA sense strand
gugagaagaucgccaggau

SEQ ID NO: 1604909 - RNA, 19 nt, Homo sapiens
  misc_RNA (1)...(19): siRNA sense strand
ucauaagaccuccguguuu

SEQ ID NO: 1604910 - RNA, 19 nt, Homo sapiens
  misc_RNA (1)...(19): siRNA sense strand
cccaugaagucgcucagua

SEQ ID NO: 1604911 - RNA, 19 nt, Homo sapiens
  misc_RNA (1)...(19): siRNA sense strand
ucagaagucggagcucuua

SEQ ID NO: 1604912 - RNA, 19 nt, Homo sapiens
  misc_RNA (1)...(19): siRNA sense strand
cucaguacauuaaguuuga

SEQ ID NO: 1604913 - RNA, 19 nt, Homo sapiens
  misc_RNA (1)...(19): siRNA sense strand
ggaagaagggacucugauc

SEQ ID NO: 1604914 - RNA, 19 nt, Homo sapiens
  misc_RNA (1)...(19): siRNA sense strand
gcucuuaggccugcugaaa

SEQ ID NO: 1604915 - RNA, 19 nt, Homo sapiens
  misc_RNA (1)...(19): siRNA sense strand
gagacaccgugaggaagaa

SEQ ID NO: 1604916 - RNA, 19 nt, Homo sapiens
  misc_RNA (1)...(19): siRNA sense strand
caacggccacuucuacaau

SEQ ID NO: 1604917 - RNA, 19 nt, Homo sapiens
  misc_RNA (1)...(19): siRNA sense strand
gcugagacaccgugaggaa

SEQ ID NO: 1604918 - RNA, 19 nt, Homo sapiens
  misc_RNA (1)...(19): siRNA sense strand
gaggaagaagggacucuga

SEQ ID NO: 1604919 - RNA, 19 nt, Homo sapiens
  misc_RNA (1)...(19): siRNA sense strand
gcucaguacauuaaguuug

SEQ ID NO: 1604920 - RNA, 19 nt, Homo sapiens
  misc_RNA (1)...(19): siRNA sense strand
ugccggugcuggacaguuu

SEQ ID NO: 1604921 - RNA, 19 nt, Homo sapiens
  misc_RNA (1)...(19): siRNA sense strand
gcugguggaggccaaguaa

SEQ ID NO: 1604922 - RNA, 19 nt, Homo sapiens
  misc_RNA (1)...(19): siRNA sense strand
ucacccugcugcugaacaa

SEQ ID NO: 1604923 - RNA, 19 nt, Homo sapiens
  misc_RNA (1)...(19): siRNA sense strand
gaagauggccccagugagu

SEQ ID NO: 1604924 - RNA, 19 nt, Homo sapiens
  misc_RNA (1)...(19): siRNA sense strand
agaagggacucugaucauc

SEQ ID NO: 1604925 - RNA, 19 nt, Homo sapiens
  misc_RNA (1)...(19): siRNA sense strand
cagcugaugcggaccaaga

SEQ ID NO: 1604926 - RNA, 19 nt, Homo sapiens
  misc_RNA (1)...(19): siRNA sense strand
ugagacaccgugaggaaga

SEQ ID NO: 1604927 - RNA, 19 nt, Homo sapiens
  misc_RNA (1)...(19): siRNA sense strand
agaagaggaagaaagagaa

SEQ ID NO: 1604928 - RNA, 19 nt, Homo sapiens
  misc_RNA (1)...(19): siRNA sense strand
auaaucaaacugaccauga

SEQ ID NO: 1604929 - RNA, 19 nt, Homo sapiens
  misc_RNA (1)...(19): siRNA sense strand
aaaagaagaggaagaaaga

SEQ ID NO: 1604930 - RNA, 19 nt, Homo sapiens
  misc_RNA (1)...(19): siRNA sense strand
aagaagaggaagaaagaga

SEQ ID NO: 1604931 - RNA, 19 nt, Homo sapiens
  misc_RNA (1)...(19): siRNA sense strand
uaucaacggccacuucuac

SEQ ID NO: 1604932 - RNA, 19 nt, Homo sapiens
  misc_RNA (1)...(19): siRNA sense strand
ccaagagcgacgccaguug

SEQ ID NO: 1604933 - RNA, 19 nt, Homo sapiens
  misc_RNA (1)...(19): siRNA sense strand
cguguuuacuccagccuau

SEQ ID NO: 1604934 - RNA, 19 nt, Homo sapiens
  misc_RNA (1)...(19): siRNA sense strand
cagcaaguccauucagaag

SEQ ID NO: 1604935 - RNA, 19 nt, Homo sapiens
  misc_RNA (1)...(19): siRNA sense strand
ggcgacaccgguucucuau

SEQ ID NO: 1604936 - RNA, 19 nt, Homo sapiens
  misc_RNA (1)...(19): siRNA sense strand
gacaccgguucucuaucaa

SEQ ID NO: 1604937 - RNA, 19 nt, Homo sapiens
  misc_RNA (1)...(19): siRNA sense strand
aagggacucugaucaucga

SEQ ID NO: 1604938 - RNA, 19 nt, Homo sapiens
  misc_RNA (1)...(19): siRNA sense strand
ccugauggaagcugacuug

SEQ ID NO: 1604939 - RNA, 19 nt, Homo sapiens
  misc_RNA (1)...(19): siRNA sense strand
ucaacggccacuucuacaa

SEQ ID NO: 1604940 - RNA, 19 nt, Homo sapiens
  misc_RNA (1)...(19): siRNA sense strand
ccacuucuacaaucauaag

SEQ ID NO: 1604941 - RNA, 19 nt, Homo sapiens
  misc_RNA (1)...(19): siRNA sense strand
cccugcugcugaacaaauu

SEQ ID NO: 1604942 - RNA, 19 nt, Homo sapiens
  misc_RNA (1)...(19): siRNA sense strand
acagcaaguccauucagaa

SEQ ID NO: 1604943 - RNA, 19 nt, Homo sapiens
  misc_RNA (1)...(19): siRNA sense strand
gcaaguccauucagaaguc

SEQ ID NO: 1604944 - RNA, 19 nt, Homo sapiens
  misc_RNA (1)...(19): siRNA sense strand
gaagaagggacucugauca

SEQ ID NO: 1604945 - RNA, 19 nt, Homo sapiens
  misc_RNA (1)...(19): siRNA sense strand
gacagcaaguccauucaga

SEQ ID NO: 1604946 - RNA, 19 nt, Homo sapiens
  misc_RNA (1)...(19): siRNA sense strand
ucagaagucggagcucuua

SEQ ID NO: 1604947 - RNA, 19 nt, Homo sapiens
  misc_RNA (1)...(19): siRNA sense strand
ggaagaagggacucugauc

SEQ ID NO: 1604948 - RNA, 19 nt, Homo sapiens
  misc_RNA (1)...(19): siRNA sense strand
gcucuuaggccugcugaaa

SEQ ID NO: 1604949 - RNA, 19 nt, Homo sapiens
  misc_RNA (1)...(19): siRNA sense strand
gagacaccgugaggaagaa

SEQ ID NO: 1604950 - RNA, 19 nt, Homo sapiens
  misc_RNA (1)...(19): siRNA sense strand
gcugagacaccgugaggaa

SEQ ID NO: 1604951 - RNA, 19 nt, Homo sapiens
  misc_RNA (1)...(19): siRNA sense strand
gaggaagaagggacucuga

SEQ ID NO: 1604952 - RNA, 19 nt, Homo sapiens
  misc_RNA (1)...(19): siRNA sense strand
agaagggacucugaucauc

SEQ ID NO: 1604953 - RNA, 19 nt, Homo sapiens
  misc_RNA (1)...(19): siRNA sense strand
cagcugaugcggaccaaga

SEQ ID NO: 1604954 - RNA, 19 nt, Homo sapiens
  misc_RNA (1)...(19): siRNA sense strand
ugagacaccgugaggaaga

SEQ ID NO: 1604955 - RNA, 19 nt, Homo sapiens
  misc_RNA (1)...(19): siRNA sense strand
cagcaaguccauucagaag

SEQ ID NO: 1604956 - RNA, 19 nt, Homo sapiens
  misc_RNA (1)...(19): siRNA sense strand
ccaagagcgacgccaguug

SEQ ID NO: 1604957 - RNA, 19 nt, Homo sapiens
  misc_RNA (1)...(19): siRNA sense strand
aagggacucugaucaucga

SEQ ID NO: 1604958 - RNA, 19 nt, Homo sapiens
  misc_RNA (1)...(19): siRNA sense strand
acagcaaguccauucagaa

SEQ ID NO: 1604959 - RNA, 19 nt, Homo sapiens
  misc_RNA (1)...(19): siRNA sense strand
gagccaagcuuguguguaa

SEQ ID NO: 1604960 - RNA, 19 nt, Homo sapiens
  misc_RNA (1)...(19): siRNA sense strand
gaagaugggugcacaaaga

SEQ ID NO: 1604961 - RNA, 19 nt, Homo sapiens
  misc_RNA (1)...(19): siRNA sense strand
ggagggagaucaucaguga

SEQ ID NO: 1604962 - RNA, 19 nt, Homo sapiens
  misc_RNA (1)...(19): siRNA sense strand
gcaauaggauucacuacaa

SEQ ID NO: 1604963 - RNA, 19 nt, Homo sapiens
  misc_RNA (1)...(19): siRNA sense strand
ggucaaagauggacaaaca

SEQ ID NO: 1604964 - RNA, 19 nt, Homo sapiens
  misc_RNA (1)...(19): siRNA sense strand
ccucaacgcuggucaagua

SEQ ID NO: 1604965 - RNA, 19 nt, Homo sapiens
  misc_RNA (1)...(19): siRNA sense strand
gaacaacagcugauucuga

SEQ ID NO: 1604966 - RNA, 19 nt, Homo sapiens
  misc_RNA (1)...(19): siRNA sense strand
ggaaguaccagucaaagaa

SEQ ID NO: 1604967 - RNA, 19 nt, Homo sapiens
  misc_RNA (1)...(19): siRNA sense strand
acgaagagcugaccauuga

SEQ ID NO: 1604968 - RNA, 19 nt, Homo sapiens
  misc_RNA (1)...(19): siRNA sense strand
gaagaacggaggaaacaaa

SEQ ID NO: 1604969 - RNA, 19 nt, Homo sapiens
  misc_RNA (1)...(19): siRNA sense strand
gggauuaacaucagcaaua

SEQ ID NO: 1604970 - RNA, 19 nt, Homo sapiens
  misc_RNA (1)...(19): siRNA sense strand
gcuacuaucuuggauguuu

SEQ ID NO: 1604971 - RNA, 19 nt, Homo sapiens
  misc_RNA (1)...(19): siRNA sense strand
aagcagagcugacaagcaa

SEQ ID NO: 1604972 - RNA, 19 nt, Homo sapiens
  misc_RNA (1)...(19): siRNA sense strand
uggaagaccucuauuggaa

SEQ ID NO: 1604973 - RNA, 19 nt, Homo sapiens
  misc_RNA (1)...(19): siRNA sense strand
caagaagcgucucaucaug

SEQ ID NO: 1604974 - RNA, 19 nt, Homo sapiens
  misc_RNA (1)...(19): siRNA sense strand
gaauggaauuuacuguaug

SEQ ID NO: 1604975 - RNA, 19 nt, Homo sapiens
  misc_RNA (1)...(19): siRNA sense strand
gagcuacuaucuuggaugu

SEQ ID NO: 1604976 - RNA, 19 nt, Homo sapiens
  misc_RNA (1)...(19): siRNA sense strand
gaccaacgccaacguguuu

SEQ ID NO: 1604977 - RNA, 19 nt, Homo sapiens
  misc_RNA (1)...(19): siRNA sense strand
caagaucgcaguuguugaa

SEQ ID NO: 1604978 - RNA, 19 nt, Homo sapiens
  misc_RNA (1)...(19): siRNA sense strand
ggauuaacaucagcaauag

SEQ ID NO: 1604979 - RNA, 19 nt, Homo sapiens
  misc_RNA (1)...(19): siRNA sense strand
caaagaagaaguugaaucu

SEQ ID NO: 1604980 - RNA, 19 nt, Homo sapiens
  misc_RNA (1)...(19): siRNA sense strand
gccuauaucuucaggagaa

SEQ ID NO: 1604981 - RNA, 19 nt, Homo sapiens
  misc_RNA (1)...(19): siRNA sense strand
gaacagccaaggacagaga

SEQ ID NO: 1604982 - RNA, 19 nt, Homo sapiens
  misc_RNA (1)...(19): siRNA sense strand
gaggaugaauggaauuuac

SEQ ID NO: 1604983 - RNA, 19 nt, Homo sapiens
  misc_RNA (1)...(19): siRNA sense strand
gcauagccgugcuucucua

SEQ ID NO: 1604984 - RNA, 19 nt, Homo sapiens
  misc_RNA (1)...(19): siRNA sense strand
aaagaugcaucccugaguu

SEQ ID NO: 1604985 - RNA, 19 nt, Homo sapiens
  misc_RNA (1)...(19): siRNA sense strand
gcacugagccacauuugca

SEQ ID NO: 1604986 - RNA, 19 nt, Homo sapiens
  misc_RNA (1)...(19): siRNA sense strand
caaguuaacacccuucaug

SEQ ID NO: 1604987 - RNA, 19 nt, Homo sapiens
  misc_RNA (1)...(19): siRNA sense strand
gaagaggcgcaccagauga

SEQ ID NO: 1604988 - RNA, 19 nt, Homo sapiens
  misc_RNA (1)...(19): siRNA sense strand
gacagagagucaugguuga

SEQ ID NO: 1604989 - RNA, 19 nt, Homo sapiens
  misc_RNA (1)...(19): siRNA sense strand
gccauugacugccagcauu

SEQ ID NO: 1604990 - RNA, 19 nt, Homo sapiens
  misc_RNA (1)...(19): siRNA sense strand
agggaaggguggauucaua

SEQ ID NO: 1604991 - RNA, 19 nt, Homo sapiens
  misc_RNA (1)...(19): siRNA sense strand
ggucaaguaugcagagaag

SEQ ID NO: 1604992 - RNA, 19 nt, Homo sapiens
  misc_RNA (1)...(19): siRNA sense strand
aacaacagcugauucugaa

SEQ ID NO: 1604993 - RNA, 19 nt, Homo sapiens
  misc_RNA (1)...(19): siRNA sense strand
ccauccaacuuacacauga

SEQ ID NO: 1604994 - RNA, 19 nt, Homo sapiens
  misc_RNA (1)...(19): siRNA sense strand
cuucagaguugagucauuu

SEQ ID NO: 1604995 - RNA, 19 nt, Homo sapiens
  misc_RNA (1)...(19): siRNA sense strand
aaacaaaaccucgucauua

SEQ ID NO: 1604996 - RNA, 19 nt, Homo sapiens
  misc_RNA (1)...(19): siRNA sense strand
aaacagagauccgaaccau

SEQ ID NO: 1604997 - RNA, 19 nt, Homo sapiens
  misc_RNA (1)...(19): siRNA sense strand
ugugggagcuacuaucuug

SEQ ID NO: 1604998 - RNA, 19 nt, Homo sapiens
  misc_RNA (1)...(19): siRNA sense strand
gcacaccagcuaucaugaa

SEQ ID NO: 1604999 - RNA, 19 nt, Homo sapiens
  misc_RNA (1)...(19): siRNA sense strand
gaaggguggauucauaaga

SEQ ID NO: 1605000 - RNA, 19 nt, Homo sapiens
  misc_RNA (1)...(19): siRNA sense strand
aggauucacuacaacauuu

SEQ ID NO: 1605001 - RNA, 19 nt, Homo sapiens
  misc_RNA (1)...(19): siRNA sense strand
gcugacaagcaacgucuua

SEQ ID NO: 1605002 - RNA, 19 nt, Homo sapiens
  misc_RNA (1)...(19): siRNA sense strand
gggaaggguggauucauaa

SEQ ID NO: 1605003 - RNA, 19 nt, Homo sapiens
  misc_RNA (1)...(19): siRNA sense strand
aagaagaaguugaaucucu

SEQ ID NO: 1605004 - RNA, 19 nt, Homo sapiens
  misc_RNA (1)...(19): siRNA sense strand
gcaagaagcagaggacagu

SEQ ID NO: 1605005 - RNA, 19 nt, Homo sapiens
  misc_RNA (1)...(19): siRNA sense strand
ggacuuugcagaguacauu

SEQ ID NO: 1605006 - RNA, 19 nt, Homo sapiens
  misc_RNA (1)...(19): siRNA sense strand
gauacacagccaccacuaa

SEQ ID NO: 1605007 - RNA, 19 nt, Homo sapiens
  misc_RNA (1)...(19): siRNA sense strand
gaagcacugagccacauuu

SEQ ID NO: 1605008 - RNA, 19 nt, Homo sapiens
  misc_RNA (1)...(19): siRNA sense strand
aucgauaccugaugaauga

SEQ ID NO: 1605009 - RNA, 19 nt, Homo sapiens
  misc_RNA (1)...(19): siRNA sense strand
ugaagaagcugcccaucac

SEQ ID NO: 1605010 - RNA, 19 nt, Homo sapiens
  misc_RNA (1)...(19): siRNA sense strand
cauuagaggugacgcaaag

SEQ ID NO: 1605011 - RNA, 19 nt, Homo sapiens
  misc_RNA (1)...(19): siRNA sense strand
uaacaucagcaauaggauu

SEQ ID NO: 1605012 - RNA, 19 nt, Homo sapiens
  misc_RNA (1)...(19): siRNA sense strand
gauaccugaugaaugaaga

SEQ ID NO: 1605013 - RNA, 19 nt, Homo sapiens
  misc_RNA (1)...(19): siRNA sense strand
gaagagcugaccauugauc

SEQ ID NO: 1605014 - RNA, 19 nt, Homo sapiens
  misc_RNA (1)...(19): siRNA sense strand
acaaugccaucccuguuga

SEQ ID NO: 1605015 - RNA, 19 nt, Homo sapiens
  misc_RNA (1)...(19): siRNA sense strand
aacaaaaccucgucauuaa

SEQ ID NO: 1605016 - RNA, 19 nt, Homo sapiens
  misc_RNA (1)...(19): siRNA sense strand
gcaagcagccgugcaccaa

SEQ ID NO: 1605017 - RNA, 19 nt, Homo sapiens
  misc_RNA (1)...(19): siRNA sense strand
gugccuauuugguguaaga

SEQ ID NO: 1605018 - RNA, 19 nt, Homo sapiens
  misc_RNA (1)...(19): siRNA sense strand
agccuucgcuggccucuuu

SEQ ID NO: 1605019 - RNA, 19 nt, Homo sapiens
  misc_RNA (1)...(19): siRNA sense strand
gcacuucagaguugaguca

SEQ ID NO: 1605020 - RNA, 19 nt, Homo sapiens
  misc_RNA (1)...(19): siRNA sense strand
gaaacaaaaccucgucauu

SEQ ID NO: 1605021 - RNA, 19 nt, Homo sapiens
  misc_RNA (1)...(19): siRNA sense strand
gcacauagggcggaaguac

SEQ ID NO: 1605022 - RNA, 19 nt, Homo sapiens
  misc_RNA (1)...(19): siRNA sense strand
ugacaagcaacgucuuaaa

SEQ ID NO: 1605023 - RNA, 19 nt, Homo sapiens
  misc_RNA (1)...(19): siRNA sense strand
ccaagaagcgucucaucau

SEQ ID NO: 1605024 - RNA, 19 nt, Homo sapiens
  misc_RNA (1)...(19): siRNA sense strand
gagcagguuucuguaugug

SEQ ID NO: 1605025 - RNA, 19 nt, Homo sapiens
  misc_RNA (1)...(19): siRNA sense strand
ggaccaacgccaacguguu

SEQ ID NO: 1605026 - RNA, 19 nt, Homo sapiens
  misc_RNA (1)...(19): siRNA sense strand
guaagacucuagaaaacuu

SEQ ID NO: 1605027 - RNA, 19 nt, Homo sapiens
  misc_RNA (1)...(19): siRNA sense strand
ccagcaacgucaucugcaa

SEQ ID NO: 1605028 - RNA, 19 nt, Homo sapiens
  misc_RNA (1)...(19): siRNA sense strand
ugcugaaccucauacgaua

SEQ ID NO: 1605029 - RNA, 19 nt, Homo sapiens
  misc_RNA (1)...(19): siRNA sense strand
gccaagaagcgucucauca

SEQ ID NO: 1605030 - RNA, 19 nt, Homo sapiens
  misc_RNA (1)...(19): siRNA sense strand
ggucagggaagucaaagau

SEQ ID NO: 1605031 - RNA, 19 nt, Homo sapiens
  misc_RNA (1)...(19): siRNA sense strand
cagaagaggcgcaccagau

SEQ ID NO: 1605032 - RNA, 19 nt, Homo sapiens
  misc_RNA (1)...(19): siRNA sense strand
aaagauggacaaacagaga

SEQ ID NO: 1605033 - RNA, 19 nt, Homo sapiens
  misc_RNA (1)...(19): siRNA sense strand
caacgcuggucaaguaugc

SEQ ID NO: 1605034 - RNA, 19 nt, Homo sapiens
  misc_RNA (1)...(19): siRNA sense strand
accauggucucuauccuaa

SEQ ID NO: 1605035 - RNA, 19 nt, Homo sapiens
  misc_RNA (1)...(19): siRNA sense strand
gaagcugcccaucaccuau

SEQ ID NO: 1605036 - RNA, 19 nt, Homo sapiens
  misc_RNA (1)...(19): siRNA sense strand
uagaagauuuggacuuugc

SEQ ID NO: 1605037 - RNA, 19 nt, Homo sapiens
  misc_RNA (1)...(19): siRNA sense strand
ucaaagauggacaaacaga

SEQ ID NO: 1605038 - RNA, 19 nt, Homo sapiens
  misc_RNA (1)...(19): siRNA sense strand
gaaguaccagucaaagaag

SEQ ID NO: 1605039 - RNA, 19 nt, Homo sapiens
  misc_RNA (1)...(19): siRNA sense strand
aagaaaaccauccaacuua

SEQ ID NO: 1605040 - RNA, 19 nt, Homo sapiens
  misc_RNA (1)...(19): siRNA sense strand
uuaaagaggagccaucugu

SEQ ID NO: 1605041 - RNA, 19 nt, Homo sapiens
  misc_RNA (1)...(19): siRNA sense strand
uaacacccuucauggucaa

SEQ ID NO: 1605042 - RNA, 19 nt, Homo sapiens
  misc_RNA (1)...(19): siRNA sense strand
gauauuuggauccuucuuc

SEQ ID NO: 1605043 - RNA, 19 nt, Homo sapiens
  misc_RNA (1)...(19): siRNA sense strand
caccagcuaucaugaacau

SEQ ID NO: 1605044 - RNA, 19 nt, Homo sapiens
  misc_RNA (1)...(19): siRNA sense strand
gacgaagagcugaccauug

SEQ ID NO: 1605045 - RNA, 19 nt, Homo sapiens
  misc_RNA (1)...(19): siRNA sense strand
gagcuuggugugccacuug

SEQ ID NO: 1605046 - RNA, 19 nt, Homo sapiens
  misc_RNA (1)...(19): siRNA sense strand
gccaagaucgcaguuguug

SEQ ID NO: 1605047 - RNA, 19 nt, Homo sapiens
  misc_RNA (1)...(19): siRNA sense strand
uuaguggcuucaagaggua

SEQ ID NO: 1605048 - RNA, 19 nt, Homo sapiens
  misc_RNA (1)...(19): siRNA sense strand
ccacacccacgucuucuau

SEQ ID NO: 1605049 - RNA, 19 nt, Homo sapiens
  misc_RNA (1)...(19): siRNA sense strand
aagcagccgugcaccaaug

SEQ ID NO: 1605050 - RNA, 19 nt, Homo sapiens
  misc_RNA (1)...(19): siRNA sense strand
gaagggaaggguggauuca

SEQ ID NO: 1605051 - RNA, 19 nt, Homo sapiens
  misc_RNA (1)...(19): siRNA sense strand
acaagagcaucgcaaagca

SEQ ID NO: 1605052 - RNA, 19 nt, Homo sapiens
  misc_RNA (1)...(19): siRNA sense strand
ucaacaagagcaucgcaaa

SEQ ID NO: 1605053 - RNA, 19 nt, Homo sapiens
  misc_RNA (1)...(19): siRNA sense strand
ccugaugaaugaagagcaa

SEQ ID NO: 1605054 - RNA, 19 nt, Homo sapiens
  misc_RNA (1)...(19): siRNA sense strand
gggcggaaguaccagucaa

SEQ ID NO: 1605055 - RNA, 19 nt, Homo sapiens
  misc_RNA (1)...(19): siRNA sense strand
caaagaugcaucccugagu

SEQ ID NO: 1605056 - RNA, 19 nt, Homo sapiens
  misc_RNA (1)...(19): siRNA sense strand
ggucaacgcccuguucaca

SEQ ID NO: 1605057 - RNA, 19 nt, Homo sapiens
  misc_RNA (1)...(19): siRNA sense strand
ggacugcacaccagcuauc

SEQ ID NO: 1605058 - RNA, 19 nt, Homo sapiens
  misc_RNA (1)...(19): siRNA sense strand
cauaagagccaagcuugug

SEQ ID NO: 1605059 - RNA, 19 nt, Homo sapiens
  misc_RNA (1)...(19): siRNA sense strand
gagccaagcuuguguguaa

SEQ ID NO: 1605060 - RNA, 19 nt, Homo sapiens
  misc_RNA (1)...(19): siRNA sense strand
gaagaugggugcacaaaga

SEQ ID NO: 1605061 - RNA, 19 nt, Homo sapiens
  misc_RNA (1)...(19): siRNA sense strand
ggagggagaucaucaguga

SEQ ID NO: 1605062 - RNA, 19 nt, Homo sapiens
  misc_RNA (1)...(19): siRNA sense strand
gcaauaggauucacuacaa

SEQ ID NO: 1605063 - RNA, 19 nt, Homo sapiens
  misc_RNA (1)...(19): siRNA sense strand
ggucaaagauggacaaaca

SEQ ID NO: 1605064 - RNA, 19 nt, Homo sapiens
  misc_RNA (1)...(19): siRNA sense strand
ccucaacgcuggucaagua

SEQ ID NO: 1605065 - RNA, 19 nt, Homo sapiens
  misc_RNA (1)...(19): siRNA sense strand
gaacaacagcugauucuga

SEQ ID NO: 1605066 - RNA, 19 nt, Homo sapiens
  misc_RNA (1)...(19): siRNA sense strand
ggaaguaccagucaaagaa

SEQ ID NO: 1605067 - RNA, 19 nt, Homo sapiens
  misc_RNA (1)...(19): siRNA sense strand
acgaagagcugaccauuga

SEQ ID NO: 1605068 - RNA, 19 nt, Homo sapiens
  misc_RNA (1)...(19): siRNA sense strand
gaagaacggaggaaacaaa

SEQ ID NO: 1605069 - RNA, 19 nt, Homo sapiens
  misc_RNA (1)...(19): siRNA sense strand
gggauuaacaucagcaaua

SEQ ID NO: 1605070 - RNA, 19 nt, Homo sapiens
  misc_RNA (1)...(19): siRNA sense strand
gcuacuaucuuggauguuu

SEQ ID NO: 1605071 - RNA, 19 nt, Homo sapiens
  misc_RNA (1)...(19): siRNA sense strand
aagcagagcugacaagcaa

SEQ ID NO: 1605072 - RNA, 19 nt, Homo sapiens
  misc_RNA (1)...(19): siRNA sense strand
uggaagaccucuauuggaa

SEQ ID NO: 1605073 - RNA, 19 nt, Homo sapiens
  misc_RNA (1)...(19): siRNA sense strand
caagaagcgucucaucaug

SEQ ID NO: 1605074 - RNA, 19 nt, Homo sapiens
  misc_RNA (1)...(19): siRNA sense strand
gaauggaauuuacuguaug

SEQ ID NO: 1605075 - RNA, 19 nt, Homo sapiens
  misc_RNA (1)...(19): siRNA sense strand
gagcuacuaucuuggaugu

SEQ ID NO: 1605076 - RNA, 19 nt, Homo sapiens
  misc_RNA (1)...(19): siRNA sense strand
gaccaacgccaacguguuu

SEQ ID NO: 1605077 - RNA, 19 nt, Homo sapiens
  misc_RNA (1)...(19): siRNA sense strand
caagaucgcaguuguugaa

SEQ ID NO: 1605078 - RNA, 19 nt, Homo sapiens
  misc_RNA (1)...(19): siRNA sense strand
ggauuaacaucagcaauag

SEQ ID NO: 1605079 - RNA, 19 nt, Homo sapiens
  misc_RNA (1)...(19): siRNA sense strand
caaagaagaaguugaaucu

SEQ ID NO: 1605080 - RNA, 19 nt, Homo sapiens
  misc_RNA (1)...(19): siRNA sense strand
gccuauaucuucaggagaa

SEQ ID NO: 1605081 - RNA, 19 nt, Homo sapiens
  misc_RNA (1)...(19): siRNA sense strand
gaacagccaaggacagaga

SEQ ID NO: 1605082 - RNA, 19 nt, Homo sapiens
  misc_RNA (1)...(19): siRNA sense strand
gaggaugaauggaauuuac

SEQ ID NO: 1605083 - RNA, 19 nt, Homo sapiens
  misc_RNA (1)...(19): siRNA sense strand
gcauagccgugcuucucua

SEQ ID NO: 1605084 - RNA, 19 nt, Homo sapiens
  misc_RNA (1)...(19): siRNA sense strand
aaagaugcaucccugaguu

SEQ ID NO: 1605085 - RNA, 19 nt, Homo sapiens
  misc_RNA (1)...(19): siRNA sense strand
gcacugagccacauuugca

SEQ ID NO: 1605086 - RNA, 19 nt, Homo sapiens
  misc_RNA (1)...(19): siRNA sense strand
caaguuaacacccuucaug

SEQ ID NO: 1605087 - RNA, 19 nt, Homo sapiens
  misc_RNA (1)...(19): siRNA sense strand
gaagaggcgcaccagauga

SEQ ID NO: 1605088 - RNA, 19 nt, Homo sapiens
  misc_RNA (1)...(19): siRNA sense strand
gacagagagucaugguuga

SEQ ID NO: 1605089 - RNA, 19 nt, Homo sapiens
  misc_RNA (1)...(19): siRNA sense strand
gccauugacugccagcauu

SEQ ID NO: 1605090 - RNA, 19 nt, Homo sapiens
  misc_RNA (1)...(19): siRNA sense strand
agggaaggguggauucaua

SEQ ID NO: 1605091 - RNA, 19 nt, Homo sapiens
  misc_RNA (1)...(19): siRNA sense strand
ggucaaguaugcagagaag

SEQ ID NO: 1605092 - RNA, 19 nt, Homo sapiens
  misc_RNA (1)...(19): siRNA sense strand
aacaacagcugauucugaa

SEQ ID NO: 1605093 - RNA, 19 nt, Homo sapiens
  misc_RNA (1)...(19): siRNA sense strand
ccauccaacuuacacauga

SEQ ID NO: 1605094 - RNA, 19 nt, Homo sapiens
  misc_RNA (1)...(19): siRNA sense strand
cuucagaguugagucauuu

SEQ ID NO: 1605095 - RNA, 19 nt, Homo sapiens
  misc_RNA (1)...(19): siRNA sense strand
aaacaaaaccucgucauua

SEQ ID NO: 1605096 - RNA, 19 nt, Homo sapiens
  misc_RNA (1)...(19): siRNA sense strand
aaacagagauccgaaccau

SEQ ID NO: 1605097 - RNA, 19 nt, Homo sapiens
  misc_RNA (1)...(19): siRNA sense strand
ugugggagcuacuaucuug

SEQ ID NO: 1605098 - RNA, 19 nt, Homo sapiens
  misc_RNA (1)...(19): siRNA sense strand
gcacaccagcuaucaugaa

SEQ ID NO: 1605099 - RNA, 19 nt, Homo sapiens
  misc_RNA (1)...(19): siRNA sense strand
gaaggguggauucauaaga

SEQ ID NO: 1605100 - RNA, 19 nt, Homo sapiens
  misc_RNA (1)...(19): siRNA sense strand
aggauucacuacaacauuu

SEQ ID NO: 1605101 - RNA, 19 nt, Homo sapiens
  misc_RNA (1)...(19): siRNA sense strand
gcugacaagcaacgucuua

SEQ ID NO: 1605102 - RNA, 19 nt, Homo sapiens
  misc_RNA (1)...(19): siRNA sense strand
gggaaggguggauucauaa

SEQ ID NO: 1605103 - RNA, 19 nt, Homo sapiens
  misc_RNA (1)...(19): siRNA sense strand
aagaagaaguugaaucucu

SEQ ID NO: 1605104 - RNA, 19 nt, Homo sapiens
  misc_RNA (1)...(19): siRNA sense strand
gcaagaagcagaggacagu

SEQ ID NO: 1605105 - RNA, 19 nt, Homo sapiens
  misc_RNA (1)...(19): siRNA sense strand
ggacuuugcagaguacauu

SEQ ID NO: 1605106 - RNA, 19 nt, Homo sapiens
  misc_RNA (1)...(19): siRNA sense strand
gauacacagccaccacuaa

SEQ ID NO: 1605107 - RNA, 19 nt, Homo sapiens
  misc_RNA (1)...(19): siRNA sense strand
gaagcacugagccacauuu

SEQ ID NO: 1605108 - RNA, 19 nt, Homo sapiens
  misc_RNA (1)...(19): siRNA sense strand
aucgauaccugaugaauga

SEQ ID NO: 1605109 - RNA, 19 nt, Homo sapiens
  misc_RNA (1)...(19): siRNA sense strand
ugaagaagcugcccaucac

SEQ ID NO: 1605110 - RNA, 19 nt, Homo sapiens
  misc_RNA (1)...(19): siRNA sense strand
cauuagaggugacgcaaag

SEQ ID NO: 1605111 - RNA, 19 nt, Homo sapiens
  misc_RNA (1)...(19): siRNA sense strand
uaacaucagcaauaggauu

SEQ ID NO: 1605112 - RNA, 19 nt, Homo sapiens
  misc_RNA (1)...(19): siRNA sense strand
gauaccugaugaaugaaga

SEQ ID NO: 1605113 - RNA, 19 nt, Homo sapiens
  misc_RNA (1)...(19): siRNA sense strand
gaagagcugaccauugauc

SEQ ID NO: 1605114 - RNA, 19 nt, Homo sapiens
  misc_RNA (1)...(19): siRNA sense strand
acaaugccaucccuguuga

SEQ ID NO: 1605115 - RNA, 19 nt, Homo sapiens
  misc_RNA (1)...(19): siRNA sense strand
aacaaaaccucgucauuaa

SEQ ID NO: 1605116 - RNA, 19 nt, Homo sapiens
  misc_RNA (1)...(19): siRNA sense strand
gcaagcagccgugcaccaa

SEQ ID NO: 1605117 - RNA, 19 nt, Homo sapiens
  misc_RNA (1)...(19): siRNA sense strand
gugccuauuugguguaaga

SEQ ID NO: 1605118 - RNA, 19 nt, Homo sapiens
  misc_RNA (1)...(19): siRNA sense strand
agccuucgcuggccucuuu

SEQ ID NO: 1605119 - RNA, 19 nt, Homo sapiens
  misc_RNA (1)...(19): siRNA sense strand
gcacuucagaguugaguca

SEQ ID NO: 1605120 - RNA, 19 nt, Homo sapiens
  misc_RNA (1)...(19): siRNA sense strand
gaaacaaaaccucgucauu

SEQ ID NO: 1605121 - RNA, 19 nt, Homo sapiens
  misc_RNA (1)...(19): siRNA sense strand
gcacauagggcggaaguac

SEQ ID NO: 1605122 - RNA, 19 nt, Homo sapiens
  misc_RNA (1)...(19): siRNA sense strand
ugacaagcaacgucuuaaa

SEQ ID NO: 1605123 - RNA, 19 nt, Homo sapiens
  misc_RNA (1)...(19): siRNA sense strand
ccaagaagcgucucaucau

SEQ ID NO: 1605124 - RNA, 19 nt, Homo sapiens
  misc_RNA (1)...(19): siRNA sense strand
gagcagguuucuguaugug

SEQ ID NO: 1605125 - RNA, 19 nt, Homo sapiens
  misc_RNA (1)...(19): siRNA sense strand
ggaccaacgccaacguguu

SEQ ID NO: 1605126 - RNA, 19 nt, Homo sapiens
  misc_RNA (1)...(19): siRNA sense strand
guaagacucuagaaaacuu

SEQ ID NO: 1605127 - RNA, 19 nt, Homo sapiens
  misc_RNA (1)...(19): siRNA sense strand
ccagcaacgucaucugcaa

SEQ ID NO: 1605128 - RNA, 19 nt, Homo sapiens
  misc_RNA (1)...(19): siRNA sense strand
ugcugaaccucauacgaua

SEQ ID NO: 1605129 - RNA, 19 nt, Homo sapiens
  misc_RNA (1)...(19): siRNA sense strand
gccaagaagcgucucauca

SEQ ID NO: 1605130 - RNA, 19 nt, Homo sapiens
  misc_RNA (1)...(19): siRNA sense strand
ggucagggaagucaaagau

SEQ ID NO: 1605131 - RNA, 19 nt, Homo sapiens
  misc_RNA (1)...(19): siRNA sense strand
cagaagaggcgcaccagau

SEQ ID NO: 1605132 - RNA, 19 nt, Homo sapiens
  misc_RNA (1)...(19): siRNA sense strand
aaagauggacaaacagaga

SEQ ID NO: 1605133 - RNA, 19 nt, Homo sapiens
  misc_RNA (1)...(19): siRNA sense strand
caacgcuggucaaguaugc

SEQ ID NO: 1605134 - RNA, 19 nt, Homo sapiens
  misc_RNA (1)...(19): siRNA sense strand
accauggucucuauccuaa

SEQ ID NO: 1605135 - RNA, 19 nt, Homo sapiens
  misc_RNA (1)...(19): siRNA sense strand
gaagcugcccaucaccuau

SEQ ID NO: 1605136 - RNA, 19 nt, Homo sapiens
  misc_RNA (1)...(19): siRNA sense strand
uagaagauuuggacuuugc

SEQ ID NO: 1605137 - RNA, 19 nt, Homo sapiens
  misc_RNA (1)...(19): siRNA sense strand
ucaaagauggacaaacaga

SEQ ID NO: 1605138 - RNA, 19 nt, Homo sapiens
  misc_RNA (1)...(19): siRNA sense strand
gaaguaccagucaaagaag

SEQ ID NO: 1605139 - RNA, 19 nt, Homo sapiens
  misc_RNA (1)...(19): siRNA sense strand
aagaaaaccauccaacuua

SEQ ID NO: 1605140 - RNA, 19 nt, Homo sapiens
  misc_RNA (1)...(19): siRNA sense strand
uuaaagaggagccaucugu

SEQ ID NO: 1605141 - RNA, 19 nt, Homo sapiens
  misc_RNA (1)...(19): siRNA sense strand
uaacacccuucauggucaa

SEQ ID NO: 1605142 - RNA, 19 nt, Homo sapiens
  misc_RNA (1)...(19): siRNA sense strand
gauauuuggauccuucuuc

SEQ ID NO: 1605143 - RNA, 19 nt, Homo sapiens
  misc_RNA (1)...(19): siRNA sense strand
caccagcuaucaugaacau

SEQ ID NO: 1605144 - RNA, 19 nt, Homo sapiens
  misc_RNA (1)...(19): siRNA sense strand
gacgaagagcugaccauug

SEQ ID NO: 1605145 - RNA, 19 nt, Homo sapiens
  misc_RNA (1)...(19): siRNA sense strand
gagcuuggugugccacuug

SEQ ID NO: 1605146 - RNA, 19 nt, Homo sapiens
  misc_RNA (1)...(19): siRNA sense strand
gccaagaucgcaguuguug

SEQ ID NO: 1605147 - RNA, 19 nt, Homo sapiens
  misc_RNA (1)...(19): siRNA sense strand
uuaguggcuucaagaggua

SEQ ID NO: 1605148 - RNA, 19 nt, Homo sapiens
  misc_RNA (1)...(19): siRNA sense strand
ccacacccacgucuucuau

SEQ ID NO: 1605149 - RNA, 19 nt, Homo sapiens
  misc_RNA (1)...(19): siRNA sense strand
aagcagccgugcaccaaug

SEQ ID NO: 1605150 - RNA, 19 nt, Homo sapiens
  misc_RNA (1)...(19): siRNA sense strand
gaagggaaggguggauuca

SEQ ID NO: 1605151 - RNA, 19 nt, Homo sapiens
  misc_RNA (1)...(19): siRNA sense strand
acaagagcaucgcaaagca

SEQ ID NO: 1605152 - RNA, 19 nt, Homo sapiens
  misc_RNA (1)...(19): siRNA sense strand
ucaacaagagcaucgcaaa

SEQ ID NO: 1605153 - RNA, 19 nt, Homo sapiens
  misc_RNA (1)...(19): siRNA sense strand
ccugaugaaugaagagcaa

SEQ ID NO: 1605154 - RNA, 19 nt, Homo sapiens
  misc_RNA (1)...(19): siRNA sense strand
gggcggaaguaccagucaa

SEQ ID NO: 1605155 - RNA, 19 nt, Homo sapiens
  misc_RNA (1)...(19): siRNA sense strand
caaagaugcaucccugagu

SEQ ID NO: 1605156 - RNA, 19 nt, Homo sapiens
  misc_RNA (1)...(19): siRNA sense strand
ggucaacgcccuguucaca

SEQ ID NO: 1605157 - RNA, 19 nt, Homo sapiens
  misc_RNA (1)...(19): siRNA sense strand
ggacugcacaccagcuauc

SEQ ID NO: 1605158 - RNA, 19 nt, Homo sapiens
  misc_RNA (1)...(19): siRNA sense strand
cauaagagccaagcuugug

SEQ ID NO: 1605159 - RNA, 19 nt, Homo sapiens
  misc_RNA (1)...(19): siRNA sense strand
agaagaggcugaagaagga

SEQ ID NO: 1605160 - RNA, 19 nt, Homo sapiens
  misc_RNA (1)...(19): siRNA sense strand
gcagggaacggacccaguu

SEQ ID NO: 1605161 - RNA, 19 nt, Homo sapiens
  misc_RNA (1)...(19): siRNA sense strand
gggagagcguuuacugcaa

SEQ ID NO: 1605162 - RNA, 19 nt, Homo sapiens
  misc_RNA (1)...(19): siRNA sense strand
ggacccaguucugaccuau

SEQ ID NO: 1605163 - RNA, 19 nt, Homo sapiens
  misc_RNA (1)...(19): siRNA sense strand
gcacagcaagugucucaag

SEQ ID NO: 1605164 - RNA, 19 nt, Homo sapiens
  misc_RNA (1)...(19): siRNA sense strand
gugcaaggcggacuacgaa

SEQ ID NO: 1605165 - RNA, 19 nt, Homo sapiens
  misc_RNA (1)...(19): siRNA sense strand
cugaagagcgcuuacaaca

SEQ ID NO: 1605166 - RNA, 19 nt, Homo sapiens
  misc_RNA (1)...(19): siRNA sense strand
gcaaggcggacuacgaaac

SEQ ID NO: 1605167 - RNA, 19 nt, Homo sapiens
  misc_RNA (1)...(19): siRNA sense strand
ggacaaggacagcguucag

SEQ ID NO: 1605168 - RNA, 19 nt, Homo sapiens
  misc_RNA (1)...(19): siRNA sense strand
gcuccaagucggacaagga

SEQ ID NO: 1605169 - RNA, 19 nt, Homo sapiens
  misc_RNA (1)...(19): siRNA sense strand
gggcaguauuuccgcaaca

SEQ ID NO: 1605170 - RNA, 19 nt, Homo sapiens
  misc_RNA (1)...(19): siRNA sense strand
gguagaccacgcucaguuc

SEQ ID NO: 1605171 - RNA, 19 nt, Homo sapiens
  misc_RNA (1)...(19): siRNA sense strand
uuacugcaaggacgacuuu

SEQ ID NO: 1605172 - RNA, 19 nt, Homo sapiens
  misc_RNA (1)...(19): siRNA sense strand
caguauuuccgcaacauga

SEQ ID NO: 1605173 - RNA, 19 nt, Homo sapiens
  misc_RNA (1)...(19): siRNA sense strand
gcgacgaguucuaccucau

SEQ ID NO: 1605174 - RNA, 19 nt, Homo sapiens
  misc_RNA (1)...(19): siRNA sense strand
cacagcaagugucucaagu

SEQ ID NO: 1605175 - RNA, 19 nt, Homo sapiens
  misc_RNA (1)...(19): siRNA sense strand
cgacgaguucuaccucaug

SEQ ID NO: 1605176 - RNA, 19 nt, Homo sapiens
  misc_RNA (1)...(19): siRNA sense strand
ccaaggagaagaggcugaa

SEQ ID NO: 1605177 - RNA, 19 nt, Homo sapiens
  misc_RNA (1)...(19): siRNA sense strand
aggagaagaggcugaagaa

SEQ ID NO: 1605178 - RNA, 19 nt, Homo sapiens
  misc_RNA (1)...(19): siRNA sense strand
gcaguauuuccgcaacaug

SEQ ID NO: 1605179 - RNA, 19 nt, Homo sapiens
  misc_RNA (1)...(19): siRNA sense strand
uggcaggcccagagcagua

SEQ ID NO: 1605180 - RNA, 19 nt, Homo sapiens
  misc_RNA (1)...(19): siRNA sense strand
uguaccaccugcacugcuu

SEQ ID NO: 1605181 - RNA, 19 nt, Homo sapiens
  misc_RNA (1)...(19): siRNA sense strand
ccacgggcgacgaguucua

SEQ ID NO: 1605182 - RNA, 19 nt, Homo sapiens
  misc_RNA (1)...(19): siRNA sense strand
acagccggcucgugugcaa

SEQ ID NO: 1605183 - RNA, 19 nt, Homo sapiens
  misc_RNA (1)...(19): siRNA sense strand
agaagaggcugaagaagga

SEQ ID NO: 1605184 - RNA, 19 nt, Homo sapiens
  misc_RNA (1)...(19): siRNA sense strand
gcagggaacggacccaguu

SEQ ID NO: 1605185 - RNA, 19 nt, Homo sapiens
  misc_RNA (1)...(19): siRNA sense strand
gggagagcguuuacugcaa

SEQ ID NO: 1605186 - RNA, 19 nt, Homo sapiens
  misc_RNA (1)...(19): siRNA sense strand
ggacccaguucugaccuau

SEQ ID NO: 1605187 - RNA, 19 nt, Homo sapiens
  misc_RNA (1)...(19): siRNA sense strand
gcacagcaagugucucaag

SEQ ID NO: 1605188 - RNA, 19 nt, Homo sapiens
  misc_RNA (1)...(19): siRNA sense strand
gugcaaggcggacuacgaa

SEQ ID NO: 1605189 - RNA, 19 nt, Homo sapiens
  misc_RNA (1)...(19): siRNA sense strand
cugaagagcgcuuacaaca

SEQ ID NO: 1605190 - RNA, 19 nt, Homo sapiens
  misc_RNA (1)...(19): siRNA sense strand
gcaaggcggacuacgaaac

SEQ ID NO: 1605191 - RNA, 19 nt, Homo sapiens
  misc_RNA (1)...(19): siRNA sense strand
ggacaaggacagcguucag

SEQ ID NO: 1605192 - RNA, 19 nt, Homo sapiens
  misc_RNA (1)...(19): siRNA sense strand
gcuccaagucggacaagga

SEQ ID NO: 1605193 - RNA, 19 nt, Homo sapiens
  misc_RNA (1)...(19): siRNA sense strand
gggcaguauuuccgcaaca

SEQ ID NO: 1605194 - RNA, 19 nt, Homo sapiens
  misc_RNA (1)...(19): siRNA sense strand
gguagaccacgcucaguuc

SEQ ID NO: 1605195 - RNA, 19 nt, Homo sapiens
  misc_RNA (1)...(19): siRNA sense strand
uuacugcaaggacgacuuu

SEQ ID NO: 1605196 - RNA, 19 nt, Homo sapiens
  misc_RNA (1)...(19): siRNA sense strand
caguauuuccgcaacauga

SEQ ID NO: 1605197 - RNA, 19 nt, Homo sapiens
  misc_RNA (1)...(19): siRNA sense strand
gcgacgaguucuaccucau

SEQ ID NO: 1605198 - RNA, 19 nt, Homo sapiens
  misc_RNA (1)...(19): siRNA sense strand
cacagcaagugucucaagu

SEQ ID NO: 1605199 - RNA, 19 nt, Homo sapiens
  misc_RNA (1)...(19): siRNA sense strand
cgacgaguucuaccucaug

SEQ ID NO: 1605200 - RNA, 19 nt, Homo sapiens
  misc_RNA (1)...(19): siRNA sense strand
ccaaggagaagaggcugaa

SEQ ID NO: 1605201 - RNA, 19 nt, Homo sapiens
  misc_RNA (1)...(19): siRNA sense strand
aggagaagaggcugaagaa

SEQ ID NO: 1605202 - RNA, 19 nt, Homo sapiens
  misc_RNA (1)...(19): siRNA sense strand
gcaguauuuccgcaacaug

SEQ ID NO: 1605203 - RNA, 19 nt, Homo sapiens
  misc_RNA (1)...(19): siRNA sense strand
uggcaggcccagagcagua

SEQ ID NO: 1605204 - RNA, 19 nt, Homo sapiens
  misc_RNA (1)...(19): siRNA sense strand
uguaccaccugcacugcuu

SEQ ID NO: 1605205 - RNA, 19 nt, Homo sapiens
  misc_RNA (1)...(19): siRNA sense strand
ccacgggcgacgaguucua

SEQ ID NO: 1605206 - RNA, 19 nt, Homo sapiens
  misc_RNA (1)...(19): siRNA sense strand
acagccggcucgugugcaa

SEQ ID NO: 1605207 - RNA, 19 nt, Homo sapiens
  misc_RNA (1)...(19): siRNA sense strand
ugaacaagcuggaauaaua

SEQ ID NO: 1605208 - RNA, 19 nt, Homo sapiens
  misc_RNA (1)...(19): siRNA sense strand
agaagaagcuggucaguua

SEQ ID NO: 1605209 - RNA, 19 nt, Homo sapiens
  misc_RNA (1)...(19): siRNA sense strand
ggaggaaguuggccgaaua

SEQ ID NO: 1605210 - RNA, 19 nt, Homo sapiens
  misc_RNA (1)...(19): siRNA sense strand
ggacagauguggagccaaa

SEQ ID NO: 1605211 - RNA, 19 nt, Homo sapiens
  misc_RNA (1)...(19): siRNA sense strand
ugacagagcugaggaagaa

SEQ ID NO: 1605212 - RNA, 19 nt, Homo sapiens
  misc_RNA (1)...(19): siRNA sense strand
gaacaugaccugcuagaug

SEQ ID NO: 1605213 - RNA, 19 nt, Homo sapiens
  misc_RNA (1)...(19): siRNA sense strand
ccaaaguucugucauuaaa

SEQ ID NO: 1605214 - RNA, 19 nt, Homo sapiens
  misc_RNA (1)...(19): siRNA sense strand
ggaaguaacacucaacaaa

SEQ ID NO: 1605215 - RNA, 19 nt, Homo sapiens
  misc_RNA (1)...(19): siRNA sense strand
gagaugaaauucuugcuau

SEQ ID NO: 1605216 - RNA, 19 nt, Homo sapiens
  misc_RNA (1)...(19): siRNA sense strand
guaaauggcuuggaacaug

SEQ ID NO: 1605217 - RNA, 19 nt, Homo sapiens
  misc_RNA (1)...(19): siRNA sense strand
ggccuuggcuuuaguauug

SEQ ID NO: 1605218 - RNA, 19 nt, Homo sapiens
  misc_RNA (1)...(19): siRNA sense strand
gcagaggacggaagacuua

SEQ ID NO: 1605219 - RNA, 19 nt, Homo sapiens
  misc_RNA (1)...(19): siRNA sense strand
gaacggcccugacccugaa

SEQ ID NO: 1605220 - RNA, 19 nt, Homo sapiens
  misc_RNA (1)...(19): siRNA sense strand
gcauaggaauucuucauga

SEQ ID NO: 1605221 - RNA, 19 nt, Homo sapiens
  misc_RNA (1)...(19): siRNA sense strand
gagacgagcugccuaguca

SEQ ID NO: 1605222 - RNA, 19 nt, Homo sapiens
  misc_RNA (1)...(19): siRNA sense strand
agaaggaccugugcaguua

SEQ ID NO: 1605223 - RNA, 19 nt, Homo sapiens
  misc_RNA (1)...(19): siRNA sense strand
gagcauagaauuccaaaga

SEQ ID NO: 1605224 - RNA, 19 nt, Homo sapiens
  misc_RNA (1)...(19): siRNA sense strand
gaaaucacuugguccuuug

SEQ ID NO: 1605225 - RNA, 19 nt, Homo sapiens
  misc_RNA (1)...(19): siRNA sense strand
gaugaaauccuagauguaa

SEQ ID NO: 1605226 - RNA, 19 nt, Homo sapiens
  misc_RNA (1)...(19): siRNA sense strand
ggacagggcauauauagug

SEQ ID NO: 1605227 - RNA, 19 nt, Homo sapiens
  misc_RNA (1)...(19): siRNA sense strand
gaugggcccuuggucauua

SEQ ID NO: 1605228 - RNA, 19 nt, Homo sapiens
  misc_RNA (1)...(19): siRNA sense strand
uuugaugccuggaauauua

SEQ ID NO: 1605229 - RNA, 19 nt, Homo sapiens
  misc_RNA (1)...(19): siRNA sense strand
aauagaagcuggagaugaa

SEQ ID NO: 1605230 - RNA, 19 nt, Homo sapiens
  misc_RNA (1)...(19): siRNA sense strand
ccugugcaguuauuaauua

SEQ ID NO: 1605231 - RNA, 19 nt, Homo sapiens
  misc_RNA (1)...(19): siRNA sense strand
gaucaaauccuggaaguga

SEQ ID NO: 1605232 - RNA, 19 nt, Homo sapiens
  misc_RNA (1)...(19): siRNA sense strand
aaucugaacucucccagua

SEQ ID NO: 1605233 - RNA, 19 nt, Homo sapiens
  misc_RNA (1)...(19): siRNA sense strand
caacaaagagccaagaguu

SEQ ID NO: 1605234 - RNA, 19 nt, Homo sapiens
  misc_RNA (1)...(19): siRNA sense strand
gaacuaaagaaaucacuug

SEQ ID NO: 1605235 - RNA, 19 nt, Homo sapiens
  misc_RNA (1)...(19): siRNA sense strand
acgaaacccugaaucaaua

SEQ ID NO: 1605236 - RNA, 19 nt, Homo sapiens
  misc_RNA (1)...(19): siRNA sense strand
gcugugagguguccaguga

SEQ ID NO: 1605237 - RNA, 19 nt, Homo sapiens
  misc_RNA (1)...(19): siRNA sense strand
ccacauggcuguccucucu

SEQ ID NO: 1605238 - RNA, 19 nt, Homo sapiens
  misc_RNA (1)...(19): siRNA sense strand
auaaggaccugucuaagaa

SEQ ID NO: 1605239 - RNA, 19 nt, Homo sapiens
  misc_RNA (1)...(19): siRNA sense strand
ggaagaguuugacagagaa

SEQ ID NO: 1605240 - RNA, 19 nt, Homo sapiens
  misc_RNA (1)...(19): siRNA sense strand
cggaguggauuauuuguuu

SEQ ID NO: 1605241 - RNA, 19 nt, Homo sapiens
  misc_RNA (1)...(19): siRNA sense strand
gaaguuggccgaauaugga

SEQ ID NO: 1605242 - RNA, 19 nt, Homo sapiens
  misc_RNA (1)...(19): siRNA sense strand
auaaagggcuugacauuuc

SEQ ID NO: 1605243 - RNA, 19 nt, Homo sapiens
  misc_RNA (1)...(19): siRNA sense strand
ggaauauuaugaagucugu

SEQ ID NO: 1605244 - RNA, 19 nt, Homo sapiens
  misc_RNA (1)...(19): siRNA sense strand
ccacaucucugaaagucaa

SEQ ID NO: 1605245 - RNA, 19 nt, Homo sapiens
  misc_RNA (1)...(19): siRNA sense strand
gaagacagcaccucccuau

SEQ ID NO: 1605246 - RNA, 19 nt, Homo sapiens
  misc_RNA (1)...(19): siRNA sense strand
caauuccucuccuggcuua

SEQ ID NO: 1605247 - RNA, 19 nt, Homo sapiens
  misc_RNA (1)...(19): siRNA sense strand
ggacggaagacuuaaagaa

SEQ ID NO: 1605248 - RNA, 19 nt, Homo sapiens
  misc_RNA (1)...(19): siRNA sense strand
gggcauauauaguguaaag

SEQ ID NO: 1605249 - RNA, 19 nt, Homo sapiens
  misc_RNA (1)...(19): siRNA sense strand
gaaaugcuucugacuaaug

SEQ ID NO: 1605250 - RNA, 19 nt, Homo sapiens
  misc_RNA (1)...(19): siRNA sense strand
uaaauggcuuggaacauga

SEQ ID NO: 1605251 - RNA, 19 nt, Homo sapiens
  misc_RNA (1)...(19): siRNA sense strand
gcagauguuugcuucauag

SEQ ID NO: 1605252 - RNA, 19 nt, Homo sapiens
  misc_RNA (1)...(19): siRNA sense strand
gaaggaacaaccucuaaug

SEQ ID NO: 1605253 - RNA, 19 nt, Homo sapiens
  misc_RNA (1)...(19): siRNA sense strand
agaaaucacuugguccuuu

SEQ ID NO: 1605254 - RNA, 19 nt, Homo sapiens
  misc_RNA (1)...(19): siRNA sense strand
gcauagaauuccaaagaca

SEQ ID NO: 1605255 - RNA, 19 nt, Homo sapiens
  misc_RNA (1)...(19): siRNA sense strand
gaacaagcuggaauaauag

SEQ ID NO: 1605256 - RNA, 19 nt, Homo sapiens
  misc_RNA (1)...(19): siRNA sense strand
ggaggaccaucucuacuuc

SEQ ID NO: 1605257 - RNA, 19 nt, Homo sapiens
  misc_RNA (1)...(19): siRNA sense strand
gaagaaaccacagaaguca

SEQ ID NO: 1605258 - RNA, 19 nt, Homo sapiens
  misc_RNA (1)...(19): siRNA sense strand
gaacugucaggaucaagua

SEQ ID NO: 1605259 - RNA, 19 nt, Homo sapiens
  misc_RNA (1)...(19): siRNA sense strand
uccagaagcugcaggagua

SEQ ID NO: 1605260 - RNA, 19 nt, Homo sapiens
  misc_RNA (1)...(19): siRNA sense strand
acaaagcccacuccacuua

SEQ ID NO: 1605261 - RNA, 19 nt, Homo sapiens
  misc_RNA (1)...(19): siRNA sense strand
gaaagcauaggaauucuuc

SEQ ID NO: 1605262 - RNA, 19 nt, Homo sapiens
  misc_RNA (1)...(19): siRNA sense strand
gcacuuugaugccuggaau

SEQ ID NO: 1605263 - RNA, 19 nt, Homo sapiens
  misc_RNA (1)...(19): siRNA sense strand
gaacaaaccagcugaaaau

SEQ ID NO: 1605264 - RNA, 19 nt, Homo sapiens
  misc_RNA (1)...(19): siRNA sense strand
caucaucacucuuggagau

SEQ ID NO: 1605265 - RNA, 19 nt, Homo sapiens
  misc_RNA (1)...(19): siRNA sense strand
gcacuuaucaggagagcaa

SEQ ID NO: 1605266 - RNA, 19 nt, Homo sapiens
  misc_RNA (1)...(19): siRNA sense strand
gaaguaacacucaacaaag

SEQ ID NO: 1605267 - RNA, 19 nt, Homo sapiens
  misc_RNA (1)...(19): siRNA sense strand
caauaaagggcuugacauu

SEQ ID NO: 1605268 - RNA, 19 nt, Homo sapiens
  misc_RNA (1)...(19): siRNA sense strand
caagaccucuguagacaca

SEQ ID NO: 1605269 - RNA, 19 nt, Homo sapiens
  misc_RNA (1)...(19): siRNA sense strand
aggcacagcugcacaaaga

SEQ ID NO: 1605270 - RNA, 19 nt, Homo sapiens
  misc_RNA (1)...(19): siRNA sense strand
gagaaggaacaaccucuaa

SEQ ID NO: 1605271 - RNA, 19 nt, Homo sapiens
  misc_RNA (1)...(19): siRNA sense strand
gacauaagcacuucacaga

SEQ ID NO: 1605272 - RNA, 19 nt, Homo sapiens
  misc_RNA (1)...(19): siRNA sense strand
gcaacuacucuagaaauuu

SEQ ID NO: 1605273 - RNA, 19 nt, Homo sapiens
  misc_RNA (1)...(19): siRNA sense strand
gaagucuacccgcuccuua

SEQ ID NO: 1605274 - RNA, 19 nt, Homo sapiens
  misc_RNA (1)...(19): siRNA sense strand
ucagugggaucgaaaucua

SEQ ID NO: 1605275 - RNA, 19 nt, Homo sapiens
  misc_RNA (1)...(19): siRNA sense strand
gaacuuugcuguggaugag

SEQ ID NO: 1605276 - RNA, 19 nt, Homo sapiens
  misc_RNA (1)...(19): siRNA sense strand
gagaaacaccuaccuugga

SEQ ID NO: 1605277 - RNA, 19 nt, Homo sapiens
  misc_RNA (1)...(19): siRNA sense strand
gauguuugcuucauagucu

SEQ ID NO: 1605278 - RNA, 19 nt, Homo sapiens
  misc_RNA (1)...(19): siRNA sense strand
aacaugaccugcuagauga

SEQ ID NO: 1605279 - RNA, 19 nt, Homo sapiens
  misc_RNA (1)...(19): siRNA sense strand
cagccaaaguucugucauu

SEQ ID NO: 1605280 - RNA, 19 nt, Homo sapiens
  misc_RNA (1)...(19): siRNA sense strand
ccuggaagcugguggaaga

SEQ ID NO: 1605281 - RNA, 19 nt, Homo sapiens
  misc_RNA (1)...(19): siRNA sense strand
ggaaaacacuggugagcaa

SEQ ID NO: 1605282 - RNA, 19 nt, Homo sapiens
  misc_RNA (1)...(19): siRNA sense strand
gaagaguccggcagaaaug

SEQ ID NO: 1605283 - RNA, 19 nt, Homo sapiens
  misc_RNA (1)...(19): siRNA sense strand
aggaacagauugagauuug

SEQ ID NO: 1605284 - RNA, 19 nt, Homo sapiens
  misc_RNA (1)...(19): siRNA sense strand
gaagaggaacagauugaga

SEQ ID NO: 1605285 - RNA, 19 nt, Homo sapiens
  misc_RNA (1)...(19): siRNA sense strand
aaagcccacuccacuuaua

SEQ ID NO: 1605286 - RNA, 19 nt, Homo sapiens
  misc_RNA (1)...(19): siRNA sense strand
ggagaugaaauucuugcua

SEQ ID NO: 1605287 - RNA, 19 nt, Homo sapiens
  misc_RNA (1)...(19): siRNA sense strand
ggagaaguguggcuguaca

SEQ ID NO: 1605288 - RNA, 19 nt, Homo sapiens
  misc_RNA (1)...(19): siRNA sense strand
gaaagcacaaucagagaau

SEQ ID NO: 1605289 - RNA, 19 nt, Homo sapiens
  misc_RNA (1)...(19): siRNA sense strand
gaagaagcuggucaguuaa

SEQ ID NO: 1605290 - RNA, 19 nt, Homo sapiens
  misc_RNA (1)...(19): siRNA sense strand
ggccugguuuaaagaaaua

SEQ ID NO: 1605291 - RNA, 19 nt, Homo sapiens
  misc_RNA (1)...(19): siRNA sense strand
ccaggccacuucugucaaa

SEQ ID NO: 1605292 - RNA, 19 nt, Homo sapiens
  misc_RNA (1)...(19): siRNA sense strand
uaaagggcuugacauuuca

SEQ ID NO: 1605293 - RNA, 19 nt, Homo sapiens
  misc_RNA (1)...(19): siRNA sense strand
gcagaaucauccacaaguc

SEQ ID NO: 1605294 - RNA, 19 nt, Homo sapiens
  misc_RNA (1)...(19): siRNA sense strand
gacgaaacccugaaucaau

SEQ ID NO: 1605295 - RNA, 19 nt, Homo sapiens
  misc_RNA (1)...(19): siRNA sense strand
caugguaaauggcuuggaa

SEQ ID NO: 1605296 - RNA, 19 nt, Homo sapiens
  misc_RNA (1)...(19): siRNA sense strand
gagcaacuacucuagaaau

SEQ ID NO: 1605297 - RNA, 19 nt, Homo sapiens
  misc_RNA (1)...(19): siRNA sense strand
caauuaaucccgacaaaca

SEQ ID NO: 1605298 - RNA, 19 nt, Homo sapiens
  misc_RNA (1)...(19): siRNA sense strand
gcagcaaggucuccgucuu

SEQ ID NO: 1605299 - RNA, 19 nt, Homo sapiens
  misc_RNA (1)...(19): siRNA sense strand
ugacggacauugacagcuu

SEQ ID NO: 1605300 - RNA, 19 nt, Homo sapiens
  misc_RNA (1)...(19): siRNA sense strand
cauaagcacuucacagaac

SEQ ID NO: 1605301 - RNA, 19 nt, Homo sapiens
  misc_RNA (1)...(19): siRNA sense strand
ggaauguccugaagguucu

SEQ ID NO: 1605302 - RNA, 19 nt, Homo sapiens
  misc_RNA (1)...(19): siRNA sense strand
aaguaacacucaacaaaga

SEQ ID NO: 1605303 - RNA, 19 nt, Homo sapiens
  misc_RNA (1)...(19): siRNA sense strand
aaacugagcuggagaucac

SEQ ID NO: 1605304 - RNA, 19 nt, Homo sapiens
  misc_RNA (1)...(19): siRNA sense strand
gagcaugccugaccuugac

SEQ ID NO: 1605305 - RNA, 19 nt, Homo sapiens
  misc_RNA (1)...(19): siRNA sense strand
gcacacauuugaggagcaa

SEQ ID NO: 1605306 - RNA, 19 nt, Homo sapiens
  misc_RNA (1)...(19): siRNA sense strand
caucauggccugguuuaaa

SEQ ID NO: 1605307 - RNA, 19 nt, Homo sapiens
  misc_RNA (1)...(19): siRNA sense strand
ugaacaagcuggaauaaua

SEQ ID NO: 1605308 - RNA, 19 nt, Homo sapiens
  misc_RNA (1)...(19): siRNA sense strand
agaagaagcuggucaguua

SEQ ID NO: 1605309 - RNA, 19 nt, Homo sapiens
  misc_RNA (1)...(19): siRNA sense strand
ggaggaaguuggccgaaua

SEQ ID NO: 1605310 - RNA, 19 nt, Homo sapiens
  misc_RNA (1)...(19): siRNA sense strand
ggacagauguggagccaaa

SEQ ID NO: 1605311 - RNA, 19 nt, Homo sapiens
  misc_RNA (1)...(19): siRNA sense strand
ugacagagcugaggaagaa

SEQ ID NO: 1605312 - RNA, 19 nt, Homo sapiens
  misc_RNA (1)...(19): siRNA sense strand
gaacaugaccugcuagaug

SEQ ID NO: 1605313 - RNA, 19 nt, Homo sapiens
  misc_RNA (1)...(19): siRNA sense strand
ccaaaguucugucauuaaa

SEQ ID NO: 1605314 - RNA, 19 nt, Homo sapiens
  misc_RNA (1)...(19): siRNA sense strand
ggaaguaacacucaacaaa

SEQ ID NO: 1605315 - RNA, 19 nt, Homo sapiens
  misc_RNA (1)...(19): siRNA sense strand
gagaugaaauucuugcuau

SEQ ID NO: 1605316 - RNA, 19 nt, Homo sapiens
  misc_RNA (1)...(19): siRNA sense strand
guaaauggcuuggaacaug

SEQ ID NO: 1605317 - RNA, 19 nt, Homo sapiens
  misc_RNA (1)...(19): siRNA sense strand
ggccuuggcuuuaguauug

SEQ ID NO: 1605318 - RNA, 19 nt, Homo sapiens
  misc_RNA (1)...(19): siRNA sense strand
gcagaggacggaagacuua

SEQ ID NO: 1605319 - RNA, 19 nt, Homo sapiens
  misc_RNA (1)...(19): siRNA sense strand
gaacggcccugacccugaa

SEQ ID NO: 1605320 - RNA, 19 nt, Homo sapiens
  misc_RNA (1)...(19): siRNA sense strand
gcauaggaauucuucauga

SEQ ID NO: 1605321 - RNA, 19 nt, Homo sapiens
  misc_RNA (1)...(19): siRNA sense strand
gagacgagcugccuaguca

SEQ ID NO: 1605322 - RNA, 19 nt, Homo sapiens
  misc_RNA (1)...(19): siRNA sense strand
agaaggaccugugcaguua

SEQ ID NO: 1605323 - RNA, 19 nt, Homo sapiens
  misc_RNA (1)...(19): siRNA sense strand
gagcauagaauuccaaaga

SEQ ID NO: 1605324 - RNA, 19 nt, Homo sapiens
  misc_RNA (1)...(19): siRNA sense strand
gaaaucacuugguccuuug

SEQ ID NO: 1605325 - RNA, 19 nt, Homo sapiens
  misc_RNA (1)...(19): siRNA sense strand
gaugaaauccuagauguaa

SEQ ID NO: 1605326 - RNA, 19 nt, Homo sapiens
  misc_RNA (1)...(19): siRNA sense strand
ggacagggcauauauagug

SEQ ID NO: 1605327 - RNA, 19 nt, Homo sapiens
  misc_RNA (1)...(19): siRNA sense strand
gaugggcccuuggucauua

SEQ ID NO: 1605328 - RNA, 19 nt, Homo sapiens
  misc_RNA (1)...(19): siRNA sense strand
uuugaugccuggaauauua

SEQ ID NO: 1605329 - RNA, 19 nt, Homo sapiens
  misc_RNA (1)...(19): siRNA sense strand
aauagaagcuggagaugaa

SEQ ID NO: 1605330 - RNA, 19 nt, Homo sapiens
  misc_RNA (1)...(19): siRNA sense strand
ccugugcaguuauuaauua

SEQ ID NO: 1605331 - RNA, 19 nt, Homo sapiens
  misc_RNA (1)...(19): siRNA sense strand
gaucaaauccuggaaguga

SEQ ID NO: 1605332 - RNA, 19 nt, Homo sapiens
  misc_RNA (1)...(19): siRNA sense strand
aaucugaacucucccagua

SEQ ID NO: 1605333 - RNA, 19 nt, Homo sapiens
  misc_RNA (1)...(19): siRNA sense strand
caacaaagagccaagaguu

SEQ ID NO: 1605334 - RNA, 19 nt, Homo sapiens
  misc_RNA (1)...(19): siRNA sense strand
gaacuaaagaaaucacuug

SEQ ID NO: 1605335 - RNA, 19 nt, Homo sapiens
  misc_RNA (1)...(19): siRNA sense strand
acgaaacccugaaucaaua

SEQ ID NO: 1605336 - RNA, 19 nt, Homo sapiens
  misc_RNA (1)...(19): siRNA sense strand
gcugugagguguccaguga

SEQ ID NO: 1605337 - RNA, 19 nt, Homo sapiens
  misc_RNA (1)...(19): siRNA sense strand
ccacauggcuguccucucu

SEQ ID NO: 1605338 - RNA, 19 nt, Homo sapiens
  misc_RNA (1)...(19): siRNA sense strand
auaaggaccugucuaagaa

SEQ ID NO: 1605339 - RNA, 19 nt, Homo sapiens
  misc_RNA (1)...(19): siRNA sense strand
ggaagaguuugacagagaa

SEQ ID NO: 1605340 - RNA, 19 nt, Homo sapiens
  misc_RNA (1)...(19): siRNA sense strand
cggaguggauuauuuguuu

SEQ ID NO: 1605341 - RNA, 19 nt, Homo sapiens
  misc_RNA (1)...(19): siRNA sense strand
gaaguuggccgaauaugga

SEQ ID NO: 1605342 - RNA, 19 nt, Homo sapiens
  misc_RNA (1)...(19): siRNA sense strand
auaaagggcuugacauuuc

SEQ ID NO: 1605343 - RNA, 19 nt, Homo sapiens
  misc_RNA (1)...(19): siRNA sense strand
ggaauauuaugaagucugu

SEQ ID NO: 1605344 - RNA, 19 nt, Homo sapiens
  misc_RNA (1)...(19): siRNA sense strand
ccacaucucugaaagucaa

SEQ ID NO: 1605345 - RNA, 19 nt, Homo sapiens
  misc_RNA (1)...(19): siRNA sense strand
gaagacagcaccucccuau

SEQ ID NO: 1605346 - RNA, 19 nt, Homo sapiens
  misc_RNA (1)...(19): siRNA sense strand
caauuccucuccuggcuua

SEQ ID NO: 1605347 - RNA, 19 nt, Homo sapiens
  misc_RNA (1)...(19): siRNA sense strand
ggacggaagacuuaaagaa

SEQ ID NO: 1605348 - RNA, 19 nt, Homo sapiens
  misc_RNA (1)...(19): siRNA sense strand
gggcauauauaguguaaag

SEQ ID NO: 1605349 - RNA, 19 nt, Homo sapiens
  misc_RNA (1)...(19): siRNA sense strand
gaaaugcuucugacuaaug

SEQ ID NO: 1605350 - RNA, 19 nt, Homo sapiens
  misc_RNA (1)...(19): siRNA sense strand
uaaauggcuuggaacauga

SEQ ID NO: 1605351 - RNA, 19 nt, Homo sapiens
  misc_RNA (1)...(19): siRNA sense strand
gcagauguuugcuucauag

SEQ ID NO: 1605352 - RNA, 19 nt, Homo sapiens
  misc_RNA (1)...(19): siRNA sense strand
gaaggaacaaccucuaaug

SEQ ID NO: 1605353 - RNA, 19 nt, Homo sapiens
  misc_RNA (1)...(19): siRNA sense strand
agaaaucacuugguccuuu

SEQ ID NO: 1605354 - RNA, 19 nt, Homo sapiens
  misc_RNA (1)...(19): siRNA sense strand
gcauagaauuccaaagaca

SEQ ID NO: 1605355 - RNA, 19 nt, Homo sapiens
  misc_RNA (1)...(19): siRNA sense strand
gaacaagcuggaauaauag

SEQ ID NO: 1605356 - RNA, 19 nt, Homo sapiens
  misc_RNA (1)...(19): siRNA sense strand
ggaggaccaucucuacuuc

SEQ ID NO: 1605357 - RNA, 19 nt, Homo sapiens
  misc_RNA (1)...(19): siRNA sense strand
gaagaaaccacagaaguca

SEQ ID NO: 1605358 - RNA, 19 nt, Homo sapiens
  misc_RNA (1)...(19): siRNA sense strand
gaacugucaggaucaagua

SEQ ID NO: 1605359 - RNA, 19 nt, Homo sapiens
  misc_RNA (1)...(19): siRNA sense strand
uccagaagcugcaggagua

SEQ ID NO: 1605360 - RNA, 19 nt, Homo sapiens
  misc_RNA (1)...(19): siRNA sense strand
acaaagcccacuccacuua

SEQ ID NO: 1605361 - RNA, 19 nt, Homo sapiens
  misc_RNA (1)...(19): siRNA sense strand
gaaagcauaggaauucuuc

SEQ ID NO: 1605362 - RNA, 19 nt, Homo sapiens
  misc_RNA (1)...(19): siRNA sense strand
gcacuuugaugccuggaau

SEQ ID NO: 1605363 - RNA, 19 nt, Homo sapiens
  misc_RNA (1)...(19): siRNA sense strand
gaacaaaccagcugaaaau

SEQ ID NO: 1605364 - RNA, 19 nt, Homo sapiens
  misc_RNA (1)...(19): siRNA sense strand
caucaucacucuuggagau

SEQ ID NO: 1605365 - RNA, 19 nt, Homo sapiens
  misc_RNA (1)...(19): siRNA sense strand
gcacuuaucaggagagcaa

SEQ ID NO: 1605366 - RNA, 19 nt, Homo sapiens
  misc_RNA (1)...(19): siRNA sense strand
gaaguaacacucaacaaag

SEQ ID NO: 1605367 - RNA, 19 nt, Homo sapiens
  misc_RNA (1)...(19): siRNA sense strand
caauaaagggcuugacauu

SEQ ID NO: 1605368 - RNA, 19 nt, Homo sapiens
  misc_RNA (1)...(19): siRNA sense strand
caagaccucuguagacaca

SEQ ID NO: 1605369 - RNA, 19 nt, Homo sapiens
  misc_RNA (1)...(19): siRNA sense strand
aggcacagcugcacaaaga

SEQ ID NO: 1605370 - RNA, 19 nt, Homo sapiens
  misc_RNA (1)...(19): siRNA sense strand
gagaaggaacaaccucuaa

SEQ ID NO: 1605371 - RNA, 19 nt, Homo sapiens
  misc_RNA (1)...(19): siRNA sense strand
gacauaagcacuucacaga

SEQ ID NO: 1605372 - RNA, 19 nt, Homo sapiens
  misc_RNA (1)...(19): siRNA sense strand
gcaacuacucuagaaauuu

SEQ ID NO: 1605373 - RNA, 19 nt, Homo sapiens
  misc_RNA (1)...(19): siRNA sense strand
gaagucuacccgcuccuua

SEQ ID NO: 1605374 - RNA, 19 nt, Homo sapiens
  misc_RNA (1)...(19): siRNA sense strand
ucagugggaucgaaaucua

SEQ ID NO: 1605375 - RNA, 19 nt, Homo sapiens
  misc_RNA (1)...(19): siRNA sense strand
gaacuuugcuguggaugag

SEQ ID NO: 1605376 - RNA, 19 nt, Homo sapiens
  misc_RNA (1)...(19): siRNA sense strand
gagaaacaccuaccuugga

SEQ ID NO: 1605377 - RNA, 19 nt, Homo sapiens
  misc_RNA (1)...(19): siRNA sense strand
gauguuugcuucauagucu

SEQ ID NO: 1605378 - RNA, 19 nt, Homo sapiens
  misc_RNA (1)...(19): siRNA sense strand
aacaugaccugcuagauga

SEQ ID NO: 1605379 - RNA, 19 nt, Homo sapiens
  misc_RNA (1)...(19): siRNA sense strand
cagccaaaguucugucauu

SEQ ID NO: 1605380 - RNA, 19 nt, Homo sapiens
  misc_RNA (1)...(19): siRNA sense strand
ccuggaagcugguggaaga

SEQ ID NO: 1605381 - RNA, 19 nt, Homo sapiens
  misc_RNA (1)...(19): siRNA sense strand
ggaaaacacuggugagcaa

SEQ ID NO: 1605382 - RNA, 19 nt, Homo sapiens
  misc_RNA (1)...(19): siRNA sense strand
gaagaguccggcagaaaug

SEQ ID NO: 1605383 - RNA, 19 nt, Homo sapiens
  misc_RNA (1)...(19): siRNA sense strand
aggaacagauugagauuug

SEQ ID NO: 1605384 - RNA, 19 nt, Homo sapiens
  misc_RNA (1)...(19): siRNA sense strand
gaagaggaacagauugaga

SEQ ID NO: 1605385 - RNA, 19 nt, Homo sapiens
  misc_RNA (1)...(19): siRNA sense strand
aaagcccacuccacuuaua

SEQ ID NO: 1605386 - RNA, 19 nt, Homo sapiens
  misc_RNA (1)...(19): siRNA sense strand
ggagaugaaauucuugcua

SEQ ID NO: 1605387 - RNA, 19 nt, Homo sapiens
  misc_RNA (1)...(19): siRNA sense strand
ggagaaguguggcuguaca

SEQ ID NO: 1605388 - RNA, 19 nt, Homo sapiens
  misc_RNA (1)...(19): siRNA sense strand
gaaagcacaaucagagaau

SEQ ID NO: 1605389 - RNA, 19 nt, Homo sapiens
  misc_RNA (1)...(19): siRNA sense strand
gaagaagcuggucaguuaa

SEQ ID NO: 1605390 - RNA, 19 nt, Homo sapiens
  misc_RNA (1)...(19): siRNA sense strand
ggccugguuuaaagaaaua

SEQ ID NO: 1605391 - RNA, 19 nt, Homo sapiens
  misc_RNA (1)...(19): siRNA sense strand
ccaggccacuucugucaaa

SEQ ID NO: 1605392 - RNA, 19 nt, Homo sapiens
  misc_RNA (1)...(19): siRNA sense strand
uaaagggcuugacauuuca

SEQ ID NO: 1605393 - RNA, 19 nt, Homo sapiens
  misc_RNA (1)...(19): siRNA sense strand
gcagaaucauccacaaguc

SEQ ID NO: 1605394 - RNA, 19 nt, Homo sapiens
  misc_RNA (1)...(19): siRNA sense strand
gacgaaacccugaaucaau

SEQ ID NO: 1605395 - RNA, 19 nt, Homo sapiens
  misc_RNA (1)...(19): siRNA sense strand
caugguaaauggcuuggaa

SEQ ID NO: 1605396 - RNA, 19 nt, Homo sapiens
  misc_RNA (1)...(19): siRNA sense strand
gagcaacuacucuagaaau

SEQ ID NO: 1605397 - RNA, 19 nt, Homo sapiens
  misc_RNA (1)...(19): siRNA sense strand
caauuaaucccgacaaaca

SEQ ID NO: 1605398 - RNA, 19 nt, Homo sapiens
  misc_RNA (1)...(19): siRNA sense strand
gcagcaaggucuccgucuu

SEQ ID NO: 1605399 - RNA, 19 nt, Homo sapiens
  misc_RNA (1)...(19): siRNA sense strand
ugacggacauugacagcuu

SEQ ID NO: 1605400 - RNA, 19 nt, Homo sapiens
  misc_RNA (1)...(19): siRNA sense strand
cauaagcacuucacagaac

SEQ ID NO: 1605401 - RNA, 19 nt, Homo sapiens
  misc_RNA (1)...(19): siRNA sense strand
ggaauguccugaagguucu

SEQ ID NO: 1605402 - RNA, 19 nt, Homo sapiens
  misc_RNA (1)...(19): siRNA sense strand
aaguaacacucaacaaaga

SEQ ID NO: 1605403 - RNA, 19 nt, Homo sapiens
  misc_RNA (1)...(19): siRNA sense strand
aaacugagcuggagaucac

SEQ ID NO: 1605404 - RNA, 19 nt, Homo sapiens
  misc_RNA (1)...(19): siRNA sense strand
gagcaugccugaccuugac

SEQ ID NO: 1605405 - RNA, 19 nt, Homo sapiens
  misc_RNA (1)...(19): siRNA sense strand
gcacacauuugaggagcaa

SEQ ID NO: 1605406 - RNA, 19 nt, Homo sapiens
  misc_RNA (1)...(19): siRNA sense strand
caucauggccugguuuaaa

SEQ ID NO: 1605407 - RNA, 19 nt, Homo sapiens
  misc_RNA (1)...(19): siRNA sense strand
ggaaauggacgcuggauua

SEQ ID NO: 1605408 - RNA, 19 nt, Homo sapiens
  misc_RNA (1)...(19): siRNA sense strand
gaacaaaggaagcaggaaa

SEQ ID NO: 1605409 - RNA, 19 nt, Homo sapiens
  misc_RNA (1)...(19): siRNA sense strand
gcaggaaaaugcucuuaaa

SEQ ID NO: 1605410 - RNA, 19 nt, Homo sapiens
  misc_RNA (1)...(19): siRNA sense strand
aauggacgcuggauuacaa

SEQ ID NO: 1605411 - RNA, 19 nt, Homo sapiens
  misc_RNA (1)...(19): siRNA sense strand
gaaguugcaggaagaacaa

SEQ ID NO: 1605412 - RNA, 19 nt, Homo sapiens
  misc_RNA (1)...(19): siRNA sense strand
gaaauggacgcuggauuac

SEQ ID NO: 1605413 - RNA, 19 nt, Homo sapiens
  misc_RNA (1)...(19): siRNA sense strand
uuuagggacuguucucuuc

SEQ ID NO: 1605414 - RNA, 19 nt, Homo sapiens
  misc_RNA (1)...(19): siRNA sense strand
gaguuguacugcugucaca

SEQ ID NO: 1605415 - RNA, 19 nt, Homo sapiens
  misc_RNA (1)...(19): siRNA sense strand
gcagaaguugcaggaagaa

SEQ ID NO: 1605416 - RNA, 19 nt, Homo sapiens
  misc_RNA (1)...(19): siRNA sense strand
agcagaaguugcaggaaga

SEQ ID NO: 1605417 - RNA, 19 nt, Homo sapiens
  misc_RNA (1)...(19): siRNA sense strand
gacgcuggauuacaagcau

SEQ ID NO: 1605418 - RNA, 19 nt, Homo sapiens
  misc_RNA (1)...(19): siRNA sense strand
gcucaggcagcagaaguug

SEQ ID NO: 1605419 - RNA, 19 nt, Homo sapiens
  misc_RNA (1)...(19): siRNA sense strand
uuuagggacuguucucuuc

SEQ ID NO: 1605420 - RNA, 19 nt, Homo sapiens
  misc_RNA (1)...(19): siRNA sense strand
ggaaauggacgcuggauua

SEQ ID NO: 1605421 - RNA, 19 nt, Homo sapiens
  misc_RNA (1)...(19): siRNA sense strand
gaacaaaggaagcaggaaa

SEQ ID NO: 1605422 - RNA, 19 nt, Homo sapiens
  misc_RNA (1)...(19): siRNA sense strand
gcaggaaaaugcucuuaaa

SEQ ID NO: 1605423 - RNA, 19 nt, Homo sapiens
  misc_RNA (1)...(19): siRNA sense strand
aauggacgcuggauuacaa

SEQ ID NO: 1605424 - RNA, 19 nt, Homo sapiens
  misc_RNA (1)...(19): siRNA sense strand
gaaguugcaggaagaacaa

SEQ ID NO: 1605425 - RNA, 19 nt, Homo sapiens
  misc_RNA (1)...(19): siRNA sense strand
gaaauggacgcuggauuac

SEQ ID NO: 1605426 - RNA, 19 nt, Homo sapiens
  misc_RNA (1)...(19): siRNA sense strand
uuuagggacuguucucuuc

SEQ ID NO: 1605427 - RNA, 19 nt, Homo sapiens
  misc_RNA (1)...(19): siRNA sense strand
gaguuguacugcugucaca

SEQ ID NO: 1605428 - RNA, 19 nt, Homo sapiens
  misc_RNA (1)...(19): siRNA sense strand
gcagaaguugcaggaagaa

SEQ ID NO: 1605429 - RNA, 19 nt, Homo sapiens
  misc_RNA (1)...(19): siRNA sense strand
agcagaaguugcaggaaga

SEQ ID NO: 1605430 - RNA, 19 nt, Homo sapiens
  misc_RNA (1)...(19): siRNA sense strand
gacgcuggauuacaagcau

SEQ ID NO: 1605431 - RNA, 19 nt, Homo sapiens
  misc_RNA (1)...(19): siRNA sense strand
gcucaggcagcagaaguug

SEQ ID NO: 1605432 - RNA, 19 nt, Homo sapiens
  misc_RNA (1)...(19): siRNA sense strand
ggaaauggacgcuggauua

SEQ ID NO: 1605433 - RNA, 19 nt, Homo sapiens
  misc_RNA (1)...(19): siRNA sense strand
gaacaaaggaagcaggaaa

SEQ ID NO: 1605434 - RNA, 19 nt, Homo sapiens
  misc_RNA (1)...(19): siRNA sense strand
gcaggaaaaugcucuuaaa

SEQ ID NO: 1605435 - RNA, 19 nt, Homo sapiens
  misc_RNA (1)...(19): siRNA sense strand
aauggacgcuggauuacaa

SEQ ID NO: 1605436 - RNA, 19 nt, Homo sapiens
  misc_RNA (1)...(19): siRNA sense strand
gaaguugcaggaagaacaa

SEQ ID NO: 1605437 - RNA, 19 nt, Homo sapiens
  misc_RNA (1)...(19): siRNA sense strand
gaaauggacgcuggauuac

SEQ ID NO: 1605438 - RNA, 19 nt, Homo sapiens
  misc_RNA (1)...(19): siRNA sense strand
gaguuguacugcugucaca

SEQ ID NO: 1605439 - RNA, 19 nt, Homo sapiens
  misc_RNA (1)...(19): siRNA sense strand
gcagaaguugcaggaagaa

SEQ ID NO: 1605440 - RNA, 19 nt, Homo sapiens
  misc_RNA (1)...(19): siRNA sense strand
agcagaaguugcaggaaga

SEQ ID NO: 1605441 - RNA, 19 nt, Homo sapiens
  misc_RNA (1)...(19): siRNA sense strand
gacgcuggauuacaagcau

SEQ ID NO: 1605442 - RNA, 19 nt, Homo sapiens
  misc_RNA (1)...(19): siRNA sense strand
gcucaggcagcagaaguug

SEQ ID NO: 1605443 - RNA, 19 nt, Homo sapiens
  misc_RNA (1)...(19): siRNA sense strand
ggaaauggacgcuggauua

SEQ ID NO: 1605444 - RNA, 19 nt, Homo sapiens
  misc_RNA (1)...(19): siRNA sense strand
gaacaaaggaagcaggaaa

SEQ ID NO: 1605445 - RNA, 19 nt, Homo sapiens
  misc_RNA (1)...(19): siRNA sense strand
gcaggaaaaugcucuuaaa

SEQ ID NO: 1605446 - RNA, 19 nt, Homo sapiens
  misc_RNA (1)...(19): siRNA sense strand
aauggacgcuggauuacaa

SEQ ID NO: 1605447 - RNA, 19 nt, Homo sapiens
  misc_RNA (1)...(19): siRNA sense strand
gaaguugcaggaagaacaa

SEQ ID NO: 1605448 - RNA, 19 nt, Homo sapiens
  misc_RNA (1)...(19): siRNA sense strand
gaaauggacgcuggauuac

SEQ ID NO: 1605449 - RNA, 19 nt, Homo sapiens
  misc_RNA (1)...(19): siRNA sense strand
gaguuguacugcugucaca

SEQ ID NO: 1605450 - RNA, 19 nt, Homo sapiens
  misc_RNA (1)...(19): siRNA sense strand
gcagaaguugcaggaagaa

SEQ ID NO: 1605451 - RNA, 19 nt, Homo sapiens
  misc_RNA (1)...(19): siRNA sense strand
agcagaaguugcaggaaga

SEQ ID NO: 1605452 - RNA, 19 nt, Homo sapiens
  misc_RNA (1)...(19): siRNA sense strand
gacgcuggauuacaagcau

SEQ ID NO: 1605453 - RNA, 19 nt, Homo sapiens
  misc_RNA (1)...(19): siRNA sense strand
gcucaggcagcagaaguug

SEQ ID NO: 1605454 - RNA, 19 nt, Homo sapiens
  misc_RNA (1)...(19): siRNA sense strand
ggaaauggacgcuggauua

SEQ ID NO: 1605455 - RNA, 19 nt, Homo sapiens
  misc_RNA (1)...(19): siRNA sense strand
gaacaaaggaagcaggaaa

SEQ ID NO: 1605456 - RNA, 19 nt, Homo sapiens
  misc_RNA (1)...(19): siRNA sense strand
gcaggaaaaugcucuuaaa

SEQ ID NO: 1605457 - RNA, 19 nt, Homo sapiens
  misc_RNA (1)...(19): siRNA sense strand
aauggacgcuggauuacaa

SEQ ID NO: 1605458 - RNA, 19 nt, Homo sapiens
  misc_RNA (1)...(19): siRNA sense strand
gaaguugcaggaagaacaa

SEQ ID NO: 1605459 - RNA, 19 nt, Homo sapiens
  misc_RNA (1)...(19): siRNA sense strand
gaaauggacgcuggauuac

SEQ ID NO: 1605460 - RNA, 19 nt, Homo sapiens
  misc_RNA (1)...(19): siRNA sense strand
gaguuguacugcugucaca

SEQ ID NO: 1605461 - RNA, 19 nt, Homo sapiens
  misc_RNA (1)...(19): siRNA sense strand
gcagaaguugcaggaagaa

SEQ ID NO: 1605462 - RNA, 19 nt, Homo sapiens
  misc_RNA (1)...(19): siRNA sense strand
agcagaaguugcaggaaga

SEQ ID NO: 1605463 - RNA, 19 nt, Homo sapiens
  misc_RNA (1)...(19): siRNA sense strand
gacgcuggauuacaagcau

SEQ ID NO: 1605464 - RNA, 19 nt, Homo sapiens
  misc_RNA (1)...(19): siRNA sense strand
gcucaggcagcagaaguug

SEQ ID NO: 1605465 - RNA, 19 nt, Homo sapiens
  misc_RNA (1)...(19): siRNA sense strand
ggaaauggacgcuggauua

SEQ ID NO: 1605466 - RNA, 19 nt, Homo sapiens
  misc_RNA (1)...(19): siRNA sense strand
gaacaaaggaagcaggaaa

SEQ ID NO: 1605467 - RNA, 19 nt, Homo sapiens
  misc_RNA (1)...(19): siRNA sense strand
aauggacgcuggauuacaa

SEQ ID NO: 1605468 - RNA, 19 nt, Homo sapiens
  misc_RNA (1)...(19): siRNA sense strand
gaaguugcaggaagaacaa

SEQ ID NO: 1605469 - RNA, 19 nt, Homo sapiens
  misc_RNA (1)...(19): siRNA sense strand
gaaauggacgcuggauuac

SEQ ID NO: 1605470 - RNA, 19 nt, Homo sapiens
  misc_RNA (1)...(19): siRNA sense strand
uuuagggacuguucucuuc

SEQ ID NO: 1605471 - RNA, 19 nt, Homo sapiens
  misc_RNA (1)...(19): siRNA sense strand
gaguuguacugcugucaca

SEQ ID NO: 1605472 - RNA, 19 nt, Homo sapiens
  misc_RNA (1)...(19): siRNA sense strand
gcagaaguugcaggaagaa

SEQ ID NO: 1605473 - RNA, 19 nt, Homo sapiens
  misc_RNA (1)...(19): siRNA sense strand
agcagaaguugcaggaaga

SEQ ID NO: 1605474 - RNA, 19 nt, Homo sapiens
  misc_RNA (1)...(19): siRNA sense strand
gacgcuggauuacaagcau

SEQ ID NO: 1605475 - RNA, 19 nt, Homo sapiens
  misc_RNA (1)...(19): siRNA sense strand
gcucaggcagcagaaguug

SEQ ID NO: 1605476 - RNA, 19 nt, Homo sapiens
  misc_RNA (1)...(19): siRNA sense strand
ggaaagguguuggcauuaa

SEQ ID NO: 1605477 - RNA, 19 nt, Homo sapiens
  misc_RNA (1)...(19): siRNA sense strand
gaaagguguuggcauuaaa

SEQ ID NO: 1605478 - RNA, 19 nt, Homo sapiens
  misc_RNA (1)...(19): siRNA sense strand
gaucgauccugccauguuu

SEQ ID NO: 1605479 - RNA, 19 nt, Homo sapiens
  misc_RNA (1)...(19): siRNA sense strand
gaaagugagcgacgaguuu

SEQ ID NO: 1605480 - RNA, 19 nt, Homo sapiens
  misc_RNA (1)...(19): siRNA sense strand
auaaagggcugcaucauga

SEQ ID NO: 1605481 - RNA, 19 nt, Homo sapiens
  misc_RNA (1)...(19): siRNA sense strand
ucaaggagcugcugaccaa

SEQ ID NO: 1605482 - RNA, 19 nt, Homo sapiens
  misc_RNA (1)...(19): siRNA sense strand
gagcaaguuucaccgaaga

SEQ ID NO: 1605483 - RNA, 19 nt, Homo sapiens
  misc_RNA (1)...(19): siRNA sense strand
gcagagaguucagguaugg

SEQ ID NO: 1605484 - RNA, 19 nt, Homo sapiens
  misc_RNA (1)...(19): siRNA sense strand
cgaaaguacauucuugaua

SEQ ID NO: 1605485 - RNA, 19 nt, Homo sapiens
  misc_RNA (1)...(19): siRNA sense strand
gagaacugguguccacaga

SEQ ID NO: 1605486 - RNA, 19 nt, Homo sapiens
  misc_RNA (1)...(19): siRNA sense strand
cgagagccaucuaccgaaa

SEQ ID NO: 1605487 - RNA, 19 nt, Homo sapiens
  misc_RNA (1)...(19): siRNA sense strand
cgggaaagguguuggcauu

SEQ ID NO: 1605488 - RNA, 19 nt, Homo sapiens
  misc_RNA (1)...(19): siRNA sense strand
gaagaucaucggcaaagug

SEQ ID NO: 1605489 - RNA, 19 nt, Homo sapiens
  misc_RNA (1)...(19): siRNA sense strand
gaccuuaaaugaagaugag

SEQ ID NO: 1605490 - RNA, 19 nt, Homo sapiens
  misc_RNA (1)...(19): siRNA sense strand
uaaaugaagaugaggaaug

SEQ ID NO: 1605491 - RNA, 19 nt, Homo sapiens
  misc_RNA (1)...(19): siRNA sense strand
caaaagaaaugccaagaag

SEQ ID NO: 1605492 - RNA, 19 nt, Homo sapiens
  misc_RNA (1)...(19): siRNA sense strand
ggaagcacguacccaaguc

SEQ ID NO: 1605493 - RNA, 19 nt, Homo sapiens
  misc_RNA (1)...(19): siRNA sense strand
ccaccaagagcuucauaaa

SEQ ID NO: 1605494 - RNA, 19 nt, Homo sapiens
  misc_RNA (1)...(19): siRNA sense strand
accaagagcuucauaaagg

SEQ ID NO: 1605495 - RNA, 19 nt, Homo sapiens
  misc_RNA (1)...(19): siRNA sense strand
gcguggagccucagaaguu

SEQ ID NO: 1605496 - RNA, 19 nt, Homo sapiens
  misc_RNA (1)...(19): siRNA sense strand
gggaaagguguuggcauua

SEQ ID NO: 1605497 - RNA, 19 nt, Homo sapiens
  misc_RNA (1)...(19): siRNA sense strand
ccggaagacucccucagaa

SEQ ID NO: 1605498 - RNA, 19 nt, Homo sapiens
  misc_RNA (1)...(19): siRNA sense strand
cauaaagggcugcaucaug

SEQ ID NO: 1605499 - RNA, 19 nt, Homo sapiens
  misc_RNA (1)...(19): siRNA sense strand
cagauacuacuucaagaaa

SEQ ID NO: 1605500 - RNA, 19 nt, Homo sapiens
  misc_RNA (1)...(19): siRNA sense strand
uaccgaaaguacauucuug

SEQ ID NO: 1605501 - RNA, 19 nt, Homo sapiens
  misc_RNA (1)...(19): siRNA sense strand
gagaagaaccagaaaauca

SEQ ID NO: 1605502 - RNA, 19 nt, Homo sapiens
  misc_RNA (1)...(19): siRNA sense strand
aaaugaagaugaggaaugg

SEQ ID NO: 1605503 - RNA, 19 nt, Homo sapiens
  misc_RNA (1)...(19): siRNA sense strand
gggaagggcauaucuggau

SEQ ID NO: 1605504 - RNA, 19 nt, Homo sapiens
  misc_RNA (1)...(19): siRNA sense strand
cuacagauacuacuucaag

SEQ ID NO: 1605505 - RNA, 19 nt, Homo sapiens
  misc_RNA (1)...(19): siRNA sense strand
gcauuaaaggugagacuuc

SEQ ID NO: 1605506 - RNA, 19 nt, Homo sapiens
  misc_RNA (1)...(19): siRNA sense strand
gcaucguuguggcguacua

SEQ ID NO: 1605507 - RNA, 19 nt, Homo sapiens
  misc_RNA (1)...(19): siRNA sense strand
gagaagaucaucggcaaag

SEQ ID NO: 1605508 - RNA, 19 nt, Homo sapiens
  misc_RNA (1)...(19): siRNA sense strand
ugcauucccugcuggauga

SEQ ID NO: 1605509 - RNA, 19 nt, Homo sapiens
  misc_RNA (1)...(19): siRNA sense strand
gagcgacgaguuugacugu

SEQ ID NO: 1605510 - RNA, 19 nt, Homo sapiens
  misc_RNA (1)...(19): siRNA sense strand
ggaugaccaagaugggaua

SEQ ID NO: 1605511 - RNA, 19 nt, Homo sapiens
  misc_RNA (1)...(19): siRNA sense strand
gauaccugccgaccuuaaa

SEQ ID NO: 1605512 - RNA, 19 nt, Homo sapiens
  misc_RNA (1)...(19): siRNA sense strand
ggauaccugccgaccuuaa

SEQ ID NO: 1605513 - RNA, 19 nt, Homo sapiens
  misc_RNA (1)...(19): siRNA sense strand
gaaauccaggccacuaugg

SEQ ID NO: 1605514 - RNA, 19 nt, Homo sapiens
  misc_RNA (1)...(19): siRNA sense strand
ccuccuuccuuaagucuga

SEQ ID NO: 1605515 - RNA, 19 nt, Homo sapiens
  misc_RNA (1)...(19): siRNA sense strand
gaagaugaggaauggaagu

SEQ ID NO: 1605516 - RNA, 19 nt, Homo sapiens
  misc_RNA (1)...(19): siRNA sense strand
cuggauaccugccgaccuu

SEQ ID NO: 1605517 - RNA, 19 nt, Homo sapiens
  misc_RNA (1)...(19): siRNA sense strand
accuaucccuccuuccuua

SEQ ID NO: 1605518 - RNA, 19 nt, Homo sapiens
  misc_RNA (1)...(19): siRNA sense strand
ggagaagaucaucggcaaa

SEQ ID NO: 1605519 - RNA, 19 nt, Homo sapiens
  misc_RNA (1)...(19): siRNA sense strand
gcaaaagaaaugccaagaa

SEQ ID NO: 1605520 - RNA, 19 nt, Homo sapiens
  misc_RNA (1)...(19): siRNA sense strand
gaccaggcccagaccgaaa

SEQ ID NO: 1605521 - RNA, 19 nt, Homo sapiens
  misc_RNA (1)...(19): siRNA sense strand
ggcagagaguucagguaug

SEQ ID NO: 1605522 - RNA, 19 nt, Homo sapiens
  misc_RNA (1)...(19): siRNA sense strand
ggacagggaagggcauauc

SEQ ID NO: 1605523 - RNA, 19 nt, Homo sapiens
  misc_RNA (1)...(19): siRNA sense strand
acagauacuacuucaagaa

SEQ ID NO: 1605524 - RNA, 19 nt, Homo sapiens
  misc_RNA (1)...(19): siRNA sense strand
ccagacccuugucccuuga

SEQ ID NO: 1605525 - RNA, 19 nt, Homo sapiens
  misc_RNA (1)...(19): siRNA sense strand
gaagugugaccaggacaug

SEQ ID NO: 1605526 - RNA, 19 nt, Homo sapiens
  misc_RNA (1)...(19): siRNA sense strand
uugcuggacuucugguuug

SEQ ID NO: 1605527 - RNA, 19 nt, Homo sapiens
  misc_RNA (1)...(19): siRNA sense strand
gggaugcacacgaggagaa

SEQ ID NO: 1605528 - RNA, 19 nt, Homo sapiens
  misc_RNA (1)...(19): siRNA sense strand
cagcgaaggcagagaguuc

SEQ ID NO: 1605529 - RNA, 19 nt, Homo sapiens
  misc_RNA (1)...(19): siRNA sense strand
cggaggaugcggagaagaa

SEQ ID NO: 1605530 - RNA, 19 nt, Homo sapiens
  misc_RNA (1)...(19): siRNA sense strand
ggaagcuggagcccuguga

SEQ ID NO: 1605531 - RNA, 19 nt, Homo sapiens
  misc_RNA (1)...(19): siRNA sense strand
caagaucgcagaggaaggu

SEQ ID NO: 1605532 - RNA, 19 nt, Homo sapiens
  misc_RNA (1)...(19): siRNA sense strand
gaagcacguacccaaguca

SEQ ID NO: 1605533 - RNA, 19 nt, Homo sapiens
  misc_RNA (1)...(19): siRNA sense strand
gggaagcacguacccaagu

SEQ ID NO: 1605534 - RNA, 19 nt, Homo sapiens
  misc_RNA (1)...(19): siRNA sense strand
ggaccucggagcaaguuuc

SEQ ID NO: 1605535 - RNA, 19 nt, Homo sapiens
  misc_RNA (1)...(19): siRNA sense strand
gcaaguuucaccgaagaug

SEQ ID NO: 1605536 - RNA, 19 nt, Homo sapiens
  misc_RNA (1)...(19): siRNA sense strand
uacagauacuacuucaaga

SEQ ID NO: 1605537 - RNA, 19 nt, Homo sapiens
  misc_RNA (1)...(19): siRNA sense strand
gcagcuacagauacuacuu

SEQ ID NO: 1605538 - RNA, 19 nt, Homo sapiens
  misc_RNA (1)...(19): siRNA sense strand
cugccgaccuuaaaugaag

SEQ ID NO: 1605539 - RNA, 19 nt, Homo sapiens
  misc_RNA (1)...(19): siRNA sense strand
gggcugagucacugcauuc

SEQ ID NO: 1605540 - RNA, 19 nt, Homo sapiens
  misc_RNA (1)...(19): siRNA sense strand
cgaaauccaggccacuaug

SEQ ID NO: 1605541 - RNA, 19 nt, Homo sapiens
  misc_RNA (1)...(19): siRNA sense strand
gaugggauaagccuguuca

SEQ ID NO: 1605542 - RNA, 19 nt, Homo sapiens
  misc_RNA (1)...(19): siRNA sense strand
ugaccaagaugggauaagc

SEQ ID NO: 1605543 - RNA, 19 nt, Homo sapiens
  misc_RNA (1)...(19): siRNA sense strand
gaagacucccucagaagcu

SEQ ID NO: 1605544 - RNA, 19 nt, Homo sapiens
  misc_RNA (1)...(19): siRNA sense strand
ucccgaggcuacucagaga

SEQ ID NO: 1605545 - RNA, 19 nt, Homo sapiens
  misc_RNA (1)...(19): siRNA sense strand
caccaagagcuucauaaag

SEQ ID NO: 1605546 - RNA, 19 nt, Homo sapiens
  misc_RNA (1)...(19): siRNA sense strand
uaaagggcugcaucaugaa

SEQ ID NO: 1605547 - RNA, 19 nt, Homo sapiens
  misc_RNA (1)...(19): siRNA sense strand
ggaagugugaccaggacau

SEQ ID NO: 1605548 - RNA, 19 nt, Homo sapiens
  misc_RNA (1)...(19): siRNA sense strand
cauacaggauccguaagca

SEQ ID NO: 1605549 - RNA, 19 nt, Homo sapiens
  misc_RNA (1)...(19): siRNA sense strand
agagccaucuaccgaaagu

SEQ ID NO: 1605550 - RNA, 19 nt, Homo sapiens
  misc_RNA (1)...(19): siRNA sense strand
aaagugagcgacgaguuug

SEQ ID NO: 1605551 - RNA, 19 nt, Homo sapiens
  misc_RNA (1)...(19): siRNA sense strand
ccugcuggaugaccaagau

SEQ ID NO: 1605552 - RNA, 19 nt, Homo sapiens
  misc_RNA (1)...(19): siRNA sense strand
aggcagagaguucagguau

SEQ ID NO: 1605553 - RNA, 19 nt, Homo sapiens
  misc_RNA (1)...(19): siRNA sense strand
ugaucgauccugccauguu

SEQ ID NO: 1605554 - RNA, 19 nt, Homo sapiens
  misc_RNA (1)...(19): siRNA sense strand
agaccaagccagccaccaa

SEQ ID NO: 1605555 - RNA, 19 nt, Homo sapiens
  misc_RNA (1)...(19): siRNA sense strand
cguggagccucagaaguuc

SEQ ID NO: 1605556 - RNA, 19 nt, Homo sapiens
  misc_RNA (1)...(19): siRNA sense strand
agaaagugagcgacgaguu

SEQ ID NO: 1605557 - RNA, 19 nt, Homo sapiens
  misc_RNA (1)...(19): siRNA sense strand
agauacuacuucaagaaag

SEQ ID NO: 1605558 - RNA, 19 nt, Homo sapiens
  misc_RNA (1)...(19): siRNA sense strand
cagcuacagauacuacuuc

SEQ ID NO: 1605559 - RNA, 19 nt, Homo sapiens
  misc_RNA (1)...(19): siRNA sense strand
gugggcacguggccaagau

SEQ ID NO: 1605560 - RNA, 19 nt, Homo sapiens
  misc_RNA (1)...(19): siRNA sense strand
ucaugaagcagcugaucga

SEQ ID NO: 1605561 - RNA, 19 nt, Homo sapiens
  misc_RNA (1)...(19): siRNA sense strand
gugccgacuugcuggacuu

SEQ ID NO: 1605562 - RNA, 19 nt, Homo sapiens
  misc_RNA (1)...(19): siRNA sense strand
ggagagcgugcaggucaau

SEQ ID NO: 1605563 - RNA, 19 nt, Homo sapiens
  misc_RNA (1)...(19): siRNA sense strand
uuaugucaaugccggcuau

SEQ ID NO: 1605564 - RNA, 19 nt, Homo sapiens
  misc_RNA (1)...(19): siRNA sense strand
cgaccuuaaaugaagauga

SEQ ID NO: 1605565 - RNA, 19 nt, Homo sapiens
  misc_RNA (1)...(19): siRNA sense strand
ccaggccacuauggaggaa

SEQ ID NO: 1605566 - RNA, 19 nt, Homo sapiens
  misc_RNA (1)...(19): siRNA sense strand
ggaaagguguuggcauuaa

SEQ ID NO: 1605567 - RNA, 19 nt, Homo sapiens
  misc_RNA (1)...(19): siRNA sense strand
gaaagguguuggcauuaaa

SEQ ID NO: 1605568 - RNA, 19 nt, Homo sapiens
  misc_RNA (1)...(19): siRNA sense strand
gaucgauccugccauguuu

SEQ ID NO: 1605569 - RNA, 19 nt, Homo sapiens
  misc_RNA (1)...(19): siRNA sense strand
gaaagugagcgacgaguuu

SEQ ID NO: 1605570 - RNA, 19 nt, Homo sapiens
  misc_RNA (1)...(19): siRNA sense strand
auaaagggcugcaucauga

SEQ ID NO: 1605571 - RNA, 19 nt, Homo sapiens
  misc_RNA (1)...(19): siRNA sense strand
ucaaggagcugcugaccaa

SEQ ID NO: 1605572 - RNA, 19 nt, Homo sapiens
  misc_RNA (1)...(19): siRNA sense strand
gagcaaguuucaccgaaga

SEQ ID NO: 1605573 - RNA, 19 nt, Homo sapiens
  misc_RNA (1)...(19): siRNA sense strand
gcagagaguucagguaugg

SEQ ID NO: 1605574 - RNA, 19 nt, Homo sapiens
  misc_RNA (1)...(19): siRNA sense strand
cgaaaguacauucuugaua

SEQ ID NO: 1605575 - RNA, 19 nt, Homo sapiens
  misc_RNA (1)...(19): siRNA sense strand
gagaacugguguccacaga

SEQ ID NO: 1605576 - RNA, 19 nt, Homo sapiens
  misc_RNA (1)...(19): siRNA sense strand
cgagagccaucuaccgaaa

SEQ ID NO: 1605577 - RNA, 19 nt, Homo sapiens
  misc_RNA (1)...(19): siRNA sense strand
cgggaaagguguuggcauu

SEQ ID NO: 1605578 - RNA, 19 nt, Homo sapiens
  misc_RNA (1)...(19): siRNA sense strand
gaagaucaucggcaaagug

SEQ ID NO: 1605579 - RNA, 19 nt, Homo sapiens
  misc_RNA (1)...(19): siRNA sense strand
gaccuuaaaugaagaugag

SEQ ID NO: 1605580 - RNA, 19 nt, Homo sapiens
  misc_RNA (1)...(19): siRNA sense strand
uaaaugaagaugaggaaug

SEQ ID NO: 1605581 - RNA, 19 nt, Homo sapiens
  misc_RNA (1)...(19): siRNA sense strand
caaaagaaaugccaagaag

SEQ ID NO: 1605582 - RNA, 19 nt, Homo sapiens
  misc_RNA (1)...(19): siRNA sense strand
ggaagcacguacccaaguc

SEQ ID NO: 1605583 - RNA, 19 nt, Homo sapiens
  misc_RNA (1)...(19): siRNA sense strand
ccaccaagagcuucauaaa

SEQ ID NO: 1605584 - RNA, 19 nt, Homo sapiens
  misc_RNA (1)...(19): siRNA sense strand
accaagagcuucauaaagg

SEQ ID NO: 1605585 - RNA, 19 nt, Homo sapiens
  misc_RNA (1)...(19): siRNA sense strand
gcguggagccucagaaguu

SEQ ID NO: 1605586 - RNA, 19 nt, Homo sapiens
  misc_RNA (1)...(19): siRNA sense strand
gggaaagguguuggcauua

SEQ ID NO: 1605587 - RNA, 19 nt, Homo sapiens
  misc_RNA (1)...(19): siRNA sense strand
ccggaagacucccucagaa

SEQ ID NO: 1605588 - RNA, 19 nt, Homo sapiens
  misc_RNA (1)...(19): siRNA sense strand
cauaaagggcugcaucaug

SEQ ID NO: 1605589 - RNA, 19 nt, Homo sapiens
  misc_RNA (1)...(19): siRNA sense strand
cagauacuacuucaagaaa

SEQ ID NO: 1605590 - RNA, 19 nt, Homo sapiens
  misc_RNA (1)...(19): siRNA sense strand
uaccgaaaguacauucuug

SEQ ID NO: 1605591 - RNA, 19 nt, Homo sapiens
  misc_RNA (1)...(19): siRNA sense strand
gagaagaaccagaaaauca

SEQ ID NO: 1605592 - RNA, 19 nt, Homo sapiens
  misc_RNA (1)...(19): siRNA sense strand
aaaugaagaugaggaaugg

SEQ ID NO: 1605593 - RNA, 19 nt, Homo sapiens
  misc_RNA (1)...(19): siRNA sense strand
gggaagggcauaucuggau

SEQ ID NO: 1605594 - RNA, 19 nt, Homo sapiens
  misc_RNA (1)...(19): siRNA sense strand
cuacagauacuacuucaag

SEQ ID NO: 1605595 - RNA, 19 nt, Homo sapiens
  misc_RNA (1)...(19): siRNA sense strand
gcauuaaaggugagacuuc

SEQ ID NO: 1605596 - RNA, 19 nt, Homo sapiens
  misc_RNA (1)...(19): siRNA sense strand
gcaucguuguggcguacua

SEQ ID NO: 1605597 - RNA, 19 nt, Homo sapiens
  misc_RNA (1)...(19): siRNA sense strand
gagaagaucaucggcaaag

SEQ ID NO: 1605598 - RNA, 19 nt, Homo sapiens
  misc_RNA (1)...(19): siRNA sense strand
ugcauucccugcuggauga

SEQ ID NO: 1605599 - RNA, 19 nt, Homo sapiens
  misc_RNA (1)...(19): siRNA sense strand
gagcgacgaguuugacugu

SEQ ID NO: 1605600 - RNA, 19 nt, Homo sapiens
  misc_RNA (1)...(19): siRNA sense strand
ggaugaccaagaugggaua

SEQ ID NO: 1605601 - RNA, 19 nt, Homo sapiens
  misc_RNA (1)...(19): siRNA sense strand
gauaccugccgaccuuaaa

SEQ ID NO: 1605602 - RNA, 19 nt, Homo sapiens
  misc_RNA (1)...(19): siRNA sense strand
ggauaccugccgaccuuaa

SEQ ID NO: 1605603 - RNA, 19 nt, Homo sapiens
  misc_RNA (1)...(19): siRNA sense strand
gaaauccaggccacuaugg

SEQ ID NO: 1605604 - RNA, 19 nt, Homo sapiens
  misc_RNA (1)...(19): siRNA sense strand
ccuccuuccuuaagucuga

SEQ ID NO: 1605605 - RNA, 19 nt, Homo sapiens
  misc_RNA (1)...(19): siRNA sense strand
gaagaugaggaauggaagu

SEQ ID NO: 1605606 - RNA, 19 nt, Homo sapiens
  misc_RNA (1)...(19): siRNA sense strand
cuggauaccugccgaccuu

SEQ ID NO: 1605607 - RNA, 19 nt, Homo sapiens
  misc_RNA (1)...(19): siRNA sense strand
accuaucccuccuuccuua

SEQ ID NO: 1605608 - RNA, 19 nt, Homo sapiens
  misc_RNA (1)...(19): siRNA sense strand
ggagaagaucaucggcaaa

SEQ ID NO: 1605609 - RNA, 19 nt, Homo sapiens
  misc_RNA (1)...(19): siRNA sense strand
gcaaaagaaaugccaagaa

SEQ ID NO: 1605610 - RNA, 19 nt, Homo sapiens
  misc_RNA (1)...(19): siRNA sense strand
gaccaggcccagaccgaaa

SEQ ID NO: 1605611 - RNA, 19 nt, Homo sapiens
  misc_RNA (1)...(19): siRNA sense strand
ggcagagaguucagguaug

SEQ ID NO: 1605612 - RNA, 19 nt, Homo sapiens
  misc_RNA (1)...(19): siRNA sense strand
ggacagggaagggcauauc

SEQ ID NO: 1605613 - RNA, 19 nt, Homo sapiens
  misc_RNA (1)...(19): siRNA sense strand
acagauacuacuucaagaa

SEQ ID NO: 1605614 - RNA, 19 nt, Homo sapiens
  misc_RNA (1)...(19): siRNA sense strand
ccagacccuugucccuuga

SEQ ID NO: 1605615 - RNA, 19 nt, Homo sapiens
  misc_RNA (1)...(19): siRNA sense strand
gaagugugaccaggacaug

SEQ ID NO: 1605616 - RNA, 19 nt, Homo sapiens
  misc_RNA (1)...(19): siRNA sense strand
uugcuggacuucugguuug

SEQ ID NO: 1605617 - RNA, 19 nt, Homo sapiens
  misc_RNA (1)...(19): siRNA sense strand
gggaugcacacgaggagaa

SEQ ID NO: 1605618 - RNA, 19 nt, Homo sapiens
  misc_RNA (1)...(19): siRNA sense strand
cagcgaaggcagagaguuc

SEQ ID NO: 1605619 - RNA, 19 nt, Homo sapiens
  misc_RNA (1)...(19): siRNA sense strand
cggaggaugcggagaagaa

SEQ ID NO: 1605620 - RNA, 19 nt, Homo sapiens
  misc_RNA (1)...(19): siRNA sense strand
ggaagcuggagcccuguga

SEQ ID NO: 1605621 - RNA, 19 nt, Homo sapiens
  misc_RNA (1)...(19): siRNA sense strand
caagaucgcagaggaaggu

SEQ ID NO: 1605622 - RNA, 19 nt, Homo sapiens
  misc_RNA (1)...(19): siRNA sense strand
gaagcacguacccaaguca

SEQ ID NO: 1605623 - RNA, 19 nt, Homo sapiens
  misc_RNA (1)...(19): siRNA sense strand
gggaagcacguacccaagu

SEQ ID NO: 1605624 - RNA, 19 nt, Homo sapiens
  misc_RNA (1)...(19): siRNA sense strand
ggaccucggagcaaguuuc

SEQ ID NO: 1605625 - RNA, 19 nt, Homo sapiens
  misc_RNA (1)...(19): siRNA sense strand
gcaaguuucaccgaagaug

SEQ ID NO: 1605626 - RNA, 19 nt, Homo sapiens
  misc_RNA (1)...(19): siRNA sense strand
uacagauacuacuucaaga

SEQ ID NO: 1605627 - RNA, 19 nt, Homo sapiens
  misc_RNA (1)...(19): siRNA sense strand
gcagcuacagauacuacuu

SEQ ID NO: 1605628 - RNA, 19 nt, Homo sapiens
  misc_RNA (1)...(19): siRNA sense strand
cugccgaccuuaaaugaag

SEQ ID NO: 1605629 - RNA, 19 nt, Homo sapiens
  misc_RNA (1)...(19): siRNA sense strand
gggcugagucacugcauuc

SEQ ID NO: 1605630 - RNA, 19 nt, Homo sapiens
  misc_RNA (1)...(19): siRNA sense strand
cgaaauccaggccacuaug

SEQ ID NO: 1605631 - RNA, 19 nt, Homo sapiens
  misc_RNA (1)...(19): siRNA sense strand
gaugggauaagccuguuca

SEQ ID NO: 1605632 - RNA, 19 nt, Homo sapiens
  misc_RNA (1)...(19): siRNA sense strand
ugaccaagaugggauaagc

SEQ ID NO: 1605633 - RNA, 19 nt, Homo sapiens
  misc_RNA (1)...(19): siRNA sense strand
gaagacucccucagaagcu

SEQ ID NO: 1605634 - RNA, 19 nt, Homo sapiens
  misc_RNA (1)...(19): siRNA sense strand
ucccgaggcuacucagaga

SEQ ID NO: 1605635 - RNA, 19 nt, Homo sapiens
  misc_RNA (1)...(19): siRNA sense strand
caccaagagcuucauaaag

SEQ ID NO: 1605636 - RNA, 19 nt, Homo sapiens
  misc_RNA (1)...(19): siRNA sense strand
uaaagggcugcaucaugaa

SEQ ID NO: 1605637 - RNA, 19 nt, Homo sapiens
  misc_RNA (1)...(19): siRNA sense strand
ggaagugugaccaggacau

SEQ ID NO: 1605638 - RNA, 19 nt, Homo sapiens
  misc_RNA (1)...(19): siRNA sense strand
cauacaggauccguaagca

SEQ ID NO: 1605639 - RNA, 19 nt, Homo sapiens
  misc_RNA (1)...(19): siRNA sense strand
agagccaucuaccgaaagu

SEQ ID NO: 1605640 - RNA, 19 nt, Homo sapiens
  misc_RNA (1)...(19): siRNA sense strand
aaagugagcgacgaguuug

SEQ ID NO: 1605641 - RNA, 19 nt, Homo sapiens
  misc_RNA (1)...(19): siRNA sense strand
ccugcuggaugaccaagau

SEQ ID NO: 1605642 - RNA, 19 nt, Homo sapiens
  misc_RNA (1)...(19): siRNA sense strand
aggcagagaguucagguau

SEQ ID NO: 1605643 - RNA, 19 nt, Homo sapiens
  misc_RNA (1)...(19): siRNA sense strand
ugaucgauccugccauguu

SEQ ID NO: 1605644 - RNA, 19 nt, Homo sapiens
  misc_RNA (1)...(19): siRNA sense strand
agaccaagccagccaccaa

SEQ ID NO: 1605645 - RNA, 19 nt, Homo sapiens
  misc_RNA (1)...(19): siRNA sense strand
cguggagccucagaaguuc

SEQ ID NO: 1605646 - RNA, 19 nt, Homo sapiens
  misc_RNA (1)...(19): siRNA sense strand
agaaagugagcgacgaguu

SEQ ID NO: 1605647 - RNA, 19 nt, Homo sapiens
  misc_RNA (1)...(19): siRNA sense strand
agauacuacuucaagaaag

SEQ ID NO: 1605648 - RNA, 19 nt, Homo sapiens
  misc_RNA (1)...(19): siRNA sense strand
cagcuacagauacuacuuc

SEQ ID NO: 1605649 - RNA, 19 nt, Homo sapiens
  misc_RNA (1)...(19): siRNA sense strand
gugggcacguggccaagau

SEQ ID NO: 1605650 - RNA, 19 nt, Homo sapiens
  misc_RNA (1)...(19): siRNA sense strand
ucaugaagcagcugaucga

SEQ ID NO: 1605651 - RNA, 19 nt, Homo sapiens
  misc_RNA (1)...(19): siRNA sense strand
gugccgacuugcuggacuu

SEQ ID NO: 1605652 - RNA, 19 nt, Homo sapiens
  misc_RNA (1)...(19): siRNA sense strand
ggagagcgugcaggucaau

SEQ ID NO: 1605653 - RNA, 19 nt, Homo sapiens
  misc_RNA (1)...(19): siRNA sense strand
uuaugucaaugccggcuau

SEQ ID NO: 1605654 - RNA, 19 nt, Homo sapiens
  misc_RNA (1)...(19): siRNA sense strand
cgaccuuaaaugaagauga

SEQ ID NO: 1605655 - RNA, 19 nt, Homo sapiens
  misc_RNA (1)...(19): siRNA sense strand
ccaggccacuauggaggaa

SEQ ID NO: 1605656 - RNA, 19 nt, Homo sapiens
  misc_RNA (1)...(19): siRNA sense strand
caacaugucucccugauga

SEQ ID NO: 1605657 - RNA, 19 nt, Homo sapiens
  misc_RNA (1)...(19): siRNA sense strand
uaaaggaguuugaggugua

SEQ ID NO: 1605658 - RNA, 19 nt, Homo sapiens
  misc_RNA (1)...(19): siRNA sense strand
gaaggagucucuuaaggau

SEQ ID NO: 1605659 - RNA, 19 nt, Homo sapiens
  misc_RNA (1)...(19): siRNA sense strand
ggaugaugcugaacaaaug

SEQ ID NO: 1605660 - RNA, 19 nt, Homo sapiens
  misc_RNA (1)...(19): siRNA sense strand
cagcagagaugccgagaug

SEQ ID NO: 1605661 - RNA, 19 nt, Homo sapiens
  misc_RNA (1)...(19): siRNA sense strand
caaaguacccugagcauca

SEQ ID NO: 1605662 - RNA, 19 nt, Homo sapiens
  misc_RNA (1)...(19): siRNA sense strand
aaaccuggcuucaacauca

SEQ ID NO: 1605663 - RNA, 19 nt, Homo sapiens
  misc_RNA (1)...(19): siRNA sense strand
cgacaaacccaucaccuuu

SEQ ID NO: 1605664 - RNA, 19 nt, Homo sapiens
  misc_RNA (1)...(19): siRNA sense strand
caccaaagauuucucugaa

SEQ ID NO: 1605665 - RNA, 19 nt, Homo sapiens
  misc_RNA (1)...(19): siRNA sense strand
ggaaggagucucuuaagga

SEQ ID NO: 1605666 - RNA, 19 nt, Homo sapiens
  misc_RNA (1)...(19): siRNA sense strand
acaguacccuggacucaua

SEQ ID NO: 1605667 - RNA, 19 nt, Homo sapiens
  misc_RNA (1)...(19): siRNA sense strand
ggggaugggucuucuauua

SEQ ID NO: 1605668 - RNA, 19 nt, Homo sapiens
  misc_RNA (1)...(19): siRNA sense strand
uaaaguggcaguggcauua

SEQ ID NO: 1605669 - RNA, 19 nt, Homo sapiens
  misc_RNA (1)...(19): siRNA sense strand
gcagagaugccgagaugaa

SEQ ID NO: 1605670 - RNA, 19 nt, Homo sapiens
  misc_RNA (1)...(19): siRNA sense strand
gaauccauguguuugcaaa

SEQ ID NO: 1605671 - RNA, 19 nt, Homo sapiens
  misc_RNA (1)...(19): siRNA sense strand
aaagcaguguucaaccuua

SEQ ID NO: 1605672 - RNA, 19 nt, Homo sapiens
  misc_RNA (1)...(19): siRNA sense strand
aggagucucuuaaggauaa

SEQ ID NO: 1605673 - RNA, 19 nt, Homo sapiens
  misc_RNA (1)...(19): siRNA sense strand
gcaugucucugcugcuguu

SEQ ID NO: 1605674 - RNA, 19 nt, Homo sapiens
  misc_RNA (1)...(19): siRNA sense strand
gcaggaauaacuguguuua

SEQ ID NO: 1605675 - RNA, 19 nt, Homo sapiens
  misc_RNA (1)...(19): siRNA sense strand
ggccaaaucuuuucuaaau

SEQ ID NO: 1605676 - RNA, 19 nt, Homo sapiens
  misc_RNA (1)...(19): siRNA sense strand
gacccuggaugguucuaaa

SEQ ID NO: 1605677 - RNA, 19 nt, Homo sapiens
  misc_RNA (1)...(19): siRNA sense strand
aguuugagguguaucauaa

SEQ ID NO: 1605678 - RNA, 19 nt, Homo sapiens
  misc_RNA (1)...(19): siRNA sense strand
gcuaucuccuggauccuuu

SEQ ID NO: 1605679 - RNA, 19 nt, Homo sapiens
  misc_RNA (1)...(19): siRNA sense strand
ggaugguucuaaauggaaa

SEQ ID NO: 1605680 - RNA, 19 nt, Homo sapiens
  misc_RNA (1)...(19): siRNA sense strand
gaaagcaguguucaaccuu

SEQ ID NO: 1605681 - RNA, 19 nt, Homo sapiens
  misc_RNA (1)...(19): siRNA sense strand
ucuccaggcugaagugaaa

SEQ ID NO: 1605682 - RNA, 19 nt, Homo sapiens
  misc_RNA (1)...(19): siRNA sense strand
acaagauacuacucagaaa

SEQ ID NO: 1605683 - RNA, 19 nt, Homo sapiens
  misc_RNA (1)...(19): siRNA sense strand
ucagagcccugcaccuguu

SEQ ID NO: 1605684 - RNA, 19 nt, Homo sapiens
  misc_RNA (1)...(19): siRNA sense strand
gaaaagacaagaucccaaa

SEQ ID NO: 1605685 - RNA, 19 nt, Homo sapiens
  misc_RNA (1)...(19): siRNA sense strand
gaccggaaggagucucuua

SEQ ID NO: 1605686 - RNA, 19 nt, Homo sapiens
  misc_RNA (1)...(19): siRNA sense strand
ggauuaaggaacugcauug

SEQ ID NO: 1605687 - RNA, 19 nt, Homo sapiens
  misc_RNA (1)...(19): siRNA sense strand
aggaggagauggaugauca

SEQ ID NO: 1605688 - RNA, 19 nt, Homo sapiens
  misc_RNA (1)...(19): siRNA sense strand
guuggacccuuuacgaugu

SEQ ID NO: 1605689 - RNA, 19 nt, Homo sapiens
  misc_RNA (1)...(19): siRNA sense strand
gggaacaccugagccagau

SEQ ID NO: 1605690 - RNA, 19 nt, Homo sapiens
  misc_RNA (1)...(19): siRNA sense strand
cagaggaggagauggauga

SEQ ID NO: 1605691 - RNA, 19 nt, Homo sapiens
  misc_RNA (1)...(19): siRNA sense strand
gacaccacauccagugcua

SEQ ID NO: 1605692 - RNA, 19 nt, Homo sapiens
  misc_RNA (1)...(19): siRNA sense strand
gcgaaaacaccaaagauuu

SEQ ID NO: 1605693 - RNA, 19 nt, Homo sapiens
  misc_RNA (1)...(19): siRNA sense strand
gagaugaaaucagggaacu

SEQ ID NO: 1605694 - RNA, 19 nt, Homo sapiens
  misc_RNA (1)...(19): siRNA sense strand
gcaccgguaguaaacauau

SEQ ID NO: 1605695 - RNA, 19 nt, Homo sapiens
  misc_RNA (1)...(19): siRNA sense strand
gaguuugagguguaucaua

SEQ ID NO: 1605696 - RNA, 19 nt, Homo sapiens
  misc_RNA (1)...(19): siRNA sense strand
cuucaucaguucacagaga

SEQ ID NO: 1605697 - RNA, 19 nt, Homo sapiens
  misc_RNA (1)...(19): siRNA sense strand
caugaugucugagaguguu

SEQ ID NO: 1605698 - RNA, 19 nt, Homo sapiens
  misc_RNA (1)...(19): siRNA sense strand
cuggagcucuuucaacaug

SEQ ID NO: 1605699 - RNA, 19 nt, Homo sapiens
  misc_RNA (1)...(19): siRNA sense strand
ggacaguacccuggacuca

SEQ ID NO: 1605700 - RNA, 19 nt, Homo sapiens
  misc_RNA (1)...(19): siRNA sense strand
ggacaugacaccacaucca

SEQ ID NO: 1605701 - RNA, 19 nt, Homo sapiens
  misc_RNA (1)...(19): siRNA sense strand
ugaaaucagggaacuccua

SEQ ID NO: 1605702 - RNA, 19 nt, Homo sapiens
  misc_RNA (1)...(19): siRNA sense strand
gucuggagcucuuucaaca

SEQ ID NO: 1605703 - RNA, 19 nt, Homo sapiens
  misc_RNA (1)...(19): siRNA sense strand
guaaaguggcaguggcauu

SEQ ID NO: 1605704 - RNA, 19 nt, Homo sapiens
  misc_RNA (1)...(19): siRNA sense strand
aaacauaucccgguuacuc

SEQ ID NO: 1605705 - RNA, 19 nt, Homo sapiens
  misc_RNA (1)...(19): siRNA sense strand
ccaaccagcgcaugaacaa

SEQ ID NO: 1605706 - RNA, 19 nt, Homo sapiens
  misc_RNA (1)...(19): siRNA sense strand
caucacaacgaccugguuu

SEQ ID NO: 1605707 - RNA, 19 nt, Homo sapiens
  misc_RNA (1)...(19): siRNA sense strand
gacaaacccaucaccuuuc

SEQ ID NO: 1605708 - RNA, 19 nt, Homo sapiens
  misc_RNA (1)...(19): siRNA sense strand
cugcugcuguuucagguaa

SEQ ID NO: 1605709 - RNA, 19 nt, Homo sapiens
  misc_RNA (1)...(19): siRNA sense strand
cccagacuaugccaagauu

SEQ ID NO: 1605710 - RNA, 19 nt, Homo sapiens
  misc_RNA (1)...(19): siRNA sense strand
uaacucugcuccgcuucaa

SEQ ID NO: 1605711 - RNA, 19 nt, Homo sapiens
  misc_RNA (1)...(19): siRNA sense strand
ucaguucacagagaaagua

SEQ ID NO: 1605712 - RNA, 19 nt, Homo sapiens
  misc_RNA (1)...(19): siRNA sense strand
cauaauugaguguaaagug

SEQ ID NO: 1605713 - RNA, 19 nt, Homo sapiens
  misc_RNA (1)...(19): siRNA sense strand
cggaaggagucucuuaagg

SEQ ID NO: 1605714 - RNA, 19 nt, Homo sapiens
  misc_RNA (1)...(19): siRNA sense strand
gaacaaaugggaggaacac

SEQ ID NO: 1605715 - RNA, 19 nt, Homo sapiens
  misc_RNA (1)...(19): siRNA sense strand
guccucaaguccaagaaug

SEQ ID NO: 1605716 - RNA, 19 nt, Homo sapiens
  misc_RNA (1)...(19): siRNA sense strand
gagaugccgagaugaaauc

SEQ ID NO: 1605717 - RNA, 19 nt, Homo sapiens
  misc_RNA (1)...(19): siRNA sense strand
aacaagauacuacucagaa

SEQ ID NO: 1605718 - RNA, 19 nt, Homo sapiens
  misc_RNA (1)...(19): siRNA sense strand
aaacaagauacuacucaga

SEQ ID NO: 1605719 - RNA, 19 nt, Homo sapiens
  misc_RNA (1)...(19): siRNA sense strand
aaccagcgcaugaacaauu

SEQ ID NO: 1605720 - RNA, 19 nt, Homo sapiens
  misc_RNA (1)...(19): siRNA sense strand
gaggaacacauugcccaaa

SEQ ID NO: 1605721 - RNA, 19 nt, Homo sapiens
  misc_RNA (1)...(19): siRNA sense strand
ggaugggucuucuauuacc

SEQ ID NO: 1605722 - RNA, 19 nt, Homo sapiens
  misc_RNA (1)...(19): siRNA sense strand
caaggaguuuuacccagua

SEQ ID NO: 1605723 - RNA, 19 nt, Homo sapiens
  misc_RNA (1)...(19): siRNA sense strand
ugccaagauucuccugaaa

SEQ ID NO: 1605724 - RNA, 19 nt, Homo sapiens
  misc_RNA (1)...(19): siRNA sense strand
ggacucauaccugaaagca

SEQ ID NO: 1605725 - RNA, 19 nt, Homo sapiens
  misc_RNA (1)...(19): siRNA sense strand
ggagcucuuucaacauguc

SEQ ID NO: 1605726 - RNA, 19 nt, Homo sapiens
  misc_RNA (1)...(19): siRNA sense strand
gaaaccuggcuucaacauc

SEQ ID NO: 1605727 - RNA, 19 nt, Homo sapiens
  misc_RNA (1)...(19): siRNA sense strand
uuacgauguucuucagugu

SEQ ID NO: 1605728 - RNA, 19 nt, Homo sapiens
  misc_RNA (1)...(19): siRNA sense strand
acaccaaagauuucucuga

SEQ ID NO: 1605729 - RNA, 19 nt, Homo sapiens
  misc_RNA (1)...(19): siRNA sense strand
aaaggaguuugagguguau

SEQ ID NO: 1605730 - RNA, 19 nt, Homo sapiens
  misc_RNA (1)...(19): siRNA sense strand
caugugcuguucccuugug

SEQ ID NO: 1605731 - RNA, 19 nt, Homo sapiens
  misc_RNA (1)...(19): siRNA sense strand
cagagaugccgagaugaaa

SEQ ID NO: 1605732 - RNA, 19 nt, Homo sapiens
  misc_RNA (1)...(19): siRNA sense strand
cggaugaugcugaacaaau

SEQ ID NO: 1605733 - RNA, 19 nt, Homo sapiens
  misc_RNA (1)...(19): siRNA sense strand
gcaccgccagauugugaaa

SEQ ID NO: 1605734 - RNA, 19 nt, Homo sapiens
  misc_RNA (1)...(19): siRNA sense strand
aagcaccgccagauuguga

SEQ ID NO: 1605735 - RNA, 19 nt, Homo sapiens
  misc_RNA (1)...(19): siRNA sense strand
auucucagcuggauuaagg

SEQ ID NO: 1605736 - RNA, 19 nt, Homo sapiens
  misc_RNA (1)...(19): siRNA sense strand
ugucucugcugcuguuuca

SEQ ID NO: 1605737 - RNA, 19 nt, Homo sapiens
  misc_RNA (1)...(19): siRNA sense strand
guucacagagaaaguaauc

SEQ ID NO: 1605738 - RNA, 19 nt, Homo sapiens
  misc_RNA (1)...(19): siRNA sense strand
accagcgcaugaacaauuu

SEQ ID NO: 1605739 - RNA, 19 nt, Homo sapiens
  misc_RNA (1)...(19): siRNA sense strand
gacccagacuaugccaaga

SEQ ID NO: 1605740 - RNA, 19 nt, Homo sapiens
  misc_RNA (1)...(19): siRNA sense strand
aaagugcuguuagccacaa

SEQ ID NO: 1605741 - RNA, 19 nt, Homo sapiens
  misc_RNA (1)...(19): siRNA sense strand
cgaccugguuuucaaauuc

SEQ ID NO: 1605742 - RNA, 19 nt, Homo sapiens
  misc_RNA (1)...(19): siRNA sense strand
ugccauaauugaguguaaa

SEQ ID NO: 1605743 - RNA, 19 nt, Homo sapiens
  misc_RNA (1)...(19): siRNA sense strand
accauucucagcuggauua

SEQ ID NO: 1605744 - RNA, 19 nt, Homo sapiens
  misc_RNA (1)...(19): siRNA sense strand
aggauaagcuaaaacaaga

SEQ ID NO: 1605745 - RNA, 19 nt, Homo sapiens
  misc_RNA (1)...(19): siRNA sense strand
ccaagauucuccugaaaag

SEQ ID NO: 1605746 - RNA, 19 nt, Homo sapiens
  misc_RNA (1)...(19): siRNA sense strand
ucagcuggauuaaggaacu

SEQ ID NO: 1605747 - RNA, 19 nt, Homo sapiens
  misc_RNA (1)...(19): siRNA sense strand
ggaaugccuccgccucuac

SEQ ID NO: 1605748 - RNA, 19 nt, Homo sapiens
  misc_RNA (1)...(19): siRNA sense strand
ggacagcaucaugaagugu

SEQ ID NO: 1605749 - RNA, 19 nt, Homo sapiens
  misc_RNA (1)...(19): siRNA sense strand
cuggaugguucuaaaugga

SEQ ID NO: 1605750 - RNA, 19 nt, Homo sapiens
  misc_RNA (1)...(19): siRNA sense strand
ccuggaugguucuaaaugg

SEQ ID NO: 1605751 - RNA, 19 nt, Homo sapiens
  misc_RNA (1)...(19): siRNA sense strand
caagauacuacucagaaaa

SEQ ID NO: 1605752 - RNA, 19 nt, Homo sapiens
  misc_RNA (1)...(19): siRNA sense strand
ccagauggacgcuccuuac

SEQ ID NO: 1605753 - RNA, 19 nt, Homo sapiens
  misc_RNA (1)...(19): siRNA sense strand
gggaugggucuucuauuac

SEQ ID NO: 1605754 - RNA, 19 nt, Homo sapiens
  misc_RNA (1)...(19): siRNA sense strand
ucuccuggauccuuuacug

SEQ ID NO: 1605755 - RNA, 19 nt, Homo sapiens
  misc_RNA (1)...(19): siRNA sense strand
gcagaucuccaggcugaag

SEQ ID NO: 1605756 - RNA, 19 nt, Homo sapiens
  misc_RNA (1)...(19): siRNA sense strand
gcagaaagaugcccgauuu

SEQ ID NO: 1605757 - RNA, 19 nt, Homo sapiens
  misc_RNA (1)...(19): siRNA sense strand
ccaaagugguucagaauga

SEQ ID NO: 1605758 - RNA, 19 nt, Homo sapiens
  misc_RNA (1)...(19): siRNA sense strand
gcaccaagaugacugugaa

SEQ ID NO: 1605759 - RNA, 19 nt, Homo sapiens
  misc_RNA (1)...(19): siRNA sense strand
gaauuuauaugaccuggau

SEQ ID NO: 1605760 - RNA, 19 nt, Homo sapiens
  misc_RNA (1)...(19): siRNA sense strand
uauaugaccuggaugaaga

SEQ ID NO: 1605761 - RNA, 19 nt, Homo sapiens
  misc_RNA (1)...(19): siRNA sense strand
gagaagaucagcuugaaga

SEQ ID NO: 1605762 - RNA, 19 nt, Homo sapiens
  misc_RNA (1)...(19): siRNA sense strand
ugaagaugaugaugguaua

SEQ ID NO: 1605763 - RNA, 19 nt, Homo sapiens
  misc_RNA (1)...(19): siRNA sense strand
caagaugacugugaauaau

SEQ ID NO: 1605764 - RNA, 19 nt, Homo sapiens
  misc_RNA (1)...(19): siRNA sense strand
ggacacuggugaacaagga

SEQ ID NO: 1605765 - RNA, 19 nt, Homo sapiens
  misc_RNA (1)...(19): siRNA sense strand
ggaauguuaucaccucaga

SEQ ID NO: 1605766 - RNA, 19 nt, Homo sapiens
  misc_RNA (1)...(19): siRNA sense strand
ccagagagauguugaacuc

SEQ ID NO: 1605767 - RNA, 19 nt, Homo sapiens
  misc_RNA (1)...(19): siRNA sense strand
ccaagaugacugugaauaa

SEQ ID NO: 1605768 - RNA, 19 nt, Homo sapiens
  misc_RNA (1)...(19): siRNA sense strand
gcagaagauuggccucuca

SEQ ID NO: 1605769 - RNA, 19 nt, Homo sapiens
  misc_RNA (1)...(19): siRNA sense strand
ggaugaagaugaugauggu

SEQ ID NO: 1605770 - RNA, 19 nt, Homo sapiens
  misc_RNA (1)...(19): siRNA sense strand
gggagaagaucagcuugaa

SEQ ID NO: 1605771 - RNA, 19 nt, Homo sapiens
  misc_RNA (1)...(19): siRNA sense strand
ccacgcagcccacagaauu

SEQ ID NO: 1605772 - RNA, 19 nt, Homo sapiens
  misc_RNA (1)...(19): siRNA sense strand
uagcuuccguuccuacuaa

SEQ ID NO: 1605773 - RNA, 19 nt, Homo sapiens
  misc_RNA (1)...(19): siRNA sense strand
gggagaagcuuuugcagaa

SEQ ID NO: 1605774 - RNA, 19 nt, Homo sapiens
  misc_RNA (1)...(19): siRNA sense strand
gcgaaaggacggcuuaaug

SEQ ID NO: 1605775 - RNA, 19 nt, Homo sapiens
  misc_RNA (1)...(19): siRNA sense strand
cuacuaaacagaugaaguu

SEQ ID NO: 1605776 - RNA, 19 nt, Homo sapiens
  misc_RNA (1)...(19): siRNA sense strand
ggacaucucccuggacgaa

SEQ ID NO: 1605777 - RNA, 19 nt, Homo sapiens
  misc_RNA (1)...(19): siRNA sense strand
uagcggaggugguguuugu

SEQ ID NO: 1605778 - RNA, 19 nt, Homo sapiens
  misc_RNA (1)...(19): siRNA sense strand
ugacagcccaucaaugaaa

SEQ ID NO: 1605779 - RNA, 19 nt, Homo sapiens
  misc_RNA (1)...(19): siRNA sense strand
guuccaagcuuuccauguc

SEQ ID NO: 1605780 - RNA, 19 nt, Homo sapiens
  misc_RNA (1)...(19): siRNA sense strand
gaagauuggccucucagau

SEQ ID NO: 1605781 - RNA, 19 nt, Homo sapiens
  misc_RNA (1)...(19): siRNA sense strand
ggaggacauuguugagcuu

SEQ ID NO: 1605782 - RNA, 19 nt, Homo sapiens
  misc_RNA (1)...(19): siRNA sense strand
aaagaugcccgauuucgaa

SEQ ID NO: 1605783 - RNA, 19 nt, Homo sapiens
  misc_RNA (1)...(19): siRNA sense strand
gguguccgaucucgaguug

SEQ ID NO: 1605784 - RNA, 19 nt, Homo sapiens
  misc_RNA (1)...(19): siRNA sense strand
gaacaaaagccuugaccaa

SEQ ID NO: 1605785 - RNA, 19 nt, Homo sapiens
  misc_RNA (1)...(19): siRNA sense strand
caaagugguucagaaugau

SEQ ID NO: 1605786 - RNA, 19 nt, Homo sapiens
  misc_RNA (1)...(19): siRNA sense strand
ccacauggcugggcuaagc

SEQ ID NO: 1605787 - RNA, 19 nt, Homo sapiens
  misc_RNA (1)...(19): siRNA sense strand
ucagaaugaugcauacaca

SEQ ID NO: 1605788 - RNA, 19 nt, Homo sapiens
  misc_RNA (1)...(19): siRNA sense strand
uggacgaacucaucaggaa

SEQ ID NO: 1605789 - RNA, 19 nt, Homo sapiens
  misc_RNA (1)...(19): siRNA sense strand
ggaggugguguuugugaaa

SEQ ID NO: 1605790 - RNA, 19 nt, Homo sapiens
  misc_RNA (1)...(19): siRNA sense strand
ugaccuggaugaagaugau

SEQ ID NO: 1605791 - RNA, 19 nt, Homo sapiens
  misc_RNA (1)...(19): siRNA sense strand
agugacagcccaucaauga

SEQ ID NO: 1605792 - RNA, 19 nt, Homo sapiens
  misc_RNA (1)...(19): siRNA sense strand
gcucucccuuccucuauuc

SEQ ID NO: 1605793 - RNA, 19 nt, Homo sapiens
  misc_RNA (1)...(19): siRNA sense strand
ccacagaauucaaaaucaa

SEQ ID NO: 1605794 - RNA, 19 nt, Homo sapiens
  misc_RNA (1)...(19): siRNA sense strand
gcaggaugccagagagaug

SEQ ID NO: 1605795 - RNA, 19 nt, Homo sapiens
  misc_RNA (1)...(19): siRNA sense strand
ucacugaggaggacauugu

SEQ ID NO: 1605796 - RNA, 19 nt, Homo sapiens
  misc_RNA (1)...(19): siRNA sense strand
ggcccucccucucaccaaa

SEQ ID NO: 1605797 - RNA, 19 nt, Homo sapiens
  misc_RNA (1)...(19): siRNA sense strand
cgaaaggacggcuuaaugc

SEQ ID NO: 1605798 - RNA, 19 nt, Homo sapiens
  misc_RNA (1)...(19): siRNA sense strand
gguauagcuuccguuccua

SEQ ID NO: 1605799 - RNA, 19 nt, Homo sapiens
  misc_RNA (1)...(19): siRNA sense strand
gcauauaagaaguacaaca

SEQ ID NO: 1605800 - RNA, 19 nt, Homo sapiens
  misc_RNA (1)...(19): siRNA sense strand
ccgcauauaagaaguacaa

SEQ ID NO: 1605801 - RNA, 19 nt, Homo sapiens
  misc_RNA (1)...(19): siRNA sense strand
aagauuggccucucagaug

SEQ ID NO: 1605802 - RNA, 19 nt, Homo sapiens
  misc_RNA (1)...(19): siRNA sense strand
gccaucaccgcauauaaga

SEQ ID NO: 1605803 - RNA, 19 nt, Homo sapiens
  misc_RNA (1)...(19): siRNA sense strand
gcagcccacagaauucaaa

SEQ ID NO: 1605804 - RNA, 19 nt, Homo sapiens
  misc_RNA (1)...(19): siRNA sense strand
ggcagccgaugaagugcaa

SEQ ID NO: 1605805 - RNA, 19 nt, Homo sapiens
  misc_RNA (1)...(19): siRNA sense strand
cuucauaaacccacccauu

SEQ ID NO: 1605806 - RNA, 19 nt, Homo sapiens
  misc_RNA (1)...(19): siRNA sense strand
caucaccgcauauaagaag

SEQ ID NO: 1605807 - RNA, 19 nt, Homo sapiens
  misc_RNA (1)...(19): siRNA sense strand
gaagaugaugaugguauag

SEQ ID NO: 1605808 - RNA, 19 nt, Homo sapiens
  misc_RNA (1)...(19): siRNA sense strand
gcggaggugguguuuguga

SEQ ID NO: 1605809 - RNA, 19 nt, Homo sapiens
  misc_RNA (1)...(19): siRNA sense strand
ggagaagcuuuugcagaaa

SEQ ID NO: 1605810 - RNA, 19 nt, Homo sapiens
  misc_RNA (1)...(19): siRNA sense strand
acaaaagccuugaccaaca

SEQ ID NO: 1605811 - RNA, 19 nt, Homo sapiens
  misc_RNA (1)...(19): siRNA sense strand
gcggcgaaaggacggcuua

SEQ ID NO: 1605812 - RNA, 19 nt, Homo sapiens
  misc_RNA (1)...(19): siRNA sense strand
cggaggugguguuugugaa

SEQ ID NO: 1605813 - RNA, 19 nt, Homo sapiens
  misc_RNA (1)...(19): siRNA sense strand
caaaagccuugaccaacau

SEQ ID NO: 1605814 - RNA, 19 nt, Homo sapiens
  misc_RNA (1)...(19): siRNA sense strand
caaacugggagucaaggau

SEQ ID NO: 1605815 - RNA, 19 nt, Homo sapiens
  misc_RNA (1)...(19): siRNA sense strand
ucaccgcauauaagaagua

SEQ ID NO: 1605816 - RNA, 19 nt, Homo sapiens
  misc_RNA (1)...(19): siRNA sense strand
ggacauuguugagcuuuuc

SEQ ID NO: 1605817 - RNA, 19 nt, Homo sapiens
  misc_RNA (1)...(19): siRNA sense strand
cccggacacuggugaacaa

SEQ ID NO: 1605818 - RNA, 19 nt, Homo sapiens
  misc_RNA (1)...(19): siRNA sense strand
gaugaugaugguauagcuu

SEQ ID NO: 1605819 - RNA, 19 nt, Homo sapiens
  misc_RNA (1)...(19): siRNA sense strand
ggagaagaucagcuugaag

SEQ ID NO: 1605820 - RNA, 19 nt, Homo sapiens
  misc_RNA (1)...(19): siRNA sense strand
ugaccacgcagcccacaga

SEQ ID NO: 1605821 - RNA, 19 nt, Homo sapiens
  misc_RNA (1)...(19): siRNA sense strand
uucauaaacccacccauug

SEQ ID NO: 1605822 - RNA, 19 nt, Homo sapiens
  misc_RNA (1)...(19): siRNA sense strand
gcucaaacugggagucaag

SEQ ID NO: 1605823 - RNA, 19 nt, Homo sapiens
  misc_RNA (1)...(19): siRNA sense strand
ucauaaacccacccauugg

SEQ ID NO: 1605824 - RNA, 19 nt, Homo sapiens
  misc_RNA (1)...(19): siRNA sense strand
gacagcccaucaaugaaaa

SEQ ID NO: 1605825 - RNA, 19 nt, Homo sapiens
  misc_RNA (1)...(19): siRNA sense strand
gagugacagcccaucaaug

SEQ ID NO: 1605826 - RNA, 19 nt, Homo sapiens
  misc_RNA (1)...(19): siRNA sense strand
gaggacauuguugagcuuu

SEQ ID NO: 1605827 - RNA, 19 nt, Homo sapiens
  misc_RNA (1)...(19): siRNA sense strand
aaucugcacccucgaguca

SEQ ID NO: 1605828 - RNA, 19 nt, Homo sapiens
  misc_RNA (1)...(19): siRNA sense strand
uggcugggcuaagcaguuc

SEQ ID NO: 1605829 - RNA, 19 nt, Homo sapiens
  misc_RNA (1)...(19): siRNA sense strand
gcucugaagcucaccaaaa

SEQ ID NO: 1605830 - RNA, 19 nt, Homo sapiens
  misc_RNA (1)...(19): siRNA sense strand
caacacgcacagccaccuu

SEQ ID NO: 1605831 - RNA, 19 nt, Homo sapiens
  misc_RNA (1)...(19): siRNA sense strand
ccaccuuccagcagagauu

SEQ ID NO: 1605832 - RNA, 19 nt, Homo sapiens
  misc_RNA (1)...(19): siRNA sense strand
ugagugacagcccaucaau

SEQ ID NO: 1605833 - RNA, 19 nt, Homo sapiens
  misc_RNA (1)...(19): siRNA sense strand
gcagaaagaugcccgauuu

SEQ ID NO: 1605834 - RNA, 19 nt, Homo sapiens
  misc_RNA (1)...(19): siRNA sense strand
ccaaagugguucagaauga

SEQ ID NO: 1605835 - RNA, 19 nt, Homo sapiens
  misc_RNA (1)...(19): siRNA sense strand
gcaccaagaugacugugaa

SEQ ID NO: 1605836 - RNA, 19 nt, Homo sapiens
  misc_RNA (1)...(19): siRNA sense strand
gaauuuauaugaccuggau

SEQ ID NO: 1605837 - RNA, 19 nt, Homo sapiens
  misc_RNA (1)...(19): siRNA sense strand
uauaugaccuggaugaaga

SEQ ID NO: 1605838 - RNA, 19 nt, Homo sapiens
  misc_RNA (1)...(19): siRNA sense strand
gagaagaucagcuugaaga

SEQ ID NO: 1605839 - RNA, 19 nt, Homo sapiens
  misc_RNA (1)...(19): siRNA sense strand
ugaagaugaugaugguaua

SEQ ID NO: 1605840 - RNA, 19 nt, Homo sapiens
  misc_RNA (1)...(19): siRNA sense strand
caagaugacugugaauaau

SEQ ID NO: 1605841 - RNA, 19 nt, Homo sapiens
  misc_RNA (1)...(19): siRNA sense strand
ggacacuggugaacaagga

SEQ ID NO: 1605842 - RNA, 19 nt, Homo sapiens
  misc_RNA (1)...(19): siRNA sense strand
ggaauguuaucaccucaga

SEQ ID NO: 1605843 - RNA, 19 nt, Homo sapiens
  misc_RNA (1)...(19): siRNA sense strand
ccagagagauguugaacuc

SEQ ID NO: 1605844 - RNA, 19 nt, Homo sapiens
  misc_RNA (1)...(19): siRNA sense strand
ccaagaugacugugaauaa

SEQ ID NO: 1605845 - RNA, 19 nt, Homo sapiens
  misc_RNA (1)...(19): siRNA sense strand
gcagaagauuggccucuca

SEQ ID NO: 1605846 - RNA, 19 nt, Homo sapiens
  misc_RNA (1)...(19): siRNA sense strand
ggaugaagaugaugauggu

SEQ ID NO: 1605847 - RNA, 19 nt, Homo sapiens
  misc_RNA (1)...(19): siRNA sense strand
gggagaagaucagcuugaa

SEQ ID NO: 1605848 - RNA, 19 nt, Homo sapiens
  misc_RNA (1)...(19): siRNA sense strand
ccacgcagcccacagaauu

SEQ ID NO: 1605849 - RNA, 19 nt, Homo sapiens
  misc_RNA (1)...(19): siRNA sense strand
uagcuuccguuccuacuaa

SEQ ID NO: 1605850 - RNA, 19 nt, Homo sapiens
  misc_RNA (1)...(19): siRNA sense strand
gggagaagcuuuugcagaa

SEQ ID NO: 1605851 - RNA, 19 nt, Homo sapiens
  misc_RNA (1)...(19): siRNA sense strand
gcgaaaggacggcuuaaug

SEQ ID NO: 1605852 - RNA, 19 nt, Homo sapiens
  misc_RNA (1)...(19): siRNA sense strand
cuacuaaacagaugaaguu

SEQ ID NO: 1605853 - RNA, 19 nt, Homo sapiens
  misc_RNA (1)...(19): siRNA sense strand
ggacaucucccuggacgaa

SEQ ID NO: 1605854 - RNA, 19 nt, Homo sapiens
  misc_RNA (1)...(19): siRNA sense strand
uagcggaggugguguuugu

SEQ ID NO: 1605855 - RNA, 19 nt, Homo sapiens
  misc_RNA (1)...(19): siRNA sense strand
ugacagcccaucaaugaaa

SEQ ID NO: 1605856 - RNA, 19 nt, Homo sapiens
  misc_RNA (1)...(19): siRNA sense strand
guuccaagcuuuccauguc

SEQ ID NO: 1605857 - RNA, 19 nt, Homo sapiens
  misc_RNA (1)...(19): siRNA sense strand
gaagauuggccucucagau

SEQ ID NO: 1605858 - RNA, 19 nt, Homo sapiens
  misc_RNA (1)...(19): siRNA sense strand
ggaggacauuguugagcuu

SEQ ID NO: 1605859 - RNA, 19 nt, Homo sapiens
  misc_RNA (1)...(19): siRNA sense strand
aaagaugcccgauuucgaa

SEQ ID NO: 1605860 - RNA, 19 nt, Homo sapiens
  misc_RNA (1)...(19): siRNA sense strand
gguguccgaucucgaguug

SEQ ID NO: 1605861 - RNA, 19 nt, Homo sapiens
  misc_RNA (1)...(19): siRNA sense strand
gaacaaaagccuugaccaa

SEQ ID NO: 1605862 - RNA, 19 nt, Homo sapiens
  misc_RNA (1)...(19): siRNA sense strand
caaagugguucagaaugau

SEQ ID NO: 1605863 - RNA, 19 nt, Homo sapiens
  misc_RNA (1)...(19): siRNA sense strand
ccacauggcugggcuaagc

SEQ ID NO: 1605864 - RNA, 19 nt, Homo sapiens
  misc_RNA (1)...(19): siRNA sense strand
ucagaaugaugcauacaca

SEQ ID NO: 1605865 - RNA, 19 nt, Homo sapiens
  misc_RNA (1)...(19): siRNA sense strand
uggacgaacucaucaggaa

SEQ ID NO: 1605866 - RNA, 19 nt, Homo sapiens
  misc_RNA (1)...(19): siRNA sense strand
ggaggugguguuugugaaa

SEQ ID NO: 1605867 - RNA, 19 nt, Homo sapiens
  misc_RNA (1)...(19): siRNA sense strand
ugaccuggaugaagaugau

SEQ ID NO: 1605868 - RNA, 19 nt, Homo sapiens
  misc_RNA (1)...(19): siRNA sense strand
agugacagcccaucaauga

SEQ ID NO: 1605869 - RNA, 19 nt, Homo sapiens
  misc_RNA (1)...(19): siRNA sense strand
gcucucccuuccucuauuc

SEQ ID NO: 1605870 - RNA, 19 nt, Homo sapiens
  misc_RNA (1)...(19): siRNA sense strand
ccacagaauucaaaaucaa

SEQ ID NO: 1605871 - RNA, 19 nt, Homo sapiens
  misc_RNA (1)...(19): siRNA sense strand
gcaggaugccagagagaug

SEQ ID NO: 1605872 - RNA, 19 nt, Homo sapiens
  misc_RNA (1)...(19): siRNA sense strand
ucacugaggaggacauugu

SEQ ID NO: 1605873 - RNA, 19 nt, Homo sapiens
  misc_RNA (1)...(19): siRNA sense strand
ggcccucccucucaccaaa

SEQ ID NO: 1605874 - RNA, 19 nt, Homo sapiens
  misc_RNA (1)...(19): siRNA sense strand
cgaaaggacggcuuaaugc

SEQ ID NO: 1605875 - RNA, 19 nt, Homo sapiens
  misc_RNA (1)...(19): siRNA sense strand
gguauagcuuccguuccua

SEQ ID NO: 1605876 - RNA, 19 nt, Homo sapiens
  misc_RNA (1)...(19): siRNA sense strand
gcauauaagaaguacaaca

SEQ ID NO: 1605877 - RNA, 19 nt, Homo sapiens
  misc_RNA (1)...(19): siRNA sense strand
ccgcauauaagaaguacaa

SEQ ID NO: 1605878 - RNA, 19 nt, Homo sapiens
  misc_RNA (1)...(19): siRNA sense strand
aagauuggccucucagaug

SEQ ID NO: 1605879 - RNA, 19 nt, Homo sapiens
  misc_RNA (1)...(19): siRNA sense strand
gccaucaccgcauauaaga

SEQ ID NO: 1605880 - RNA, 19 nt, Homo sapiens
  misc_RNA (1)...(19): siRNA sense strand
gcagcccacagaauucaaa

SEQ ID NO: 1605881 - RNA, 19 nt, Homo sapiens
  misc_RNA (1)...(19): siRNA sense strand
ggcagccgaugaagugcaa

SEQ ID NO: 1605882 - RNA, 19 nt, Homo sapiens
  misc_RNA (1)...(19): siRNA sense strand
cuucauaaacccacccauu

SEQ ID NO: 1605883 - RNA, 19 nt, Homo sapiens
  misc_RNA (1)...(19): siRNA sense strand
caucaccgcauauaagaag

SEQ ID NO: 1605884 - RNA, 19 nt, Homo sapiens
  misc_RNA (1)...(19): siRNA sense strand
gaagaugaugaugguauag

SEQ ID NO: 1605885 - RNA, 19 nt, Homo sapiens
  misc_RNA (1)...(19): siRNA sense strand
gcggaggugguguuuguga

SEQ ID NO: 1605886 - RNA, 19 nt, Homo sapiens
  misc_RNA (1)...(19): siRNA sense strand
ggagaagcuuuugcagaaa

SEQ ID NO: 1605887 - RNA, 19 nt, Homo sapiens
  misc_RNA (1)...(19): siRNA sense strand
acaaaagccuugaccaaca

SEQ ID NO: 1605888 - RNA, 19 nt, Homo sapiens
  misc_RNA (1)...(19): siRNA sense strand
gcggcgaaaggacggcuua

SEQ ID NO: 1605889 - RNA, 19 nt, Homo sapiens
  misc_RNA (1)...(19): siRNA sense strand
cggaggugguguuugugaa

SEQ ID NO: 1605890 - RNA, 19 nt, Homo sapiens
  misc_RNA (1)...(19): siRNA sense strand
caaaagccuugaccaacau

SEQ ID NO: 1605891 - RNA, 19 nt, Homo sapiens
  misc_RNA (1)...(19): siRNA sense strand
caaacugggagucaaggau

SEQ ID NO: 1605892 - RNA, 19 nt, Homo sapiens
  misc_RNA (1)...(19): siRNA sense strand
ucaccgcauauaagaagua

SEQ ID NO: 1605893 - RNA, 19 nt, Homo sapiens
  misc_RNA (1)...(19): siRNA sense strand
ggacauuguugagcuuuuc

SEQ ID NO: 1605894 - RNA, 19 nt, Homo sapiens
  misc_RNA (1)...(19): siRNA sense strand
cccggacacuggugaacaa

SEQ ID NO: 1605895 - RNA, 19 nt, Homo sapiens
  misc_RNA (1)...(19): siRNA sense strand
gaugaugaugguauagcuu

SEQ ID NO: 1605896 - RNA, 19 nt, Homo sapiens
  misc_RNA (1)...(19): siRNA sense strand
ggagaagaucagcuugaag

SEQ ID NO: 1605897 - RNA, 19 nt, Homo sapiens
  misc_RNA (1)...(19): siRNA sense strand
ugaccacgcagcccacaga

SEQ ID NO: 1605898 - RNA, 19 nt, Homo sapiens
  misc_RNA (1)...(19): siRNA sense strand
uucauaaacccacccauug

SEQ ID NO: 1605899 - RNA, 19 nt, Homo sapiens
  misc_RNA (1)...(19): siRNA sense strand
gcucaaacugggagucaag

SEQ ID NO: 1605900 - RNA, 19 nt, Homo sapiens
  misc_RNA (1)...(19): siRNA sense strand
ucauaaacccacccauugg

SEQ ID NO: 1605901 - RNA, 19 nt, Homo sapiens
  misc_RNA (1)...(19): siRNA sense strand
gacagcccaucaaugaaaa

SEQ ID NO: 1605902 - RNA, 19 nt, Homo sapiens
  misc_RNA (1)...(19): siRNA sense strand
gagugacagcccaucaaug

SEQ ID NO: 1605903 - RNA, 19 nt, Homo sapiens
  misc_RNA (1)...(19): siRNA sense strand
gaggacauuguugagcuuu

SEQ ID NO: 1605904 - RNA, 19 nt, Homo sapiens
  misc_RNA (1)...(19): siRNA sense strand
aaucugcacccucgaguca

SEQ ID NO: 1605905 - RNA, 19 nt, Homo sapiens
  misc_RNA (1)...(19): siRNA sense strand
uggcugggcuaagcaguuc

SEQ ID NO: 1605906 - RNA, 19 nt, Homo sapiens
  misc_RNA (1)...(19): siRNA sense strand
gcucugaagcucaccaaaa

SEQ ID NO: 1605907 - RNA, 19 nt, Homo sapiens
  misc_RNA (1)...(19): siRNA sense strand
caacacgcacagccaccuu

SEQ ID NO: 1605908 - RNA, 19 nt, Homo sapiens
  misc_RNA (1)...(19): siRNA sense strand
ccaccuuccagcagagauu

SEQ ID NO: 1605909 - RNA, 19 nt, Homo sapiens
  misc_RNA (1)...(19): siRNA sense strand
ugagugacagcccaucaau

SEQ ID NO: 1605910 - RNA, 19 nt, Homo sapiens
  misc_RNA (1)...(19): siRNA sense strand
caagugagcuacauucaug

SEQ ID NO: 1605911 - RNA, 19 nt, Homo sapiens
  misc_RNA (1)...(19): siRNA sense strand
caacuacucugguaccauu

SEQ ID NO: 1605912 - RNA, 19 nt, Homo sapiens
  misc_RNA (1)...(19): siRNA sense strand
gaacucugcuccuacauuc

SEQ ID NO: 1605913 - RNA, 19 nt, Homo sapiens
  misc_RNA (1)...(19): siRNA sense strand
uaagagagcugauacuuuu

SEQ ID NO: 1605914 - RNA, 19 nt, Homo sapiens
  misc_RNA (1)...(19): siRNA sense strand
ggaugguucuucuaaauga

SEQ ID NO: 1605915 - RNA, 19 nt, Homo sapiens
  misc_RNA (1)...(19): siRNA sense strand
ggccagauguggaaccaua

SEQ ID NO: 1605916 - RNA, 19 nt, Homo sapiens
  misc_RNA (1)...(19): siRNA sense strand
gaaaggcgauguuggaaaa

SEQ ID NO: 1605917 - RNA, 19 nt, Homo sapiens
  misc_RNA (1)...(19): siRNA sense strand
gcaagcuaaugaagaauau

SEQ ID NO: 1605918 - RNA, 19 nt, Homo sapiens
  misc_RNA (1)...(19): siRNA sense strand
ccucgaaacuauuccauga

SEQ ID NO: 1605919 - RNA, 19 nt, Homo sapiens
  misc_RNA (1)...(19): siRNA sense strand
guaacaagcucuucuucag

SEQ ID NO: 1605920 - RNA, 19 nt, Homo sapiens
  misc_RNA (1)...(19): siRNA sense strand
cauaagaacccacacaaug

SEQ ID NO: 1605921 - RNA, 19 nt, Homo sapiens
  misc_RNA (1)...(19): siRNA sense strand
aacaagcucuucuucagua

SEQ ID NO: 1605922 - RNA, 19 nt, Homo sapiens
  misc_RNA (1)...(19): siRNA sense strand
uagagcagcugauggaaug

SEQ ID NO: 1605923 - RNA, 19 nt, Homo sapiens
  misc_RNA (1)...(19): siRNA sense strand
ccgaaugaauggugauaaa

SEQ ID NO: 1605924 - RNA, 19 nt, Homo sapiens
  misc_RNA (1)...(19): siRNA sense strand
caggcaagcuaaugaagaa

SEQ ID NO: 1605925 - RNA, 19 nt, Homo sapiens
  misc_RNA (1)...(19): siRNA sense strand
gaaacuauuccaugauugu

SEQ ID NO: 1605926 - RNA, 19 nt, Homo sapiens
  misc_RNA (1)...(19): siRNA sense strand
uaccacggcuauccuuaua

SEQ ID NO: 1605927 - RNA, 19 nt, Homo sapiens
  misc_RNA (1)...(19): siRNA sense strand
ucaguaugguggacuauga

SEQ ID NO: 1605928 - RNA, 19 nt, Homo sapiens
  misc_RNA (1)...(19): siRNA sense strand
ccacccaacuacucuggua

SEQ ID NO: 1605929 - RNA, 19 nt, Homo sapiens
  misc_RNA (1)...(19): siRNA sense strand
ucgaaacuauuccaugauu

SEQ ID NO: 1605930 - RNA, 19 nt, Homo sapiens
  misc_RNA (1)...(19): siRNA sense strand
gaguucaucuauaacaaga

SEQ ID NO: 1605931 - RNA, 19 nt, Homo sapiens
  misc_RNA (1)...(19): siRNA sense strand
caauauuucguuccaagua

SEQ ID NO: 1605932 - RNA, 19 nt, Homo sapiens
  misc_RNA (1)...(19): siRNA sense strand
ggacaagugagcuacauuc

SEQ ID NO: 1605933 - RNA, 19 nt, Homo sapiens
  misc_RNA (1)...(19): siRNA sense strand
guggcagaaucacacauua

SEQ ID NO: 1605934 - RNA, 19 nt, Homo sapiens
  misc_RNA (1)...(19): siRNA sense strand
gagguuugcuuuauuugag

SEQ ID NO: 1605935 - RNA, 19 nt, Homo sapiens
  misc_RNA (1)...(19): siRNA sense strand
cauggugucucuguguaua

SEQ ID NO: 1605936 - RNA, 19 nt, Homo sapiens
  misc_RNA (1)...(19): siRNA sense strand
ggcagaaucacacauuauu

SEQ ID NO: 1605937 - RNA, 19 nt, Homo sapiens
  misc_RNA (1)...(19): siRNA sense strand
cgaaacuauuccaugauug

SEQ ID NO: 1605938 - RNA, 19 nt, Homo sapiens
  misc_RNA (1)...(19): siRNA sense strand
uaauuugccuagugggauu

SEQ ID NO: 1605939 - RNA, 19 nt, Homo sapiens
  misc_RNA (1)...(19): siRNA sense strand
acuuggaguucaucuauaa

SEQ ID NO: 1605940 - RNA, 19 nt, Homo sapiens
  misc_RNA (1)...(19): siRNA sense strand
ggcaagcuaaugaagaaua

SEQ ID NO: 1605941 - RNA, 19 nt, Homo sapiens
  misc_RNA (1)...(19): siRNA sense strand
gcaggcaagcuaaugaaga

SEQ ID NO: 1605942 - RNA, 19 nt, Homo sapiens
  misc_RNA (1)...(19): siRNA sense strand
ggagguuugcuuuauuuga

SEQ ID NO: 1605943 - RNA, 19 nt, Homo sapiens
  misc_RNA (1)...(19): siRNA sense strand
guuggagguuugcuuuauu

SEQ ID NO: 1605944 - RNA, 19 nt, Homo sapiens
  misc_RNA (1)...(19): siRNA sense strand
cuaagagagcugauacuuu

SEQ ID NO: 1605945 - RNA, 19 nt, Homo sapiens
  misc_RNA (1)...(19): siRNA sense strand
ggcaccaccucgaaacuau

SEQ ID NO: 1605946 - RNA, 19 nt, Homo sapiens
  misc_RNA (1)...(19): siRNA sense strand
gccauggugucucugugua

SEQ ID NO: 1605947 - RNA, 19 nt, Homo sapiens
  misc_RNA (1)...(19): siRNA sense strand
ggugauaaauuccgaaaau

SEQ ID NO: 1605948 - RNA, 19 nt, Homo sapiens
  misc_RNA (1)...(19): siRNA sense strand
gcgaacuccuggcgcuauu

SEQ ID NO: 1605949 - RNA, 19 nt, Homo sapiens
  misc_RNA (1)...(19): siRNA sense strand
caugaacucugcuccuaca

SEQ ID NO: 1605950 - RNA, 19 nt, Homo sapiens
  misc_RNA (1)...(19): siRNA sense strand
gcaacuagcaaaguggauu

SEQ ID NO: 1605951 - RNA, 19 nt, Homo sapiens
  misc_RNA (1)...(19): siRNA sense strand
gaugguucuucuaaaugaa

SEQ ID NO: 1605952 - RNA, 19 nt, Homo sapiens
  misc_RNA (1)...(19): siRNA sense strand
uaaaggcaccaccucgaaa

SEQ ID NO: 1605953 - RNA, 19 nt, Homo sapiens
  misc_RNA (1)...(19): siRNA sense strand
cagcugagcaacuagcaaa

SEQ ID NO: 1605954 - RNA, 19 nt, Homo sapiens
  misc_RNA (1)...(19): siRNA sense strand
uuggagguuugcuuuauuu

SEQ ID NO: 1605955 - RNA, 19 nt, Homo sapiens
  misc_RNA (1)...(19): siRNA sense strand
aaaguggauugcugacaga

SEQ ID NO: 1605956 - RNA, 19 nt, Homo sapiens
  misc_RNA (1)...(19): siRNA sense strand
cagcggcaguguucugugu

SEQ ID NO: 1605957 - RNA, 19 nt, Homo sapiens
  misc_RNA (1)...(19): siRNA sense strand
cgaaaggcgauguuggaaa

SEQ ID NO: 1605958 - RNA, 19 nt, Homo sapiens
  misc_RNA (1)...(19): siRNA sense strand
uaagaacccacacaaugga

SEQ ID NO: 1605959 - RNA, 19 nt, Homo sapiens
  misc_RNA (1)...(19): siRNA sense strand
aacaugaacucugcuccua

SEQ ID NO: 1605960 - RNA, 19 nt, Homo sapiens
  misc_RNA (1)...(19): siRNA sense strand
gaacuccuggcgcuauuca

SEQ ID NO: 1605961 - RNA, 19 nt, Homo sapiens
  misc_RNA (1)...(19): siRNA sense strand
caacuagcaaaguggauug

SEQ ID NO: 1605962 - RNA, 19 nt, Homo sapiens
  misc_RNA (1)...(19): siRNA sense strand
guaccacggcuauccuuau

SEQ ID NO: 1605963 - RNA, 19 nt, Homo sapiens
  misc_RNA (1)...(19): siRNA sense strand
ccacacaauggacaaguga

SEQ ID NO: 1605964 - RNA, 19 nt, Homo sapiens
  misc_RNA (1)...(19): siRNA sense strand
cgcucaaucuuccgaauga

SEQ ID NO: 1605965 - RNA, 19 nt, Homo sapiens
  misc_RNA (1)...(19): siRNA sense strand
gaacccacacaauggacaa

SEQ ID NO: 1605966 - RNA, 19 nt, Homo sapiens
  misc_RNA (1)...(19): siRNA sense strand
gauugggccugguggucuu

SEQ ID NO: 1605967 - RNA, 19 nt, Homo sapiens
  misc_RNA (1)...(19): siRNA sense strand
gggaugguucuucuaaaug

SEQ ID NO: 1605968 - RNA, 19 nt, Homo sapiens
  misc_RNA (1)...(19): siRNA sense strand
uaacaagcucuucuucagu

SEQ ID NO: 1605969 - RNA, 19 nt, Homo sapiens
  misc_RNA (1)...(19): siRNA sense strand
ccaaaaggcagaccuaaga

SEQ ID NO: 1605970 - RNA, 19 nt, Homo sapiens
  misc_RNA (1)...(19): siRNA sense strand
gagaaucuuuuagcugaaa

SEQ ID NO: 1605971 - RNA, 19 nt, Homo sapiens
  misc_RNA (1)...(19): siRNA sense strand
gcaccaccucgaaacuauu

SEQ ID NO: 1605972 - RNA, 19 nt, Homo sapiens
  misc_RNA (1)...(19): siRNA sense strand
ggaguucaucuauaacaag

SEQ ID NO: 1605973 - RNA, 19 nt, Homo sapiens
  misc_RNA (1)...(19): siRNA sense strand
guagagcagcugauggaau

SEQ ID NO: 1605974 - RNA, 19 nt, Homo sapiens
  misc_RNA (1)...(19): siRNA sense strand
guucaucuauaacaagacu

SEQ ID NO: 1605975 - RNA, 19 nt, Homo sapiens
  misc_RNA (1)...(19): siRNA sense strand
gacaagugagcuacauuca

SEQ ID NO: 1605976 - RNA, 19 nt, Homo sapiens
  misc_RNA (1)...(19): siRNA sense strand
ugaacucugcuccuacauu

SEQ ID NO: 1605977 - RNA, 19 nt, Homo sapiens
  misc_RNA (1)...(19): siRNA sense strand
acggauaauuugccuagug

SEQ ID NO: 1605978 - RNA, 19 nt, Homo sapiens
  misc_RNA (1)...(19): siRNA sense strand
gcucaaucuuccgaaugaa

SEQ ID NO: 1605979 - RNA, 19 nt, Homo sapiens
  misc_RNA (1)...(19): siRNA sense strand
gauguucauauucggguuu

SEQ ID NO: 1605980 - RNA, 19 nt, Homo sapiens
  misc_RNA (1)...(19): siRNA sense strand
cugagcaacuagcaaagug

SEQ ID NO: 1605981 - RNA, 19 nt, Homo sapiens
  misc_RNA (1)...(19): siRNA sense strand
ggggaugguucuucuaaau

SEQ ID NO: 1605982 - RNA, 19 nt, Homo sapiens
  misc_RNA (1)...(19): siRNA sense strand
uggaguucaucuauaacaa

SEQ ID NO: 1605983 - RNA, 19 nt, Homo sapiens
  misc_RNA (1)...(19): siRNA sense strand
cgaaugaauggugauaaau

SEQ ID NO: 1605984 - RNA, 19 nt, Homo sapiens
  misc_RNA (1)...(19): siRNA sense strand
acauuauucugguacugaa

SEQ ID NO: 1605985 - RNA, 19 nt, Homo sapiens
  misc_RNA (1)...(19): siRNA sense strand
ugagaaggaacaacuugga

SEQ ID NO: 1605986 - RNA, 19 nt, Homo sapiens
  misc_RNA (1)...(19): siRNA sense strand
ccuaagagagcugauacuu

SEQ ID NO: 1605987 - RNA, 19 nt, Homo sapiens
  misc_RNA (1)...(19): siRNA sense strand
guggucuucuucuucaguu

SEQ ID NO: 1605988 - RNA, 19 nt, Homo sapiens
  misc_RNA (1)...(19): siRNA sense strand
gguacugaaugccgcuauc

SEQ ID NO: 1605989 - RNA, 19 nt, Homo sapiens
  misc_RNA (1)...(19): siRNA sense strand
gguuugcuuuauuugagaa

SEQ ID NO: 1605990 - RNA, 19 nt, Homo sapiens
  misc_RNA (1)...(19): siRNA sense strand
uguuggagguuugcuuuau

SEQ ID NO: 1605991 - RNA, 19 nt, Homo sapiens
  misc_RNA (1)...(19): siRNA sense strand
ucaaucuuccgaaugaaug

SEQ ID NO: 1605992 - RNA, 19 nt, Homo sapiens
  misc_RNA (1)...(19): siRNA sense strand
guacugaaugccgcuauca

SEQ ID NO: 1605993 - RNA, 19 nt, Homo sapiens
  misc_RNA (1)...(19): siRNA sense strand
gcucauaagaacccacaca

SEQ ID NO: 1605994 - RNA, 19 nt, Homo sapiens
  misc_RNA (1)...(19): siRNA sense strand
auaagaacccacacaaugg

SEQ ID NO: 1605995 - RNA, 19 nt, Homo sapiens
  misc_RNA (1)...(19): siRNA sense strand
gacgcucaaucuuccgaau

SEQ ID NO: 1605996 - RNA, 19 nt, Homo sapiens
  misc_RNA (1)...(19): siRNA sense strand
acaauggacaagugagcua

SEQ ID NO: 1605997 - RNA, 19 nt, Homo sapiens
  misc_RNA (1)...(19): siRNA sense strand
gaccuaagagagcugauac

SEQ ID NO: 1605998 - RNA, 19 nt, Homo sapiens
  misc_RNA (1)...(19): siRNA sense strand
aagcucuucuucaguaugg

SEQ ID NO: 1605999 - RNA, 19 nt, Homo sapiens
  misc_RNA (1)...(19): siRNA sense strand
cugguggucuucuucuuca

SEQ ID NO: 1606000 - RNA, 19 nt, Homo sapiens
  misc_RNA (1)...(19): siRNA sense strand
ucauaagaacccacacaau

SEQ ID NO: 1606001 - RNA, 19 nt, Homo sapiens
  misc_RNA (1)...(19): siRNA sense strand
auaaaggcaccaccucgaa

SEQ ID NO: 1606002 - RNA, 19 nt, Homo sapiens
  misc_RNA (1)...(19): siRNA sense strand
gugcaggcaagcuaaugaa

SEQ ID NO: 1606003 - RNA, 19 nt, Homo sapiens
  misc_RNA (1)...(19): siRNA sense strand
guaugguggacuaugauga

SEQ ID NO: 1606004 - RNA, 19 nt, Homo sapiens
  misc_RNA (1)...(19): siRNA sense strand
acaagcucuucuucaguau

SEQ ID NO: 1606005 - RNA, 19 nt, Homo sapiens
  misc_RNA (1)...(19): siRNA sense strand
uauguucacugcucuucag

SEQ ID NO: 1606006 - RNA, 19 nt, Homo sapiens
  misc_RNA (1)...(19): siRNA sense strand
gcuuuggcccuguuagugu

SEQ ID NO: 1606007 - RNA, 19 nt, Homo sapiens
  misc_RNA (1)...(19): siRNA sense strand
agaccuaagagagcugaua

SEQ ID NO: 1606008 - RNA, 19 nt, Homo sapiens
  misc_RNA (1)...(19): siRNA sense strand
guuagugucgcuuguugga

SEQ ID NO: 1606009 - RNA, 19 nt, Homo sapiens
  misc_RNA (1)...(19): siRNA sense strand
aauauuucguuccaaguac

SEQ ID NO: 1606010 - RNA, 19 nt, Homo sapiens
  misc_RNA (1)...(19): siRNA sense strand
caagugagcuacauucaug

SEQ ID NO: 1606011 - RNA, 19 nt, Homo sapiens
  misc_RNA (1)...(19): siRNA sense strand
caacuacucugguaccauu

SEQ ID NO: 1606012 - RNA, 19 nt, Homo sapiens
  misc_RNA (1)...(19): siRNA sense strand
gaacucugcuccuacauuc

SEQ ID NO: 1606013 - RNA, 19 nt, Homo sapiens
  misc_RNA (1)...(19): siRNA sense strand
uaagagagcugauacuuuu

SEQ ID NO: 1606014 - RNA, 19 nt, Homo sapiens
  misc_RNA (1)...(19): siRNA sense strand
ggaugguucuucuaaauga

SEQ ID NO: 1606015 - RNA, 19 nt, Homo sapiens
  misc_RNA (1)...(19): siRNA sense strand
ggccagauguggaaccaua

SEQ ID NO: 1606016 - RNA, 19 nt, Homo sapiens
  misc_RNA (1)...(19): siRNA sense strand
gaaaggcgauguuggaaaa

SEQ ID NO: 1606017 - RNA, 19 nt, Homo sapiens
  misc_RNA (1)...(19): siRNA sense strand
gcaagcuaaugaagaauau

SEQ ID NO: 1606018 - RNA, 19 nt, Homo sapiens
  misc_RNA (1)...(19): siRNA sense strand
ccucgaaacuauuccauga

SEQ ID NO: 1606019 - RNA, 19 nt, Homo sapiens
  misc_RNA (1)...(19): siRNA sense strand
guaacaagcucuucuucag

SEQ ID NO: 1606020 - RNA, 19 nt, Homo sapiens
  misc_RNA (1)...(19): siRNA sense strand
cauaagaacccacacaaug

SEQ ID NO: 1606021 - RNA, 19 nt, Homo sapiens
  misc_RNA (1)...(19): siRNA sense strand
aacaagcucuucuucagua

SEQ ID NO: 1606022 - RNA, 19 nt, Homo sapiens
  misc_RNA (1)...(19): siRNA sense strand
uagagcagcugauggaaug

SEQ ID NO: 1606023 - RNA, 19 nt, Homo sapiens
  misc_RNA (1)...(19): siRNA sense strand
ccgaaugaauggugauaaa

SEQ ID NO: 1606024 - RNA, 19 nt, Homo sapiens
  misc_RNA (1)...(19): siRNA sense strand
caggcaagcuaaugaagaa

SEQ ID NO: 1606025 - RNA, 19 nt, Homo sapiens
  misc_RNA (1)...(19): siRNA sense strand
gaaacuauuccaugauugu

SEQ ID NO: 1606026 - RNA, 19 nt, Homo sapiens
  misc_RNA (1)...(19): siRNA sense strand
uaccacggcuauccuuaua

SEQ ID NO: 1606027 - RNA, 19 nt, Homo sapiens
  misc_RNA (1)...(19): siRNA sense strand
ucaguaugguggacuauga

SEQ ID NO: 1606028 - RNA, 19 nt, Homo sapiens
  misc_RNA (1)...(19): siRNA sense strand
ccacccaacuacucuggua

SEQ ID NO: 1606029 - RNA, 19 nt, Homo sapiens
  misc_RNA (1)...(19): siRNA sense strand
ucgaaacuauuccaugauu

SEQ ID NO: 1606030 - RNA, 19 nt, Homo sapiens
  misc_RNA (1)...(19): siRNA sense strand
gaguucaucuauaacaaga

SEQ ID NO: 1606031 - RNA, 19 nt, Homo sapiens
  misc_RNA (1)...(19): siRNA sense strand
caauauuucguuccaagua

SEQ ID NO: 1606032 - RNA, 19 nt, Homo sapiens
  misc_RNA (1)...(19): siRNA sense strand
ggacaagugagcuacauuc

SEQ ID NO: 1606033 - RNA, 19 nt, Homo sapiens
  misc_RNA (1)...(19): siRNA sense strand
guggcagaaucacacauua

SEQ ID NO: 1606034 - RNA, 19 nt, Homo sapiens
  misc_RNA (1)...(19): siRNA sense strand
gagguuugcuuuauuugag

SEQ ID NO: 1606035 - RNA, 19 nt, Homo sapiens
  misc_RNA (1)...(19): siRNA sense strand
cauggugucucuguguaua

SEQ ID NO: 1606036 - RNA, 19 nt, Homo sapiens
  misc_RNA (1)...(19): siRNA sense strand
ggcagaaucacacauuauu

SEQ ID NO: 1606037 - RNA, 19 nt, Homo sapiens
  misc_RNA (1)...(19): siRNA sense strand
cgaaacuauuccaugauug

SEQ ID NO: 1606038 - RNA, 19 nt, Homo sapiens
  misc_RNA (1)...(19): siRNA sense strand
uaauuugccuagugggauu

SEQ ID NO: 1606039 - RNA, 19 nt, Homo sapiens
  misc_RNA (1)...(19): siRNA sense strand
acuuggaguucaucuauaa

SEQ ID NO: 1606040 - RNA, 19 nt, Homo sapiens
  misc_RNA (1)...(19): siRNA sense strand
ggcaagcuaaugaagaaua

SEQ ID NO: 1606041 - RNA, 19 nt, Homo sapiens
  misc_RNA (1)...(19): siRNA sense strand
gcaggcaagcuaaugaaga

SEQ ID NO: 1606042 - RNA, 19 nt, Homo sapiens
  misc_RNA (1)...(19): siRNA sense strand
ggagguuugcuuuauuuga

SEQ ID NO: 1606043 - RNA, 19 nt, Homo sapiens
  misc_RNA (1)...(19): siRNA sense strand
guuggagguuugcuuuauu

SEQ ID NO: 1606044 - RNA, 19 nt, Homo sapiens
  misc_RNA (1)...(19): siRNA sense strand
cuaagagagcugauacuuu

SEQ ID NO: 1606045 - RNA, 19 nt, Homo sapiens
  misc_RNA (1)...(19): siRNA sense strand
ggcaccaccucgaaacuau

SEQ ID NO: 1606046 - RNA, 19 nt, Homo sapiens
  misc_RNA (1)...(19): siRNA sense strand
gccauggugucucugugua

SEQ ID NO: 1606047 - RNA, 19 nt, Homo sapiens
  misc_RNA (1)...(19): siRNA sense strand
ggugauaaauuccgaaaau

SEQ ID NO: 1606048 - RNA, 19 nt, Homo sapiens
  misc_RNA (1)...(19): siRNA sense strand
gcgaacuccuggcgcuauu

SEQ ID NO: 1606049 - RNA, 19 nt, Homo sapiens
  misc_RNA (1)...(19): siRNA sense strand
caugaacucugcuccuaca

SEQ ID NO: 1606050 - RNA, 19 nt, Homo sapiens
  misc_RNA (1)...(19): siRNA sense strand
gcaacuagcaaaguggauu

SEQ ID NO: 1606051 - RNA, 19 nt, Homo sapiens
  misc_RNA (1)...(19): siRNA sense strand
gaugguucuucuaaaugaa

SEQ ID NO: 1606052 - RNA, 19 nt, Homo sapiens
  misc_RNA (1)...(19): siRNA sense strand
uaaaggcaccaccucgaaa

SEQ ID NO: 1606053 - RNA, 19 nt, Homo sapiens
  misc_RNA (1)...(19): siRNA sense strand
cagcugagcaacuagcaaa

SEQ ID NO: 1606054 - RNA, 19 nt, Homo sapiens
  misc_RNA (1)...(19): siRNA sense strand
uuggagguuugcuuuauuu

SEQ ID NO: 1606055 - RNA, 19 nt, Homo sapiens
  misc_RNA (1)...(19): siRNA sense strand
aaaguggauugcugacaga

SEQ ID NO: 1606056 - RNA, 19 nt, Homo sapiens
  misc_RNA (1)...(19): siRNA sense strand
cagcggcaguguucugugu

SEQ ID NO: 1606057 - RNA, 19 nt, Homo sapiens
  misc_RNA (1)...(19): siRNA sense strand
cgaaaggcgauguuggaaa

SEQ ID NO: 1606058 - RNA, 19 nt, Homo sapiens
  misc_RNA (1)...(19): siRNA sense strand
uaagaacccacacaaugga

SEQ ID NO: 1606059 - RNA, 19 nt, Homo sapiens
  misc_RNA (1)...(19): siRNA sense strand
aacaugaacucugcuccua

SEQ ID NO: 1606060 - RNA, 19 nt, Homo sapiens
  misc_RNA (1)...(19): siRNA sense strand
gaacuccuggcgcuauuca

SEQ ID NO: 1606061 - RNA, 19 nt, Homo sapiens
  misc_RNA (1)...(19): siRNA sense strand
caacuagcaaaguggauug

SEQ ID NO: 1606062 - RNA, 19 nt, Homo sapiens
  misc_RNA (1)...(19): siRNA sense strand
guaccacggcuauccuuau

SEQ ID NO: 1606063 - RNA, 19 nt, Homo sapiens
  misc_RNA (1)...(19): siRNA sense strand
ccacacaauggacaaguga

SEQ ID NO: 1606064 - RNA, 19 nt, Homo sapiens
  misc_RNA (1)...(19): siRNA sense strand
cgcucaaucuuccgaauga

SEQ ID NO: 1606065 - RNA, 19 nt, Homo sapiens
  misc_RNA (1)...(19): siRNA sense strand
gaacccacacaauggacaa

SEQ ID NO: 1606066 - RNA, 19 nt, Homo sapiens
  misc_RNA (1)...(19): siRNA sense strand
gauugggccugguggucuu

SEQ ID NO: 1606067 - RNA, 19 nt, Homo sapiens
  misc_RNA (1)...(19): siRNA sense strand
gggaugguucuucuaaaug

SEQ ID NO: 1606068 - RNA, 19 nt, Homo sapiens
  misc_RNA (1)...(19): siRNA sense strand
uaacaagcucuucuucagu

SEQ ID NO: 1606069 - RNA, 19 nt, Homo sapiens
  misc_RNA (1)...(19): siRNA sense strand
ccaaaaggcagaccuaaga

SEQ ID NO: 1606070 - RNA, 19 nt, Homo sapiens
  misc_RNA (1)...(19): siRNA sense strand
gagaaucuuuuagcugaaa

SEQ ID NO: 1606071 - RNA, 19 nt, Homo sapiens
  misc_RNA (1)...(19): siRNA sense strand
gcaccaccucgaaacuauu

SEQ ID NO: 1606072 - RNA, 19 nt, Homo sapiens
  misc_RNA (1)...(19): siRNA sense strand
ggaguucaucuauaacaag

SEQ ID NO: 1606073 - RNA, 19 nt, Homo sapiens
  misc_RNA (1)...(19): siRNA sense strand
guagagcagcugauggaau

SEQ ID NO: 1606074 - RNA, 19 nt, Homo sapiens
  misc_RNA (1)...(19): siRNA sense strand
guucaucuauaacaagacu

SEQ ID NO: 1606075 - RNA, 19 nt, Homo sapiens
  misc_RNA (1)...(19): siRNA sense strand
gacaagugagcuacauuca

SEQ ID NO: 1606076 - RNA, 19 nt, Homo sapiens
  misc_RNA (1)...(19): siRNA sense strand
ugaacucugcuccuacauu

SEQ ID NO: 1606077 - RNA, 19 nt, Homo sapiens
  misc_RNA (1)...(19): siRNA sense strand
acggauaauuugccuagug

SEQ ID NO: 1606078 - RNA, 19 nt, Homo sapiens
  misc_RNA (1)...(19): siRNA sense strand
gcucaaucuuccgaaugaa

SEQ ID NO: 1606079 - RNA, 19 nt, Homo sapiens
  misc_RNA (1)...(19): siRNA sense strand
gauguucauauucggguuu

SEQ ID NO: 1606080 - RNA, 19 nt, Homo sapiens
  misc_RNA (1)...(19): siRNA sense strand
cugagcaacuagcaaagug

SEQ ID NO: 1606081 - RNA, 19 nt, Homo sapiens
  misc_RNA (1)...(19): siRNA sense strand
ggggaugguucuucuaaau

SEQ ID NO: 1606082 - RNA, 19 nt, Homo sapiens
  misc_RNA (1)...(19): siRNA sense strand
uggaguucaucuauaacaa

SEQ ID NO: 1606083 - RNA, 19 nt, Homo sapiens
  misc_RNA (1)...(19): siRNA sense strand
cgaaugaauggugauaaau

SEQ ID NO: 1606084 - RNA, 19 nt, Homo sapiens
  misc_RNA (1)...(19): siRNA sense strand
acauuauucugguacugaa

SEQ ID NO: 1606085 - RNA, 19 nt, Homo sapiens
  misc_RNA (1)...(19): siRNA sense strand
ugagaaggaacaacuugga

SEQ ID NO: 1606086 - RNA, 19 nt, Homo sapiens
  misc_RNA (1)...(19): siRNA sense strand
ccuaagagagcugauacuu

SEQ ID NO: 1606087 - RNA, 19 nt, Homo sapiens
  misc_RNA (1)...(19): siRNA sense strand
guggucuucuucuucaguu

SEQ ID NO: 1606088 - RNA, 19 nt, Homo sapiens
  misc_RNA (1)...(19): siRNA sense strand
gguacugaaugccgcuauc

SEQ ID NO: 1606089 - RNA, 19 nt, Homo sapiens
  misc_RNA (1)...(19): siRNA sense strand
gguuugcuuuauuugagaa

SEQ ID NO: 1606090 - RNA, 19 nt, Homo sapiens
  misc_RNA (1)...(19): siRNA sense strand
uguuggagguuugcuuuau

SEQ ID NO: 1606091 - RNA, 19 nt, Homo sapiens
  misc_RNA (1)...(19): siRNA sense strand
ucaaucuuccgaaugaaug

SEQ ID NO: 1606092 - RNA, 19 nt, Homo sapiens
  misc_RNA (1)...(19): siRNA sense strand
guacugaaugccgcuauca

SEQ ID NO: 1606093 - RNA, 19 nt, Homo sapiens
  misc_RNA (1)...(19): siRNA sense strand
gcucauaagaacccacaca

SEQ ID NO: 1606094 - RNA, 19 nt, Homo sapiens
  misc_RNA (1)...(19): siRNA sense strand
auaagaacccacacaaugg

SEQ ID NO: 1606095 - RNA, 19 nt, Homo sapiens
  misc_RNA (1)...(19): siRNA sense strand
gacgcucaaucuuccgaau

SEQ ID NO: 1606096 - RNA, 19 nt, Homo sapiens
  misc_RNA (1)...(19): siRNA sense strand
acaauggacaagugagcua

SEQ ID NO: 1606097 - RNA, 19 nt, Homo sapiens
  misc_RNA (1)...(19): siRNA sense strand
gaccuaagagagcugauac

SEQ ID NO: 1606098 - RNA, 19 nt, Homo sapiens
  misc_RNA (1)...(19): siRNA sense strand
aagcucuucuucaguaugg

SEQ ID NO: 1606099 - RNA, 19 nt, Homo sapiens
  misc_RNA (1)...(19): siRNA sense strand
cugguggucuucuucuuca

SEQ ID NO: 1606100 - RNA, 19 nt, Homo sapiens
  misc_RNA (1)...(19): siRNA sense strand
ucauaagaacccacacaau

SEQ ID NO: 1606101 - RNA, 19 nt, Homo sapiens
  misc_RNA (1)...(19): siRNA sense strand
auaaaggcaccaccucgaa

SEQ ID NO: 1606102 - RNA, 19 nt, Homo sapiens
  misc_RNA (1)...(19): siRNA sense strand
gugcaggcaagcuaaugaa

SEQ ID NO: 1606103 - RNA, 19 nt, Homo sapiens
  misc_RNA (1)...(19): siRNA sense strand
guaugguggacuaugauga

SEQ ID NO: 1606104 - RNA, 19 nt, Homo sapiens
  misc_RNA (1)...(19): siRNA sense strand
acaagcucuucuucaguau

SEQ ID NO: 1606105 - RNA, 19 nt, Homo sapiens
  misc_RNA (1)...(19): siRNA sense strand
uauguucacugcucuucag

SEQ ID NO: 1606106 - RNA, 19 nt, Homo sapiens
  misc_RNA (1)...(19): siRNA sense strand
gcuuuggcccuguuagugu

SEQ ID NO: 1606107 - RNA, 19 nt, Homo sapiens
  misc_RNA (1)...(19): siRNA sense strand
agaccuaagagagcugaua

SEQ ID NO: 1606108 - RNA, 19 nt, Homo sapiens
  misc_RNA (1)...(19): siRNA sense strand
guuagugucgcuuguugga

SEQ ID NO: 1606109 - RNA, 19 nt, Homo sapiens
  misc_RNA (1)...(19): siRNA sense strand
aauauuucguuccaaguac

SEQ ID NO: 1606110 - RNA, 19 nt, Homo sapiens
  misc_RNA (1)...(19): siRNA sense strand
gcaaauaaaccaacacaua

SEQ ID NO: 1606111 - RNA, 19 nt, Homo sapiens
  misc_RNA (1)...(19): siRNA sense strand
gaacgagacuucuuucuuc

SEQ ID NO: 1606112 - RNA, 19 nt, Homo sapiens
  misc_RNA (1)...(19): siRNA sense strand
gcacagaaguagaaauugu

SEQ ID NO: 1606113 - RNA, 19 nt, Homo sapiens
  misc_RNA (1)...(19): siRNA sense strand
gaauauuacuucaguguag

SEQ ID NO: 1606114 - RNA, 19 nt, Homo sapiens
  misc_RNA (1)...(19): siRNA sense strand
agacuucucucaacugauu

SEQ ID NO: 1606115 - RNA, 19 nt, Homo sapiens
  misc_RNA (1)...(19): siRNA sense strand
caacguaagagagcuaaua

SEQ ID NO: 1606116 - RNA, 19 nt, Homo sapiens
  misc_RNA (1)...(19): siRNA sense strand
gaagugagggugguaauau

SEQ ID NO: 1606117 - RNA, 19 nt, Homo sapiens
  misc_RNA (1)...(19): siRNA sense strand
gaaaugauacacgaaguug

SEQ ID NO: 1606118 - RNA, 19 nt, Homo sapiens
  misc_RNA (1)...(19): siRNA sense strand
cuacaaaccuuaaucucau

SEQ ID NO: 1606119 - RNA, 19 nt, Homo sapiens
  misc_RNA (1)...(19): siRNA sense strand
gaucaaccauuucaaacag

SEQ ID NO: 1606120 - RNA, 19 nt, Homo sapiens
  misc_RNA (1)...(19): siRNA sense strand
gccaacaccaagugaauua

SEQ ID NO: 1606121 - RNA, 19 nt, Homo sapiens
  misc_RNA (1)...(19): siRNA sense strand
caacagacuucucucaacu

SEQ ID NO: 1606122 - RNA, 19 nt, Homo sapiens
  misc_RNA (1)...(19): siRNA sense strand
ugaaaggacugaucaacca

SEQ ID NO: 1606123 - RNA, 19 nt, Homo sapiens
  misc_RNA (1)...(19): siRNA sense strand
aaagauggaugaacaaggu

SEQ ID NO: 1606124 - RNA, 19 nt, Homo sapiens
  misc_RNA (1)...(19): siRNA sense strand
ggaacgagacuucuuucuu

SEQ ID NO: 1606125 - RNA, 19 nt, Homo sapiens
  misc_RNA (1)...(19): siRNA sense strand
ggacugaucaaccauuuca

SEQ ID NO: 1606126 - RNA, 19 nt, Homo sapiens
  misc_RNA (1)...(19): siRNA sense strand
gaucagagagucaagaaag

SEQ ID NO: 1606127 - RNA, 19 nt, Homo sapiens
  misc_RNA (1)...(19): siRNA sense strand
ggauagcacagaaguagaa

SEQ ID NO: 1606128 - RNA, 19 nt, Homo sapiens
  misc_RNA (1)...(19): siRNA sense strand
gagaaaugauacacgaagu

SEQ ID NO: 1606129 - RNA, 19 nt, Homo sapiens
  misc_RNA (1)...(19): siRNA sense strand
ucaagaacauggugaaagg

SEQ ID NO: 1606130 - RNA, 19 nt, Homo sapiens
  misc_RNA (1)...(19): siRNA sense strand
gaaguaacagugacagcaa

SEQ ID NO: 1606131 - RNA, 19 nt, Homo sapiens
  misc_RNA (1)...(19): siRNA sense strand
uauccgagguuccuuuaga

SEQ ID NO: 1606132 - RNA, 19 nt, Homo sapiens
  misc_RNA (1)...(19): siRNA sense strand
ccacuccacuuagauguug

SEQ ID NO: 1606133 - RNA, 19 nt, Homo sapiens
  misc_RNA (1)...(19): siRNA sense strand
gauugauuguccagaguuu

SEQ ID NO: 1606134 - RNA, 19 nt, Homo sapiens
  misc_RNA (1)...(19): siRNA sense strand
aaguagaaauuguggauga

SEQ ID NO: 1606135 - RNA, 19 nt, Homo sapiens
  misc_RNA (1)...(19): siRNA sense strand
gaaggauagcacagaagua

SEQ ID NO: 1606136 - RNA, 19 nt, Homo sapiens
  misc_RNA (1)...(19): siRNA sense strand
gaugacguuuccaguguga

SEQ ID NO: 1606137 - RNA, 19 nt, Homo sapiens
  misc_RNA (1)...(19): siRNA sense strand
gaacagcucaagaugucaa

SEQ ID NO: 1606138 - RNA, 19 nt, Homo sapiens
  misc_RNA (1)...(19): siRNA sense strand
cggaacagcucaagauguc

SEQ ID NO: 1606139 - RNA, 19 nt, Homo sapiens
  misc_RNA (1)...(19): siRNA sense strand
uagcacagaaguagaaauu

SEQ ID NO: 1606140 - RNA, 19 nt, Homo sapiens
  misc_RNA (1)...(19): siRNA sense strand
gaugucaaccugaagcaaa

SEQ ID NO: 1606141 - RNA, 19 nt, Homo sapiens
  misc_RNA (1)...(19): siRNA sense strand
uagaggcacugaaggauag

SEQ ID NO: 1606142 - RNA, 19 nt, Homo sapiens
  misc_RNA (1)...(19): siRNA sense strand
uaacagugacagcaaagaa

SEQ ID NO: 1606143 - RNA, 19 nt, Homo sapiens
  misc_RNA (1)...(19): siRNA sense strand
gagcuaauaagcacaagug

SEQ ID NO: 1606144 - RNA, 19 nt, Homo sapiens
  misc_RNA (1)...(19): siRNA sense strand
uagaaauuguggaugagaa

SEQ ID NO: 1606145 - RNA, 19 nt, Homo sapiens
  misc_RNA (1)...(19): siRNA sense strand
acacauaacaauaggagaa

SEQ ID NO: 1606146 - RNA, 19 nt, Homo sapiens
  misc_RNA (1)...(19): siRNA sense strand
aagaugacguuuccagugu

SEQ ID NO: 1606147 - RNA, 19 nt, Homo sapiens
  misc_RNA (1)...(19): siRNA sense strand
acagacuucucucaacuga

SEQ ID NO: 1606148 - RNA, 19 nt, Homo sapiens
  misc_RNA (1)...(19): siRNA sense strand
gaggcucagucaaguaauc

SEQ ID NO: 1606149 - RNA, 19 nt, Homo sapiens
  misc_RNA (1)...(19): siRNA sense strand
ggacgaggcagaggaaauc

SEQ ID NO: 1606150 - RNA, 19 nt, Homo sapiens
  misc_RNA (1)...(19): siRNA sense strand
ggguaccacuccacuuaga

SEQ ID NO: 1606151 - RNA, 19 nt, Homo sapiens
  misc_RNA (1)...(19): siRNA sense strand
ugaagcaaauaaaccaaca

SEQ ID NO: 1606152 - RNA, 19 nt, Homo sapiens
  misc_RNA (1)...(19): siRNA sense strand
ccaacagacuucucucaac

SEQ ID NO: 1606153 - RNA, 19 nt, Homo sapiens
  misc_RNA (1)...(19): siRNA sense strand
ucaaccauuucaaacagaa

SEQ ID NO: 1606154 - RNA, 19 nt, Homo sapiens
  misc_RNA (1)...(19): siRNA sense strand
ccaagugaauuagugaaca

SEQ ID NO: 1606155 - RNA, 19 nt, Homo sapiens
  misc_RNA (1)...(19): siRNA sense strand
guaagagagcuaauaagca

SEQ ID NO: 1606156 - RNA, 19 nt, Homo sapiens
  misc_RNA (1)...(19): siRNA sense strand
aaggacugaucaaccauuu

SEQ ID NO: 1606157 - RNA, 19 nt, Homo sapiens
  misc_RNA (1)...(19): siRNA sense strand
aaagggaugaucaagauga

SEQ ID NO: 1606158 - RNA, 19 nt, Homo sapiens
  misc_RNA (1)...(19): siRNA sense strand
ucaaguaaucaacguaaga

SEQ ID NO: 1606159 - RNA, 19 nt, Homo sapiens
  misc_RNA (1)...(19): siRNA sense strand
gcagugugccaccaacaga

SEQ ID NO: 1606160 - RNA, 19 nt, Homo sapiens
  misc_RNA (1)...(19): siRNA sense strand
gcucucacuacaaaccuua

SEQ ID NO: 1606161 - RNA, 19 nt, Homo sapiens
  misc_RNA (1)...(19): siRNA sense strand
gguguauccuguggaagaa

SEQ ID NO: 1606162 - RNA, 19 nt, Homo sapiens
  misc_RNA (1)...(19): siRNA sense strand
cuuuagaggucgaggaaga

SEQ ID NO: 1606163 - RNA, 19 nt, Homo sapiens
  misc_RNA (1)...(19): siRNA sense strand
gaaguuggaagcgagauag

SEQ ID NO: 1606164 - RNA, 19 nt, Homo sapiens
  misc_RNA (1)...(19): siRNA sense strand
guauuacuaugaugauggu

SEQ ID NO: 1606165 - RNA, 19 nt, Homo sapiens
  misc_RNA (1)...(19): siRNA sense strand
ggggaaagauggaugaaca

SEQ ID NO: 1606166 - RNA, 19 nt, Homo sapiens
  misc_RNA (1)...(19): siRNA sense strand
uuagaggcacugaaggaua

SEQ ID NO: 1606167 - RNA, 19 nt, Homo sapiens
  misc_RNA (1)...(19): siRNA sense strand
guaccacuccacuuagaug

SEQ ID NO: 1606168 - RNA, 19 nt, Homo sapiens
  misc_RNA (1)...(19): siRNA sense strand
uaauauccgagguuccuuu

SEQ ID NO: 1606169 - RNA, 19 nt, Homo sapiens
  misc_RNA (1)...(19): siRNA sense strand
cgaaguuggaagcgagaua

SEQ ID NO: 1606170 - RNA, 19 nt, Homo sapiens
  misc_RNA (1)...(19): siRNA sense strand
cauaacaauaggagaaaug

SEQ ID NO: 1606171 - RNA, 19 nt, Homo sapiens
  misc_RNA (1)...(19): siRNA sense strand
cucaagaugucaaccugaa

SEQ ID NO: 1606172 - RNA, 19 nt, Homo sapiens
  misc_RNA (1)...(19): siRNA sense strand
gauguuguaagaucagaga

SEQ ID NO: 1606173 - RNA, 19 nt, Homo sapiens
  misc_RNA (1)...(19): siRNA sense strand
gaagagaagguugaaaaga

SEQ ID NO: 1606174 - RNA, 19 nt, Homo sapiens
  misc_RNA (1)...(19): siRNA sense strand
uucaggcucucacuacaaa

SEQ ID NO: 1606175 - RNA, 19 nt, Homo sapiens
  misc_RNA (1)...(19): siRNA sense strand
ggaaagauggaugaacaag

SEQ ID NO: 1606176 - RNA, 19 nt, Homo sapiens
  misc_RNA (1)...(19): siRNA sense strand
aaguaacagugacagcaaa

SEQ ID NO: 1606177 - RNA, 19 nt, Homo sapiens
  misc_RNA (1)...(19): siRNA sense strand
caacaccaagugaauuagu

SEQ ID NO: 1606178 - RNA, 19 nt, Homo sapiens
  misc_RNA (1)...(19): siRNA sense strand
gaguauauuaagcgucaaa

SEQ ID NO: 1606179 - RNA, 19 nt, Homo sapiens
  misc_RNA (1)...(19): siRNA sense strand
agaaaugauacacgaaguu

SEQ ID NO: 1606180 - RNA, 19 nt, Homo sapiens
  misc_RNA (1)...(19): siRNA sense strand
caagugaauuagugaacac

SEQ ID NO: 1606181 - RNA, 19 nt, Homo sapiens
  misc_RNA (1)...(19): siRNA sense strand
uuacuaugaugaugguaca

SEQ ID NO: 1606182 - RNA, 19 nt, Homo sapiens
  misc_RNA (1)...(19): siRNA sense strand
caaacagaacuuaauacca

SEQ ID NO: 1606183 - RNA, 19 nt, Homo sapiens
  misc_RNA (1)...(19): siRNA sense strand
ccauuucaaacagaacuua

SEQ ID NO: 1606184 - RNA, 19 nt, Homo sapiens
  misc_RNA (1)...(19): siRNA sense strand
gaaaggacugaucaaccau

SEQ ID NO: 1606185 - RNA, 19 nt, Homo sapiens
  misc_RNA (1)...(19): siRNA sense strand
agaccuggaucccggaaca

SEQ ID NO: 1606186 - RNA, 19 nt, Homo sapiens
  misc_RNA (1)...(19): siRNA sense strand
agaaauuguggaugagaaa

SEQ ID NO: 1606187 - RNA, 19 nt, Homo sapiens
  misc_RNA (1)...(19): siRNA sense strand
acugaaggauagcacagaa

SEQ ID NO: 1606188 - RNA, 19 nt, Homo sapiens
  misc_RNA (1)...(19): siRNA sense strand
caucuuagaggcacugaag

SEQ ID NO: 1606189 - RNA, 19 nt, Homo sapiens
  misc_RNA (1)...(19): siRNA sense strand
gggaaagauggaugaacaa

SEQ ID NO: 1606190 - RNA, 19 nt, Homo sapiens
  misc_RNA (1)...(19): siRNA sense strand
aauauccgagguuccuuua

SEQ ID NO: 1606191 - RNA, 19 nt, Homo sapiens
  misc_RNA (1)...(19): siRNA sense strand
agaagugagggugguaaua

SEQ ID NO: 1606192 - RNA, 19 nt, Homo sapiens
  misc_RNA (1)...(19): siRNA sense strand
gagaagugagggugguaau

SEQ ID NO: 1606193 - RNA, 19 nt, Homo sapiens
  misc_RNA (1)...(19): siRNA sense strand
guuggaagcgagauagaga

SEQ ID NO: 1606194 - RNA, 19 nt, Homo sapiens
  misc_RNA (1)...(19): siRNA sense strand
gaaaaccgggaaacaaaau

SEQ ID NO: 1606195 - RNA, 19 nt, Homo sapiens
  misc_RNA (1)...(19): siRNA sense strand
guagaaauuguggaugaga

SEQ ID NO: 1606196 - RNA, 19 nt, Homo sapiens
  misc_RNA (1)...(19): siRNA sense strand
ccucagccaaggaaauaaa

SEQ ID NO: 1606197 - RNA, 19 nt, Homo sapiens
  misc_RNA (1)...(19): siRNA sense strand
accuuaaucucaucuuaga

SEQ ID NO: 1606198 - RNA, 19 nt, Homo sapiens
  misc_RNA (1)...(19): siRNA sense strand
aacguaagagagcuaauaa

SEQ ID NO: 1606199 - RNA, 19 nt, Homo sapiens
  misc_RNA (1)...(19): siRNA sense strand
uuaaaugguccuggugaaa

SEQ ID NO: 1606200 - RNA, 19 nt, Homo sapiens
  misc_RNA (1)...(19): siRNA sense strand
aaccaacacauaacaauag

SEQ ID NO: 1606201 - RNA, 19 nt, Homo sapiens
  misc_RNA (1)...(19): siRNA sense strand
ggccaacaccaagugaauu

SEQ ID NO: 1606202 - RNA, 19 nt, Homo sapiens
  misc_RNA (1)...(19): siRNA sense strand
ugaaggauagcacagaagu

SEQ ID NO: 1606203 - RNA, 19 nt, Homo sapiens
  misc_RNA (1)...(19): siRNA sense strand
acuacaaaccuuaaucuca

SEQ ID NO: 1606204 - RNA, 19 nt, Homo sapiens
  misc_RNA (1)...(19): siRNA sense strand
aaugauacacgaaguugga

SEQ ID NO: 1606205 - RNA, 19 nt, Homo sapiens
  misc_RNA (1)...(19): siRNA sense strand
cguaagagagcuaauaagc

SEQ ID NO: 1606206 - RNA, 19 nt, Homo sapiens
  misc_RNA (1)...(19): siRNA sense strand
ucacuacaaaccuuaaucu

SEQ ID NO: 1606207 - RNA, 19 nt, Homo sapiens
  misc_RNA (1)...(19): siRNA sense strand
gaugaucaagaugacguuu

SEQ ID NO: 1606208 - RNA, 19 nt, Homo sapiens
  misc_RNA (1)...(19): siRNA sense strand
agaaguagaaauuguggau

SEQ ID NO: 1606209 - RNA, 19 nt, Homo sapiens
  misc_RNA (1)...(19): siRNA sense strand
gauagcacagaaguagaaa

SEQ ID NO: 1606210 - RNA, 19 nt, Homo sapiens
  misc_RNA (1)...(19): siRNA sense strand
gcaaauaaaccaacacaua

SEQ ID NO: 1606211 - RNA, 19 nt, Homo sapiens
  misc_RNA (1)...(19): siRNA sense strand
gaacgagacuucuuucuuc

SEQ ID NO: 1606212 - RNA, 19 nt, Homo sapiens
  misc_RNA (1)...(19): siRNA sense strand
gcacagaaguagaaauugu

SEQ ID NO: 1606213 - RNA, 19 nt, Homo sapiens
  misc_RNA (1)...(19): siRNA sense strand
gaauauuacuucaguguag

SEQ ID NO: 1606214 - RNA, 19 nt, Homo sapiens
  misc_RNA (1)...(19): siRNA sense strand
agacuucucucaacugauu

SEQ ID NO: 1606215 - RNA, 19 nt, Homo sapiens
  misc_RNA (1)...(19): siRNA sense strand
caacguaagagagcuaaua

SEQ ID NO: 1606216 - RNA, 19 nt, Homo sapiens
  misc_RNA (1)...(19): siRNA sense strand
gaagugagggugguaauau

SEQ ID NO: 1606217 - RNA, 19 nt, Homo sapiens
  misc_RNA (1)...(19): siRNA sense strand
gaaaugauacacgaaguug

SEQ ID NO: 1606218 - RNA, 19 nt, Homo sapiens
  misc_RNA (1)...(19): siRNA sense strand
cuacaaaccuuaaucucau

SEQ ID NO: 1606219 - RNA, 19 nt, Homo sapiens
  misc_RNA (1)...(19): siRNA sense strand
gaucaaccauuucaaacag

SEQ ID NO: 1606220 - RNA, 19 nt, Homo sapiens
  misc_RNA (1)...(19): siRNA sense strand
gccaacaccaagugaauua

SEQ ID NO: 1606221 - RNA, 19 nt, Homo sapiens
  misc_RNA (1)...(19): siRNA sense strand
caacagacuucucucaacu

SEQ ID NO: 1606222 - RNA, 19 nt, Homo sapiens
  misc_RNA (1)...(19): siRNA sense strand
ugaaaggacugaucaacca

SEQ ID NO: 1606223 - RNA, 19 nt, Homo sapiens
  misc_RNA (1)...(19): siRNA sense strand
aaagauggaugaacaaggu

SEQ ID NO: 1606224 - RNA, 19 nt, Homo sapiens
  misc_RNA (1)...(19): siRNA sense strand
ggaacgagacuucuuucuu

SEQ ID NO: 1606225 - RNA, 19 nt, Homo sapiens
  misc_RNA (1)...(19): siRNA sense strand
ggacugaucaaccauuuca

SEQ ID NO: 1606226 - RNA, 19 nt, Homo sapiens
  misc_RNA (1)...(19): siRNA sense strand
gaucagagagucaagaaag

SEQ ID NO: 1606227 - RNA, 19 nt, Homo sapiens
  misc_RNA (1)...(19): siRNA sense strand
ggauagcacagaaguagaa

SEQ ID NO: 1606228 - RNA, 19 nt, Homo sapiens
  misc_RNA (1)...(19): siRNA sense strand
gagaaaugauacacgaagu

SEQ ID NO: 1606229 - RNA, 19 nt, Homo sapiens
  misc_RNA (1)...(19): siRNA sense strand
ucaagaacauggugaaagg

SEQ ID NO: 1606230 - RNA, 19 nt, Homo sapiens
  misc_RNA (1)...(19): siRNA sense strand
gaaguaacagugacagcaa

SEQ ID NO: 1606231 - RNA, 19 nt, Homo sapiens
  misc_RNA (1)...(19): siRNA sense strand
uauccgagguuccuuuaga

SEQ ID NO: 1606232 - RNA, 19 nt, Homo sapiens
  misc_RNA (1)...(19): siRNA sense strand
ccacuccacuuagauguug

SEQ ID NO: 1606233 - RNA, 19 nt, Homo sapiens
  misc_RNA (1)...(19): siRNA sense strand
gauugauuguccagaguuu

SEQ ID NO: 1606234 - RNA, 19 nt, Homo sapiens
  misc_RNA (1)...(19): siRNA sense strand
aaguagaaauuguggauga

SEQ ID NO: 1606235 - RNA, 19 nt, Homo sapiens
  misc_RNA (1)...(19): siRNA sense strand
gaaggauagcacagaagua

SEQ ID NO: 1606236 - RNA, 19 nt, Homo sapiens
  misc_RNA (1)...(19): siRNA sense strand
gaugacguuuccaguguga

SEQ ID NO: 1606237 - RNA, 19 nt, Homo sapiens
  misc_RNA (1)...(19): siRNA sense strand
gaacagcucaagaugucaa

SEQ ID NO: 1606238 - RNA, 19 nt, Homo sapiens
  misc_RNA (1)...(19): siRNA sense strand
cggaacagcucaagauguc

SEQ ID NO: 1606239 - RNA, 19 nt, Homo sapiens
  misc_RNA (1)...(19): siRNA sense strand
uagcacagaaguagaaauu

SEQ ID NO: 1606240 - RNA, 19 nt, Homo sapiens
  misc_RNA (1)...(19): siRNA sense strand
gaugucaaccugaagcaaa

SEQ ID NO: 1606241 - RNA, 19 nt, Homo sapiens
  misc_RNA (1)...(19): siRNA sense strand
uagaggcacugaaggauag

SEQ ID NO: 1606242 - RNA, 19 nt, Homo sapiens
  misc_RNA (1)...(19): siRNA sense strand
uaacagugacagcaaagaa

SEQ ID NO: 1606243 - RNA, 19 nt, Homo sapiens
  misc_RNA (1)...(19): siRNA sense strand
gagcuaauaagcacaagug

SEQ ID NO: 1606244 - RNA, 19 nt, Homo sapiens
  misc_RNA (1)...(19): siRNA sense strand
uagaaauuguggaugagaa

SEQ ID NO: 1606245 - RNA, 19 nt, Homo sapiens
  misc_RNA (1)...(19): siRNA sense strand
acacauaacaauaggagaa

SEQ ID NO: 1606246 - RNA, 19 nt, Homo sapiens
  misc_RNA (1)...(19): siRNA sense strand
aagaugacguuuccagugu

SEQ ID NO: 1606247 - RNA, 19 nt, Homo sapiens
  misc_RNA (1)...(19): siRNA sense strand
acagacuucucucaacuga

SEQ ID NO: 1606248 - RNA, 19 nt, Homo sapiens
  misc_RNA (1)...(19): siRNA sense strand
gaggcucagucaaguaauc

SEQ ID NO: 1606249 - RNA, 19 nt, Homo sapiens
  misc_RNA (1)...(19): siRNA sense strand
ggacgaggcagaggaaauc

SEQ ID NO: 1606250 - RNA, 19 nt, Homo sapiens
  misc_RNA (1)...(19): siRNA sense strand
ggguaccacuccacuuaga

SEQ ID NO: 1606251 - RNA, 19 nt, Homo sapiens
  misc_RNA (1)...(19): siRNA sense strand
ugaagcaaauaaaccaaca

SEQ ID NO: 1606252 - RNA, 19 nt, Homo sapiens
  misc_RNA (1)...(19): siRNA sense strand
ccaacagacuucucucaac

SEQ ID NO: 1606253 - RNA, 19 nt, Homo sapiens
  misc_RNA (1)...(19): siRNA sense strand
ucaaccauuucaaacagaa

SEQ ID NO: 1606254 - RNA, 19 nt, Homo sapiens
  misc_RNA (1)...(19): siRNA sense strand
ccaagugaauuagugaaca

SEQ ID NO: 1606255 - RNA, 19 nt, Homo sapiens
  misc_RNA (1)...(19): siRNA sense strand
guaagagagcuaauaagca

SEQ ID NO: 1606256 - RNA, 19 nt, Homo sapiens
  misc_RNA (1)...(19): siRNA sense strand
aaggacugaucaaccauuu

SEQ ID NO: 1606257 - RNA, 19 nt, Homo sapiens
  misc_RNA (1)...(19): siRNA sense strand
aaagggaugaucaagauga

SEQ ID NO: 1606258 - RNA, 19 nt, Homo sapiens
  misc_RNA (1)...(19): siRNA sense strand
ucaaguaaucaacguaaga

SEQ ID NO: 1606259 - RNA, 19 nt, Homo sapiens
  misc_RNA (1)...(19): siRNA sense strand
gcagugugccaccaacaga

SEQ ID NO: 1606260 - RNA, 19 nt, Homo sapiens
  misc_RNA (1)...(19): siRNA sense strand
gcucucacuacaaaccuua

SEQ ID NO: 1606261 - RNA, 19 nt, Homo sapiens
  misc_RNA (1)...(19): siRNA sense strand
gguguauccuguggaagaa

SEQ ID NO: 1606262 - RNA, 19 nt, Homo sapiens
  misc_RNA (1)...(19): siRNA sense strand
cuuuagaggucgaggaaga

SEQ ID NO: 1606263 - RNA, 19 nt, Homo sapiens
  misc_RNA (1)...(19): siRNA sense strand
gaaguuggaagcgagauag

SEQ ID NO: 1606264 - RNA, 19 nt, Homo sapiens
  misc_RNA (1)...(19): siRNA sense strand
guauuacuaugaugauggu

SEQ ID NO: 1606265 - RNA, 19 nt, Homo sapiens
  misc_RNA (1)...(19): siRNA sense strand
ggggaaagauggaugaaca

SEQ ID NO: 1606266 - RNA, 19 nt, Homo sapiens
  misc_RNA (1)...(19): siRNA sense strand
uuagaggcacugaaggaua

SEQ ID NO: 1606267 - RNA, 19 nt, Homo sapiens
  misc_RNA (1)...(19): siRNA sense strand
guaccacuccacuuagaug

SEQ ID NO: 1606268 - RNA, 19 nt, Homo sapiens
  misc_RNA (1)...(19): siRNA sense strand
uaauauccgagguuccuuu

SEQ ID NO: 1606269 - RNA, 19 nt, Homo sapiens
  misc_RNA (1)...(19): siRNA sense strand
cgaaguuggaagcgagaua

SEQ ID NO: 1606270 - RNA, 19 nt, Homo sapiens
  misc_RNA (1)...(19): siRNA sense strand
cauaacaauaggagaaaug

SEQ ID NO: 1606271 - RNA, 19 nt, Homo sapiens
  misc_RNA (1)...(19): siRNA sense strand
cucaagaugucaaccugaa

SEQ ID NO: 1606272 - RNA, 19 nt, Homo sapiens
  misc_RNA (1)...(19): siRNA sense strand
gauguuguaagaucagaga

SEQ ID NO: 1606273 - RNA, 19 nt, Homo sapiens
  misc_RNA (1)...(19): siRNA sense strand
gaagagaagguugaaaaga

SEQ ID NO: 1606274 - RNA, 19 nt, Homo sapiens
  misc_RNA (1)...(19): siRNA sense strand
uucaggcucucacuacaaa

SEQ ID NO: 1606275 - RNA, 19 nt, Homo sapiens
  misc_RNA (1)...(19): siRNA sense strand
ggaaagauggaugaacaag

SEQ ID NO: 1606276 - RNA, 19 nt, Homo sapiens
  misc_RNA (1)...(19): siRNA sense strand
aaguaacagugacagcaaa

SEQ ID NO: 1606277 - RNA, 19 nt, Homo sapiens
  misc_RNA (1)...(19): siRNA sense strand
caacaccaagugaauuagu

SEQ ID NO: 1606278 - RNA, 19 nt, Homo sapiens
  misc_RNA (1)...(19): siRNA sense strand
gaguauauuaagcgucaaa

SEQ ID NO: 1606279 - RNA, 19 nt, Homo sapiens
  misc_RNA (1)...(19): siRNA sense strand
agaaaugauacacgaaguu

SEQ ID NO: 1606280 - RNA, 19 nt, Homo sapiens
  misc_RNA (1)...(19): siRNA sense strand
caagugaauuagugaacac

SEQ ID NO: 1606281 - RNA, 19 nt, Homo sapiens
  misc_RNA (1)...(19): siRNA sense strand
uuacuaugaugaugguaca

SEQ ID NO: 1606282 - RNA, 19 nt, Homo sapiens
  misc_RNA (1)...(19): siRNA sense strand
caaacagaacuuaauacca

SEQ ID NO: 1606283 - RNA, 19 nt, Homo sapiens
  misc_RNA (1)...(19): siRNA sense strand
ccauuucaaacagaacuua

SEQ ID NO: 1606284 - RNA, 19 nt, Homo sapiens
  misc_RNA (1)...(19): siRNA sense strand
gaaaggacugaucaaccau

SEQ ID NO: 1606285 - RNA, 19 nt, Homo sapiens
  misc_RNA (1)...(19): siRNA sense strand
agaccuggaucccggaaca

SEQ ID NO: 1606286 - RNA, 19 nt, Homo sapiens
  misc_RNA (1)...(19): siRNA sense strand
agaaauuguggaugagaaa

SEQ ID NO: 1606287 - RNA, 19 nt, Homo sapiens
  misc_RNA (1)...(19): siRNA sense strand
acugaaggauagcacagaa

SEQ ID NO: 1606288 - RNA, 19 nt, Homo sapiens
  misc_RNA (1)...(19): siRNA sense strand
caucuuagaggcacugaag

SEQ ID NO: 1606289 - RNA, 19 nt, Homo sapiens
  misc_RNA (1)...(19): siRNA sense strand
gggaaagauggaugaacaa

SEQ ID NO: 1606290 - RNA, 19 nt, Homo sapiens
  misc_RNA (1)...(19): siRNA sense strand
aauauccgagguuccuuua

SEQ ID NO: 1606291 - RNA, 19 nt, Homo sapiens
  misc_RNA (1)...(19): siRNA sense strand
agaagugagggugguaaua

SEQ ID NO: 1606292 - RNA, 19 nt, Homo sapiens
  misc_RNA (1)...(19): siRNA sense strand
gagaagugagggugguaau

SEQ ID NO: 1606293 - RNA, 19 nt, Homo sapiens
  misc_RNA (1)...(19): siRNA sense strand
guuggaagcgagauagaga

SEQ ID NO: 1606294 - RNA, 19 nt, Homo sapiens
  misc_RNA (1)...(19): siRNA sense strand
gaaaaccgggaaacaaaau

SEQ ID NO: 1606295 - RNA, 19 nt, Homo sapiens
  misc_RNA (1)...(19): siRNA sense strand
guagaaauuguggaugaga

SEQ ID NO: 1606296 - RNA, 19 nt, Homo sapiens
  misc_RNA (1)...(19): siRNA sense strand
ccucagccaaggaaauaaa

SEQ ID NO: 1606297 - RNA, 19 nt, Homo sapiens
  misc_RNA (1)...(19): siRNA sense strand
accuuaaucucaucuuaga

SEQ ID NO: 1606298 - RNA, 19 nt, Homo sapiens
  misc_RNA (1)...(19): siRNA sense strand
aacguaagagagcuaauaa

SEQ ID NO: 1606299 - RNA, 19 nt, Homo sapiens
  misc_RNA (1)...(19): siRNA sense strand
uuaaaugguccuggugaaa

SEQ ID NO: 1606300 - RNA, 19 nt, Homo sapiens
  misc_RNA (1)...(19): siRNA sense strand
aaccaacacauaacaauag

SEQ ID NO: 1606301 - RNA, 19 nt, Homo sapiens
  misc_RNA (1)...(19): siRNA sense strand
ggccaacaccaagugaauu

SEQ ID NO: 1606302 - RNA, 19 nt, Homo sapiens
  misc_RNA (1)...(19): siRNA sense strand
ugaaggauagcacagaagu

SEQ ID NO: 1606303 - RNA, 19 nt, Homo sapiens
  misc_RNA (1)...(19): siRNA sense strand
acuacaaaccuuaaucuca

SEQ ID NO: 1606304 - RNA, 19 nt, Homo sapiens
  misc_RNA (1)...(19): siRNA sense strand
aaugauacacgaaguugga

SEQ ID NO: 1606305 - RNA, 19 nt, Homo sapiens
  misc_RNA (1)...(19): siRNA sense strand
cguaagagagcuaauaagc

SEQ ID NO: 1606306 - RNA, 19 nt, Homo sapiens
  misc_RNA (1)...(19): siRNA sense strand
ucacuacaaaccuuaaucu

SEQ ID NO: 1606307 - RNA, 19 nt, Homo sapiens
  misc_RNA (1)...(19): siRNA sense strand
gaugaucaagaugacguuu

SEQ ID NO: 1606308 - RNA, 19 nt, Homo sapiens
  misc_RNA (1)...(19): siRNA sense strand
agaaguagaaauuguggau

SEQ ID NO: 1606309 - RNA, 19 nt, Homo sapiens
  misc_RNA (1)...(19): siRNA sense strand
gauagcacagaaguagaaa

SEQ ID NO: 1606310 - RNA, 19 nt, Homo sapiens
  misc_RNA (1)...(19): siRNA sense strand
gcaaauaaaccaacacaua

SEQ ID NO: 1606311 - RNA, 19 nt, Homo sapiens
  misc_RNA (1)...(19): siRNA sense strand
gaacgagacuucuuucuuc

SEQ ID NO: 1606312 - RNA, 19 nt, Homo sapiens
  misc_RNA (1)...(19): siRNA sense strand
gcacagaaguagaaauugu

SEQ ID NO: 1606313 - RNA, 19 nt, Homo sapiens
  misc_RNA (1)...(19): siRNA sense strand
gaauauuacuucaguguag

SEQ ID NO: 1606314 - RNA, 19 nt, Homo sapiens
  misc_RNA (1)...(19): siRNA sense strand
agacuucucucaacugauu

SEQ ID NO: 1606315 - RNA, 19 nt, Homo sapiens
  misc_RNA (1)...(19): siRNA sense strand
caacguaagagagcuaaua

SEQ ID NO: 1606316 - RNA, 19 nt, Homo sapiens
  misc_RNA (1)...(19): siRNA sense strand
gaagugagggugguaauau

SEQ ID NO: 1606317 - RNA, 19 nt, Homo sapiens
  misc_RNA (1)...(19): siRNA sense strand
gaaaugauacacgaaguug

SEQ ID NO: 1606318 - RNA, 19 nt, Homo sapiens
  misc_RNA (1)...(19): siRNA sense strand
cuacaaaccuuaaucucau

SEQ ID NO: 1606319 - RNA, 19 nt, Homo sapiens
  misc_RNA (1)...(19): siRNA sense strand
gaucaaccauuucaaacag

SEQ ID NO: 1606320 - RNA, 19 nt, Homo sapiens
  misc_RNA (1)...(19): siRNA sense strand
gccaacaccaagugaauua

SEQ ID NO: 1606321 - RNA, 19 nt, Homo sapiens
  misc_RNA (1)...(19): siRNA sense strand
caacagacuucucucaacu

SEQ ID NO: 1606322 - RNA, 19 nt, Homo sapiens
  misc_RNA (1)...(19): siRNA sense strand
ugaaaggacugaucaacca

SEQ ID NO: 1606323 - RNA, 19 nt, Homo sapiens
  misc_RNA (1)...(19): siRNA sense strand
aaagauggaugaacaaggu

SEQ ID NO: 1606324 - RNA, 19 nt, Homo sapiens
  misc_RNA (1)...(19): siRNA sense strand
ggaacgagacuucuuucuu

SEQ ID NO: 1606325 - RNA, 19 nt, Homo sapiens
  misc_RNA (1)...(19): siRNA sense strand
ggacugaucaaccauuuca

SEQ ID NO: 1606326 - RNA, 19 nt, Homo sapiens
  misc_RNA (1)...(19): siRNA sense strand
gaucagagagucaagaaag

SEQ ID NO: 1606327 - RNA, 19 nt, Homo sapiens
  misc_RNA (1)...(19): siRNA sense strand
ggauagcacagaaguagaa

SEQ ID NO: 1606328 - RNA, 19 nt, Homo sapiens
  misc_RNA (1)...(19): siRNA sense strand
gagaaaugauacacgaagu

SEQ ID NO: 1606329 - RNA, 19 nt, Homo sapiens
  misc_RNA (1)...(19): siRNA sense strand
ucaagaacauggugaaagg

SEQ ID NO: 1606330 - RNA, 19 nt, Homo sapiens
  misc_RNA (1)...(19): siRNA sense strand
gaaguaacagugacagcaa

SEQ ID NO: 1606331 - RNA, 19 nt, Homo sapiens
  misc_RNA (1)...(19): siRNA sense strand
uauccgagguuccuuuaga

SEQ ID NO: 1606332 - RNA, 19 nt, Homo sapiens
  misc_RNA (1)...(19): siRNA sense strand
ccacuccacuuagauguug

SEQ ID NO: 1606333 - RNA, 19 nt, Homo sapiens
  misc_RNA (1)...(19): siRNA sense strand
gauugauuguccagaguuu

SEQ ID NO: 1606334 - RNA, 19 nt, Homo sapiens
  misc_RNA (1)...(19): siRNA sense strand
aaguagaaauuguggauga

SEQ ID NO: 1606335 - RNA, 19 nt, Homo sapiens
  misc_RNA (1)...(19): siRNA sense strand
gaaggauagcacagaagua

SEQ ID NO: 1606336 - RNA, 19 nt, Homo sapiens
  misc_RNA (1)...(19): siRNA sense strand
gaugacguuuccaguguga

SEQ ID NO: 1606337 - RNA, 19 nt, Homo sapiens
  misc_RNA (1)...(19): siRNA sense strand
gaacagcucaagaugucaa

SEQ ID NO: 1606338 - RNA, 19 nt, Homo sapiens
  misc_RNA (1)...(19): siRNA sense strand
cggaacagcucaagauguc

SEQ ID NO: 1606339 - RNA, 19 nt, Homo sapiens
  misc_RNA (1)...(19): siRNA sense strand
uagcacagaaguagaaauu

SEQ ID NO: 1606340 - RNA, 19 nt, Homo sapiens
  misc_RNA (1)...(19): siRNA sense strand
gaugucaaccugaagcaaa

SEQ ID NO: 1606341 - RNA, 19 nt, Homo sapiens
  misc_RNA (1)...(19): siRNA sense strand
uagaggcacugaaggauag

SEQ ID NO: 1606342 - RNA, 19 nt, Homo sapiens
  misc_RNA (1)...(19): siRNA sense strand
uaacagugacagcaaagaa

SEQ ID NO: 1606343 - RNA, 19 nt, Homo sapiens
  misc_RNA (1)...(19): siRNA sense strand
gagcuaauaagcacaagug

SEQ ID NO: 1606344 - RNA, 19 nt, Homo sapiens
  misc_RNA (1)...(19): siRNA sense strand
uagaaauuguggaugagaa

SEQ ID NO: 1606345 - RNA, 19 nt, Homo sapiens
  misc_RNA (1)...(19): siRNA sense strand
acacauaacaauaggagaa

SEQ ID NO: 1606346 - RNA, 19 nt, Homo sapiens
  misc_RNA (1)...(19): siRNA sense strand
aagaugacguuuccagugu

SEQ ID NO: 1606347 - RNA, 19 nt, Homo sapiens
  misc_RNA (1)...(19): siRNA sense strand
acagacuucucucaacuga

SEQ ID NO: 1606348 - RNA, 19 nt, Homo sapiens
  misc_RNA (1)...(19): siRNA sense strand
gaggcucagucaaguaauc

SEQ ID NO: 1606349 - RNA, 19 nt, Homo sapiens
  misc_RNA (1)...(19): siRNA sense strand
ggacgaggcagaggaaauc

SEQ ID NO: 1606350 - RNA, 19 nt, Homo sapiens
  misc_RNA (1)...(19): siRNA sense strand
ggguaccacuccacuuaga

SEQ ID NO: 1606351 - RNA, 19 nt, Homo sapiens
  misc_RNA (1)...(19): siRNA sense strand
ugaagcaaauaaaccaaca

SEQ ID NO: 1606352 - RNA, 19 nt, Homo sapiens
  misc_RNA (1)...(19): siRNA sense strand
ccaacagacuucucucaac

SEQ ID NO: 1606353 - RNA, 19 nt, Homo sapiens
  misc_RNA (1)...(19): siRNA sense strand
ucaaccauuucaaacagaa

SEQ ID NO: 1606354 - RNA, 19 nt, Homo sapiens
  misc_RNA (1)...(19): siRNA sense strand
ccaagugaauuagugaaca

SEQ ID NO: 1606355 - RNA, 19 nt, Homo sapiens
  misc_RNA (1)...(19): siRNA sense strand
guaagagagcuaauaagca

SEQ ID NO: 1606356 - RNA, 19 nt, Homo sapiens
  misc_RNA (1)...(19): siRNA sense strand
aaggacugaucaaccauuu

SEQ ID NO: 1606357 - RNA, 19 nt, Homo sapiens
  misc_RNA (1)...(19): siRNA sense strand
aaagggaugaucaagauga

SEQ ID NO: 1606358 - RNA, 19 nt, Homo sapiens
  misc_RNA (1)...(19): siRNA sense strand
ucaaguaaucaacguaaga

SEQ ID NO: 1606359 - RNA, 19 nt, Homo sapiens
  misc_RNA (1)...(19): siRNA sense strand
gcagugugccaccaacaga

SEQ ID NO: 1606360 - RNA, 19 nt, Homo sapiens
  misc_RNA (1)...(19): siRNA sense strand
gcucucacuacaaaccuua

SEQ ID NO: 1606361 - RNA, 19 nt, Homo sapiens
  misc_RNA (1)...(19): siRNA sense strand
gguguauccuguggaagaa

SEQ ID NO: 1606362 - RNA, 19 nt, Homo sapiens
  misc_RNA (1)...(19): siRNA sense strand
cuuuagaggucgaggaaga

SEQ ID NO: 1606363 - RNA, 19 nt, Homo sapiens
  misc_RNA (1)...(19): siRNA sense strand
gaaguuggaagcgagauag

SEQ ID NO: 1606364 - RNA, 19 nt, Homo sapiens
  misc_RNA (1)...(19): siRNA sense strand
guauuacuaugaugauggu

SEQ ID NO: 1606365 - RNA, 19 nt, Homo sapiens
  misc_RNA (1)...(19): siRNA sense strand
ggggaaagauggaugaaca

SEQ ID NO: 1606366 - RNA, 19 nt, Homo sapiens
  misc_RNA (1)...(19): siRNA sense strand
uuagaggcacugaaggaua

SEQ ID NO: 1606367 - RNA, 19 nt, Homo sapiens
  misc_RNA (1)...(19): siRNA sense strand
guaccacuccacuuagaug

SEQ ID NO: 1606368 - RNA, 19 nt, Homo sapiens
  misc_RNA (1)...(19): siRNA sense strand
uaauauccgagguuccuuu

SEQ ID NO: 1606369 - RNA, 19 nt, Homo sapiens
  misc_RNA (1)...(19): siRNA sense strand
cgaaguuggaagcgagaua

SEQ ID NO: 1606370 - RNA, 19 nt, Homo sapiens
  misc_RNA (1)...(19): siRNA sense strand
cauaacaauaggagaaaug

SEQ ID NO: 1606371 - RNA, 19 nt, Homo sapiens
  misc_RNA (1)...(19): siRNA sense strand
cucaagaugucaaccugaa

SEQ ID NO: 1606372 - RNA, 19 nt, Homo sapiens
  misc_RNA (1)...(19): siRNA sense strand
gauguuguaagaucagaga

SEQ ID NO: 1606373 - RNA, 19 nt, Homo sapiens
  misc_RNA (1)...(19): siRNA sense strand
gaagagaagguugaaaaga

SEQ ID NO: 1606374 - RNA, 19 nt, Homo sapiens
  misc_RNA (1)...(19): siRNA sense strand
uucaggcucucacuacaaa

SEQ ID NO: 1606375 - RNA, 19 nt, Homo sapiens
  misc_RNA (1)...(19): siRNA sense strand
ggaaagauggaugaacaag

SEQ ID NO: 1606376 - RNA, 19 nt, Homo sapiens
  misc_RNA (1)...(19): siRNA sense strand
aaguaacagugacagcaaa

SEQ ID NO: 1606377 - RNA, 19 nt, Homo sapiens
  misc_RNA (1)...(19): siRNA sense strand
caacaccaagugaauuagu

SEQ ID NO: 1606378 - RNA, 19 nt, Homo sapiens
  misc_RNA (1)...(19): siRNA sense strand
gaguauauuaagcgucaaa

SEQ ID NO: 1606379 - RNA, 19 nt, Homo sapiens
  misc_RNA (1)...(19): siRNA sense strand
agaaaugauacacgaaguu

SEQ ID NO: 1606380 - RNA, 19 nt, Homo sapiens
  misc_RNA (1)...(19): siRNA sense strand
caagugaauuagugaacac

SEQ ID NO: 1606381 - RNA, 19 nt, Homo sapiens
  misc_RNA (1)...(19): siRNA sense strand
uuacuaugaugaugguaca

SEQ ID NO: 1606382 - RNA, 19 nt, Homo sapiens
  misc_RNA (1)...(19): siRNA sense strand
caaacagaacuuaauacca

SEQ ID NO: 1606383 - RNA, 19 nt, Homo sapiens
  misc_RNA (1)...(19): siRNA sense strand
ccauuucaaacagaacuua

SEQ ID NO: 1606384 - RNA, 19 nt, Homo sapiens
  misc_RNA (1)...(19): siRNA sense strand
gaaaggacugaucaaccau

SEQ ID NO: 1606385 - RNA, 19 nt, Homo sapiens
  misc_RNA (1)...(19): siRNA sense strand
agaccuggaucccggaaca

SEQ ID NO: 1606386 - RNA, 19 nt, Homo sapiens
  misc_RNA (1)...(19): siRNA sense strand
agaaauuguggaugagaaa

SEQ ID NO: 1606387 - RNA, 19 nt, Homo sapiens
  misc_RNA (1)...(19): siRNA sense strand
acugaaggauagcacagaa

SEQ ID NO: 1606388 - RNA, 19 nt, Homo sapiens
  misc_RNA (1)...(19): siRNA sense strand
caucuuagaggcacugaag

SEQ ID NO: 1606389 - RNA, 19 nt, Homo sapiens
  misc_RNA (1)...(19): siRNA sense strand
gggaaagauggaugaacaa

SEQ ID NO: 1606390 - RNA, 19 nt, Homo sapiens
  misc_RNA (1)...(19): siRNA sense strand
aauauccgagguuccuuua

SEQ ID NO: 1606391 - RNA, 19 nt, Homo sapiens
  misc_RNA (1)...(19): siRNA sense strand
agaagugagggugguaaua

SEQ ID NO: 1606392 - RNA, 19 nt, Homo sapiens
  misc_RNA (1)...(19): siRNA sense strand
gagaagugagggugguaau

SEQ ID NO: 1606393 - RNA, 19 nt, Homo sapiens
  misc_RNA (1)...(19): siRNA sense strand
guuggaagcgagauagaga

SEQ ID NO: 1606394 - RNA, 19 nt, Homo sapiens
  misc_RNA (1)...(19): siRNA sense strand
gaaaaccgggaaacaaaau

SEQ ID NO: 1606395 - RNA, 19 nt, Homo sapiens
  misc_RNA (1)...(19): siRNA sense strand
guagaaauuguggaugaga

SEQ ID NO: 1606396 - RNA, 19 nt, Homo sapiens
  misc_RNA (1)...(19): siRNA sense strand
ccucagccaaggaaauaaa

SEQ ID NO: 1606397 - RNA, 19 nt, Homo sapiens
  misc_RNA (1)...(19): siRNA sense strand
accuuaaucucaucuuaga

SEQ ID NO: 1606398 - RNA, 19 nt, Homo sapiens
  misc_RNA (1)...(19): siRNA sense strand
aacguaagagagcuaauaa

SEQ ID NO: 1606399 - RNA, 19 nt, Homo sapiens
  misc_RNA (1)...(19): siRNA sense strand
uuaaaugguccuggugaaa

SEQ ID NO: 1606400 - RNA, 19 nt, Homo sapiens
  misc_RNA (1)...(19): siRNA sense strand
aaccaacacauaacaauag

SEQ ID NO: 1606401 - RNA, 19 nt, Homo sapiens
  misc_RNA (1)...(19): siRNA sense strand
ggccaacaccaagugaauu

SEQ ID NO: 1606402 - RNA, 19 nt, Homo sapiens
  misc_RNA (1)...(19): siRNA sense strand
ugaaggauagcacagaagu

SEQ ID NO: 1606403 - RNA, 19 nt, Homo sapiens
  misc_RNA (1)...(19): siRNA sense strand
acuacaaaccuuaaucuca

SEQ ID NO: 1606404 - RNA, 19 nt, Homo sapiens
  misc_RNA (1)...(19): siRNA sense strand
aaugauacacgaaguugga

SEQ ID NO: 1606405 - RNA, 19 nt, Homo sapiens
  misc_RNA (1)...(19): siRNA sense strand
cguaagagagcuaauaagc

SEQ ID NO: 1606406 - RNA, 19 nt, Homo sapiens
  misc_RNA (1)...(19): siRNA sense strand
ucacuacaaaccuuaaucu

SEQ ID NO: 1606407 - RNA, 19 nt, Homo sapiens
  misc_RNA (1)...(19): siRNA sense strand
gaugaucaagaugacguuu

SEQ ID NO: 1606408 - RNA, 19 nt, Homo sapiens
  misc_RNA (1)...(19): siRNA sense strand
agaaguagaaauuguggau

SEQ ID NO: 1606409 - RNA, 19 nt, Homo sapiens
  misc_RNA (1)...(19): siRNA sense strand
gauagcacagaaguagaaa

SEQ ID NO: 1606410 - RNA, 19 nt, Homo sapiens
  misc_RNA (1)...(19): siRNA sense strand
gaaggaaccugaugcuuua

SEQ ID NO: 1606411 - RNA, 19 nt, Homo sapiens
  misc_RNA (1)...(19): siRNA sense strand
ggacacagauuuagacuug

SEQ ID NO: 1606412 - RNA, 19 nt, Homo sapiens
  misc_RNA (1)...(19): siRNA sense strand
gaaaugagagaaaugcuua

SEQ ID NO: 1606413 - RNA, 19 nt, Homo sapiens
  misc_RNA (1)...(19): siRNA sense strand
gaacaaauacaugggauua

SEQ ID NO: 1606414 - RNA, 19 nt, Homo sapiens
  misc_RNA (1)...(19): siRNA sense strand
ucaagcaacugucauauau

SEQ ID NO: 1606415 - RNA, 19 nt, Homo sapiens
  misc_RNA (1)...(19): siRNA sense strand
gauguuagcucccuauauc

SEQ ID NO: 1606416 - RNA, 19 nt, Homo sapiens
  misc_RNA (1)...(19): siRNA sense strand
gauaaggccucugugauga

SEQ ID NO: 1606417 - RNA, 19 nt, Homo sapiens
  misc_RNA (1)...(19): siRNA sense strand
gagacacaaucauaucuuu

SEQ ID NO: 1606418 - RNA, 19 nt, Homo sapiens
  misc_RNA (1)...(19): siRNA sense strand
gauacuagcuuugcagaau

SEQ ID NO: 1606419 - RNA, 19 nt, Homo sapiens
  misc_RNA (1)...(19): siRNA sense strand
gaacauaaagucugcaaca

SEQ ID NO: 1606420 - RNA, 19 nt, Homo sapiens
  misc_RNA (1)...(19): siRNA sense strand
ggauaugucuggguugaaa

SEQ ID NO: 1606421 - RNA, 19 nt, Homo sapiens
  misc_RNA (1)...(19): siRNA sense strand
agaaugaaguguacccuaa

SEQ ID NO: 1606422 - RNA, 19 nt, Homo sapiens
  misc_RNA (1)...(19): siRNA sense strand
gaggaaguaccauuauaua

SEQ ID NO: 1606423 - RNA, 19 nt, Homo sapiens
  misc_RNA (1)...(19): siRNA sense strand
gaaaaugacucagcuauuc

SEQ ID NO: 1606424 - RNA, 19 nt, Homo sapiens
  misc_RNA (1)...(19): siRNA sense strand
gauggaagcacuagacaaa

SEQ ID NO: 1606425 - RNA, 19 nt, Homo sapiens
  misc_RNA (1)...(19): siRNA sense strand
caaacagaauguguccuua

SEQ ID NO: 1606426 - RNA, 19 nt, Homo sapiens
  misc_RNA (1)...(19): siRNA sense strand
caaguagccucuuugacaa

SEQ ID NO: 1606427 - RNA, 19 nt, Homo sapiens
  misc_RNA (1)...(19): siRNA sense strand
ugccaccacugaugaauua

SEQ ID NO: 1606428 - RNA, 19 nt, Homo sapiens
  misc_RNA (1)...(19): siRNA sense strand
cgacacagccuggauauga

SEQ ID NO: 1606429 - RNA, 19 nt, Homo sapiens
  misc_RNA (1)...(19): siRNA sense strand
uauaagaaaccaccuauga

SEQ ID NO: 1606430 - RNA, 19 nt, Homo sapiens
  misc_RNA (1)...(19): siRNA sense strand
caccaaaguugaaucagaa

SEQ ID NO: 1606431 - RNA, 19 nt, Homo sapiens
  misc_RNA (1)...(19): siRNA sense strand
caaccacagugcauuguau

SEQ ID NO: 1606432 - RNA, 19 nt, Homo sapiens
  misc_RNA (1)...(19): siRNA sense strand
gaacuaaauccaaagauac

SEQ ID NO: 1606433 - RNA, 19 nt, Homo sapiens
  misc_RNA (1)...(19): siRNA sense strand
ccacauacauaaagaaacu

SEQ ID NO: 1606434 - RNA, 19 nt, Homo sapiens
  misc_RNA (1)...(19): siRNA sense strand
caaucaagaaguugcauua

SEQ ID NO: 1606435 - RNA, 19 nt, Homo sapiens
  misc_RNA (1)...(19): siRNA sense strand
ugaaagcacagaugaauug

SEQ ID NO: 1606436 - RNA, 19 nt, Homo sapiens
  misc_RNA (1)...(19): siRNA sense strand
gcucaucaguugccacuuc

SEQ ID NO: 1606437 - RNA, 19 nt, Homo sapiens
  misc_RNA (1)...(19): siRNA sense strand
gaugaugacuuccaguuac

SEQ ID NO: 1606438 - RNA, 19 nt, Homo sapiens
  misc_RNA (1)...(19): siRNA sense strand
ggaugaugacuuccaguua

SEQ ID NO: 1606439 - RNA, 19 nt, Homo sapiens
  misc_RNA (1)...(19): siRNA sense strand
ugaaagccuuggaugguuu

SEQ ID NO: 1606440 - RNA, 19 nt, Homo sapiens
  misc_RNA (1)...(19): siRNA sense strand
ugagagaaaugcuuacaca

SEQ ID NO: 1606441 - RNA, 19 nt, Homo sapiens
  misc_RNA (1)...(19): siRNA sense strand
gaagaacuaaauccaaaga

SEQ ID NO: 1606442 - RNA, 19 nt, Homo sapiens
  misc_RNA (1)...(19): siRNA sense strand
ucaaagcacaguuacagua

SEQ ID NO: 1606443 - RNA, 19 nt, Homo sapiens
  misc_RNA (1)...(19): siRNA sense strand
auagugauauggucaauga

SEQ ID NO: 1606444 - RNA, 19 nt, Homo sapiens
  misc_RNA (1)...(19): siRNA sense strand
gaaauuccuuuagauagca

SEQ ID NO: 1606445 - RNA, 19 nt, Homo sapiens
  misc_RNA (1)...(19): siRNA sense strand
ugacucagcuauucaccaa

SEQ ID NO: 1606446 - RNA, 19 nt, Homo sapiens
  misc_RNA (1)...(19): siRNA sense strand
ugaaguuaaugcuccuaua

SEQ ID NO: 1606447 - RNA, 19 nt, Homo sapiens
  misc_RNA (1)...(19): siRNA sense strand
gaucaguugucaccauuag

SEQ ID NO: 1606448 - RNA, 19 nt, Homo sapiens
  misc_RNA (1)...(19): siRNA sense strand
ucaccaaaguugaaucaga

SEQ ID NO: 1606449 - RNA, 19 nt, Homo sapiens
  misc_RNA (1)...(19): siRNA sense strand
agaaggaaccugaugcuuu

SEQ ID NO: 1606450 - RNA, 19 nt, Homo sapiens
  misc_RNA (1)...(19): siRNA sense strand
gcagaaugcucagagaaag

SEQ ID NO: 1606451 - RNA, 19 nt, Homo sapiens
  misc_RNA (1)...(19): siRNA sense strand
gaaaaggagucauagaaca

SEQ ID NO: 1606452 - RNA, 19 nt, Homo sapiens
  misc_RNA (1)...(19): siRNA sense strand
gcacugcacaggccacauu

SEQ ID NO: 1606453 - RNA, 19 nt, Homo sapiens
  misc_RNA (1)...(19): siRNA sense strand
aggaagaacuaaauccaaa

SEQ ID NO: 1606454 - RNA, 19 nt, Homo sapiens
  misc_RNA (1)...(19): siRNA sense strand
gugauauggucaaugaauu

SEQ ID NO: 1606455 - RNA, 19 nt, Homo sapiens
  misc_RNA (1)...(19): siRNA sense strand
ugaguucgcaucuugauaa

SEQ ID NO: 1606456 - RNA, 19 nt, Homo sapiens
  misc_RNA (1)...(19): siRNA sense strand
uacaagaaccuacugcuaa

SEQ ID NO: 1606457 - RNA, 19 nt, Homo sapiens
  misc_RNA (1)...(19): siRNA sense strand
ucaaugaauucaaguugga

SEQ ID NO: 1606458 - RNA, 19 nt, Homo sapiens
  misc_RNA (1)...(19): siRNA sense strand
gaucagacaccuaguccuu

SEQ ID NO: 1606459 - RNA, 19 nt, Homo sapiens
  misc_RNA (1)...(19): siRNA sense strand
ccucacccaucaaauauug

SEQ ID NO: 1606460 - RNA, 19 nt, Homo sapiens
  misc_RNA (1)...(19): siRNA sense strand
ccagcagacucaaauacaa

SEQ ID NO: 1606461 - RNA, 19 nt, Homo sapiens
  misc_RNA (1)...(19): siRNA sense strand
gacacagccuggauaugaa

SEQ ID NO: 1606462 - RNA, 19 nt, Homo sapiens
  misc_RNA (1)...(19): siRNA sense strand
gcuuggugcugauuuguga

SEQ ID NO: 1606463 - RNA, 19 nt, Homo sapiens
  misc_RNA (1)...(19): siRNA sense strand
ggaugaaaguggauuacca

SEQ ID NO: 1606464 - RNA, 19 nt, Homo sapiens
  misc_RNA (1)...(19): siRNA sense strand
cguguuaucugucgcuuug

SEQ ID NO: 1606465 - RNA, 19 nt, Homo sapiens
  misc_RNA (1)...(19): siRNA sense strand
uuaaaccgguugaaucuuc

SEQ ID NO: 1606466 - RNA, 19 nt, Homo sapiens
  misc_RNA (1)...(19): siRNA sense strand
gcaacugucauauauaaca

SEQ ID NO: 1606467 - RNA, 19 nt, Homo sapiens
  misc_RNA (1)...(19): siRNA sense strand
gaugaaagaauuaccgaau

SEQ ID NO: 1606468 - RNA, 19 nt, Homo sapiens
  misc_RNA (1)...(19): siRNA sense strand
uagcaagacuuuccucagu

SEQ ID NO: 1606469 - RNA, 19 nt, Homo sapiens
  misc_RNA (1)...(19): siRNA sense strand
ggaaaugagagaaaugcuu

SEQ ID NO: 1606470 - RNA, 19 nt, Homo sapiens
  misc_RNA (1)...(19): siRNA sense strand
cagagucacuggaacuuuc

SEQ ID NO: 1606471 - RNA, 19 nt, Homo sapiens
  misc_RNA (1)...(19): siRNA sense strand
gcaacgacacagaaacuga

SEQ ID NO: 1606472 - RNA, 19 nt, Homo sapiens
  misc_RNA (1)...(19): siRNA sense strand
caaaagagguggauauguc

SEQ ID NO: 1606473 - RNA, 19 nt, Homo sapiens
  misc_RNA (1)...(19): siRNA sense strand
gaugggauaugagccagaa

SEQ ID NO: 1606474 - RNA, 19 nt, Homo sapiens
  misc_RNA (1)...(19): siRNA sense strand
caaccucaguguggguaua

SEQ ID NO: 1606475 - RNA, 19 nt, Homo sapiens
  misc_RNA (1)...(19): siRNA sense strand
gaaaugcuuacacacagaa

SEQ ID NO: 1606476 - RNA, 19 nt, Homo sapiens
  misc_RNA (1)...(19): siRNA sense strand
acugcagggugaagaauua

SEQ ID NO: 1606477 - RNA, 19 nt, Homo sapiens
  misc_RNA (1)...(19): siRNA sense strand
caagaagcccuaacguguu

SEQ ID NO: 1606478 - RNA, 19 nt, Homo sapiens
  misc_RNA (1)...(19): siRNA sense strand
acaagaaccuacugcuaau

SEQ ID NO: 1606479 - RNA, 19 nt, Homo sapiens
  misc_RNA (1)...(19): siRNA sense strand
acaaguagccucuuugaca

SEQ ID NO: 1606480 - RNA, 19 nt, Homo sapiens
  misc_RNA (1)...(19): siRNA sense strand
aaacagaauguguccuuaa

SEQ ID NO: 1606481 - RNA, 19 nt, Homo sapiens
  misc_RNA (1)...(19): siRNA sense strand
gccgcucaauuuaugaaua

SEQ ID NO: 1606482 - RNA, 19 nt, Homo sapiens
  misc_RNA (1)...(19): siRNA sense strand
gaaagcgcaaguccucaaa

SEQ ID NO: 1606483 - RNA, 19 nt, Homo sapiens
  misc_RNA (1)...(19): siRNA sense strand
ccaguuacguuccuucgau

SEQ ID NO: 1606484 - RNA, 19 nt, Homo sapiens
  misc_RNA (1)...(19): siRNA sense strand
aacagaauguguccuuaaa

SEQ ID NO: 1606485 - RNA, 19 nt, Homo sapiens
  misc_RNA (1)...(19): siRNA sense strand
ggugacaugauuuacauuu

SEQ ID NO: 1606486 - RNA, 19 nt, Homo sapiens
  misc_RNA (1)...(19): siRNA sense strand
gaagaauuacucagagcuu

SEQ ID NO: 1606487 - RNA, 19 nt, Homo sapiens
  misc_RNA (1)...(19): siRNA sense strand
gaaguuaaugcuccuauac

SEQ ID NO: 1606488 - RNA, 19 nt, Homo sapiens
  misc_RNA (1)...(19): siRNA sense strand
ccgcucaauuuaugaauau

SEQ ID NO: 1606489 - RNA, 19 nt, Homo sapiens
  misc_RNA (1)...(19): siRNA sense strand
cacauucacguauaugaua

SEQ ID NO: 1606490 - RNA, 19 nt, Homo sapiens
  misc_RNA (1)...(19): siRNA sense strand
caaagcacaguuacaguau

SEQ ID NO: 1606491 - RNA, 19 nt, Homo sapiens
  misc_RNA (1)...(19): siRNA sense strand
cuaauagucccagugaaua

SEQ ID NO: 1606492 - RNA, 19 nt, Homo sapiens
  misc_RNA (1)...(19): siRNA sense strand
aaaguucaccugagccuaa

SEQ ID NO: 1606493 - RNA, 19 nt, Homo sapiens
  misc_RNA (1)...(19): siRNA sense strand
gauaugagccagaagaacu

SEQ ID NO: 1606494 - RNA, 19 nt, Homo sapiens
  misc_RNA (1)...(19): siRNA sense strand
ccgaauugaugggauauga

SEQ ID NO: 1606495 - RNA, 19 nt, Homo sapiens
  misc_RNA (1)...(19): siRNA sense strand
uuaccgaauugaugggaua

SEQ ID NO: 1606496 - RNA, 19 nt, Homo sapiens
  misc_RNA (1)...(19): siRNA sense strand
cagccuggauaugaaauuu

SEQ ID NO: 1606497 - RNA, 19 nt, Homo sapiens
  misc_RNA (1)...(19): siRNA sense strand
gacaugaaagcacagauga

SEQ ID NO: 1606498 - RNA, 19 nt, Homo sapiens
  misc_RNA (1)...(19): siRNA sense strand
acucagagcuuuggaucaa

SEQ ID NO: 1606499 - RNA, 19 nt, Homo sapiens
  misc_RNA (1)...(19): siRNA sense strand
cccaauggaugaugacuuc

SEQ ID NO: 1606500 - RNA, 19 nt, Homo sapiens
  misc_RNA (1)...(19): siRNA sense strand
uugaggaaguaccauuaua

SEQ ID NO: 1606501 - RNA, 19 nt, Homo sapiens
  misc_RNA (1)...(19): siRNA sense strand
aaugugaguucgcaucuug

SEQ ID NO: 1606502 - RNA, 19 nt, Homo sapiens
  misc_RNA (1)...(19): siRNA sense strand
caagcaacugucauauaua

SEQ ID NO: 1606503 - RNA, 19 nt, Homo sapiens
  misc_RNA (1)...(19): siRNA sense strand
gcugauuugugaacccauu

SEQ ID NO: 1606504 - RNA, 19 nt, Homo sapiens
  misc_RNA (1)...(19): siRNA sense strand
ggcaaucaauggaugaaag

SEQ ID NO: 1606505 - RNA, 19 nt, Homo sapiens
  misc_RNA (1)...(19): siRNA sense strand
ccauauagagauacucaaa

SEQ ID NO: 1606506 - RNA, 19 nt, Homo sapiens
  misc_RNA (1)...(19): siRNA sense strand
ugacaaacuuaagaaggaa

SEQ ID NO: 1606507 - RNA, 19 nt, Homo sapiens
  misc_RNA (1)...(19): siRNA sense strand
gcauuguaugugugaauua

SEQ ID NO: 1606508 - RNA, 19 nt, Homo sapiens
  misc_RNA (1)...(19): siRNA sense strand
gaaacucaagcaacuguca

SEQ ID NO: 1606509 - RNA, 19 nt, Homo sapiens
  misc_RNA (1)...(19): siRNA sense strand
gagcuuuggaucaaguuaa

SEQ ID NO: 1606510 - RNA, 19 nt, Homo sapiens
  misc_RNA (1)...(19): siRNA sense strand
gaaggaaccugaugcuuua

SEQ ID NO: 1606511 - RNA, 19 nt, Homo sapiens
  misc_RNA (1)...(19): siRNA sense strand
ggacacagauuuagacuug

SEQ ID NO: 1606512 - RNA, 19 nt, Homo sapiens
  misc_RNA (1)...(19): siRNA sense strand
gaaaugagagaaaugcuua

SEQ ID NO: 1606513 - RNA, 19 nt, Homo sapiens
  misc_RNA (1)...(19): siRNA sense strand
gaacaaauacaugggauua

SEQ ID NO: 1606514 - RNA, 19 nt, Homo sapiens
  misc_RNA (1)...(19): siRNA sense strand
ucaagcaacugucauauau

SEQ ID NO: 1606515 - RNA, 19 nt, Homo sapiens
  misc_RNA (1)...(19): siRNA sense strand
gauguuagcucccuauauc

SEQ ID NO: 1606516 - RNA, 19 nt, Homo sapiens
  misc_RNA (1)...(19): siRNA sense strand
gauaaggccucugugauga

SEQ ID NO: 1606517 - RNA, 19 nt, Homo sapiens
  misc_RNA (1)...(19): siRNA sense strand
gagacacaaucauaucuuu

SEQ ID NO: 1606518 - RNA, 19 nt, Homo sapiens
  misc_RNA (1)...(19): siRNA sense strand
gauacuagcuuugcagaau

SEQ ID NO: 1606519 - RNA, 19 nt, Homo sapiens
  misc_RNA (1)...(19): siRNA sense strand
gaacauaaagucugcaaca

SEQ ID NO: 1606520 - RNA, 19 nt, Homo sapiens
  misc_RNA (1)...(19): siRNA sense strand
ggauaugucuggguugaaa

SEQ ID NO: 1606521 - RNA, 19 nt, Homo sapiens
  misc_RNA (1)...(19): siRNA sense strand
agaaugaaguguacccuaa

SEQ ID NO: 1606522 - RNA, 19 nt, Homo sapiens
  misc_RNA (1)...(19): siRNA sense strand
gaggaaguaccauuauaua

SEQ ID NO: 1606523 - RNA, 19 nt, Homo sapiens
  misc_RNA (1)...(19): siRNA sense strand
gaaaaugacucagcuauuc

SEQ ID NO: 1606524 - RNA, 19 nt, Homo sapiens
  misc_RNA (1)...(19): siRNA sense strand
gauggaagcacuagacaaa

SEQ ID NO: 1606525 - RNA, 19 nt, Homo sapiens
  misc_RNA (1)...(19): siRNA sense strand
caaacagaauguguccuua

SEQ ID NO: 1606526 - RNA, 19 nt, Homo sapiens
  misc_RNA (1)...(19): siRNA sense strand
caaguagccucuuugacaa

SEQ ID NO: 1606527 - RNA, 19 nt, Homo sapiens
  misc_RNA (1)...(19): siRNA sense strand
ugccaccacugaugaauua

SEQ ID NO: 1606528 - RNA, 19 nt, Homo sapiens
  misc_RNA (1)...(19): siRNA sense strand
cgacacagccuggauauga

SEQ ID NO: 1606529 - RNA, 19 nt, Homo sapiens
  misc_RNA (1)...(19): siRNA sense strand
uauaagaaaccaccuauga

SEQ ID NO: 1606530 - RNA, 19 nt, Homo sapiens
  misc_RNA (1)...(19): siRNA sense strand
caccaaaguugaaucagaa

SEQ ID NO: 1606531 - RNA, 19 nt, Homo sapiens
  misc_RNA (1)...(19): siRNA sense strand
caaccacagugcauuguau

SEQ ID NO: 1606532 - RNA, 19 nt, Homo sapiens
  misc_RNA (1)...(19): siRNA sense strand
gaacuaaauccaaagauac

SEQ ID NO: 1606533 - RNA, 19 nt, Homo sapiens
  misc_RNA (1)...(19): siRNA sense strand
ccacauacauaaagaaacu

SEQ ID NO: 1606534 - RNA, 19 nt, Homo sapiens
  misc_RNA (1)...(19): siRNA sense strand
caaucaagaaguugcauua

SEQ ID NO: 1606535 - RNA, 19 nt, Homo sapiens
  misc_RNA (1)...(19): siRNA sense strand
ugaaagcacagaugaauug

SEQ ID NO: 1606536 - RNA, 19 nt, Homo sapiens
  misc_RNA (1)...(19): siRNA sense strand
gcucaucaguugccacuuc

SEQ ID NO: 1606537 - RNA, 19 nt, Homo sapiens
  misc_RNA (1)...(19): siRNA sense strand
gaugaugacuuccaguuac

SEQ ID NO: 1606538 - RNA, 19 nt, Homo sapiens
  misc_RNA (1)...(19): siRNA sense strand
ggaugaugacuuccaguua

SEQ ID NO: 1606539 - RNA, 19 nt, Homo sapiens
  misc_RNA (1)...(19): siRNA sense strand
ugaaagccuuggaugguuu

SEQ ID NO: 1606540 - RNA, 19 nt, Homo sapiens
  misc_RNA (1)...(19): siRNA sense strand
ugagagaaaugcuuacaca

SEQ ID NO: 1606541 - RNA, 19 nt, Homo sapiens
  misc_RNA (1)...(19): siRNA sense strand
gaagaacuaaauccaaaga

SEQ ID NO: 1606542 - RNA, 19 nt, Homo sapiens
  misc_RNA (1)...(19): siRNA sense strand
ucaaagcacaguuacagua

SEQ ID NO: 1606543 - RNA, 19 nt, Homo sapiens
  misc_RNA (1)...(19): siRNA sense strand
auagugauauggucaauga

SEQ ID NO: 1606544 - RNA, 19 nt, Homo sapiens
  misc_RNA (1)...(19): siRNA sense strand
gaaauuccuuuagauagca

SEQ ID NO: 1606545 - RNA, 19 nt, Homo sapiens
  misc_RNA (1)...(19): siRNA sense strand
ugacucagcuauucaccaa

SEQ ID NO: 1606546 - RNA, 19 nt, Homo sapiens
  misc_RNA (1)...(19): siRNA sense strand
gaucaguugucaccauuag

SEQ ID NO: 1606547 - RNA, 19 nt, Homo sapiens
  misc_RNA (1)...(19): siRNA sense strand
ucaccaaaguugaaucaga

SEQ ID NO: 1606548 - RNA, 19 nt, Homo sapiens
  misc_RNA (1)...(19): siRNA sense strand
agaaggaaccugaugcuuu

SEQ ID NO: 1606549 - RNA, 19 nt, Homo sapiens
  misc_RNA (1)...(19): siRNA sense strand
gcagaaugcucagagaaag

SEQ ID NO: 1606550 - RNA, 19 nt, Homo sapiens
  misc_RNA (1)...(19): siRNA sense strand
gaaaaggagucauagaaca

SEQ ID NO: 1606551 - RNA, 19 nt, Homo sapiens
  misc_RNA (1)...(19): siRNA sense strand
gcacugcacaggccacauu

SEQ ID NO: 1606552 - RNA, 19 nt, Homo sapiens
  misc_RNA (1)...(19): siRNA sense strand
aggaagaacuaaauccaaa

SEQ ID NO: 1606553 - RNA, 19 nt, Homo sapiens
  misc_RNA (1)...(19): siRNA sense strand
gugauauggucaaugaauu

SEQ ID NO: 1606554 - RNA, 19 nt, Homo sapiens
  misc_RNA (1)...(19): siRNA sense strand
gaucagacaccuaguccuu

SEQ ID NO: 1606555 - RNA, 19 nt, Homo sapiens
  misc_RNA (1)...(19): siRNA sense strand
ugaguucgcaucuugauaa

SEQ ID NO: 1606556 - RNA, 19 nt, Homo sapiens
  misc_RNA (1)...(19): siRNA sense strand
uacaagaaccuacugcuaa

SEQ ID NO: 1606557 - RNA, 19 nt, Homo sapiens
  misc_RNA (1)...(19): siRNA sense strand
ucaaugaauucaaguugga

SEQ ID NO: 1606558 - RNA, 19 nt, Homo sapiens
  misc_RNA (1)...(19): siRNA sense strand
ccucacccaucaaauauug

SEQ ID NO: 1606559 - RNA, 19 nt, Homo sapiens
  misc_RNA (1)...(19): siRNA sense strand
ccagcagacucaaauacaa

SEQ ID NO: 1606560 - RNA, 19 nt, Homo sapiens
  misc_RNA (1)...(19): siRNA sense strand
gacacagccuggauaugaa

SEQ ID NO: 1606561 - RNA, 19 nt, Homo sapiens
  misc_RNA (1)...(19): siRNA sense strand
gcuuggugcugauuuguga

SEQ ID NO: 1606562 - RNA, 19 nt, Homo sapiens
  misc_RNA (1)...(19): siRNA sense strand
cguguuaucugucgcuuug

SEQ ID NO: 1606563 - RNA, 19 nt, Homo sapiens
  misc_RNA (1)...(19): siRNA sense strand
uuaaaccgguugaaucuuc

SEQ ID NO: 1606564 - RNA, 19 nt, Homo sapiens
  misc_RNA (1)...(19): siRNA sense strand
gcaacugucauauauaaca

SEQ ID NO: 1606565 - RNA, 19 nt, Homo sapiens
  misc_RNA (1)...(19): siRNA sense strand
gaugaaagaauuaccgaau

SEQ ID NO: 1606566 - RNA, 19 nt, Homo sapiens
  misc_RNA (1)...(19): siRNA sense strand
uagcaagacuuuccucagu

SEQ ID NO: 1606567 - RNA, 19 nt, Homo sapiens
  misc_RNA (1)...(19): siRNA sense strand
ggaaaugagagaaaugcuu

SEQ ID NO: 1606568 - RNA, 19 nt, Homo sapiens
  misc_RNA (1)...(19): siRNA sense strand
cagagucacuggaacuuuc

SEQ ID NO: 1606569 - RNA, 19 nt, Homo sapiens
  misc_RNA (1)...(19): siRNA sense strand
gcaacgacacagaaacuga

SEQ ID NO: 1606570 - RNA, 19 nt, Homo sapiens
  misc_RNA (1)...(19): siRNA sense strand
caaaagagguggauauguc

SEQ ID NO: 1606571 - RNA, 19 nt, Homo sapiens
  misc_RNA (1)...(19): siRNA sense strand
gaugggauaugagccagaa

SEQ ID NO: 1606572 - RNA, 19 nt, Homo sapiens
  misc_RNA (1)...(19): siRNA sense strand
caaccucaguguggguaua

SEQ ID NO: 1606573 - RNA, 19 nt, Homo sapiens
  misc_RNA (1)...(19): siRNA sense strand
gaaaugcuuacacacagaa

SEQ ID NO: 1606574 - RNA, 19 nt, Homo sapiens
  misc_RNA (1)...(19): siRNA sense strand
caagaagcccuaacguguu

SEQ ID NO: 1606575 - RNA, 19 nt, Homo sapiens
  misc_RNA (1)...(19): siRNA sense strand
acaagaaccuacugcuaau

SEQ ID NO: 1606576 - RNA, 19 nt, Homo sapiens
  misc_RNA (1)...(19): siRNA sense strand
acaaguagccucuuugaca

SEQ ID NO: 1606577 - RNA, 19 nt, Homo sapiens
  misc_RNA (1)...(19): siRNA sense strand
aaacagaauguguccuuaa

SEQ ID NO: 1606578 - RNA, 19 nt, Homo sapiens
  misc_RNA (1)...(19): siRNA sense strand
gccgcucaauuuaugaaua

SEQ ID NO: 1606579 - RNA, 19 nt, Homo sapiens
  misc_RNA (1)...(19): siRNA sense strand
gaaagcgcaaguccucaaa

SEQ ID NO: 1606580 - RNA, 19 nt, Homo sapiens
  misc_RNA (1)...(19): siRNA sense strand
ccaguuacguuccuucgau

SEQ ID NO: 1606581 - RNA, 19 nt, Homo sapiens
  misc_RNA (1)...(19): siRNA sense strand
aacagaauguguccuuaaa

SEQ ID NO: 1606582 - RNA, 19 nt, Homo sapiens
  misc_RNA (1)...(19): siRNA sense strand
ggugacaugauuuacauuu

SEQ ID NO: 1606583 - RNA, 19 nt, Homo sapiens
  misc_RNA (1)...(19): siRNA sense strand
ccgcucaauuuaugaauau

SEQ ID NO: 1606584 - RNA, 19 nt, Homo sapiens
  misc_RNA (1)...(19): siRNA sense strand
cacauucacguauaugaua

SEQ ID NO: 1606585 - RNA, 19 nt, Homo sapiens
  misc_RNA (1)...(19): siRNA sense strand
caaagcacaguuacaguau

SEQ ID NO: 1606586 - RNA, 19 nt, Homo sapiens
  misc_RNA (1)...(19): siRNA sense strand
cuaauagucccagugaaua

SEQ ID NO: 1606587 - RNA, 19 nt, Homo sapiens
  misc_RNA (1)...(19): siRNA sense strand
aaaguucaccugagccuaa

SEQ ID NO: 1606588 - RNA, 19 nt, Homo sapiens
  misc_RNA (1)...(19): siRNA sense strand
gauaugagccagaagaacu

SEQ ID NO: 1606589 - RNA, 19 nt, Homo sapiens
  misc_RNA (1)...(19): siRNA sense strand
ccgaauugaugggauauga

SEQ ID NO: 1606590 - RNA, 19 nt, Homo sapiens
  misc_RNA (1)...(19): siRNA sense strand
uuaccgaauugaugggaua

SEQ ID NO: 1606591 - RNA, 19 nt, Homo sapiens
  misc_RNA (1)...(19): siRNA sense strand
cagccuggauaugaaauuu

SEQ ID NO: 1606592 - RNA, 19 nt, Homo sapiens
  misc_RNA (1)...(19): siRNA sense strand
gacaugaaagcacagauga

SEQ ID NO: 1606593 - RNA, 19 nt, Homo sapiens
  misc_RNA (1)...(19): siRNA sense strand
cccaauggaugaugacuuc

SEQ ID NO: 1606594 - RNA, 19 nt, Homo sapiens
  misc_RNA (1)...(19): siRNA sense strand
uugaggaaguaccauuaua

SEQ ID NO: 1606595 - RNA, 19 nt, Homo sapiens
  misc_RNA (1)...(19): siRNA sense strand
aaugugaguucgcaucuug

SEQ ID NO: 1606596 - RNA, 19 nt, Homo sapiens
  misc_RNA (1)...(19): siRNA sense strand
caagcaacugucauauaua

SEQ ID NO: 1606597 - RNA, 19 nt, Homo sapiens
  misc_RNA (1)...(19): siRNA sense strand
gcugauuugugaacccauu

SEQ ID NO: 1606598 - RNA, 19 nt, Homo sapiens
  misc_RNA (1)...(19): siRNA sense strand
ccauauagagauacucaaa

SEQ ID NO: 1606599 - RNA, 19 nt, Homo sapiens
  misc_RNA (1)...(19): siRNA sense strand
ugacaaacuuaagaaggaa

SEQ ID NO: 1606600 - RNA, 19 nt, Homo sapiens
  misc_RNA (1)...(19): siRNA sense strand
gcauuguaugugugaauua

SEQ ID NO: 1606601 - RNA, 19 nt, Homo sapiens
  misc_RNA (1)...(19): siRNA sense strand
gaaacucaagcaacuguca

SEQ ID NO: 1606602 - RNA, 19 nt, Homo sapiens
  misc_RNA (1)...(19): siRNA sense strand
gaugauggugacaugauuu

SEQ ID NO: 1606603 - RNA, 19 nt, Homo sapiens
  misc_RNA (1)...(19): siRNA sense strand
caucaucaccauauagaga

SEQ ID NO: 1606604 - RNA, 19 nt, Homo sapiens
  misc_RNA (1)...(19): siRNA sense strand
aagcacaguuacaguauuc

SEQ ID NO: 1606605 - RNA, 19 nt, Homo sapiens
  misc_RNA (1)...(19): siRNA sense strand
gauuuagacuuggagaugu

SEQ ID NO: 1606606 - RNA, 19 nt, Homo sapiens
  misc_RNA (1)...(19): siRNA sense strand
ggucaaugaauucaaguug

SEQ ID NO: 1606607 - RNA, 19 nt, Homo sapiens
  misc_RNA (1)...(19): siRNA sense strand
ggaagcacuagacaaaguu

SEQ ID NO: 1606608 - RNA, 19 nt, Homo sapiens
  misc_RNA (1)...(19): siRNA sense strand
gaaguaaagaaucugaagu

SEQ ID NO: 1606609 - RNA, 19 nt, Homo sapiens
  misc_RNA (1)...(19): siRNA sense strand
gaggaagaacuaaauccaa

SEQ ID NO: 1606610 - RNA, 19 nt, Homo sapiens
  misc_RNA (1)...(19): siRNA sense strand
gaaaguacaucgccuucua

SEQ ID NO: 1606611 - RNA, 19 nt, Homo sapiens
  misc_RNA (1)...(19): siRNA sense strand
uaaaggagcugcaggagaa

SEQ ID NO: 1606612 - RNA, 19 nt, Homo sapiens
  misc_RNA (1)...(19): siRNA sense strand
ggaaggagcuggagagagu

SEQ ID NO: 1606613 - RNA, 19 nt, Homo sapiens
  misc_RNA (1)...(19): siRNA sense strand
ggaccuguaucacaugaaa

SEQ ID NO: 1606614 - RNA, 19 nt, Homo sapiens
  misc_RNA (1)...(19): siRNA sense strand
ggagagagaucaauaugcu

SEQ ID NO: 1606615 - RNA, 19 nt, Homo sapiens
  misc_RNA (1)...(19): siRNA sense strand
gcaggagguuugcacauug

SEQ ID NO: 1606616 - RNA, 19 nt, Homo sapiens
  misc_RNA (1)...(19): siRNA sense strand
gaaagcaaacaaugagaaa

SEQ ID NO: 1606617 - RNA, 19 nt, Homo sapiens
  misc_RNA (1)...(19): siRNA sense strand
gaaggagucgcuuaaagaa

SEQ ID NO: 1606618 - RNA, 19 nt, Homo sapiens
  misc_RNA (1)...(19): siRNA sense strand
gaaacauucucucagauac

SEQ ID NO: 1606619 - RNA, 19 nt, Homo sapiens
  misc_RNA (1)...(19): siRNA sense strand
caugaaacauucucucaga

SEQ ID NO: 1606620 - RNA, 19 nt, Homo sapiens
  misc_RNA (1)...(19): siRNA sense strand
ucagauacuuugaagaaga

SEQ ID NO: 1606621 - RNA, 19 nt, Homo sapiens
  misc_RNA (1)...(19): siRNA sense strand
agaaacaaguggaacauca

SEQ ID NO: 1606622 - RNA, 19 nt, Homo sapiens
  misc_RNA (1)...(19): siRNA sense strand
cgacaagcauggugaucuu

SEQ ID NO: 1606623 - RNA, 19 nt, Homo sapiens
  misc_RNA (1)...(19): siRNA sense strand
ugaaacauucucucagaua

SEQ ID NO: 1606624 - RNA, 19 nt, Homo sapiens
  misc_RNA (1)...(19): siRNA sense strand
gaggagaagaagcaugaua

SEQ ID NO: 1606625 - RNA, 19 nt, Homo sapiens
  misc_RNA (1)...(19): siRNA sense strand
gaaacuggaacuuggauuc

SEQ ID NO: 1606626 - RNA, 19 nt, Homo sapiens
  misc_RNA (1)...(19): siRNA sense strand
gcaguuagagcaguccaua

SEQ ID NO: 1606627 - RNA, 19 nt, Homo sapiens
  misc_RNA (1)...(19): siRNA sense strand
guacaucgccuucuaacag

SEQ ID NO: 1606628 - RNA, 19 nt, Homo sapiens
  misc_RNA (1)...(19): siRNA sense strand
ugaaggagucgcuuaaaga

SEQ ID NO: 1606629 - RNA, 19 nt, Homo sapiens
  misc_RNA (1)...(19): siRNA sense strand
gagcuuguccagacucaaa

SEQ ID NO: 1606630 - RNA, 19 nt, Homo sapiens
  misc_RNA (1)...(19): siRNA sense strand
gaaaagaaagcaaacaaug

SEQ ID NO: 1606631 - RNA, 19 nt, Homo sapiens
  misc_RNA (1)...(19): siRNA sense strand
gcacauugaaggaggagaa

SEQ ID NO: 1606632 - RNA, 19 nt, Homo sapiens
  misc_RNA (1)...(19): siRNA sense strand
aacaucagcuggaagaaga

SEQ ID NO: 1606633 - RNA, 19 nt, Homo sapiens
  misc_RNA (1)...(19): siRNA sense strand
caaacaaugagaaacagaa

SEQ ID NO: 1606634 - RNA, 19 nt, Homo sapiens
  misc_RNA (1)...(19): siRNA sense strand
ucucagauacuuugaagaa

SEQ ID NO: 1606635 - RNA, 19 nt, Homo sapiens
  misc_RNA (1)...(19): siRNA sense strand
ugaaugacaccaucaaauc

SEQ ID NO: 1606636 - RNA, 19 nt, Homo sapiens
  misc_RNA (1)...(19): siRNA sense strand
gcaguuggagcagcaagua

SEQ ID NO: 1606637 - RNA, 19 nt, Homo sapiens
  misc_RNA (1)...(19): siRNA sense strand
gagauugaacacagagaaa

SEQ ID NO: 1606638 - RNA, 19 nt, Homo sapiens
  misc_RNA (1)...(19): siRNA sense strand
gaacaucagcuggaagaag

SEQ ID NO: 1606639 - RNA, 19 nt, Homo sapiens
  misc_RNA (1)...(19): siRNA sense strand
caggagguuugcacauuga

SEQ ID NO: 1606640 - RNA, 19 nt, Homo sapiens
  misc_RNA (1)...(19): siRNA sense strand
gaaugacaccaucaaaucu

SEQ ID NO: 1606641 - RNA, 19 nt, Homo sapiens
  misc_RNA (1)...(19): siRNA sense strand
gagggagcauguggagaaa

SEQ ID NO: 1606642 - RNA, 19 nt, Homo sapiens
  misc_RNA (1)...(19): siRNA sense strand
caagagcgcacugcaguug

SEQ ID NO: 1606643 - RNA, 19 nt, Homo sapiens
  misc_RNA (1)...(19): siRNA sense strand
gaagaaacaaguggaacau

SEQ ID NO: 1606644 - RNA, 19 nt, Homo sapiens
  misc_RNA (1)...(19): siRNA sense strand
caagcauggugaucuuugu

SEQ ID NO: 1606645 - RNA, 19 nt, Homo sapiens
  misc_RNA (1)...(19): siRNA sense strand
ggagcuagagggucaaauc

SEQ ID NO: 1606646 - RNA, 19 nt, Homo sapiens
  misc_RNA (1)...(19): siRNA sense strand
ugagggagcauguggagaa

SEQ ID NO: 1606647 - RNA, 19 nt, Homo sapiens
  misc_RNA (1)...(19): siRNA sense strand
gcaaacaaugagaaacaga

SEQ ID NO: 1606648 - RNA, 19 nt, Homo sapiens
  misc_RNA (1)...(19): siRNA sense strand
uguaucacaugaaacauuc

SEQ ID NO: 1606649 - RNA, 19 nt, Homo sapiens
  misc_RNA (1)...(19): siRNA sense strand
ggacacgugacacaguuga

SEQ ID NO: 1606650 - RNA, 19 nt, Homo sapiens
  misc_RNA (1)...(19): siRNA sense strand
ggagaaacuggaacuugga

SEQ ID NO: 1606651 - RNA, 19 nt, Homo sapiens
  misc_RNA (1)...(19): siRNA sense strand
aggagucgcuuaaagaagu

SEQ ID NO: 1606652 - RNA, 19 nt, Homo sapiens
  misc_RNA (1)...(19): siRNA sense strand
gcagcuccuuggugagaug

SEQ ID NO: 1606653 - RNA, 19 nt, Homo sapiens
  misc_RNA (1)...(19): siRNA sense strand
gggagcauguggagaaacu

SEQ ID NO: 1606654 - RNA, 19 nt, Homo sapiens
  misc_RNA (1)...(19): siRNA sense strand
cgcaggagguuugcacauu

SEQ ID NO: 1606655 - RNA, 19 nt, Homo sapiens
  misc_RNA (1)...(19): siRNA sense strand
aaagaaagcaaacaaugag

SEQ ID NO: 1606656 - RNA, 19 nt, Homo sapiens
  misc_RNA (1)...(19): siRNA sense strand
aaaguacaucgccuucuaa

SEQ ID NO: 1606657 - RNA, 19 nt, Homo sapiens
  misc_RNA (1)...(19): siRNA sense strand
gaaacagaaagcugaaagg

SEQ ID NO: 1606658 - RNA, 19 nt, Homo sapiens
  misc_RNA (1)...(19): siRNA sense strand
ccggaacccugcugcugaa

SEQ ID NO: 1606659 - RNA, 19 nt, Homo sapiens
  misc_RNA (1)...(19): siRNA sense strand
uacaucgccuucuaacaga

SEQ ID NO: 1606660 - RNA, 19 nt, Homo sapiens
  misc_RNA (1)...(19): siRNA sense strand
ucagagcccgugccaagaa

SEQ ID NO: 1606661 - RNA, 19 nt, Homo sapiens
  misc_RNA (1)...(19): siRNA sense strand
ugcaagaccugaggaagga

SEQ ID NO: 1606662 - RNA, 19 nt, Homo sapiens
  misc_RNA (1)...(19): siRNA sense strand
agaucaauaugcugaacaa

SEQ ID NO: 1606663 - RNA, 19 nt, Homo sapiens
  misc_RNA (1)...(19): siRNA sense strand
gcaguaaagcacuucucaa

SEQ ID NO: 1606664 - RNA, 19 nt, Homo sapiens
  misc_RNA (1)...(19): siRNA sense strand
ugaagaagaguccaaggau

SEQ ID NO: 1606665 - RNA, 19 nt, Homo sapiens
  misc_RNA (1)...(19): siRNA sense strand
cagauacuuugaagaagag

SEQ ID NO: 1606666 - RNA, 19 nt, Homo sapiens
  misc_RNA (1)...(19): siRNA sense strand
cguggagccugcacaagga

SEQ ID NO: 1606667 - RNA, 19 nt, Homo sapiens
  misc_RNA (1)...(19): siRNA sense strand
agaaagcaaacaaugagaa

SEQ ID NO: 1606668 - RNA, 19 nt, Homo sapiens
  misc_RNA (1)...(19): siRNA sense strand
aaggacacgugacacaguu

SEQ ID NO: 1606669 - RNA, 19 nt, Homo sapiens
  misc_RNA (1)...(19): siRNA sense strand
gcugaaaggacacgugaca

SEQ ID NO: 1606670 - RNA, 19 nt, Homo sapiens
  misc_RNA (1)...(19): siRNA sense strand
ugaaaggacacgugacaca

SEQ ID NO: 1606671 - RNA, 19 nt, Homo sapiens
  misc_RNA (1)...(19): siRNA sense strand
ugaaggaggagaagaagca

SEQ ID NO: 1606672 - RNA, 19 nt, Homo sapiens
  misc_RNA (1)...(19): siRNA sense strand
gagccgcaguaaagcacuu

SEQ ID NO: 1606673 - RNA, 19 nt, Homo sapiens
  misc_RNA (1)...(19): siRNA sense strand
gaaacaaguggaacaucag

SEQ ID NO: 1606674 - RNA, 19 nt, Homo sapiens
  misc_RNA (1)...(19): siRNA sense strand
caguaaagcacuucucaag

SEQ ID NO: 1606675 - RNA, 19 nt, Homo sapiens
  misc_RNA (1)...(19): siRNA sense strand
aagcaaacaaugagaaaca

SEQ ID NO: 1606676 - RNA, 19 nt, Homo sapiens
  misc_RNA (1)...(19): siRNA sense strand
gagaaacagaaagcugaaa

SEQ ID NO: 1606677 - RNA, 19 nt, Homo sapiens
  misc_RNA (1)...(19): siRNA sense strand
ugaacucgagguccauaaa

SEQ ID NO: 1606678 - RNA, 19 nt, Homo sapiens
  misc_RNA (1)...(19): siRNA sense strand
gcuggagagagaucaauau

SEQ ID NO: 1606679 - RNA, 19 nt, Homo sapiens
  misc_RNA (1)...(19): siRNA sense strand
cauugaaggaggagaagaa

SEQ ID NO: 1606680 - RNA, 19 nt, Homo sapiens
  misc_RNA (1)...(19): siRNA sense strand
aacauucucucagauacuu

SEQ ID NO: 1606681 - RNA, 19 nt, Homo sapiens
  misc_RNA (1)...(19): siRNA sense strand
gaacucgagguccauaaaa

SEQ ID NO: 1606682 - RNA, 19 nt, Homo sapiens
  misc_RNA (1)...(19): siRNA sense strand
gcagcguauaggagaguua

SEQ ID NO: 1606683 - RNA, 19 nt, Homo sapiens
  misc_RNA (1)...(19): siRNA sense strand
uugaaggagucgcuuaaag

SEQ ID NO: 1606684 - RNA, 19 nt, Homo sapiens
  misc_RNA (1)...(19): siRNA sense strand
gagucuagcggccuuaugg

SEQ ID NO: 1606685 - RNA, 19 nt, Homo sapiens
  misc_RNA (1)...(19): siRNA sense strand
gaaaaugucgcaggagguu

SEQ ID NO: 1606686 - RNA, 19 nt, Homo sapiens
  misc_RNA (1)...(19): siRNA sense strand
ggagucgcuuaaagaaguc

SEQ ID NO: 1606687 - RNA, 19 nt, Homo sapiens
  misc_RNA (1)...(19): siRNA sense strand
ucucucagauacuuugaag

SEQ ID NO: 1606688 - RNA, 19 nt, Homo sapiens
  misc_RNA (1)...(19): siRNA sense strand
guggagaaacuggaacuug

SEQ ID NO: 1606689 - RNA, 19 nt, Homo sapiens
  misc_RNA (1)...(19): siRNA sense strand
gcauguggagaaacuggaa

SEQ ID NO: 1606690 - RNA, 19 nt, Homo sapiens
  misc_RNA (1)...(19): siRNA sense strand
augacaccaucaaaucuuu

SEQ ID NO: 1606691 - RNA, 19 nt, Homo sapiens
  misc_RNA (1)...(19): siRNA sense strand
gaacaaauaaaaggagaga

SEQ ID NO: 1606692 - RNA, 19 nt, Homo sapiens
  misc_RNA (1)...(19): siRNA sense strand
gacaagcauggugaucuuu

SEQ ID NO: 1606693 - RNA, 19 nt, Homo sapiens
  misc_RNA (1)...(19): siRNA sense strand
gagaaacuggaacuuggau

SEQ ID NO: 1606694 - RNA, 19 nt, Homo sapiens
  misc_RNA (1)...(19): siRNA sense strand
aaaugucgcaggagguuug

SEQ ID NO: 1606695 - RNA, 19 nt, Homo sapiens
  misc_RNA (1)...(19): siRNA sense strand
aagcagcaguccugaacuc

SEQ ID NO: 1606696 - RNA, 19 nt, Homo sapiens
  misc_RNA (1)...(19): siRNA sense strand
agaagaaacaaguggaaca

SEQ ID NO: 1606697 - RNA, 19 nt, Homo sapiens
  misc_RNA (1)...(19): siRNA sense strand
agagcgcacugcaguugga

SEQ ID NO: 1606698 - RNA, 19 nt, Homo sapiens
  misc_RNA (1)...(19): siRNA sense strand
gaaaacaaucagugcauca

SEQ ID NO: 1606699 - RNA, 19 nt, Homo sapiens
  misc_RNA (1)...(19): siRNA sense strand
gaggaaggagcuggagaga

SEQ ID NO: 1606700 - RNA, 19 nt, Homo sapiens
  misc_RNA (1)...(19): siRNA sense strand
aggaggagaagaagcauga

SEQ ID NO: 1606701 - RNA, 19 nt, Homo sapiens
  misc_RNA (1)...(19): siRNA sense strand
aagaagaguccaaggaucu

SEQ ID NO: 1606702 - RNA, 19 nt, Homo sapiens
  misc_RNA (1)...(19): siRNA sense strand
gugcagcuccuuggugaga

SEQ ID NO: 1606703 - RNA, 19 nt, Homo sapiens
  misc_RNA (1)...(19): siRNA sense strand
uggaacaucagcuggaaga

SEQ ID NO: 1606704 - RNA, 19 nt, Homo sapiens
  misc_RNA (1)...(19): siRNA sense strand
gaucaauaugcugaacaaa

SEQ ID NO: 1606705 - RNA, 19 nt, Homo sapiens
  misc_RNA (1)...(19): siRNA sense strand
guccauacgggagcagaua

SEQ ID NO: 1606706 - RNA, 19 nt, Homo sapiens
  misc_RNA (1)...(19): siRNA sense strand
gagaucaauaugcugaaca

SEQ ID NO: 1606707 - RNA, 19 nt, Homo sapiens
  misc_RNA (1)...(19): siRNA sense strand
cacaugaaacauucucuca

SEQ ID NO: 1606708 - RNA, 19 nt, Homo sapiens
  misc_RNA (1)...(19): siRNA sense strand
aaacuggaacuuggauuca

SEQ ID NO: 1606709 - RNA, 19 nt, Homo sapiens
  misc_RNA (1)...(19): siRNA sense strand
cagcagaggaugaggaaaa

SEQ ID NO: 1606710 - RNA, 19 nt, Homo sapiens
  misc_RNA (1)...(19): siRNA sense strand
gaaaguacaucgccuucua

SEQ ID NO: 1606711 - RNA, 19 nt, Homo sapiens
  misc_RNA (1)...(19): siRNA sense strand
uaaaggagcugcaggagaa

SEQ ID NO: 1606712 - RNA, 19 nt, Homo sapiens
  misc_RNA (1)...(19): siRNA sense strand
ggaaggagcuggagagagu

SEQ ID NO: 1606713 - RNA, 19 nt, Homo sapiens
  misc_RNA (1)...(19): siRNA sense strand
ggagagagaucaauaugcu

SEQ ID NO: 1606714 - RNA, 19 nt, Homo sapiens
  misc_RNA (1)...(19): siRNA sense strand
gcaggagguuugcacauug

SEQ ID NO: 1606715 - RNA, 19 nt, Homo sapiens
  misc_RNA (1)...(19): siRNA sense strand
gaaggagucgcuuaaagaa

SEQ ID NO: 1606716 - RNA, 19 nt, Homo sapiens
  misc_RNA (1)...(19): siRNA sense strand
gaaacauucucucagauac

SEQ ID NO: 1606717 - RNA, 19 nt, Homo sapiens
  misc_RNA (1)...(19): siRNA sense strand
ucagauacuuugaagaaga

SEQ ID NO: 1606718 - RNA, 19 nt, Homo sapiens
  misc_RNA (1)...(19): siRNA sense strand
cgacaagcauggugaucuu

SEQ ID NO: 1606719 - RNA, 19 nt, Homo sapiens
  misc_RNA (1)...(19): siRNA sense strand
gaggagaagaagcaugaua

SEQ ID NO: 1606720 - RNA, 19 nt, Homo sapiens
  misc_RNA (1)...(19): siRNA sense strand
gaaacuggaacuuggauuc

SEQ ID NO: 1606721 - RNA, 19 nt, Homo sapiens
  misc_RNA (1)...(19): siRNA sense strand
gcaguuagagcaguccaua

SEQ ID NO: 1606722 - RNA, 19 nt, Homo sapiens
  misc_RNA (1)...(19): siRNA sense strand
guacaucgccuucuaacag

SEQ ID NO: 1606723 - RNA, 19 nt, Homo sapiens
  misc_RNA (1)...(19): siRNA sense strand
ugaaggagucgcuuaaaga

SEQ ID NO: 1606724 - RNA, 19 nt, Homo sapiens
  misc_RNA (1)...(19): siRNA sense strand
gagcuuguccagacucaaa

SEQ ID NO: 1606725 - RNA, 19 nt, Homo sapiens
  misc_RNA (1)...(19): siRNA sense strand
gcacauugaaggaggagaa

SEQ ID NO: 1606726 - RNA, 19 nt, Homo sapiens
  misc_RNA (1)...(19): siRNA sense strand
ucucagauacuuugaagaa

SEQ ID NO: 1606727 - RNA, 19 nt, Homo sapiens
  misc_RNA (1)...(19): siRNA sense strand
gcaguuggagcagcaagua

SEQ ID NO: 1606728 - RNA, 19 nt, Homo sapiens
  misc_RNA (1)...(19): siRNA sense strand
caggagguuugcacauuga

SEQ ID NO: 1606729 - RNA, 19 nt, Homo sapiens
  misc_RNA (1)...(19): siRNA sense strand
caagagcgcacugcaguug

SEQ ID NO: 1606730 - RNA, 19 nt, Homo sapiens
  misc_RNA (1)...(19): siRNA sense strand
gagggagcauguggagaaa

SEQ ID NO: 1606731 - RNA, 19 nt, Homo sapiens
  misc_RNA (1)...(19): siRNA sense strand
caagcauggugaucuuugu

SEQ ID NO: 1606732 - RNA, 19 nt, Homo sapiens
  misc_RNA (1)...(19): siRNA sense strand
ugagggagcauguggagaa

SEQ ID NO: 1606733 - RNA, 19 nt, Homo sapiens
  misc_RNA (1)...(19): siRNA sense strand
ggacacgugacacaguuga

SEQ ID NO: 1606734 - RNA, 19 nt, Homo sapiens
  misc_RNA (1)...(19): siRNA sense strand
ggagaaacuggaacuugga

SEQ ID NO: 1606735 - RNA, 19 nt, Homo sapiens
  misc_RNA (1)...(19): siRNA sense strand
aggagucgcuuaaagaagu

SEQ ID NO: 1606736 - RNA, 19 nt, Homo sapiens
  misc_RNA (1)...(19): siRNA sense strand
gcagcuccuuggugagaug

SEQ ID NO: 1606737 - RNA, 19 nt, Homo sapiens
  misc_RNA (1)...(19): siRNA sense strand
gggagcauguggagaaacu

SEQ ID NO: 1606738 - RNA, 19 nt, Homo sapiens
  misc_RNA (1)...(19): siRNA sense strand
cgcaggagguuugcacauu

SEQ ID NO: 1606739 - RNA, 19 nt, Homo sapiens
  misc_RNA (1)...(19): siRNA sense strand
aaaguacaucgccuucuaa

SEQ ID NO: 1606740 - RNA, 19 nt, Homo sapiens
  misc_RNA (1)...(19): siRNA sense strand
gcaguaaagcacuucucaa

SEQ ID NO: 1606741 - RNA, 19 nt, Homo sapiens
  misc_RNA (1)...(19): siRNA sense strand
ccggaacccugcugcugaa

SEQ ID NO: 1606742 - RNA, 19 nt, Homo sapiens
  misc_RNA (1)...(19): siRNA sense strand
uacaucgccuucuaacaga

SEQ ID NO: 1606743 - RNA, 19 nt, Homo sapiens
  misc_RNA (1)...(19): siRNA sense strand
ugaagaagaguccaaggau

SEQ ID NO: 1606744 - RNA, 19 nt, Homo sapiens
  misc_RNA (1)...(19): siRNA sense strand
ugcaagaccugaggaagga

SEQ ID NO: 1606745 - RNA, 19 nt, Homo sapiens
  misc_RNA (1)...(19): siRNA sense strand
agaucaauaugcugaacaa

SEQ ID NO: 1606746 - RNA, 19 nt, Homo sapiens
  misc_RNA (1)...(19): siRNA sense strand
cagauacuuugaagaagag

SEQ ID NO: 1606747 - RNA, 19 nt, Homo sapiens
  misc_RNA (1)...(19): siRNA sense strand
cguggagccugcacaagga

SEQ ID NO: 1606748 - RNA, 19 nt, Homo sapiens
  misc_RNA (1)...(19): siRNA sense strand
aaggacacgugacacaguu

SEQ ID NO: 1606749 - RNA, 19 nt, Homo sapiens
  misc_RNA (1)...(19): siRNA sense strand
gcugaaaggacacgugaca

SEQ ID NO: 1606750 - RNA, 19 nt, Homo sapiens
  misc_RNA (1)...(19): siRNA sense strand
ugaaaggacacgugacaca

SEQ ID NO: 1606751 - RNA, 19 nt, Homo sapiens
  misc_RNA (1)...(19): siRNA sense strand
ugaaggaggagaagaagca

SEQ ID NO: 1606752 - RNA, 19 nt, Homo sapiens
  misc_RNA (1)...(19): siRNA sense strand
caguaaagcacuucucaag

SEQ ID NO: 1606753 - RNA, 19 nt, Homo sapiens
  misc_RNA (1)...(19): siRNA sense strand
gagccgcaguaaagcacuu

SEQ ID NO: 1606754 - RNA, 19 nt, Homo sapiens
  misc_RNA (1)...(19): siRNA sense strand
gcuggagagagaucaauau

SEQ ID NO: 1606755 - RNA, 19 nt, Homo sapiens
  misc_RNA (1)...(19): siRNA sense strand
cauugaaggaggagaagaa

SEQ ID NO: 1606756 - RNA, 19 nt, Homo sapiens
  misc_RNA (1)...(19): siRNA sense strand
aacauucucucagauacuu

SEQ ID NO: 1606757 - RNA, 19 nt, Homo sapiens
  misc_RNA (1)...(19): siRNA sense strand
gcagcguauaggagaguua

SEQ ID NO: 1606758 - RNA, 19 nt, Homo sapiens
  misc_RNA (1)...(19): siRNA sense strand
uugaaggagucgcuuaaag

SEQ ID NO: 1606759 - RNA, 19 nt, Homo sapiens
  misc_RNA (1)...(19): siRNA sense strand
gagucuagcggccuuaugg

SEQ ID NO: 1606760 - RNA, 19 nt, Homo sapiens
  misc_RNA (1)...(19): siRNA sense strand
gaaaaugucgcaggagguu

SEQ ID NO: 1606761 - RNA, 19 nt, Homo sapiens
  misc_RNA (1)...(19): siRNA sense strand
ggagucgcuuaaagaaguc

SEQ ID NO: 1606762 - RNA, 19 nt, Homo sapiens
  misc_RNA (1)...(19): siRNA sense strand
gcauguggagaaacuggaa

SEQ ID NO: 1606763 - RNA, 19 nt, Homo sapiens
  misc_RNA (1)...(19): siRNA sense strand
ucucucagauacuuugaag

SEQ ID NO: 1606764 - RNA, 19 nt, Homo sapiens
  misc_RNA (1)...(19): siRNA sense strand
guggagaaacuggaacuug

SEQ ID NO: 1606765 - RNA, 19 nt, Homo sapiens
  misc_RNA (1)...(19): siRNA sense strand
gaacaaauaaaaggagaga

SEQ ID NO: 1606766 - RNA, 19 nt, Homo sapiens
  misc_RNA (1)...(19): siRNA sense strand
gacaagcauggugaucuuu

SEQ ID NO: 1606767 - RNA, 19 nt, Homo sapiens
  misc_RNA (1)...(19): siRNA sense strand
gagaaacuggaacuuggau

SEQ ID NO: 1606768 - RNA, 19 nt, Homo sapiens
  misc_RNA (1)...(19): siRNA sense strand
aaaugucgcaggagguuug

SEQ ID NO: 1606769 - RNA, 19 nt, Homo sapiens
  misc_RNA (1)...(19): siRNA sense strand
aggaggagaagaagcauga

SEQ ID NO: 1606770 - RNA, 19 nt, Homo sapiens
  misc_RNA (1)...(19): siRNA sense strand
agagcgcacugcaguugga

SEQ ID NO: 1606771 - RNA, 19 nt, Homo sapiens
  misc_RNA (1)...(19): siRNA sense strand
gaaaacaaucagugcauca

SEQ ID NO: 1606772 - RNA, 19 nt, Homo sapiens
  misc_RNA (1)...(19): siRNA sense strand
gaggaaggagcuggagaga

SEQ ID NO: 1606773 - RNA, 19 nt, Homo sapiens
  misc_RNA (1)...(19): siRNA sense strand
gaucaauaugcugaacaaa

SEQ ID NO: 1606774 - RNA, 19 nt, Homo sapiens
  misc_RNA (1)...(19): siRNA sense strand
gugcagcuccuuggugaga

SEQ ID NO: 1606775 - RNA, 19 nt, Homo sapiens
  misc_RNA (1)...(19): siRNA sense strand
aagaagaguccaaggaucu

SEQ ID NO: 1606776 - RNA, 19 nt, Homo sapiens
  misc_RNA (1)...(19): siRNA sense strand
guccauacgggagcagaua

SEQ ID NO: 1606777 - RNA, 19 nt, Homo sapiens
  misc_RNA (1)...(19): siRNA sense strand
gagaucaauaugcugaaca

SEQ ID NO: 1606778 - RNA, 19 nt, Homo sapiens
  misc_RNA (1)...(19): siRNA sense strand
aaacuggaacuuggauuca

SEQ ID NO: 1606779 - RNA, 19 nt, Homo sapiens
  misc_RNA (1)...(19): siRNA sense strand
cagcagaggaugaggaaaa

SEQ ID NO: 1606780 - RNA, 19 nt, Homo sapiens
  misc_RNA (1)...(19): siRNA sense strand
gagagaucaauaugcugaa

SEQ ID NO: 1606781 - RNA, 19 nt, Homo sapiens
  misc_RNA (1)...(19): siRNA sense strand
ggcagcagaggaugaggaa

SEQ ID NO: 1606782 - RNA, 19 nt, Homo sapiens
  misc_RNA (1)...(19): siRNA sense strand
gggaggaggccaucaucag

SEQ ID NO: 1606783 - RNA, 19 nt, Homo sapiens
  misc_RNA (1)...(19): siRNA sense strand
gaaaguacaucgccuucua

SEQ ID NO: 1606784 - RNA, 19 nt, Homo sapiens
  misc_RNA (1)...(19): siRNA sense strand
uaaaggagcugcaggagaa

SEQ ID NO: 1606785 - RNA, 19 nt, Homo sapiens
  misc_RNA (1)...(19): siRNA sense strand
ggaaggagcuggagagagu

SEQ ID NO: 1606786 - RNA, 19 nt, Homo sapiens
  misc_RNA (1)...(19): siRNA sense strand
ggaccuguaucacaugaaa

SEQ ID NO: 1606787 - RNA, 19 nt, Homo sapiens
  misc_RNA (1)...(19): siRNA sense strand
ggagagagaucaauaugcu

SEQ ID NO: 1606788 - RNA, 19 nt, Homo sapiens
  misc_RNA (1)...(19): siRNA sense strand
gcaggagguuugcacauug

SEQ ID NO: 1606789 - RNA, 19 nt, Homo sapiens
  misc_RNA (1)...(19): siRNA sense strand
gaaagcaaacaaugagaaa

SEQ ID NO: 1606790 - RNA, 19 nt, Homo sapiens
  misc_RNA (1)...(19): siRNA sense strand
gaaggagucgcuuaaagaa

SEQ ID NO: 1606791 - RNA, 19 nt, Homo sapiens
  misc_RNA (1)...(19): siRNA sense strand
gaaacauucucucagauac

SEQ ID NO: 1606792 - RNA, 19 nt, Homo sapiens
  misc_RNA (1)...(19): siRNA sense strand
caugaaacauucucucaga

SEQ ID NO: 1606793 - RNA, 19 nt, Homo sapiens
  misc_RNA (1)...(19): siRNA sense strand
ucagauacuuugaagaaga

SEQ ID NO: 1606794 - RNA, 19 nt, Homo sapiens
  misc_RNA (1)...(19): siRNA sense strand
agaaacaaguggaacauca

SEQ ID NO: 1606795 - RNA, 19 nt, Homo sapiens
  misc_RNA (1)...(19): siRNA sense strand
cgacaagcauggugaucuu

SEQ ID NO: 1606796 - RNA, 19 nt, Homo sapiens
  misc_RNA (1)...(19): siRNA sense strand
ugaaacauucucucagaua

SEQ ID NO: 1606797 - RNA, 19 nt, Homo sapiens
  misc_RNA (1)...(19): siRNA sense strand
gaggagaagaagcaugaua

SEQ ID NO: 1606798 - RNA, 19 nt, Homo sapiens
  misc_RNA (1)...(19): siRNA sense strand
gaaacuggaacuuggauuc

SEQ ID NO: 1606799 - RNA, 19 nt, Homo sapiens
  misc_RNA (1)...(19): siRNA sense strand
gcaguuagagcaguccaua

SEQ ID NO: 1606800 - RNA, 19 nt, Homo sapiens
  misc_RNA (1)...(19): siRNA sense strand
guacaucgccuucuaacag

SEQ ID NO: 1606801 - RNA, 19 nt, Homo sapiens
  misc_RNA (1)...(19): siRNA sense strand
ugaaggagucgcuuaaaga

SEQ ID NO: 1606802 - RNA, 19 nt, Homo sapiens
  misc_RNA (1)...(19): siRNA sense strand
gagcuuguccagacucaaa

SEQ ID NO: 1606803 - RNA, 19 nt, Homo sapiens
  misc_RNA (1)...(19): siRNA sense strand
gaaaagaaagcaaacaaug

SEQ ID NO: 1606804 - RNA, 19 nt, Homo sapiens
  misc_RNA (1)...(19): siRNA sense strand
gcacauugaaggaggagaa

SEQ ID NO: 1606805 - RNA, 19 nt, Homo sapiens
  misc_RNA (1)...(19): siRNA sense strand
aacaucagcuggaagaaga

SEQ ID NO: 1606806 - RNA, 19 nt, Homo sapiens
  misc_RNA (1)...(19): siRNA sense strand
caaacaaugagaaacagaa

SEQ ID NO: 1606807 - RNA, 19 nt, Homo sapiens
  misc_RNA (1)...(19): siRNA sense strand
ucucagauacuuugaagaa

SEQ ID NO: 1606808 - RNA, 19 nt, Homo sapiens
  misc_RNA (1)...(19): siRNA sense strand
ugaaugacaccaucaaauc

SEQ ID NO: 1606809 - RNA, 19 nt, Homo sapiens
  misc_RNA (1)...(19): siRNA sense strand
gcaguuggagcagcaagua

SEQ ID NO: 1606810 - RNA, 19 nt, Homo sapiens
  misc_RNA (1)...(19): siRNA sense strand
gagauugaacacagagaaa

SEQ ID NO: 1606811 - RNA, 19 nt, Homo sapiens
  misc_RNA (1)...(19): siRNA sense strand
gaacaucagcuggaagaag

SEQ ID NO: 1606812 - RNA, 19 nt, Homo sapiens
  misc_RNA (1)...(19): siRNA sense strand
caggagguuugcacauuga

SEQ ID NO: 1606813 - RNA, 19 nt, Homo sapiens
  misc_RNA (1)...(19): siRNA sense strand
gaaugacaccaucaaaucu

SEQ ID NO: 1606814 - RNA, 19 nt, Homo sapiens
  misc_RNA (1)...(19): siRNA sense strand
gagggagcauguggagaaa

SEQ ID NO: 1606815 - RNA, 19 nt, Homo sapiens
  misc_RNA (1)...(19): siRNA sense strand
caagagcgcacugcaguug

SEQ ID NO: 1606816 - RNA, 19 nt, Homo sapiens
  misc_RNA (1)...(19): siRNA sense strand
gaagaaacaaguggaacau

SEQ ID NO: 1606817 - RNA, 19 nt, Homo sapiens
  misc_RNA (1)...(19): siRNA sense strand
caagcauggugaucuuugu

SEQ ID NO: 1606818 - RNA, 19 nt, Homo sapiens
  misc_RNA (1)...(19): siRNA sense strand
ggagcuagagggucaaauc

SEQ ID NO: 1606819 - RNA, 19 nt, Homo sapiens
  misc_RNA (1)...(19): siRNA sense strand
ugagggagcauguggagaa

SEQ ID NO: 1606820 - RNA, 19 nt, Homo sapiens
  misc_RNA (1)...(19): siRNA sense strand
gcaaacaaugagaaacaga

SEQ ID NO: 1606821 - RNA, 19 nt, Homo sapiens
  misc_RNA (1)...(19): siRNA sense strand
uguaucacaugaaacauuc

SEQ ID NO: 1606822 - RNA, 19 nt, Homo sapiens
  misc_RNA (1)...(19): siRNA sense strand
ggacacgugacacaguuga

SEQ ID NO: 1606823 - RNA, 19 nt, Homo sapiens
  misc_RNA (1)...(19): siRNA sense strand
ggagaaacuggaacuugga

SEQ ID NO: 1606824 - RNA, 19 nt, Homo sapiens
  misc_RNA (1)...(19): siRNA sense strand
aggagucgcuuaaagaagu

SEQ ID NO: 1606825 - RNA, 19 nt, Homo sapiens
  misc_RNA (1)...(19): siRNA sense strand
gcagcuccuuggugagaug

SEQ ID NO: 1606826 - RNA, 19 nt, Homo sapiens
  misc_RNA (1)...(19): siRNA sense strand
gggagcauguggagaaacu

SEQ ID NO: 1606827 - RNA, 19 nt, Homo sapiens
  misc_RNA (1)...(19): siRNA sense strand
cgcaggagguuugcacauu

SEQ ID NO: 1606828 - RNA, 19 nt, Homo sapiens
  misc_RNA (1)...(19): siRNA sense strand
aaagaaagcaaacaaugag

SEQ ID NO: 1606829 - RNA, 19 nt, Homo sapiens
  misc_RNA (1)...(19): siRNA sense strand
aaaguacaucgccuucuaa

SEQ ID NO: 1606830 - RNA, 19 nt, Homo sapiens
  misc_RNA (1)...(19): siRNA sense strand
gaaacagaaagcugaaagg

SEQ ID NO: 1606831 - RNA, 19 nt, Homo sapiens
  misc_RNA (1)...(19): siRNA sense strand
ccggaacccugcugcugaa

SEQ ID NO: 1606832 - RNA, 19 nt, Homo sapiens
  misc_RNA (1)...(19): siRNA sense strand
uacaucgccuucuaacaga

SEQ ID NO: 1606833 - RNA, 19 nt, Homo sapiens
  misc_RNA (1)...(19): siRNA sense strand
ucagagcccgugccaagaa

SEQ ID NO: 1606834 - RNA, 19 nt, Homo sapiens
  misc_RNA (1)...(19): siRNA sense strand
ugcaagaccugaggaagga

SEQ ID NO: 1606835 - RNA, 19 nt, Homo sapiens
  misc_RNA (1)...(19): siRNA sense strand
agaucaauaugcugaacaa

SEQ ID NO: 1606836 - RNA, 19 nt, Homo sapiens
  misc_RNA (1)...(19): siRNA sense strand
gcaguaaagcacuucucaa

SEQ ID NO: 1606837 - RNA, 19 nt, Homo sapiens
  misc_RNA (1)...(19): siRNA sense strand
ugaagaagaguccaaggau

SEQ ID NO: 1606838 - RNA, 19 nt, Homo sapiens
  misc_RNA (1)...(19): siRNA sense strand
cagauacuuugaagaagag

SEQ ID NO: 1606839 - RNA, 19 nt, Homo sapiens
  misc_RNA (1)...(19): siRNA sense strand
cguggagccugcacaagga

SEQ ID NO: 1606840 - RNA, 19 nt, Homo sapiens
  misc_RNA (1)...(19): siRNA sense strand
agaaagcaaacaaugagaa

SEQ ID NO: 1606841 - RNA, 19 nt, Homo sapiens
  misc_RNA (1)...(19): siRNA sense strand
aaggacacgugacacaguu

SEQ ID NO: 1606842 - RNA, 19 nt, Homo sapiens
  misc_RNA (1)...(19): siRNA sense strand
gcugaaaggacacgugaca

SEQ ID NO: 1606843 - RNA, 19 nt, Homo sapiens
  misc_RNA (1)...(19): siRNA sense strand
ugaaaggacacgugacaca

SEQ ID NO: 1606844 - RNA, 19 nt, Homo sapiens
  misc_RNA (1)...(19): siRNA sense strand
ugaaggaggagaagaagca

SEQ ID NO: 1606845 - RNA, 19 nt, Homo sapiens
  misc_RNA (1)...(19): siRNA sense strand
gagccgcaguaaagcacuu

SEQ ID NO: 1606846 - RNA, 19 nt, Homo sapiens
  misc_RNA (1)...(19): siRNA sense strand
gaaacaaguggaacaucag

SEQ ID NO: 1606847 - RNA, 19 nt, Homo sapiens
  misc_RNA (1)...(19): siRNA sense strand
caguaaagcacuucucaag

SEQ ID NO: 1606848 - RNA, 19 nt, Homo sapiens
  misc_RNA (1)...(19): siRNA sense strand
aagcaaacaaugagaaaca

SEQ ID NO: 1606849 - RNA, 19 nt, Homo sapiens
  misc_RNA (1)...(19): siRNA sense strand
gagaaacagaaagcugaaa

SEQ ID NO: 1606850 - RNA, 19 nt, Homo sapiens
  misc_RNA (1)...(19): siRNA sense strand
ugaacucgagguccauaaa

SEQ ID NO: 1606851 - RNA, 19 nt, Homo sapiens
  misc_RNA (1)...(19): siRNA sense strand
gcuggagagagaucaauau

SEQ ID NO: 1606852 - RNA, 19 nt, Homo sapiens
  misc_RNA (1)...(19): siRNA sense strand
cauugaaggaggagaagaa

SEQ ID NO: 1606853 - RNA, 19 nt, Homo sapiens
  misc_RNA (1)...(19): siRNA sense strand
aacauucucucagauacuu

SEQ ID NO: 1606854 - RNA, 19 nt, Homo sapiens
  misc_RNA (1)...(19): siRNA sense strand
gaacucgagguccauaaaa

SEQ ID NO: 1606855 - RNA, 19 nt, Homo sapiens
  misc_RNA (1)...(19): siRNA sense strand
gcagcguauaggagaguua

SEQ ID NO: 1606856 - RNA, 19 nt, Homo sapiens
  misc_RNA (1)...(19): siRNA sense strand
uugaaggagucgcuuaaag

SEQ ID NO: 1606857 - RNA, 19 nt, Homo sapiens
  misc_RNA (1)...(19): siRNA sense strand
gagucuagcggccuuaugg

SEQ ID NO: 1606858 - RNA, 19 nt, Homo sapiens
  misc_RNA (1)...(19): siRNA sense strand
gaaaaugucgcaggagguu

SEQ ID NO: 1606859 - RNA, 19 nt, Homo sapiens
  misc_RNA (1)...(19): siRNA sense strand
ggagucgcuuaaagaaguc

SEQ ID NO: 1606860 - RNA, 19 nt, Homo sapiens
  misc_RNA (1)...(19): siRNA sense strand
ucucucagauacuuugaag

SEQ ID NO: 1606861 - RNA, 19 nt, Homo sapiens
  misc_RNA (1)...(19): siRNA sense strand
guggagaaacuggaacuug

SEQ ID NO: 1606862 - RNA, 19 nt, Homo sapiens
  misc_RNA (1)...(19): siRNA sense strand
gcauguggagaaacuggaa

SEQ ID NO: 1606863 - RNA, 19 nt, Homo sapiens
  misc_RNA (1)...(19): siRNA sense strand
augacaccaucaaaucuuu

SEQ ID NO: 1606864 - RNA, 19 nt, Homo sapiens
  misc_RNA (1)...(19): siRNA sense strand
gaacaaauaaaaggagaga

SEQ ID NO: 1606865 - RNA, 19 nt, Homo sapiens
  misc_RNA (1)...(19): siRNA sense strand
gacaagcauggugaucuuu

SEQ ID NO: 1606866 - RNA, 19 nt, Homo sapiens
  misc_RNA (1)...(19): siRNA sense strand
gagaaacuggaacuuggau

SEQ ID NO: 1606867 - RNA, 19 nt, Homo sapiens
  misc_RNA (1)...(19): siRNA sense strand
aaaugucgcaggagguuug

SEQ ID NO: 1606868 - RNA, 19 nt, Homo sapiens
  misc_RNA (1)...(19): siRNA sense strand
aagcagcaguccugaacuc

SEQ ID NO: 1606869 - RNA, 19 nt, Homo sapiens
  misc_RNA (1)...(19): siRNA sense strand
agaagaaacaaguggaaca

SEQ ID NO: 1606870 - RNA, 19 nt, Homo sapiens
  misc_RNA (1)...(19): siRNA sense strand
agagcgcacugcaguugga

SEQ ID NO: 1606871 - RNA, 19 nt, Homo sapiens
  misc_RNA (1)...(19): siRNA sense strand
gaaaacaaucagugcauca

SEQ ID NO: 1606872 - RNA, 19 nt, Homo sapiens
  misc_RNA (1)...(19): siRNA sense strand
gaggaaggagcuggagaga

SEQ ID NO: 1606873 - RNA, 19 nt, Homo sapiens
  misc_RNA (1)...(19): siRNA sense strand
aggaggagaagaagcauga

SEQ ID NO: 1606874 - RNA, 19 nt, Homo sapiens
  misc_RNA (1)...(19): siRNA sense strand
aagaagaguccaaggaucu

SEQ ID NO: 1606875 - RNA, 19 nt, Homo sapiens
  misc_RNA (1)...(19): siRNA sense strand
gugcagcuccuuggugaga

SEQ ID NO: 1606876 - RNA, 19 nt, Homo sapiens
  misc_RNA (1)...(19): siRNA sense strand
uggaacaucagcuggaaga

SEQ ID NO: 1606877 - RNA, 19 nt, Homo sapiens
  misc_RNA (1)...(19): siRNA sense strand
gaucaauaugcugaacaaa

SEQ ID NO: 1606878 - RNA, 19 nt, Homo sapiens
  misc_RNA (1)...(19): siRNA sense strand
guccauacgggagcagaua

SEQ ID NO: 1606879 - RNA, 19 nt, Homo sapiens
  misc_RNA (1)...(19): siRNA sense strand
gagaucaauaugcugaaca

SEQ ID NO: 1606880 - RNA, 19 nt, Homo sapiens
  misc_RNA (1)...(19): siRNA sense strand
cacaugaaacauucucuca

SEQ ID NO: 1606881 - RNA, 19 nt, Homo sapiens
  misc_RNA (1)...(19): siRNA sense strand
aaacuggaacuuggauuca

SEQ ID NO: 1606882 - RNA, 19 nt, Homo sapiens
  misc_RNA (1)...(19): siRNA sense strand
cagcagaggaugaggaaaa

SEQ ID NO: 1606883 - RNA, 19 nt, Homo sapiens
  misc_RNA (1)...(19): siRNA sense strand
ggaaauagauggcgauaaa

SEQ ID NO: 1606884 - RNA, 19 nt, Homo sapiens
  misc_RNA (1)...(19): siRNA sense strand
gcaagaauaugaagaagga

SEQ ID NO: 1606885 - RNA, 19 nt, Homo sapiens
  misc_RNA (1)...(19): siRNA sense strand
caacaucccugccuucuuc

SEQ ID NO: 1606886 - RNA, 19 nt, Homo sapiens
  misc_RNA (1)...(19): siRNA sense strand
ggaagcacauuaauggaaa

SEQ ID NO: 1606887 - RNA, 19 nt, Homo sapiens
  misc_RNA (1)...(19): siRNA sense strand
gcacauuaauggaaauaga

SEQ ID NO: 1606888 - RNA, 19 nt, Homo sapiens
  misc_RNA (1)...(19): siRNA sense strand
gaacggagguuuagcucau

SEQ ID NO: 1606889 - RNA, 19 nt, Homo sapiens
  misc_RNA (1)...(19): siRNA sense strand
ugacagaguuaauguuuga

SEQ ID NO: 1606890 - RNA, 19 nt, Homo sapiens
  misc_RNA (1)...(19): siRNA sense strand
gcaaagagagagaaacuga

SEQ ID NO: 1606891 - RNA, 19 nt, Homo sapiens
  misc_RNA (1)...(19): siRNA sense strand
gcuggagacuuuauuacua

SEQ ID NO: 1606892 - RNA, 19 nt, Homo sapiens
  misc_RNA (1)...(19): siRNA sense strand
gaagcaguguguagaaaga

SEQ ID NO: 1606893 - RNA, 19 nt, Homo sapiens
  misc_RNA (1)...(19): siRNA sense strand
ggaaacacacuaauacaga

SEQ ID NO: 1606894 - RNA, 19 nt, Homo sapiens
  misc_RNA (1)...(19): siRNA sense strand
gaaguuggagcccuuguuu

SEQ ID NO: 1606895 - RNA, 19 nt, Homo sapiens
  misc_RNA (1)...(19): siRNA sense strand
gaugccaacuguucauuau

SEQ ID NO: 1606896 - RNA, 19 nt, Homo sapiens
  misc_RNA (1)...(19): siRNA sense strand
ggucuuggcacaauuauau

SEQ ID NO: 1606897 - RNA, 19 nt, Homo sapiens
  misc_RNA (1)...(19): siRNA sense strand
acaaguggcugcacagaug

SEQ ID NO: 1606898 - RNA, 19 nt, Homo sapiens
  misc_RNA (1)...(19): siRNA sense strand
ugaauugguuccuccauau

SEQ ID NO: 1606899 - RNA, 19 nt, Homo sapiens
  misc_RNA (1)...(19): siRNA sense strand
gcagagcggcuaaagauuc

SEQ ID NO: 1606900 - RNA, 19 nt, Homo sapiens
  misc_RNA (1)...(19): siRNA sense strand
caaaaugcaugucaaauca

SEQ ID NO: 1606901 - RNA, 19 nt, Homo sapiens
  misc_RNA (1)...(19): siRNA sense strand
gcuaaagauuccagaagga

SEQ ID NO: 1606902 - RNA, 19 nt, Homo sapiens
  misc_RNA (1)...(19): siRNA sense strand
gagaaguugccucagguua

SEQ ID NO: 1606903 - RNA, 19 nt, Homo sapiens
  misc_RNA (1)...(19): siRNA sense strand
gacauuggauccuauacug

SEQ ID NO: 1606904 - RNA, 19 nt, Homo sapiens
  misc_RNA (1)...(19): siRNA sense strand
gaauugguuccuccauaua

SEQ ID NO: 1606905 - RNA, 19 nt, Homo sapiens
  misc_RNA (1)...(19): siRNA sense strand
caaguaugcgguugaaauu

SEQ ID NO: 1606906 - RNA, 19 nt, Homo sapiens
  misc_RNA (1)...(19): siRNA sense strand
ggaggaaacacacuaauac

SEQ ID NO: 1606907 - RNA, 19 nt, Homo sapiens
  misc_RNA (1)...(19): siRNA sense strand
aaagauuccagaaggauua

SEQ ID NO: 1606908 - RNA, 19 nt, Homo sapiens
  misc_RNA (1)...(19): siRNA sense strand
gggaagcaguguguagaaa

SEQ ID NO: 1606909 - RNA, 19 nt, Homo sapiens
  misc_RNA (1)...(19): siRNA sense strand
ugaaggaucuccagcaaac

SEQ ID NO: 1606910 - RNA, 19 nt, Homo sapiens
  misc_RNA (1)...(19): siRNA sense strand
caagcaagaauaugaagaa

SEQ ID NO: 1606911 - RNA, 19 nt, Homo sapiens
  misc_RNA (1)...(19): siRNA sense strand
ccuacuacauagauacuaa

SEQ ID NO: 1606912 - RNA, 19 nt, Homo sapiens
  misc_RNA (1)...(19): siRNA sense strand
guaaagggguuaucaggaa

SEQ ID NO: 1606913 - RNA, 19 nt, Homo sapiens
  misc_RNA (1)...(19): siRNA sense strand
aaaagaagcuguucgugaa

SEQ ID NO: 1606914 - RNA, 19 nt, Homo sapiens
  misc_RNA (1)...(19): siRNA sense strand
gaggcaccguggaauacua

SEQ ID NO: 1606915 - RNA, 19 nt, Homo sapiens
  misc_RNA (1)...(19): siRNA sense strand
gaugacggaagcacauuaa

SEQ ID NO: 1606916 - RNA, 19 nt, Homo sapiens
  misc_RNA (1)...(19): siRNA sense strand
ggauuuccaagcaagaaua

SEQ ID NO: 1606917 - RNA, 19 nt, Homo sapiens
  misc_RNA (1)...(19): siRNA sense strand
gcaggaggaaacacacuaa

SEQ ID NO: 1606918 - RNA, 19 nt, Homo sapiens
  misc_RNA (1)...(19): siRNA sense strand
ugggauaguuuccaagcua

SEQ ID NO: 1606919 - RNA, 19 nt, Homo sapiens
  misc_RNA (1)...(19): siRNA sense strand
guugaagacugggauaguu

SEQ ID NO: 1606920 - RNA, 19 nt, Homo sapiens
  misc_RNA (1)...(19): siRNA sense strand
gaagcacauuaauggaaau

SEQ ID NO: 1606921 - RNA, 19 nt, Homo sapiens
  misc_RNA (1)...(19): siRNA sense strand
agguuuagcucauggauug

SEQ ID NO: 1606922 - RNA, 19 nt, Homo sapiens
  misc_RNA (1)...(19): siRNA sense strand
aguaugcgguugaaauuga

SEQ ID NO: 1606923 - RNA, 19 nt, Homo sapiens
  misc_RNA (1)...(19): siRNA sense strand
gaucauaccuacaaaaugc

SEQ ID NO: 1606924 - RNA, 19 nt, Homo sapiens
  misc_RNA (1)...(19): siRNA sense strand
gguugaaauugauugcaaa

SEQ ID NO: 1606925 - RNA, 19 nt, Homo sapiens
  misc_RNA (1)...(19): siRNA sense strand
ccaaguaugcgguugaaau

SEQ ID NO: 1606926 - RNA, 19 nt, Homo sapiens
  misc_RNA (1)...(19): siRNA sense strand
guugggaugugugauauug

SEQ ID NO: 1606927 - RNA, 19 nt, Homo sapiens
  misc_RNA (1)...(19): siRNA sense strand
gugcagagcggcuaaagau

SEQ ID NO: 1606928 - RNA, 19 nt, Homo sapiens
  misc_RNA (1)...(19): siRNA sense strand
cuacauagauacuaaugcu

SEQ ID NO: 1606929 - RNA, 19 nt, Homo sapiens
  misc_RNA (1)...(19): siRNA sense strand
gcuccauucuagccucuuu

SEQ ID NO: 1606930 - RNA, 19 nt, Homo sapiens
  misc_RNA (1)...(19): siRNA sense strand
ucagaggcaccguggaaua

SEQ ID NO: 1606931 - RNA, 19 nt, Homo sapiens
  misc_RNA (1)...(19): siRNA sense strand
gaacaaguggcugcacaga

SEQ ID NO: 1606932 - RNA, 19 nt, Homo sapiens
  misc_RNA (1)...(19): siRNA sense strand
cagauucaacuuaugauga

SEQ ID NO: 1606933 - RNA, 19 nt, Homo sapiens
  misc_RNA (1)...(19): siRNA sense strand
aaaugcaugucaaaucaga

SEQ ID NO: 1606934 - RNA, 19 nt, Homo sapiens
  misc_RNA (1)...(19): siRNA sense strand
gacggaagcacauuaaugg

SEQ ID NO: 1606935 - RNA, 19 nt, Homo sapiens
  misc_RNA (1)...(19): siRNA sense strand
gaaaacuccuccaaguaug

SEQ ID NO: 1606936 - RNA, 19 nt, Homo sapiens
  misc_RNA (1)...(19): siRNA sense strand
gauuccagaaggauuauuu

SEQ ID NO: 1606937 - RNA, 19 nt, Homo sapiens
  misc_RNA (1)...(19): siRNA sense strand
cgaggucuuggcacaauua

SEQ ID NO: 1606938 - RNA, 19 nt, Homo sapiens
  misc_RNA (1)...(19): siRNA sense strand
uugaauugguuccuccaua

SEQ ID NO: 1606939 - RNA, 19 nt, Homo sapiens
  misc_RNA (1)...(19): siRNA sense strand
gagcaaagagagagaaacu

SEQ ID NO: 1606940 - RNA, 19 nt, Homo sapiens
  misc_RNA (1)...(19): siRNA sense strand
acacacuaauacagaguuu

SEQ ID NO: 1606941 - RNA, 19 nt, Homo sapiens
  misc_RNA (1)...(19): siRNA sense strand
gaaaagaaaagagaaguug

SEQ ID NO: 1606942 - RNA, 19 nt, Homo sapiens
  misc_RNA (1)...(19): siRNA sense strand
cuggagacuuuauuacuau

SEQ ID NO: 1606943 - RNA, 19 nt, Homo sapiens
  misc_RNA (1)...(19): siRNA sense strand
agacugggauaguuuccaa

SEQ ID NO: 1606944 - RNA, 19 nt, Homo sapiens
  misc_RNA (1)...(19): siRNA sense strand
gaggaaacacacuaauaca

SEQ ID NO: 1606945 - RNA, 19 nt, Homo sapiens
  misc_RNA (1)...(19): siRNA sense strand
gaaguugccucagguuacg

SEQ ID NO: 1606946 - RNA, 19 nt, Homo sapiens
  misc_RNA (1)...(19): siRNA sense strand
ugacggaagcacauuaaug

SEQ ID NO: 1606947 - RNA, 19 nt, Homo sapiens
  misc_RNA (1)...(19): siRNA sense strand
ggucccaccuacuacauag

SEQ ID NO: 1606948 - RNA, 19 nt, Homo sapiens
  misc_RNA (1)...(19): siRNA sense strand
cgugaaggaucuccagcaa

SEQ ID NO: 1606949 - RNA, 19 nt, Homo sapiens
  misc_RNA (1)...(19): siRNA sense strand
aaaaugggaugguugaaga

SEQ ID NO: 1606950 - RNA, 19 nt, Homo sapiens
  misc_RNA (1)...(19): siRNA sense strand
uuggguaccuuucaacaga

SEQ ID NO: 1606951 - RNA, 19 nt, Homo sapiens
  misc_RNA (1)...(19): siRNA sense strand
uaaagauuccagaaggauu

SEQ ID NO: 1606952 - RNA, 19 nt, Homo sapiens
  misc_RNA (1)...(19): siRNA sense strand
gcuaauggucguucuacug

SEQ ID NO: 1606953 - RNA, 19 nt, Homo sapiens
  misc_RNA (1)...(19): siRNA sense strand
ggagggaagcaguguguag

SEQ ID NO: 1606954 - RNA, 19 nt, Homo sapiens
  misc_RNA (1)...(19): siRNA sense strand
aggaggaaacacacuaaua

SEQ ID NO: 1606955 - RNA, 19 nt, Homo sapiens
  misc_RNA (1)...(19): siRNA sense strand
ugugagagcugguuaugcu

SEQ ID NO: 1606956 - RNA, 19 nt, Homo sapiens
  misc_RNA (1)...(19): siRNA sense strand
guuccuccauauaugauug

SEQ ID NO: 1606957 - RNA, 19 nt, Homo sapiens
  misc_RNA (1)...(19): siRNA sense strand
ugucagauucaacuuauga

SEQ ID NO: 1606958 - RNA, 19 nt, Homo sapiens
  misc_RNA (1)...(19): siRNA sense strand
ggaagcaguguguagaaag

SEQ ID NO: 1606959 - RNA, 19 nt, Homo sapiens
  misc_RNA (1)...(19): siRNA sense strand
gagacuuuauuacuaugca

SEQ ID NO: 1606960 - RNA, 19 nt, Homo sapiens
  misc_RNA (1)...(19): siRNA sense strand
gauuggcggcuccauucua

SEQ ID NO: 1606961 - RNA, 19 nt, Homo sapiens
  misc_RNA (1)...(19): siRNA sense strand
acaguggaacggagguuua

SEQ ID NO: 1606962 - RNA, 19 nt, Homo sapiens
  misc_RNA (1)...(19): siRNA sense strand
ucagaaaacuccuccaagu

SEQ ID NO: 1606963 - RNA, 19 nt, Homo sapiens
  misc_RNA (1)...(19): siRNA sense strand
guauggugguagaaagaga

SEQ ID NO: 1606964 - RNA, 19 nt, Homo sapiens
  misc_RNA (1)...(19): siRNA sense strand
cggaagcacauuaauggaa

SEQ ID NO: 1606965 - RNA, 19 nt, Homo sapiens
  misc_RNA (1)...(19): siRNA sense strand
uauuugacccuuccaaugu

SEQ ID NO: 1606966 - RNA, 19 nt, Homo sapiens
  misc_RNA (1)...(19): siRNA sense strand
gagggaagcaguguguaga

SEQ ID NO: 1606967 - RNA, 19 nt, Homo sapiens
  misc_RNA (1)...(19): siRNA sense strand
aaagagagagaaacugaca

SEQ ID NO: 1606968 - RNA, 19 nt, Homo sapiens
  misc_RNA (1)...(19): siRNA sense strand
gaaauagauggcgauaaag

SEQ ID NO: 1606969 - RNA, 19 nt, Homo sapiens
  misc_RNA (1)...(19): siRNA sense strand
agugucagauucaacuuau

SEQ ID NO: 1606970 - RNA, 19 nt, Homo sapiens
  misc_RNA (1)...(19): siRNA sense strand
cgauggcuauguccuucaa

SEQ ID NO: 1606971 - RNA, 19 nt, Homo sapiens
  misc_RNA (1)...(19): siRNA sense strand
uuacugacagguugaauag

SEQ ID NO: 1606972 - RNA, 19 nt, Homo sapiens
  misc_RNA (1)...(19): siRNA sense strand
cgguugaaauugauugcaa

SEQ ID NO: 1606973 - RNA, 19 nt, Homo sapiens
  misc_RNA (1)...(19): siRNA sense strand
caagcuauuuuggaucaua

SEQ ID NO: 1606974 - RNA, 19 nt, Homo sapiens
  misc_RNA (1)...(19): siRNA sense strand
cuacugggcugauuuugga

SEQ ID NO: 1606975 - RNA, 19 nt, Homo sapiens
  misc_RNA (1)...(19): siRNA sense strand
acugacagaguuaauguuu

SEQ ID NO: 1606976 - RNA, 19 nt, Homo sapiens
  misc_RNA (1)...(19): siRNA sense strand
agagagagaaacugacaga

SEQ ID NO: 1606977 - RNA, 19 nt, Homo sapiens
  misc_RNA (1)...(19): siRNA sense strand
ucucuauggcaguguaaua

SEQ ID NO: 1606978 - RNA, 19 nt, Homo sapiens
  misc_RNA (1)...(19): siRNA sense strand
agauggcgauaaaggcaaa

SEQ ID NO: 1606979 - RNA, 19 nt, Homo sapiens
  misc_RNA (1)...(19): siRNA sense strand
agagagaaacugacagagu

SEQ ID NO: 1606980 - RNA, 19 nt, Homo sapiens
  misc_RNA (1)...(19): siRNA sense strand
guaugcgguugaaauugau

SEQ ID NO: 1606981 - RNA, 19 nt, Homo sapiens
  misc_RNA (1)...(19): siRNA sense strand
acugacagguugaauagag

SEQ ID NO: 1606982 - RNA, 19 nt, Homo sapiens
  misc_RNA (1)...(19): siRNA sense strand
ccacucauaccacugcaau

SEQ ID NO: 1606983 - RNA, 19 nt, Homo sapiens
  misc_RNA (1)...(19): siRNA sense strand
ggaaauagauggcgauaaa

SEQ ID NO: 1606984 - RNA, 19 nt, Homo sapiens
  misc_RNA (1)...(19): siRNA sense strand
gcaagaauaugaagaagga

SEQ ID NO: 1606985 - RNA, 19 nt, Homo sapiens
  misc_RNA (1)...(19): siRNA sense strand
caacaucccugccuucuuc

SEQ ID NO: 1606986 - RNA, 19 nt, Homo sapiens
  misc_RNA (1)...(19): siRNA sense strand
ggaagcacauuaauggaaa

SEQ ID NO: 1606987 - RNA, 19 nt, Homo sapiens
  misc_RNA (1)...(19): siRNA sense strand
gcacauuaauggaaauaga

SEQ ID NO: 1606988 - RNA, 19 nt, Homo sapiens
  misc_RNA (1)...(19): siRNA sense strand
gaacggagguuuagcucau

SEQ ID NO: 1606989 - RNA, 19 nt, Homo sapiens
  misc_RNA (1)...(19): siRNA sense strand
ugacagaguuaauguuuga

SEQ ID NO: 1606990 - RNA, 19 nt, Homo sapiens
  misc_RNA (1)...(19): siRNA sense strand
gcaaagagagagaaacuga

SEQ ID NO: 1606991 - RNA, 19 nt, Homo sapiens
  misc_RNA (1)...(19): siRNA sense strand
gcuggagacuuuauuacua

SEQ ID NO: 1606992 - RNA, 19 nt, Homo sapiens
  misc_RNA (1)...(19): siRNA sense strand
gaagcaguguguagaaaga

SEQ ID NO: 1606993 - RNA, 19 nt, Homo sapiens
  misc_RNA (1)...(19): siRNA sense strand
ggaaacacacuaauacaga

SEQ ID NO: 1606994 - RNA, 19 nt, Homo sapiens
  misc_RNA (1)...(19): siRNA sense strand
gaugccaacuguucauuau

SEQ ID NO: 1606995 - RNA, 19 nt, Homo sapiens
  misc_RNA (1)...(19): siRNA sense strand
ggucuuggcacaauuauau

SEQ ID NO: 1606996 - RNA, 19 nt, Homo sapiens
  misc_RNA (1)...(19): siRNA sense strand
acaaguggcugcacagaug

SEQ ID NO: 1606997 - RNA, 19 nt, Homo sapiens
  misc_RNA (1)...(19): siRNA sense strand
ugaauugguuccuccauau

SEQ ID NO: 1606998 - RNA, 19 nt, Homo sapiens
  misc_RNA (1)...(19): siRNA sense strand
gcagagcggcuaaagauuc

SEQ ID NO: 1606999 - RNA, 19 nt, Homo sapiens
  misc_RNA (1)...(19): siRNA sense strand
caaaaugcaugucaaauca

SEQ ID NO: 1607000 - RNA, 19 nt, Homo sapiens
  misc_RNA (1)...(19): siRNA sense strand
gcuaaagauuccagaagga

SEQ ID NO: 1607001 - RNA, 19 nt, Homo sapiens
  misc_RNA (1)...(19): siRNA sense strand
gagaaguugccucagguua

SEQ ID NO: 1607002 - RNA, 19 nt, Homo sapiens
  misc_RNA (1)...(19): siRNA sense strand
gaauugguuccuccauaua

SEQ ID NO: 1607003 - RNA, 19 nt, Homo sapiens
  misc_RNA (1)...(19): siRNA sense strand
caaguaugcgguugaaauu

SEQ ID NO: 1607004 - RNA, 19 nt, Homo sapiens
  misc_RNA (1)...(19): siRNA sense strand
ggaggaaacacacuaauac

SEQ ID NO: 1607005 - RNA, 19 nt, Homo sapiens
  misc_RNA (1)...(19): siRNA sense strand
aaagauuccagaaggauua

SEQ ID NO: 1607006 - RNA, 19 nt, Homo sapiens
  misc_RNA (1)...(19): siRNA sense strand
gggaagcaguguguagaaa

SEQ ID NO: 1607007 - RNA, 19 nt, Homo sapiens
  misc_RNA (1)...(19): siRNA sense strand
ugaaggaucuccagcaaac

SEQ ID NO: 1607008 - RNA, 19 nt, Homo sapiens
  misc_RNA (1)...(19): siRNA sense strand
caagcaagaauaugaagaa

SEQ ID NO: 1607009 - RNA, 19 nt, Homo sapiens
  misc_RNA (1)...(19): siRNA sense strand
ccuacuacauagauacuaa

SEQ ID NO: 1607010 - RNA, 19 nt, Homo sapiens
  misc_RNA (1)...(19): siRNA sense strand
guaaagggguuaucaggaa

SEQ ID NO: 1607011 - RNA, 19 nt, Homo sapiens
  misc_RNA (1)...(19): siRNA sense strand
aaaagaagcuguucgugaa

SEQ ID NO: 1607012 - RNA, 19 nt, Homo sapiens
  misc_RNA (1)...(19): siRNA sense strand
gaggcaccguggaauacua

SEQ ID NO: 1607013 - RNA, 19 nt, Homo sapiens
  misc_RNA (1)...(19): siRNA sense strand
guugaagacugggauaguu

SEQ ID NO: 1607014 - RNA, 19 nt, Homo sapiens
  misc_RNA (1)...(19): siRNA sense strand
ggauuuccaagcaagaaua

SEQ ID NO: 1607015 - RNA, 19 nt, Homo sapiens
  misc_RNA (1)...(19): siRNA sense strand
gaugacggaagcacauuaa

SEQ ID NO: 1607016 - RNA, 19 nt, Homo sapiens
  misc_RNA (1)...(19): siRNA sense strand
gcaggaggaaacacacuaa

SEQ ID NO: 1607017 - RNA, 19 nt, Homo sapiens
  misc_RNA (1)...(19): siRNA sense strand
ugggauaguuuccaagcua

SEQ ID NO: 1607018 - RNA, 19 nt, Homo sapiens
  misc_RNA (1)...(19): siRNA sense strand
gaagcacauuaauggaaau

SEQ ID NO: 1607019 - RNA, 19 nt, Homo sapiens
  misc_RNA (1)...(19): siRNA sense strand
agguuuagcucauggauug

SEQ ID NO: 1607020 - RNA, 19 nt, Homo sapiens
  misc_RNA (1)...(19): siRNA sense strand
aguaugcgguugaaauuga

SEQ ID NO: 1607021 - RNA, 19 nt, Homo sapiens
  misc_RNA (1)...(19): siRNA sense strand
gaucauaccuacaaaaugc

SEQ ID NO: 1607022 - RNA, 19 nt, Homo sapiens
  misc_RNA (1)...(19): siRNA sense strand
gguugaaauugauugcaaa

SEQ ID NO: 1607023 - RNA, 19 nt, Homo sapiens
  misc_RNA (1)...(19): siRNA sense strand
ccaaguaugcgguugaaau

SEQ ID NO: 1607024 - RNA, 19 nt, Homo sapiens
  misc_RNA (1)...(19): siRNA sense strand
guugggaugugugauauug

SEQ ID NO: 1607025 - RNA, 19 nt, Homo sapiens
  misc_RNA (1)...(19): siRNA sense strand
gugcagagcggcuaaagau

SEQ ID NO: 1607026 - RNA, 19 nt, Homo sapiens
  misc_RNA (1)...(19): siRNA sense strand
cuacauagauacuaaugcu

SEQ ID NO: 1607027 - RNA, 19 nt, Homo sapiens
  misc_RNA (1)...(19): siRNA sense strand
gcuccauucuagccucuuu

SEQ ID NO: 1607028 - RNA, 19 nt, Homo sapiens
  misc_RNA (1)...(19): siRNA sense strand
ucagaggcaccguggaaua

SEQ ID NO: 1607029 - RNA, 19 nt, Homo sapiens
  misc_RNA (1)...(19): siRNA sense strand
gaacaaguggcugcacaga

SEQ ID NO: 1607030 - RNA, 19 nt, Homo sapiens
  misc_RNA (1)...(19): siRNA sense strand
cagauucaacuuaugauga

SEQ ID NO: 1607031 - RNA, 19 nt, Homo sapiens
  misc_RNA (1)...(19): siRNA sense strand
aaaugcaugucaaaucaga

SEQ ID NO: 1607032 - RNA, 19 nt, Homo sapiens
  misc_RNA (1)...(19): siRNA sense strand
gacggaagcacauuaaugg

SEQ ID NO: 1607033 - RNA, 19 nt, Homo sapiens
  misc_RNA (1)...(19): siRNA sense strand
gaaaacuccuccaaguaug

SEQ ID NO: 1607034 - RNA, 19 nt, Homo sapiens
  misc_RNA (1)...(19): siRNA sense strand
gauuccagaaggauuauuu

SEQ ID NO: 1607035 - RNA, 19 nt, Homo sapiens
  misc_RNA (1)...(19): siRNA sense strand
cgaggucuuggcacaauua

SEQ ID NO: 1607036 - RNA, 19 nt, Homo sapiens
  misc_RNA (1)...(19): siRNA sense strand
uugaauugguuccuccaua

SEQ ID NO: 1607037 - RNA, 19 nt, Homo sapiens
  misc_RNA (1)...(19): siRNA sense strand
gagcaaagagagagaaacu

SEQ ID NO: 1607038 - RNA, 19 nt, Homo sapiens
  misc_RNA (1)...(19): siRNA sense strand
acacacuaauacagaguuu

SEQ ID NO: 1607039 - RNA, 19 nt, Homo sapiens
  misc_RNA (1)...(19): siRNA sense strand
gaaaagaaaagagaaguug

SEQ ID NO: 1607040 - RNA, 19 nt, Homo sapiens
  misc_RNA (1)...(19): siRNA sense strand
cuggagacuuuauuacuau

SEQ ID NO: 1607041 - RNA, 19 nt, Homo sapiens
  misc_RNA (1)...(19): siRNA sense strand
agacugggauaguuuccaa

SEQ ID NO: 1607042 - RNA, 19 nt, Homo sapiens
  misc_RNA (1)...(19): siRNA sense strand
gaggaaacacacuaauaca

SEQ ID NO: 1607043 - RNA, 19 nt, Homo sapiens
  misc_RNA (1)...(19): siRNA sense strand
gaaguugccucagguuacg

SEQ ID NO: 1607044 - RNA, 19 nt, Homo sapiens
  misc_RNA (1)...(19): siRNA sense strand
ugacggaagcacauuaaug

SEQ ID NO: 1607045 - RNA, 19 nt, Homo sapiens
  misc_RNA (1)...(19): siRNA sense strand
cgugaaggaucuccagcaa

SEQ ID NO: 1607046 - RNA, 19 nt, Homo sapiens
  misc_RNA (1)...(19): siRNA sense strand
ggucccaccuacuacauag

SEQ ID NO: 1607047 - RNA, 19 nt, Homo sapiens
  misc_RNA (1)...(19): siRNA sense strand
aaaaugggaugguugaaga

SEQ ID NO: 1607048 - RNA, 19 nt, Homo sapiens
  misc_RNA (1)...(19): siRNA sense strand
uuggguaccuuucaacaga

SEQ ID NO: 1607049 - RNA, 19 nt, Homo sapiens
  misc_RNA (1)...(19): siRNA sense strand
uaaagauuccagaaggauu

SEQ ID NO: 1607050 - RNA, 19 nt, Homo sapiens
  misc_RNA (1)...(19): siRNA sense strand
gcuaauggucguucuacug

SEQ ID NO: 1607051 - RNA, 19 nt, Homo sapiens
  misc_RNA (1)...(19): siRNA sense strand
ggagggaagcaguguguag

SEQ ID NO: 1607052 - RNA, 19 nt, Homo sapiens
  misc_RNA (1)...(19): siRNA sense strand
aggaggaaacacacuaaua

SEQ ID NO: 1607053 - RNA, 19 nt, Homo sapiens
  misc_RNA (1)...(19): siRNA sense strand
guuccuccauauaugauug

SEQ ID NO: 1607054 - RNA, 19 nt, Homo sapiens
  misc_RNA (1)...(19): siRNA sense strand
ugucagauucaacuuauga

SEQ ID NO: 1607055 - RNA, 19 nt, Homo sapiens
  misc_RNA (1)...(19): siRNA sense strand
ggaagcaguguguagaaag

SEQ ID NO: 1607056 - RNA, 19 nt, Homo sapiens
  misc_RNA (1)...(19): siRNA sense strand
gagacuuuauuacuaugca

SEQ ID NO: 1607057 - RNA, 19 nt, Homo sapiens
  misc_RNA (1)...(19): siRNA sense strand
gauuggcggcuccauucua

SEQ ID NO: 1607058 - RNA, 19 nt, Homo sapiens
  misc_RNA (1)...(19): siRNA sense strand
acaguggaacggagguuua

SEQ ID NO: 1607059 - RNA, 19 nt, Homo sapiens
  misc_RNA (1)...(19): siRNA sense strand
ucagaaaacuccuccaagu

SEQ ID NO: 1607060 - RNA, 19 nt, Homo sapiens
  misc_RNA (1)...(19): siRNA sense strand
cggaagcacauuaauggaa

SEQ ID NO: 1607061 - RNA, 19 nt, Homo sapiens
  misc_RNA (1)...(19): siRNA sense strand
uauuugacccuuccaaugu

SEQ ID NO: 1607062 - RNA, 19 nt, Homo sapiens
  misc_RNA (1)...(19): siRNA sense strand
gagggaagcaguguguaga

SEQ ID NO: 1607063 - RNA, 19 nt, Homo sapiens
  misc_RNA (1)...(19): siRNA sense strand
gaaauagauggcgauaaag

SEQ ID NO: 1607064 - RNA, 19 nt, Homo sapiens
  misc_RNA (1)...(19): siRNA sense strand
agugucagauucaacuuau

SEQ ID NO: 1607065 - RNA, 19 nt, Homo sapiens
  misc_RNA (1)...(19): siRNA sense strand
cgauggcuauguccuucaa

SEQ ID NO: 1607066 - RNA, 19 nt, Homo sapiens
  misc_RNA (1)...(19): siRNA sense strand
aaagagagagaaacugaca

SEQ ID NO: 1607067 - RNA, 19 nt, Homo sapiens
  misc_RNA (1)...(19): siRNA sense strand
uuacugacagguugaauag

SEQ ID NO: 1607068 - RNA, 19 nt, Homo sapiens
  misc_RNA (1)...(19): siRNA sense strand
cgguugaaauugauugcaa

SEQ ID NO: 1607069 - RNA, 19 nt, Homo sapiens
  misc_RNA (1)...(19): siRNA sense strand
acugacagaguuaauguuu

SEQ ID NO: 1607070 - RNA, 19 nt, Homo sapiens
  misc_RNA (1)...(19): siRNA sense strand
caagcuauuuuggaucaua

SEQ ID NO: 1607071 - RNA, 19 nt, Homo sapiens
  misc_RNA (1)...(19): siRNA sense strand
cuacugggcugauuuugga

SEQ ID NO: 1607072 - RNA, 19 nt, Homo sapiens
  misc_RNA (1)...(19): siRNA sense strand
agagagagaaacugacaga

SEQ ID NO: 1607073 - RNA, 19 nt, Homo sapiens
  misc_RNA (1)...(19): siRNA sense strand
agauggcgauaaaggcaaa

SEQ ID NO: 1607074 - RNA, 19 nt, Homo sapiens
  misc_RNA (1)...(19): siRNA sense strand
ucucuauggcaguguaaua

SEQ ID NO: 1607075 - RNA, 19 nt, Homo sapiens
  misc_RNA (1)...(19): siRNA sense strand
ggaauacuagagcaaagag

SEQ ID NO: 1607076 - RNA, 19 nt, Homo sapiens
  misc_RNA (1)...(19): siRNA sense strand
guaugcgguugaaauugau

SEQ ID NO: 1607077 - RNA, 19 nt, Homo sapiens
  misc_RNA (1)...(19): siRNA sense strand
acugacagguugaauagag

SEQ ID NO: 1607078 - RNA, 19 nt, Homo sapiens
  misc_RNA (1)...(19): siRNA sense strand
ccacucauaccacugcaau

SEQ ID NO: 1607079 - RNA, 19 nt, Homo sapiens
  misc_RNA (1)...(19): siRNA sense strand
agagagaaacugacagagu

SEQ ID NO: 1607080 - RNA, 19 nt, Homo sapiens
  misc_RNA (1)...(19): siRNA sense strand
agaugccaacuguucauua

SEQ ID NO: 1607081 - RNA, 19 nt, Homo sapiens
  misc_RNA (1)...(19): siRNA sense strand
cagaaaacuccuccaagua

SEQ ID NO: 1607082 - RNA, 19 nt, Homo sapiens
  misc_RNA (1)...(19): siRNA sense strand
gagaugacggaagcacauu

SEQ ID NO: 1607083 - RNA, 19 nt, Homo sapiens
  misc_RNA (1)...(19): siRNA sense strand
ggaaauagauggcgauaaa

SEQ ID NO: 1607084 - RNA, 19 nt, Homo sapiens
  misc_RNA (1)...(19): siRNA sense strand
gcaagaauaugaagaagga

SEQ ID NO: 1607085 - RNA, 19 nt, Homo sapiens
  misc_RNA (1)...(19): siRNA sense strand
caacaucccugccuucuuc

SEQ ID NO: 1607086 - RNA, 19 nt, Homo sapiens
  misc_RNA (1)...(19): siRNA sense strand
ggaagcacauuaauggaaa

SEQ ID NO: 1607087 - RNA, 19 nt, Homo sapiens
  misc_RNA (1)...(19): siRNA sense strand
gcacauuaauggaaauaga

SEQ ID NO: 1607088 - RNA, 19 nt, Homo sapiens
  misc_RNA (1)...(19): siRNA sense strand
gaacggagguuuagcucau

SEQ ID NO: 1607089 - RNA, 19 nt, Homo sapiens
  misc_RNA (1)...(19): siRNA sense strand
ugacagaguuaauguuuga

SEQ ID NO: 1607090 - RNA, 19 nt, Homo sapiens
  misc_RNA (1)...(19): siRNA sense strand
gcaaagagagagaaacuga

SEQ ID NO: 1607091 - RNA, 19 nt, Homo sapiens
  misc_RNA (1)...(19): siRNA sense strand
gcuggagacuuuauuacua

SEQ ID NO: 1607092 - RNA, 19 nt, Homo sapiens
  misc_RNA (1)...(19): siRNA sense strand
gaagcaguguguagaaaga

SEQ ID NO: 1607093 - RNA, 19 nt, Homo sapiens
  misc_RNA (1)...(19): siRNA sense strand
ggaaacacacuaauacaga

SEQ ID NO: 1607094 - RNA, 19 nt, Homo sapiens
  misc_RNA (1)...(19): siRNA sense strand
gaugccaacuguucauuau

SEQ ID NO: 1607095 - RNA, 19 nt, Homo sapiens
  misc_RNA (1)...(19): siRNA sense strand
ggucuuggcacaauuauau

SEQ ID NO: 1607096 - RNA, 19 nt, Homo sapiens
  misc_RNA (1)...(19): siRNA sense strand
acaaguggcugcacagaug

SEQ ID NO: 1607097 - RNA, 19 nt, Homo sapiens
  misc_RNA (1)...(19): siRNA sense strand
ugaauugguuccuccauau

SEQ ID NO: 1607098 - RNA, 19 nt, Homo sapiens
  misc_RNA (1)...(19): siRNA sense strand
gcagagcggcuaaagauuc

SEQ ID NO: 1607099 - RNA, 19 nt, Homo sapiens
  misc_RNA (1)...(19): siRNA sense strand
caaaaugcaugucaaauca

SEQ ID NO: 1607100 - RNA, 19 nt, Homo sapiens
  misc_RNA (1)...(19): siRNA sense strand
gcuaaagauuccagaagga

SEQ ID NO: 1607101 - RNA, 19 nt, Homo sapiens
  misc_RNA (1)...(19): siRNA sense strand
gagaaguugccucagguua

SEQ ID NO: 1607102 - RNA, 19 nt, Homo sapiens
  misc_RNA (1)...(19): siRNA sense strand
gaauugguuccuccauaua

SEQ ID NO: 1607103 - RNA, 19 nt, Homo sapiens
  misc_RNA (1)...(19): siRNA sense strand
caaguaugcgguugaaauu

SEQ ID NO: 1607104 - RNA, 19 nt, Homo sapiens
  misc_RNA (1)...(19): siRNA sense strand
ggaggaaacacacuaauac

SEQ ID NO: 1607105 - RNA, 19 nt, Homo sapiens
  misc_RNA (1)...(19): siRNA sense strand
aaagauuccagaaggauua

SEQ ID NO: 1607106 - RNA, 19 nt, Homo sapiens
  misc_RNA (1)...(19): siRNA sense strand
gggaagcaguguguagaaa

SEQ ID NO: 1607107 - RNA, 19 nt, Homo sapiens
  misc_RNA (1)...(19): siRNA sense strand
ugaaggaucuccagcaaac

SEQ ID NO: 1607108 - RNA, 19 nt, Homo sapiens
  misc_RNA (1)...(19): siRNA sense strand
caagcaagaauaugaagaa

SEQ ID NO: 1607109 - RNA, 19 nt, Homo sapiens
  misc_RNA (1)...(19): siRNA sense strand
ccuacuacauagauacuaa

SEQ ID NO: 1607110 - RNA, 19 nt, Homo sapiens
  misc_RNA (1)...(19): siRNA sense strand
guaaagggguuaucaggaa

SEQ ID NO: 1607111 - RNA, 19 nt, Homo sapiens
  misc_RNA (1)...(19): siRNA sense strand
aaaagaagcuguucgugaa

SEQ ID NO: 1607112 - RNA, 19 nt, Homo sapiens
  misc_RNA (1)...(19): siRNA sense strand
gaggcaccguggaauacua

SEQ ID NO: 1607113 - RNA, 19 nt, Homo sapiens
  misc_RNA (1)...(19): siRNA sense strand
guugaagacugggauaguu

SEQ ID NO: 1607114 - RNA, 19 nt, Homo sapiens
  misc_RNA (1)...(19): siRNA sense strand
ggauuuccaagcaagaaua

SEQ ID NO: 1607115 - RNA, 19 nt, Homo sapiens
  misc_RNA (1)...(19): siRNA sense strand
gaugacggaagcacauuaa

SEQ ID NO: 1607116 - RNA, 19 nt, Homo sapiens
  misc_RNA (1)...(19): siRNA sense strand
gcaggaggaaacacacuaa

SEQ ID NO: 1607117 - RNA, 19 nt, Homo sapiens
  misc_RNA (1)...(19): siRNA sense strand
ugggauaguuuccaagcua

SEQ ID NO: 1607118 - RNA, 19 nt, Homo sapiens
  misc_RNA (1)...(19): siRNA sense strand
gaagcacauuaauggaaau

SEQ ID NO: 1607119 - RNA, 19 nt, Homo sapiens
  misc_RNA (1)...(19): siRNA sense strand
agguuuagcucauggauug

SEQ ID NO: 1607120 - RNA, 19 nt, Homo sapiens
  misc_RNA (1)...(19): siRNA sense strand
aguaugcgguugaaauuga

SEQ ID NO: 1607121 - RNA, 19 nt, Homo sapiens
  misc_RNA (1)...(19): siRNA sense strand
gaucauaccuacaaaaugc

SEQ ID NO: 1607122 - RNA, 19 nt, Homo sapiens
  misc_RNA (1)...(19): siRNA sense strand
gguugaaauugauugcaaa

SEQ ID NO: 1607123 - RNA, 19 nt, Homo sapiens
  misc_RNA (1)...(19): siRNA sense strand
ccaaguaugcgguugaaau

SEQ ID NO: 1607124 - RNA, 19 nt, Homo sapiens
  misc_RNA (1)...(19): siRNA sense strand
guugggaugugugauauug

SEQ ID NO: 1607125 - RNA, 19 nt, Homo sapiens
  misc_RNA (1)...(19): siRNA sense strand
gugcagagcggcuaaagau

SEQ ID NO: 1607126 - RNA, 19 nt, Homo sapiens
  misc_RNA (1)...(19): siRNA sense strand
cuacauagauacuaaugcu

SEQ ID NO: 1607127 - RNA, 19 nt, Homo sapiens
  misc_RNA (1)...(19): siRNA sense strand
gcuccauucuagccucuuu

SEQ ID NO: 1607128 - RNA, 19 nt, Homo sapiens
  misc_RNA (1)...(19): siRNA sense strand
ucagaggcaccguggaaua

SEQ ID NO: 1607129 - RNA, 19 nt, Homo sapiens
  misc_RNA (1)...(19): siRNA sense strand
gaacaaguggcugcacaga

SEQ ID NO: 1607130 - RNA, 19 nt, Homo sapiens
  misc_RNA (1)...(19): siRNA sense strand
cagauucaacuuaugauga

SEQ ID NO: 1607131 - RNA, 19 nt, Homo sapiens
  misc_RNA (1)...(19): siRNA sense strand
aaaugcaugucaaaucaga

SEQ ID NO: 1607132 - RNA, 19 nt, Homo sapiens
  misc_RNA (1)...(19): siRNA sense strand
gacggaagcacauuaaugg

SEQ ID NO: 1607133 - RNA, 19 nt, Homo sapiens
  misc_RNA (1)...(19): siRNA sense strand
gaaaacuccuccaaguaug

SEQ ID NO: 1607134 - RNA, 19 nt, Homo sapiens
  misc_RNA (1)...(19): siRNA sense strand
gauuccagaaggauuauuu

SEQ ID NO: 1607135 - RNA, 19 nt, Homo sapiens
  misc_RNA (1)...(19): siRNA sense strand
cgaggucuuggcacaauua

SEQ ID NO: 1607136 - RNA, 19 nt, Homo sapiens
  misc_RNA (1)...(19): siRNA sense strand
uugaauugguuccuccaua

SEQ ID NO: 1607137 - RNA, 19 nt, Homo sapiens
  misc_RNA (1)...(19): siRNA sense strand
gagcaaagagagagaaacu

SEQ ID NO: 1607138 - RNA, 19 nt, Homo sapiens
  misc_RNA (1)...(19): siRNA sense strand
acacacuaauacagaguuu

SEQ ID NO: 1607139 - RNA, 19 nt, Homo sapiens
  misc_RNA (1)...(19): siRNA sense strand
gaaaagaaaagagaaguug

SEQ ID NO: 1607140 - RNA, 19 nt, Homo sapiens
  misc_RNA (1)...(19): siRNA sense strand
cuggagacuuuauuacuau

SEQ ID NO: 1607141 - RNA, 19 nt, Homo sapiens
  misc_RNA (1)...(19): siRNA sense strand
agacugggauaguuuccaa

SEQ ID NO: 1607142 - RNA, 19 nt, Homo sapiens
  misc_RNA (1)...(19): siRNA sense strand
gaggaaacacacuaauaca

SEQ ID NO: 1607143 - RNA, 19 nt, Homo sapiens
  misc_RNA (1)...(19): siRNA sense strand
gaaguugccucagguuacg

SEQ ID NO: 1607144 - RNA, 19 nt, Homo sapiens
  misc_RNA (1)...(19): siRNA sense strand
ugacggaagcacauuaaug

SEQ ID NO: 1607145 - RNA, 19 nt, Homo sapiens
  misc_RNA (1)...(19): siRNA sense strand
cgugaaggaucuccagcaa

SEQ ID NO: 1607146 - RNA, 19 nt, Homo sapiens
  misc_RNA (1)...(19): siRNA sense strand
ggucccaccuacuacauag

SEQ ID NO: 1607147 - RNA, 19 nt, Homo sapiens
  misc_RNA (1)...(19): siRNA sense strand
aaaaugggaugguugaaga

SEQ ID NO: 1607148 - RNA, 19 nt, Homo sapiens
  misc_RNA (1)...(19): siRNA sense strand
uuggguaccuuucaacaga

SEQ ID NO: 1607149 - RNA, 19 nt, Homo sapiens
  misc_RNA (1)...(19): siRNA sense strand
uaaagauuccagaaggauu

SEQ ID NO: 1607150 - RNA, 19 nt, Homo sapiens
  misc_RNA (1)...(19): siRNA sense strand
gcuaauggucguucuacug

SEQ ID NO: 1607151 - RNA, 19 nt, Homo sapiens
  misc_RNA (1)...(19): siRNA sense strand
ggagggaagcaguguguag

SEQ ID NO: 1607152 - RNA, 19 nt, Homo sapiens
  misc_RNA (1)...(19): siRNA sense strand
aggaggaaacacacuaaua

SEQ ID NO: 1607153 - RNA, 19 nt, Homo sapiens
  misc_RNA (1)...(19): siRNA sense strand
guuccuccauauaugauug

SEQ ID NO: 1607154 - RNA, 19 nt, Homo sapiens
  misc_RNA (1)...(19): siRNA sense strand
ugucagauucaacuuauga

SEQ ID NO: 1607155 - RNA, 19 nt, Homo sapiens
  misc_RNA (1)...(19): siRNA sense strand
ggaagcaguguguagaaag

SEQ ID NO: 1607156 - RNA, 19 nt, Homo sapiens
  misc_RNA (1)...(19): siRNA sense strand
gagacuuuauuacuaugca

SEQ ID NO: 1607157 - RNA, 19 nt, Homo sapiens
  misc_RNA (1)...(19): siRNA sense strand
gauuggcggcuccauucua

SEQ ID NO: 1607158 - RNA, 19 nt, Homo sapiens
  misc_RNA (1)...(19): siRNA sense strand
acaguggaacggagguuua

SEQ ID NO: 1607159 - RNA, 19 nt, Homo sapiens
  misc_RNA (1)...(19): siRNA sense strand
ucagaaaacuccuccaagu

SEQ ID NO: 1607160 - RNA, 19 nt, Homo sapiens
  misc_RNA (1)...(19): siRNA sense strand
cggaagcacauuaauggaa

SEQ ID NO: 1607161 - RNA, 19 nt, Homo sapiens
  misc_RNA (1)...(19): siRNA sense strand
uauuugacccuuccaaugu

SEQ ID NO: 1607162 - RNA, 19 nt, Homo sapiens
  misc_RNA (1)...(19): siRNA sense strand
gagggaagcaguguguaga

SEQ ID NO: 1607163 - RNA, 19 nt, Homo sapiens
  misc_RNA (1)...(19): siRNA sense strand
gaaauagauggcgauaaag

SEQ ID NO: 1607164 - RNA, 19 nt, Homo sapiens
  misc_RNA (1)...(19): siRNA sense strand
agugucagauucaacuuau

SEQ ID NO: 1607165 - RNA, 19 nt, Homo sapiens
  misc_RNA (1)...(19): siRNA sense strand
cgauggcuauguccuucaa

SEQ ID NO: 1607166 - RNA, 19 nt, Homo sapiens
  misc_RNA (1)...(19): siRNA sense strand
aaagagagagaaacugaca

SEQ ID NO: 1607167 - RNA, 19 nt, Homo sapiens
  misc_RNA (1)...(19): siRNA sense strand
uuacugacagguugaauag

SEQ ID NO: 1607168 - RNA, 19 nt, Homo sapiens
  misc_RNA (1)...(19): siRNA sense strand
cgguugaaauugauugcaa

SEQ ID NO: 1607169 - RNA, 19 nt, Homo sapiens
  misc_RNA (1)...(19): siRNA sense strand
acugacagaguuaauguuu

SEQ ID NO: 1607170 - RNA, 19 nt, Homo sapiens
  misc_RNA (1)...(19): siRNA sense strand
caagcuauuuuggaucaua

SEQ ID NO: 1607171 - RNA, 19 nt, Homo sapiens
  misc_RNA (1)...(19): siRNA sense strand
cuacugggcugauuuugga

SEQ ID NO: 1607172 - RNA, 19 nt, Homo sapiens
  misc_RNA (1)...(19): siRNA sense strand
agagagagaaacugacaga

SEQ ID NO: 1607173 - RNA, 19 nt, Homo sapiens
  misc_RNA (1)...(19): siRNA sense strand
agauggcgauaaaggcaaa

SEQ ID NO: 1607174 - RNA, 19 nt, Homo sapiens
  misc_RNA (1)...(19): siRNA sense strand
ucucuauggcaguguaaua

SEQ ID NO: 1607175 - RNA, 19 nt, Homo sapiens
  misc_RNA (1)...(19): siRNA sense strand
ggaauacuagagcaaagag

SEQ ID NO: 1607176 - RNA, 19 nt, Homo sapiens
  misc_RNA (1)...(19): siRNA sense strand
guaugcgguugaaauugau

SEQ ID NO: 1607177 - RNA, 19 nt, Homo sapiens
  misc_RNA (1)...(19): siRNA sense strand
acugacagguugaauagag

SEQ ID NO: 1607178 - RNA, 19 nt, Homo sapiens
  misc_RNA (1)...(19): siRNA sense strand
ccacucauaccacugcaau

SEQ ID NO: 1607179 - RNA, 19 nt, Homo sapiens
  misc_RNA (1)...(19): siRNA sense strand
agagagaaacugacagagu

SEQ ID NO: 1607180 - RNA, 19 nt, Homo sapiens
  misc_RNA (1)...(19): siRNA sense strand
agaugccaacuguucauua

SEQ ID NO: 1607181 - RNA, 19 nt, Homo sapiens
  misc_RNA (1)...(19): siRNA sense strand
cagaaaacuccuccaagua

SEQ ID NO: 1607182 - RNA, 19 nt, Homo sapiens
  misc_RNA (1)...(19): siRNA sense strand
gagaugacggaagcacauu

SEQ ID NO: 1607183 - RNA, 19 nt, Homo sapiens
  misc_RNA (1)...(19): siRNA sense strand
gaaaguacaucgccuucua

SEQ ID NO: 1607184 - RNA, 19 nt, Homo sapiens
  misc_RNA (1)...(19): siRNA sense strand
uaaaggagcugcaggagaa

SEQ ID NO: 1607185 - RNA, 19 nt, Homo sapiens
  misc_RNA (1)...(19): siRNA sense strand
ggaaggagcuggagagagu

SEQ ID NO: 1607186 - RNA, 19 nt, Homo sapiens
  misc_RNA (1)...(19): siRNA sense strand
ggaccuguaucacaugaaa

SEQ ID NO: 1607187 - RNA, 19 nt, Homo sapiens
  misc_RNA (1)...(19): siRNA sense strand
ggagagagaucaauaugcu

SEQ ID NO: 1607188 - RNA, 19 nt, Homo sapiens
  misc_RNA (1)...(19): siRNA sense strand
gcaggagguuugcacauug

SEQ ID NO: 1607189 - RNA, 19 nt, Homo sapiens
  misc_RNA (1)...(19): siRNA sense strand
gaaagcaaacaaugagaaa

SEQ ID NO: 1607190 - RNA, 19 nt, Homo sapiens
  misc_RNA (1)...(19): siRNA sense strand
gaaggagucgcuuaaagaa

SEQ ID NO: 1607191 - RNA, 19 nt, Homo sapiens
  misc_RNA (1)...(19): siRNA sense strand
gaaacauucucucagauac

SEQ ID NO: 1607192 - RNA, 19 nt, Homo sapiens
  misc_RNA (1)...(19): siRNA sense strand
caugaaacauucucucaga

SEQ ID NO: 1607193 - RNA, 19 nt, Homo sapiens
  misc_RNA (1)...(19): siRNA sense strand
ucagauacuuugaagaaga

SEQ ID NO: 1607194 - RNA, 19 nt, Homo sapiens
  misc_RNA (1)...(19): siRNA sense strand
agaaacaaguggaacauca

SEQ ID NO: 1607195 - RNA, 19 nt, Homo sapiens
  misc_RNA (1)...(19): siRNA sense strand
cgacaagcauggugaucuu

SEQ ID NO: 1607196 - RNA, 19 nt, Homo sapiens
  misc_RNA (1)...(19): siRNA sense strand
ugaaacauucucucagaua

SEQ ID NO: 1607197 - RNA, 19 nt, Homo sapiens
  misc_RNA (1)...(19): siRNA sense strand
gaggagaagaagcaugaua

SEQ ID NO: 1607198 - RNA, 19 nt, Homo sapiens
  misc_RNA (1)...(19): siRNA sense strand
gaaacuggaacuuggauuc

SEQ ID NO: 1607199 - RNA, 19 nt, Homo sapiens
  misc_RNA (1)...(19): siRNA sense strand
gcaguuagagcaguccaua

SEQ ID NO: 1607200 - RNA, 19 nt, Homo sapiens
  misc_RNA (1)...(19): siRNA sense strand
guacaucgccuucuaacag

SEQ ID NO: 1607201 - RNA, 19 nt, Homo sapiens
  misc_RNA (1)...(19): siRNA sense strand
ugaaggagucgcuuaaaga

SEQ ID NO: 1607202 - RNA, 19 nt, Homo sapiens
  misc_RNA (1)...(19): siRNA sense strand
gagcuuguccagacucaaa

SEQ ID NO: 1607203 - RNA, 19 nt, Homo sapiens
  misc_RNA (1)...(19): siRNA sense strand
gaaaagaaagcaaacaaug

SEQ ID NO: 1607204 - RNA, 19 nt, Homo sapiens
  misc_RNA (1)...(19): siRNA sense strand
gcacauugaaggaggagaa

SEQ ID NO: 1607205 - RNA, 19 nt, Homo sapiens
  misc_RNA (1)...(19): siRNA sense strand
aacaucagcuggaagaaga

SEQ ID NO: 1607206 - RNA, 19 nt, Homo sapiens
  misc_RNA (1)...(19): siRNA sense strand
caaacaaugagaaacagaa

SEQ ID NO: 1607207 - RNA, 19 nt, Homo sapiens
  misc_RNA (1)...(19): siRNA sense strand
ucucagauacuuugaagaa

SEQ ID NO: 1607208 - RNA, 19 nt, Homo sapiens
  misc_RNA (1)...(19): siRNA sense strand
ugaaugacaccaucaaauc

SEQ ID NO: 1607209 - RNA, 19 nt, Homo sapiens
  misc_RNA (1)...(19): siRNA sense strand
gcaguuggagcagcaagua

SEQ ID NO: 1607210 - RNA, 19 nt, Homo sapiens
  misc_RNA (1)...(19): siRNA sense strand
gagauugaacacagagaaa

SEQ ID NO: 1607211 - RNA, 19 nt, Homo sapiens
  misc_RNA (1)...(19): siRNA sense strand
gaacaucagcuggaagaag

SEQ ID NO: 1607212 - RNA, 19 nt, Homo sapiens
  misc_RNA (1)...(19): siRNA sense strand
caggagguuugcacauuga

SEQ ID NO: 1607213 - RNA, 19 nt, Homo sapiens
  misc_RNA (1)...(19): siRNA sense strand
gaaugacaccaucaaaucu

SEQ ID NO: 1607214 - RNA, 19 nt, Homo sapiens
  misc_RNA (1)...(19): siRNA sense strand
gagggagcauguggagaaa

SEQ ID NO: 1607215 - RNA, 19 nt, Homo sapiens
  misc_RNA (1)...(19): siRNA sense strand
caagagcgcacugcaguug

SEQ ID NO: 1607216 - RNA, 19 nt, Homo sapiens
  misc_RNA (1)...(19): siRNA sense strand
gaagaaacaaguggaacau

SEQ ID NO: 1607217 - RNA, 19 nt, Homo sapiens
  misc_RNA (1)...(19): siRNA sense strand
caagcauggugaucuuugu

SEQ ID NO: 1607218 - RNA, 19 nt, Homo sapiens
  misc_RNA (1)...(19): siRNA sense strand
ggagcuagagggucaaauc

SEQ ID NO: 1607219 - RNA, 19 nt, Homo sapiens
  misc_RNA (1)...(19): siRNA sense strand
ugagggagcauguggagaa

SEQ ID NO: 1607220 - RNA, 19 nt, Homo sapiens
  misc_RNA (1)...(19): siRNA sense strand
gcaaacaaugagaaacaga

SEQ ID NO: 1607221 - RNA, 19 nt, Homo sapiens
  misc_RNA (1)...(19): siRNA sense strand
uguaucacaugaaacauuc

SEQ ID NO: 1607222 - RNA, 19 nt, Homo sapiens
  misc_RNA (1)...(19): siRNA sense strand
ggacacgugacacaguuga

SEQ ID NO: 1607223 - RNA, 19 nt, Homo sapiens
  misc_RNA (1)...(19): siRNA sense strand
ggagaaacuggaacuugga

SEQ ID NO: 1607224 - RNA, 19 nt, Homo sapiens
  misc_RNA (1)...(19): siRNA sense strand
aggagucgcuuaaagaagu

SEQ ID NO: 1607225 - RNA, 19 nt, Homo sapiens
  misc_RNA (1)...(19): siRNA sense strand
gcagcuccuuggugagaug

SEQ ID NO: 1607226 - RNA, 19 nt, Homo sapiens
  misc_RNA (1)...(19): siRNA sense strand
gggagcauguggagaaacu

SEQ ID NO: 1607227 - RNA, 19 nt, Homo sapiens
  misc_RNA (1)...(19): siRNA sense strand
cgcaggagguuugcacauu

SEQ ID NO: 1607228 - RNA, 19 nt, Homo sapiens
  misc_RNA (1)...(19): siRNA sense strand
aaagaaagcaaacaaugag

SEQ ID NO: 1607229 - RNA, 19 nt, Homo sapiens
  misc_RNA (1)...(19): siRNA sense strand
aaaguacaucgccuucuaa

SEQ ID NO: 1607230 - RNA, 19 nt, Homo sapiens
  misc_RNA (1)...(19): siRNA sense strand
gaaacagaaagcugaaagg

SEQ ID NO: 1607231 - RNA, 19 nt, Homo sapiens
  misc_RNA (1)...(19): siRNA sense strand
ccggaacccugcugcugaa

SEQ ID NO: 1607232 - RNA, 19 nt, Homo sapiens
  misc_RNA (1)...(19): siRNA sense strand
uacaucgccuucuaacaga

SEQ ID NO: 1607233 - RNA, 19 nt, Homo sapiens
  misc_RNA (1)...(19): siRNA sense strand
ucagagcccgugccaagaa

SEQ ID NO: 1607234 - RNA, 19 nt, Homo sapiens
  misc_RNA (1)...(19): siRNA sense strand
ugcaagaccugaggaagga

SEQ ID NO: 1607235 - RNA, 19 nt, Homo sapiens
  misc_RNA (1)...(19): siRNA sense strand
agaucaauaugcugaacaa

SEQ ID NO: 1607236 - RNA, 19 nt, Homo sapiens
  misc_RNA (1)...(19): siRNA sense strand
gcaguaaagcacuucucaa

SEQ ID NO: 1607237 - RNA, 19 nt, Homo sapiens
  misc_RNA (1)...(19): siRNA sense strand
ugaagaagaguccaaggau

SEQ ID NO: 1607238 - RNA, 19 nt, Homo sapiens
  misc_RNA (1)...(19): siRNA sense strand
cagauacuuugaagaagag

SEQ ID NO: 1607239 - RNA, 19 nt, Homo sapiens
  misc_RNA (1)...(19): siRNA sense strand
cguggagccugcacaagga

SEQ ID NO: 1607240 - RNA, 19 nt, Homo sapiens
  misc_RNA (1)...(19): siRNA sense strand
agaaagcaaacaaugagaa

SEQ ID NO: 1607241 - RNA, 19 nt, Homo sapiens
  misc_RNA (1)...(19): siRNA sense strand
aaggacacgugacacaguu

SEQ ID NO: 1607242 - RNA, 19 nt, Homo sapiens
  misc_RNA (1)...(19): siRNA sense strand
gcugaaaggacacgugaca

SEQ ID NO: 1607243 - RNA, 19 nt, Homo sapiens
  misc_RNA (1)...(19): siRNA sense strand
ugaaaggacacgugacaca

SEQ ID NO: 1607244 - RNA, 19 nt, Homo sapiens
  misc_RNA (1)...(19): siRNA sense strand
ugaaggaggagaagaagca

SEQ ID NO: 1607245 - RNA, 19 nt, Homo sapiens
  misc_RNA (1)...(19): siRNA sense strand
gagccgcaguaaagcacuu

SEQ ID NO: 1607246 - RNA, 19 nt, Homo sapiens
  misc_RNA (1)...(19): siRNA sense strand
gaaacaaguggaacaucag

SEQ ID NO: 1607247 - RNA, 19 nt, Homo sapiens
  misc_RNA (1)...(19): siRNA sense strand
caguaaagcacuucucaag

SEQ ID NO: 1607248 - RNA, 19 nt, Homo sapiens
  misc_RNA (1)...(19): siRNA sense strand
aagcaaacaaugagaaaca

SEQ ID NO: 1607249 - RNA, 19 nt, Homo sapiens
  misc_RNA (1)...(19): siRNA sense strand
gagaaacagaaagcugaaa

SEQ ID NO: 1607250 - RNA, 19 nt, Homo sapiens
  misc_RNA (1)...(19): siRNA sense strand
ugaacucgagguccauaaa

SEQ ID NO: 1607251 - RNA, 19 nt, Homo sapiens
  misc_RNA (1)...(19): siRNA sense strand
gcuggagagagaucaauau

SEQ ID NO: 1607252 - RNA, 19 nt, Homo sapiens
  misc_RNA (1)...(19): siRNA sense strand
cauugaaggaggagaagaa

SEQ ID NO: 1607253 - RNA, 19 nt, Homo sapiens
  misc_RNA (1)...(19): siRNA sense strand
aacauucucucagauacuu

SEQ ID NO: 1607254 - RNA, 19 nt, Homo sapiens
  misc_RNA (1)...(19): siRNA sense strand
gaacucgagguccauaaaa

SEQ ID NO: 1607255 - RNA, 19 nt, Homo sapiens
  misc_RNA (1)...(19): siRNA sense strand
gcagcguauaggagaguua

SEQ ID NO: 1607256 - RNA, 19 nt, Homo sapiens
  misc_RNA (1)...(19): siRNA sense strand
uugaaggagucgcuuaaag

SEQ ID NO: 1607257 - RNA, 19 nt, Homo sapiens
  misc_RNA (1)...(19): siRNA sense strand
gagucuagcggccuuaugg

SEQ ID NO: 1607258 - RNA, 19 nt, Homo sapiens
  misc_RNA (1)...(19): siRNA sense strand
gaaaaugucgcaggagguu

SEQ ID NO: 1607259 - RNA, 19 nt, Homo sapiens
  misc_RNA (1)...(19): siRNA sense strand
ggagucgcuuaaagaaguc

SEQ ID NO: 1607260 - RNA, 19 nt, Homo sapiens
  misc_RNA (1)...(19): siRNA sense strand
ucucucagauacuuugaag

SEQ ID NO: 1607261 - RNA, 19 nt, Homo sapiens
  misc_RNA (1)...(19): siRNA sense strand
guggagaaacuggaacuug

SEQ ID NO: 1607262 - RNA, 19 nt, Homo sapiens
  misc_RNA (1)...(19): siRNA sense strand
gcauguggagaaacuggaa

SEQ ID NO: 1607263 - RNA, 19 nt, Homo sapiens
  misc_RNA (1)...(19): siRNA sense strand
augacaccaucaaaucuuu

SEQ ID NO: 1607264 - RNA, 19 nt, Homo sapiens
  misc_RNA (1)...(19): siRNA sense strand
gaacaaauaaaaggagaga

SEQ ID NO: 1607265 - RNA, 19 nt, Homo sapiens
  misc_RNA (1)...(19): siRNA sense strand
gacaagcauggugaucuuu

SEQ ID NO: 1607266 - RNA, 19 nt, Homo sapiens
  misc_RNA (1)...(19): siRNA sense strand
gagaaacuggaacuuggau

SEQ ID NO: 1607267 - RNA, 19 nt, Homo sapiens
  misc_RNA (1)...(19): siRNA sense strand
aaaugucgcaggagguuug

SEQ ID NO: 1607268 - RNA, 19 nt, Homo sapiens
  misc_RNA (1)...(19): siRNA sense strand
aagcagcaguccugaacuc

SEQ ID NO: 1607269 - RNA, 19 nt, Homo sapiens
  misc_RNA (1)...(19): siRNA sense strand
agaagaaacaaguggaaca

SEQ ID NO: 1607270 - RNA, 19 nt, Homo sapiens
  misc_RNA (1)...(19): siRNA sense strand
agagcgcacugcaguugga

SEQ ID NO: 1607271 - RNA, 19 nt, Homo sapiens
  misc_RNA (1)...(19): siRNA sense strand
gaaaacaaucagugcauca

SEQ ID NO: 1607272 - RNA, 19 nt, Homo sapiens
  misc_RNA (1)...(19): siRNA sense strand
gaggaaggagcuggagaga

SEQ ID NO: 1607273 - RNA, 19 nt, Homo sapiens
  misc_RNA (1)...(19): siRNA sense strand
aggaggagaagaagcauga

SEQ ID NO: 1607274 - RNA, 19 nt, Homo sapiens
  misc_RNA (1)...(19): siRNA sense strand
aagaagaguccaaggaucu

SEQ ID NO: 1607275 - RNA, 19 nt, Homo sapiens
  misc_RNA (1)...(19): siRNA sense strand
gugcagcuccuuggugaga

SEQ ID NO: 1607276 - RNA, 19 nt, Homo sapiens
  misc_RNA (1)...(19): siRNA sense strand
uggaacaucagcuggaaga

SEQ ID NO: 1607277 - RNA, 19 nt, Homo sapiens
  misc_RNA (1)...(19): siRNA sense strand
gaucaauaugcugaacaaa

SEQ ID NO: 1607278 - RNA, 19 nt, Homo sapiens
  misc_RNA (1)...(19): siRNA sense strand
guccauacgggagcagaua

SEQ ID NO: 1607279 - RNA, 19 nt, Homo sapiens
  misc_RNA (1)...(19): siRNA sense strand
gagaucaauaugcugaaca

SEQ ID NO: 1607280 - RNA, 19 nt, Homo sapiens
  misc_RNA (1)...(19): siRNA sense strand
cacaugaaacauucucuca

SEQ ID NO: 1607281 - RNA, 19 nt, Homo sapiens
  misc_RNA (1)...(19): siRNA sense strand
aaacuggaacuuggauuca

SEQ ID NO: 1607282 - RNA, 19 nt, Homo sapiens
  misc_RNA (1)...(19): siRNA sense strand
cagcagaggaugaggaaaa

SEQ ID NO: 1607283 - RNA, 19 nt, Homo sapiens
  misc_RNA (1)...(19): siRNA sense strand
gaaaguacaucgccuucua

SEQ ID NO: 1607284 - RNA, 19 nt, Homo sapiens
  misc_RNA (1)...(19): siRNA sense strand
uaaaggagcugcaggagaa

SEQ ID NO: 1607285 - RNA, 19 nt, Homo sapiens
  misc_RNA (1)...(19): siRNA sense strand
ggaaggagcuggagagagu

SEQ ID NO: 1607286 - RNA, 19 nt, Homo sapiens
  misc_RNA (1)...(19): siRNA sense strand
ggagagagaucaauaugcu

SEQ ID NO: 1607287 - RNA, 19 nt, Homo sapiens
  misc_RNA (1)...(19): siRNA sense strand
gcaggagguuugcacauug

SEQ ID NO: 1607288 - RNA, 19 nt, Homo sapiens
  misc_RNA (1)...(19): siRNA sense strand
gaaggagucgcuuaaagaa

SEQ ID NO: 1607289 - RNA, 19 nt, Homo sapiens
  misc_RNA (1)...(19): siRNA sense strand
gaaacauucucucagauac

SEQ ID NO: 1607290 - RNA, 19 nt, Homo sapiens
  misc_RNA (1)...(19): siRNA sense strand
ucagauacuuugaagaaga

SEQ ID NO: 1607291 - RNA, 19 nt, Homo sapiens
  misc_RNA (1)...(19): siRNA sense strand
cgacaagcauggugaucuu

SEQ ID NO: 1607292 - RNA, 19 nt, Homo sapiens
  misc_RNA (1)...(19): siRNA sense strand
gaggagaagaagcaugaua

SEQ ID NO: 1607293 - RNA, 19 nt, Homo sapiens
  misc_RNA (1)...(19): siRNA sense strand
gaaacuggaacuuggauuc

SEQ ID NO: 1607294 - RNA, 19 nt, Homo sapiens
  misc_RNA (1)...(19): siRNA sense strand
gcaguuagagcaguccaua

SEQ ID NO: 1607295 - RNA, 19 nt, Homo sapiens
  misc_RNA (1)...(19): siRNA sense strand
guacaucgccuucuaacag

SEQ ID NO: 1607296 - RNA, 19 nt, Homo sapiens
  misc_RNA (1)...(19): siRNA sense strand
ugaaggagucgcuuaaaga

SEQ ID NO: 1607297 - RNA, 19 nt, Homo sapiens
  misc_RNA (1)...(19): siRNA sense strand
gagcuuguccagacucaaa

SEQ ID NO: 1607298 - RNA, 19 nt, Homo sapiens
  misc_RNA (1)...(19): siRNA sense strand
gcacauugaaggaggagaa

SEQ ID NO: 1607299 - RNA, 19 nt, Homo sapiens
  misc_RNA (1)...(19): siRNA sense strand
ucucagauacuuugaagaa

SEQ ID NO: 1607300 - RNA, 19 nt, Homo sapiens
  misc_RNA (1)...(19): siRNA sense strand
gcaguuggagcagcaagua

SEQ ID NO: 1607301 - RNA, 19 nt, Homo sapiens
  misc_RNA (1)...(19): siRNA sense strand
caggagguuugcacauuga

SEQ ID NO: 1607302 - RNA, 19 nt, Homo sapiens
  misc_RNA (1)...(19): siRNA sense strand
caagagcgcacugcaguug

SEQ ID NO: 1607303 - RNA, 19 nt, Homo sapiens
  misc_RNA (1)...(19): siRNA sense strand
gagggagcauguggagaaa

SEQ ID NO: 1607304 - RNA, 19 nt, Homo sapiens
  misc_RNA (1)...(19): siRNA sense strand
caagcauggugaucuuugu

SEQ ID NO: 1607305 - RNA, 19 nt, Homo sapiens
  misc_RNA (1)...(19): siRNA sense strand
ugagggagcauguggagaa

SEQ ID NO: 1607306 - RNA, 19 nt, Homo sapiens
  misc_RNA (1)...(19): siRNA sense strand
ggacacgugacacaguuga

SEQ ID NO: 1607307 - RNA, 19 nt, Homo sapiens
  misc_RNA (1)...(19): siRNA sense strand
ggagaaacuggaacuugga

SEQ ID NO: 1607308 - RNA, 19 nt, Homo sapiens
  misc_RNA (1)...(19): siRNA sense strand
aggagucgcuuaaagaagu

SEQ ID NO: 1607309 - RNA, 19 nt, Homo sapiens
  misc_RNA (1)...(19): siRNA sense strand
gcagcuccuuggugagaug

SEQ ID NO: 1607310 - RNA, 19 nt, Homo sapiens
  misc_RNA (1)...(19): siRNA sense strand
gggagcauguggagaaacu

SEQ ID NO: 1607311 - RNA, 19 nt, Homo sapiens
  misc_RNA (1)...(19): siRNA sense strand
cgcaggagguuugcacauu

SEQ ID NO: 1607312 - RNA, 19 nt, Homo sapiens
  misc_RNA (1)...(19): siRNA sense strand
aaaguacaucgccuucuaa

SEQ ID NO: 1607313 - RNA, 19 nt, Homo sapiens
  misc_RNA (1)...(19): siRNA sense strand
gcaguaaagcacuucucaa

SEQ ID NO: 1607314 - RNA, 19 nt, Homo sapiens
  misc_RNA (1)...(19): siRNA sense strand
ccggaacccugcugcugaa

SEQ ID NO: 1607315 - RNA, 19 nt, Homo sapiens
  misc_RNA (1)...(19): siRNA sense strand
uacaucgccuucuaacaga

SEQ ID NO: 1607316 - RNA, 19 nt, Homo sapiens
  misc_RNA (1)...(19): siRNA sense strand
ugaagaagaguccaaggau

SEQ ID NO: 1607317 - RNA, 19 nt, Homo sapiens
  misc_RNA (1)...(19): siRNA sense strand
ugcaagaccugaggaagga

SEQ ID NO: 1607318 - RNA, 19 nt, Homo sapiens
  misc_RNA (1)...(19): siRNA sense strand
agaucaauaugcugaacaa

SEQ ID NO: 1607319 - RNA, 19 nt, Homo sapiens
  misc_RNA (1)...(19): siRNA sense strand
cagauacuuugaagaagag

SEQ ID NO: 1607320 - RNA, 19 nt, Homo sapiens
  misc_RNA (1)...(19): siRNA sense strand
cguggagccugcacaagga

SEQ ID NO: 1607321 - RNA, 19 nt, Homo sapiens
  misc_RNA (1)...(19): siRNA sense strand
aaggacacgugacacaguu

SEQ ID NO: 1607322 - RNA, 19 nt, Homo sapiens
  misc_RNA (1)...(19): siRNA sense strand
gcugaaaggacacgugaca

SEQ ID NO: 1607323 - RNA, 19 nt, Homo sapiens
  misc_RNA (1)...(19): siRNA sense strand
ugaaaggacacgugacaca

SEQ ID NO: 1607324 - RNA, 19 nt, Homo sapiens
  misc_RNA (1)...(19): siRNA sense strand
ugaaggaggagaagaagca

SEQ ID NO: 1607325 - RNA, 19 nt, Homo sapiens
  misc_RNA (1)...(19): siRNA sense strand
caguaaagcacuucucaag

SEQ ID NO: 1607326 - RNA, 19 nt, Homo sapiens
  misc_RNA (1)...(19): siRNA sense strand
gagccgcaguaaagcacuu

SEQ ID NO: 1607327 - RNA, 19 nt, Homo sapiens
  misc_RNA (1)...(19): siRNA sense strand
gcuggagagagaucaauau

SEQ ID NO: 1607328 - RNA, 19 nt, Homo sapiens
  misc_RNA (1)...(19): siRNA sense strand
cauugaaggaggagaagaa

SEQ ID NO: 1607329 - RNA, 19 nt, Homo sapiens
  misc_RNA (1)...(19): siRNA sense strand
aacauucucucagauacuu

SEQ ID NO: 1607330 - RNA, 19 nt, Homo sapiens
  misc_RNA (1)...(19): siRNA sense strand
gcagcguauaggagaguua

SEQ ID NO: 1607331 - RNA, 19 nt, Homo sapiens
  misc_RNA (1)...(19): siRNA sense strand
uugaaggagucgcuuaaag

SEQ ID NO: 1607332 - RNA, 19 nt, Homo sapiens
  misc_RNA (1)...(19): siRNA sense strand
gagucuagcggccuuaugg

SEQ ID NO: 1607333 - RNA, 19 nt, Homo sapiens
  misc_RNA (1)...(19): siRNA sense strand
gaaaaugucgcaggagguu

SEQ ID NO: 1607334 - RNA, 19 nt, Homo sapiens
  misc_RNA (1)...(19): siRNA sense strand
ggagucgcuuaaagaaguc

SEQ ID NO: 1607335 - RNA, 19 nt, Homo sapiens
  misc_RNA (1)...(19): siRNA sense strand
gcauguggagaaacuggaa

SEQ ID NO: 1607336 - RNA, 19 nt, Homo sapiens
  misc_RNA (1)...(19): siRNA sense strand
ucucucagauacuuugaag

SEQ ID NO: 1607337 - RNA, 19 nt, Homo sapiens
  misc_RNA (1)...(19): siRNA sense strand
guggagaaacuggaacuug

SEQ ID NO: 1607338 - RNA, 19 nt, Homo sapiens
  misc_RNA (1)...(19): siRNA sense strand
gaacaaauaaaaggagaga

SEQ ID NO: 1607339 - RNA, 19 nt, Homo sapiens
  misc_RNA (1)...(19): siRNA sense strand
gacaagcauggugaucuuu

SEQ ID NO: 1607340 - RNA, 19 nt, Homo sapiens
  misc_RNA (1)...(19): siRNA sense strand
gagaaacuggaacuuggau

SEQ ID NO: 1607341 - RNA, 19 nt, Homo sapiens
  misc_RNA (1)...(19): siRNA sense strand
aaaugucgcaggagguuug

SEQ ID NO: 1607342 - RNA, 19 nt, Homo sapiens
  misc_RNA (1)...(19): siRNA sense strand
aggaggagaagaagcauga

SEQ ID NO: 1607343 - RNA, 19 nt, Homo sapiens
  misc_RNA (1)...(19): siRNA sense strand
agagcgcacugcaguugga

SEQ ID NO: 1607344 - RNA, 19 nt, Homo sapiens
  misc_RNA (1)...(19): siRNA sense strand
gaaaacaaucagugcauca

SEQ ID NO: 1607345 - RNA, 19 nt, Homo sapiens
  misc_RNA (1)...(19): siRNA sense strand
gaggaaggagcuggagaga

SEQ ID NO: 1607346 - RNA, 19 nt, Homo sapiens
  misc_RNA (1)...(19): siRNA sense strand
gaucaauaugcugaacaaa

SEQ ID NO: 1607347 - RNA, 19 nt, Homo sapiens
  misc_RNA (1)...(19): siRNA sense strand
gugcagcuccuuggugaga

SEQ ID NO: 1607348 - RNA, 19 nt, Homo sapiens
  misc_RNA (1)...(19): siRNA sense strand
aagaagaguccaaggaucu

SEQ ID NO: 1607349 - RNA, 19 nt, Homo sapiens
  misc_RNA (1)...(19): siRNA sense strand
guccauacgggagcagaua

SEQ ID NO: 1607350 - RNA, 19 nt, Homo sapiens
  misc_RNA (1)...(19): siRNA sense strand
gagaucaauaugcugaaca

SEQ ID NO: 1607351 - RNA, 19 nt, Homo sapiens
  misc_RNA (1)...(19): siRNA sense strand
aaacuggaacuuggauuca

SEQ ID NO: 1607352 - RNA, 19 nt, Homo sapiens
  misc_RNA (1)...(19): siRNA sense strand
cagcagaggaugaggaaaa

SEQ ID NO: 1607353 - RNA, 19 nt, Homo sapiens
  misc_RNA (1)...(19): siRNA sense strand
gagagaucaauaugcugaa

SEQ ID NO: 1607354 - RNA, 19 nt, Homo sapiens
  misc_RNA (1)...(19): siRNA sense strand
ggcagcagaggaugaggaa

SEQ ID NO: 1607355 - RNA, 19 nt, Homo sapiens
  misc_RNA (1)...(19): siRNA sense strand
gggaggaggccaucaucag

SEQ ID NO: 1607356 - RNA, 19 nt, Homo sapiens
  misc_RNA (1)...(19): siRNA sense strand
gaaaguacaucgccuucua

SEQ ID NO: 1607357 - RNA, 19 nt, Homo sapiens
  misc_RNA (1)...(19): siRNA sense strand
uaaaggagcugcaggagaa

SEQ ID NO: 1607358 - RNA, 19 nt, Homo sapiens
  misc_RNA (1)...(19): siRNA sense strand
ggaaggagcuggagagagu

SEQ ID NO: 1607359 - RNA, 19 nt, Homo sapiens
  misc_RNA (1)...(19): siRNA sense strand
ggaccuguaucacaugaaa

SEQ ID NO: 1607360 - RNA, 19 nt, Homo sapiens
  misc_RNA (1)...(19): siRNA sense strand
ggagagagaucaauaugcu

SEQ ID NO: 1607361 - RNA, 19 nt, Homo sapiens
  misc_RNA (1)...(19): siRNA sense strand
gcaggagguuugcacauug

SEQ ID NO: 1607362 - RNA, 19 nt, Homo sapiens
  misc_RNA (1)...(19): siRNA sense strand
gaaagcaaacaaugagaaa

SEQ ID NO: 1607363 - RNA, 19 nt, Homo sapiens
  misc_RNA (1)...(19): siRNA sense strand
gaaggagucgcuuaaagaa

SEQ ID NO: 1607364 - RNA, 19 nt, Homo sapiens
  misc_RNA (1)...(19): siRNA sense strand
gaaacauucucucagauac

SEQ ID NO: 1607365 - RNA, 19 nt, Homo sapiens
  misc_RNA (1)...(19): siRNA sense strand
caugaaacauucucucaga

SEQ ID NO: 1607366 - RNA, 19 nt, Homo sapiens
  misc_RNA (1)...(19): siRNA sense strand
ucagauacuuugaagaaga

SEQ ID NO: 1607367 - RNA, 19 nt, Homo sapiens
  misc_RNA (1)...(19): siRNA sense strand
agaaacaaguggaacauca

SEQ ID NO: 1607368 - RNA, 19 nt, Homo sapiens
  misc_RNA (1)...(19): siRNA sense strand
cgacaagcauggugaucuu

SEQ ID NO: 1607369 - RNA, 19 nt, Homo sapiens
  misc_RNA (1)...(19): siRNA sense strand
ugaaacauucucucagaua

SEQ ID NO: 1607370 - RNA, 19 nt, Homo sapiens
  misc_RNA (1)...(19): siRNA sense strand
gaggagaagaagcaugaua

SEQ ID NO: 1607371 - RNA, 19 nt, Homo sapiens
  misc_RNA (1)...(19): siRNA sense strand
gaaacuggaacuuggauuc

SEQ ID NO: 1607372 - RNA, 19 nt, Homo sapiens
  misc_RNA (1)...(19): siRNA sense strand
gcaguuagagcaguccaua

SEQ ID NO: 1607373 - RNA, 19 nt, Homo sapiens
  misc_RNA (1)...(19): siRNA sense strand
guacaucgccuucuaacag

SEQ ID NO: 1607374 - RNA, 19 nt, Homo sapiens
  misc_RNA (1)...(19): siRNA sense strand
ugaaggagucgcuuaaaga

SEQ ID NO: 1607375 - RNA, 19 nt, Homo sapiens
  misc_RNA (1)...(19): siRNA sense strand
gagcuuguccagacucaaa

SEQ ID NO: 1607376 - RNA, 19 nt, Homo sapiens
  misc_RNA (1)...(19): siRNA sense strand
gaaaagaaagcaaacaaug

SEQ ID NO: 1607377 - RNA, 19 nt, Homo sapiens
  misc_RNA (1)...(19): siRNA sense strand
gcacauugaaggaggagaa

SEQ ID NO: 1607378 - RNA, 19 nt, Homo sapiens
  misc_RNA (1)...(19): siRNA sense strand
aacaucagcuggaagaaga

SEQ ID NO: 1607379 - RNA, 19 nt, Homo sapiens
  misc_RNA (1)...(19): siRNA sense strand
caaacaaugagaaacagaa

SEQ ID NO: 1607380 - RNA, 19 nt, Homo sapiens
  misc_RNA (1)...(19): siRNA sense strand
ucucagauacuuugaagaa

SEQ ID NO: 1607381 - RNA, 19 nt, Homo sapiens
  misc_RNA (1)...(19): siRNA sense strand
ugaaugacaccaucaaauc

SEQ ID NO: 1607382 - RNA, 19 nt, Homo sapiens
  misc_RNA (1)...(19): siRNA sense strand
gcaguuggagcagcaagua

SEQ ID NO: 1607383 - RNA, 19 nt, Homo sapiens
  misc_RNA (1)...(19): siRNA sense strand
gagauugaacacagagaaa

SEQ ID NO: 1607384 - RNA, 19 nt, Homo sapiens
  misc_RNA (1)...(19): siRNA sense strand
gaacaucagcuggaagaag

SEQ ID NO: 1607385 - RNA, 19 nt, Homo sapiens
  misc_RNA (1)...(19): siRNA sense strand
caggagguuugcacauuga

SEQ ID NO: 1607386 - RNA, 19 nt, Homo sapiens
  misc_RNA (1)...(19): siRNA sense strand
gaaugacaccaucaaaucu

SEQ ID NO: 1607387 - RNA, 19 nt, Homo sapiens
  misc_RNA (1)...(19): siRNA sense strand
gagggagcauguggagaaa

SEQ ID NO: 1607388 - RNA, 19 nt, Homo sapiens
  misc_RNA (1)...(19): siRNA sense strand
caagagcgcacugcaguug

SEQ ID NO: 1607389 - RNA, 19 nt, Homo sapiens
  misc_RNA (1)...(19): siRNA sense strand
gaagaaacaaguggaacau

SEQ ID NO: 1607390 - RNA, 19 nt, Homo sapiens
  misc_RNA (1)...(19): siRNA sense strand
caagcauggugaucuuugu

SEQ ID NO: 1607391 - RNA, 19 nt, Homo sapiens
  misc_RNA (1)...(19): siRNA sense strand
ggagcuagagggucaaauc

SEQ ID NO: 1607392 - RNA, 19 nt, Homo sapiens
  misc_RNA (1)...(19): siRNA sense strand
ugagggagcauguggagaa

SEQ ID NO: 1607393 - RNA, 19 nt, Homo sapiens
  misc_RNA (1)...(19): siRNA sense strand
gcaaacaaugagaaacaga

SEQ ID NO: 1607394 - RNA, 19 nt, Homo sapiens
  misc_RNA (1)...(19): siRNA sense strand
uguaucacaugaaacauuc

SEQ ID NO: 1607395 - RNA, 19 nt, Homo sapiens
  misc_RNA (1)...(19): siRNA sense strand
ggacacgugacacaguuga

SEQ ID NO: 1607396 - RNA, 19 nt, Homo sapiens
  misc_RNA (1)...(19): siRNA sense strand
ggagaaacuggaacuugga

SEQ ID NO: 1607397 - RNA, 19 nt, Homo sapiens
  misc_RNA (1)...(19): siRNA sense strand
aggagucgcuuaaagaagu

SEQ ID NO: 1607398 - RNA, 19 nt, Homo sapiens
  misc_RNA (1)...(19): siRNA sense strand
gcagcuccuuggugagaug

SEQ ID NO: 1607399 - RNA, 19 nt, Homo sapiens
  misc_RNA (1)...(19): siRNA sense strand
gggagcauguggagaaacu

SEQ ID NO: 1607400 - RNA, 19 nt, Homo sapiens
  misc_RNA (1)...(19): siRNA sense strand
cgcaggagguuugcacauu

SEQ ID NO: 1607401 - RNA, 19 nt, Homo sapiens
  misc_RNA (1)...(19): siRNA sense strand
aaagaaagcaaacaaugag

SEQ ID NO: 1607402 - RNA, 19 nt, Homo sapiens
  misc_RNA (1)...(19): siRNA sense strand
aaaguacaucgccuucuaa

SEQ ID NO: 1607403 - RNA, 19 nt, Homo sapiens
  misc_RNA (1)...(19): siRNA sense strand
gaaacagaaagcugaaagg

SEQ ID NO: 1607404 - RNA, 19 nt, Homo sapiens
  misc_RNA (1)...(19): siRNA sense strand
ccggaacccugcugcugaa

SEQ ID NO: 1607405 - RNA, 19 nt, Homo sapiens
  misc_RNA (1)...(19): siRNA sense strand
uacaucgccuucuaacaga

SEQ ID NO: 1607406 - RNA, 19 nt, Homo sapiens
  misc_RNA (1)...(19): siRNA sense strand
ucagagcccgugccaagaa

SEQ ID NO: 1607407 - RNA, 19 nt, Homo sapiens
  misc_RNA (1)...(19): siRNA sense strand
ugcaagaccugaggaagga

SEQ ID NO: 1607408 - RNA, 19 nt, Homo sapiens
  misc_RNA (1)...(19): siRNA sense strand
agaucaauaugcugaacaa

SEQ ID NO: 1607409 - RNA, 19 nt, Homo sapiens
  misc_RNA (1)...(19): siRNA sense strand
gcaguaaagcacuucucaa

SEQ ID NO: 1607410 - RNA, 19 nt, Homo sapiens
  misc_RNA (1)...(19): siRNA sense strand
ugaagaagaguccaaggau

SEQ ID NO: 1607411 - RNA, 19 nt, Homo sapiens
  misc_RNA (1)...(19): siRNA sense strand
cagauacuuugaagaagag

SEQ ID NO: 1607412 - RNA, 19 nt, Homo sapiens
  misc_RNA (1)...(19): siRNA sense strand
cguggagccugcacaagga

SEQ ID NO: 1607413 - RNA, 19 nt, Homo sapiens
  misc_RNA (1)...(19): siRNA sense strand
agaaagcaaacaaugagaa

SEQ ID NO: 1607414 - RNA, 19 nt, Homo sapiens
  misc_RNA (1)...(19): siRNA sense strand
aaggacacgugacacaguu

SEQ ID NO: 1607415 - RNA, 19 nt, Homo sapiens
  misc_RNA (1)...(19): siRNA sense strand
gcugaaaggacacgugaca

SEQ ID NO: 1607416 - RNA, 19 nt, Homo sapiens
  misc_RNA (1)...(19): siRNA sense strand
ugaaaggacacgugacaca

SEQ ID NO: 1607417 - RNA, 19 nt, Homo sapiens
  misc_RNA (1)...(19): siRNA sense strand
ugaaggaggagaagaagca

SEQ ID NO: 1607418 - RNA, 19 nt, Homo sapiens
  misc_RNA (1)...(19): siRNA sense strand
gagccgcaguaaagcacuu

SEQ ID NO: 1607419 - RNA, 19 nt, Homo sapiens
  misc_RNA (1)...(19): siRNA sense strand
gaaacaaguggaacaucag

SEQ ID NO: 1607420 - RNA, 19 nt, Homo sapiens
  misc_RNA (1)...(19): siRNA sense strand
caguaaagcacuucucaag

SEQ ID NO: 1607421 - RNA, 19 nt, Homo sapiens
  misc_RNA (1)...(19): siRNA sense strand
aagcaaacaaugagaaaca

SEQ ID NO: 1607422 - RNA, 19 nt, Homo sapiens
  misc_RNA (1)...(19): siRNA sense strand
gagaaacagaaagcugaaa

SEQ ID NO: 1607423 - RNA, 19 nt, Homo sapiens
  misc_RNA (1)...(19): siRNA sense strand
ugaacucgagguccauaaa

SEQ ID NO: 1607424 - RNA, 19 nt, Homo sapiens
  misc_RNA (1)...(19): siRNA sense strand
gcuggagagagaucaauau

SEQ ID NO: 1607425 - RNA, 19 nt, Homo sapiens
  misc_RNA (1)...(19): siRNA sense strand
cauugaaggaggagaagaa

SEQ ID NO: 1607426 - RNA, 19 nt, Homo sapiens
  misc_RNA (1)...(19): siRNA sense strand
aacauucucucagauacuu

SEQ ID NO: 1607427 - RNA, 19 nt, Homo sapiens
  misc_RNA (1)...(19): siRNA sense strand
gaacucgagguccauaaaa

SEQ ID NO: 1607428 - RNA, 19 nt, Homo sapiens
  misc_RNA (1)...(19): siRNA sense strand
gcagcguauaggagaguua

SEQ ID NO: 1607429 - RNA, 19 nt, Homo sapiens
  misc_RNA (1)...(19): siRNA sense strand
uugaaggagucgcuuaaag

SEQ ID NO: 1607430 - RNA, 19 nt, Homo sapiens
  misc_RNA (1)...(19): siRNA sense strand
gagucuagcggccuuaugg

SEQ ID NO: 1607431 - RNA, 19 nt, Homo sapiens
  misc_RNA (1)...(19): siRNA sense strand
gaaaaugucgcaggagguu

SEQ ID NO: 1607432 - RNA, 19 nt, Homo sapiens
  misc_RNA (1)...(19): siRNA sense strand
ggagucgcuuaaagaaguc

SEQ ID NO: 1607433 - RNA, 19 nt, Homo sapiens
  misc_RNA (1)...(19): siRNA sense strand
ucucucagauacuuugaag

SEQ ID NO: 1607434 - RNA, 19 nt, Homo sapiens
  misc_RNA (1)...(19): siRNA sense strand
guggagaaacuggaacuug

SEQ ID NO: 1607435 - RNA, 19 nt, Homo sapiens
  misc_RNA (1)...(19): siRNA sense strand
gcauguggagaaacuggaa

SEQ ID NO: 1607436 - RNA, 19 nt, Homo sapiens
  misc_RNA (1)...(19): siRNA sense strand
augacaccaucaaaucuuu

SEQ ID NO: 1607437 - RNA, 19 nt, Homo sapiens
  misc_RNA (1)...(19): siRNA sense strand
gaacaaauaaaaggagaga

SEQ ID NO: 1607438 - RNA, 19 nt, Homo sapiens
  misc_RNA (1)...(19): siRNA sense strand
gacaagcauggugaucuuu

SEQ ID NO: 1607439 - RNA, 19 nt, Homo sapiens
  misc_RNA (1)...(19): siRNA sense strand
gagaaacuggaacuuggau

SEQ ID NO: 1607440 - RNA, 19 nt, Homo sapiens
  misc_RNA (1)...(19): siRNA sense strand
aaaugucgcaggagguuug

SEQ ID NO: 1607441 - RNA, 19 nt, Homo sapiens
  misc_RNA (1)...(19): siRNA sense strand
aagcagcaguccugaacuc

SEQ ID NO: 1607442 - RNA, 19 nt, Homo sapiens
  misc_RNA (1)...(19): siRNA sense strand
agaagaaacaaguggaaca

SEQ ID NO: 1607443 - RNA, 19 nt, Homo sapiens
  misc_RNA (1)...(19): siRNA sense strand
agagcgcacugcaguugga

SEQ ID NO: 1607444 - RNA, 19 nt, Homo sapiens
  misc_RNA (1)...(19): siRNA sense strand
gaaaacaaucagugcauca

SEQ ID NO: 1607445 - RNA, 19 nt, Homo sapiens
  misc_RNA (1)...(19): siRNA sense strand
gaggaaggagcuggagaga

SEQ ID NO: 1607446 - RNA, 19 nt, Homo sapiens
  misc_RNA (1)...(19): siRNA sense strand
aggaggagaagaagcauga

SEQ ID NO: 1607447 - RNA, 19 nt, Homo sapiens
  misc_RNA (1)...(19): siRNA sense strand
aagaagaguccaaggaucu

SEQ ID NO: 1607448 - RNA, 19 nt, Homo sapiens
  misc_RNA (1)...(19): siRNA sense strand
gugcagcuccuuggugaga

SEQ ID NO: 1607449 - RNA, 19 nt, Homo sapiens
  misc_RNA (1)...(19): siRNA sense strand
uggaacaucagcuggaaga

SEQ ID NO: 1607450 - RNA, 19 nt, Homo sapiens
  misc_RNA (1)...(19): siRNA sense strand
gaucaauaugcugaacaaa

SEQ ID NO: 1607451 - RNA, 19 nt, Homo sapiens
  misc_RNA (1)...(19): siRNA sense strand
guccauacgggagcagaua

SEQ ID NO: 1607452 - RNA, 19 nt, Homo sapiens
  misc_RNA (1)...(19): siRNA sense strand
gagaucaauaugcugaaca

SEQ ID NO: 1607453 - RNA, 19 nt, Homo sapiens
  misc_RNA (1)...(19): siRNA sense strand
cacaugaaacauucucuca

SEQ ID NO: 1607454 - RNA, 19 nt, Homo sapiens
  misc_RNA (1)...(19): siRNA sense strand
aaacuggaacuuggauuca

SEQ ID NO: 1607455 - RNA, 19 nt, Homo sapiens
  misc_RNA (1)...(19): siRNA sense strand
cagcagaggaugaggaaaa

SEQ ID NO: 1607456 - RNA, 19 nt, Homo sapiens
  misc_RNA (1)...(19): siRNA sense strand
gcaaagacucgagcuauga

SEQ ID NO: 1607457 - RNA, 19 nt, Homo sapiens
  misc_RNA (1)...(19): siRNA sense strand
gcggagacuucaagaaaug

SEQ ID NO: 1607458 - RNA, 19 nt, Homo sapiens
  misc_RNA (1)...(19): siRNA sense strand
cagcggagacuucaagaaa

SEQ ID NO: 1607459 - RNA, 19 nt, Homo sapiens
  misc_RNA (1)...(19): siRNA sense strand
ucaguggacucaagaagug

SEQ ID NO: 1607460 - RNA, 19 nt, Homo sapiens
  misc_RNA (1)...(19): siRNA sense strand
agggcaagcuucaguauga

SEQ ID NO: 1607461 - RNA, 19 nt, Homo sapiens
  misc_RNA (1)...(19): siRNA sense strand
ccaggaguguggcagcuuu

SEQ ID NO: 1607462 - RNA, 19 nt, Homo sapiens
  misc_RNA (1)...(19): siRNA sense strand
ggagagggaucggccauac

SEQ ID NO: 1607463 - RNA, 19 nt, Homo sapiens
  misc_RNA (1)...(19): siRNA sense strand
ggcaagaccaguaugaaga

SEQ ID NO: 1607464 - RNA, 19 nt, Homo sapiens
  misc_RNA (1)...(19): siRNA sense strand
gcgcucagauuacgaagac

SEQ ID NO: 1607465 - RNA, 19 nt, Homo sapiens
  misc_RNA (1)...(19): siRNA sense strand
gcagcccuguggaguguga

SEQ ID NO: 1607466 - RNA, 19 nt, Homo sapiens
  misc_RNA (1)...(19): siRNA sense strand
ucucaggacaguauaauau

SEQ ID NO: 1607467 - RNA, 19 nt, Homo sapiens
  misc_RNA (1)...(19): siRNA sense strand
cuucauggccgacgacauu

SEQ ID NO: 1607468 - RNA, 19 nt, Homo sapiens
  misc_RNA (1)...(19): siRNA sense strand
cagcagcccuguggagugu

SEQ ID NO: 1607469 - RNA, 19 nt, Homo sapiens
  misc_RNA (1)...(19): siRNA sense strand
gauauggacacguuugaca

SEQ ID NO: 1607470 - RNA, 19 nt, Homo sapiens
  misc_RNA (1)...(19): siRNA sense strand
ggauguauuccacuucaug

SEQ ID NO: 1607471 - RNA, 19 nt, Homo sapiens
  misc_RNA (1)...(19): siRNA sense strand
aguaugagcugcaguacag

SEQ ID NO: 1607472 - RNA, 19 nt, Homo sapiens
  misc_RNA (1)...(19): siRNA sense strand
gaccuucucaggacaguau

SEQ ID NO: 1607473 - RNA, 19 nt, Homo sapiens
  misc_RNA (1)...(19): siRNA sense strand
cgcaaagacucgagcuaug

SEQ ID NO: 1607474 - RNA, 19 nt, Homo sapiens
  misc_RNA (1)...(19): siRNA sense strand
ccacaggucggcccacaau

SEQ ID NO: 1607475 - RNA, 19 nt, Homo sapiens
  misc_RNA (1)...(19): siRNA sense strand
gaucucaguggacucaaga

SEQ ID NO: 1607476 - RNA, 19 nt, Homo sapiens
  misc_RNA (1)...(19): siRNA sense strand
ucuccuggcgcucagauua

SEQ ID NO: 1607477 - RNA, 19 nt, Homo sapiens
  misc_RNA (1)...(19): siRNA sense strand
gcaagaccaguaugaagag

SEQ ID NO: 1607478 - RNA, 19 nt, Homo sapiens
  misc_RNA (1)...(19): siRNA sense strand
ccugaagacccauccauug

SEQ ID NO: 1607479 - RNA, 19 nt, Homo sapiens
  misc_RNA (1)...(19): siRNA sense strand
ucaggacaguauaauaucu

SEQ ID NO: 1607480 - RNA, 19 nt, Homo sapiens
  misc_RNA (1)...(19): siRNA sense strand
ggucauuccuccgccacuu

SEQ ID NO: 1607481 - RNA, 19 nt, Homo sapiens
  misc_RNA (1)...(19): siRNA sense strand
ccagcacgcucacccuuac

SEQ ID NO: 1607482 - RNA, 19 nt, Homo sapiens
  misc_RNA (1)...(19): siRNA sense strand
gccuggauauggacacguu

SEQ ID NO: 1607483 - RNA, 19 nt, Homo sapiens
  misc_RNA (1)...(19): siRNA sense strand
uggaggcuauggaagaaga

SEQ ID NO: 1607484 - RNA, 19 nt, Homo sapiens
  misc_RNA (1)...(19): siRNA sense strand
gcugugaguccgaggagaa

SEQ ID NO: 1607485 - RNA, 19 nt, Homo sapiens
  misc_RNA (1)...(19): siRNA sense strand
gacccagucagaggaguua

SEQ ID NO: 1607486 - RNA, 19 nt, Homo sapiens
  misc_RNA (1)...(19): siRNA sense strand
ggucaucugcauccuggaa

SEQ ID NO: 1607487 - RNA, 19 nt, Homo sapiens
  misc_RNA (1)...(19): siRNA sense strand
gcagcggagacuucaagaa

SEQ ID NO: 1607488 - RNA, 19 nt, Homo sapiens
  misc_RNA (1)...(19): siRNA sense strand
agucagaggaguuaaagga

SEQ ID NO: 1607489 - RNA, 19 nt, Homo sapiens
  misc_RNA (1)...(19): siRNA sense strand
ccgcaaagacucgagcuau

SEQ ID NO: 1607490 - RNA, 19 nt, Homo sapiens
  misc_RNA (1)...(19): siRNA sense strand
uguggaggcuauggaagaa

SEQ ID NO: 1607491 - RNA, 19 nt, Homo sapiens
  misc_RNA (1)...(19): siRNA sense strand
ugaagacccauccauugug

SEQ ID NO: 1607492 - RNA, 19 nt, Homo sapiens
  misc_RNA (1)...(19): siRNA sense strand
gaagccuccuggacagacu

SEQ ID NO: 1607493 - RNA, 19 nt, Homo sapiens
  misc_RNA (1)...(19): siRNA sense strand
cauacggccugguguccau

SEQ ID NO: 1607494 - RNA, 19 nt, Homo sapiens
  misc_RNA (1)...(19): siRNA sense strand
cugaagacccauccauugu

SEQ ID NO: 1607495 - RNA, 19 nt, Homo sapiens
  misc_RNA (1)...(19): siRNA sense strand
gccugaagacccauccauu

SEQ ID NO: 1607496 - RNA, 19 nt, Homo sapiens
  misc_RNA (1)...(19): siRNA sense strand
gcccugagcgguucuucau

SEQ ID NO: 1607497 - RNA, 19 nt, Homo sapiens
  misc_RNA (1)...(19): siRNA sense strand
gaggcuauggaagaagaua

SEQ ID NO: 1607498 - RNA, 19 nt, Homo sapiens
  misc_RNA (1)...(19): siRNA sense strand
caccuacaccugccacaug

SEQ ID NO: 1607499 - RNA, 19 nt, Homo sapiens
  misc_RNA (1)...(19): siRNA sense strand
caaagacucgagcuaugag

SEQ ID NO: 1607500 - RNA, 19 nt, Homo sapiens
  misc_RNA (1)...(19): siRNA sense strand
ucaucugcauccuggaaau

SEQ ID NO: 1607501 - RNA, 19 nt, Homo sapiens
  misc_RNA (1)...(19): siRNA sense strand
gcaaagacucgagcuauga

SEQ ID NO: 1607502 - RNA, 19 nt, Homo sapiens
  misc_RNA (1)...(19): siRNA sense strand
gcggagacuucaagaaaug

SEQ ID NO: 1607503 - RNA, 19 nt, Homo sapiens
  misc_RNA (1)...(19): siRNA sense strand
cagcggagacuucaagaaa

SEQ ID NO: 1607504 - RNA, 19 nt, Homo sapiens
  misc_RNA (1)...(19): siRNA sense strand
ucaguggacucaagaagug

SEQ ID NO: 1607505 - RNA, 19 nt, Homo sapiens
  misc_RNA (1)...(19): siRNA sense strand
agggcaagcuucaguauga

SEQ ID NO: 1607506 - RNA, 19 nt, Homo sapiens
  misc_RNA (1)...(19): siRNA sense strand
ccaggaguguggcagcuuu

SEQ ID NO: 1607507 - RNA, 19 nt, Homo sapiens
  misc_RNA (1)...(19): siRNA sense strand
ggagagggaucggccauac

SEQ ID NO: 1607508 - RNA, 19 nt, Homo sapiens
  misc_RNA (1)...(19): siRNA sense strand
ggcaagaccaguaugaaga

SEQ ID NO: 1607509 - RNA, 19 nt, Homo sapiens
  misc_RNA (1)...(19): siRNA sense strand
gcgcucagauuacgaagac

SEQ ID NO: 1607510 - RNA, 19 nt, Homo sapiens
  misc_RNA (1)...(19): siRNA sense strand
gcagcccuguggaguguga

SEQ ID NO: 1607511 - RNA, 19 nt, Homo sapiens
  misc_RNA (1)...(19): siRNA sense strand
ucucaggacaguauaauau

SEQ ID NO: 1607512 - RNA, 19 nt, Homo sapiens
  misc_RNA (1)...(19): siRNA sense strand
cuucauggccgacgacauu

SEQ ID NO: 1607513 - RNA, 19 nt, Homo sapiens
  misc_RNA (1)...(19): siRNA sense strand
cagcagcccuguggagugu

SEQ ID NO: 1607514 - RNA, 19 nt, Homo sapiens
  misc_RNA (1)...(19): siRNA sense strand
gauauggacacguuugaca

SEQ ID NO: 1607515 - RNA, 19 nt, Homo sapiens
  misc_RNA (1)...(19): siRNA sense strand
ggauguauuccacuucaug

SEQ ID NO: 1607516 - RNA, 19 nt, Homo sapiens
  misc_RNA (1)...(19): siRNA sense strand
aguaugagcugcaguacag

SEQ ID NO: 1607517 - RNA, 19 nt, Homo sapiens
  misc_RNA (1)...(19): siRNA sense strand
gaccuucucaggacaguau

SEQ ID NO: 1607518 - RNA, 19 nt, Homo sapiens
  misc_RNA (1)...(19): siRNA sense strand
cgcaaagacucgagcuaug

SEQ ID NO: 1607519 - RNA, 19 nt, Homo sapiens
  misc_RNA (1)...(19): siRNA sense strand
ccacaggucggcccacaau

SEQ ID NO: 1607520 - RNA, 19 nt, Homo sapiens
  misc_RNA (1)...(19): siRNA sense strand
gaucucaguggacucaaga

SEQ ID NO: 1607521 - RNA, 19 nt, Homo sapiens
  misc_RNA (1)...(19): siRNA sense strand
ucuccuggcgcucagauua

SEQ ID NO: 1607522 - RNA, 19 nt, Homo sapiens
  misc_RNA (1)...(19): siRNA sense strand
gcaagaccaguaugaagag

SEQ ID NO: 1607523 - RNA, 19 nt, Homo sapiens
  misc_RNA (1)...(19): siRNA sense strand
ccugaagacccauccauug

SEQ ID NO: 1607524 - RNA, 19 nt, Homo sapiens
  misc_RNA (1)...(19): siRNA sense strand
ucaggacaguauaauaucu

SEQ ID NO: 1607525 - RNA, 19 nt, Homo sapiens
  misc_RNA (1)...(19): siRNA sense strand
ggucauuccuccgccacuu

SEQ ID NO: 1607526 - RNA, 19 nt, Homo sapiens
  misc_RNA (1)...(19): siRNA sense strand
ccagcacgcucacccuuac

SEQ ID NO: 1607527 - RNA, 19 nt, Homo sapiens
  misc_RNA (1)...(19): siRNA sense strand
gccuggauauggacacguu

SEQ ID NO: 1607528 - RNA, 19 nt, Homo sapiens
  misc_RNA (1)...(19): siRNA sense strand
uggaggcuauggaagaaga

SEQ ID NO: 1607529 - RNA, 19 nt, Homo sapiens
  misc_RNA (1)...(19): siRNA sense strand
gcugugaguccgaggagaa

SEQ ID NO: 1607530 - RNA, 19 nt, Homo sapiens
  misc_RNA (1)...(19): siRNA sense strand
gacccagucagaggaguua

SEQ ID NO: 1607531 - RNA, 19 nt, Homo sapiens
  misc_RNA (1)...(19): siRNA sense strand
ggucaucugcauccuggaa

SEQ ID NO: 1607532 - RNA, 19 nt, Homo sapiens
  misc_RNA (1)...(19): siRNA sense strand
gcagcggagacuucaagaa

SEQ ID NO: 1607533 - RNA, 19 nt, Homo sapiens
  misc_RNA (1)...(19): siRNA sense strand
agucagaggaguuaaagga

SEQ ID NO: 1607534 - RNA, 19 nt, Homo sapiens
  misc_RNA (1)...(19): siRNA sense strand
ccgcaaagacucgagcuau

SEQ ID NO: 1607535 - RNA, 19 nt, Homo sapiens
  misc_RNA (1)...(19): siRNA sense strand
uguggaggcuauggaagaa

SEQ ID NO: 1607536 - RNA, 19 nt, Homo sapiens
  misc_RNA (1)...(19): siRNA sense strand
ugaagacccauccauugug

SEQ ID NO: 1607537 - RNA, 19 nt, Homo sapiens
  misc_RNA (1)...(19): siRNA sense strand
gaagccuccuggacagacu

SEQ ID NO: 1607538 - RNA, 19 nt, Homo sapiens
  misc_RNA (1)...(19): siRNA sense strand
cauacggccugguguccau

SEQ ID NO: 1607539 - RNA, 19 nt, Homo sapiens
  misc_RNA (1)...(19): siRNA sense strand
cugaagacccauccauugu

SEQ ID NO: 1607540 - RNA, 19 nt, Homo sapiens
  misc_RNA (1)...(19): siRNA sense strand
gccugaagacccauccauu

SEQ ID NO: 1607541 - RNA, 19 nt, Homo sapiens
  misc_RNA (1)...(19): siRNA sense strand
gcccugagcgguucuucau

SEQ ID NO: 1607542 - RNA, 19 nt, Homo sapiens
  misc_RNA (1)...(19): siRNA sense strand
gaggcuauggaagaagaua

SEQ ID NO: 1607543 - RNA, 19 nt, Homo sapiens
  misc_RNA (1)...(19): siRNA sense strand
caccuacaccugccacaug

SEQ ID NO: 1607544 - RNA, 19 nt, Homo sapiens
  misc_RNA (1)...(19): siRNA sense strand
caaagacucgagcuaugag

SEQ ID NO: 1607545 - RNA, 19 nt, Homo sapiens
  misc_RNA (1)...(19): siRNA sense strand
ucaucugcauccuggaaau

SEQ ID NO: 1607546 - RNA, 19 nt, Homo sapiens
  misc_RNA (1)...(19): siRNA sense strand
gcaaagacucgagcuauga

SEQ ID NO: 1607547 - RNA, 19 nt, Homo sapiens
  misc_RNA (1)...(19): siRNA sense strand
gcggagacuucaagaaaug

SEQ ID NO: 1607548 - RNA, 19 nt, Homo sapiens
  misc_RNA (1)...(19): siRNA sense strand
cagcggagacuucaagaaa

SEQ ID NO: 1607549 - RNA, 19 nt, Homo sapiens
  misc_RNA (1)...(19): siRNA sense strand
ucaguggacucaagaagug

SEQ ID NO: 1607550 - RNA, 19 nt, Homo sapiens
  misc_RNA (1)...(19): siRNA sense strand
agggcaagcuucaguauga

SEQ ID NO: 1607551 - RNA, 19 nt, Homo sapiens
  misc_RNA (1)...(19): siRNA sense strand
ccaggaguguggcagcuuu

SEQ ID NO: 1607552 - RNA, 19 nt, Homo sapiens
  misc_RNA (1)...(19): siRNA sense strand
ggagagggaucggccauac

SEQ ID NO: 1607553 - RNA, 19 nt, Homo sapiens
  misc_RNA (1)...(19): siRNA sense strand
ggcaagaccaguaugaaga

SEQ ID NO: 1607554 - RNA, 19 nt, Homo sapiens
  misc_RNA (1)...(19): siRNA sense strand
gcgcucagauuacgaagac

SEQ ID NO: 1607555 - RNA, 19 nt, Homo sapiens
  misc_RNA (1)...(19): siRNA sense strand
gcagcccuguggaguguga

SEQ ID NO: 1607556 - RNA, 19 nt, Homo sapiens
  misc_RNA (1)...(19): siRNA sense strand
ucucaggacaguauaauau

SEQ ID NO: 1607557 - RNA, 19 nt, Homo sapiens
  misc_RNA (1)...(19): siRNA sense strand
cuucauggccgacgacauu

SEQ ID NO: 1607558 - RNA, 19 nt, Homo sapiens
  misc_RNA (1)...(19): siRNA sense strand
cagcagcccuguggagugu

SEQ ID NO: 1607559 - RNA, 19 nt, Homo sapiens
  misc_RNA (1)...(19): siRNA sense strand
gauauggacacguuugaca

SEQ ID NO: 1607560 - RNA, 19 nt, Homo sapiens
  misc_RNA (1)...(19): siRNA sense strand
ggauguauuccacuucaug

SEQ ID NO: 1607561 - RNA, 19 nt, Homo sapiens
  misc_RNA (1)...(19): siRNA sense strand
aguaugagcugcaguacag

SEQ ID NO: 1607562 - RNA, 19 nt, Homo sapiens
  misc_RNA (1)...(19): siRNA sense strand
gaccuucucaggacaguau

SEQ ID NO: 1607563 - RNA, 19 nt, Homo sapiens
  misc_RNA (1)...(19): siRNA sense strand
cgcaaagacucgagcuaug

SEQ ID NO: 1607564 - RNA, 19 nt, Homo sapiens
  misc_RNA (1)...(19): siRNA sense strand
ccacaggucggcccacaau

SEQ ID NO: 1607565 - RNA, 19 nt, Homo sapiens
  misc_RNA (1)...(19): siRNA sense strand
gaucucaguggacucaaga

SEQ ID NO: 1607566 - RNA, 19 nt, Homo sapiens
  misc_RNA (1)...(19): siRNA sense strand
ucuccuggcgcucagauua

SEQ ID NO: 1607567 - RNA, 19 nt, Homo sapiens
  misc_RNA (1)...(19): siRNA sense strand
gcaagaccaguaugaagag

SEQ ID NO: 1607568 - RNA, 19 nt, Homo sapiens
  misc_RNA (1)...(19): siRNA sense strand
ccugaagacccauccauug

SEQ ID NO: 1607569 - RNA, 19 nt, Homo sapiens
  misc_RNA (1)...(19): siRNA sense strand
ucaggacaguauaauaucu

SEQ ID NO: 1607570 - RNA, 19 nt, Homo sapiens
  misc_RNA (1)...(19): siRNA sense strand
ggucauuccuccgccacuu

SEQ ID NO: 1607571 - RNA, 19 nt, Homo sapiens
  misc_RNA (1)...(19): siRNA sense strand
ccagcacgcucacccuuac

SEQ ID NO: 1607572 - RNA, 19 nt, Homo sapiens
  misc_RNA (1)...(19): siRNA sense strand
gccuggauauggacacguu

SEQ ID NO: 1607573 - RNA, 19 nt, Homo sapiens
  misc_RNA (1)...(19): siRNA sense strand
uggaggcuauggaagaaga

SEQ ID NO: 1607574 - RNA, 19 nt, Homo sapiens
  misc_RNA (1)...(19): siRNA sense strand
gcugugaguccgaggagaa

SEQ ID NO: 1607575 - RNA, 19 nt, Homo sapiens
  misc_RNA (1)...(19): siRNA sense strand
gacccagucagaggaguua

SEQ ID NO: 1607576 - RNA, 19 nt, Homo sapiens
  misc_RNA (1)...(19): siRNA sense strand
ggucaucugcauccuggaa

SEQ ID NO: 1607577 - RNA, 19 nt, Homo sapiens
  misc_RNA (1)...(19): siRNA sense strand
gcagcggagacuucaagaa

SEQ ID NO: 1607578 - RNA, 19 nt, Homo sapiens
  misc_RNA (1)...(19): siRNA sense strand
agucagaggaguuaaagga

SEQ ID NO: 1607579 - RNA, 19 nt, Homo sapiens
  misc_RNA (1)...(19): siRNA sense strand
ccgcaaagacucgagcuau

SEQ ID NO: 1607580 - RNA, 19 nt, Homo sapiens
  misc_RNA (1)...(19): siRNA sense strand
uguggaggcuauggaagaa

SEQ ID NO: 1607581 - RNA, 19 nt, Homo sapiens
  misc_RNA (1)...(19): siRNA sense strand
ugaagacccauccauugug

SEQ ID NO: 1607582 - RNA, 19 nt, Homo sapiens
  misc_RNA (1)...(19): siRNA sense strand
gaagccuccuggacagacu

SEQ ID NO: 1607583 - RNA, 19 nt, Homo sapiens
  misc_RNA (1)...(19): siRNA sense strand
cauacggccugguguccau

SEQ ID NO: 1607584 - RNA, 19 nt, Homo sapiens
  misc_RNA (1)...(19): siRNA sense strand
cugaagacccauccauugu

SEQ ID NO: 1607585 - RNA, 19 nt, Homo sapiens
  misc_RNA (1)...(19): siRNA sense strand
gccugaagacccauccauu

SEQ ID NO: 1607586 - RNA, 19 nt, Homo sapiens
  misc_RNA (1)...(19): siRNA sense strand
gcccugagcgguucuucau

SEQ ID NO: 1607587 - RNA, 19 nt, Homo sapiens
  misc_RNA (1)...(19): siRNA sense strand
gaggcuauggaagaagaua

SEQ ID NO: 1607588 - RNA, 19 nt, Homo sapiens
  misc_RNA (1)...(19): siRNA sense strand
caccuacaccugccacaug

SEQ ID NO: 1607589 - RNA, 19 nt, Homo sapiens
  misc_RNA (1)...(19): siRNA sense strand
caaagacucgagcuaugag

SEQ ID NO: 1607590 - RNA, 19 nt, Homo sapiens
  misc_RNA (1)...(19): siRNA sense strand
ucaucugcauccuggaaau

SEQ ID NO: 1607591 - RNA, 19 nt, Homo sapiens
  misc_RNA (1)...(19): siRNA sense strand
gcaaauccauggugaaaua

SEQ ID NO: 1607592 - RNA, 19 nt, Homo sapiens
  misc_RNA (1)...(19): siRNA sense strand
gcaaagaaguccuggauga

SEQ ID NO: 1607593 - RNA, 19 nt, Homo sapiens
  misc_RNA (1)...(19): siRNA sense strand
gaaagaaguuccuaacaga

SEQ ID NO: 1607594 - RNA, 19 nt, Homo sapiens
  misc_RNA (1)...(19): siRNA sense strand
caacaaaccucuugagaau

SEQ ID NO: 1607595 - RNA, 19 nt, Homo sapiens
  misc_RNA (1)...(19): siRNA sense strand
gauaauagcccacagcaua

SEQ ID NO: 1607596 - RNA, 19 nt, Homo sapiens
  misc_RNA (1)...(19): siRNA sense strand
caacagauccagucaauuu

SEQ ID NO: 1607597 - RNA, 19 nt, Homo sapiens
  misc_RNA (1)...(19): siRNA sense strand
gaagagauuuccauucaga

SEQ ID NO: 1607598 - RNA, 19 nt, Homo sapiens
  misc_RNA (1)...(19): siRNA sense strand
gaagacauauaccuggaua

SEQ ID NO: 1607599 - RNA, 19 nt, Homo sapiens
  misc_RNA (1)...(19): siRNA sense strand
gcagacacauuaugacauu

SEQ ID NO: 1607600 - RNA, 19 nt, Homo sapiens
  misc_RNA (1)...(19): siRNA sense strand
gguacagccuauauaauua

SEQ ID NO: 1607601 - RNA, 19 nt, Homo sapiens
  misc_RNA (1)...(19): siRNA sense strand
gaagaaguuuccagaaguu

SEQ ID NO: 1607602 - RNA, 19 nt, Homo sapiens
  misc_RNA (1)...(19): siRNA sense strand
gaagaaaccaugucuaugu

SEQ ID NO: 1607603 - RNA, 19 nt, Homo sapiens
  misc_RNA (1)...(19): siRNA sense strand
uaauagagcuccucagaau

SEQ ID NO: 1607604 - RNA, 19 nt, Homo sapiens
  misc_RNA (1)...(19): siRNA sense strand
ggaaacuacuucaaauaug

SEQ ID NO: 1607605 - RNA, 19 nt, Homo sapiens
  misc_RNA (1)...(19): siRNA sense strand
ggaaucacguuuagguauu

SEQ ID NO: 1607606 - RNA, 19 nt, Homo sapiens
  misc_RNA (1)...(19): siRNA sense strand
gaacuagugcaauuacaua

SEQ ID NO: 1607607 - RNA, 19 nt, Homo sapiens
  misc_RNA (1)...(19): siRNA sense strand
gaaacuacuucaaauaugg

SEQ ID NO: 1607608 - RNA, 19 nt, Homo sapiens
  misc_RNA (1)...(19): siRNA sense strand
gcagaaagcuccguaaagg

SEQ ID NO: 1607609 - RNA, 19 nt, Homo sapiens
  misc_RNA (1)...(19): siRNA sense strand
caagagaaauccaggguau

SEQ ID NO: 1607610 - RNA, 19 nt, Homo sapiens
  misc_RNA (1)...(19): siRNA sense strand
ugaaauauguacugacuug

SEQ ID NO: 1607611 - RNA, 19 nt, Homo sapiens
  misc_RNA (1)...(19): siRNA sense strand
ugaaguaccuagucagauu

SEQ ID NO: 1607612 - RNA, 19 nt, Homo sapiens
  misc_RNA (1)...(19): siRNA sense strand
ggaauguucuggaaaguca

SEQ ID NO: 1607613 - RNA, 19 nt, Homo sapiens
  misc_RNA (1)...(19): siRNA sense strand
caagagagaauaagacaaa

SEQ ID NO: 1607614 - RNA, 19 nt, Homo sapiens
  misc_RNA (1)...(19): siRNA sense strand
gaaagcuacuacagaagaa

SEQ ID NO: 1607615 - RNA, 19 nt, Homo sapiens
  misc_RNA (1)...(19): siRNA sense strand
acaaaccucuugagaauau

SEQ ID NO: 1607616 - RNA, 19 nt, Homo sapiens
  misc_RNA (1)...(19): siRNA sense strand
gaccaguucuccuuuaaga

SEQ ID NO: 1607617 - RNA, 19 nt, Homo sapiens
  misc_RNA (1)...(19): siRNA sense strand
gauuggagcuaguaacaga

SEQ ID NO: 1607618 - RNA, 19 nt, Homo sapiens
  misc_RNA (1)...(19): siRNA sense strand
gaggaaacuacuucaaaua

SEQ ID NO: 1607619 - RNA, 19 nt, Homo sapiens
  misc_RNA (1)...(19): siRNA sense strand
gcaugaaaaugaaggauua

SEQ ID NO: 1607620 - RNA, 19 nt, Homo sapiens
  misc_RNA (1)...(19): siRNA sense strand
gugaugaacuagugcaauu

SEQ ID NO: 1607621 - RNA, 19 nt, Homo sapiens
  misc_RNA (1)...(19): siRNA sense strand
gaaucacguuuagguauuu

SEQ ID NO: 1607622 - RNA, 19 nt, Homo sapiens
  misc_RNA (1)...(19): siRNA sense strand
gaucauggcauuacugaga

SEQ ID NO: 1607623 - RNA, 19 nt, Homo sapiens
  misc_RNA (1)...(19): siRNA sense strand
ggacaaggaagauuuggaa

SEQ ID NO: 1607624 - RNA, 19 nt, Homo sapiens
  misc_RNA (1)...(19): siRNA sense strand
ugucuaccauuaugacuua

SEQ ID NO: 1607625 - RNA, 19 nt, Homo sapiens
  misc_RNA (1)...(19): siRNA sense strand
uaacaucuguggaagaauc

SEQ ID NO: 1607626 - RNA, 19 nt, Homo sapiens
  misc_RNA (1)...(19): siRNA sense strand
gauaauacgaggaguuuga

SEQ ID NO: 1607627 - RNA, 19 nt, Homo sapiens
  misc_RNA (1)...(19): siRNA sense strand
cagcagaugugucucauuc

SEQ ID NO: 1607628 - RNA, 19 nt, Homo sapiens
  misc_RNA (1)...(19): siRNA sense strand
gaaguaccuagucagauua

SEQ ID NO: 1607629 - RNA, 19 nt, Homo sapiens
  misc_RNA (1)...(19): siRNA sense strand
ccaaauacagaaagcaaua

SEQ ID NO: 1607630 - RNA, 19 nt, Homo sapiens
  misc_RNA (1)...(19): siRNA sense strand
uaacagagcauaucaaagg

SEQ ID NO: 1607631 - RNA, 19 nt, Homo sapiens
  misc_RNA (1)...(19): siRNA sense strand
caaagaaucaacagaagaa

SEQ ID NO: 1607632 - RNA, 19 nt, Homo sapiens
  misc_RNA (1)...(19): siRNA sense strand
ggaacaugaugaacauaau

SEQ ID NO: 1607633 - RNA, 19 nt, Homo sapiens
  misc_RNA (1)...(19): siRNA sense strand
caacaacuccaaauacaga

SEQ ID NO: 1607634 - RNA, 19 nt, Homo sapiens
  misc_RNA (1)...(19): siRNA sense strand
gaagaagcaaggcaugaaa

SEQ ID NO: 1607635 - RNA, 19 nt, Homo sapiens
  misc_RNA (1)...(19): siRNA sense strand
ggaagaagcuguguuaacc

SEQ ID NO: 1607636 - RNA, 19 nt, Homo sapiens
  misc_RNA (1)...(19): siRNA sense strand
aagaaguccuggaugauaa

SEQ ID NO: 1607637 - RNA, 19 nt, Homo sapiens
  misc_RNA (1)...(19): siRNA sense strand
cuacuagucuuccuguuga

SEQ ID NO: 1607638 - RNA, 19 nt, Homo sapiens
  misc_RNA (1)...(19): siRNA sense strand
uauaacaucuguggaagaa

SEQ ID NO: 1607639 - RNA, 19 nt, Homo sapiens
  misc_RNA (1)...(19): siRNA sense strand
gaaaccaugucuauguaca

SEQ ID NO: 1607640 - RNA, 19 nt, Homo sapiens
  misc_RNA (1)...(19): siRNA sense strand
aagaaaccaugucuaugua

SEQ ID NO: 1607641 - RNA, 19 nt, Homo sapiens
  misc_RNA (1)...(19): siRNA sense strand
caaguuuguucaucaagaa

SEQ ID NO: 1607642 - RNA, 19 nt, Homo sapiens
  misc_RNA (1)...(19): siRNA sense strand
gagaugaaaggaauacauu

SEQ ID NO: 1607643 - RNA, 19 nt, Homo sapiens
  misc_RNA (1)...(19): siRNA sense strand
gaaauuucagugucaacua

SEQ ID NO: 1607644 - RNA, 19 nt, Homo sapiens
  misc_RNA (1)...(19): siRNA sense strand
gaaaaggaaucacguuuag

SEQ ID NO: 1607645 - RNA, 19 nt, Homo sapiens
  misc_RNA (1)...(19): siRNA sense strand
gauuugggauguuuacgaa

SEQ ID NO: 1607646 - RNA, 19 nt, Homo sapiens
  misc_RNA (1)...(19): siRNA sense strand
caaagaauacagauaccua

SEQ ID NO: 1607647 - RNA, 19 nt, Homo sapiens
  misc_RNA (1)...(19): siRNA sense strand
ggcaauugcuguagagaau

SEQ ID NO: 1607648 - RNA, 19 nt, Homo sapiens
  misc_RNA (1)...(19): siRNA sense strand
uaauguacguguagaugaa

SEQ ID NO: 1607649 - RNA, 19 nt, Homo sapiens
  misc_RNA (1)...(19): siRNA sense strand
gagaaaugaugauucacau

SEQ ID NO: 1607650 - RNA, 19 nt, Homo sapiens
  misc_RNA (1)...(19): siRNA sense strand
caggugggauuaauucuga

SEQ ID NO: 1607651 - RNA, 19 nt, Homo sapiens
  misc_RNA (1)...(19): siRNA sense strand
ggaagauuauuauggcaau

SEQ ID NO: 1607652 - RNA, 19 nt, Homo sapiens
  misc_RNA (1)...(19): siRNA sense strand
gcaggaaaccuuaauaaaa

SEQ ID NO: 1607653 - RNA, 19 nt, Homo sapiens
  misc_RNA (1)...(19): siRNA sense strand
ggaauagugacaucaggua

SEQ ID NO: 1607654 - RNA, 19 nt, Homo sapiens
  misc_RNA (1)...(19): siRNA sense strand
gagauaauacgaggaguuu

SEQ ID NO: 1607655 - RNA, 19 nt, Homo sapiens
  misc_RNA (1)...(19): siRNA sense strand
cuacaaguaucaaggguau

SEQ ID NO: 1607656 - RNA, 19 nt, Homo sapiens
  misc_RNA (1)...(19): siRNA sense strand
ccucaugggucauuacaga

SEQ ID NO: 1607657 - RNA, 19 nt, Homo sapiens
  misc_RNA (1)...(19): siRNA sense strand
uagaugaaauggagaagga

SEQ ID NO: 1607658 - RNA, 19 nt, Homo sapiens
  misc_RNA (1)...(19): siRNA sense strand
acgaagagauuuccauuca

SEQ ID NO: 1607659 - RNA, 19 nt, Homo sapiens
  misc_RNA (1)...(19): siRNA sense strand
gaacaugaugaacauaaug

SEQ ID NO: 1607660 - RNA, 19 nt, Homo sapiens
  misc_RNA (1)...(19): siRNA sense strand
aaagauggcaguaaaguug

SEQ ID NO: 1607661 - RNA, 19 nt, Homo sapiens
  misc_RNA (1)...(19): siRNA sense strand
gcaguaaaguugaguuuug

SEQ ID NO: 1607662 - RNA, 19 nt, Homo sapiens
  misc_RNA (1)...(19): siRNA sense strand
ggcaaucacuauacacuuc

SEQ ID NO: 1607663 - RNA, 19 nt, Homo sapiens
  misc_RNA (1)...(19): siRNA sense strand
ugaagaaguuuccagaagu

SEQ ID NO: 1607664 - RNA, 19 nt, Homo sapiens
  misc_RNA (1)...(19): siRNA sense strand
gucuaaaccugaagaaguu

SEQ ID NO: 1607665 - RNA, 19 nt, Homo sapiens
  misc_RNA (1)...(19): siRNA sense strand
uaagcuaccucaagagaca

SEQ ID NO: 1607666 - RNA, 19 nt, Homo sapiens
  misc_RNA (1)...(19): siRNA sense strand
uaaggaugaugaagaacaa

SEQ ID NO: 1607667 - RNA, 19 nt, Homo sapiens
  misc_RNA (1)...(19): siRNA sense strand
aaaggcugcuuaaagguaa

SEQ ID NO: 1607668 - RNA, 19 nt, Homo sapiens
  misc_RNA (1)...(19): siRNA sense strand
guuccuaacagacaaauaa

SEQ ID NO: 1607669 - RNA, 19 nt, Homo sapiens
  misc_RNA (1)...(19): siRNA sense strand
guauugagaagcacccuua

SEQ ID NO: 1607670 - RNA, 19 nt, Homo sapiens
  misc_RNA (1)...(19): siRNA sense strand
gcugugaacugucuucucu

SEQ ID NO: 1607671 - RNA, 19 nt, Homo sapiens
  misc_RNA (1)...(19): siRNA sense strand
gcaaugguaaggaugauga

SEQ ID NO: 1607672 - RNA, 19 nt, Homo sapiens
  misc_RNA (1)...(19): siRNA sense strand
guacugacuuguuccaaag

SEQ ID NO: 1607673 - RNA, 19 nt, Homo sapiens
  misc_RNA (1)...(19): siRNA sense strand
ucaguaacaucagaagaaa

SEQ ID NO: 1607674 - RNA, 19 nt, Homo sapiens
  misc_RNA (1)...(19): siRNA sense strand
gaaaucaagccaucauugg

SEQ ID NO: 1607675 - RNA, 19 nt, Homo sapiens
  misc_RNA (1)...(19): siRNA sense strand
gggaacaugaugaacauaa

SEQ ID NO: 1607676 - RNA, 19 nt, Homo sapiens
  misc_RNA (1)...(19): siRNA sense strand
ccaguucuccuuuaagauu

SEQ ID NO: 1607677 - RNA, 19 nt, Homo sapiens
  misc_RNA (1)...(19): siRNA sense strand
ccaaacaucauacugaaau

SEQ ID NO: 1607678 - RNA, 19 nt, Homo sapiens
  misc_RNA (1)...(19): siRNA sense strand
cauaacagagcauaucaaa

SEQ ID NO: 1607679 - RNA, 19 nt, Homo sapiens
  misc_RNA (1)...(19): siRNA sense strand
ucaccaaggacaaauuuaa

SEQ ID NO: 1607680 - RNA, 19 nt, Homo sapiens
  misc_RNA (1)...(19): siRNA sense strand
aaagaaguccuggaugaua

SEQ ID NO: 1607681 - RNA, 19 nt, Homo sapiens
  misc_RNA (1)...(19): siRNA sense strand
aaacuucuguugguacauu

SEQ ID NO: 1607682 - RNA, 19 nt, Homo sapiens
  misc_RNA (1)...(19): siRNA sense strand
acaaguaucaaggguauua

SEQ ID NO: 1607683 - RNA, 19 nt, Homo sapiens
  misc_RNA (1)...(19): siRNA sense strand
ggagaaaugaugauucaca

SEQ ID NO: 1607684 - RNA, 19 nt, Homo sapiens
  misc_RNA (1)...(19): siRNA sense strand
gagcauaucaaaggacaaa

SEQ ID NO: 1607685 - RNA, 19 nt, Homo sapiens
  misc_RNA (1)...(19): siRNA sense strand
ggucaaguuuguucaucaa

SEQ ID NO: 1607686 - RNA, 19 nt, Homo sapiens
  misc_RNA (1)...(19): siRNA sense strand
caucaucauuugacuagug

SEQ ID NO: 1607687 - RNA, 19 nt, Homo sapiens
  misc_RNA (1)...(19): siRNA sense strand
gagcgaacauaccgcaauc

SEQ ID NO: 1607688 - RNA, 19 nt, Homo sapiens
  misc_RNA (1)...(19): siRNA sense strand
agaggaaacuacuucaaau

SEQ ID NO: 1607689 - RNA, 19 nt, Homo sapiens
  misc_RNA (1)...(19): siRNA sense strand
gaagaaucaucaguaacau

SEQ ID NO: 1607690 - RNA, 19 nt, Homo sapiens
  misc_RNA (1)...(19): siRNA sense strand
gaagggagaaaugaugauu

SEQ ID NO: 1607691 - RNA, 19 nt, Homo sapiens
  misc_RNA (1)...(19): siRNA sense strand
ucgaguugcuuaugaaauu

SEQ ID NO: 1607692 - RNA, 19 nt, Homo sapiens
  misc_RNA (1)...(19): siRNA sense strand
gaaauuaugcaaacacuac

SEQ ID NO: 1607693 - RNA, 19 nt, Homo sapiens
  misc_RNA (1)...(19): siRNA sense strand
cuaaaggugucaacaggaa

SEQ ID NO: 1607694 - RNA, 19 nt, Homo sapiens
  misc_RNA (1)...(19): siRNA sense strand
cacaaucgauacacagaaa

SEQ ID NO: 1607695 - RNA, 19 nt, Homo sapiens
  misc_RNA (1)...(19): siRNA sense strand
cuacaaaguucgagagaag

SEQ ID NO: 1607696 - RNA, 19 nt, Homo sapiens
  misc_RNA (1)...(19): siRNA sense strand
cugcaaacuuccauucuuu

SEQ ID NO: 1607697 - RNA, 19 nt, Homo sapiens
  misc_RNA (1)...(19): siRNA sense strand
cgaguugcuuaugaaauua

SEQ ID NO: 1607698 - RNA, 19 nt, Homo sapiens
  misc_RNA (1)...(19): siRNA sense strand
cagaugaaauucccaugga

SEQ ID NO: 1607699 - RNA, 19 nt, Homo sapiens
  misc_RNA (1)...(19): siRNA sense strand
cauggaaccuggagauauc

SEQ ID NO: 1607700 - RNA, 19 nt, Homo sapiens
  misc_RNA (1)...(19): siRNA sense strand
gaaccuggagauaucauug

SEQ ID NO: 1607701 - RNA, 19 nt, Homo sapiens
  misc_RNA (1)...(19): siRNA sense strand
gggaaggacgggccuauau

SEQ ID NO: 1607702 - RNA, 19 nt, Homo sapiens
  misc_RNA (1)...(19): siRNA sense strand
gauagaaacggucaaguac

SEQ ID NO: 1607703 - RNA, 19 nt, Homo sapiens
  misc_RNA (1)...(19): siRNA sense strand
agauagaaacggucaagua

SEQ ID NO: 1607704 - RNA, 19 nt, Homo sapiens
  misc_RNA (1)...(19): siRNA sense strand
cagaaugcccacaaucaaa

SEQ ID NO: 1607705 - RNA, 19 nt, Homo sapiens
  misc_RNA (1)...(19): siRNA sense strand
ggauggcuauucuaaaggu

SEQ ID NO: 1607706 - RNA, 19 nt, Homo sapiens
  misc_RNA (1)...(19): siRNA sense strand
gcacaaucgauacacagaa

SEQ ID NO: 1607707 - RNA, 19 nt, Homo sapiens
  misc_RNA (1)...(19): siRNA sense strand
ucccaggucugucgaguug

SEQ ID NO: 1607708 - RNA, 19 nt, Homo sapiens
  misc_RNA (1)...(19): siRNA sense strand
gcaaacuuccauucuuuag

SEQ ID NO: 1607709 - RNA, 19 nt, Homo sapiens
  misc_RNA (1)...(19): siRNA sense strand
gaaugcccacaaucaaauu

SEQ ID NO: 1607710 - RNA, 19 nt, Homo sapiens
  misc_RNA (1)...(19): siRNA sense strand
ggaaggacgggccuauauc

SEQ ID NO: 1607711 - RNA, 19 nt, Homo sapiens
  misc_RNA (1)...(19): siRNA sense strand
ugggauggcuauucuaaag

SEQ ID NO: 1607712 - RNA, 19 nt, Homo sapiens
  misc_RNA (1)...(19): siRNA sense strand
cagcuggacugcacaaucg

SEQ ID NO: 1607713 - RNA, 19 nt, Homo sapiens
  misc_RNA (1)...(19): siRNA sense strand
gaagauagaaacggucaag

SEQ ID NO: 1607714 - RNA, 19 nt, Homo sapiens
  misc_RNA (1)...(19): siRNA sense strand
cuauaucccuccuacaaag

SEQ ID NO: 1607715 - RNA, 19 nt, Homo sapiens
  misc_RNA (1)...(19): siRNA sense strand
ggauauacauuuucucucu

SEQ ID NO: 1607716 - RNA, 19 nt, Homo sapiens
  misc_RNA (1)...(19): siRNA sense strand
ccagaaugcccacaaucaa

SEQ ID NO: 1607717 - RNA, 19 nt, Homo sapiens
  misc_RNA (1)...(19): siRNA sense strand
gccagaaugcccacaauca

SEQ ID NO: 1607718 - RNA, 19 nt, Homo sapiens
  misc_RNA (1)...(19): siRNA sense strand
uauuuaggccuguaaguga

SEQ ID NO: 1607719 - RNA, 19 nt, Homo sapiens
  misc_RNA (1)...(19): siRNA sense strand
ggacugcacaaucgauaca

SEQ ID NO: 1607720 - RNA, 19 nt, Homo sapiens
  misc_RNA (1)...(19): siRNA sense strand
gccuauaucccuccuacaa

SEQ ID NO: 1607721 - RNA, 19 nt, Homo sapiens
  misc_RNA (1)...(19): siRNA sense strand
caaacuuccauucuuuaga

SEQ ID NO: 1607722 - RNA, 19 nt, Homo sapiens
  misc_RNA (1)...(19): siRNA sense strand
caggcagacuuccuagugu

SEQ ID NO: 1607723 - RNA, 19 nt, Homo sapiens
  misc_RNA (1)...(19): siRNA sense strand
caaaguucgagagaagaua

SEQ ID NO: 1607724 - RNA, 19 nt, Homo sapiens
  misc_RNA (1)...(19): siRNA sense strand
ugaugccucugcaaacuuc

SEQ ID NO: 1607725 - RNA, 19 nt, Homo sapiens
  misc_RNA (1)...(19): siRNA sense strand
uccugaggcugagaaauaa

SEQ ID NO: 1607726 - RNA, 19 nt, Homo sapiens
  misc_RNA (1)...(19): siRNA sense strand
ucauugguguggcuggaaa

SEQ ID NO: 1607727 - RNA, 19 nt, Homo sapiens
  misc_RNA (1)...(19): siRNA sense strand
ucugcaaacuuccauucuu

SEQ ID NO: 1607728 - RNA, 19 nt, Homo sapiens
  misc_RNA (1)...(19): siRNA sense strand
gcagacuuccuagugugua

SEQ ID NO: 1607729 - RNA, 19 nt, Homo sapiens
  misc_RNA (1)...(19): siRNA sense strand
guauuuaggccuguaagug

SEQ ID NO: 1607730 - RNA, 19 nt, Homo sapiens
  misc_RNA (1)...(19): siRNA sense strand
ccgaacugcagaugaaauu

SEQ ID NO: 1607731 - RNA, 19 nt, Homo sapiens
  misc_RNA (1)...(19): siRNA sense strand
ucugucgaguugcuuauga

SEQ ID NO: 1607732 - RNA, 19 nt, Homo sapiens
  misc_RNA (1)...(19): siRNA sense strand
auccugaggcugagaaaua

SEQ ID NO: 1607733 - RNA, 19 nt, Homo sapiens
  misc_RNA (1)...(19): siRNA sense strand
ucauugggauggcuauucu

SEQ ID NO: 1607734 - RNA, 19 nt, Homo sapiens
  misc_RNA (1)...(19): siRNA sense strand
ccauggaaccuggagauau

SEQ ID NO: 1607735 - RNA, 19 nt, Homo sapiens
  misc_RNA (1)...(19): siRNA sense strand
ggaaccuggagauaucauu

SEQ ID NO: 1607736 - RNA, 19 nt, Homo sapiens
  misc_RNA (1)...(19): siRNA sense strand
uaagugagacaugcacaga

SEQ ID NO: 1607737 - RNA, 19 nt, Homo sapiens
  misc_RNA (1)...(19): siRNA sense strand
gcaaacacuacauccugau

SEQ ID NO: 1607738 - RNA, 19 nt, Homo sapiens
  misc_RNA (1)...(19): siRNA sense strand
ccuacaaaguucgagagaa

SEQ ID NO: 1607739 - RNA, 19 nt, Homo sapiens
  misc_RNA (1)...(19): siRNA sense strand
ccuauaucccuccuacaaa

SEQ ID NO: 1607740 - RNA, 19 nt, Homo sapiens
  misc_RNA (1)...(19): siRNA sense strand
gaaggacgggccuauaucc

SEQ ID NO: 1607741 - RNA, 19 nt, Homo sapiens
  misc_RNA (1)...(19): siRNA sense strand
gaacugcagaugaaauucc

SEQ ID NO: 1607742 - RNA, 19 nt, Homo sapiens
  misc_RNA (1)...(19): siRNA sense strand
ucaggcagacuuccuagug

SEQ ID NO: 1607743 - RNA, 19 nt, Homo sapiens
  misc_RNA (1)...(19): siRNA sense strand
agaaugcccacaaucaaau

SEQ ID NO: 1607744 - RNA, 19 nt, Homo sapiens
  misc_RNA (1)...(19): siRNA sense strand
ugcaaacuuccauucuuua

SEQ ID NO: 1607745 - RNA, 19 nt, Homo sapiens
  misc_RNA (1)...(19): siRNA sense strand
agugagacaugcacagaca

SEQ ID NO: 1607746 - RNA, 19 nt, Homo sapiens
  misc_RNA (1)...(19): siRNA sense strand
uaaaggugucaacaggaaa

SEQ ID NO: 1607747 - RNA, 19 nt, Homo sapiens
  misc_RNA (1)...(19): siRNA sense strand
aacaggaaauugggaagga

SEQ ID NO: 1607748 - RNA, 19 nt, Homo sapiens
  misc_RNA (1)...(19): siRNA sense strand
agugauaacucuauuuccu

SEQ ID NO: 1607749 - RNA, 19 nt, Homo sapiens
  misc_RNA (1)...(19): siRNA sense strand
gacaugcacagacagaucu

SEQ ID NO: 1607750 - RNA, 19 nt, Homo sapiens
  misc_RNA (1)...(19): siRNA sense strand
ugagacaugcacagacaga

SEQ ID NO: 1607751 - RNA, 19 nt, Homo sapiens
  misc_RNA (1)...(19): siRNA sense strand
ucgaguugcuuaugaaauu

SEQ ID NO: 1607752 - RNA, 19 nt, Homo sapiens
  misc_RNA (1)...(19): siRNA sense strand
gaaauuaugcaaacacuac

SEQ ID NO: 1607753 - RNA, 19 nt, Homo sapiens
  misc_RNA (1)...(19): siRNA sense strand
cuaaaggugucaacaggaa

SEQ ID NO: 1607754 - RNA, 19 nt, Homo sapiens
  misc_RNA (1)...(19): siRNA sense strand
cacaaucgauacacagaaa

SEQ ID NO: 1607755 - RNA, 19 nt, Homo sapiens
  misc_RNA (1)...(19): siRNA sense strand
cuacaaaguucgagagaag

SEQ ID NO: 1607756 - RNA, 19 nt, Homo sapiens
  misc_RNA (1)...(19): siRNA sense strand
cugcaaacuuccauucuuu

SEQ ID NO: 1607757 - RNA, 19 nt, Homo sapiens
  misc_RNA (1)...(19): siRNA sense strand
cgaguugcuuaugaaauua

SEQ ID NO: 1607758 - RNA, 19 nt, Homo sapiens
  misc_RNA (1)...(19): siRNA sense strand
cagaugaaauucccaugga

SEQ ID NO: 1607759 - RNA, 19 nt, Homo sapiens
  misc_RNA (1)...(19): siRNA sense strand
cauggaaccuggagauauc

SEQ ID NO: 1607760 - RNA, 19 nt, Homo sapiens
  misc_RNA (1)...(19): siRNA sense strand
gaaccuggagauaucauug

SEQ ID NO: 1607761 - RNA, 19 nt, Homo sapiens
  misc_RNA (1)...(19): siRNA sense strand
gggaaggacgggccuauau

SEQ ID NO: 1607762 - RNA, 19 nt, Homo sapiens
  misc_RNA (1)...(19): siRNA sense strand
gauagaaacggucaaguac

SEQ ID NO: 1607763 - RNA, 19 nt, Homo sapiens
  misc_RNA (1)...(19): siRNA sense strand
agauagaaacggucaagua

SEQ ID NO: 1607764 - RNA, 19 nt, Homo sapiens
  misc_RNA (1)...(19): siRNA sense strand
cagaaugcccacaaucaaa

SEQ ID NO: 1607765 - RNA, 19 nt, Homo sapiens
  misc_RNA (1)...(19): siRNA sense strand
ggauggcuauucuaaaggu

SEQ ID NO: 1607766 - RNA, 19 nt, Homo sapiens
  misc_RNA (1)...(19): siRNA sense strand
gcacaaucgauacacagaa

SEQ ID NO: 1607767 - RNA, 19 nt, Homo sapiens
  misc_RNA (1)...(19): siRNA sense strand
ucccaggucugucgaguug

SEQ ID NO: 1607768 - RNA, 19 nt, Homo sapiens
  misc_RNA (1)...(19): siRNA sense strand
gcaaacuuccauucuuuag

SEQ ID NO: 1607769 - RNA, 19 nt, Homo sapiens
  misc_RNA (1)...(19): siRNA sense strand
gaaugcccacaaucaaauu

SEQ ID NO: 1607770 - RNA, 19 nt, Homo sapiens
  misc_RNA (1)...(19): siRNA sense strand
ggaaggacgggccuauauc

SEQ ID NO: 1607771 - RNA, 19 nt, Homo sapiens
  misc_RNA (1)...(19): siRNA sense strand
ugggauggcuauucuaaag

SEQ ID NO: 1607772 - RNA, 19 nt, Homo sapiens
  misc_RNA (1)...(19): siRNA sense strand
cagcuggacugcacaaucg

SEQ ID NO: 1607773 - RNA, 19 nt, Homo sapiens
  misc_RNA (1)...(19): siRNA sense strand
gaagauagaaacggucaag

SEQ ID NO: 1607774 - RNA, 19 nt, Homo sapiens
  misc_RNA (1)...(19): siRNA sense strand
cuauaucccuccuacaaag

SEQ ID NO: 1607775 - RNA, 19 nt, Homo sapiens
  misc_RNA (1)...(19): siRNA sense strand
ggauauacauuuucucucu

SEQ ID NO: 1607776 - RNA, 19 nt, Homo sapiens
  misc_RNA (1)...(19): siRNA sense strand
ccagaaugcccacaaucaa

SEQ ID NO: 1607777 - RNA, 19 nt, Homo sapiens
  misc_RNA (1)...(19): siRNA sense strand
gccagaaugcccacaauca

SEQ ID NO: 1607778 - RNA, 19 nt, Homo sapiens
  misc_RNA (1)...(19): siRNA sense strand
uauuuaggccuguaaguga

SEQ ID NO: 1607779 - RNA, 19 nt, Homo sapiens
  misc_RNA (1)...(19): siRNA sense strand
ggacugcacaaucgauaca

SEQ ID NO: 1607780 - RNA, 19 nt, Homo sapiens
  misc_RNA (1)...(19): siRNA sense strand
gccuauaucccuccuacaa

SEQ ID NO: 1607781 - RNA, 19 nt, Homo sapiens
  misc_RNA (1)...(19): siRNA sense strand
caaacuuccauucuuuaga

SEQ ID NO: 1607782 - RNA, 19 nt, Homo sapiens
  misc_RNA (1)...(19): siRNA sense strand
caggcagacuuccuagugu

SEQ ID NO: 1607783 - RNA, 19 nt, Homo sapiens
  misc_RNA (1)...(19): siRNA sense strand
caaaguucgagagaagaua

SEQ ID NO: 1607784 - RNA, 19 nt, Homo sapiens
  misc_RNA (1)...(19): siRNA sense strand
ugaugccucugcaaacuuc

SEQ ID NO: 1607785 - RNA, 19 nt, Homo sapiens
  misc_RNA (1)...(19): siRNA sense strand
uccugaggcugagaaauaa

SEQ ID NO: 1607786 - RNA, 19 nt, Homo sapiens
  misc_RNA (1)...(19): siRNA sense strand
ucauugguguggcuggaaa

SEQ ID NO: 1607787 - RNA, 19 nt, Homo sapiens
  misc_RNA (1)...(19): siRNA sense strand
ucugcaaacuuccauucuu

SEQ ID NO: 1607788 - RNA, 19 nt, Homo sapiens
  misc_RNA (1)...(19): siRNA sense strand
gcagacuuccuagugugua

SEQ ID NO: 1607789 - RNA, 19 nt, Homo sapiens
  misc_RNA (1)...(19): siRNA sense strand
guauuuaggccuguaagug

SEQ ID NO: 1607790 - RNA, 19 nt, Homo sapiens
  misc_RNA (1)...(19): siRNA sense strand
ccgaacugcagaugaaauu

SEQ ID NO: 1607791 - RNA, 19 nt, Homo sapiens
  misc_RNA (1)...(19): siRNA sense strand
ucugucgaguugcuuauga

SEQ ID NO: 1607792 - RNA, 19 nt, Homo sapiens
  misc_RNA (1)...(19): siRNA sense strand
auccugaggcugagaaaua

SEQ ID NO: 1607793 - RNA, 19 nt, Homo sapiens
  misc_RNA (1)...(19): siRNA sense strand
ucauugggauggcuauucu

SEQ ID NO: 1607794 - RNA, 19 nt, Homo sapiens
  misc_RNA (1)...(19): siRNA sense strand
ccauggaaccuggagauau

SEQ ID NO: 1607795 - RNA, 19 nt, Homo sapiens
  misc_RNA (1)...(19): siRNA sense strand
ggaaccuggagauaucauu

SEQ ID NO: 1607796 - RNA, 19 nt, Homo sapiens
  misc_RNA (1)...(19): siRNA sense strand
uaagugagacaugcacaga

SEQ ID NO: 1607797 - RNA, 19 nt, Homo sapiens
  misc_RNA (1)...(19): siRNA sense strand
gcaaacacuacauccugau

SEQ ID NO: 1607798 - RNA, 19 nt, Homo sapiens
  misc_RNA (1)...(19): siRNA sense strand
ccuacaaaguucgagagaa

SEQ ID NO: 1607799 - RNA, 19 nt, Homo sapiens
  misc_RNA (1)...(19): siRNA sense strand
ccuauaucccuccuacaaa

SEQ ID NO: 1607800 - RNA, 19 nt, Homo sapiens
  misc_RNA (1)...(19): siRNA sense strand
gaaggacgggccuauaucc

SEQ ID NO: 1607801 - RNA, 19 nt, Homo sapiens
  misc_RNA (1)...(19): siRNA sense strand
gaacugcagaugaaauucc

SEQ ID NO: 1607802 - RNA, 19 nt, Homo sapiens
  misc_RNA (1)...(19): siRNA sense strand
ucaggcagacuuccuagug

SEQ ID NO: 1607803 - RNA, 19 nt, Homo sapiens
  misc_RNA (1)...(19): siRNA sense strand
agaaugcccacaaucaaau

SEQ ID NO: 1607804 - RNA, 19 nt, Homo sapiens
  misc_RNA (1)...(19): siRNA sense strand
ugcaaacuuccauucuuua

SEQ ID NO: 1607805 - RNA, 19 nt, Homo sapiens
  misc_RNA (1)...(19): siRNA sense strand
agugagacaugcacagaca

SEQ ID NO: 1607806 - RNA, 19 nt, Homo sapiens
  misc_RNA (1)...(19): siRNA sense strand
uaaaggugucaacaggaaa

SEQ ID NO: 1607807 - RNA, 19 nt, Homo sapiens
  misc_RNA (1)...(19): siRNA sense strand
aacaggaaauugggaagga

SEQ ID NO: 1607808 - RNA, 19 nt, Homo sapiens
  misc_RNA (1)...(19): siRNA sense strand
agugauaacucuauuuccu

SEQ ID NO: 1607809 - RNA, 19 nt, Homo sapiens
  misc_RNA (1)...(19): siRNA sense strand
gacaugcacagacagaucu

SEQ ID NO: 1607810 - RNA, 19 nt, Homo sapiens
  misc_RNA (1)...(19): siRNA sense strand
ugagacaugcacagacaga

SEQ ID NO: 1607811 - RNA, 19 nt, Homo sapiens
  misc_RNA (1)...(19): siRNA sense strand
ucgaguugcuuaugaaauu

SEQ ID NO: 1607812 - RNA, 19 nt, Homo sapiens
  misc_RNA (1)...(19): siRNA sense strand
gaaauuaugcaaacacuac

SEQ ID NO: 1607813 - RNA, 19 nt, Homo sapiens
  misc_RNA (1)...(19): siRNA sense strand
cuaaaggugucaacaggaa

SEQ ID NO: 1607814 - RNA, 19 nt, Homo sapiens
  misc_RNA (1)...(19): siRNA sense strand
cacaaucgauacacagaaa

SEQ ID NO: 1607815 - RNA, 19 nt, Homo sapiens
  misc_RNA (1)...(19): siRNA sense strand
cuacaaaguucgagagaag

SEQ ID NO: 1607816 - RNA, 19 nt, Homo sapiens
  misc_RNA (1)...(19): siRNA sense strand
cugcaaacuuccauucuuu

SEQ ID NO: 1607817 - RNA, 19 nt, Homo sapiens
  misc_RNA (1)...(19): siRNA sense strand
cgaguugcuuaugaaauua

SEQ ID NO: 1607818 - RNA, 19 nt, Homo sapiens
  misc_RNA (1)...(19): siRNA sense strand
cagaugaaauucccaugga

SEQ ID NO: 1607819 - RNA, 19 nt, Homo sapiens
  misc_RNA (1)...(19): siRNA sense strand
cauggaaccuggagauauc

SEQ ID NO: 1607820 - RNA, 19 nt, Homo sapiens
  misc_RNA (1)...(19): siRNA sense strand
gaaccuggagauaucauug

SEQ ID NO: 1607821 - RNA, 19 nt, Homo sapiens
  misc_RNA (1)...(19): siRNA sense strand
gggaaggacgggccuauau

SEQ ID NO: 1607822 - RNA, 19 nt, Homo sapiens
  misc_RNA (1)...(19): siRNA sense strand
gauagaaacggucaaguac

SEQ ID NO: 1607823 - RNA, 19 nt, Homo sapiens
  misc_RNA (1)...(19): siRNA sense strand
agauagaaacggucaagua

SEQ ID NO: 1607824 - RNA, 19 nt, Homo sapiens
  misc_RNA (1)...(19): siRNA sense strand
cagaaugcccacaaucaaa

SEQ ID NO: 1607825 - RNA, 19 nt, Homo sapiens
  misc_RNA (1)...(19): siRNA sense strand
ggauggcuauucuaaaggu

SEQ ID NO: 1607826 - RNA, 19 nt, Homo sapiens
  misc_RNA (1)...(19): siRNA sense strand
gcacaaucgauacacagaa

SEQ ID NO: 1607827 - RNA, 19 nt, Homo sapiens
  misc_RNA (1)...(19): siRNA sense strand
ucccaggucugucgaguug

SEQ ID NO: 1607828 - RNA, 19 nt, Homo sapiens
  misc_RNA (1)...(19): siRNA sense strand
gcaaacuuccauucuuuag

SEQ ID NO: 1607829 - RNA, 19 nt, Homo sapiens
  misc_RNA (1)...(19): siRNA sense strand
gaaugcccacaaucaaauu

SEQ ID NO: 1607830 - RNA, 19 nt, Homo sapiens
  misc_RNA (1)...(19): siRNA sense strand
ggaaggacgggccuauauc

SEQ ID NO: 1607831 - RNA, 19 nt, Homo sapiens
  misc_RNA (1)...(19): siRNA sense strand
ugggauggcuauucuaaag

SEQ ID NO: 1607832 - RNA, 19 nt, Homo sapiens
  misc_RNA (1)...(19): siRNA sense strand
cagcuggacugcacaaucg

SEQ ID NO: 1607833 - RNA, 19 nt, Homo sapiens
  misc_RNA (1)...(19): siRNA sense strand
gaagauagaaacggucaag

SEQ ID NO: 1607834 - RNA, 19 nt, Homo sapiens
  misc_RNA (1)...(19): siRNA sense strand
cuauaucccuccuacaaag

SEQ ID NO: 1607835 - RNA, 19 nt, Homo sapiens
  misc_RNA (1)...(19): siRNA sense strand
ggauauacauuuucucucu

SEQ ID NO: 1607836 - RNA, 19 nt, Homo sapiens
  misc_RNA (1)...(19): siRNA sense strand
ccagaaugcccacaaucaa

SEQ ID NO: 1607837 - RNA, 19 nt, Homo sapiens
  misc_RNA (1)...(19): siRNA sense strand
gccagaaugcccacaauca

SEQ ID NO: 1607838 - RNA, 19 nt, Homo sapiens
  misc_RNA (1)...(19): siRNA sense strand
uauuuaggccuguaaguga

SEQ ID NO: 1607839 - RNA, 19 nt, Homo sapiens
  misc_RNA (1)...(19): siRNA sense strand
ggacugcacaaucgauaca

SEQ ID NO: 1607840 - RNA, 19 nt, Homo sapiens
  misc_RNA (1)...(19): siRNA sense strand
gccuauaucccuccuacaa

SEQ ID NO: 1607841 - RNA, 19 nt, Homo sapiens
  misc_RNA (1)...(19): siRNA sense strand
caaacuuccauucuuuaga

SEQ ID NO: 1607842 - RNA, 19 nt, Homo sapiens
  misc_RNA (1)...(19): siRNA sense strand
caggcagacuuccuagugu

SEQ ID NO: 1607843 - RNA, 19 nt, Homo sapiens
  misc_RNA (1)...(19): siRNA sense strand
caaaguucgagagaagaua

SEQ ID NO: 1607844 - RNA, 19 nt, Homo sapiens
  misc_RNA (1)...(19): siRNA sense strand
ugaugccucugcaaacuuc

SEQ ID NO: 1607845 - RNA, 19 nt, Homo sapiens
  misc_RNA (1)...(19): siRNA sense strand
uccugaggcugagaaauaa

SEQ ID NO: 1607846 - RNA, 19 nt, Homo sapiens
  misc_RNA (1)...(19): siRNA sense strand
ucauugguguggcuggaaa

SEQ ID NO: 1607847 - RNA, 19 nt, Homo sapiens
  misc_RNA (1)...(19): siRNA sense strand
ucugcaaacuuccauucuu

SEQ ID NO: 1607848 - RNA, 19 nt, Homo sapiens
  misc_RNA (1)...(19): siRNA sense strand
gcagacuuccuagugugua

SEQ ID NO: 1607849 - RNA, 19 nt, Homo sapiens
  misc_RNA (1)...(19): siRNA sense strand
guauuuaggccuguaagug

SEQ ID NO: 1607850 - RNA, 19 nt, Homo sapiens
  misc_RNA (1)...(19): siRNA sense strand
ccgaacugcagaugaaauu

SEQ ID NO: 1607851 - RNA, 19 nt, Homo sapiens
  misc_RNA (1)...(19): siRNA sense strand
ucugucgaguugcuuauga

SEQ ID NO: 1607852 - RNA, 19 nt, Homo sapiens
  misc_RNA (1)...(19): siRNA sense strand
auccugaggcugagaaaua

SEQ ID NO: 1607853 - RNA, 19 nt, Homo sapiens
  misc_RNA (1)...(19): siRNA sense strand
ucauugggauggcuauucu

SEQ ID NO: 1607854 - RNA, 19 nt, Homo sapiens
  misc_RNA (1)...(19): siRNA sense strand
ccauggaaccuggagauau

SEQ ID NO: 1607855 - RNA, 19 nt, Homo sapiens
  misc_RNA (1)...(19): siRNA sense strand
ggaaccuggagauaucauu

SEQ ID NO: 1607856 - RNA, 19 nt, Homo sapiens
  misc_RNA (1)...(19): siRNA sense strand
uaagugagacaugcacaga

SEQ ID NO: 1607857 - RNA, 19 nt, Homo sapiens
  misc_RNA (1)...(19): siRNA sense strand
gcaaacacuacauccugau

SEQ ID NO: 1607858 - RNA, 19 nt, Homo sapiens
  misc_RNA (1)...(19): siRNA sense strand
ccuacaaaguucgagagaa

SEQ ID NO: 1607859 - RNA, 19 nt, Homo sapiens
  misc_RNA (1)...(19): siRNA sense strand
ccuauaucccuccuacaaa

SEQ ID NO: 1607860 - RNA, 19 nt, Homo sapiens
  misc_RNA (1)...(19): siRNA sense strand
gaaggacgggccuauaucc

SEQ ID NO: 1607861 - RNA, 19 nt, Homo sapiens
  misc_RNA (1)...(19): siRNA sense strand
gaacugcagaugaaauucc

SEQ ID NO: 1607862 - RNA, 19 nt, Homo sapiens
  misc_RNA (1)...(19): siRNA sense strand
ucaggcagacuuccuagug

SEQ ID NO: 1607863 - RNA, 19 nt, Homo sapiens
  misc_RNA (1)...(19): siRNA sense strand
agaaugcccacaaucaaau

SEQ ID NO: 1607864 - RNA, 19 nt, Homo sapiens
  misc_RNA (1)...(19): siRNA sense strand
ugcaaacuuccauucuuua

SEQ ID NO: 1607865 - RNA, 19 nt, Homo sapiens
  misc_RNA (1)...(19): siRNA sense strand
agugagacaugcacagaca

SEQ ID NO: 1607866 - RNA, 19 nt, Homo sapiens
  misc_RNA (1)...(19): siRNA sense strand
uaaaggugucaacaggaaa

SEQ ID NO: 1607867 - RNA, 19 nt, Homo sapiens
  misc_RNA (1)...(19): siRNA sense strand
aacaggaaauugggaagga

SEQ ID NO: 1607868 - RNA, 19 nt, Homo sapiens
  misc_RNA (1)...(19): siRNA sense strand
agugauaacucuauuuccu

SEQ ID NO: 1607869 - RNA, 19 nt, Homo sapiens
  misc_RNA (1)...(19): siRNA sense strand
gacaugcacagacagaucu

SEQ ID NO: 1607870 - RNA, 19 nt, Homo sapiens
  misc_RNA (1)...(19): siRNA sense strand
ugagacaugcacagacaga

SEQ ID NO: 1607871 - RNA, 19 nt, Homo sapiens
  misc_RNA (1)...(19): siRNA sense strand
ucgaguugcuuaugaaauu

SEQ ID NO: 1607872 - RNA, 19 nt, Homo sapiens
  misc_RNA (1)...(19): siRNA sense strand
gaaauuaugcaaacacuac

SEQ ID NO: 1607873 - RNA, 19 nt, Homo sapiens
  misc_RNA (1)...(19): siRNA sense strand
cuaaaggugucaacaggaa

SEQ ID NO: 1607874 - RNA, 19 nt, Homo sapiens
  misc_RNA (1)...(19): siRNA sense strand
cacaaucgauacacagaaa

SEQ ID NO: 1607875 - RNA, 19 nt, Homo sapiens
  misc_RNA (1)...(19): siRNA sense strand
cuacaaaguucgagagaag

SEQ ID NO: 1607876 - RNA, 19 nt, Homo sapiens
  misc_RNA (1)...(19): siRNA sense strand
cugcaaacuuccauucuuu

SEQ ID NO: 1607877 - RNA, 19 nt, Homo sapiens
  misc_RNA (1)...(19): siRNA sense strand
cgaguugcuuaugaaauua

SEQ ID NO: 1607878 - RNA, 19 nt, Homo sapiens
  misc_RNA (1)...(19): siRNA sense strand
cagaugaaauucccaugga

SEQ ID NO: 1607879 - RNA, 19 nt, Homo sapiens
  misc_RNA (1)...(19): siRNA sense strand
cauggaaccuggagauauc

SEQ ID NO: 1607880 - RNA, 19 nt, Homo sapiens
  misc_RNA (1)...(19): siRNA sense strand
gaaccuggagauaucauug

SEQ ID NO: 1607881 - RNA, 19 nt, Homo sapiens
  misc_RNA (1)...(19): siRNA sense strand
gggaaggacgggccuauau

SEQ ID NO: 1607882 - RNA, 19 nt, Homo sapiens
  misc_RNA (1)...(19): siRNA sense strand
gauagaaacggucaaguac

SEQ ID NO: 1607883 - RNA, 19 nt, Homo sapiens
  misc_RNA (1)...(19): siRNA sense strand
agauagaaacggucaagua

SEQ ID NO: 1607884 - RNA, 19 nt, Homo sapiens
  misc_RNA (1)...(19): siRNA sense strand
cagaaugcccacaaucaaa

SEQ ID NO: 1607885 - RNA, 19 nt, Homo sapiens
  misc_RNA (1)...(19): siRNA sense strand
ggauggcuauucuaaaggu

SEQ ID NO: 1607886 - RNA, 19 nt, Homo sapiens
  misc_RNA (1)...(19): siRNA sense strand
gcacaaucgauacacagaa

SEQ ID NO: 1607887 - RNA, 19 nt, Homo sapiens
  misc_RNA (1)...(19): siRNA sense strand
ucccaggucugucgaguug

SEQ ID NO: 1607888 - RNA, 19 nt, Homo sapiens
  misc_RNA (1)...(19): siRNA sense strand
gcaaacuuccauucuuuag

SEQ ID NO: 1607889 - RNA, 19 nt, Homo sapiens
  misc_RNA (1)...(19): siRNA sense strand
gaaugcccacaaucaaauu

SEQ ID NO: 1607890 - RNA, 19 nt, Homo sapiens
  misc_RNA (1)...(19): siRNA sense strand
ggaaggacgggccuauauc

SEQ ID NO: 1607891 - RNA, 19 nt, Homo sapiens
  misc_RNA (1)...(19): siRNA sense strand
ugggauggcuauucuaaag

SEQ ID NO: 1607892 - RNA, 19 nt, Homo sapiens
  misc_RNA (1)...(19): siRNA sense strand
cagcuggacugcacaaucg

SEQ ID NO: 1607893 - RNA, 19 nt, Homo sapiens
  misc_RNA (1)...(19): siRNA sense strand
gaagauagaaacggucaag

SEQ ID NO: 1607894 - RNA, 19 nt, Homo sapiens
  misc_RNA (1)...(19): siRNA sense strand
cuauaucccuccuacaaag

SEQ ID NO: 1607895 - RNA, 19 nt, Homo sapiens
  misc_RNA (1)...(19): siRNA sense strand
ggauauacauuuucucucu

SEQ ID NO: 1607896 - RNA, 19 nt, Homo sapiens
  misc_RNA (1)...(19): siRNA sense strand
ccagaaugcccacaaucaa

SEQ ID NO: 1607897 - RNA, 19 nt, Homo sapiens
  misc_RNA (1)...(19): siRNA sense strand
gccagaaugcccacaauca

SEQ ID NO: 1607898 - RNA, 19 nt, Homo sapiens
  misc_RNA (1)...(19): siRNA sense strand
uauuuaggccuguaaguga

SEQ ID NO: 1607899 - RNA, 19 nt, Homo sapiens
  misc_RNA (1)...(19): siRNA sense strand
ggacugcacaaucgauaca

SEQ ID NO: 1607900 - RNA, 19 nt, Homo sapiens
  misc_RNA (1)...(19): siRNA sense strand
gccuauaucccuccuacaa

SEQ ID NO: 1607901 - RNA, 19 nt, Homo sapiens
  misc_RNA (1)...(19): siRNA sense strand
caaacuuccauucuuuaga

SEQ ID NO: 1607902 - RNA, 19 nt, Homo sapiens
  misc_RNA (1)...(19): siRNA sense strand
caggcagacuuccuagugu

SEQ ID NO: 1607903 - RNA, 19 nt, Homo sapiens
  misc_RNA (1)...(19): siRNA sense strand
caaaguucgagagaagaua

SEQ ID NO: 1607904 - RNA, 19 nt, Homo sapiens
  misc_RNA (1)...(19): siRNA sense strand
ugaugccucugcaaacuuc

SEQ ID NO: 1607905 - RNA, 19 nt, Homo sapiens
  misc_RNA (1)...(19): siRNA sense strand
uccugaggcugagaaauaa

SEQ ID NO: 1607906 - RNA, 19 nt, Homo sapiens
  misc_RNA (1)...(19): siRNA sense strand
ucauugguguggcuggaaa

SEQ ID NO: 1607907 - RNA, 19 nt, Homo sapiens
  misc_RNA (1)...(19): siRNA sense strand
ucugcaaacuuccauucuu

SEQ ID NO: 1607908 - RNA, 19 nt, Homo sapiens
  misc_RNA (1)...(19): siRNA sense strand
gcagacuuccuagugugua

SEQ ID NO: 1607909 - RNA, 19 nt, Homo sapiens
  misc_RNA (1)...(19): siRNA sense strand
guauuuaggccuguaagug

SEQ ID NO: 1607910 - RNA, 19 nt, Homo sapiens
  misc_RNA (1)...(19): siRNA sense strand
ccgaacugcagaugaaauu

SEQ ID NO: 1607911 - RNA, 19 nt, Homo sapiens
  misc_RNA (1)...(19): siRNA sense strand
ucugucgaguugcuuauga

SEQ ID NO: 1607912 - RNA, 19 nt, Homo sapiens
  misc_RNA (1)...(19): siRNA sense strand
auccugaggcugagaaaua

SEQ ID NO: 1607913 - RNA, 19 nt, Homo sapiens
  misc_RNA (1)...(19): siRNA sense strand
ucauugggauggcuauucu

SEQ ID NO: 1607914 - RNA, 19 nt, Homo sapiens
  misc_RNA (1)...(19): siRNA sense strand
ccauggaaccuggagauau

SEQ ID NO: 1607915 - RNA, 19 nt, Homo sapiens
  misc_RNA (1)...(19): siRNA sense strand
ggaaccuggagauaucauu

SEQ ID NO: 1607916 - RNA, 19 nt, Homo sapiens
  misc_RNA (1)...(19): siRNA sense strand
uaagugagacaugcacaga

SEQ ID NO: 1607917 - RNA, 19 nt, Homo sapiens
  misc_RNA (1)...(19): siRNA sense strand
gcaaacacuacauccugau

SEQ ID NO: 1607918 - RNA, 19 nt, Homo sapiens
  misc_RNA (1)...(19): siRNA sense strand
ccuacaaaguucgagagaa

SEQ ID NO: 1607919 - RNA, 19 nt, Homo sapiens
  misc_RNA (1)...(19): siRNA sense strand
ccuauaucccuccuacaaa

SEQ ID NO: 1607920 - RNA, 19 nt, Homo sapiens
  misc_RNA (1)...(19): siRNA sense strand
gaaggacgggccuauaucc

SEQ ID NO: 1607921 - RNA, 19 nt, Homo sapiens
  misc_RNA (1)...(19): siRNA sense strand
gaacugcagaugaaauucc

SEQ ID NO: 1607922 - RNA, 19 nt, Homo sapiens
  misc_RNA (1)...(19): siRNA sense strand
ucaggcagacuuccuagug

SEQ ID NO: 1607923 - RNA, 19 nt, Homo sapiens
  misc_RNA (1)...(19): siRNA sense strand
agaaugcccacaaucaaau

SEQ ID NO: 1607924 - RNA, 19 nt, Homo sapiens
  misc_RNA (1)...(19): siRNA sense strand
ugcaaacuuccauucuuua

SEQ ID NO: 1607925 - RNA, 19 nt, Homo sapiens
  misc_RNA (1)...(19): siRNA sense strand
agugagacaugcacagaca

SEQ ID NO: 1607926 - RNA, 19 nt, Homo sapiens
  misc_RNA (1)...(19): siRNA sense strand
uaaaggugucaacaggaaa

SEQ ID NO: 1607927 - RNA, 19 nt, Homo sapiens
  misc_RNA (1)...(19): siRNA sense strand
aacaggaaauugggaagga

SEQ ID NO: 1607928 - RNA, 19 nt, Homo sapiens
  misc_RNA (1)...(19): siRNA sense strand
agugauaacucuauuuccu

SEQ ID NO: 1607929 - RNA, 19 nt, Homo sapiens
  misc_RNA (1)...(19): siRNA sense strand
gacaugcacagacagaucu

SEQ ID NO: 1607930 - RNA, 19 nt, Homo sapiens
  misc_RNA (1)...(19): siRNA sense strand
ugagacaugcacagacaga

SEQ ID NO: 1607931 - RNA, 19 nt, Homo sapiens
  misc_RNA (1)...(19): siRNA sense strand
ucgaguugcuuaugaaauu

SEQ ID NO: 1607932 - RNA, 19 nt, Homo sapiens
  misc_RNA (1)...(19): siRNA sense strand
gaaauuaugcaaacacuac

SEQ ID NO: 1607933 - RNA, 19 nt, Homo sapiens
  misc_RNA (1)...(19): siRNA sense strand
cuaaaggugucaacaggaa

SEQ ID NO: 1607934 - RNA, 19 nt, Homo sapiens
  misc_RNA (1)...(19): siRNA sense strand
cacaaucgauacacagaaa

SEQ ID NO: 1607935 - RNA, 19 nt, Homo sapiens
  misc_RNA (1)...(19): siRNA sense strand
cuacaaaguucgagagaag

SEQ ID NO: 1607936 - RNA, 19 nt, Homo sapiens
  misc_RNA (1)...(19): siRNA sense strand
cugcaaacuuccauucuuu

SEQ ID NO: 1607937 - RNA, 19 nt, Homo sapiens
  misc_RNA (1)...(19): siRNA sense strand
cgaguugcuuaugaaauua

SEQ ID NO: 1607938 - RNA, 19 nt, Homo sapiens
  misc_RNA (1)...(19): siRNA sense strand
cagaugaaauucccaugga

SEQ ID NO: 1607939 - RNA, 19 nt, Homo sapiens
  misc_RNA (1)...(19): siRNA sense strand
cauggaaccuggagauauc

SEQ ID NO: 1607940 - RNA, 19 nt, Homo sapiens
  misc_RNA (1)...(19): siRNA sense strand
gaaccuggagauaucauug

SEQ ID NO: 1607941 - RNA, 19 nt, Homo sapiens
  misc_RNA (1)...(19): siRNA sense strand
gggaaggacgggccuauau

SEQ ID NO: 1607942 - RNA, 19 nt, Homo sapiens
  misc_RNA (1)...(19): siRNA sense strand
gauagaaacggucaaguac

SEQ ID NO: 1607943 - RNA, 19 nt, Homo sapiens
  misc_RNA (1)...(19): siRNA sense strand
agauagaaacggucaagua

SEQ ID NO: 1607944 - RNA, 19 nt, Homo sapiens
  misc_RNA (1)...(19): siRNA sense strand
cagaaugcccacaaucaaa

SEQ ID NO: 1607945 - RNA, 19 nt, Homo sapiens
  misc_RNA (1)...(19): siRNA sense strand
ggauggcuauucuaaaggu

SEQ ID NO: 1607946 - RNA, 19 nt, Homo sapiens
  misc_RNA (1)...(19): siRNA sense strand
gcacaaucgauacacagaa

SEQ ID NO: 1607947 - RNA, 19 nt, Homo sapiens
  misc_RNA (1)...(19): siRNA sense strand
ucccaggucugucgaguug

SEQ ID NO: 1607948 - RNA, 19 nt, Homo sapiens
  misc_RNA (1)...(19): siRNA sense strand
gcaaacuuccauucuuuag

SEQ ID NO: 1607949 - RNA, 19 nt, Homo sapiens
  misc_RNA (1)...(19): siRNA sense strand
gaaugcccacaaucaaauu

SEQ ID NO: 1607950 - RNA, 19 nt, Homo sapiens
  misc_RNA (1)...(19): siRNA sense strand
ggaaggacgggccuauauc

SEQ ID NO: 1607951 - RNA, 19 nt, Homo sapiens
  misc_RNA (1)...(19): siRNA sense strand
ugggauggcuauucuaaag

SEQ ID NO: 1607952 - RNA, 19 nt, Homo sapiens
  misc_RNA (1)...(19): siRNA sense strand
cagcuggacugcacaaucg

SEQ ID NO: 1607953 - RNA, 19 nt, Homo sapiens
  misc_RNA (1)...(19): siRNA sense strand
gaagauagaaacggucaag

SEQ ID NO: 1607954 - RNA, 19 nt, Homo sapiens
  misc_RNA (1)...(19): siRNA sense strand
cuauaucccuccuacaaag

SEQ ID NO: 1607955 - RNA, 19 nt, Homo sapiens
  misc_RNA (1)...(19): siRNA sense strand
ggauauacauuuucucucu

SEQ ID NO: 1607956 - RNA, 19 nt, Homo sapiens
  misc_RNA (1)...(19): siRNA sense strand
ccagaaugcccacaaucaa

SEQ ID NO: 1607957 - RNA, 19 nt, Homo sapiens
  misc_RNA (1)...(19): siRNA sense strand
gccagaaugcccacaauca

SEQ ID NO: 1607958 - RNA, 19 nt, Homo sapiens
  misc_RNA (1)...(19): siRNA sense strand
gccuauaucccuccuacaa

SEQ ID NO: 1607959 - RNA, 19 nt, Homo sapiens
  misc_RNA (1)...(19): siRNA sense strand
ggacugcacaaucgauaca

SEQ ID NO: 1607960 - RNA, 19 nt, Homo sapiens
  misc_RNA (1)...(19): siRNA sense strand
caaacuuccauucuuuaga

SEQ ID NO: 1607961 - RNA, 19 nt, Homo sapiens
  misc_RNA (1)...(19): siRNA sense strand
caggcagacuuccuagugu

SEQ ID NO: 1607962 - RNA, 19 nt, Homo sapiens
  misc_RNA (1)...(19): siRNA sense strand
caaaguucgagagaagaua

SEQ ID NO: 1607963 - RNA, 19 nt, Homo sapiens
  misc_RNA (1)...(19): siRNA sense strand
ugaugccucugcaaacuuc

SEQ ID NO: 1607964 - RNA, 19 nt, Homo sapiens
  misc_RNA (1)...(19): siRNA sense strand
uccugaggcugagaaauaa

SEQ ID NO: 1607965 - RNA, 19 nt, Homo sapiens
  misc_RNA (1)...(19): siRNA sense strand
ucauugguguggcuggaaa

SEQ ID NO: 1607966 - RNA, 19 nt, Homo sapiens
  misc_RNA (1)...(19): siRNA sense strand
ucugcaaacuuccauucuu

SEQ ID NO: 1607967 - RNA, 19 nt, Homo sapiens
  misc_RNA (1)...(19): siRNA sense strand
gcagacuuccuagugugua

SEQ ID NO: 1607968 - RNA, 19 nt, Homo sapiens
  misc_RNA (1)...(19): siRNA sense strand
ccgaacugcagaugaaauu

SEQ ID NO: 1607969 - RNA, 19 nt, Homo sapiens
  misc_RNA (1)...(19): siRNA sense strand
ucugucgaguugcuuauga

SEQ ID NO: 1607970 - RNA, 19 nt, Homo sapiens
  misc_RNA (1)...(19): siRNA sense strand
auccugaggcugagaaaua

SEQ ID NO: 1607971 - RNA, 19 nt, Homo sapiens
  misc_RNA (1)...(19): siRNA sense strand
ucauugggauggcuauucu

SEQ ID NO: 1607972 - RNA, 19 nt, Homo sapiens
  misc_RNA (1)...(19): siRNA sense strand
ccauggaaccuggagauau

SEQ ID NO: 1607973 - RNA, 19 nt, Homo sapiens
  misc_RNA (1)...(19): siRNA sense strand
ggaaccuggagauaucauu

SEQ ID NO: 1607974 - RNA, 19 nt, Homo sapiens
  misc_RNA (1)...(19): siRNA sense strand
gcaaacacuacauccugau

SEQ ID NO: 1607975 - RNA, 19 nt, Homo sapiens
  misc_RNA (1)...(19): siRNA sense strand
ccuacaaaguucgagagaa

SEQ ID NO: 1607976 - RNA, 19 nt, Homo sapiens
  misc_RNA (1)...(19): siRNA sense strand
ccuauaucccuccuacaaa

SEQ ID NO: 1607977 - RNA, 19 nt, Homo sapiens
  misc_RNA (1)...(19): siRNA sense strand
gaaggacgggccuauaucc

SEQ ID NO: 1607978 - RNA, 19 nt, Homo sapiens
  misc_RNA (1)...(19): siRNA sense strand
gaacugcagaugaaauucc

SEQ ID NO: 1607979 - RNA, 19 nt, Homo sapiens
  misc_RNA (1)...(19): siRNA sense strand
agaaugcccacaaucaaau

SEQ ID NO: 1607980 - RNA, 19 nt, Homo sapiens
  misc_RNA (1)...(19): siRNA sense strand
ucaggcagacuuccuagug

SEQ ID NO: 1607981 - RNA, 19 nt, Homo sapiens
  misc_RNA (1)...(19): siRNA sense strand
ugcaaacuuccauucuuua

SEQ ID NO: 1607982 - RNA, 19 nt, Homo sapiens
  misc_RNA (1)...(19): siRNA sense strand
uaaaggugucaacaggaaa

SEQ ID NO: 1607983 - RNA, 19 nt, Homo sapiens
  misc_RNA (1)...(19): siRNA sense strand
aacaggaaauugggaagga

SEQ ID NO: 1607984 - RNA, 19 nt, Homo sapiens
  misc_RNA (1)...(19): siRNA sense strand
agugauaacucuauuuccu

SEQ ID NO: 1607985 - RNA, 19 nt, Homo sapiens
  misc_RNA (1)...(19): siRNA sense strand
ugacaaauguggaugauga

SEQ ID NO: 1607986 - RNA, 19 nt, Homo sapiens
  misc_RNA (1)...(19): siRNA sense strand
gcaccgaccugccucugua

SEQ ID NO: 1607987 - RNA, 19 nt, Homo sapiens
  misc_RNA (1)...(19): siRNA sense strand
ggaagagccugucaucauc

SEQ ID NO: 1607988 - RNA, 19 nt, Homo sapiens
  misc_RNA (1)...(19): siRNA sense strand
caaggcagcuuaacuacau

SEQ ID NO: 1607989 - RNA, 19 nt, Homo sapiens
  misc_RNA (1)...(19): siRNA sense strand
ccaagggucuucaacuuug

SEQ ID NO: 1607990 - RNA, 19 nt, Homo sapiens
  misc_RNA (1)...(19): siRNA sense strand
cagggaauauuugcauuua

SEQ ID NO: 1607991 - RNA, 19 nt, Homo sapiens
  misc_RNA (1)...(19): siRNA sense strand
gggaauauuugcauuuaag

SEQ ID NO: 1607992 - RNA, 19 nt, Homo sapiens
  misc_RNA (1)...(19): siRNA sense strand
gcagcugccugaacagaga

SEQ ID NO: 1607993 - RNA, 19 nt, Homo sapiens
  misc_RNA (1)...(19): siRNA sense strand
ggagagggcccacgauucu

SEQ ID NO: 1607994 - RNA, 19 nt, Homo sapiens
  misc_RNA (1)...(19): siRNA sense strand
gcucuaggcuacacugucu

SEQ ID NO: 1607995 - RNA, 19 nt, Homo sapiens
  misc_RNA (1)...(19): siRNA sense strand
ccacaccuaugucaacaca

SEQ ID NO: 1607996 - RNA, 19 nt, Homo sapiens
  misc_RNA (1)...(19): siRNA sense strand
uccaauggcuucccugaug

SEQ ID NO: 1607997 - RNA, 19 nt, Homo sapiens
  misc_RNA (1)...(19): siRNA sense strand
caacacaccggccagugaa

SEQ ID NO: 1607998 - RNA, 19 nt, Homo sapiens
  misc_RNA (1)...(19): siRNA sense strand
gacaggccagggaauauuu

SEQ ID NO: 1607999 - RNA, 19 nt, Homo sapiens
  misc_RNA (1)...(19): siRNA sense strand
gagacagcguuccagacaa

SEQ ID NO: 1608000 - RNA, 19 nt, Homo sapiens
  misc_RNA (1)...(19): siRNA sense strand
gaagagccugucaucauca

SEQ ID NO: 1608001 - RNA, 19 nt, Homo sapiens
  misc_RNA (1)...(19): siRNA sense strand
ccagggaauauuugcauuu

SEQ ID NO: 1608002 - RNA, 19 nt, Homo sapiens
  misc_RNA (1)...(19): siRNA sense strand
gcucacacccucuuccaau

SEQ ID NO: 1608003 - RNA, 19 nt, Homo sapiens
  misc_RNA (1)...(19): siRNA sense strand
ucagacaggccagggaaua

SEQ ID NO: 1608004 - RNA, 19 nt, Homo sapiens
  misc_RNA (1)...(19): siRNA sense strand
ggaaaucuucaaccuccuu

SEQ ID NO: 1608005 - RNA, 19 nt, Homo sapiens
  misc_RNA (1)...(19): siRNA sense strand
gccagggaauauuugcauu

SEQ ID NO: 1608006 - RNA, 19 nt, Homo sapiens
  misc_RNA (1)...(19): siRNA sense strand
ccaagugcaccuacgagaa

SEQ ID NO: 1608007 - RNA, 19 nt, Homo sapiens
  misc_RNA (1)...(19): siRNA sense strand
ccacaauaauaacaaugag

SEQ ID NO: 1608008 - RNA, 19 nt, Homo sapiens
  misc_RNA (1)...(19): siRNA sense strand
gcuacacugucuccagcuu

SEQ ID NO: 1608009 - RNA, 19 nt, Homo sapiens
  misc_RNA (1)...(19): siRNA sense strand
ucaacacaccggccaguga

SEQ ID NO: 1608010 - RNA, 19 nt, Homo sapiens
  misc_RNA (1)...(19): siRNA sense strand
ugcaacagcaucaauguga

SEQ ID NO: 1608011 - RNA, 19 nt, Homo sapiens
  misc_RNA (1)...(19): siRNA sense strand
gaagugccagggccucugu

SEQ ID NO: 1608012 - RNA, 19 nt, Homo sapiens
  misc_RNA (1)...(19): siRNA sense strand
gucaucaucacccgcaaua

SEQ ID NO: 1608013 - RNA, 19 nt, Homo sapiens
  misc_RNA (1)...(19): siRNA sense strand
uggaagagccugucaucau

SEQ ID NO: 1608014 - RNA, 19 nt, Homo sapiens
  misc_RNA (1)...(19): siRNA sense strand
ggugacaaauguggaugau

SEQ ID NO: 1608015 - RNA, 19 nt, Homo sapiens
  misc_RNA (1)...(19): siRNA sense strand
agacagcguuccagacaac

SEQ ID NO: 1608016 - RNA, 19 nt, Homo sapiens
  misc_RNA (1)...(19): siRNA sense strand
ccgcccugcugcacuauga

SEQ ID NO: 1608017 - RNA, 19 nt, Homo sapiens
  misc_RNA (1)...(19): siRNA sense strand
ccacaccacaauaauaaca

SEQ ID NO: 1608018 - RNA, 19 nt, Homo sapiens
  misc_RNA (1)...(19): siRNA sense strand
uccaaccucuucuccuuug

SEQ ID NO: 1608019 - RNA, 19 nt, Homo sapiens
  misc_RNA (1)...(19): siRNA sense strand
cccaagggucuucaacuuu

SEQ ID NO: 1608020 - RNA, 19 nt, Homo sapiens
  misc_RNA (1)...(19): siRNA sense strand
caggccaggugaaguuugu

SEQ ID NO: 1608021 - RNA, 19 nt, Homo sapiens
  misc_RNA (1)...(19): siRNA sense strand
guccacccaugcccucauu

SEQ ID NO: 1608022 - RNA, 19 nt, Homo sapiens
  misc_RNA (1)...(19): siRNA sense strand
gcagugcaacagcaucaau

SEQ ID NO: 1608023 - RNA, 19 nt, Homo sapiens
  misc_RNA (1)...(19): siRNA sense strand
acuccaaccucuucuccuu

SEQ ID NO: 1608024 - RNA, 19 nt, Homo sapiens
  misc_RNA (1)...(19): siRNA sense strand
ccaggugaaguuuguguug

SEQ ID NO: 1608025 - RNA, 19 nt, Homo sapiens
  misc_RNA (1)...(19): siRNA sense strand
caagugcaccuacgagaac

SEQ ID NO: 1608026 - RNA, 19 nt, Homo sapiens
  misc_RNA (1)...(19): siRNA sense strand
gggcugaggaaaucuucaa

SEQ ID NO: 1608027 - RNA, 19 nt, Homo sapiens
  misc_RNA (1)...(19): siRNA sense strand
ccaaguucaaggugacaaa

SEQ ID NO: 1608028 - RNA, 19 nt, Homo sapiens
  misc_RNA (1)...(19): siRNA sense strand
ggcggcacauggugaagug

SEQ ID NO: 1608029 - RNA, 19 nt, Homo sapiens
  misc_RNA (1)...(19): siRNA sense strand
gagcagucccacaccuaug

SEQ ID NO: 1608030 - RNA, 19 nt, Homo sapiens
  misc_RNA (1)...(19): siRNA sense strand
agacaggccagggaauauu

SEQ ID NO: 1608031 - RNA, 19 nt, Homo sapiens
  misc_RNA (1)...(19): siRNA sense strand
aguucaaggugacaaaugu

SEQ ID NO: 1608032 - RNA, 19 nt, Homo sapiens
  misc_RNA (1)...(19): siRNA sense strand
agagacagcguuccagaca

SEQ ID NO: 1608033 - RNA, 19 nt, Homo sapiens
  misc_RNA (1)...(19): siRNA sense strand
cuacgacuccaaccucuuc

SEQ ID NO: 1608034 - RNA, 19 nt, Homo sapiens
  misc_RNA (1)...(19): siRNA sense strand
ccaaccucuucuccuuuga

SEQ ID NO: 1608035 - RNA, 19 nt, Homo sapiens
  misc_RNA (1)...(19): siRNA sense strand
ccaaggcagcuuaacuaca

SEQ ID NO: 1608036 - RNA, 19 nt, Homo sapiens
  misc_RNA (1)...(19): siRNA sense strand
caaggugacaaauguggau

SEQ ID NO: 1608037 - RNA, 19 nt, Homo sapiens
  misc_RNA (1)...(19): siRNA sense strand
ggacccacagguguucuug

SEQ ID NO: 1608038 - RNA, 19 nt, Homo sapiens
  misc_RNA (1)...(19): siRNA sense strand
gaagagacccugcaaagau

SEQ ID NO: 1608039 - RNA, 19 nt, Homo sapiens
  misc_RNA (1)...(19): siRNA sense strand
gcaucgaggugcucaguaa

SEQ ID NO: 1608040 - RNA, 19 nt, Homo sapiens
  misc_RNA (1)...(19): siRNA sense strand
gaaaugagagccaccuaau

SEQ ID NO: 1608041 - RNA, 19 nt, Homo sapiens
  misc_RNA (1)...(19): siRNA sense strand
ggaagagacccugcaaaga

SEQ ID NO: 1608042 - RNA, 19 nt, Homo sapiens
  misc_RNA (1)...(19): siRNA sense strand
guacaugacauccgacgaa

SEQ ID NO: 1608043 - RNA, 19 nt, Homo sapiens
  misc_RNA (1)...(19): siRNA sense strand
gagagccaccuaauugauu

SEQ ID NO: 1608044 - RNA, 19 nt, Homo sapiens
  misc_RNA (1)...(19): siRNA sense strand
aaugagagccaccuaauug

SEQ ID NO: 1608045 - RNA, 19 nt, Homo sapiens
  misc_RNA (1)...(19): siRNA sense strand
gcacuucacugggcaucga

SEQ ID NO: 1608046 - RNA, 19 nt, Homo sapiens
  misc_RNA (1)...(19): siRNA sense strand
gcagcagccuuguguuugg

SEQ ID NO: 1608047 - RNA, 19 nt, Homo sapiens
  misc_RNA (1)...(19): siRNA sense strand
gcgugaugcugguacauga

SEQ ID NO: 1608048 - RNA, 19 nt, Homo sapiens
  misc_RNA (1)...(19): siRNA sense strand
agagccaccuaauugauuu

SEQ ID NO: 1608049 - RNA, 19 nt, Homo sapiens
  misc_RNA (1)...(19): siRNA sense strand
gggaagagacccugcaaag

SEQ ID NO: 1608050 - RNA, 19 nt, Homo sapiens
  misc_RNA (1)...(19): siRNA sense strand
caugacauccgacgaaaug

SEQ ID NO: 1608051 - RNA, 19 nt, Homo sapiens
  misc_RNA (1)...(19): siRNA sense strand
cgaaaugagagccaccuaa

SEQ ID NO: 1608052 - RNA, 19 nt, Homo sapiens
  misc_RNA (1)...(19): siRNA sense strand
ggacgaggacgccuuucug

SEQ ID NO: 1608053 - RNA, 19 nt, Homo sapiens
  misc_RNA (1)...(19): siRNA sense strand
aagagacccugcaaagauc

SEQ ID NO: 1608054 - RNA, 19 nt, Homo sapiens
  misc_RNA (1)...(19): siRNA sense strand
gacauccgacgaaaugaga

SEQ ID NO: 1608055 - RNA, 19 nt, Homo sapiens
  misc_RNA (1)...(19): siRNA sense strand
aaaugagagccaccuaauu

SEQ ID NO: 1608056 - RNA, 19 nt, Homo sapiens
  misc_RNA (1)...(19): siRNA sense strand
uggcagcagccuuguguuu

SEQ ID NO: 1608057 - RNA, 19 nt, Homo sapiens
  misc_RNA (1)...(19): siRNA sense strand
uacaugacauccgacgaaa

SEQ ID NO: 1608058 - RNA, 19 nt, Homo sapiens
  misc_RNA (1)...(19): siRNA sense strand
gguggcagcagccuugugu

SEQ ID NO: 1608059 - RNA, 19 nt, Homo sapiens
  misc_RNA (1)...(19): siRNA sense strand
ggagaugggcagccaagac

SEQ ID NO: 1608060 - RNA, 19 nt, Homo sapiens
  misc_RNA (1)...(19): siRNA sense strand
ggucaugcagaucuacuuc

SEQ ID NO: 1608061 - RNA, 19 nt, Homo sapiens
  misc_RNA (1)...(19): siRNA sense strand
ggcagcagccuuguguuug

SEQ ID NO: 1608062 - RNA, 19 nt, Homo sapiens
  misc_RNA (1)...(19): siRNA sense strand
ucgaggugcucaguaaaca

SEQ ID NO: 1608063 - RNA, 19 nt, Homo sapiens
  misc_RNA (1)...(19): siRNA sense strand
ucaguaaacagggaucuuc

SEQ ID NO: 1608064 - RNA, 19 nt, Homo sapiens
  misc_RNA (1)...(19): siRNA sense strand
ugagagccaccuaauugau

SEQ ID NO: 1608065 - RNA, 19 nt, Homo sapiens
  misc_RNA (1)...(19): siRNA sense strand
gaagagacccugcaaagau

SEQ ID NO: 1608066 - RNA, 19 nt, Homo sapiens
  misc_RNA (1)...(19): siRNA sense strand
gcaucgaggugcucaguaa

SEQ ID NO: 1608067 - RNA, 19 nt, Homo sapiens
  misc_RNA (1)...(19): siRNA sense strand
gaaaugagagccaccuaau

SEQ ID NO: 1608068 - RNA, 19 nt, Homo sapiens
  misc_RNA (1)...(19): siRNA sense strand
ggaagagacccugcaaaga

SEQ ID NO: 1608069 - RNA, 19 nt, Homo sapiens
  misc_RNA (1)...(19): siRNA sense strand
guacaugacauccgacgaa

SEQ ID NO: 1608070 - RNA, 19 nt, Homo sapiens
  misc_RNA (1)...(19): siRNA sense strand
gagagccaccuaauugauu

SEQ ID NO: 1608071 - RNA, 19 nt, Homo sapiens
  misc_RNA (1)...(19): siRNA sense strand
aaugagagccaccuaauug

SEQ ID NO: 1608072 - RNA, 19 nt, Homo sapiens
  misc_RNA (1)...(19): siRNA sense strand
gcacuucacugggcaucga

SEQ ID NO: 1608073 - RNA, 19 nt, Homo sapiens
  misc_RNA (1)...(19): siRNA sense strand
gcagcagccuuguguuugg

SEQ ID NO: 1608074 - RNA, 19 nt, Homo sapiens
  misc_RNA (1)...(19): siRNA sense strand
gcgugaugcugguacauga

SEQ ID NO: 1608075 - RNA, 19 nt, Homo sapiens
  misc_RNA (1)...(19): siRNA sense strand
agagccaccuaauugauuu

SEQ ID NO: 1608076 - RNA, 19 nt, Homo sapiens
  misc_RNA (1)...(19): siRNA sense strand
gggaagagacccugcaaag

SEQ ID NO: 1608077 - RNA, 19 nt, Homo sapiens
  misc_RNA (1)...(19): siRNA sense strand
caugacauccgacgaaaug

SEQ ID NO: 1608078 - RNA, 19 nt, Homo sapiens
  misc_RNA (1)...(19): siRNA sense strand
cgaaaugagagccaccuaa

SEQ ID NO: 1608079 - RNA, 19 nt, Homo sapiens
  misc_RNA (1)...(19): siRNA sense strand
ggacgaggacgccuuucug

SEQ ID NO: 1608080 - RNA, 19 nt, Homo sapiens
  misc_RNA (1)...(19): siRNA sense strand
aagagacccugcaaagauc

SEQ ID NO: 1608081 - RNA, 19 nt, Homo sapiens
  misc_RNA (1)...(19): siRNA sense strand
gacauccgacgaaaugaga

SEQ ID NO: 1608082 - RNA, 19 nt, Homo sapiens
  misc_RNA (1)...(19): siRNA sense strand
aaaugagagccaccuaauu

SEQ ID NO: 1608083 - RNA, 19 nt, Homo sapiens
  misc_RNA (1)...(19): siRNA sense strand
uggcagcagccuuguguuu

SEQ ID NO: 1608084 - RNA, 19 nt, Homo sapiens
  misc_RNA (1)...(19): siRNA sense strand
uacaugacauccgacgaaa

SEQ ID NO: 1608085 - RNA, 19 nt, Homo sapiens
  misc_RNA (1)...(19): siRNA sense strand
gguggcagcagccuugugu

SEQ ID NO: 1608086 - RNA, 19 nt, Homo sapiens
  misc_RNA (1)...(19): siRNA sense strand
ggagaugggcagccaagac

SEQ ID NO: 1608087 - RNA, 19 nt, Homo sapiens
  misc_RNA (1)...(19): siRNA sense strand
ggucaugcagaucuacuuc

SEQ ID NO: 1608088 - RNA, 19 nt, Homo sapiens
  misc_RNA (1)...(19): siRNA sense strand
ggcagcagccuuguguuug

SEQ ID NO: 1608089 - RNA, 19 nt, Homo sapiens
  misc_RNA (1)...(19): siRNA sense strand
ucgaggugcucaguaaaca

SEQ ID NO: 1608090 - RNA, 19 nt, Homo sapiens
  misc_RNA (1)...(19): siRNA sense strand
ucaguaaacagggaucuuc

SEQ ID NO: 1608091 - RNA, 19 nt, Homo sapiens
  misc_RNA (1)...(19): siRNA sense strand
ugagagccaccuaauugau

SEQ ID NO: 1608092 - RNA, 19 nt, Homo sapiens
  misc_RNA (1)...(19): siRNA sense strand
gaagagacccugcaaagau

SEQ ID NO: 1608093 - RNA, 19 nt, Homo sapiens
  misc_RNA (1)...(19): siRNA sense strand
gcaucgaggugcucaguaa

SEQ ID NO: 1608094 - RNA, 19 nt, Homo sapiens
  misc_RNA (1)...(19): siRNA sense strand
gaaaugagagccaccuaau

SEQ ID NO: 1608095 - RNA, 19 nt, Homo sapiens
  misc_RNA (1)...(19): siRNA sense strand
ggaagagacccugcaaaga

SEQ ID NO: 1608096 - RNA, 19 nt, Homo sapiens
  misc_RNA (1)...(19): siRNA sense strand
guacaugacauccgacgaa

SEQ ID NO: 1608097 - RNA, 19 nt, Homo sapiens
  misc_RNA (1)...(19): siRNA sense strand
gagagccaccuaauugauu

SEQ ID NO: 1608098 - RNA, 19 nt, Homo sapiens
  misc_RNA (1)...(19): siRNA sense strand
aaugagagccaccuaauug

SEQ ID NO: 1608099 - RNA, 19 nt, Homo sapiens
  misc_RNA (1)...(19): siRNA sense strand
gcacuucacugggcaucga

SEQ ID NO: 1608100 - RNA, 19 nt, Homo sapiens
  misc_RNA (1)...(19): siRNA sense strand
gcagcagccuuguguuugg

SEQ ID NO: 1608101 - RNA, 19 nt, Homo sapiens
  misc_RNA (1)...(19): siRNA sense strand
gcgugaugcugguacauga

SEQ ID NO: 1608102 - RNA, 19 nt, Homo sapiens
  misc_RNA (1)...(19): siRNA sense strand
agagccaccuaauugauuu

SEQ ID NO: 1608103 - RNA, 19 nt, Homo sapiens
  misc_RNA (1)...(19): siRNA sense strand
gggaagagacccugcaaag

SEQ ID NO: 1608104 - RNA, 19 nt, Homo sapiens
  misc_RNA (1)...(19): siRNA sense strand
caugacauccgacgaaaug

SEQ ID NO: 1608105 - RNA, 19 nt, Homo sapiens
  misc_RNA (1)...(19): siRNA sense strand
cgaaaugagagccaccuaa

SEQ ID NO: 1608106 - RNA, 19 nt, Homo sapiens
  misc_RNA (1)...(19): siRNA sense strand
ggacgaggacgccuuucug

SEQ ID NO: 1608107 - RNA, 19 nt, Homo sapiens
  misc_RNA (1)...(19): siRNA sense strand
aagagacccugcaaagauc

SEQ ID NO: 1608108 - RNA, 19 nt, Homo sapiens
  misc_RNA (1)...(19): siRNA sense strand
gacauccgacgaaaugaga

SEQ ID NO: 1608109 - RNA, 19 nt, Homo sapiens
  misc_RNA (1)...(19): siRNA sense strand
aaaugagagccaccuaauu

SEQ ID NO: 1608110 - RNA, 19 nt, Homo sapiens
  misc_RNA (1)...(19): siRNA sense strand
uggcagcagccuuguguuu

SEQ ID NO: 1608111 - RNA, 19 nt, Homo sapiens
  misc_RNA (1)...(19): siRNA sense strand
uacaugacauccgacgaaa

SEQ ID NO: 1608112 - RNA, 19 nt, Homo sapiens
  misc_RNA (1)...(19): siRNA sense strand
gguggcagcagccuugugu

SEQ ID NO: 1608113 - RNA, 19 nt, Homo sapiens
  misc_RNA (1)...(19): siRNA sense strand
ggagaugggcagccaagac

SEQ ID NO: 1608114 - RNA, 19 nt, Homo sapiens
  misc_RNA (1)...(19): siRNA sense strand
ggucaugcagaucuacuuc

SEQ ID NO: 1608115 - RNA, 19 nt, Homo sapiens
  misc_RNA (1)...(19): siRNA sense strand
ggcagcagccuuguguuug

SEQ ID NO: 1608116 - RNA, 19 nt, Homo sapiens
  misc_RNA (1)...(19): siRNA sense strand
ucgaggugcucaguaaaca

SEQ ID NO: 1608117 - RNA, 19 nt, Homo sapiens
  misc_RNA (1)...(19): siRNA sense strand
ucaguaaacagggaucuuc

SEQ ID NO: 1608118 - RNA, 19 nt, Homo sapiens
  misc_RNA (1)...(19): siRNA sense strand
ugagagccaccuaauugau

SEQ ID NO: 1608119 - RNA, 19 nt, Homo sapiens
  misc_RNA (1)...(19): siRNA sense strand
gcaaagacucgagcuauga

SEQ ID NO: 1608120 - RNA, 19 nt, Homo sapiens
  misc_RNA (1)...(19): siRNA sense strand
gcggagacuucaagaaaug

SEQ ID NO: 1608121 - RNA, 19 nt, Homo sapiens
  misc_RNA (1)...(19): siRNA sense strand
cagcggagacuucaagaaa

SEQ ID NO: 1608122 - RNA, 19 nt, Homo sapiens
  misc_RNA (1)...(19): siRNA sense strand
ucaguggacucaagaagug

SEQ ID NO: 1608123 - RNA, 19 nt, Homo sapiens
  misc_RNA (1)...(19): siRNA sense strand
agggcaagcuucaguauga

SEQ ID NO: 1608124 - RNA, 19 nt, Homo sapiens
  misc_RNA (1)...(19): siRNA sense strand
ccaggaguguggcagcuuu

SEQ ID NO: 1608125 - RNA, 19 nt, Homo sapiens
  misc_RNA (1)...(19): siRNA sense strand
ggagagggaucggccauac

SEQ ID NO: 1608126 - RNA, 19 nt, Homo sapiens
  misc_RNA (1)...(19): siRNA sense strand
ggcaagaccaguaugaaga

SEQ ID NO: 1608127 - RNA, 19 nt, Homo sapiens
  misc_RNA (1)...(19): siRNA sense strand
gcgcucagauuacgaagac

SEQ ID NO: 1608128 - RNA, 19 nt, Homo sapiens
  misc_RNA (1)...(19): siRNA sense strand
gcagcccuguggaguguga

SEQ ID NO: 1608129 - RNA, 19 nt, Homo sapiens
  misc_RNA (1)...(19): siRNA sense strand
ucucaggacaguauaauau

SEQ ID NO: 1608130 - RNA, 19 nt, Homo sapiens
  misc_RNA (1)...(19): siRNA sense strand
cuucauggccgacgacauu

SEQ ID NO: 1608131 - RNA, 19 nt, Homo sapiens
  misc_RNA (1)...(19): siRNA sense strand
cagcagcccuguggagugu

SEQ ID NO: 1608132 - RNA, 19 nt, Homo sapiens
  misc_RNA (1)...(19): siRNA sense strand
gauauggacacguuugaca

SEQ ID NO: 1608133 - RNA, 19 nt, Homo sapiens
  misc_RNA (1)...(19): siRNA sense strand
ggauguauuccacuucaug

SEQ ID NO: 1608134 - RNA, 19 nt, Homo sapiens
  misc_RNA (1)...(19): siRNA sense strand
aguaugagcugcaguacag

SEQ ID NO: 1608135 - RNA, 19 nt, Homo sapiens
  misc_RNA (1)...(19): siRNA sense strand
gaccuucucaggacaguau

SEQ ID NO: 1608136 - RNA, 19 nt, Homo sapiens
  misc_RNA (1)...(19): siRNA sense strand
cgcaaagacucgagcuaug

SEQ ID NO: 1608137 - RNA, 19 nt, Homo sapiens
  misc_RNA (1)...(19): siRNA sense strand
ccacaggucggcccacaau

SEQ ID NO: 1608138 - RNA, 19 nt, Homo sapiens
  misc_RNA (1)...(19): siRNA sense strand
gaucucaguggacucaaga

SEQ ID NO: 1608139 - RNA, 19 nt, Homo sapiens
  misc_RNA (1)...(19): siRNA sense strand
ucuccuggcgcucagauua

SEQ ID NO: 1608140 - RNA, 19 nt, Homo sapiens
  misc_RNA (1)...(19): siRNA sense strand
gcaagaccaguaugaagag

SEQ ID NO: 1608141 - RNA, 19 nt, Homo sapiens
  misc_RNA (1)...(19): siRNA sense strand
ccugaagacccauccauug

SEQ ID NO: 1608142 - RNA, 19 nt, Homo sapiens
  misc_RNA (1)...(19): siRNA sense strand
ucaggacaguauaauaucu

SEQ ID NO: 1608143 - RNA, 19 nt, Homo sapiens
  misc_RNA (1)...(19): siRNA sense strand
ggucauuccuccgccacuu

SEQ ID NO: 1608144 - RNA, 19 nt, Homo sapiens
  misc_RNA (1)...(19): siRNA sense strand
ccagcacgcucacccuuac

SEQ ID NO: 1608145 - RNA, 19 nt, Homo sapiens
  misc_RNA (1)...(19): siRNA sense strand
gccuggauauggacacguu

SEQ ID NO: 1608146 - RNA, 19 nt, Homo sapiens
  misc_RNA (1)...(19): siRNA sense strand
uggaggcuauggaagaaga

SEQ ID NO: 1608147 - RNA, 19 nt, Homo sapiens
  misc_RNA (1)...(19): siRNA sense strand
gcugugaguccgaggagaa

SEQ ID NO: 1608148 - RNA, 19 nt, Homo sapiens
  misc_RNA (1)...(19): siRNA sense strand
gacccagucagaggaguua

SEQ ID NO: 1608149 - RNA, 19 nt, Homo sapiens
  misc_RNA (1)...(19): siRNA sense strand
ggucaucugcauccuggaa

SEQ ID NO: 1608150 - RNA, 19 nt, Homo sapiens
  misc_RNA (1)...(19): siRNA sense strand
gcagcggagacuucaagaa

SEQ ID NO: 1608151 - RNA, 19 nt, Homo sapiens
  misc_RNA (1)...(19): siRNA sense strand
agucagaggaguuaaagga

SEQ ID NO: 1608152 - RNA, 19 nt, Homo sapiens
  misc_RNA (1)...(19): siRNA sense strand
ccgcaaagacucgagcuau

SEQ ID NO: 1608153 - RNA, 19 nt, Homo sapiens
  misc_RNA (1)...(19): siRNA sense strand
uguggaggcuauggaagaa

SEQ ID NO: 1608154 - RNA, 19 nt, Homo sapiens
  misc_RNA (1)...(19): siRNA sense strand
ugaagacccauccauugug

SEQ ID NO: 1608155 - RNA, 19 nt, Homo sapiens
  misc_RNA (1)...(19): siRNA sense strand
gaagccuccuggacagacu

SEQ ID NO: 1608156 - RNA, 19 nt, Homo sapiens
  misc_RNA (1)...(19): siRNA sense strand
cauacggccugguguccau

SEQ ID NO: 1608157 - RNA, 19 nt, Homo sapiens
  misc_RNA (1)...(19): siRNA sense strand
cugaagacccauccauugu

SEQ ID NO: 1608158 - RNA, 19 nt, Homo sapiens
  misc_RNA (1)...(19): siRNA sense strand
gccugaagacccauccauu

SEQ ID NO: 1608159 - RNA, 19 nt, Homo sapiens
  misc_RNA (1)...(19): siRNA sense strand
gcccugagcgguucuucau

SEQ ID NO: 1608160 - RNA, 19 nt, Homo sapiens
  misc_RNA (1)...(19): siRNA sense strand
gaggcuauggaagaagaua

SEQ ID NO: 1608161 - RNA, 19 nt, Homo sapiens
  misc_RNA (1)...(19): siRNA sense strand
caccuacaccugccacaug

SEQ ID NO: 1608162 - RNA, 19 nt, Homo sapiens
  misc_RNA (1)...(19): siRNA sense strand
caaagacucgagcuaugag

SEQ ID NO: 1608163 - RNA, 19 nt, Homo sapiens
  misc_RNA (1)...(19): siRNA sense strand
ucaucugcauccuggaaau

SEQ ID NO: 1608164 - RNA, 19 nt, Homo sapiens
  misc_RNA (1)...(19): siRNA sense strand
gcaaagacucgagcuauga

SEQ ID NO: 1608165 - RNA, 19 nt, Homo sapiens
  misc_RNA (1)...(19): siRNA sense strand
gcggagacuucaagaaaug

SEQ ID NO: 1608166 - RNA, 19 nt, Homo sapiens
  misc_RNA (1)...(19): siRNA sense strand
cagcggagacuucaagaaa

SEQ ID NO: 1608167 - RNA, 19 nt, Homo sapiens
  misc_RNA (1)...(19): siRNA sense strand
ucaguggacucaagaagug

SEQ ID NO: 1608168 - RNA, 19 nt, Homo sapiens
  misc_RNA (1)...(19): siRNA sense strand
agggcaagcuucaguauga

SEQ ID NO: 1608169 - RNA, 19 nt, Homo sapiens
  misc_RNA (1)...(19): siRNA sense strand
ccaggaguguggcagcuuu

SEQ ID NO: 1608170 - RNA, 19 nt, Homo sapiens
  misc_RNA (1)...(19): siRNA sense strand
ggagagggaucggccauac

SEQ ID NO: 1608171 - RNA, 19 nt, Homo sapiens
  misc_RNA (1)...(19): siRNA sense strand
ggcaagaccaguaugaaga

SEQ ID NO: 1608172 - RNA, 19 nt, Homo sapiens
  misc_RNA (1)...(19): siRNA sense strand
gcgcucagauuacgaagac

SEQ ID NO: 1608173 - RNA, 19 nt, Homo sapiens
  misc_RNA (1)...(19): siRNA sense strand
gcagcccuguggaguguga

SEQ ID NO: 1608174 - RNA, 19 nt, Homo sapiens
  misc_RNA (1)...(19): siRNA sense strand
ucucaggacaguauaauau

SEQ ID NO: 1608175 - RNA, 19 nt, Homo sapiens
  misc_RNA (1)...(19): siRNA sense strand
cuucauggccgacgacauu

SEQ ID NO: 1608176 - RNA, 19 nt, Homo sapiens
  misc_RNA (1)...(19): siRNA sense strand
cagcagcccuguggagugu

SEQ ID NO: 1608177 - RNA, 19 nt, Homo sapiens
  misc_RNA (1)...(19): siRNA sense strand
gauauggacacguuugaca

SEQ ID NO: 1608178 - RNA, 19 nt, Homo sapiens
  misc_RNA (1)...(19): siRNA sense strand
ggauguauuccacuucaug

SEQ ID NO: 1608179 - RNA, 19 nt, Homo sapiens
  misc_RNA (1)...(19): siRNA sense strand
aguaugagcugcaguacag

SEQ ID NO: 1608180 - RNA, 19 nt, Homo sapiens
  misc_RNA (1)...(19): siRNA sense strand
gaccuucucaggacaguau

SEQ ID NO: 1608181 - RNA, 19 nt, Homo sapiens
  misc_RNA (1)...(19): siRNA sense strand
cgcaaagacucgagcuaug

SEQ ID NO: 1608182 - RNA, 19 nt, Homo sapiens
  misc_RNA (1)...(19): siRNA sense strand
ccacaggucggcccacaau

SEQ ID NO: 1608183 - RNA, 19 nt, Homo sapiens
  misc_RNA (1)...(19): siRNA sense strand
gaucucaguggacucaaga

SEQ ID NO: 1608184 - RNA, 19 nt, Homo sapiens
  misc_RNA (1)...(19): siRNA sense strand
ucuccuggcgcucagauua

SEQ ID NO: 1608185 - RNA, 19 nt, Homo sapiens
  misc_RNA (1)...(19): siRNA sense strand
gcaagaccaguaugaagag

SEQ ID NO: 1608186 - RNA, 19 nt, Homo sapiens
  misc_RNA (1)...(19): siRNA sense strand
ccugaagacccauccauug

SEQ ID NO: 1608187 - RNA, 19 nt, Homo sapiens
  misc_RNA (1)...(19): siRNA sense strand
ucaggacaguauaauaucu

SEQ ID NO: 1608188 - RNA, 19 nt, Homo sapiens
  misc_RNA (1)...(19): siRNA sense strand
ggucauuccuccgccacuu

SEQ ID NO: 1608189 - RNA, 19 nt, Homo sapiens
  misc_RNA (1)...(19): siRNA sense strand
ccagcacgcucacccuuac

SEQ ID NO: 1608190 - RNA, 19 nt, Homo sapiens
  misc_RNA (1)...(19): siRNA sense strand
gccuggauauggacacguu

SEQ ID NO: 1608191 - RNA, 19 nt, Homo sapiens
  misc_RNA (1)...(19): siRNA sense strand
uggaggcuauggaagaaga

SEQ ID NO: 1608192 - RNA, 19 nt, Homo sapiens
  misc_RNA (1)...(19): siRNA sense strand
gcugugaguccgaggagaa

SEQ ID NO: 1608193 - RNA, 19 nt, Homo sapiens
  misc_RNA (1)...(19): siRNA sense strand
gacccagucagaggaguua

SEQ ID NO: 1608194 - RNA, 19 nt, Homo sapiens
  misc_RNA (1)...(19): siRNA sense strand
ggucaucugcauccuggaa

SEQ ID NO: 1608195 - RNA, 19 nt, Homo sapiens
  misc_RNA (1)...(19): siRNA sense strand
gcagcggagacuucaagaa

SEQ ID NO: 1608196 - RNA, 19 nt, Homo sapiens
  misc_RNA (1)...(19): siRNA sense strand
agucagaggaguuaaagga

SEQ ID NO: 1608197 - RNA, 19 nt, Homo sapiens
  misc_RNA (1)...(19): siRNA sense strand
ccgcaaagacucgagcuau

SEQ ID NO: 1608198 - RNA, 19 nt, Homo sapiens
  misc_RNA (1)...(19): siRNA sense strand
uguggaggcuauggaagaa

SEQ ID NO: 1608199 - RNA, 19 nt, Homo sapiens
  misc_RNA (1)...(19): siRNA sense strand
ugaagacccauccauugug

SEQ ID NO: 1608200 - RNA, 19 nt, Homo sapiens
  misc_RNA (1)...(19): siRNA sense strand
gaagccuccuggacagacu

SEQ ID NO: 1608201 - RNA, 19 nt, Homo sapiens
  misc_RNA (1)...(19): siRNA sense strand
cauacggccugguguccau

SEQ ID NO: 1608202 - RNA, 19 nt, Homo sapiens
  misc_RNA (1)...(19): siRNA sense strand
cugaagacccauccauugu

SEQ ID NO: 1608203 - RNA, 19 nt, Homo sapiens
  misc_RNA (1)...(19): siRNA sense strand
gccugaagacccauccauu

SEQ ID NO: 1608204 - RNA, 19 nt, Homo sapiens
  misc_RNA (1)...(19): siRNA sense strand
gcccugagcgguucuucau

SEQ ID NO: 1608205 - RNA, 19 nt, Homo sapiens
  misc_RNA (1)...(19): siRNA sense strand
gaggcuauggaagaagaua

SEQ ID NO: 1608206 - RNA, 19 nt, Homo sapiens
  misc_RNA (1)...(19): siRNA sense strand
caccuacaccugccacaug

SEQ ID NO: 1608207 - RNA, 19 nt, Homo sapiens
  misc_RNA (1)...(19): siRNA sense strand
caaagacucgagcuaugag

SEQ ID NO: 1608208 - RNA, 19 nt, Homo sapiens
  misc_RNA (1)...(19): siRNA sense strand
ucaucugcauccuggaaau

SEQ ID NO: 1608209 - RNA, 19 nt, Homo sapiens
  misc_RNA (1)...(19): siRNA sense strand
gcaaagacucgagcuauga

SEQ ID NO: 1608210 - RNA, 19 nt, Homo sapiens
  misc_RNA (1)...(19): siRNA sense strand
gcggagacuucaagaaaug

SEQ ID NO: 1608211 - RNA, 19 nt, Homo sapiens
  misc_RNA (1)...(19): siRNA sense strand
cagcggagacuucaagaaa

SEQ ID NO: 1608212 - RNA, 19 nt, Homo sapiens
  misc_RNA (1)...(19): siRNA sense strand
ucaguggacucaagaagug

SEQ ID NO: 1608213 - RNA, 19 nt, Homo sapiens
  misc_RNA (1)...(19): siRNA sense strand
agggcaagcuucaguauga

SEQ ID NO: 1608214 - RNA, 19 nt, Homo sapiens
  misc_RNA (1)...(19): siRNA sense strand
ccaggaguguggcagcuuu

SEQ ID NO: 1608215 - RNA, 19 nt, Homo sapiens
  misc_RNA (1)...(19): siRNA sense strand
ggagagggaucggccauac

SEQ ID NO: 1608216 - RNA, 19 nt, Homo sapiens
  misc_RNA (1)...(19): siRNA sense strand
ggcaagaccaguaugaaga

SEQ ID NO: 1608217 - RNA, 19 nt, Homo sapiens
  misc_RNA (1)...(19): siRNA sense strand
gcgcucagauuacgaagac

SEQ ID NO: 1608218 - RNA, 19 nt, Homo sapiens
  misc_RNA (1)...(19): siRNA sense strand
gcagcccuguggaguguga

SEQ ID NO: 1608219 - RNA, 19 nt, Homo sapiens
  misc_RNA (1)...(19): siRNA sense strand
ucucaggacaguauaauau

SEQ ID NO: 1608220 - RNA, 19 nt, Homo sapiens
  misc_RNA (1)...(19): siRNA sense strand
cuucauggccgacgacauu

SEQ ID NO: 1608221 - RNA, 19 nt, Homo sapiens
  misc_RNA (1)...(19): siRNA sense strand
cagcagcccuguggagugu

SEQ ID NO: 1608222 - RNA, 19 nt, Homo sapiens
  misc_RNA (1)...(19): siRNA sense strand
gauauggacacguuugaca

SEQ ID NO: 1608223 - RNA, 19 nt, Homo sapiens
  misc_RNA (1)...(19): siRNA sense strand
ggauguauuccacuucaug

SEQ ID NO: 1608224 - RNA, 19 nt, Homo sapiens
  misc_RNA (1)...(19): siRNA sense strand
aguaugagcugcaguacag

SEQ ID NO: 1608225 - RNA, 19 nt, Homo sapiens
  misc_RNA (1)...(19): siRNA sense strand
gaccuucucaggacaguau

SEQ ID NO: 1608226 - RNA, 19 nt, Homo sapiens
  misc_RNA (1)...(19): siRNA sense strand
cgcaaagacucgagcuaug

SEQ ID NO: 1608227 - RNA, 19 nt, Homo sapiens
  misc_RNA (1)...(19): siRNA sense strand
ccacaggucggcccacaau

SEQ ID NO: 1608228 - RNA, 19 nt, Homo sapiens
  misc_RNA (1)...(19): siRNA sense strand
gaucucaguggacucaaga

SEQ ID NO: 1608229 - RNA, 19 nt, Homo sapiens
  misc_RNA (1)...(19): siRNA sense strand
ucuccuggcgcucagauua

SEQ ID NO: 1608230 - RNA, 19 nt, Homo sapiens
  misc_RNA (1)...(19): siRNA sense strand
gcaagaccaguaugaagag

SEQ ID NO: 1608231 - RNA, 19 nt, Homo sapiens
  misc_RNA (1)...(19): siRNA sense strand
ccugaagacccauccauug

SEQ ID NO: 1608232 - RNA, 19 nt, Homo sapiens
  misc_RNA (1)...(19): siRNA sense strand
ucaggacaguauaauaucu

SEQ ID NO: 1608233 - RNA, 19 nt, Homo sapiens
  misc_RNA (1)...(19): siRNA sense strand
ggucauuccuccgccacuu

SEQ ID NO: 1608234 - RNA, 19 nt, Homo sapiens
  misc_RNA (1)...(19): siRNA sense strand
ccagcacgcucacccuuac

SEQ ID NO: 1608235 - RNA, 19 nt, Homo sapiens
  misc_RNA (1)...(19): siRNA sense strand
gccuggauauggacacguu

SEQ ID NO: 1608236 - RNA, 19 nt, Homo sapiens
  misc_RNA (1)...(19): siRNA sense strand
uggaggcuauggaagaaga

SEQ ID NO: 1608237 - RNA, 19 nt, Homo sapiens
  misc_RNA (1)...(19): siRNA sense strand
gcugugaguccgaggagaa

SEQ ID NO: 1608238 - RNA, 19 nt, Homo sapiens
  misc_RNA (1)...(19): siRNA sense strand
gacccagucagaggaguua

SEQ ID NO: 1608239 - RNA, 19 nt, Homo sapiens
  misc_RNA (1)...(19): siRNA sense strand
ggucaucugcauccuggaa

SEQ ID NO: 1608240 - RNA, 19 nt, Homo sapiens
  misc_RNA (1)...(19): siRNA sense strand
gcagcggagacuucaagaa

SEQ ID NO: 1608241 - RNA, 19 nt, Homo sapiens
  misc_RNA (1)...(19): siRNA sense strand
agucagaggaguuaaagga

SEQ ID NO: 1608242 - RNA, 19 nt, Homo sapiens
  misc_RNA (1)...(19): siRNA sense strand
ccgcaaagacucgagcuau

SEQ ID NO: 1608243 - RNA, 19 nt, Homo sapiens
  misc_RNA (1)...(19): siRNA sense strand
uguggaggcuauggaagaa

SEQ ID NO: 1608244 - RNA, 19 nt, Homo sapiens
  misc_RNA (1)...(19): siRNA sense strand
ugaagacccauccauugug

SEQ ID NO: 1608245 - RNA, 19 nt, Homo sapiens
  misc_RNA (1)...(19): siRNA sense strand
gaagccuccuggacagacu

SEQ ID NO: 1608246 - RNA, 19 nt, Homo sapiens
  misc_RNA (1)...(19): siRNA sense strand
cauacggccugguguccau

SEQ ID NO: 1608247 - RNA, 19 nt, Homo sapiens
  misc_RNA (1)...(19): siRNA sense strand
cugaagacccauccauugu

SEQ ID NO: 1608248 - RNA, 19 nt, Homo sapiens
  misc_RNA (1)...(19): siRNA sense strand
gccugaagacccauccauu

SEQ ID NO: 1608249 - RNA, 19 nt, Homo sapiens
  misc_RNA (1)...(19): siRNA sense strand
gcccugagcgguucuucau

SEQ ID NO: 1608250 - RNA, 19 nt, Homo sapiens
  misc_RNA (1)...(19): siRNA sense strand
gaggcuauggaagaagaua

SEQ ID NO: 1608251 - RNA, 19 nt, Homo sapiens
  misc_RNA (1)...(19): siRNA sense strand
caccuacaccugccacaug

SEQ ID NO: 1608252 - RNA, 19 nt, Homo sapiens
  misc_RNA (1)...(19): siRNA sense strand
caaagacucgagcuaugag

SEQ ID NO: 1608253 - RNA, 19 nt, Homo sapiens
  misc_RNA (1)...(19): siRNA sense strand
ucaucugcauccuggaaau

SEQ ID NO: 1608254 - RNA, 19 nt, Homo sapiens
  misc_RNA (1)...(19): siRNA sense strand
gcaaccagcugccugcuua

SEQ ID NO: 1608255 - RNA, 19 nt, Homo sapiens
  misc_RNA (1)...(19): siRNA sense strand
gaaaugugcuuccucucuu

SEQ ID NO: 1608256 - RNA, 19 nt, Homo sapiens
  misc_RNA (1)...(19): siRNA sense strand
gaaaggugcuuccucucuu

SEQ ID NO: 1608257 - RNA, 19 nt, Homo sapiens
  misc_RNA (1)...(19): siRNA sense strand
uauggacgaugaagaauuu

SEQ ID NO: 1608258 - RNA, 19 nt, Homo sapiens
  misc_RNA (1)...(19): siRNA sense strand
uauaauagacccauccuuu

SEQ ID NO: 1608259 - RNA, 19 nt, Homo sapiens
  misc_RNA (1)...(19): siRNA sense strand
cagaucaccugguuuguau

SEQ ID NO: 1608260 - RNA, 19 nt, Homo sapiens
  misc_RNA (1)...(19): siRNA sense strand
uggcgaagcuggccgaauu

SEQ ID NO: 1608261 - RNA, 19 nt, Homo sapiens
  misc_RNA (1)...(19): siRNA sense strand
gaaacacaguggagcgaau

SEQ ID NO: 1608262 - RNA, 19 nt, Homo sapiens
  misc_RNA (1)...(19): siRNA sense strand
ggaaaggacuaaaauacaa

SEQ ID NO: 1608263 - RNA, 19 nt, Homo sapiens
  misc_RNA (1)...(19): siRNA sense strand
gaucaugggcuacaaagau

SEQ ID NO: 1608264 - RNA, 19 nt, Homo sapiens
  misc_RNA (1)...(19): siRNA sense strand
guacaaauucgaugacaau

SEQ ID NO: 1608265 - RNA, 19 nt, Homo sapiens
  misc_RNA (1)...(19): siRNA sense strand
gaaacccgauggaggcaau

SEQ ID NO: 1608266 - RNA, 19 nt, Homo sapiens
  misc_RNA (1)...(19): siRNA sense strand
gauuauggacgaugaagaa

SEQ ID NO: 1608267 - RNA, 19 nt, Homo sapiens
  misc_RNA (1)...(19): siRNA sense strand
gcgaauguaucgagacaca

SEQ ID NO: 1608268 - RNA, 19 nt, Homo sapiens
  misc_RNA (1)...(19): siRNA sense strand
gagcgaauguaucgagaca

SEQ ID NO: 1608269 - RNA, 19 nt, Homo sapiens
  misc_RNA (1)...(19): siRNA sense strand
ugaagauuauggacgauga

SEQ ID NO: 1608270 - RNA, 19 nt, Homo sapiens
  misc_RNA (1)...(19): siRNA sense strand
cauauucuacuuccacuuu

SEQ ID NO: 1608271 - RNA, 19 nt, Homo sapiens
  misc_RNA (1)...(19): siRNA sense strand
ucaccugucuccuggaaga

SEQ ID NO: 1608272 - RNA, 19 nt, Homo sapiens
  misc_RNA (1)...(19): siRNA sense strand
cacauucuccuacaacuuu

SEQ ID NO: 1608273 - RNA, 19 nt, Homo sapiens
  misc_RNA (1)...(19): siRNA sense strand
uuacaaguguuuccagauc

SEQ ID NO: 1608274 - RNA, 19 nt, Homo sapiens
  misc_RNA (1)...(19): siRNA sense strand
gguacaaauucgaugacaa

SEQ ID NO: 1608275 - RNA, 19 nt, Homo sapiens
  misc_RNA (1)...(19): siRNA sense strand
cgaugacaauuaugcauuc

SEQ ID NO: 1608276 - RNA, 19 nt, Homo sapiens
  misc_RNA (1)...(19): siRNA sense strand
ccauggaaguuguaaagca

SEQ ID NO: 1608277 - RNA, 19 nt, Homo sapiens
  misc_RNA (1)...(19): siRNA sense strand
ggacuaaaauacaacuuuc

SEQ ID NO: 1608278 - RNA, 19 nt, Homo sapiens
  misc_RNA (1)...(19): siRNA sense strand
cauacugucuccuaacaca

SEQ ID NO: 1608279 - RNA, 19 nt, Homo sapiens
  misc_RNA (1)...(19): siRNA sense strand
ggagaucaugggcuacaaa

SEQ ID NO: 1608280 - RNA, 19 nt, Homo sapiens
  misc_RNA (1)...(19): siRNA sense strand
aaaggugcuuccucucuug

SEQ ID NO: 1608281 - RNA, 19 nt, Homo sapiens
  misc_RNA (1)...(19): siRNA sense strand
gaagauuauggacgaugaa

SEQ ID NO: 1608282 - RNA, 19 nt, Homo sapiens
  misc_RNA (1)...(19): siRNA sense strand
gcuacgaagugaaaacaaa

SEQ ID NO: 1608283 - RNA, 19 nt, Homo sapiens
  misc_RNA (1)...(19): siRNA sense strand
gaugaagaauuugcauacu

SEQ ID NO: 1608284 - RNA, 19 nt, Homo sapiens
  misc_RNA (1)...(19): siRNA sense strand
aagccucacuucagaaaca

SEQ ID NO: 1608285 - RNA, 19 nt, Homo sapiens
  misc_RNA (1)...(19): siRNA sense strand
gaggcaauguauccacaca

SEQ ID NO: 1608286 - RNA, 19 nt, Homo sapiens
  misc_RNA (1)...(19): siRNA sense strand
aaaugugcuuccucucuug

SEQ ID NO: 1608287 - RNA, 19 nt, Homo sapiens
  misc_RNA (1)...(19): siRNA sense strand
gcugugcuacgaagugaaa

SEQ ID NO: 1608288 - RNA, 19 nt, Homo sapiens
  misc_RNA (1)...(19): siRNA sense strand
ccagcugccugcuuacaag

SEQ ID NO: 1608289 - RNA, 19 nt, Homo sapiens
  misc_RNA (1)...(19): siRNA sense strand
auucaugccuugguacaaa

SEQ ID NO: 1608290 - RNA, 19 nt, Homo sapiens
  misc_RNA (1)...(19): siRNA sense strand
uaauagacccauccuuucu

SEQ ID NO: 1608291 - RNA, 19 nt, Homo sapiens
  misc_RNA (1)...(19): siRNA sense strand
uugguucugugacgacaua

SEQ ID NO: 1608292 - RNA, 19 nt, Homo sapiens
  misc_RNA (1)...(19): siRNA sense strand
ggugcuuccucucuugguu

SEQ ID NO: 1608293 - RNA, 19 nt, Homo sapiens
  misc_RNA (1)...(19): siRNA sense strand
uacaaguguuuccagauca

SEQ ID NO: 1608294 - RNA, 19 nt, Homo sapiens
  misc_RNA (1)...(19): siRNA sense strand
gacccauugucaugcagaa

SEQ ID NO: 1608295 - RNA, 19 nt, Homo sapiens
  misc_RNA (1)...(19): siRNA sense strand
cagugaaggucagccauuc

SEQ ID NO: 1608296 - RNA, 19 nt, Homo sapiens
  misc_RNA (1)...(19): siRNA sense strand
gagcaccacgcagaaaugu

SEQ ID NO: 1608297 - RNA, 19 nt, Homo sapiens
  misc_RNA (1)...(19): siRNA sense strand
ggacgaugaagaauuugca

SEQ ID NO: 1608298 - RNA, 19 nt, Homo sapiens
  misc_RNA (1)...(19): siRNA sense strand
gcugccugcuuacaagugu

SEQ ID NO: 1608299 - RNA, 19 nt, Homo sapiens
  misc_RNA (1)...(19): siRNA sense strand
ccugagacccauugucaug

SEQ ID NO: 1608300 - RNA, 19 nt, Homo sapiens
  misc_RNA (1)...(19): siRNA sense strand
aagcaccacucaccugucu

SEQ ID NO: 1608301 - RNA, 19 nt, Homo sapiens
  misc_RNA (1)...(19): siRNA sense strand
aucaugggcuacaaagauu

SEQ ID NO: 1608302 - RNA, 19 nt, Homo sapiens
  misc_RNA (1)...(19): siRNA sense strand
cgaugaagaauuugcauac

SEQ ID NO: 1608303 - RNA, 19 nt, Homo sapiens
  misc_RNA (1)...(19): siRNA sense strand
gcaagcugcaggagauucu

SEQ ID NO: 1608304 - RNA, 19 nt, Homo sapiens
  misc_RNA (1)...(19): siRNA sense strand
cauccuuucucgucggaau

SEQ ID NO: 1608305 - RNA, 19 nt, Homo sapiens
  misc_RNA (1)...(19): siRNA sense strand
augaagaauuugcauacug

SEQ ID NO: 1608306 - RNA, 19 nt, Homo sapiens
  misc_RNA (1)...(19): siRNA sense strand
gacacauucuccuacaacu

SEQ ID NO: 1608307 - RNA, 19 nt, Homo sapiens
  misc_RNA (1)...(19): siRNA sense strand
gagaucaugggcuacaaag

SEQ ID NO: 1608308 - RNA, 19 nt, Homo sapiens
  misc_RNA (1)...(19): siRNA sense strand
ugagacccauugucaugca

SEQ ID NO: 1608309 - RNA, 19 nt, Homo sapiens
  misc_RNA (1)...(19): siRNA sense strand
caccauggaaguuguaaag

SEQ ID NO: 1608310 - RNA, 19 nt, Homo sapiens
  misc_RNA (1)...(19): siRNA sense strand
agaaaugugcuuccucucu

SEQ ID NO: 1608311 - RNA, 19 nt, Homo sapiens
  misc_RNA (1)...(19): siRNA sense strand
auaauagacccauccuuuc

SEQ ID NO: 1608312 - RNA, 19 nt, Homo sapiens
  misc_RNA (1)...(19): siRNA sense strand
cuacuacuacugggaaaga

SEQ ID NO: 1608313 - RNA, 19 nt, Homo sapiens
  misc_RNA (1)...(19): siRNA sense strand
gcacagcaacgugaaucuc

SEQ ID NO: 1608314 - RNA, 19 nt, Homo sapiens
  misc_RNA (1)...(19): siRNA sense strand
aaaccuacgcaaagccuau

SEQ ID NO: 1608315 - RNA, 19 nt, Homo sapiens
  misc_RNA (1)...(19): siRNA sense strand
ucgaugacaauuaugcauu

SEQ ID NO: 1608316 - RNA, 19 nt, Homo sapiens
  misc_RNA (1)...(19): siRNA sense strand
agccauucaugccuuggua

SEQ ID NO: 1608317 - RNA, 19 nt, Homo sapiens
  misc_RNA (1)...(19): siRNA sense strand
ggaaaacuuuguguacagu

SEQ ID NO: 1608318 - RNA, 19 nt, Homo sapiens
  misc_RNA (1)...(19): siRNA sense strand
cacaguggagcgaauguau

SEQ ID NO: 1608319 - RNA, 19 nt, Homo sapiens
  misc_RNA (1)...(19): siRNA sense strand
acucaccugucuccuggaa

SEQ ID NO: 1608320 - RNA, 19 nt, Homo sapiens
  misc_RNA (1)...(19): siRNA sense strand
agaaaggugcuuccucucu

SEQ ID NO: 1608321 - RNA, 19 nt, Homo sapiens
  misc_RNA (1)...(19): siRNA sense strand
uggcugugcuacgaaguga

SEQ ID NO: 1608322 - RNA, 19 nt, Homo sapiens
  misc_RNA (1)...(19): siRNA sense strand
gcaaacaugucccagguaa

SEQ ID NO: 1608323 - RNA, 19 nt, Homo sapiens
  misc_RNA (1)...(19): siRNA sense strand
gcaaguggcaguacugaua

SEQ ID NO: 1608324 - RNA, 19 nt, Homo sapiens
  misc_RNA (1)...(19): siRNA sense strand
ggagacagguuugcauauu

SEQ ID NO: 1608325 - RNA, 19 nt, Homo sapiens
  misc_RNA (1)...(19): siRNA sense strand
uggcaguacugauaauuua

SEQ ID NO: 1608326 - RNA, 19 nt, Homo sapiens
  misc_RNA (1)...(19): siRNA sense strand
gagacagguuugcauauug

SEQ ID NO: 1608327 - RNA, 19 nt, Homo sapiens
  misc_RNA (1)...(19): siRNA sense strand
gacccuggcuaucuauauu

SEQ ID NO: 1608328 - RNA, 19 nt, Homo sapiens
  misc_RNA (1)...(19): siRNA sense strand
gaucaccguuauaaugaau

SEQ ID NO: 1608329 - RNA, 19 nt, Homo sapiens
  misc_RNA (1)...(19): siRNA sense strand
acauaauccugaucuguuu

SEQ ID NO: 1608330 - RNA, 19 nt, Homo sapiens
  misc_RNA (1)...(19): siRNA sense strand
gugcgacccuggcuaucua

SEQ ID NO: 1608331 - RNA, 19 nt, Homo sapiens
  misc_RNA (1)...(19): siRNA sense strand
ucaguuggaucaccguuau

SEQ ID NO: 1608332 - RNA, 19 nt, Homo sapiens
  misc_RNA (1)...(19): siRNA sense strand
ggaucaccguuauaaugaa

SEQ ID NO: 1608333 - RNA, 19 nt, Homo sapiens
  misc_RNA (1)...(19): siRNA sense strand
aaacuucacgcaauuaugu

SEQ ID NO: 1608334 - RNA, 19 nt, Homo sapiens
  misc_RNA (1)...(19): siRNA sense strand
caaguggcaguacugauaa

SEQ ID NO: 1608335 - RNA, 19 nt, Homo sapiens
  misc_RNA (1)...(19): siRNA sense strand
agacagguuugcauauugu

SEQ ID NO: 1608336 - RNA, 19 nt, Homo sapiens
  misc_RNA (1)...(19): siRNA sense strand
cccuggcuaucuauauuua

SEQ ID NO: 1608337 - RNA, 19 nt, Homo sapiens
  misc_RNA (1)...(19): siRNA sense strand
auucaaacuucacgcaauu

SEQ ID NO: 1608338 - RNA, 19 nt, Homo sapiens
  misc_RNA (1)...(19): siRNA sense strand
cacauaauccugaucuguu

SEQ ID NO: 1608339 - RNA, 19 nt, Homo sapiens
  misc_RNA (1)...(19): siRNA sense strand
guggagacagguuugcaua

SEQ ID NO: 1608340 - RNA, 19 nt, Homo sapiens
  misc_RNA (1)...(19): siRNA sense strand
uggaucaccguuauaauga

SEQ ID NO: 1608341 - RNA, 19 nt, Homo sapiens
  misc_RNA (1)...(19): siRNA sense strand
gcaguacugauaauuuagu

SEQ ID NO: 1608342 - RNA, 19 nt, Homo sapiens
  misc_RNA (1)...(19): siRNA sense strand
ucaccguuauaaugaauuc

SEQ ID NO: 1608343 - RNA, 19 nt, Homo sapiens
  misc_RNA (1)...(19): siRNA sense strand
ccacauaauccugaucugu

SEQ ID NO: 1608344 - RNA, 19 nt, Homo sapiens
  misc_RNA (1)...(19): siRNA sense strand
gaugucagccauggaacaa

SEQ ID NO: 1608345 - RNA, 19 nt, Homo sapiens
  misc_RNA (1)...(19): siRNA sense strand
guggcaguacugauaauuu

SEQ ID NO: 1608346 - RNA, 19 nt, Homo sapiens
  misc_RNA (1)...(19): siRNA sense strand
ucaaacuucacgcaauuau

SEQ ID NO: 1608347 - RNA, 19 nt, Homo sapiens
  misc_RNA (1)...(19): siRNA sense strand
caaacuucacgcaauuaug

SEQ ID NO: 1608348 - RNA, 19 nt, Homo sapiens
  misc_RNA (1)...(19): siRNA sense strand
aaacaugucccagguaagg

SEQ ID NO: 1608349 - RNA, 19 nt, Homo sapiens
  misc_RNA (1)...(19): siRNA sense strand
aaacaaucacagcaauuuc

SEQ ID NO: 1608350 - RNA, 19 nt, Homo sapiens
  misc_RNA (1)...(19): siRNA sense strand
aauucaaacuucacgcaau

SEQ ID NO: 1608351 - RNA, 19 nt, Homo sapiens
  misc_RNA (1)...(19): siRNA sense strand
uuggaucaccguuauaaug

SEQ ID NO: 1608352 - RNA, 19 nt, Homo sapiens
  misc_RNA (1)...(19): siRNA sense strand
ccugaucuguuugcaagug

SEQ ID NO: 1608353 - RNA, 19 nt, Homo sapiens
  misc_RNA (1)...(19): siRNA sense strand
cgacccuggcuaucuauau

SEQ ID NO: 1608354 - RNA, 19 nt, Homo sapiens
  misc_RNA (1)...(19): siRNA sense strand
ggaugucagccauggaaca

SEQ ID NO: 1608355 - RNA, 19 nt, Homo sapiens
  misc_RNA (1)...(19): siRNA sense strand
gguaaggcaagugggauug

SEQ ID NO: 1608356 - RNA, 19 nt, Homo sapiens
  misc_RNA (1)...(19): siRNA sense strand
caguacugauaauuuagug

SEQ ID NO: 1608357 - RNA, 19 nt, Homo sapiens
  misc_RNA (1)...(19): siRNA sense strand
cuggcuaucuauauuuauc

SEQ ID NO: 1608358 - RNA, 19 nt, Homo sapiens
  misc_RNA (1)...(19): siRNA sense strand
caaucacagcaauuucuug

SEQ ID NO: 1608359 - RNA, 19 nt, Homo sapiens
  misc_RNA (1)...(19): siRNA sense strand
gcaaguggcaguacugaua

SEQ ID NO: 1608360 - RNA, 19 nt, Homo sapiens
  misc_RNA (1)...(19): siRNA sense strand
ggagacagguuugcauauu

SEQ ID NO: 1608361 - RNA, 19 nt, Homo sapiens
  misc_RNA (1)...(19): siRNA sense strand
uggcaguacugauaauuua

SEQ ID NO: 1608362 - RNA, 19 nt, Homo sapiens
  misc_RNA (1)...(19): siRNA sense strand
gagacagguuugcauauug

SEQ ID NO: 1608363 - RNA, 19 nt, Homo sapiens
  misc_RNA (1)...(19): siRNA sense strand
gacccuggcuaucuauauu

SEQ ID NO: 1608364 - RNA, 19 nt, Homo sapiens
  misc_RNA (1)...(19): siRNA sense strand
gaucaccguuauaaugaau

SEQ ID NO: 1608365 - RNA, 19 nt, Homo sapiens
  misc_RNA (1)...(19): siRNA sense strand
acauaauccugaucuguuu

SEQ ID NO: 1608366 - RNA, 19 nt, Homo sapiens
  misc_RNA (1)...(19): siRNA sense strand
gugcgacccuggcuaucua

SEQ ID NO: 1608367 - RNA, 19 nt, Homo sapiens
  misc_RNA (1)...(19): siRNA sense strand
ucaguuggaucaccguuau

SEQ ID NO: 1608368 - RNA, 19 nt, Homo sapiens
  misc_RNA (1)...(19): siRNA sense strand
ggaucaccguuauaaugaa

SEQ ID NO: 1608369 - RNA, 19 nt, Homo sapiens
  misc_RNA (1)...(19): siRNA sense strand
aaacuucacgcaauuaugu

SEQ ID NO: 1608370 - RNA, 19 nt, Homo sapiens
  misc_RNA (1)...(19): siRNA sense strand
caaguggcaguacugauaa

SEQ ID NO: 1608371 - RNA, 19 nt, Homo sapiens
  misc_RNA (1)...(19): siRNA sense strand
agacagguuugcauauugu

SEQ ID NO: 1608372 - RNA, 19 nt, Homo sapiens
  misc_RNA (1)...(19): siRNA sense strand
cccuggcuaucuauauuua

SEQ ID NO: 1608373 - RNA, 19 nt, Homo sapiens
  misc_RNA (1)...(19): siRNA sense strand
auucaaacuucacgcaauu

SEQ ID NO: 1608374 - RNA, 19 nt, Homo sapiens
  misc_RNA (1)...(19): siRNA sense strand
cacauaauccugaucuguu

SEQ ID NO: 1608375 - RNA, 19 nt, Homo sapiens
  misc_RNA (1)...(19): siRNA sense strand
guggagacagguuugcaua

SEQ ID NO: 1608376 - RNA, 19 nt, Homo sapiens
  misc_RNA (1)...(19): siRNA sense strand
uggaucaccguuauaauga

SEQ ID NO: 1608377 - RNA, 19 nt, Homo sapiens
  misc_RNA (1)...(19): siRNA sense strand
gcaguacugauaauuuagu

SEQ ID NO: 1608378 - RNA, 19 nt, Homo sapiens
  misc_RNA (1)...(19): siRNA sense strand
ucaccguuauaaugaauuc

SEQ ID NO: 1608379 - RNA, 19 nt, Homo sapiens
  misc_RNA (1)...(19): siRNA sense strand
ccacauaauccugaucugu

SEQ ID NO: 1608380 - RNA, 19 nt, Homo sapiens
  misc_RNA (1)...(19): siRNA sense strand
gaugucagccauggaacaa

SEQ ID NO: 1608381 - RNA, 19 nt, Homo sapiens
  misc_RNA (1)...(19): siRNA sense strand
guggcaguacugauaauuu

SEQ ID NO: 1608382 - RNA, 19 nt, Homo sapiens
  misc_RNA (1)...(19): siRNA sense strand
ucaaacuucacgcaauuau

SEQ ID NO: 1608383 - RNA, 19 nt, Homo sapiens
  misc_RNA (1)...(19): siRNA sense strand
caaacuucacgcaauuaug

SEQ ID NO: 1608384 - RNA, 19 nt, Homo sapiens
  misc_RNA (1)...(19): siRNA sense strand
aaacaaucacagcaauuuc

SEQ ID NO: 1608385 - RNA, 19 nt, Homo sapiens
  misc_RNA (1)...(19): siRNA sense strand
aauucaaacuucacgcaau

SEQ ID NO: 1608386 - RNA, 19 nt, Homo sapiens
  misc_RNA (1)...(19): siRNA sense strand
uuggaucaccguuauaaug

SEQ ID NO: 1608387 - RNA, 19 nt, Homo sapiens
  misc_RNA (1)...(19): siRNA sense strand
ccugaucuguuugcaagug

SEQ ID NO: 1608388 - RNA, 19 nt, Homo sapiens
  misc_RNA (1)...(19): siRNA sense strand
cgacccuggcuaucuauau

SEQ ID NO: 1608389 - RNA, 19 nt, Homo sapiens
  misc_RNA (1)...(19): siRNA sense strand
gguaaggcaagugggauug

SEQ ID NO: 1608390 - RNA, 19 nt, Homo sapiens
  misc_RNA (1)...(19): siRNA sense strand
ggaugucagccauggaaca

SEQ ID NO: 1608391 - RNA, 19 nt, Homo sapiens
  misc_RNA (1)...(19): siRNA sense strand
caguacugauaauuuagug

SEQ ID NO: 1608392 - RNA, 19 nt, Homo sapiens
  misc_RNA (1)...(19): siRNA sense strand
cuggcuaucuauauuuauc

SEQ ID NO: 1608393 - RNA, 19 nt, Homo sapiens
  misc_RNA (1)...(19): siRNA sense strand
caaucacagcaauuucuug

SEQ ID NO: 1608394 - RNA, 19 nt, Homo sapiens
  misc_RNA (1)...(19): siRNA sense strand
gcagaaagaugcccgauuu

SEQ ID NO: 1608395 - RNA, 19 nt, Homo sapiens
  misc_RNA (1)...(19): siRNA sense strand
ccaaagugguucagaauga

SEQ ID NO: 1608396 - RNA, 19 nt, Homo sapiens
  misc_RNA (1)...(19): siRNA sense strand
gcaccaagaugacugugaa

SEQ ID NO: 1608397 - RNA, 19 nt, Homo sapiens
  misc_RNA (1)...(19): siRNA sense strand
gaauuuauaugaccuggau

SEQ ID NO: 1608398 - RNA, 19 nt, Homo sapiens
  misc_RNA (1)...(19): siRNA sense strand
uauaugaccuggaugaaga

SEQ ID NO: 1608399 - RNA, 19 nt, Homo sapiens
  misc_RNA (1)...(19): siRNA sense strand
gagaagaucagcuugaaga

SEQ ID NO: 1608400 - RNA, 19 nt, Homo sapiens
  misc_RNA (1)...(19): siRNA sense strand
ugaagaugaugaugguaua

SEQ ID NO: 1608401 - RNA, 19 nt, Homo sapiens
  misc_RNA (1)...(19): siRNA sense strand
caagaugacugugaauaau

SEQ ID NO: 1608402 - RNA, 19 nt, Homo sapiens
  misc_RNA (1)...(19): siRNA sense strand
ggacacuggugaacaagga

SEQ ID NO: 1608403 - RNA, 19 nt, Homo sapiens
  misc_RNA (1)...(19): siRNA sense strand
ggaauguuaucaccucaga

SEQ ID NO: 1608404 - RNA, 19 nt, Homo sapiens
  misc_RNA (1)...(19): siRNA sense strand
ccagagagauguugaacuc

SEQ ID NO: 1608405 - RNA, 19 nt, Homo sapiens
  misc_RNA (1)...(19): siRNA sense strand
ccaagaugacugugaauaa

SEQ ID NO: 1608406 - RNA, 19 nt, Homo sapiens
  misc_RNA (1)...(19): siRNA sense strand
gcagaagauuggccucuca

SEQ ID NO: 1608407 - RNA, 19 nt, Homo sapiens
  misc_RNA (1)...(19): siRNA sense strand
ggaugaagaugaugauggu

SEQ ID NO: 1608408 - RNA, 19 nt, Homo sapiens
  misc_RNA (1)...(19): siRNA sense strand
gggagaagaucagcuugaa

SEQ ID NO: 1608409 - RNA, 19 nt, Homo sapiens
  misc_RNA (1)...(19): siRNA sense strand
ccacgcagcccacagaauu

SEQ ID NO: 1608410 - RNA, 19 nt, Homo sapiens
  misc_RNA (1)...(19): siRNA sense strand
uagcuuccguuccuacuaa

SEQ ID NO: 1608411 - RNA, 19 nt, Homo sapiens
  misc_RNA (1)...(19): siRNA sense strand
gggagaagcuuuugcagaa

SEQ ID NO: 1608412 - RNA, 19 nt, Homo sapiens
  misc_RNA (1)...(19): siRNA sense strand
gcgaaaggacggcuuaaug

SEQ ID NO: 1608413 - RNA, 19 nt, Homo sapiens
  misc_RNA (1)...(19): siRNA sense strand
cuacuaaacagaugaaguu

SEQ ID NO: 1608414 - RNA, 19 nt, Homo sapiens
  misc_RNA (1)...(19): siRNA sense strand
ggacaucucccuggacgaa

SEQ ID NO: 1608415 - RNA, 19 nt, Homo sapiens
  misc_RNA (1)...(19): siRNA sense strand
uagcggaggugguguuugu

SEQ ID NO: 1608416 - RNA, 19 nt, Homo sapiens
  misc_RNA (1)...(19): siRNA sense strand
ugacagcccaucaaugaaa

SEQ ID NO: 1608417 - RNA, 19 nt, Homo sapiens
  misc_RNA (1)...(19): siRNA sense strand
guuccaagcuuuccauguc

SEQ ID NO: 1608418 - RNA, 19 nt, Homo sapiens
  misc_RNA (1)...(19): siRNA sense strand
gaagauuggccucucagau

SEQ ID NO: 1608419 - RNA, 19 nt, Homo sapiens
  misc_RNA (1)...(19): siRNA sense strand
ggaggacauuguugagcuu

SEQ ID NO: 1608420 - RNA, 19 nt, Homo sapiens
  misc_RNA (1)...(19): siRNA sense strand
aaagaugcccgauuucgaa

SEQ ID NO: 1608421 - RNA, 19 nt, Homo sapiens
  misc_RNA (1)...(19): siRNA sense strand
gguguccgaucucgaguug

SEQ ID NO: 1608422 - RNA, 19 nt, Homo sapiens
  misc_RNA (1)...(19): siRNA sense strand
gaacaaaagccuugaccaa

SEQ ID NO: 1608423 - RNA, 19 nt, Homo sapiens
  misc_RNA (1)...(19): siRNA sense strand
caaagugguucagaaugau

SEQ ID NO: 1608424 - RNA, 19 nt, Homo sapiens
  misc_RNA (1)...(19): siRNA sense strand
ccacauggcugggcuaagc

SEQ ID NO: 1608425 - RNA, 19 nt, Homo sapiens
  misc_RNA (1)...(19): siRNA sense strand
ucagaaugaugcauacaca

SEQ ID NO: 1608426 - RNA, 19 nt, Homo sapiens
  misc_RNA (1)...(19): siRNA sense strand
uggacgaacucaucaggaa

SEQ ID NO: 1608427 - RNA, 19 nt, Homo sapiens
  misc_RNA (1)...(19): siRNA sense strand
ggaggugguguuugugaaa

SEQ ID NO: 1608428 - RNA, 19 nt, Homo sapiens
  misc_RNA (1)...(19): siRNA sense strand
ugaccuggaugaagaugau

SEQ ID NO: 1608429 - RNA, 19 nt, Homo sapiens
  misc_RNA (1)...(19): siRNA sense strand
agugacagcccaucaauga

SEQ ID NO: 1608430 - RNA, 19 nt, Homo sapiens
  misc_RNA (1)...(19): siRNA sense strand
gcucucccuuccucuauuc

SEQ ID NO: 1608431 - RNA, 19 nt, Homo sapiens
  misc_RNA (1)...(19): siRNA sense strand
ccacagaauucaaaaucaa

SEQ ID NO: 1608432 - RNA, 19 nt, Homo sapiens
  misc_RNA (1)...(19): siRNA sense strand
gcaggaugccagagagaug

SEQ ID NO: 1608433 - RNA, 19 nt, Homo sapiens
  misc_RNA (1)...(19): siRNA sense strand
ucacugaggaggacauugu

SEQ ID NO: 1608434 - RNA, 19 nt, Homo sapiens
  misc_RNA (1)...(19): siRNA sense strand
ggcccucccucucaccaaa

SEQ ID NO: 1608435 - RNA, 19 nt, Homo sapiens
  misc_RNA (1)...(19): siRNA sense strand
cgaaaggacggcuuaaugc

SEQ ID NO: 1608436 - RNA, 19 nt, Homo sapiens
  misc_RNA (1)...(19): siRNA sense strand
gguauagcuuccguuccua

SEQ ID NO: 1608437 - RNA, 19 nt, Homo sapiens
  misc_RNA (1)...(19): siRNA sense strand
gcauauaagaaguacaaca

SEQ ID NO: 1608438 - RNA, 19 nt, Homo sapiens
  misc_RNA (1)...(19): siRNA sense strand
ccgcauauaagaaguacaa

SEQ ID NO: 1608439 - RNA, 19 nt, Homo sapiens
  misc_RNA (1)...(19): siRNA sense strand
aagauuggccucucagaug

SEQ ID NO: 1608440 - RNA, 19 nt, Homo sapiens
  misc_RNA (1)...(19): siRNA sense strand
gccaucaccgcauauaaga

SEQ ID NO: 1608441 - RNA, 19 nt, Homo sapiens
  misc_RNA (1)...(19): siRNA sense strand
gcagcccacagaauucaaa

SEQ ID NO: 1608442 - RNA, 19 nt, Homo sapiens
  misc_RNA (1)...(19): siRNA sense strand
ggcagccgaugaagugcaa

SEQ ID NO: 1608443 - RNA, 19 nt, Homo sapiens
  misc_RNA (1)...(19): siRNA sense strand
cuucauaaacccacccauu

SEQ ID NO: 1608444 - RNA, 19 nt, Homo sapiens
  misc_RNA (1)...(19): siRNA sense strand
caucaccgcauauaagaag

SEQ ID NO: 1608445 - RNA, 19 nt, Homo sapiens
  misc_RNA (1)...(19): siRNA sense strand
gaagaugaugaugguauag

SEQ ID NO: 1608446 - RNA, 19 nt, Homo sapiens
  misc_RNA (1)...(19): siRNA sense strand
gcggaggugguguuuguga

SEQ ID NO: 1608447 - RNA, 19 nt, Homo sapiens
  misc_RNA (1)...(19): siRNA sense strand
ggagaagcuuuugcagaaa

SEQ ID NO: 1608448 - RNA, 19 nt, Homo sapiens
  misc_RNA (1)...(19): siRNA sense strand
acaaaagccuugaccaaca

SEQ ID NO: 1608449 - RNA, 19 nt, Homo sapiens
  misc_RNA (1)...(19): siRNA sense strand
gcggcgaaaggacggcuua

SEQ ID NO: 1608450 - RNA, 19 nt, Homo sapiens
  misc_RNA (1)...(19): siRNA sense strand
cggaggugguguuugugaa

SEQ ID NO: 1608451 - RNA, 19 nt, Homo sapiens
  misc_RNA (1)...(19): siRNA sense strand
caaaagccuugaccaacau

SEQ ID NO: 1608452 - RNA, 19 nt, Homo sapiens
  misc_RNA (1)...(19): siRNA sense strand
caaacugggagucaaggau

SEQ ID NO: 1608453 - RNA, 19 nt, Homo sapiens
  misc_RNA (1)...(19): siRNA sense strand
ucaccgcauauaagaagua

SEQ ID NO: 1608454 - RNA, 19 nt, Homo sapiens
  misc_RNA (1)...(19): siRNA sense strand
ggacauuguugagcuuuuc

SEQ ID NO: 1608455 - RNA, 19 nt, Homo sapiens
  misc_RNA (1)...(19): siRNA sense strand
cccggacacuggugaacaa

SEQ ID NO: 1608456 - RNA, 19 nt, Homo sapiens
  misc_RNA (1)...(19): siRNA sense strand
gaugaugaugguauagcuu

SEQ ID NO: 1608457 - RNA, 19 nt, Homo sapiens
  misc_RNA (1)...(19): siRNA sense strand
ggagaagaucagcuugaag

SEQ ID NO: 1608458 - RNA, 19 nt, Homo sapiens
  misc_RNA (1)...(19): siRNA sense strand
ugaccacgcagcccacaga

SEQ ID NO: 1608459 - RNA, 19 nt, Homo sapiens
  misc_RNA (1)...(19): siRNA sense strand
uucauaaacccacccauug

SEQ ID NO: 1608460 - RNA, 19 nt, Homo sapiens
  misc_RNA (1)...(19): siRNA sense strand
gcucaaacugggagucaag

SEQ ID NO: 1608461 - RNA, 19 nt, Homo sapiens
  misc_RNA (1)...(19): siRNA sense strand
ucauaaacccacccauugg

SEQ ID NO: 1608462 - RNA, 19 nt, Homo sapiens
  misc_RNA (1)...(19): siRNA sense strand
gacagcccaucaaugaaaa

SEQ ID NO: 1608463 - RNA, 19 nt, Homo sapiens
  misc_RNA (1)...(19): siRNA sense strand
gagugacagcccaucaaug

SEQ ID NO: 1608464 - RNA, 19 nt, Homo sapiens
  misc_RNA (1)...(19): siRNA sense strand
gaggacauuguugagcuuu

SEQ ID NO: 1608465 - RNA, 19 nt, Homo sapiens
  misc_RNA (1)...(19): siRNA sense strand
aaucugcacccucgaguca

SEQ ID NO: 1608466 - RNA, 19 nt, Homo sapiens
  misc_RNA (1)...(19): siRNA sense strand
uggcugggcuaagcaguuc

SEQ ID NO: 1608467 - RNA, 19 nt, Homo sapiens
  misc_RNA (1)...(19): siRNA sense strand
gcucugaagcucaccaaaa

SEQ ID NO: 1608468 - RNA, 19 nt, Homo sapiens
  misc_RNA (1)...(19): siRNA sense strand
caacacgcacagccaccuu

SEQ ID NO: 1608469 - RNA, 19 nt, Homo sapiens
  misc_RNA (1)...(19): siRNA sense strand
ccaccuuccagcagagauu

SEQ ID NO: 1608470 - RNA, 19 nt, Homo sapiens
  misc_RNA (1)...(19): siRNA sense strand
ugagugacagcccaucaau

SEQ ID NO: 1608471 - RNA, 19 nt, Homo sapiens
  misc_RNA (1)...(19): siRNA sense strand
gcagaaagaugcccgauuu

SEQ ID NO: 1608472 - RNA, 19 nt, Homo sapiens
  misc_RNA (1)...(19): siRNA sense strand
ccaaagugguucagaauga

SEQ ID NO: 1608473 - RNA, 19 nt, Homo sapiens
  misc_RNA (1)...(19): siRNA sense strand
gcaccaagaugacugugaa

SEQ ID NO: 1608474 - RNA, 19 nt, Homo sapiens
  misc_RNA (1)...(19): siRNA sense strand
gaauuuauaugaccuggau

SEQ ID NO: 1608475 - RNA, 19 nt, Homo sapiens
  misc_RNA (1)...(19): siRNA sense strand
uauaugaccuggaugaaga

SEQ ID NO: 1608476 - RNA, 19 nt, Homo sapiens
  misc_RNA (1)...(19): siRNA sense strand
gagaagaucagcuugaaga

SEQ ID NO: 1608477 - RNA, 19 nt, Homo sapiens
  misc_RNA (1)...(19): siRNA sense strand
ugaagaugaugaugguaua

SEQ ID NO: 1608478 - RNA, 19 nt, Homo sapiens
  misc_RNA (1)...(19): siRNA sense strand
caagaugacugugaauaau

SEQ ID NO: 1608479 - RNA, 19 nt, Homo sapiens
  misc_RNA (1)...(19): siRNA sense strand
ggacacuggugaacaagga

SEQ ID NO: 1608480 - RNA, 19 nt, Homo sapiens
  misc_RNA (1)...(19): siRNA sense strand
ggaauguuaucaccucaga

SEQ ID NO: 1608481 - RNA, 19 nt, Homo sapiens
  misc_RNA (1)...(19): siRNA sense strand
ccagagagauguugaacuc

SEQ ID NO: 1608482 - RNA, 19 nt, Homo sapiens
  misc_RNA (1)...(19): siRNA sense strand
ccaagaugacugugaauaa

SEQ ID NO: 1608483 - RNA, 19 nt, Homo sapiens
  misc_RNA (1)...(19): siRNA sense strand
gcagaagauuggccucuca

SEQ ID NO: 1608484 - RNA, 19 nt, Homo sapiens
  misc_RNA (1)...(19): siRNA sense strand
ggaugaagaugaugauggu

SEQ ID NO: 1608485 - RNA, 19 nt, Homo sapiens
  misc_RNA (1)...(19): siRNA sense strand
gggagaagaucagcuugaa

SEQ ID NO: 1608486 - RNA, 19 nt, Homo sapiens
  misc_RNA (1)...(19): siRNA sense strand
ccacgcagcccacagaauu

SEQ ID NO: 1608487 - RNA, 19 nt, Homo sapiens
  misc_RNA (1)...(19): siRNA sense strand
uagcuuccguuccuacuaa

SEQ ID NO: 1608488 - RNA, 19 nt, Homo sapiens
  misc_RNA (1)...(19): siRNA sense strand
gggagaagcuuuugcagaa

SEQ ID NO: 1608489 - RNA, 19 nt, Homo sapiens
  misc_RNA (1)...(19): siRNA sense strand
gcgaaaggacggcuuaaug

SEQ ID NO: 1608490 - RNA, 19 nt, Homo sapiens
  misc_RNA (1)...(19): siRNA sense strand
cuacuaaacagaugaaguu

SEQ ID NO: 1608491 - RNA, 19 nt, Homo sapiens
  misc_RNA (1)...(19): siRNA sense strand
ggacaucucccuggacgaa

SEQ ID NO: 1608492 - RNA, 19 nt, Homo sapiens
  misc_RNA (1)...(19): siRNA sense strand
uagcggaggugguguuugu

SEQ ID NO: 1608493 - RNA, 19 nt, Homo sapiens
  misc_RNA (1)...(19): siRNA sense strand
ugacagcccaucaaugaaa

SEQ ID NO: 1608494 - RNA, 19 nt, Homo sapiens
  misc_RNA (1)...(19): siRNA sense strand
guuccaagcuuuccauguc

SEQ ID NO: 1608495 - RNA, 19 nt, Homo sapiens
  misc_RNA (1)...(19): siRNA sense strand
gaagauuggccucucagau

SEQ ID NO: 1608496 - RNA, 19 nt, Homo sapiens
  misc_RNA (1)...(19): siRNA sense strand
ggaggacauuguugagcuu

SEQ ID NO: 1608497 - RNA, 19 nt, Homo sapiens
  misc_RNA (1)...(19): siRNA sense strand
aaagaugcccgauuucgaa

SEQ ID NO: 1608498 - RNA, 19 nt, Homo sapiens
  misc_RNA (1)...(19): siRNA sense strand
gguguccgaucucgaguug

SEQ ID NO: 1608499 - RNA, 19 nt, Homo sapiens
  misc_RNA (1)...(19): siRNA sense strand
gaacaaaagccuugaccaa

SEQ ID NO: 1608500 - RNA, 19 nt, Homo sapiens
  misc_RNA (1)...(19): siRNA sense strand
caaagugguucagaaugau

SEQ ID NO: 1608501 - RNA, 19 nt, Homo sapiens
  misc_RNA (1)...(19): siRNA sense strand
ccacauggcugggcuaagc

SEQ ID NO: 1608502 - RNA, 19 nt, Homo sapiens
  misc_RNA (1)...(19): siRNA sense strand
ucagaaugaugcauacaca

SEQ ID NO: 1608503 - RNA, 19 nt, Homo sapiens
  misc_RNA (1)...(19): siRNA sense strand
uggacgaacucaucaggaa

SEQ ID NO: 1608504 - RNA, 19 nt, Homo sapiens
  misc_RNA (1)...(19): siRNA sense strand
ggaggugguguuugugaaa

SEQ ID NO: 1608505 - RNA, 19 nt, Homo sapiens
  misc_RNA (1)...(19): siRNA sense strand
ugaccuggaugaagaugau

SEQ ID NO: 1608506 - RNA, 19 nt, Homo sapiens
  misc_RNA (1)...(19): siRNA sense strand
agugacagcccaucaauga

SEQ ID NO: 1608507 - RNA, 19 nt, Homo sapiens
  misc_RNA (1)...(19): siRNA sense strand
gcucucccuuccucuauuc

SEQ ID NO: 1608508 - RNA, 19 nt, Homo sapiens
  misc_RNA (1)...(19): siRNA sense strand
ccacagaauucaaaaucaa

SEQ ID NO: 1608509 - RNA, 19 nt, Homo sapiens
  misc_RNA (1)...(19): siRNA sense strand
gcaggaugccagagagaug

SEQ ID NO: 1608510 - RNA, 19 nt, Homo sapiens
  misc_RNA (1)...(19): siRNA sense strand
ucacugaggaggacauugu

SEQ ID NO: 1608511 - RNA, 19 nt, Homo sapiens
  misc_RNA (1)...(19): siRNA sense strand
ggcccucccucucaccaaa

SEQ ID NO: 1608512 - RNA, 19 nt, Homo sapiens
  misc_RNA (1)...(19): siRNA sense strand
cgaaaggacggcuuaaugc

SEQ ID NO: 1608513 - RNA, 19 nt, Homo sapiens
  misc_RNA (1)...(19): siRNA sense strand
gguauagcuuccguuccua

SEQ ID NO: 1608514 - RNA, 19 nt, Homo sapiens
  misc_RNA (1)...(19): siRNA sense strand
gcauauaagaaguacaaca

SEQ ID NO: 1608515 - RNA, 19 nt, Homo sapiens
  misc_RNA (1)...(19): siRNA sense strand
ccgcauauaagaaguacaa

SEQ ID NO: 1608516 - RNA, 19 nt, Homo sapiens
  misc_RNA (1)...(19): siRNA sense strand
aagauuggccucucagaug

SEQ ID NO: 1608517 - RNA, 19 nt, Homo sapiens
  misc_RNA (1)...(19): siRNA sense strand
gccaucaccgcauauaaga

SEQ ID NO: 1608518 - RNA, 19 nt, Homo sapiens
  misc_RNA (1)...(19): siRNA sense strand
gcagcccacagaauucaaa

SEQ ID NO: 1608519 - RNA, 19 nt, Homo sapiens
  misc_RNA (1)...(19): siRNA sense strand
ggcagccgaugaagugcaa

SEQ ID NO: 1608520 - RNA, 19 nt, Homo sapiens
  misc_RNA (1)...(19): siRNA sense strand
cuucauaaacccacccauu

SEQ ID NO: 1608521 - RNA, 19 nt, Homo sapiens
  misc_RNA (1)...(19): siRNA sense strand
caucaccgcauauaagaag

SEQ ID NO: 1608522 - RNA, 19 nt, Homo sapiens
  misc_RNA (1)...(19): siRNA sense strand
gaagaugaugaugguauag

SEQ ID NO: 1608523 - RNA, 19 nt, Homo sapiens
  misc_RNA (1)...(19): siRNA sense strand
gcggaggugguguuuguga

SEQ ID NO: 1608524 - RNA, 19 nt, Homo sapiens
  misc_RNA (1)...(19): siRNA sense strand
ggagaagcuuuugcagaaa

SEQ ID NO: 1608525 - RNA, 19 nt, Homo sapiens
  misc_RNA (1)...(19): siRNA sense strand
acaaaagccuugaccaaca

SEQ ID NO: 1608526 - RNA, 19 nt, Homo sapiens
  misc_RNA (1)...(19): siRNA sense strand
gcggcgaaaggacggcuua

SEQ ID NO: 1608527 - RNA, 19 nt, Homo sapiens
  misc_RNA (1)...(19): siRNA sense strand
cggaggugguguuugugaa

SEQ ID NO: 1608528 - RNA, 19 nt, Homo sapiens
  misc_RNA (1)...(19): siRNA sense strand
caaaagccuugaccaacau

SEQ ID NO: 1608529 - RNA, 19 nt, Homo sapiens
  misc_RNA (1)...(19): siRNA sense strand
caaacugggagucaaggau

SEQ ID NO: 1608530 - RNA, 19 nt, Homo sapiens
  misc_RNA (1)...(19): siRNA sense strand
ucaccgcauauaagaagua

SEQ ID NO: 1608531 - RNA, 19 nt, Homo sapiens
  misc_RNA (1)...(19): siRNA sense strand
ggacauuguugagcuuuuc

SEQ ID NO: 1608532 - RNA, 19 nt, Homo sapiens
  misc_RNA (1)...(19): siRNA sense strand
cccggacacuggugaacaa

SEQ ID NO: 1608533 - RNA, 19 nt, Homo sapiens
  misc_RNA (1)...(19): siRNA sense strand
gaugaugaugguauagcuu

SEQ ID NO: 1608534 - RNA, 19 nt, Homo sapiens
  misc_RNA (1)...(19): siRNA sense strand
ggagaagaucagcuugaag

SEQ ID NO: 1608535 - RNA, 19 nt, Homo sapiens
  misc_RNA (1)...(19): siRNA sense strand
ugaccacgcagcccacaga

SEQ ID NO: 1608536 - RNA, 19 nt, Homo sapiens
  misc_RNA (1)...(19): siRNA sense strand
uucauaaacccacccauug

SEQ ID NO: 1608537 - RNA, 19 nt, Homo sapiens
  misc_RNA (1)...(19): siRNA sense strand
gcucaaacugggagucaag

SEQ ID NO: 1608538 - RNA, 19 nt, Homo sapiens
  misc_RNA (1)...(19): siRNA sense strand
ucauaaacccacccauugg

SEQ ID NO: 1608539 - RNA, 19 nt, Homo sapiens
  misc_RNA (1)...(19): siRNA sense strand
gacagcccaucaaugaaaa

SEQ ID NO: 1608540 - RNA, 19 nt, Homo sapiens
  misc_RNA (1)...(19): siRNA sense strand
gagugacagcccaucaaug

SEQ ID NO: 1608541 - RNA, 19 nt, Homo sapiens
  misc_RNA (1)...(19): siRNA sense strand
gaggacauuguugagcuuu

SEQ ID NO: 1608542 - RNA, 19 nt, Homo sapiens
  misc_RNA (1)...(19): siRNA sense strand
aaucugcacccucgaguca

SEQ ID NO: 1608543 - RNA, 19 nt, Homo sapiens
  misc_RNA (1)...(19): siRNA sense strand
uggcugggcuaagcaguuc

SEQ ID NO: 1608544 - RNA, 19 nt, Homo sapiens
  misc_RNA (1)...(19): siRNA sense strand
gcucugaagcucaccaaaa

SEQ ID NO: 1608545 - RNA, 19 nt, Homo sapiens
  misc_RNA (1)...(19): siRNA sense strand
caacacgcacagccaccuu

SEQ ID NO: 1608546 - RNA, 19 nt, Homo sapiens
  misc_RNA (1)...(19): siRNA sense strand
ccaccuuccagcagagauu

SEQ ID NO: 1608547 - RNA, 19 nt, Homo sapiens
  misc_RNA (1)...(19): siRNA sense strand
ugagugacagcccaucaau

SEQ ID NO: 1608548 - RNA, 19 nt, Homo sapiens
  misc_RNA (1)...(19): siRNA sense strand
gaaagucucaguugaauuu

SEQ ID NO: 1608549 - RNA, 19 nt, Homo sapiens
  misc_RNA (1)...(19): siRNA sense strand
gaacaucagugaauuaucu

SEQ ID NO: 1608550 - RNA, 19 nt, Homo sapiens
  misc_RNA (1)...(19): siRNA sense strand
gagaacagauaaccaguaa

SEQ ID NO: 1608551 - RNA, 19 nt, Homo sapiens
  misc_RNA (1)...(19): siRNA sense strand
gaaugaauaugccaaaguu

SEQ ID NO: 1608552 - RNA, 19 nt, Homo sapiens
  misc_RNA (1)...(19): siRNA sense strand
cagaagaacugauaugcua

SEQ ID NO: 1608553 - RNA, 19 nt, Homo sapiens
  misc_RNA (1)...(19): siRNA sense strand
caacaaaggcauagaagua

SEQ ID NO: 1608554 - RNA, 19 nt, Homo sapiens
  misc_RNA (1)...(19): siRNA sense strand
gcaaguggcugcagaagau

SEQ ID NO: 1608555 - RNA, 19 nt, Homo sapiens
  misc_RNA (1)...(19): siRNA sense strand
ggaaaugcagucaaaguua

SEQ ID NO: 1608556 - RNA, 19 nt, Homo sapiens
  misc_RNA (1)...(19): siRNA sense strand
agacacaucucaauucaaa

SEQ ID NO: 1608557 - RNA, 19 nt, Homo sapiens
  misc_RNA (1)...(19): siRNA sense strand
gaaggaugguaauauggua

SEQ ID NO: 1608558 - RNA, 19 nt, Homo sapiens
  misc_RNA (1)...(19): siRNA sense strand
ugaaagaguugaaauguca

SEQ ID NO: 1608559 - RNA, 19 nt, Homo sapiens
  misc_RNA (1)...(19): siRNA sense strand
gaaacuaaaucggcagcua

SEQ ID NO: 1608560 - RNA, 19 nt, Homo sapiens
  misc_RNA (1)...(19): siRNA sense strand
cuacagauaucaguucuuu

SEQ ID NO: 1608561 - RNA, 19 nt, Homo sapiens
  misc_RNA (1)...(19): siRNA sense strand
ccagugaaaccaaacauua

SEQ ID NO: 1608562 - RNA, 19 nt, Homo sapiens
  misc_RNA (1)...(19): siRNA sense strand
auagacagcugccuuguaa

SEQ ID NO: 1608563 - RNA, 19 nt, Homo sapiens
  misc_RNA (1)...(19): siRNA sense strand
ggaacuagcagccagaauu

SEQ ID NO: 1608564 - RNA, 19 nt, Homo sapiens
  misc_RNA (1)...(19): siRNA sense strand
gaaaugcagucaaaguuac

SEQ ID NO: 1608565 - RNA, 19 nt, Homo sapiens
  misc_RNA (1)...(19): siRNA sense strand
caaaauggaugccaaugua

SEQ ID NO: 1608566 - RNA, 19 nt, Homo sapiens
  misc_RNA (1)...(19): siRNA sense strand
ucagugacuucuacagaua

SEQ ID NO: 1608567 - RNA, 19 nt, Homo sapiens
  misc_RNA (1)...(19): siRNA sense strand
gaacuagcagccagaauug

SEQ ID NO: 1608568 - RNA, 19 nt, Homo sapiens
  misc_RNA (1)...(19): siRNA sense strand
gcaacaaucaccagaagaa

SEQ ID NO: 1608569 - RNA, 19 nt, Homo sapiens
  misc_RNA (1)...(19): siRNA sense strand
gaugacaccacaacagaua

SEQ ID NO: 1608570 - RNA, 19 nt, Homo sapiens
  misc_RNA (1)...(19): siRNA sense strand
gauaugcuaggacauguua

SEQ ID NO: 1608571 - RNA, 19 nt, Homo sapiens
  misc_RNA (1)...(19): siRNA sense strand
ggaaaagagugaugauauu

SEQ ID NO: 1608572 - RNA, 19 nt, Homo sapiens
  misc_RNA (1)...(19): siRNA sense strand
ucagaaggaugguaauaug

SEQ ID NO: 1608573 - RNA, 19 nt, Homo sapiens
  misc_RNA (1)...(19): siRNA sense strand
gaacugaauauuacaagga

SEQ ID NO: 1608574 - RNA, 19 nt, Homo sapiens
  misc_RNA (1)...(19): siRNA sense strand
gaacagauaaccaguaaaa

SEQ ID NO: 1608575 - RNA, 19 nt, Homo sapiens
  misc_RNA (1)...(19): siRNA sense strand
agacacggauguacaaguu

SEQ ID NO: 1608576 - RNA, 19 nt, Homo sapiens
  misc_RNA (1)...(19): siRNA sense strand
uugcugaucuagagaauuu

SEQ ID NO: 1608577 - RNA, 19 nt, Homo sapiens
  misc_RNA (1)...(19): siRNA sense strand
uaagaaaccuuggcauagu

SEQ ID NO: 1608578 - RNA, 19 nt, Homo sapiens
  misc_RNA (1)...(19): siRNA sense strand
gcuaauauucuguacauug

SEQ ID NO: 1608579 - RNA, 19 nt, Homo sapiens
  misc_RNA (1)...(19): siRNA sense strand
uauaagaaaccuuggcaua

SEQ ID NO: 1608580 - RNA, 19 nt, Homo sapiens
  misc_RNA (1)...(19): siRNA sense strand
ggagaacagauaaccagua

SEQ ID NO: 1608581 - RNA, 19 nt, Homo sapiens
  misc_RNA (1)...(19): siRNA sense strand
caguugaauuugaagguua

SEQ ID NO: 1608582 - RNA, 19 nt, Homo sapiens
  misc_RNA (1)...(19): siRNA sense strand
caggaaaacugccauuuaa

SEQ ID NO: 1608583 - RNA, 19 nt, Homo sapiens
  misc_RNA (1)...(19): siRNA sense strand
gaauaaaggagagacuaaa

SEQ ID NO: 1608584 - RNA, 19 nt, Homo sapiens
  misc_RNA (1)...(19): siRNA sense strand
ccaagaagauucaauaccu

SEQ ID NO: 1608585 - RNA, 19 nt, Homo sapiens
  misc_RNA (1)...(19): siRNA sense strand
ccacugggauaaugggauu

SEQ ID NO: 1608586 - RNA, 19 nt, Homo sapiens
  misc_RNA (1)...(19): siRNA sense strand
uaaaccaccuaaggaaauu

SEQ ID NO: 1608587 - RNA, 19 nt, Homo sapiens
  misc_RNA (1)...(19): siRNA sense strand
gucgucaccuccagaauuu

SEQ ID NO: 1608588 - RNA, 19 nt, Homo sapiens
  misc_RNA (1)...(19): siRNA sense strand
cagcuaauauucuguacau

SEQ ID NO: 1608589 - RNA, 19 nt, Homo sapiens
  misc_RNA (1)...(19): siRNA sense strand
uaaaucggcagcuaauauu

SEQ ID NO: 1608590 - RNA, 19 nt, Homo sapiens
  misc_RNA (1)...(19): siRNA sense strand
gaguugaaaugucagugaa

SEQ ID NO: 1608591 - RNA, 19 nt, Homo sapiens
  misc_RNA (1)...(19): siRNA sense strand
uggaaugucuagaugcuuu

SEQ ID NO: 1608592 - RNA, 19 nt, Homo sapiens
  misc_RNA (1)...(19): siRNA sense strand
caguggcucuggaacauuu

SEQ ID NO: 1608593 - RNA, 19 nt, Homo sapiens
  misc_RNA (1)...(19): siRNA sense strand
ugacaaagcagaagcaagu

SEQ ID NO: 1608594 - RNA, 19 nt, Homo sapiens
  misc_RNA (1)...(19): siRNA sense strand
gcucauugaacucagauaa

SEQ ID NO: 1608595 - RNA, 19 nt, Homo sapiens
  misc_RNA (1)...(19): siRNA sense strand
agaaagccauguccaguca

SEQ ID NO: 1608596 - RNA, 19 nt, Homo sapiens
  misc_RNA (1)...(19): siRNA sense strand
gcaccucugaugcaguuua

SEQ ID NO: 1608597 - RNA, 19 nt, Homo sapiens
  misc_RNA (1)...(19): siRNA sense strand
agacacagcauuaaaggaa

SEQ ID NO: 1608598 - RNA, 19 nt, Homo sapiens
  misc_RNA (1)...(19): siRNA sense strand
ucacagacacagcauuaaa

SEQ ID NO: 1608599 - RNA, 19 nt, Homo sapiens
  misc_RNA (1)...(19): siRNA sense strand
ucacaaauuuaggcaagaa

SEQ ID NO: 1608600 - RNA, 19 nt, Homo sapiens
  misc_RNA (1)...(19): siRNA sense strand
cagccaagaagauucaaua

SEQ ID NO: 1608601 - RNA, 19 nt, Homo sapiens
  misc_RNA (1)...(19): siRNA sense strand
guuaggcgccacaugaaua

SEQ ID NO: 1608602 - RNA, 19 nt, Homo sapiens
  misc_RNA (1)...(19): siRNA sense strand
gacauucagacccuaauaa

SEQ ID NO: 1608603 - RNA, 19 nt, Homo sapiens
  misc_RNA (1)...(19): siRNA sense strand
caaagucaguuuucaauuc

SEQ ID NO: 1608604 - RNA, 19 nt, Homo sapiens
  misc_RNA (1)...(19): siRNA sense strand
cuaaaucggcagcuaauau

SEQ ID NO: 1608605 - RNA, 19 nt, Homo sapiens
  misc_RNA (1)...(19): siRNA sense strand
ggaaagacagcaauagaac

SEQ ID NO: 1608606 - RNA, 19 nt, Homo sapiens
  misc_RNA (1)...(19): siRNA sense strand
gaugaaacagccaagaaga

SEQ ID NO: 1608607 - RNA, 19 nt, Homo sapiens
  misc_RNA (1)...(19): siRNA sense strand
aaacuaaaucggcagcuaa

SEQ ID NO: 1608608 - RNA, 19 nt, Homo sapiens
  misc_RNA (1)...(19): siRNA sense strand
gcauagaaguacuguuugc

SEQ ID NO: 1608609 - RNA, 19 nt, Homo sapiens
  misc_RNA (1)...(19): siRNA sense strand
gcagucaaaguuacaauca

SEQ ID NO: 1608610 - RNA, 19 nt, Homo sapiens
  misc_RNA (1)...(19): siRNA sense strand
gcuaaaccaccuaaggaaa

SEQ ID NO: 1608611 - RNA, 19 nt, Homo sapiens
  misc_RNA (1)...(19): siRNA sense strand
ggaaugaauaugccaaagu

SEQ ID NO: 1608612 - RNA, 19 nt, Homo sapiens
  misc_RNA (1)...(19): siRNA sense strand
caacagauaauuacauugc

SEQ ID NO: 1608613 - RNA, 19 nt, Homo sapiens
  misc_RNA (1)...(19): siRNA sense strand
ucauugaacucagauaauc

SEQ ID NO: 1608614 - RNA, 19 nt, Homo sapiens
  misc_RNA (1)...(19): siRNA sense strand
gguaauaugguagaagaaa

SEQ ID NO: 1608615 - RNA, 19 nt, Homo sapiens
  misc_RNA (1)...(19): siRNA sense strand
ugaaacagccaagaagauu

SEQ ID NO: 1608616 - RNA, 19 nt, Homo sapiens
  misc_RNA (1)...(19): siRNA sense strand
acacggauguacaaguuug

SEQ ID NO: 1608617 - RNA, 19 nt, Homo sapiens
  misc_RNA (1)...(19): siRNA sense strand
ugaauaaaggagagacuaa

SEQ ID NO: 1608618 - RNA, 19 nt, Homo sapiens
  misc_RNA (1)...(19): siRNA sense strand
ccuuguaacugucauggaa

SEQ ID NO: 1608619 - RNA, 19 nt, Homo sapiens
  misc_RNA (1)...(19): siRNA sense strand
gaaacagccaagaagauuc

SEQ ID NO: 1608620 - RNA, 19 nt, Homo sapiens
  misc_RNA (1)...(19): siRNA sense strand
ggaccuacuucagcagaug

SEQ ID NO: 1608621 - RNA, 19 nt, Homo sapiens
  misc_RNA (1)...(19): siRNA sense strand
cagcaacaaucaccagaag

SEQ ID NO: 1608622 - RNA, 19 nt, Homo sapiens
  misc_RNA (1)...(19): siRNA sense strand
guugaaaugucagugaaug

SEQ ID NO: 1608623 - RNA, 19 nt, Homo sapiens
  misc_RNA (1)...(19): siRNA sense strand
gcaagaagcaaaagacuga

SEQ ID NO: 1608624 - RNA, 19 nt, Homo sapiens
  misc_RNA (1)...(19): siRNA sense strand
aagcaugccuggaaagaca

SEQ ID NO: 1608625 - RNA, 19 nt, Homo sapiens
  misc_RNA (1)...(19): siRNA sense strand
cuaauauucuguacauugg

SEQ ID NO: 1608626 - RNA, 19 nt, Homo sapiens
  misc_RNA (1)...(19): siRNA sense strand
acaccacaacagauaauua

SEQ ID NO: 1608627 - RNA, 19 nt, Homo sapiens
  misc_RNA (1)...(19): siRNA sense strand
cuucaaaugucaacaagca

SEQ ID NO: 1608628 - RNA, 19 nt, Homo sapiens
  misc_RNA (1)...(19): siRNA sense strand
aggcauagaaguacuguuu

SEQ ID NO: 1608629 - RNA, 19 nt, Homo sapiens
  misc_RNA (1)...(19): siRNA sense strand
ggaugccaauguacugaug

SEQ ID NO: 1608630 - RNA, 19 nt, Homo sapiens
  misc_RNA (1)...(19): siRNA sense strand
uaaaggagagacuaaaucu

SEQ ID NO: 1608631 - RNA, 19 nt, Homo sapiens
  misc_RNA (1)...(19): siRNA sense strand
gaagcaaguggcugcagaa

SEQ ID NO: 1608632 - RNA, 19 nt, Homo sapiens
  misc_RNA (1)...(19): siRNA sense strand
ggaagcaugccuggaaaga

SEQ ID NO: 1608633 - RNA, 19 nt, Homo sapiens
  misc_RNA (1)...(19): siRNA sense strand
ucaguggugugaagagaga

SEQ ID NO: 1608634 - RNA, 19 nt, Homo sapiens
  misc_RNA (1)...(19): siRNA sense strand
ggaaagucucaguugaauu

SEQ ID NO: 1608635 - RNA, 19 nt, Homo sapiens
  misc_RNA (1)...(19): siRNA sense strand
aaagacagcaauagaacuu

SEQ ID NO: 1608636 - RNA, 19 nt, Homo sapiens
  misc_RNA (1)...(19): siRNA sense strand
gaagaaaacccauauagac

SEQ ID NO: 1608637 - RNA, 19 nt, Homo sapiens
  misc_RNA (1)...(19): siRNA sense strand
gaacauccucccuuuuauu

SEQ ID NO: 1608638 - RNA, 19 nt, Homo sapiens
  misc_RNA (1)...(19): siRNA sense strand
uaauuacauugcacaagga

SEQ ID NO: 1608639 - RNA, 19 nt, Homo sapiens
  misc_RNA (1)...(19): siRNA sense strand
auucagacccuaauaaaga

SEQ ID NO: 1608640 - RNA, 19 nt, Homo sapiens
  misc_RNA (1)...(19): siRNA sense strand
gggagcccauuaucauugu

SEQ ID NO: 1608641 - RNA, 19 nt, Homo sapiens
  misc_RNA (1)...(19): siRNA sense strand
cugaugcaguuuaaaucua

SEQ ID NO: 1608642 - RNA, 19 nt, Homo sapiens
  misc_RNA (1)...(19): siRNA sense strand
caccucugaugcaguuuaa

SEQ ID NO: 1608643 - RNA, 19 nt, Homo sapiens
  misc_RNA (1)...(19): siRNA sense strand
caaguucccuuuucaauac

SEQ ID NO: 1608644 - RNA, 19 nt, Homo sapiens
  misc_RNA (1)...(19): siRNA sense strand
gagcuuguaauagccauaa

SEQ ID NO: 1608645 - RNA, 19 nt, Homo sapiens
  misc_RNA (1)...(19): siRNA sense strand
gagugaugauauucuugaa

SEQ ID NO: 1608646 - RNA, 19 nt, Homo sapiens
  misc_RNA (1)...(19): siRNA sense strand
uggaaagucucaguugaau

SEQ ID NO: 1608647 - RNA, 19 nt, Homo sapiens
  misc_RNA (1)...(19): siRNA sense strand
cagaugacaccacaacaga

SEQ ID NO: 1608648 - RNA, 19 nt, Homo sapiens
  misc_RNA (1)...(19): siRNA sense strand
gaguagaguuugugacauu

SEQ ID NO: 1608649 - RNA, 19 nt, Homo sapiens
  misc_RNA (1)...(19): siRNA sense strand
caaagaaccucccgacagu

SEQ ID NO: 1608650 - RNA, 19 nt, Homo sapiens
  misc_RNA (1)...(19): siRNA sense strand
gggaaauccuggugucuga

SEQ ID NO: 1608651 - RNA, 19 nt, Homo sapiens
  misc_RNA (1)...(19): siRNA sense strand
ggccagcucuuuagugcua

SEQ ID NO: 1608652 - RNA, 19 nt, Homo sapiens
  misc_RNA (1)...(19): siRNA sense strand
gcaacuacauggagaggau

SEQ ID NO: 1608653 - RNA, 19 nt, Homo sapiens
  misc_RNA (1)...(19): siRNA sense strand
gaaggacccugaggagcuu

SEQ ID NO: 1608654 - RNA, 19 nt, Homo sapiens
  misc_RNA (1)...(19): siRNA sense strand
cugaggagcuggugaauac

SEQ ID NO: 1608655 - RNA, 19 nt, Homo sapiens
  misc_RNA (1)...(19): siRNA sense strand
cugaggagcuucgcaacua

SEQ ID NO: 1608656 - RNA, 19 nt, Homo sapiens
  misc_RNA (1)...(19): siRNA sense strand
caagcacccuggcccgaaa

SEQ ID NO: 1608657 - RNA, 19 nt, Homo sapiens
  misc_RNA (1)...(19): siRNA sense strand
ggaagcgaguagaguuugu

SEQ ID NO: 1608658 - RNA, 19 nt, Homo sapiens
  misc_RNA (1)...(19): siRNA sense strand
ucacguggcagcuggagua

SEQ ID NO: 1608659 - RNA, 19 nt, Homo sapiens
  misc_RNA (1)...(19): siRNA sense strand
gaauacagcaccacugacu

SEQ ID NO: 1608660 - RNA, 19 nt, Homo sapiens
  misc_RNA (1)...(19): siRNA sense strand
ucucugagcucccgaucug

SEQ ID NO: 1608661 - RNA, 19 nt, Homo sapiens
  misc_RNA (1)...(19): siRNA sense strand
ggucaaugguguggucuuc

SEQ ID NO: 1608662 - RNA, 19 nt, Homo sapiens
  misc_RNA (1)...(19): siRNA sense strand
gugcuggacucgcguguag

SEQ ID NO: 1608663 - RNA, 19 nt, Homo sapiens
  misc_RNA (1)...(19): siRNA sense strand
gugaauacagcaccacuga

SEQ ID NO: 1608664 - RNA, 19 nt, Homo sapiens
  misc_RNA (1)...(19): siRNA sense strand
ggacaucagagcccuuauc

SEQ ID NO: 1608665 - RNA, 19 nt, Homo sapiens
  misc_RNA (1)...(19): siRNA sense strand
gcaucucgcugaccuugag

SEQ ID NO: 1608666 - RNA, 19 nt, Homo sapiens
  misc_RNA (1)...(19): siRNA sense strand
gcacugaccaggaggaacu

SEQ ID NO: 1608667 - RNA, 19 nt, Homo sapiens
  misc_RNA (1)...(19): siRNA sense strand
acucuggacugccaagcua

SEQ ID NO: 1608668 - RNA, 19 nt, Homo sapiens
  misc_RNA (1)...(19): siRNA sense strand
gcgaguagaguuugugaca

SEQ ID NO: 1608669 - RNA, 19 nt, Homo sapiens
  misc_RNA (1)...(19): siRNA sense strand
gcaugucacugagcuagag

SEQ ID NO: 1608670 - RNA, 19 nt, Homo sapiens
  misc_RNA (1)...(19): siRNA sense strand
gggaggaggaggaggaaga

SEQ ID NO: 1608671 - RNA, 19 nt, Homo sapiens
  misc_RNA (1)...(19): siRNA sense strand
gcggaagcgaguagaguuu

SEQ ID NO: 1608672 - RNA, 19 nt, Homo sapiens
  misc_RNA (1)...(19): siRNA sense strand
gauggccggucgcacaaca

SEQ ID NO: 1608673 - RNA, 19 nt, Homo sapiens
  misc_RNA (1)...(19): siRNA sense strand
gcugaggagcuggugaaua

SEQ ID NO: 1608674 - RNA, 19 nt, Homo sapiens
  misc_RNA (1)...(19): siRNA sense strand
ggacauccgcugggugugu

SEQ ID NO: 1608675 - RNA, 19 nt, Homo sapiens
  misc_RNA (1)...(19): siRNA sense strand
ggaagaggaggaggagaug

SEQ ID NO: 1608676 - RNA, 19 nt, Homo sapiens
  misc_RNA (1)...(19): siRNA sense strand
ccugccaacuccucucuga

SEQ ID NO: 1608677 - RNA, 19 nt, Homo sapiens
  misc_RNA (1)...(19): siRNA sense strand
ggccugugaugccguguuc

SEQ ID NO: 1608678 - RNA, 19 nt, Homo sapiens
  misc_RNA (1)...(19): siRNA sense strand
cagaggaggaggccaggaa

SEQ ID NO: 1608679 - RNA, 19 nt, Homo sapiens
  misc_RNA (1)...(19): siRNA sense strand
gcaccacaccacccucauc

SEQ ID NO: 1608680 - RNA, 19 nt, Homo sapiens
  misc_RNA (1)...(19): siRNA sense strand
gagcccaccagccacagaa

SEQ ID NO: 1608681 - RNA, 19 nt, Homo sapiens
  misc_RNA (1)...(19): siRNA sense strand
ucaaugguguggucuucgu

SEQ ID NO: 1608682 - RNA, 19 nt, Homo sapiens
  misc_RNA (1)...(19): siRNA sense strand
cugcgagucugccaacaca

SEQ ID NO: 1608683 - RNA, 19 nt, Homo sapiens
  misc_RNA (1)...(19): siRNA sense strand
guagaguuugugacauuug

SEQ ID NO: 1608684 - RNA, 19 nt, Homo sapiens
  misc_RNA (1)...(19): siRNA sense strand
aguagaguuugugacauuu

SEQ ID NO: 1608685 - RNA, 19 nt, Homo sapiens
  misc_RNA (1)...(19): siRNA sense strand
gcguggccaucuucaucuu

SEQ ID NO: 1608686 - RNA, 19 nt, Homo sapiens
  misc_RNA (1)...(19): siRNA sense strand
guccuucucugaucacacu

SEQ ID NO: 1608687 - RNA, 19 nt, Homo sapiens
  misc_RNA (1)...(19): siRNA sense strand
gcaugucggcugcgagucu

SEQ ID NO: 1608688 - RNA, 19 nt, Homo sapiens
  misc_RNA (1)...(19): siRNA sense strand
gaagcgaguagaguuugug

SEQ ID NO: 1608689 - RNA, 19 nt, Homo sapiens
  misc_RNA (1)...(19): siRNA sense strand
ggcggaagcgaguagaguu

SEQ ID NO: 1608690 - RNA, 19 nt, Homo sapiens
  misc_RNA (1)...(19): siRNA sense strand
caccacaccacccucauca

SEQ ID NO: 1608691 - RNA, 19 nt, Homo sapiens
  misc_RNA (1)...(19): siRNA sense strand
cgaguagaguuugugacau

SEQ ID NO: 1608692 - RNA, 19 nt, Homo sapiens
  misc_RNA (1)...(19): siRNA sense strand
ggccaucuucaucuucuug

SEQ ID NO: 1608693 - RNA, 19 nt, Homo sapiens
  misc_RNA (1)...(19): siRNA sense strand
uggcuguccuucucugauc

SEQ ID NO: 1608694 - RNA, 19 nt, Homo sapiens
  misc_RNA (1)...(19): siRNA sense strand
ugagaccuuucugcuccua

SEQ ID NO: 1608695 - RNA, 19 nt, Homo sapiens
  misc_RNA (1)...(19): siRNA sense strand
gcgagucugccaacacaca

SEQ ID NO: 1608696 - RNA, 19 nt, Homo sapiens
  misc_RNA (1)...(19): siRNA sense strand
gaguagaguuugugacauu

SEQ ID NO: 1608697 - RNA, 19 nt, Homo sapiens
  misc_RNA (1)...(19): siRNA sense strand
caaagaaccucccgacagu

SEQ ID NO: 1608698 - RNA, 19 nt, Homo sapiens
  misc_RNA (1)...(19): siRNA sense strand
gggaaauccuggugucuga

SEQ ID NO: 1608699 - RNA, 19 nt, Homo sapiens
  misc_RNA (1)...(19): siRNA sense strand
ggccagcucuuuagugcua

SEQ ID NO: 1608700 - RNA, 19 nt, Homo sapiens
  misc_RNA (1)...(19): siRNA sense strand
gcaacuacauggagaggau

SEQ ID NO: 1608701 - RNA, 19 nt, Homo sapiens
  misc_RNA (1)...(19): siRNA sense strand
gaaggacccugaggagcuu

SEQ ID NO: 1608702 - RNA, 19 nt, Homo sapiens
  misc_RNA (1)...(19): siRNA sense strand
cugaggagcuggugaauac

SEQ ID NO: 1608703 - RNA, 19 nt, Homo sapiens
  misc_RNA (1)...(19): siRNA sense strand
cugaggagcuucgcaacua

SEQ ID NO: 1608704 - RNA, 19 nt, Homo sapiens
  misc_RNA (1)...(19): siRNA sense strand
caagcacccuggcccgaaa

SEQ ID NO: 1608705 - RNA, 19 nt, Homo sapiens
  misc_RNA (1)...(19): siRNA sense strand
ggaagcgaguagaguuugu

SEQ ID NO: 1608706 - RNA, 19 nt, Homo sapiens
  misc_RNA (1)...(19): siRNA sense strand
ucacguggcagcuggagua

SEQ ID NO: 1608707 - RNA, 19 nt, Homo sapiens
  misc_RNA (1)...(19): siRNA sense strand
gaauacagcaccacugacu

SEQ ID NO: 1608708 - RNA, 19 nt, Homo sapiens
  misc_RNA (1)...(19): siRNA sense strand
ucucugagcucccgaucug

SEQ ID NO: 1608709 - RNA, 19 nt, Homo sapiens
  misc_RNA (1)...(19): siRNA sense strand
ggucaaugguguggucuuc

SEQ ID NO: 1608710 - RNA, 19 nt, Homo sapiens
  misc_RNA (1)...(19): siRNA sense strand
gugcuggacucgcguguag

SEQ ID NO: 1608711 - RNA, 19 nt, Homo sapiens
  misc_RNA (1)...(19): siRNA sense strand
gugaauacagcaccacuga

SEQ ID NO: 1608712 - RNA, 19 nt, Homo sapiens
  misc_RNA (1)...(19): siRNA sense strand
ggacaucagagcccuuauc

SEQ ID NO: 1608713 - RNA, 19 nt, Homo sapiens
  misc_RNA (1)...(19): siRNA sense strand
gcaucucgcugaccuugag

SEQ ID NO: 1608714 - RNA, 19 nt, Homo sapiens
  misc_RNA (1)...(19): siRNA sense strand
gcacugaccaggaggaacu

SEQ ID NO: 1608715 - RNA, 19 nt, Homo sapiens
  misc_RNA (1)...(19): siRNA sense strand
acucuggacugccaagcua

SEQ ID NO: 1608716 - RNA, 19 nt, Homo sapiens
  misc_RNA (1)...(19): siRNA sense strand
gcgaguagaguuugugaca

SEQ ID NO: 1608717 - RNA, 19 nt, Homo sapiens
  misc_RNA (1)...(19): siRNA sense strand
gcaugucacugagcuagag

SEQ ID NO: 1608718 - RNA, 19 nt, Homo sapiens
  misc_RNA (1)...(19): siRNA sense strand
gggaggaggaggaggaaga

SEQ ID NO: 1608719 - RNA, 19 nt, Homo sapiens
  misc_RNA (1)...(19): siRNA sense strand
gcggaagcgaguagaguuu

SEQ ID NO: 1608720 - RNA, 19 nt, Homo sapiens
  misc_RNA (1)...(19): siRNA sense strand
gauggccggucgcacaaca

SEQ ID NO: 1608721 - RNA, 19 nt, Homo sapiens
  misc_RNA (1)...(19): siRNA sense strand
gcugaggagcuggugaaua

SEQ ID NO: 1608722 - RNA, 19 nt, Homo sapiens
  misc_RNA (1)...(19): siRNA sense strand
ggacauccgcugggugugu

SEQ ID NO: 1608723 - RNA, 19 nt, Homo sapiens
  misc_RNA (1)...(19): siRNA sense strand
ggaagaggaggaggagaug

SEQ ID NO: 1608724 - RNA, 19 nt, Homo sapiens
  misc_RNA (1)...(19): siRNA sense strand
ccugccaacuccucucuga

SEQ ID NO: 1608725 - RNA, 19 nt, Homo sapiens
  misc_RNA (1)...(19): siRNA sense strand
ggccugugaugccguguuc

SEQ ID NO: 1608726 - RNA, 19 nt, Homo sapiens
  misc_RNA (1)...(19): siRNA sense strand
cagaggaggaggccaggaa

SEQ ID NO: 1608727 - RNA, 19 nt, Homo sapiens
  misc_RNA (1)...(19): siRNA sense strand
gcaccacaccacccucauc

SEQ ID NO: 1608728 - RNA, 19 nt, Homo sapiens
  misc_RNA (1)...(19): siRNA sense strand
gagcccaccagccacagaa

SEQ ID NO: 1608729 - RNA, 19 nt, Homo sapiens
  misc_RNA (1)...(19): siRNA sense strand
ucaaugguguggucuucgu

SEQ ID NO: 1608730 - RNA, 19 nt, Homo sapiens
  misc_RNA (1)...(19): siRNA sense strand
cugcgagucugccaacaca

SEQ ID NO: 1608731 - RNA, 19 nt, Homo sapiens
  misc_RNA (1)...(19): siRNA sense strand
guagaguuugugacauuug

SEQ ID NO: 1608732 - RNA, 19 nt, Homo sapiens
  misc_RNA (1)...(19): siRNA sense strand
aguagaguuugugacauuu

SEQ ID NO: 1608733 - RNA, 19 nt, Homo sapiens
  misc_RNA (1)...(19): siRNA sense strand
gcguggccaucuucaucuu

SEQ ID NO: 1608734 - RNA, 19 nt, Homo sapiens
  misc_RNA (1)...(19): siRNA sense strand
guccuucucugaucacacu

SEQ ID NO: 1608735 - RNA, 19 nt, Homo sapiens
  misc_RNA (1)...(19): siRNA sense strand
gcaugucggcugcgagucu

SEQ ID NO: 1608736 - RNA, 19 nt, Homo sapiens
  misc_RNA (1)...(19): siRNA sense strand
gaagcgaguagaguuugug

SEQ ID NO: 1608737 - RNA, 19 nt, Homo sapiens
  misc_RNA (1)...(19): siRNA sense strand
ggcggaagcgaguagaguu

SEQ ID NO: 1608738 - RNA, 19 nt, Homo sapiens
  misc_RNA (1)...(19): siRNA sense strand
caccacaccacccucauca

SEQ ID NO: 1608739 - RNA, 19 nt, Homo sapiens
  misc_RNA (1)...(19): siRNA sense strand
cgaguagaguuugugacau

SEQ ID NO: 1608740 - RNA, 19 nt, Homo sapiens
  misc_RNA (1)...(19): siRNA sense strand
ggccaucuucaucuucuug

SEQ ID NO: 1608741 - RNA, 19 nt, Homo sapiens
  misc_RNA (1)...(19): siRNA sense strand
uggcuguccuucucugauc

SEQ ID NO: 1608742 - RNA, 19 nt, Homo sapiens
  misc_RNA (1)...(19): siRNA sense strand
ugagaccuuucugcuccua

SEQ ID NO: 1608743 - RNA, 19 nt, Homo sapiens
  misc_RNA (1)...(19): siRNA sense strand
gcgagucugccaacacaca

SEQ ID NO: 1608744 - RNA, 19 nt, Homo sapiens
  misc_RNA (1)...(19): siRNA sense strand
gaguagaguuugugacauu

SEQ ID NO: 1608745 - RNA, 19 nt, Homo sapiens
  misc_RNA (1)...(19): siRNA sense strand
caaagaaccucccgacagu

SEQ ID NO: 1608746 - RNA, 19 nt, Homo sapiens
  misc_RNA (1)...(19): siRNA sense strand
gggaaauccuggugucuga

SEQ ID NO: 1608747 - RNA, 19 nt, Homo sapiens
  misc_RNA (1)...(19): siRNA sense strand
ggccagcucuuuagugcua

SEQ ID NO: 1608748 - RNA, 19 nt, Homo sapiens
  misc_RNA (1)...(19): siRNA sense strand
gcaacuacauggagaggau

SEQ ID NO: 1608749 - RNA, 19 nt, Homo sapiens
  misc_RNA (1)...(19): siRNA sense strand
gaaggacccugaggagcuu

SEQ ID NO: 1608750 - RNA, 19 nt, Homo sapiens
  misc_RNA (1)...(19): siRNA sense strand
cugaggagcuggugaauac

SEQ ID NO: 1608751 - RNA, 19 nt, Homo sapiens
  misc_RNA (1)...(19): siRNA sense strand
cugaggagcuucgcaacua

SEQ ID NO: 1608752 - RNA, 19 nt, Homo sapiens
  misc_RNA (1)...(19): siRNA sense strand
caagcacccuggcccgaaa

SEQ ID NO: 1608753 - RNA, 19 nt, Homo sapiens
  misc_RNA (1)...(19): siRNA sense strand
ggaagcgaguagaguuugu

SEQ ID NO: 1608754 - RNA, 19 nt, Homo sapiens
  misc_RNA (1)...(19): siRNA sense strand
ucacguggcagcuggagua

SEQ ID NO: 1608755 - RNA, 19 nt, Homo sapiens
  misc_RNA (1)...(19): siRNA sense strand
gaauacagcaccacugacu

SEQ ID NO: 1608756 - RNA, 19 nt, Homo sapiens
  misc_RNA (1)...(19): siRNA sense strand
ucucugagcucccgaucug

SEQ ID NO: 1608757 - RNA, 19 nt, Homo sapiens
  misc_RNA (1)...(19): siRNA sense strand
ggucaaugguguggucuuc

SEQ ID NO: 1608758 - RNA, 19 nt, Homo sapiens
  misc_RNA (1)...(19): siRNA sense strand
gugcuggacucgcguguag

SEQ ID NO: 1608759 - RNA, 19 nt, Homo sapiens
  misc_RNA (1)...(19): siRNA sense strand
gugaauacagcaccacuga

SEQ ID NO: 1608760 - RNA, 19 nt, Homo sapiens
  misc_RNA (1)...(19): siRNA sense strand
ggacaucagagcccuuauc

SEQ ID NO: 1608761 - RNA, 19 nt, Homo sapiens
  misc_RNA (1)...(19): siRNA sense strand
gcaucucgcugaccuugag

SEQ ID NO: 1608762 - RNA, 19 nt, Homo sapiens
  misc_RNA (1)...(19): siRNA sense strand
gcacugaccaggaggaacu

SEQ ID NO: 1608763 - RNA, 19 nt, Homo sapiens
  misc_RNA (1)...(19): siRNA sense strand
acucuggacugccaagcua

SEQ ID NO: 1608764 - RNA, 19 nt, Homo sapiens
  misc_RNA (1)...(19): siRNA sense strand
gcgaguagaguuugugaca

SEQ ID NO: 1608765 - RNA, 19 nt, Homo sapiens
  misc_RNA (1)...(19): siRNA sense strand
gcaugucacugagcuagag

SEQ ID NO: 1608766 - RNA, 19 nt, Homo sapiens
  misc_RNA (1)...(19): siRNA sense strand
gggaggaggaggaggaaga

SEQ ID NO: 1608767 - RNA, 19 nt, Homo sapiens
  misc_RNA (1)...(19): siRNA sense strand
gcggaagcgaguagaguuu

SEQ ID NO: 1608768 - RNA, 19 nt, Homo sapiens
  misc_RNA (1)...(19): siRNA sense strand
gauggccggucgcacaaca

SEQ ID NO: 1608769 - RNA, 19 nt, Homo sapiens
  misc_RNA (1)...(19): siRNA sense strand
gcugaggagcuggugaaua

SEQ ID NO: 1608770 - RNA, 19 nt, Homo sapiens
  misc_RNA (1)...(19): siRNA sense strand
ggacauccgcugggugugu

SEQ ID NO: 1608771 - RNA, 19 nt, Homo sapiens
  misc_RNA (1)...(19): siRNA sense strand
ggaagaggaggaggagaug

SEQ ID NO: 1608772 - RNA, 19 nt, Homo sapiens
  misc_RNA (1)...(19): siRNA sense strand
ccugccaacuccucucuga

SEQ ID NO: 1608773 - RNA, 19 nt, Homo sapiens
  misc_RNA (1)...(19): siRNA sense strand
ggccugugaugccguguuc

SEQ ID NO: 1608774 - RNA, 19 nt, Homo sapiens
  misc_RNA (1)...(19): siRNA sense strand
cagaggaggaggccaggaa

SEQ ID NO: 1608775 - RNA, 19 nt, Homo sapiens
  misc_RNA (1)...(19): siRNA sense strand
gcaccacaccacccucauc

SEQ ID NO: 1608776 - RNA, 19 nt, Homo sapiens
  misc_RNA (1)...(19): siRNA sense strand
gagcccaccagccacagaa

SEQ ID NO: 1608777 - RNA, 19 nt, Homo sapiens
  misc_RNA (1)...(19): siRNA sense strand
ucaaugguguggucuucgu

SEQ ID NO: 1608778 - RNA, 19 nt, Homo sapiens
  misc_RNA (1)...(19): siRNA sense strand
cugcgagucugccaacaca

SEQ ID NO: 1608779 - RNA, 19 nt, Homo sapiens
  misc_RNA (1)...(19): siRNA sense strand
guagaguuugugacauuug

SEQ ID NO: 1608780 - RNA, 19 nt, Homo sapiens
  misc_RNA (1)...(19): siRNA sense strand
aguagaguuugugacauuu

SEQ ID NO: 1608781 - RNA, 19 nt, Homo sapiens
  misc_RNA (1)...(19): siRNA sense strand
gcguggccaucuucaucuu

SEQ ID NO: 1608782 - RNA, 19 nt, Homo sapiens
  misc_RNA (1)...(19): siRNA sense strand
guccuucucugaucacacu

SEQ ID NO: 1608783 - RNA, 19 nt, Homo sapiens
  misc_RNA (1)...(19): siRNA sense strand
gcaugucggcugcgagucu

SEQ ID NO: 1608784 - RNA, 19 nt, Homo sapiens
  misc_RNA (1)...(19): siRNA sense strand
gaagcgaguagaguuugug

SEQ ID NO: 1608785 - RNA, 19 nt, Homo sapiens
  misc_RNA (1)...(19): siRNA sense strand
ggcggaagcgaguagaguu

SEQ ID NO: 1608786 - RNA, 19 nt, Homo sapiens
  misc_RNA (1)...(19): siRNA sense strand
caccacaccacccucauca

SEQ ID NO: 1608787 - RNA, 19 nt, Homo sapiens
  misc_RNA (1)...(19): siRNA sense strand
cgaguagaguuugugacau

SEQ ID NO: 1608788 - RNA, 19 nt, Homo sapiens
  misc_RNA (1)...(19): siRNA sense strand
ggccaucuucaucuucuug

SEQ ID NO: 1608789 - RNA, 19 nt, Homo sapiens
  misc_RNA (1)...(19): siRNA sense strand
uggcuguccuucucugauc

SEQ ID NO: 1608790 - RNA, 19 nt, Homo sapiens
  misc_RNA (1)...(19): siRNA sense strand
ugagaccuuucugcuccua

SEQ ID NO: 1608791 - RNA, 19 nt, Homo sapiens
  misc_RNA (1)...(19): siRNA sense strand
gcgagucugccaacacaca

SEQ ID NO: 1608792 - RNA, 19 nt, Homo sapiens
  misc_RNA (1)...(19): siRNA sense strand
gaguagaguuugugacauu

SEQ ID NO: 1608793 - RNA, 19 nt, Homo sapiens
  misc_RNA (1)...(19): siRNA sense strand
caaagaaccucccgacagu

SEQ ID NO: 1608794 - RNA, 19 nt, Homo sapiens
  misc_RNA (1)...(19): siRNA sense strand
gggaaauccuggugucuga

SEQ ID NO: 1608795 - RNA, 19 nt, Homo sapiens
  misc_RNA (1)...(19): siRNA sense strand
ggccagcucuuuagugcua

SEQ ID NO: 1608796 - RNA, 19 nt, Homo sapiens
  misc_RNA (1)...(19): siRNA sense strand
gcaacuacauggagaggau

SEQ ID NO: 1608797 - RNA, 19 nt, Homo sapiens
  misc_RNA (1)...(19): siRNA sense strand
gaaggacccugaggagcuu

SEQ ID NO: 1608798 - RNA, 19 nt, Homo sapiens
  misc_RNA (1)...(19): siRNA sense strand
cugaggagcuggugaauac

SEQ ID NO: 1608799 - RNA, 19 nt, Homo sapiens
  misc_RNA (1)...(19): siRNA sense strand
cugaggagcuucgcaacua

SEQ ID NO: 1608800 - RNA, 19 nt, Homo sapiens
  misc_RNA (1)...(19): siRNA sense strand
caagcacccuggcccgaaa

SEQ ID NO: 1608801 - RNA, 19 nt, Homo sapiens
  misc_RNA (1)...(19): siRNA sense strand
ggaagcgaguagaguuugu

SEQ ID NO: 1608802 - RNA, 19 nt, Homo sapiens
  misc_RNA (1)...(19): siRNA sense strand
ucacguggcagcuggagua

SEQ ID NO: 1608803 - RNA, 19 nt, Homo sapiens
  misc_RNA (1)...(19): siRNA sense strand
gaauacagcaccacugacu

SEQ ID NO: 1608804 - RNA, 19 nt, Homo sapiens
  misc_RNA (1)...(19): siRNA sense strand
ucucugagcucccgaucug

SEQ ID NO: 1608805 - RNA, 19 nt, Homo sapiens
  misc_RNA (1)...(19): siRNA sense strand
ggucaaugguguggucuuc

SEQ ID NO: 1608806 - RNA, 19 nt, Homo sapiens
  misc_RNA (1)...(19): siRNA sense strand
gugcuggacucgcguguag

SEQ ID NO: 1608807 - RNA, 19 nt, Homo sapiens
  misc_RNA (1)...(19): siRNA sense strand
gugaauacagcaccacuga

SEQ ID NO: 1608808 - RNA, 19 nt, Homo sapiens
  misc_RNA (1)...(19): siRNA sense strand
ggacaucagagcccuuauc

SEQ ID NO: 1608809 - RNA, 19 nt, Homo sapiens
  misc_RNA (1)...(19): siRNA sense strand
gcaucucgcugaccuugag

SEQ ID NO: 1608810 - RNA, 19 nt, Homo sapiens
  misc_RNA (1)...(19): siRNA sense strand
gcacugaccaggaggaacu

SEQ ID NO: 1608811 - RNA, 19 nt, Homo sapiens
  misc_RNA (1)...(19): siRNA sense strand
acucuggacugccaagcua

SEQ ID NO: 1608812 - RNA, 19 nt, Homo sapiens
  misc_RNA (1)...(19): siRNA sense strand
gcgaguagaguuugugaca

SEQ ID NO: 1608813 - RNA, 19 nt, Homo sapiens
  misc_RNA (1)...(19): siRNA sense strand
gcaugucacugagcuagag

SEQ ID NO: 1608814 - RNA, 19 nt, Homo sapiens
  misc_RNA (1)...(19): siRNA sense strand
gggaggaggaggaggaaga

SEQ ID NO: 1608815 - RNA, 19 nt, Homo sapiens
  misc_RNA (1)...(19): siRNA sense strand
gcggaagcgaguagaguuu

SEQ ID NO: 1608816 - RNA, 19 nt, Homo sapiens
  misc_RNA (1)...(19): siRNA sense strand
gauggccggucgcacaaca

SEQ ID NO: 1608817 - RNA, 19 nt, Homo sapiens
  misc_RNA (1)...(19): siRNA sense strand
gcugaggagcuggugaaua

SEQ ID NO: 1608818 - RNA, 19 nt, Homo sapiens
  misc_RNA (1)...(19): siRNA sense strand
ggacauccgcugggugugu

SEQ ID NO: 1608819 - RNA, 19 nt, Homo sapiens
  misc_RNA (1)...(19): siRNA sense strand
ggaagaggaggaggagaug

SEQ ID NO: 1608820 - RNA, 19 nt, Homo sapiens
  misc_RNA (1)...(19): siRNA sense strand
ccugccaacuccucucuga

SEQ ID NO: 1608821 - RNA, 19 nt, Homo sapiens
  misc_RNA (1)...(19): siRNA sense strand
ggccugugaugccguguuc

SEQ ID NO: 1608822 - RNA, 19 nt, Homo sapiens
  misc_RNA (1)...(19): siRNA sense strand
cagaggaggaggccaggaa

SEQ ID NO: 1608823 - RNA, 19 nt, Homo sapiens
  misc_RNA (1)...(19): siRNA sense strand
gcaccacaccacccucauc

SEQ ID NO: 1608824 - RNA, 19 nt, Homo sapiens
  misc_RNA (1)...(19): siRNA sense strand
gagcccaccagccacagaa

SEQ ID NO: 1608825 - RNA, 19 nt, Homo sapiens
  misc_RNA (1)...(19): siRNA sense strand
ucaaugguguggucuucgu

SEQ ID NO: 1608826 - RNA, 19 nt, Homo sapiens
  misc_RNA (1)...(19): siRNA sense strand
cugcgagucugccaacaca

SEQ ID NO: 1608827 - RNA, 19 nt, Homo sapiens
  misc_RNA (1)...(19): siRNA sense strand
guagaguuugugacauuug

SEQ ID NO: 1608828 - RNA, 19 nt, Homo sapiens
  misc_RNA (1)...(19): siRNA sense strand
aguagaguuugugacauuu

SEQ ID NO: 1608829 - RNA, 19 nt, Homo sapiens
  misc_RNA (1)...(19): siRNA sense strand
gcguggccaucuucaucuu

SEQ ID NO: 1608830 - RNA, 19 nt, Homo sapiens
  misc_RNA (1)...(19): siRNA sense strand
guccuucucugaucacacu

SEQ ID NO: 1608831 - RNA, 19 nt, Homo sapiens
  misc_RNA (1)...(19): siRNA sense strand
gcaugucggcugcgagucu

SEQ ID NO: 1608832 - RNA, 19 nt, Homo sapiens
  misc_RNA (1)...(19): siRNA sense strand
gaagcgaguagaguuugug

SEQ ID NO: 1608833 - RNA, 19 nt, Homo sapiens
  misc_RNA (1)...(19): siRNA sense strand
ggcggaagcgaguagaguu

SEQ ID NO: 1608834 - RNA, 19 nt, Homo sapiens
  misc_RNA (1)...(19): siRNA sense strand
caccacaccacccucauca

SEQ ID NO: 1608835 - RNA, 19 nt, Homo sapiens
  misc_RNA (1)...(19): siRNA sense strand
cgaguagaguuugugacau

SEQ ID NO: 1608836 - RNA, 19 nt, Homo sapiens
  misc_RNA (1)...(19): siRNA sense strand
ggccaucuucaucuucuug

SEQ ID NO: 1608837 - RNA, 19 nt, Homo sapiens
  misc_RNA (1)...(19): siRNA sense strand
uggcuguccuucucugauc

SEQ ID NO: 1608838 - RNA, 19 nt, Homo sapiens
  misc_RNA (1)...(19): siRNA sense strand
ugagaccuuucugcuccua

SEQ ID NO: 1608839 - RNA, 19 nt, Homo sapiens
  misc_RNA (1)...(19): siRNA sense strand
gcgagucugccaacacaca

SEQ ID NO: 1608840 - RNA, 19 nt, Homo sapiens
  misc_RNA (1)...(19): siRNA sense strand
gaagagacccugcaaagau

SEQ ID NO: 1608841 - RNA, 19 nt, Homo sapiens
  misc_RNA (1)...(19): siRNA sense strand
gcaucgaggugcucaguaa

SEQ ID NO: 1608842 - RNA, 19 nt, Homo sapiens
  misc_RNA (1)...(19): siRNA sense strand
gaaaugagagccaccuaau

SEQ ID NO: 1608843 - RNA, 19 nt, Homo sapiens
  misc_RNA (1)...(19): siRNA sense strand
ggaagagacccugcaaaga

SEQ ID NO: 1608844 - RNA, 19 nt, Homo sapiens
  misc_RNA (1)...(19): siRNA sense strand
guacaugacauccgacgaa

SEQ ID NO: 1608845 - RNA, 19 nt, Homo sapiens
  misc_RNA (1)...(19): siRNA sense strand
gagagccaccuaauugauu

SEQ ID NO: 1608846 - RNA, 19 nt, Homo sapiens
  misc_RNA (1)...(19): siRNA sense strand
aaugagagccaccuaauug

SEQ ID NO: 1608847 - RNA, 19 nt, Homo sapiens
  misc_RNA (1)...(19): siRNA sense strand
gcacuucacugggcaucga

SEQ ID NO: 1608848 - RNA, 19 nt, Homo sapiens
  misc_RNA (1)...(19): siRNA sense strand
gcagcagccuuguguuugg

SEQ ID NO: 1608849 - RNA, 19 nt, Homo sapiens
  misc_RNA (1)...(19): siRNA sense strand
gcgugaugcugguacauga

SEQ ID NO: 1608850 - RNA, 19 nt, Homo sapiens
  misc_RNA (1)...(19): siRNA sense strand
agagccaccuaauugauuu

SEQ ID NO: 1608851 - RNA, 19 nt, Homo sapiens
  misc_RNA (1)...(19): siRNA sense strand
gggaagagacccugcaaag

SEQ ID NO: 1608852 - RNA, 19 nt, Homo sapiens
  misc_RNA (1)...(19): siRNA sense strand
caugacauccgacgaaaug

SEQ ID NO: 1608853 - RNA, 19 nt, Homo sapiens
  misc_RNA (1)...(19): siRNA sense strand
cgaaaugagagccaccuaa

SEQ ID NO: 1608854 - RNA, 19 nt, Homo sapiens
  misc_RNA (1)...(19): siRNA sense strand
ggacgaggacgccuuucug

SEQ ID NO: 1608855 - RNA, 19 nt, Homo sapiens
  misc_RNA (1)...(19): siRNA sense strand
aagagacccugcaaagauc

SEQ ID NO: 1608856 - RNA, 19 nt, Homo sapiens
  misc_RNA (1)...(19): siRNA sense strand
gacauccgacgaaaugaga

SEQ ID NO: 1608857 - RNA, 19 nt, Homo sapiens
  misc_RNA (1)...(19): siRNA sense strand
aaaugagagccaccuaauu

SEQ ID NO: 1608858 - RNA, 19 nt, Homo sapiens
  misc_RNA (1)...(19): siRNA sense strand
uggcagcagccuuguguuu

SEQ ID NO: 1608859 - RNA, 19 nt, Homo sapiens
  misc_RNA (1)...(19): siRNA sense strand
uacaugacauccgacgaaa

SEQ ID NO: 1608860 - RNA, 19 nt, Homo sapiens
  misc_RNA (1)...(19): siRNA sense strand
gguggcagcagccuugugu

SEQ ID NO: 1608861 - RNA, 19 nt, Homo sapiens
  misc_RNA (1)...(19): siRNA sense strand
ggagaugggcagccaagac

SEQ ID NO: 1608862 - RNA, 19 nt, Homo sapiens
  misc_RNA (1)...(19): siRNA sense strand
ggucaugcagaucuacuuc

SEQ ID NO: 1608863 - RNA, 19 nt, Homo sapiens
  misc_RNA (1)...(19): siRNA sense strand
ggcagcagccuuguguuug

SEQ ID NO: 1608864 - RNA, 19 nt, Homo sapiens
  misc_RNA (1)...(19): siRNA sense strand
ucgaggugcucaguaaaca

SEQ ID NO: 1608865 - RNA, 19 nt, Homo sapiens
  misc_RNA (1)...(19): siRNA sense strand
ucaguaaacagggaucuuc

SEQ ID NO: 1608866 - RNA, 19 nt, Homo sapiens
  misc_RNA (1)...(19): siRNA sense strand
ugagagccaccuaauugau

SEQ ID NO: 1608867 - RNA, 19 nt, Homo sapiens
  misc_RNA (1)...(19): siRNA sense strand
gaagagacccugcaaagau

SEQ ID NO: 1608868 - RNA, 19 nt, Homo sapiens
  misc_RNA (1)...(19): siRNA sense strand
gcaucgaggugcucaguaa

SEQ ID NO: 1608869 - RNA, 19 nt, Homo sapiens
  misc_RNA (1)...(19): siRNA sense strand
gaaaugagagccaccuaau

SEQ ID NO: 1608870 - RNA, 19 nt, Homo sapiens
  misc_RNA (1)...(19): siRNA sense strand
ggaagagacccugcaaaga

SEQ ID NO: 1608871 - RNA, 19 nt, Homo sapiens
  misc_RNA (1)...(19): siRNA sense strand
guacaugacauccgacgaa

SEQ ID NO: 1608872 - RNA, 19 nt, Homo sapiens
  misc_RNA (1)...(19): siRNA sense strand
gagagccaccuaauugauu

SEQ ID NO: 1608873 - RNA, 19 nt, Homo sapiens
  misc_RNA (1)...(19): siRNA sense strand
aaugagagccaccuaauug

SEQ ID NO: 1608874 - RNA, 19 nt, Homo sapiens
  misc_RNA (1)...(19): siRNA sense strand
gcacuucacugggcaucga

SEQ ID NO: 1608875 - RNA, 19 nt, Homo sapiens
  misc_RNA (1)...(19): siRNA sense strand
gcagcagccuuguguuugg

SEQ ID NO: 1608876 - RNA, 19 nt, Homo sapiens
  misc_RNA (1)...(19): siRNA sense strand
gcgugaugcugguacauga

SEQ ID NO: 1608877 - RNA, 19 nt, Homo sapiens
  misc_RNA (1)...(19): siRNA sense strand
agagccaccuaauugauuu

SEQ ID NO: 1608878 - RNA, 19 nt, Homo sapiens
  misc_RNA (1)...(19): siRNA sense strand
gggaagagacccugcaaag

SEQ ID NO: 1608879 - RNA, 19 nt, Homo sapiens
  misc_RNA (1)...(19): siRNA sense strand
caugacauccgacgaaaug

SEQ ID NO: 1608880 - RNA, 19 nt, Homo sapiens
  misc_RNA (1)...(19): siRNA sense strand
cgaaaugagagccaccuaa

SEQ ID NO: 1608881 - RNA, 19 nt, Homo sapiens
  misc_RNA (1)...(19): siRNA sense strand
ggacgaggacgccuuucug

SEQ ID NO: 1608882 - RNA, 19 nt, Homo sapiens
  misc_RNA (1)...(19): siRNA sense strand
aagagacccugcaaagauc

SEQ ID NO: 1608883 - RNA, 19 nt, Homo sapiens
  misc_RNA (1)...(19): siRNA sense strand
gacauccgacgaaaugaga

SEQ ID NO: 1608884 - RNA, 19 nt, Homo sapiens
  misc_RNA (1)...(19): siRNA sense strand
aaaugagagccaccuaauu

SEQ ID NO: 1608885 - RNA, 19 nt, Homo sapiens
  misc_RNA (1)...(19): siRNA sense strand
uggcagcagccuuguguuu

SEQ ID NO: 1608886 - RNA, 19 nt, Homo sapiens
  misc_RNA (1)...(19): siRNA sense strand
uacaugacauccgacgaaa

SEQ ID NO: 1608887 - RNA, 19 nt, Homo sapiens
  misc_RNA (1)...(19): siRNA sense strand
gguggcagcagccuugugu

SEQ ID NO: 1608888 - RNA, 19 nt, Homo sapiens
  misc_RNA (1)...(19): siRNA sense strand
ggagaugggcagccaagac

SEQ ID NO: 1608889 - RNA, 19 nt, Homo sapiens
  misc_RNA (1)...(19): siRNA sense strand
ggucaugcagaucuacuuc

SEQ ID NO: 1608890 - RNA, 19 nt, Homo sapiens
  misc_RNA (1)...(19): siRNA sense strand
ggcagcagccuuguguuug

SEQ ID NO: 1608891 - RNA, 19 nt, Homo sapiens
  misc_RNA (1)...(19): siRNA sense strand
ucgaggugcucaguaaaca

SEQ ID NO: 1608892 - RNA, 19 nt, Homo sapiens
  misc_RNA (1)...(19): siRNA sense strand
ucaguaaacagggaucuuc

SEQ ID NO: 1608893 - RNA, 19 nt, Homo sapiens
  misc_RNA (1)...(19): siRNA sense strand
ugagagccaccuaauugau

SEQ ID NO: 1608894 - RNA, 19 nt, Homo sapiens
  misc_RNA (1)...(19): siRNA sense strand
gaagagacccugcaaagau

SEQ ID NO: 1608895 - RNA, 19 nt, Homo sapiens
  misc_RNA (1)...(19): siRNA sense strand
gcaucgaggugcucaguaa

SEQ ID NO: 1608896 - RNA, 19 nt, Homo sapiens
  misc_RNA (1)...(19): siRNA sense strand
gaaaugagagccaccuaau

SEQ ID NO: 1608897 - RNA, 19 nt, Homo sapiens
  misc_RNA (1)...(19): siRNA sense strand
ggaagagacccugcaaaga

SEQ ID NO: 1608898 - RNA, 19 nt, Homo sapiens
  misc_RNA (1)...(19): siRNA sense strand
guacaugacauccgacgaa

SEQ ID NO: 1608899 - RNA, 19 nt, Homo sapiens
  misc_RNA (1)...(19): siRNA sense strand
gagagccaccuaauugauu

SEQ ID NO: 1608900 - RNA, 19 nt, Homo sapiens
  misc_RNA (1)...(19): siRNA sense strand
aaugagagccaccuaauug

SEQ ID NO: 1608901 - RNA, 19 nt, Homo sapiens
  misc_RNA (1)...(19): siRNA sense strand
gcacuucacugggcaucga

SEQ ID NO: 1608902 - RNA, 19 nt, Homo sapiens
  misc_RNA (1)...(19): siRNA sense strand
gcagcagccuuguguuugg

SEQ ID NO: 1608903 - RNA, 19 nt, Homo sapiens
  misc_RNA (1)...(19): siRNA sense strand
gcgugaugcugguacauga

SEQ ID NO: 1608904 - RNA, 19 nt, Homo sapiens
  misc_RNA (1)...(19): siRNA sense strand
agagccaccuaauugauuu

SEQ ID NO: 1608905 - RNA, 19 nt, Homo sapiens
  misc_RNA (1)...(19): siRNA sense strand
gggaagagacccugcaaag

SEQ ID NO: 1608906 - RNA, 19 nt, Homo sapiens
  misc_RNA (1)...(19): siRNA sense strand
caugacauccgacgaaaug

SEQ ID NO: 1608907 - RNA, 19 nt, Homo sapiens
  misc_RNA (1)...(19): siRNA sense strand
cgaaaugagagccaccuaa

SEQ ID NO: 1608908 - RNA, 19 nt, Homo sapiens
  misc_RNA (1)...(19): siRNA sense strand
ggacgaggacgccuuucug

SEQ ID NO: 1608909 - RNA, 19 nt, Homo sapiens
  misc_RNA (1)...(19): siRNA sense strand
aagagacccugcaaagauc

SEQ ID NO: 1608910 - RNA, 19 nt, Homo sapiens
  misc_RNA (1)...(19): siRNA sense strand
gacauccgacgaaaugaga

SEQ ID NO: 1608911 - RNA, 19 nt, Homo sapiens
  misc_RNA (1)...(19): siRNA sense strand
aaaugagagccaccuaauu

SEQ ID NO: 1608912 - RNA, 19 nt, Homo sapiens
  misc_RNA (1)...(19): siRNA sense strand
uggcagcagccuuguguuu

SEQ ID NO: 1608913 - RNA, 19 nt, Homo sapiens
  misc_RNA (1)...(19): siRNA sense strand
uacaugacauccgacgaaa

SEQ ID NO: 1608914 - RNA, 19 nt, Homo sapiens
  misc_RNA (1)...(19): siRNA sense strand
gguggcagcagccuugugu

SEQ ID NO: 1608915 - RNA, 19 nt, Homo sapiens
  misc_RNA (1)...(19): siRNA sense strand
ggagaugggcagccaagac

SEQ ID NO: 1608916 - RNA, 19 nt, Homo sapiens
  misc_RNA (1)...(19): siRNA sense strand
ggucaugcagaucuacuuc

SEQ ID NO: 1608917 - RNA, 19 nt, Homo sapiens
  misc_RNA (1)...(19): siRNA sense strand
ggcagcagccuuguguuug

SEQ ID NO: 1608918 - RNA, 19 nt, Homo sapiens
  misc_RNA (1)...(19): siRNA sense strand
ucgaggugcucaguaaaca

SEQ ID NO: 1608919 - RNA, 19 nt, Homo sapiens
  misc_RNA (1)...(19): siRNA sense strand
ucaguaaacagggaucuuc

SEQ ID NO: 1608920 - RNA, 19 nt, Homo sapiens
  misc_RNA (1)...(19): siRNA sense strand
ugagagccaccuaauugau

SEQ ID NO: 1608921 - RNA, 19 nt, Homo sapiens
  misc_RNA (1)...(19): siRNA sense strand
gguagcagcuucucagaua

SEQ ID NO: 1608922 - RNA, 19 nt, Homo sapiens
  misc_RNA (1)...(19): siRNA sense strand
ugaagaaacucucugaaug

SEQ ID NO: 1608923 - RNA, 19 nt, Homo sapiens
  misc_RNA (1)...(19): siRNA sense strand
gaaacucucugaauguuag

SEQ ID NO: 1608924 - RNA, 19 nt, Homo sapiens
  misc_RNA (1)...(19): siRNA sense strand
guacacagauacaauaauc

SEQ ID NO: 1608925 - RNA, 19 nt, Homo sapiens
  misc_RNA (1)...(19): siRNA sense strand
ccacuuaccuucccagaug

SEQ ID NO: 1608926 - RNA, 19 nt, Homo sapiens
  misc_RNA (1)...(19): siRNA sense strand
gaagaaacucucugaaugu

SEQ ID NO: 1608927 - RNA, 19 nt, Homo sapiens
  misc_RNA (1)...(19): siRNA sense strand
gaaguuaagccgaguguug

SEQ ID NO: 1608928 - RNA, 19 nt, Homo sapiens
  misc_RNA (1)...(19): siRNA sense strand
gaucucagcaagccacuua

SEQ ID NO: 1608929 - RNA, 19 nt, Homo sapiens
  misc_RNA (1)...(19): siRNA sense strand
ccaagaaugggauguauuu

SEQ ID NO: 1608930 - RNA, 19 nt, Homo sapiens
  misc_RNA (1)...(19): siRNA sense strand
ggagaagcuugaggaaauu

SEQ ID NO: 1608931 - RNA, 19 nt, Homo sapiens
  misc_RNA (1)...(19): siRNA sense strand
cccaguaccugcagaaauu

SEQ ID NO: 1608932 - RNA, 19 nt, Homo sapiens
  misc_RNA (1)...(19): siRNA sense strand
uggagaagcuugaggaaau

SEQ ID NO: 1608933 - RNA, 19 nt, Homo sapiens
  misc_RNA (1)...(19): siRNA sense strand
gcaggaguuugccaugauu

SEQ ID NO: 1608934 - RNA, 19 nt, Homo sapiens
  misc_RNA (1)...(19): siRNA sense strand
gaaauucucaccuccacuu

SEQ ID NO: 1608935 - RNA, 19 nt, Homo sapiens
  misc_RNA (1)...(19): siRNA sense strand
ccaccaggccucuuacuuu

SEQ ID NO: 1608936 - RNA, 19 nt, Homo sapiens
  misc_RNA (1)...(19): siRNA sense strand
gagaccaacugccagacaa

SEQ ID NO: 1608937 - RNA, 19 nt, Homo sapiens
  misc_RNA (1)...(19): siRNA sense strand
gguaaccauugccuugauu

SEQ ID NO: 1608938 - RNA, 19 nt, Homo sapiens
  misc_RNA (1)...(19): siRNA sense strand
ggauguauuugcaccugaa

SEQ ID NO: 1608939 - RNA, 19 nt, Homo sapiens
  misc_RNA (1)...(19): siRNA sense strand
cgaugucucuggauauaau

SEQ ID NO: 1608940 - RNA, 19 nt, Homo sapiens
  misc_RNA (1)...(19): siRNA sense strand
caacccugcugucuggaaa

SEQ ID NO: 1608941 - RNA, 19 nt, Homo sapiens
  misc_RNA (1)...(19): siRNA sense strand
ucaguacacagauacaaua

SEQ ID NO: 1608942 - RNA, 19 nt, Homo sapiens
  misc_RNA (1)...(19): siRNA sense strand
ccuacuaacuccuggauuc

SEQ ID NO: 1608943 - RNA, 19 nt, Homo sapiens
  misc_RNA (1)...(19): siRNA sense strand
agaaguuuauucaggauga

SEQ ID NO: 1608944 - RNA, 19 nt, Homo sapiens
  misc_RNA (1)...(19): siRNA sense strand
gauaagugggagaagauuu

SEQ ID NO: 1608945 - RNA, 19 nt, Homo sapiens
  misc_RNA (1)...(19): siRNA sense strand
uuaacauccugaaagcaua

SEQ ID NO: 1608946 - RNA, 19 nt, Homo sapiens
  misc_RNA (1)...(19): siRNA sense strand
aaggagacgugccgauuga

SEQ ID NO: 1608947 - RNA, 19 nt, Homo sapiens
  misc_RNA (1)...(19): siRNA sense strand
aaaugaugcuggauaagug

SEQ ID NO: 1608948 - RNA, 19 nt, Homo sapiens
  misc_RNA (1)...(19): siRNA sense strand
ugaaaaugaugcuggauaa

SEQ ID NO: 1608949 - RNA, 19 nt, Homo sapiens
  misc_RNA (1)...(19): siRNA sense strand
cagcaucgucgccuacuaa

SEQ ID NO: 1608950 - RNA, 19 nt, Homo sapiens
  misc_RNA (1)...(19): siRNA sense strand
aagaaacucucugaauguu

SEQ ID NO: 1608951 - RNA, 19 nt, Homo sapiens
  misc_RNA (1)...(19): siRNA sense strand
gagaagcuugaggaaauua

SEQ ID NO: 1608952 - RNA, 19 nt, Homo sapiens
  misc_RNA (1)...(19): siRNA sense strand
caccaggccucuuacuuuc

SEQ ID NO: 1608953 - RNA, 19 nt, Homo sapiens
  misc_RNA (1)...(19): siRNA sense strand
ccagauggaugcacauugc

SEQ ID NO: 1608954 - RNA, 19 nt, Homo sapiens
  misc_RNA (1)...(19): siRNA sense strand
ggagacgugccgauugauu

SEQ ID NO: 1608955 - RNA, 19 nt, Homo sapiens
  misc_RNA (1)...(19): siRNA sense strand
ggaugggucuucuaucacu

SEQ ID NO: 1608956 - RNA, 19 nt, Homo sapiens
  misc_RNA (1)...(19): siRNA sense strand
cuucucagauauugaugua

SEQ ID NO: 1608957 - RNA, 19 nt, Homo sapiens
  misc_RNA (1)...(19): siRNA sense strand
acacaagcguggaggucua

SEQ ID NO: 1608958 - RNA, 19 nt, Homo sapiens
  misc_RNA (1)...(19): siRNA sense strand
gaagcuugaggaaauuauu

SEQ ID NO: 1608959 - RNA, 19 nt, Homo sapiens
  misc_RNA (1)...(19): siRNA sense strand
uugaaucaguacacagaua

SEQ ID NO: 1608960 - RNA, 19 nt, Homo sapiens
  misc_RNA (1)...(19): siRNA sense strand
gggaucaccgugguucuua

SEQ ID NO: 1608961 - RNA, 19 nt, Homo sapiens
  misc_RNA (1)...(19): siRNA sense strand
gaacucagcaaaaucauau

SEQ ID NO: 1608962 - RNA, 19 nt, Homo sapiens
  misc_RNA (1)...(19): siRNA sense strand
agaaugggauguauuugca

SEQ ID NO: 1608963 - RNA, 19 nt, Homo sapiens
  misc_RNA (1)...(19): siRNA sense strand
ucucagauauugauguaca

SEQ ID NO: 1608964 - RNA, 19 nt, Homo sapiens
  misc_RNA (1)...(19): siRNA sense strand
gauacaauaauccaggaaa

SEQ ID NO: 1608965 - RNA, 19 nt, Homo sapiens
  misc_RNA (1)...(19): siRNA sense strand
agacaaacagcacccauga

SEQ ID NO: 1608966 - RNA, 19 nt, Homo sapiens
  misc_RNA (1)...(19): siRNA sense strand
ucaccgugguucuuaguau

SEQ ID NO: 1608967 - RNA, 19 nt, Homo sapiens
  misc_RNA (1)...(19): siRNA sense strand
gaagaggaaguaccaggau

SEQ ID NO: 1608968 - RNA, 19 nt, Homo sapiens
  misc_RNA (1)...(19): siRNA sense strand
gccgaguguugaaucagua

SEQ ID NO: 1608969 - RNA, 19 nt, Homo sapiens
  misc_RNA (1)...(19): siRNA sense strand
gauggcucauucugugaaa

SEQ ID NO: 1608970 - RNA, 19 nt, Homo sapiens
  misc_RNA (1)...(19): siRNA sense strand
caaggagacgugccgauug

SEQ ID NO: 1608971 - RNA, 19 nt, Homo sapiens
  misc_RNA (1)...(19): siRNA sense strand
cagcaagcaucuccuggau

SEQ ID NO: 1608972 - RNA, 19 nt, Homo sapiens
  misc_RNA (1)...(19): siRNA sense strand
caauaauccaggaaagaaa

SEQ ID NO: 1608973 - RNA, 19 nt, Homo sapiens
  misc_RNA (1)...(19): siRNA sense strand
uuucaccgcuuguacaguu

SEQ ID NO: 1608974 - RNA, 19 nt, Homo sapiens
  misc_RNA (1)...(19): siRNA sense strand
aagcauacauugaggugau

SEQ ID NO: 1608975 - RNA, 19 nt, Homo sapiens
  misc_RNA (1)...(19): siRNA sense strand
caggauaacacuccgaaga

SEQ ID NO: 1608976 - RNA, 19 nt, Homo sapiens
  misc_RNA (1)...(19): siRNA sense strand
cagcacccaugauccuuau

SEQ ID NO: 1608977 - RNA, 19 nt, Homo sapiens
  misc_RNA (1)...(19): siRNA sense strand
ggaggucuaugagcacauc

SEQ ID NO: 1608978 - RNA, 19 nt, Homo sapiens
  misc_RNA (1)...(19): siRNA sense strand
guagcagcuucucagauau

SEQ ID NO: 1608979 - RNA, 19 nt, Homo sapiens
  misc_RNA (1)...(19): siRNA sense strand
caccgugguucuuaguauu

SEQ ID NO: 1608980 - RNA, 19 nt, Homo sapiens
  misc_RNA (1)...(19): siRNA sense strand
uaagccgaguguugaauca

SEQ ID NO: 1608981 - RNA, 19 nt, Homo sapiens
  misc_RNA (1)...(19): siRNA sense strand
gagacgugccgauugauuc

SEQ ID NO: 1608982 - RNA, 19 nt, Homo sapiens
  misc_RNA (1)...(19): siRNA sense strand
acaauaauccaggaaagaa

SEQ ID NO: 1608983 - RNA, 19 nt, Homo sapiens
  misc_RNA (1)...(19): siRNA sense strand
acaaacagcacccaugauc

SEQ ID NO: 1608984 - RNA, 19 nt, Homo sapiens
  misc_RNA (1)...(19): siRNA sense strand
caugauugaguuaaaggua

SEQ ID NO: 1608985 - RNA, 19 nt, Homo sapiens
  misc_RNA (1)...(19): siRNA sense strand
aagaggaaguaccaggauu

SEQ ID NO: 1608986 - RNA, 19 nt, Homo sapiens
  misc_RNA (1)...(19): siRNA sense strand
gacccagacuaugcaaaga

SEQ ID NO: 1608987 - RNA, 19 nt, Homo sapiens
  misc_RNA (1)...(19): siRNA sense strand
gaaguuuauucaggaugau

SEQ ID NO: 1608988 - RNA, 19 nt, Homo sapiens
  misc_RNA (1)...(19): siRNA sense strand
agaaacucucugaauguua

SEQ ID NO: 1608989 - RNA, 19 nt, Homo sapiens
  misc_RNA (1)...(19): siRNA sense strand
ggggaugggucuucuauca

SEQ ID NO: 1608990 - RNA, 19 nt, Homo sapiens
  misc_RNA (1)...(19): siRNA sense strand
caugacaccuuggcagcaa

SEQ ID NO: 1608991 - RNA, 19 nt, Homo sapiens
  misc_RNA (1)...(19): siRNA sense strand
cccaugauccuuaugcaaa

SEQ ID NO: 1608992 - RNA, 19 nt, Homo sapiens
  misc_RNA (1)...(19): siRNA sense strand
gcagaacagaucccaaguc

SEQ ID NO: 1608993 - RNA, 19 nt, Homo sapiens
  misc_RNA (1)...(19): siRNA sense strand
gagaugucguacaccacaa

SEQ ID NO: 1608994 - RNA, 19 nt, Homo sapiens
  misc_RNA (1)...(19): siRNA sense strand
agaggaaguaccaggauuu

SEQ ID NO: 1608995 - RNA, 19 nt, Homo sapiens
  misc_RNA (1)...(19): siRNA sense strand
cucgaugucucuggauaua

SEQ ID NO: 1608996 - RNA, 19 nt, Homo sapiens
  misc_RNA (1)...(19): siRNA sense strand
ccagaaguuuauucaggau

SEQ ID NO: 1608997 - RNA, 19 nt, Homo sapiens
  misc_RNA (1)...(19): siRNA sense strand
ugccuucccuuucuggauu

SEQ ID NO: 1608998 - RNA, 19 nt, Homo sapiens
  misc_RNA (1)...(19): siRNA sense strand
ucaaggagacgugccgauu

SEQ ID NO: 1608999 - RNA, 19 nt, Homo sapiens
  misc_RNA (1)...(19): siRNA sense strand
gaaagugguagcagcuucu

SEQ ID NO: 1609000 - RNA, 19 nt, Homo sapiens
  misc_RNA (1)...(19): siRNA sense strand
auauugauguacacucuga

SEQ ID NO: 1609001 - RNA, 19 nt, Homo sapiens
  misc_RNA (1)...(19): siRNA sense strand
ggaucaaggaacugcauug

SEQ ID NO: 1609002 - RNA, 19 nt, Homo sapiens
  misc_RNA (1)...(19): siRNA sense strand
ccagcaucgucgccuacua

SEQ ID NO: 1609003 - RNA, 19 nt, Homo sapiens
  misc_RNA (1)...(19): siRNA sense strand
ccucgugccuucccuuucu

SEQ ID NO: 1609004 - RNA, 19 nt, Homo sapiens
  misc_RNA (1)...(19): siRNA sense strand
ggaucaccgugguucuuag

SEQ ID NO: 1609005 - RNA, 19 nt, Homo sapiens
  misc_RNA (1)...(19): siRNA sense strand
gggaccagcugggugagau

SEQ ID NO: 1609006 - RNA, 19 nt, Homo sapiens
  misc_RNA (1)...(19): siRNA sense strand
acucugaagugagcacauu

SEQ ID NO: 1609007 - RNA, 19 nt, Homo sapiens
  misc_RNA (1)...(19): siRNA sense strand
uagcagcuucucagauauu

SEQ ID NO: 1609008 - RNA, 19 nt, Homo sapiens
  misc_RNA (1)...(19): siRNA sense strand
caucgucgccuacuaacuc

SEQ ID NO: 1609009 - RNA, 19 nt, Homo sapiens
  misc_RNA (1)...(19): siRNA sense strand
ggauaagugggagaagauu

SEQ ID NO: 1609010 - RNA, 19 nt, Homo sapiens
  misc_RNA (1)...(19): siRNA sense strand
uauucaggaugauaacaug

SEQ ID NO: 1609011 - RNA, 19 nt, Homo sapiens
  misc_RNA (1)...(19): siRNA sense strand
ggagaccaacugccagaca

SEQ ID NO: 1609012 - RNA, 19 nt, Homo sapiens
  misc_RNA (1)...(19): siRNA sense strand
cugaagaaacucucugaau

SEQ ID NO: 1609013 - RNA, 19 nt, Homo sapiens
  misc_RNA (1)...(19): siRNA sense strand
gaugggucuucuaucacuu

SEQ ID NO: 1609014 - RNA, 19 nt, Homo sapiens
  misc_RNA (1)...(19): siRNA sense strand
caguacacagauacaauaa

SEQ ID NO: 1609015 - RNA, 19 nt, Homo sapiens
  misc_RNA (1)...(19): siRNA sense strand
aaagccauauuugaacuca

SEQ ID NO: 1609016 - RNA, 19 nt, Homo sapiens
  misc_RNA (1)...(19): siRNA sense strand
agauauugauguacacucu

SEQ ID NO: 1609017 - RNA, 19 nt, Homo sapiens
  misc_RNA (1)...(19): siRNA sense strand
auacaauaauccaggaaag

SEQ ID NO: 1609018 - RNA, 19 nt, Homo sapiens
  misc_RNA (1)...(19): siRNA sense strand
acagcacccaugauccuua

SEQ ID NO: 1609019 - RNA, 19 nt, Homo sapiens
  misc_RNA (1)...(19): siRNA sense strand
gaucaaggaacugcauugg

SEQ ID NO: 1609020 - RNA, 19 nt, Homo sapiens
  misc_RNA (1)...(19): siRNA sense strand
uaucuaugacccagacuau

SEQ ID NO: 1609021 - RNA, 19 nt, Homo sapiens
  misc_RNA (1)...(19): siRNA sense strand
gaaagaaagcauccagaca

SEQ ID NO: 1609022 - RNA, 19 nt, Homo sapiens
  misc_RNA (1)...(19): siRNA sense strand
guucgagccugaggacuuu

SEQ ID NO: 1609023 - RNA, 19 nt, Homo sapiens
  misc_RNA (1)...(19): siRNA sense strand
caagaugaauggcgucaac

SEQ ID NO: 1609024 - RNA, 19 nt, Homo sapiens
  misc_RNA (1)...(19): siRNA sense strand
ccaggaggaugacucucuu

SEQ ID NO: 1609025 - RNA, 19 nt, Homo sapiens
  misc_RNA (1)...(19): siRNA sense strand
gcucagcagccacuucgaa

SEQ ID NO: 1609026 - RNA, 19 nt, Homo sapiens
  misc_RNA (1)...(19): siRNA sense strand
gggugagggucgugagugu

SEQ ID NO: 1609027 - RNA, 19 nt, Homo sapiens
  misc_RNA (1)...(19): siRNA sense strand
cacggaagcggaagccaaa

SEQ ID NO: 1609028 - RNA, 19 nt, Homo sapiens
  misc_RNA (1)...(19): siRNA sense strand
ccugcggccucuacaugaa

SEQ ID NO: 1609029 - RNA, 19 nt, Homo sapiens
  misc_RNA (1)...(19): siRNA sense strand
gccacuaccugugcaaugc

SEQ ID NO: 1609030 - RNA, 19 nt, Homo sapiens
  misc_RNA (1)...(19): siRNA sense strand
cuucguguccgacuucuug

SEQ ID NO: 1609031 - RNA, 19 nt, Homo sapiens
  misc_RNA (1)...(19): siRNA sense strand
agacagccaccgcggauuc

SEQ ID NO: 1609032 - RNA, 19 nt, Homo sapiens
  misc_RNA (1)...(19): siRNA sense strand
ccaccuucguguccgacuu

SEQ ID NO: 1609033 - RNA, 19 nt, Homo sapiens
  misc_RNA (1)...(19): siRNA sense strand
gaagagacccugcaaagau

SEQ ID NO: 1609034 - RNA, 19 nt, Homo sapiens
  misc_RNA (1)...(19): siRNA sense strand
gcaucgaggugcucaguaa

SEQ ID NO: 1609035 - RNA, 19 nt, Homo sapiens
  misc_RNA (1)...(19): siRNA sense strand
gaaaugagagccaccuaau

SEQ ID NO: 1609036 - RNA, 19 nt, Homo sapiens
  misc_RNA (1)...(19): siRNA sense strand
ggaagagacccugcaaaga

SEQ ID NO: 1609037 - RNA, 19 nt, Homo sapiens
  misc_RNA (1)...(19): siRNA sense strand
guacaugacauccgacgaa

SEQ ID NO: 1609038 - RNA, 19 nt, Homo sapiens
  misc_RNA (1)...(19): siRNA sense strand
gagagccaccuaauugauu

SEQ ID NO: 1609039 - RNA, 19 nt, Homo sapiens
  misc_RNA (1)...(19): siRNA sense strand
aaugagagccaccuaauug

SEQ ID NO: 1609040 - RNA, 19 nt, Homo sapiens
  misc_RNA (1)...(19): siRNA sense strand
gcacuucacugggcaucga

SEQ ID NO: 1609041 - RNA, 19 nt, Homo sapiens
  misc_RNA (1)...(19): siRNA sense strand
gcagcagccuuguguuugg

SEQ ID NO: 1609042 - RNA, 19 nt, Homo sapiens
  misc_RNA (1)...(19): siRNA sense strand
gcgugaugcugguacauga

SEQ ID NO: 1609043 - RNA, 19 nt, Homo sapiens
  misc_RNA (1)...(19): siRNA sense strand
agagccaccuaauugauuu

SEQ ID NO: 1609044 - RNA, 19 nt, Homo sapiens
  misc_RNA (1)...(19): siRNA sense strand
gggaagagacccugcaaag

SEQ ID NO: 1609045 - RNA, 19 nt, Homo sapiens
  misc_RNA (1)...(19): siRNA sense strand
caugacauccgacgaaaug

SEQ ID NO: 1609046 - RNA, 19 nt, Homo sapiens
  misc_RNA (1)...(19): siRNA sense strand
cgaaaugagagccaccuaa

SEQ ID NO: 1609047 - RNA, 19 nt, Homo sapiens
  misc_RNA (1)...(19): siRNA sense strand
ggacgaggacgccuuucug

SEQ ID NO: 1609048 - RNA, 19 nt, Homo sapiens
  misc_RNA (1)...(19): siRNA sense strand
aagagacccugcaaagauc

SEQ ID NO: 1609049 - RNA, 19 nt, Homo sapiens
  misc_RNA (1)...(19): siRNA sense strand
gacauccgacgaaaugaga

SEQ ID NO: 1609050 - RNA, 19 nt, Homo sapiens
  misc_RNA (1)...(19): siRNA sense strand
aaaugagagccaccuaauu

SEQ ID NO: 1609051 - RNA, 19 nt, Homo sapiens
  misc_RNA (1)...(19): siRNA sense strand
uggcagcagccuuguguuu

SEQ ID NO: 1609052 - RNA, 19 nt, Homo sapiens
  misc_RNA (1)...(19): siRNA sense strand
uacaugacauccgacgaaa

SEQ ID NO: 1609053 - RNA, 19 nt, Homo sapiens
  misc_RNA (1)...(19): siRNA sense strand
gguggcagcagccuugugu

SEQ ID NO: 1609054 - RNA, 19 nt, Homo sapiens
  misc_RNA (1)...(19): siRNA sense strand
ggagaugggcagccaagac

SEQ ID NO: 1609055 - RNA, 19 nt, Homo sapiens
  misc_RNA (1)...(19): siRNA sense strand
ggucaugcagaucuacuuc

SEQ ID NO: 1609056 - RNA, 19 nt, Homo sapiens
  misc_RNA (1)...(19): siRNA sense strand
ggcagcagccuuguguuug

SEQ ID NO: 1609057 - RNA, 19 nt, Homo sapiens
  misc_RNA (1)...(19): siRNA sense strand
ucgaggugcucaguaaaca

SEQ ID NO: 1609058 - RNA, 19 nt, Homo sapiens
  misc_RNA (1)...(19): siRNA sense strand
ucaguaaacagggaucuuc

SEQ ID NO: 1609059 - RNA, 19 nt, Homo sapiens
  misc_RNA (1)...(19): siRNA sense strand
ugagagccaccuaauugau

SEQ ID NO: 1609060 - RNA, 19 nt, Homo sapiens
  misc_RNA (1)...(19): siRNA sense strand
gaagagacccugcaaagau

SEQ ID NO: 1609061 - RNA, 19 nt, Homo sapiens
  misc_RNA (1)...(19): siRNA sense strand
gcaucgaggugcucaguaa

SEQ ID NO: 1609062 - RNA, 19 nt, Homo sapiens
  misc_RNA (1)...(19): siRNA sense strand
gaaaugagagccaccuaau

SEQ ID NO: 1609063 - RNA, 19 nt, Homo sapiens
  misc_RNA (1)...(19): siRNA sense strand
ggaagagacccugcaaaga

SEQ ID NO: 1609064 - RNA, 19 nt, Homo sapiens
  misc_RNA (1)...(19): siRNA sense strand
guacaugacauccgacgaa

SEQ ID NO: 1609065 - RNA, 19 nt, Homo sapiens
  misc_RNA (1)...(19): siRNA sense strand
gagagccaccuaauugauu

SEQ ID NO: 1609066 - RNA, 19 nt, Homo sapiens
  misc_RNA (1)...(19): siRNA sense strand
aaugagagccaccuaauug

SEQ ID NO: 1609067 - RNA, 19 nt, Homo sapiens
  misc_RNA (1)...(19): siRNA sense strand
gcacuucacugggcaucga

SEQ ID NO: 1609068 - RNA, 19 nt, Homo sapiens
  misc_RNA (1)...(19): siRNA sense strand
gcagcagccuuguguuugg

SEQ ID NO: 1609069 - RNA, 19 nt, Homo sapiens
  misc_RNA (1)...(19): siRNA sense strand
gcgugaugcugguacauga

SEQ ID NO: 1609070 - RNA, 19 nt, Homo sapiens
  misc_RNA (1)...(19): siRNA sense strand
agagccaccuaauugauuu

SEQ ID NO: 1609071 - RNA, 19 nt, Homo sapiens
  misc_RNA (1)...(19): siRNA sense strand
gggaagagacccugcaaag

SEQ ID NO: 1609072 - RNA, 19 nt, Homo sapiens
  misc_RNA (1)...(19): siRNA sense strand
caugacauccgacgaaaug

SEQ ID NO: 1609073 - RNA, 19 nt, Homo sapiens
  misc_RNA (1)...(19): siRNA sense strand
cgaaaugagagccaccuaa

SEQ ID NO: 1609074 - RNA, 19 nt, Homo sapiens
  misc_RNA (1)...(19): siRNA sense strand
ggacgaggacgccuuucug

SEQ ID NO: 1609075 - RNA, 19 nt, Homo sapiens
  misc_RNA (1)...(19): siRNA sense strand
aagagacccugcaaagauc

SEQ ID NO: 1609076 - RNA, 19 nt, Homo sapiens
  misc_RNA (1)...(19): siRNA sense strand
gacauccgacgaaaugaga

SEQ ID NO: 1609077 - RNA, 19 nt, Homo sapiens
  misc_RNA (1)...(19): siRNA sense strand
aaaugagagccaccuaauu

SEQ ID NO: 1609078 - RNA, 19 nt, Homo sapiens
  misc_RNA (1)...(19): siRNA sense strand
uggcagcagccuuguguuu

SEQ ID NO: 1609079 - RNA, 19 nt, Homo sapiens
  misc_RNA (1)...(19): siRNA sense strand
uacaugacauccgacgaaa

SEQ ID NO: 1609080 - RNA, 19 nt, Homo sapiens
  misc_RNA (1)...(19): siRNA sense strand
gguggcagcagccuugugu

SEQ ID NO: 1609081 - RNA, 19 nt, Homo sapiens
  misc_RNA (1)...(19): siRNA sense strand
ggagaugggcagccaagac

SEQ ID NO: 1609082 - RNA, 19 nt, Homo sapiens
  misc_RNA (1)...(19): siRNA sense strand
ggucaugcagaucuacuuc

SEQ ID NO: 1609083 - RNA, 19 nt, Homo sapiens
  misc_RNA (1)...(19): siRNA sense strand
ggcagcagccuuguguuug

SEQ ID NO: 1609084 - RNA, 19 nt, Homo sapiens
  misc_RNA (1)...(19): siRNA sense strand
ucgaggugcucaguaaaca

SEQ ID NO: 1609085 - RNA, 19 nt, Homo sapiens
  misc_RNA (1)...(19): siRNA sense strand
ucaguaaacagggaucuuc

SEQ ID NO: 1609086 - RNA, 19 nt, Homo sapiens
  misc_RNA (1)...(19): siRNA sense strand
ugagagccaccuaauugau

SEQ ID NO: 1609087 - RNA, 19 nt, Homo sapiens
  misc_RNA (1)...(19): siRNA sense strand
gaagagacccugcaaagau

SEQ ID NO: 1609088 - RNA, 19 nt, Homo sapiens
  misc_RNA (1)...(19): siRNA sense strand
gcaucgaggugcucaguaa

SEQ ID NO: 1609089 - RNA, 19 nt, Homo sapiens
  misc_RNA (1)...(19): siRNA sense strand
gaaaugagagccaccuaau

SEQ ID NO: 1609090 - RNA, 19 nt, Homo sapiens
  misc_RNA (1)...(19): siRNA sense strand
ggaagagacccugcaaaga

SEQ ID NO: 1609091 - RNA, 19 nt, Homo sapiens
  misc_RNA (1)...(19): siRNA sense strand
guacaugacauccgacgaa

SEQ ID NO: 1609092 - RNA, 19 nt, Homo sapiens
  misc_RNA (1)...(19): siRNA sense strand
gagagccaccuaauugauu

SEQ ID NO: 1609093 - RNA, 19 nt, Homo sapiens
  misc_RNA (1)...(19): siRNA sense strand
aaugagagccaccuaauug

SEQ ID NO: 1609094 - RNA, 19 nt, Homo sapiens
  misc_RNA (1)...(19): siRNA sense strand
gcacuucacugggcaucga

SEQ ID NO: 1609095 - RNA, 19 nt, Homo sapiens
  misc_RNA (1)...(19): siRNA sense strand
gcagcagccuuguguuugg

SEQ ID NO: 1609096 - RNA, 19 nt, Homo sapiens
  misc_RNA (1)...(19): siRNA sense strand
gcgugaugcugguacauga

SEQ ID NO: 1609097 - RNA, 19 nt, Homo sapiens
  misc_RNA (1)...(19): siRNA sense strand
agagccaccuaauugauuu

SEQ ID NO: 1609098 - RNA, 19 nt, Homo sapiens
  misc_RNA (1)...(19): siRNA sense strand
gggaagagacccugcaaag

SEQ ID NO: 1609099 - RNA, 19 nt, Homo sapiens
  misc_RNA (1)...(19): siRNA sense strand
caugacauccgacgaaaug

SEQ ID NO: 1609100 - RNA, 19 nt, Homo sapiens
  misc_RNA (1)...(19): siRNA sense strand
cgaaaugagagccaccuaa

SEQ ID NO: 1609101 - RNA, 19 nt, Homo sapiens
  misc_RNA (1)...(19): siRNA sense strand
ggacgaggacgccuuucug

SEQ ID NO: 1609102 - RNA, 19 nt, Homo sapiens
  misc_RNA (1)...(19): siRNA sense strand
aagagacccugcaaagauc

SEQ ID NO: 1609103 - RNA, 19 nt, Homo sapiens
  misc_RNA (1)...(19): siRNA sense strand
gacauccgacgaaaugaga

SEQ ID NO: 1609104 - RNA, 19 nt, Homo sapiens
  misc_RNA (1)...(19): siRNA sense strand
aaaugagagccaccuaauu

SEQ ID NO: 1609105 - RNA, 19 nt, Homo sapiens
  misc_RNA (1)...(19): siRNA sense strand
uggcagcagccuuguguuu

SEQ ID NO: 1609106 - RNA, 19 nt, Homo sapiens
  misc_RNA (1)...(19): siRNA sense strand
uacaugacauccgacgaaa

SEQ ID NO: 1609107 - RNA, 19 nt, Homo sapiens
  misc_RNA (1)...(19): siRNA sense strand
gguggcagcagccuugugu

SEQ ID NO: 1609108 - RNA, 19 nt, Homo sapiens
  misc_RNA (1)...(19): siRNA sense strand
ggagaugggcagccaagac

SEQ ID NO: 1609109 - RNA, 19 nt, Homo sapiens
  misc_RNA (1)...(19): siRNA sense strand
ggucaugcagaucuacuuc

SEQ ID NO: 1609110 - RNA, 19 nt, Homo sapiens
  misc_RNA (1)...(19): siRNA sense strand
ggcagcagccuuguguuug

SEQ ID NO: 1609111 - RNA, 19 nt, Homo sapiens
  misc_RNA (1)...(19): siRNA sense strand
ucgaggugcucaguaaaca

SEQ ID NO: 1609112 - RNA, 19 nt, Homo sapiens
  misc_RNA (1)...(19): siRNA sense strand
ucaguaaacagggaucuuc

SEQ ID NO: 1609113 - RNA, 19 nt, Homo sapiens
  misc_RNA (1)...(19): siRNA sense strand
ugagagccaccuaauugau

SEQ ID NO: 1609114 - RNA, 19 nt, Homo sapiens
  misc_RNA (1)...(19): siRNA sense strand
gaagaagccuuacaaagaa

SEQ ID NO: 1609115 - RNA, 19 nt, Homo sapiens
  misc_RNA (1)...(19): siRNA sense strand
ggaagguacuggaaauuua

SEQ ID NO: 1609116 - RNA, 19 nt, Homo sapiens
  misc_RNA (1)...(19): siRNA sense strand
agaaggaacucaauaauga

SEQ ID NO: 1609117 - RNA, 19 nt, Homo sapiens
  misc_RNA (1)...(19): siRNA sense strand
gaaaucaugucccuccaaa

SEQ ID NO: 1609118 - RNA, 19 nt, Homo sapiens
  misc_RNA (1)...(19): siRNA sense strand
gaagacugccuauauuuaa

SEQ ID NO: 1609119 - RNA, 19 nt, Homo sapiens
  misc_RNA (1)...(19): siRNA sense strand
gaccagauauucccagaaa

SEQ ID NO: 1609120 - RNA, 19 nt, Homo sapiens
  misc_RNA (1)...(19): siRNA sense strand
ggaaagauaagagggauua

SEQ ID NO: 1609121 - RNA, 19 nt, Homo sapiens
  misc_RNA (1)...(19): siRNA sense strand
gacacgaaauucauucaua

SEQ ID NO: 1609122 - RNA, 19 nt, Homo sapiens
  misc_RNA (1)...(19): siRNA sense strand
gauauaauguuaggaguga

SEQ ID NO: 1609123 - RNA, 19 nt, Homo sapiens
  misc_RNA (1)...(19): siRNA sense strand
cagcggaucuucacucaaa

SEQ ID NO: 1609124 - RNA, 19 nt, Homo sapiens
  misc_RNA (1)...(19): siRNA sense strand
uaagagggauuaagaagga

SEQ ID NO: 1609125 - RNA, 19 nt, Homo sapiens
  misc_RNA (1)...(19): siRNA sense strand
gauugauggugauguaaua

SEQ ID NO: 1609126 - RNA, 19 nt, Homo sapiens
  misc_RNA (1)...(19): siRNA sense strand
gagcgaagacugccuauau

SEQ ID NO: 1609127 - RNA, 19 nt, Homo sapiens
  misc_RNA (1)...(19): siRNA sense strand
gagacgagguucccuaugu

SEQ ID NO: 1609128 - RNA, 19 nt, Homo sapiens
  misc_RNA (1)...(19): siRNA sense strand
gauuggcccuacagaguua

SEQ ID NO: 1609129 - RNA, 19 nt, Homo sapiens
  misc_RNA (1)...(19): siRNA sense strand
agaagaagccuuacaaaga

SEQ ID NO: 1609130 - RNA, 19 nt, Homo sapiens
  misc_RNA (1)...(19): siRNA sense strand
gaacauuacagagccaaua

SEQ ID NO: 1609131 - RNA, 19 nt, Homo sapiens
  misc_RNA (1)...(19): siRNA sense strand
cgaagacugccuauauuua

SEQ ID NO: 1609132 - RNA, 19 nt, Homo sapiens
  misc_RNA (1)...(19): siRNA sense strand
aaaguugguugcaauguuu

SEQ ID NO: 1609133 - RNA, 19 nt, Homo sapiens
  misc_RNA (1)...(19): siRNA sense strand
gaagcacacugauuuggau

SEQ ID NO: 1609134 - RNA, 19 nt, Homo sapiens
  misc_RNA (1)...(19): siRNA sense strand
gcacguggccaaauuaugu

SEQ ID NO: 1609135 - RNA, 19 nt, Homo sapiens
  misc_RNA (1)...(19): siRNA sense strand
caaagaacuuguugaccaa

SEQ ID NO: 1609136 - RNA, 19 nt, Homo sapiens
  misc_RNA (1)...(19): siRNA sense strand
caguauaccucuacaacaa

SEQ ID NO: 1609137 - RNA, 19 nt, Homo sapiens
  misc_RNA (1)...(19): siRNA sense strand
gauaagaggagacaugaug

SEQ ID NO: 1609138 - RNA, 19 nt, Homo sapiens
  misc_RNA (1)...(19): siRNA sense strand
gaaguagcauggaccagau

SEQ ID NO: 1609139 - RNA, 19 nt, Homo sapiens
  misc_RNA (1)...(19): siRNA sense strand
gagaaaccauuaaguucau

SEQ ID NO: 1609140 - RNA, 19 nt, Homo sapiens
  misc_RNA (1)...(19): siRNA sense strand
caacuaaagugccaucaac

SEQ ID NO: 1609141 - RNA, 19 nt, Homo sapiens
  misc_RNA (1)...(19): siRNA sense strand
guaaugacauacuggacaa

SEQ ID NO: 1609142 - RNA, 19 nt, Homo sapiens
  misc_RNA (1)...(19): siRNA sense strand
gagagaaaccauuaaguuc

SEQ ID NO: 1609143 - RNA, 19 nt, Homo sapiens
  misc_RNA (1)...(19): siRNA sense strand
ugacauacuggacaaauuu

SEQ ID NO: 1609144 - RNA, 19 nt, Homo sapiens
  misc_RNA (1)...(19): siRNA sense strand
agauagcgaugaugguaua

SEQ ID NO: 1609145 - RNA, 19 nt, Homo sapiens
  misc_RNA (1)...(19): siRNA sense strand
ucaauuugcuccugugugu

SEQ ID NO: 1609146 - RNA, 19 nt, Homo sapiens
  misc_RNA (1)...(19): siRNA sense strand
caaaugaagcacacugauu

SEQ ID NO: 1609147 - RNA, 19 nt, Homo sapiens
  misc_RNA (1)...(19): siRNA sense strand
gaccaacuuuaucuccaua

SEQ ID NO: 1609148 - RNA, 19 nt, Homo sapiens
  misc_RNA (1)...(19): siRNA sense strand
gguaaccguuggagcaauu

SEQ ID NO: 1609149 - RNA, 19 nt, Homo sapiens
  misc_RNA (1)...(19): siRNA sense strand
gcuuuaagauggacuagug

SEQ ID NO: 1609150 - RNA, 19 nt, Homo sapiens
  misc_RNA (1)...(19): siRNA sense strand
gcgaagacugccuauauuu

SEQ ID NO: 1609151 - RNA, 19 nt, Homo sapiens
  misc_RNA (1)...(19): siRNA sense strand
ccugugugguuuacuaaua

SEQ ID NO: 1609152 - RNA, 19 nt, Homo sapiens
  misc_RNA (1)...(19): siRNA sense strand
gaagguacuggaaauuuau

SEQ ID NO: 1609153 - RNA, 19 nt, Homo sapiens
  misc_RNA (1)...(19): siRNA sense strand
uaacuuggaugugguuuca

SEQ ID NO: 1609154 - RNA, 19 nt, Homo sapiens
  misc_RNA (1)...(19): siRNA sense strand
caugguggcucauauaugg

SEQ ID NO: 1609155 - RNA, 19 nt, Homo sapiens
  misc_RNA (1)...(19): siRNA sense strand
cgaaauucauucauaccaa

SEQ ID NO: 1609156 - RNA, 19 nt, Homo sapiens
  misc_RNA (1)...(19): siRNA sense strand
ugagagaaaccauuaaguu

SEQ ID NO: 1609157 - RNA, 19 nt, Homo sapiens
  misc_RNA (1)...(19): siRNA sense strand
guagauagcgaugauggua

SEQ ID NO: 1609158 - RNA, 19 nt, Homo sapiens
  misc_RNA (1)...(19): siRNA sense strand
gaugauguucccuuaauga

SEQ ID NO: 1609159 - RNA, 19 nt, Homo sapiens
  misc_RNA (1)...(19): siRNA sense strand
gaugcugagugcaguugua

SEQ ID NO: 1609160 - RNA, 19 nt, Homo sapiens
  misc_RNA (1)...(19): siRNA sense strand
agacgagguucccuaugua

SEQ ID NO: 1609161 - RNA, 19 nt, Homo sapiens
  misc_RNA (1)...(19): siRNA sense strand
ccauuaaguucauguauac

SEQ ID NO: 1609162 - RNA, 19 nt, Homo sapiens
  misc_RNA (1)...(19): siRNA sense strand
gaaggaacucaauaaugaa

SEQ ID NO: 1609163 - RNA, 19 nt, Homo sapiens
  misc_RNA (1)...(19): siRNA sense strand
gaugguauaucagcuagug

SEQ ID NO: 1609164 - RNA, 19 nt, Homo sapiens
  misc_RNA (1)...(19): siRNA sense strand
ucagaaaugccacucaauu

SEQ ID NO: 1609165 - RNA, 19 nt, Homo sapiens
  misc_RNA (1)...(19): siRNA sense strand
gugcaguuguaaugacaua

SEQ ID NO: 1609166 - RNA, 19 nt, Homo sapiens
  misc_RNA (1)...(19): siRNA sense strand
ggucagauaucagaaaugc

SEQ ID NO: 1609167 - RNA, 19 nt, Homo sapiens
  misc_RNA (1)...(19): siRNA sense strand
uggaaugccuacagaagaa

SEQ ID NO: 1609168 - RNA, 19 nt, Homo sapiens
  misc_RNA (1)...(19): siRNA sense strand
uaucagaaaugccacucaa

SEQ ID NO: 1609169 - RNA, 19 nt, Homo sapiens
  misc_RNA (1)...(19): siRNA sense strand
guuauuuccuugcaauuuc

SEQ ID NO: 1609170 - RNA, 19 nt, Homo sapiens
  misc_RNA (1)...(19): siRNA sense strand
caucacugcuguuucugaa

SEQ ID NO: 1609171 - RNA, 19 nt, Homo sapiens
  misc_RNA (1)...(19): siRNA sense strand
gacaucacuuucagaccua

SEQ ID NO: 1609172 - RNA, 19 nt, Homo sapiens
  misc_RNA (1)...(19): siRNA sense strand
ggaguacucgguuucuuga

SEQ ID NO: 1609173 - RNA, 19 nt, Homo sapiens
  misc_RNA (1)...(19): siRNA sense strand
caaagggacuacucaacag

SEQ ID NO: 1609174 - RNA, 19 nt, Homo sapiens
  misc_RNA (1)...(19): siRNA sense strand
ccaacuuuaucuccauauu

SEQ ID NO: 1609175 - RNA, 19 nt, Homo sapiens
  misc_RNA (1)...(19): siRNA sense strand
ccagauauucccagaaaga

SEQ ID NO: 1609176 - RNA, 19 nt, Homo sapiens
  misc_RNA (1)...(19): siRNA sense strand
gauaagagggauuaagaag

SEQ ID NO: 1609177 - RNA, 19 nt, Homo sapiens
  misc_RNA (1)...(19): siRNA sense strand
ggauuaaaaccaagaguua

SEQ ID NO: 1609178 - RNA, 19 nt, Homo sapiens
  misc_RNA (1)...(19): siRNA sense strand
auauauaugucccgacuga

SEQ ID NO: 1609179 - RNA, 19 nt, Homo sapiens
  misc_RNA (1)...(19): siRNA sense strand
gaugcacguggccaaauua

SEQ ID NO: 1609180 - RNA, 19 nt, Homo sapiens
  misc_RNA (1)...(19): siRNA sense strand
caacuuuaucuccauauug

SEQ ID NO: 1609181 - RNA, 19 nt, Homo sapiens
  misc_RNA (1)...(19): siRNA sense strand
uauaguagauagcgaugau

SEQ ID NO: 1609182 - RNA, 19 nt, Homo sapiens
  misc_RNA (1)...(19): siRNA sense strand
caucaacugacaucacuuu

SEQ ID NO: 1609183 - RNA, 19 nt, Homo sapiens
  misc_RNA (1)...(19): siRNA sense strand
ugugauugauggugaugua

SEQ ID NO: 1609184 - RNA, 19 nt, Homo sapiens
  misc_RNA (1)...(19): siRNA sense strand
gcuagaauguuggccacaa

SEQ ID NO: 1609185 - RNA, 19 nt, Homo sapiens
  misc_RNA (1)...(19): siRNA sense strand
gcacuacuaccaaugaucu

SEQ ID NO: 1609186 - RNA, 19 nt, Homo sapiens
  misc_RNA (1)...(19): siRNA sense strand
cuaaagugccaucaacuga

SEQ ID NO: 1609187 - RNA, 19 nt, Homo sapiens
  misc_RNA (1)...(19): siRNA sense strand
acacgaaauucauucauac

SEQ ID NO: 1609188 - RNA, 19 nt, Homo sapiens
  misc_RNA (1)...(19): siRNA sense strand
cuagaauguuggccacaaa

SEQ ID NO: 1609189 - RNA, 19 nt, Homo sapiens
  misc_RNA (1)...(19): siRNA sense strand
uauggaagguacuggaaau

SEQ ID NO: 1609190 - RNA, 19 nt, Homo sapiens
  misc_RNA (1)...(19): siRNA sense strand
aaucaugucccuccaaaug

SEQ ID NO: 1609191 - RNA, 19 nt, Homo sapiens
  misc_RNA (1)...(19): siRNA sense strand
ucaaagggacuacucaaca

SEQ ID NO: 1609192 - RNA, 19 nt, Homo sapiens
  misc_RNA (1)...(19): siRNA sense strand
ggggaaggguuaaaauuug

SEQ ID NO: 1609193 - RNA, 19 nt, Homo sapiens
  misc_RNA (1)...(19): siRNA sense strand
acaagaagaggaaaucaug

SEQ ID NO: 1609194 - RNA, 19 nt, Homo sapiens
  misc_RNA (1)...(19): siRNA sense strand
gaucaaagggacuacucaa

SEQ ID NO: 1609195 - RNA, 19 nt, Homo sapiens
  misc_RNA (1)...(19): siRNA sense strand
aagauaagagggauuaaga

SEQ ID NO: 1609196 - RNA, 19 nt, Homo sapiens
  misc_RNA (1)...(19): siRNA sense strand
gaacuauggacuccuugau

SEQ ID NO: 1609197 - RNA, 19 nt, Homo sapiens
  misc_RNA (1)...(19): siRNA sense strand
uaccucaucugcauaaucu

SEQ ID NO: 1609198 - RNA, 19 nt, Homo sapiens
  misc_RNA (1)...(19): siRNA sense strand
gaucucauacaagcuuuaa

SEQ ID NO: 1609199 - RNA, 19 nt, Homo sapiens
  misc_RNA (1)...(19): siRNA sense strand
gugguuuacuaauaacuug

SEQ ID NO: 1609200 - RNA, 19 nt, Homo sapiens
  misc_RNA (1)...(19): siRNA sense strand
ucuaacccaugcacaagaa

SEQ ID NO: 1609201 - RNA, 19 nt, Homo sapiens
  misc_RNA (1)...(19): siRNA sense strand
gcugagugcaguuguaaug

SEQ ID NO: 1609202 - RNA, 19 nt, Homo sapiens
  misc_RNA (1)...(19): siRNA sense strand
ugaccaagauauucaacca

SEQ ID NO: 1609203 - RNA, 19 nt, Homo sapiens
  misc_RNA (1)...(19): siRNA sense strand
caguagaguuaguggaaug

SEQ ID NO: 1609204 - RNA, 19 nt, Homo sapiens
  misc_RNA (1)...(19): siRNA sense strand
caacuaucgacuuggagua

SEQ ID NO: 1609205 - RNA, 19 nt, Homo sapiens
  misc_RNA (1)...(19): siRNA sense strand
cugaugauguucccuuaau

SEQ ID NO: 1609206 - RNA, 19 nt, Homo sapiens
  misc_RNA (1)...(19): siRNA sense strand
gauuacacacuagcuauga

SEQ ID NO: 1609207 - RNA, 19 nt, Homo sapiens
  misc_RNA (1)...(19): siRNA sense strand
aaagugccaucaacugaca

SEQ ID NO: 1609208 - RNA, 19 nt, Homo sapiens
  misc_RNA (1)...(19): siRNA sense strand
guugguaccucaucugcau

SEQ ID NO: 1609209 - RNA, 19 nt, Homo sapiens
  misc_RNA (1)...(19): siRNA sense strand
ucaagacacgaaauucauu

SEQ ID NO: 1609210 - RNA, 19 nt, Homo sapiens
  misc_RNA (1)...(19): siRNA sense strand
gagugcaguuguaaugaca

SEQ ID NO: 1609211 - RNA, 19 nt, Homo sapiens
  misc_RNA (1)...(19): siRNA sense strand
gaaagauaagagggauuaa

SEQ ID NO: 1609212 - RNA, 19 nt, Homo sapiens
  misc_RNA (1)...(19): siRNA sense strand
gauggagcaaggagaguuu

SEQ ID NO: 1609213 - RNA, 19 nt, Homo sapiens
  misc_RNA (1)...(19): siRNA sense strand
cagaagaagccuuacaaag

SEQ ID NO: 1609214 - RNA, 19 nt, Homo sapiens
  misc_RNA (1)...(19): siRNA sense strand
gaagaaggguuauuuguug

SEQ ID NO: 1609215 - RNA, 19 nt, Homo sapiens
  misc_RNA (1)...(19): siRNA sense strand
ggaaacaaaugguuagaaa

SEQ ID NO: 1609216 - RNA, 19 nt, Homo sapiens
  misc_RNA (1)...(19): siRNA sense strand
gaagauagauugccugaag

SEQ ID NO: 1609217 - RNA, 19 nt, Homo sapiens
  misc_RNA (1)...(19): siRNA sense strand
gaauacagauccugaaaga

SEQ ID NO: 1609218 - RNA, 19 nt, Homo sapiens
  misc_RNA (1)...(19): siRNA sense strand
gauuauaucucuccugaaa

SEQ ID NO: 1609219 - RNA, 19 nt, Homo sapiens
  misc_RNA (1)...(19): siRNA sense strand
aagaauaucugcuguguuu

SEQ ID NO: 1609220 - RNA, 19 nt, Homo sapiens
  misc_RNA (1)...(19): siRNA sense strand
caacagauaugcccuggaa

SEQ ID NO: 1609221 - RNA, 19 nt, Homo sapiens
  misc_RNA (1)...(19): siRNA sense strand
gcgcaagacucaccaguuu

SEQ ID NO: 1609222 - RNA, 19 nt, Homo sapiens
  misc_RNA (1)...(19): siRNA sense strand
gaccauacacuaucauuua

SEQ ID NO: 1609223 - RNA, 19 nt, Homo sapiens
  misc_RNA (1)...(19): siRNA sense strand
caacagauacaucgaauuu

SEQ ID NO: 1609224 - RNA, 19 nt, Homo sapiens
  misc_RNA (1)...(19): siRNA sense strand
ugaaagaucugcccaugaa

SEQ ID NO: 1609225 - RNA, 19 nt, Homo sapiens
  misc_RNA (1)...(19): siRNA sense strand
gaucggagcuguuuaagag

SEQ ID NO: 1609226 - RNA, 19 nt, Homo sapiens
  misc_RNA (1)...(19): siRNA sense strand
ggaauugauugggauaaua

SEQ ID NO: 1609227 - RNA, 19 nt, Homo sapiens
  misc_RNA (1)...(19): siRNA sense strand
caugagggaugaagaauuu

SEQ ID NO: 1609228 - RNA, 19 nt, Homo sapiens
  misc_RNA (1)...(19): siRNA sense strand
agaaagaacugcaugauuc

SEQ ID NO: 1609229 - RNA, 19 nt, Homo sapiens
  misc_RNA (1)...(19): siRNA sense strand
gaaauucaagucccauaua

SEQ ID NO: 1609230 - RNA, 19 nt, Homo sapiens
  misc_RNA (1)...(19): siRNA sense strand
gaagagaaagucaaaguga

SEQ ID NO: 1609231 - RNA, 19 nt, Homo sapiens
  misc_RNA (1)...(19): siRNA sense strand
gauaauagucggaaacaaa

SEQ ID NO: 1609232 - RNA, 19 nt, Homo sapiens
  misc_RNA (1)...(19): siRNA sense strand
aaaggcagguccucuguua

SEQ ID NO: 1609233 - RNA, 19 nt, Homo sapiens
  misc_RNA (1)...(19): siRNA sense strand
uaaccaaacuaaagacuga

SEQ ID NO: 1609234 - RNA, 19 nt, Homo sapiens
  misc_RNA (1)...(19): siRNA sense strand
gaugguggguuuaauaaga

SEQ ID NO: 1609235 - RNA, 19 nt, Homo sapiens
  misc_RNA (1)...(19): siRNA sense strand
gaacaucgacuuggucaaa

SEQ ID NO: 1609236 - RNA, 19 nt, Homo sapiens
  misc_RNA (1)...(19): siRNA sense strand
guuaguagcccaacagaua

SEQ ID NO: 1609237 - RNA, 19 nt, Homo sapiens
  misc_RNA (1)...(19): siRNA sense strand
ggguauagauccucagaaa

SEQ ID NO: 1609238 - RNA, 19 nt, Homo sapiens
  misc_RNA (1)...(19): siRNA sense strand
gcaaauccuuccucuuguu

SEQ ID NO: 1609239 - RNA, 19 nt, Homo sapiens
  misc_RNA (1)...(19): siRNA sense strand
ugaagaaagggauguauua

SEQ ID NO: 1609240 - RNA, 19 nt, Homo sapiens
  misc_RNA (1)...(19): siRNA sense strand
gaacuuaaguauacacaac

SEQ ID NO: 1609241 - RNA, 19 nt, Homo sapiens
  misc_RNA (1)...(19): siRNA sense strand
gacaauauacugauggaua

SEQ ID NO: 1609242 - RNA, 19 nt, Homo sapiens
  misc_RNA (1)...(19): siRNA sense strand
gaaggaaauccauacagua

SEQ ID NO: 1609243 - RNA, 19 nt, Homo sapiens
  misc_RNA (1)...(19): siRNA sense strand
caaaugcgauuacauagag

SEQ ID NO: 1609244 - RNA, 19 nt, Homo sapiens
  misc_RNA (1)...(19): siRNA sense strand
caagaagaguugaauaaag

SEQ ID NO: 1609245 - RNA, 19 nt, Homo sapiens
  misc_RNA (1)...(19): siRNA sense strand
caagagauaaccaaacuaa

SEQ ID NO: 1609246 - RNA, 19 nt, Homo sapiens
  misc_RNA (1)...(19): siRNA sense strand
aaagagagguuucaguuuc

SEQ ID NO: 1609247 - RNA, 19 nt, Homo sapiens
  misc_RNA (1)...(19): siRNA sense strand
gcacuaugcuuuccaggau

SEQ ID NO: 1609248 - RNA, 19 nt, Homo sapiens
  misc_RNA (1)...(19): siRNA sense strand
gauaaaguguuugccauga

SEQ ID NO: 1609249 - RNA, 19 nt, Homo sapiens
  misc_RNA (1)...(19): siRNA sense strand
gaaagugaguucaaacaac

SEQ ID NO: 1609250 - RNA, 19 nt, Homo sapiens
  misc_RNA (1)...(19): siRNA sense strand
gcuacgagauccagaaaug

SEQ ID NO: 1609251 - RNA, 19 nt, Homo sapiens
  misc_RNA (1)...(19): siRNA sense strand
gaacuacucucagaaaucg

SEQ ID NO: 1609252 - RNA, 19 nt, Homo sapiens
  misc_RNA (1)...(19): siRNA sense strand
gaugugaacuccauggaau

SEQ ID NO: 1609253 - RNA, 19 nt, Homo sapiens
  misc_RNA (1)...(19): siRNA sense strand
agaaagggauguauuagug

SEQ ID NO: 1609254 - RNA, 19 nt, Homo sapiens
  misc_RNA (1)...(19): siRNA sense strand
guugauaucuuugauguga

SEQ ID NO: 1609255 - RNA, 19 nt, Homo sapiens
  misc_RNA (1)...(19): siRNA sense strand
gcagagagcacuggcuaua

SEQ ID NO: 1609256 - RNA, 19 nt, Homo sapiens
  misc_RNA (1)...(19): siRNA sense strand
gagaaggaauacaugcaaa

SEQ ID NO: 1609257 - RNA, 19 nt, Homo sapiens
  misc_RNA (1)...(19): siRNA sense strand
guggagacauuacuggaua

SEQ ID NO: 1609258 - RNA, 19 nt, Homo sapiens
  misc_RNA (1)...(19): siRNA sense strand
guaacagaaucaagucauu

SEQ ID NO: 1609259 - RNA, 19 nt, Homo sapiens
  misc_RNA (1)...(19): siRNA sense strand
gaauugauguggccagcaa

SEQ ID NO: 1609260 - RNA, 19 nt, Homo sapiens
  misc_RNA (1)...(19): siRNA sense strand
gaaacuaaagggugucaaa

SEQ ID NO: 1609261 - RNA, 19 nt, Homo sapiens
  misc_RNA (1)...(19): siRNA sense strand
ccauauaacuuguguaaac

SEQ ID NO: 1609262 - RNA, 19 nt, Homo sapiens
  misc_RNA (1)...(19): siRNA sense strand
gggaggaauuugaaaguga

SEQ ID NO: 1609263 - RNA, 19 nt, Homo sapiens
  misc_RNA (1)...(19): siRNA sense strand
uuagacaaaucaaggcuua

SEQ ID NO: 1609264 - RNA, 19 nt, Homo sapiens
  misc_RNA (1)...(19): siRNA sense strand
uaaaguguuugccaugaaa

SEQ ID NO: 1609265 - RNA, 19 nt, Homo sapiens
  misc_RNA (1)...(19): siRNA sense strand
caguugagaucuccaguaa

SEQ ID NO: 1609266 - RNA, 19 nt, Homo sapiens
  misc_RNA (1)...(19): siRNA sense strand
gaacaucagcaagagauaa

SEQ ID NO: 1609267 - RNA, 19 nt, Homo sapiens
  misc_RNA (1)...(19): siRNA sense strand
gauauggaccugaauguga

SEQ ID NO: 1609268 - RNA, 19 nt, Homo sapiens
  misc_RNA (1)...(19): siRNA sense strand
gcaauugacucaguucauc

SEQ ID NO: 1609269 - RNA, 19 nt, Homo sapiens
  misc_RNA (1)...(19): siRNA sense strand
cagcaaauuugaagauaga

SEQ ID NO: 1609270 - RNA, 19 nt, Homo sapiens
  misc_RNA (1)...(19): siRNA sense strand
ucgaacagcugauaaagga

SEQ ID NO: 1609271 - RNA, 19 nt, Homo sapiens
  misc_RNA (1)...(19): siRNA sense strand
cagcaaauccuuccucuug

SEQ ID NO: 1609272 - RNA, 19 nt, Homo sapiens
  misc_RNA (1)...(19): siRNA sense strand
gcauugggauauacacuga

SEQ ID NO: 1609273 - RNA, 19 nt, Homo sapiens
  misc_RNA (1)...(19): siRNA sense strand
caacuggcuuuccaccuaa

SEQ ID NO: 1609274 - RNA, 19 nt, Homo sapiens
  misc_RNA (1)...(19): siRNA sense strand
ucaacuggcuuuccaccua

SEQ ID NO: 1609275 - RNA, 19 nt, Homo sapiens
  misc_RNA (1)...(19): siRNA sense strand
gaagaagaacuuggaacua

SEQ ID NO: 1609276 - RNA, 19 nt, Homo sapiens
  misc_RNA (1)...(19): siRNA sense strand
guugagaucuccaguaaag

SEQ ID NO: 1609277 - RNA, 19 nt, Homo sapiens
  misc_RNA (1)...(19): siRNA sense strand
cugaagagcuuagaucuga

SEQ ID NO: 1609278 - RNA, 19 nt, Homo sapiens
  misc_RNA (1)...(19): siRNA sense strand
gaacuuggaacuacucuca

SEQ ID NO: 1609279 - RNA, 19 nt, Homo sapiens
  misc_RNA (1)...(19): siRNA sense strand
gaagcuacgugaacagagu

SEQ ID NO: 1609280 - RNA, 19 nt, Homo sapiens
  misc_RNA (1)...(19): siRNA sense strand
ggauggcaaucuucaguga

SEQ ID NO: 1609281 - RNA, 19 nt, Homo sapiens
  misc_RNA (1)...(19): siRNA sense strand
gaaagaaucaguugcacau

SEQ ID NO: 1609282 - RNA, 19 nt, Homo sapiens
  misc_RNA (1)...(19): siRNA sense strand
uguaggaacuccagauuau

SEQ ID NO: 1609283 - RNA, 19 nt, Homo sapiens
  misc_RNA (1)...(19): siRNA sense strand
gggaaacgaagaaggguua

SEQ ID NO: 1609284 - RNA, 19 nt, Homo sapiens
  misc_RNA (1)...(19): siRNA sense strand
ccaggcagccgcaaucaua

SEQ ID NO: 1609285 - RNA, 19 nt, Homo sapiens
  misc_RNA (1)...(19): siRNA sense strand
gaauaggaacagcauauga

SEQ ID NO: 1609286 - RNA, 19 nt, Homo sapiens
  misc_RNA (1)...(19): siRNA sense strand
gaaaucgaacagcugauaa

SEQ ID NO: 1609287 - RNA, 19 nt, Homo sapiens
  misc_RNA (1)...(19): siRNA sense strand
uuaaagaucuagcagacaa

SEQ ID NO: 1609288 - RNA, 19 nt, Homo sapiens
  misc_RNA (1)...(19): siRNA sense strand
gagauaaccaaacuaaaga

SEQ ID NO: 1609289 - RNA, 19 nt, Homo sapiens
  misc_RNA (1)...(19): siRNA sense strand
uaacagcaagcaaagauuu

SEQ ID NO: 1609290 - RNA, 19 nt, Homo sapiens
  misc_RNA (1)...(19): siRNA sense strand
gaaaugcuuuacggagaaa

SEQ ID NO: 1609291 - RNA, 19 nt, Homo sapiens
  misc_RNA (1)...(19): siRNA sense strand
uaaagaauaucugcugugu

SEQ ID NO: 1609292 - RNA, 19 nt, Homo sapiens
  misc_RNA (1)...(19): siRNA sense strand
gaucuccaguaaagaauau

SEQ ID NO: 1609293 - RNA, 19 nt, Homo sapiens
  misc_RNA (1)...(19): siRNA sense strand
gcaagacccgucacagaaa

SEQ ID NO: 1609294 - RNA, 19 nt, Homo sapiens
  misc_RNA (1)...(19): siRNA sense strand
gcuggaaguucauacagaa

SEQ ID NO: 1609295 - RNA, 19 nt, Homo sapiens
  misc_RNA (1)...(19): siRNA sense strand
gauagcaauugacucaguu

SEQ ID NO: 1609296 - RNA, 19 nt, Homo sapiens
  misc_RNA (1)...(19): siRNA sense strand
gcauagaacaucagcaaga

SEQ ID NO: 1609297 - RNA, 19 nt, Homo sapiens
  misc_RNA (1)...(19): siRNA sense strand
gaaugugacugguggucuu

SEQ ID NO: 1609298 - RNA, 19 nt, Homo sapiens
  misc_RNA (1)...(19): siRNA sense strand
ggagguugcuguaguaaaa

SEQ ID NO: 1609299 - RNA, 19 nt, Homo sapiens
  misc_RNA (1)...(19): siRNA sense strand
gauauacucaucugccuuu

SEQ ID NO: 1609300 - RNA, 19 nt, Homo sapiens
  misc_RNA (1)...(19): siRNA sense strand
ggauucucaugccauauaa

SEQ ID NO: 1609301 - RNA, 19 nt, Homo sapiens
  misc_RNA (1)...(19): siRNA sense strand
aagaagagguuaaagaucu

SEQ ID NO: 1609302 - RNA, 19 nt, Homo sapiens
  misc_RNA (1)...(19): siRNA sense strand
gcaguuagaagaagagguu

SEQ ID NO: 1609303 - RNA, 19 nt, Homo sapiens
  misc_RNA (1)...(19): siRNA sense strand
gaaagaacugcaugauuca

SEQ ID NO: 1609304 - RNA, 19 nt, Homo sapiens
  misc_RNA (1)...(19): siRNA sense strand
cugaagauauggcuagauu

SEQ ID NO: 1609305 - RNA, 19 nt, Homo sapiens
  misc_RNA (1)...(19): siRNA sense strand
ggagacaauaaauggauua

SEQ ID NO: 1609306 - RNA, 19 nt, Homo sapiens
  misc_RNA (1)...(19): siRNA sense strand
gaaagggauguauuaguga

SEQ ID NO: 1609307 - RNA, 19 nt, Homo sapiens
  misc_RNA (1)...(19): siRNA sense strand
gcccaaaucacagaaauaa

SEQ ID NO: 1609308 - RNA, 19 nt, Homo sapiens
  misc_RNA (1)...(19): siRNA sense strand
guucgacccuuaaacaaug

SEQ ID NO: 1609309 - RNA, 19 nt, Homo sapiens
  misc_RNA (1)...(19): siRNA sense strand
acaguaugcuccauucaaa

SEQ ID NO: 1609310 - RNA, 19 nt, Homo sapiens
  misc_RNA (1)...(19): siRNA sense strand
gagcaagacccgucacaga

SEQ ID NO: 1609311 - RNA, 19 nt, Homo sapiens
  misc_RNA (1)...(19): siRNA sense strand
gguccucuguuaugaacua

SEQ ID NO: 1609312 - RNA, 19 nt, Homo sapiens
  misc_RNA (1)...(19): siRNA sense strand
agauugaacucauuccaaa

SEQ ID NO: 1609313 - RNA, 19 nt, Homo sapiens
  misc_RNA (1)...(19): siRNA sense strand
aaacgaagaaggguuauuu

SEQ ID NO: 1609314 - RNA, 19 nt, Homo sapiens
  misc_RNA (1)...(19): siRNA sense strand
gaagaaggguuauuuguug

SEQ ID NO: 1609315 - RNA, 19 nt, Homo sapiens
  misc_RNA (1)...(19): siRNA sense strand
ggaaacaaaugguuagaaa

SEQ ID NO: 1609316 - RNA, 19 nt, Homo sapiens
  misc_RNA (1)...(19): siRNA sense strand
gaagauagauugccugaag

SEQ ID NO: 1609317 - RNA, 19 nt, Homo sapiens
  misc_RNA (1)...(19): siRNA sense strand
gaauacagauccugaaaga

SEQ ID NO: 1609318 - RNA, 19 nt, Homo sapiens
  misc_RNA (1)...(19): siRNA sense strand
gauuauaucucuccugaaa

SEQ ID NO: 1609319 - RNA, 19 nt, Homo sapiens
  misc_RNA (1)...(19): siRNA sense strand
aagaauaucugcuguguuu

SEQ ID NO: 1609320 - RNA, 19 nt, Homo sapiens
  misc_RNA (1)...(19): siRNA sense strand
caacagauaugcccuggaa

SEQ ID NO: 1609321 - RNA, 19 nt, Homo sapiens
  misc_RNA (1)...(19): siRNA sense strand
gcgcaagacucaccaguuu

SEQ ID NO: 1609322 - RNA, 19 nt, Homo sapiens
  misc_RNA (1)...(19): siRNA sense strand
gaccauacacuaucauuua

SEQ ID NO: 1609323 - RNA, 19 nt, Homo sapiens
  misc_RNA (1)...(19): siRNA sense strand
caacagauacaucgaauuu

SEQ ID NO: 1609324 - RNA, 19 nt, Homo sapiens
  misc_RNA (1)...(19): siRNA sense strand
ugaaagaucugcccaugaa

SEQ ID NO: 1609325 - RNA, 19 nt, Homo sapiens
  misc_RNA (1)...(19): siRNA sense strand
gaucggagcuguuuaagag

SEQ ID NO: 1609326 - RNA, 19 nt, Homo sapiens
  misc_RNA (1)...(19): siRNA sense strand
ggaauugauugggauaaua

SEQ ID NO: 1609327 - RNA, 19 nt, Homo sapiens
  misc_RNA (1)...(19): siRNA sense strand
caugagggaugaagaauuu

SEQ ID NO: 1609328 - RNA, 19 nt, Homo sapiens
  misc_RNA (1)...(19): siRNA sense strand
agaaagaacugcaugauuc

SEQ ID NO: 1609329 - RNA, 19 nt, Homo sapiens
  misc_RNA (1)...(19): siRNA sense strand
gaaauucaagucccauaua

SEQ ID NO: 1609330 - RNA, 19 nt, Homo sapiens
  misc_RNA (1)...(19): siRNA sense strand
gaagagaaagucaaaguga

SEQ ID NO: 1609331 - RNA, 19 nt, Homo sapiens
  misc_RNA (1)...(19): siRNA sense strand
gauaauagucggaaacaaa

SEQ ID NO: 1609332 - RNA, 19 nt, Homo sapiens
  misc_RNA (1)...(19): siRNA sense strand
aaaggcagguccucuguua

SEQ ID NO: 1609333 - RNA, 19 nt, Homo sapiens
  misc_RNA (1)...(19): siRNA sense strand
uaaccaaacuaaagacuga

SEQ ID NO: 1609334 - RNA, 19 nt, Homo sapiens
  misc_RNA (1)...(19): siRNA sense strand
gaugguggguuuaauaaga

SEQ ID NO: 1609335 - RNA, 19 nt, Homo sapiens
  misc_RNA (1)...(19): siRNA sense strand
gaacaucgacuuggucaaa

SEQ ID NO: 1609336 - RNA, 19 nt, Homo sapiens
  misc_RNA (1)...(19): siRNA sense strand
guuaguagcccaacagaua

SEQ ID NO: 1609337 - RNA, 19 nt, Homo sapiens
  misc_RNA (1)...(19): siRNA sense strand
ggguauagauccucagaaa

SEQ ID NO: 1609338 - RNA, 19 nt, Homo sapiens
  misc_RNA (1)...(19): siRNA sense strand
gcaaauccuuccucuuguu

SEQ ID NO: 1609339 - RNA, 19 nt, Homo sapiens
  misc_RNA (1)...(19): siRNA sense strand
ugaagaaagggauguauua

SEQ ID NO: 1609340 - RNA, 19 nt, Homo sapiens
  misc_RNA (1)...(19): siRNA sense strand
gaacuuaaguauacacaac

SEQ ID NO: 1609341 - RNA, 19 nt, Homo sapiens
  misc_RNA (1)...(19): siRNA sense strand
gacaauauacugauggaua

SEQ ID NO: 1609342 - RNA, 19 nt, Homo sapiens
  misc_RNA (1)...(19): siRNA sense strand
gaaggaaauccauacagua

SEQ ID NO: 1609343 - RNA, 19 nt, Homo sapiens
  misc_RNA (1)...(19): siRNA sense strand
caaaugcgauuacauagag

SEQ ID NO: 1609344 - RNA, 19 nt, Homo sapiens
  misc_RNA (1)...(19): siRNA sense strand
caagaagaguugaauaaag

SEQ ID NO: 1609345 - RNA, 19 nt, Homo sapiens
  misc_RNA (1)...(19): siRNA sense strand
caagagauaaccaaacuaa

SEQ ID NO: 1609346 - RNA, 19 nt, Homo sapiens
  misc_RNA (1)...(19): siRNA sense strand
aaagagagguuucaguuuc

SEQ ID NO: 1609347 - RNA, 19 nt, Homo sapiens
  misc_RNA (1)...(19): siRNA sense strand
gcacuaugcuuuccaggau

SEQ ID NO: 1609348 - RNA, 19 nt, Homo sapiens
  misc_RNA (1)...(19): siRNA sense strand
gauaaaguguuugccauga

SEQ ID NO: 1609349 - RNA, 19 nt, Homo sapiens
  misc_RNA (1)...(19): siRNA sense strand
gaaagugaguucaaacaac

SEQ ID NO: 1609350 - RNA, 19 nt, Homo sapiens
  misc_RNA (1)...(19): siRNA sense strand
gcuacgagauccagaaaug

SEQ ID NO: 1609351 - RNA, 19 nt, Homo sapiens
  misc_RNA (1)...(19): siRNA sense strand
gaacuacucucagaaaucg

SEQ ID NO: 1609352 - RNA, 19 nt, Homo sapiens
  misc_RNA (1)...(19): siRNA sense strand
gaugugaacuccauggaau

SEQ ID NO: 1609353 - RNA, 19 nt, Homo sapiens
  misc_RNA (1)...(19): siRNA sense strand
agaaagggauguauuagug

SEQ ID NO: 1609354 - RNA, 19 nt, Homo sapiens
  misc_RNA (1)...(19): siRNA sense strand
guugauaucuuugauguga

SEQ ID NO: 1609355 - RNA, 19 nt, Homo sapiens
  misc_RNA (1)...(19): siRNA sense strand
gcagagagcacuggcuaua

SEQ ID NO: 1609356 - RNA, 19 nt, Homo sapiens
  misc_RNA (1)...(19): siRNA sense strand
gagaaggaauacaugcaaa

SEQ ID NO: 1609357 - RNA, 19 nt, Homo sapiens
  misc_RNA (1)...(19): siRNA sense strand
guggagacauuacuggaua

SEQ ID NO: 1609358 - RNA, 19 nt, Homo sapiens
  misc_RNA (1)...(19): siRNA sense strand
guaacagaaucaagucauu

SEQ ID NO: 1609359 - RNA, 19 nt, Homo sapiens
  misc_RNA (1)...(19): siRNA sense strand
gaauugauguggccagcaa

SEQ ID NO: 1609360 - RNA, 19 nt, Homo sapiens
  misc_RNA (1)...(19): siRNA sense strand
gaaacuaaagggugucaaa

SEQ ID NO: 1609361 - RNA, 19 nt, Homo sapiens
  misc_RNA (1)...(19): siRNA sense strand
ccauauaacuuguguaaac

SEQ ID NO: 1609362 - RNA, 19 nt, Homo sapiens
  misc_RNA (1)...(19): siRNA sense strand
gggaggaauuugaaaguga

SEQ ID NO: 1609363 - RNA, 19 nt, Homo sapiens
  misc_RNA (1)...(19): siRNA sense strand
uuagacaaaucaaggcuua

SEQ ID NO: 1609364 - RNA, 19 nt, Homo sapiens
  misc_RNA (1)...(19): siRNA sense strand
uaaaguguuugccaugaaa

SEQ ID NO: 1609365 - RNA, 19 nt, Homo sapiens
  misc_RNA (1)...(19): siRNA sense strand
caguugagaucuccaguaa

SEQ ID NO: 1609366 - RNA, 19 nt, Homo sapiens
  misc_RNA (1)...(19): siRNA sense strand
gaacaucagcaagagauaa

SEQ ID NO: 1609367 - RNA, 19 nt, Homo sapiens
  misc_RNA (1)...(19): siRNA sense strand
gauauggaccugaauguga

SEQ ID NO: 1609368 - RNA, 19 nt, Homo sapiens
  misc_RNA (1)...(19): siRNA sense strand
gcaauugacucaguucauc

SEQ ID NO: 1609369 - RNA, 19 nt, Homo sapiens
  misc_RNA (1)...(19): siRNA sense strand
cagcaaauuugaagauaga

SEQ ID NO: 1609370 - RNA, 19 nt, Homo sapiens
  misc_RNA (1)...(19): siRNA sense strand
ucgaacagcugauaaagga

SEQ ID NO: 1609371 - RNA, 19 nt, Homo sapiens
  misc_RNA (1)...(19): siRNA sense strand
cagcaaauccuuccucuug

SEQ ID NO: 1609372 - RNA, 19 nt, Homo sapiens
  misc_RNA (1)...(19): siRNA sense strand
gcauugggauauacacuga

SEQ ID NO: 1609373 - RNA, 19 nt, Homo sapiens
  misc_RNA (1)...(19): siRNA sense strand
caacuggcuuuccaccuaa

SEQ ID NO: 1609374 - RNA, 19 nt, Homo sapiens
  misc_RNA (1)...(19): siRNA sense strand
ucaacuggcuuuccaccua

SEQ ID NO: 1609375 - RNA, 19 nt, Homo sapiens
  misc_RNA (1)...(19): siRNA sense strand
gaagaagaacuuggaacua

SEQ ID NO: 1609376 - RNA, 19 nt, Homo sapiens
  misc_RNA (1)...(19): siRNA sense strand
guugagaucuccaguaaag

SEQ ID NO: 1609377 - RNA, 19 nt, Homo sapiens
  misc_RNA (1)...(19): siRNA sense strand
cugaagagcuuagaucuga

SEQ ID NO: 1609378 - RNA, 19 nt, Homo sapiens
  misc_RNA (1)...(19): siRNA sense strand
gaacuuggaacuacucuca

SEQ ID NO: 1609379 - RNA, 19 nt, Homo sapiens
  misc_RNA (1)...(19): siRNA sense strand
gaagcuacgugaacagagu

SEQ ID NO: 1609380 - RNA, 19 nt, Homo sapiens
  misc_RNA (1)...(19): siRNA sense strand
ggauggcaaucuucaguga

SEQ ID NO: 1609381 - RNA, 19 nt, Homo sapiens
  misc_RNA (1)...(19): siRNA sense strand
gaaagaaucaguugcacau

SEQ ID NO: 1609382 - RNA, 19 nt, Homo sapiens
  misc_RNA (1)...(19): siRNA sense strand
uguaggaacuccagauuau

SEQ ID NO: 1609383 - RNA, 19 nt, Homo sapiens
  misc_RNA (1)...(19): siRNA sense strand
gggaaacgaagaaggguua

SEQ ID NO: 1609384 - RNA, 19 nt, Homo sapiens
  misc_RNA (1)...(19): siRNA sense strand
ccaggcagccgcaaucaua

SEQ ID NO: 1609385 - RNA, 19 nt, Homo sapiens
  misc_RNA (1)...(19): siRNA sense strand
gaauaggaacagcauauga

SEQ ID NO: 1609386 - RNA, 19 nt, Homo sapiens
  misc_RNA (1)...(19): siRNA sense strand
gaaaucgaacagcugauaa

SEQ ID NO: 1609387 - RNA, 19 nt, Homo sapiens
  misc_RNA (1)...(19): siRNA sense strand
uuaaagaucuagcagacaa

SEQ ID NO: 1609388 - RNA, 19 nt, Homo sapiens
  misc_RNA (1)...(19): siRNA sense strand
gagauaaccaaacuaaaga

SEQ ID NO: 1609389 - RNA, 19 nt, Homo sapiens
  misc_RNA (1)...(19): siRNA sense strand
uaacagcaagcaaagauuu

SEQ ID NO: 1609390 - RNA, 19 nt, Homo sapiens
  misc_RNA (1)...(19): siRNA sense strand
gaaaugcuuuacggagaaa

SEQ ID NO: 1609391 - RNA, 19 nt, Homo sapiens
  misc_RNA (1)...(19): siRNA sense strand
uaaagaauaucugcugugu

SEQ ID NO: 1609392 - RNA, 19 nt, Homo sapiens
  misc_RNA (1)...(19): siRNA sense strand
gaucuccaguaaagaauau

SEQ ID NO: 1609393 - RNA, 19 nt, Homo sapiens
  misc_RNA (1)...(19): siRNA sense strand
gcaagacccgucacagaaa

SEQ ID NO: 1609394 - RNA, 19 nt, Homo sapiens
  misc_RNA (1)...(19): siRNA sense strand
gcuggaaguucauacagaa

SEQ ID NO: 1609395 - RNA, 19 nt, Homo sapiens
  misc_RNA (1)...(19): siRNA sense strand
gauagcaauugacucaguu

SEQ ID NO: 1609396 - RNA, 19 nt, Homo sapiens
  misc_RNA (1)...(19): siRNA sense strand
gcauagaacaucagcaaga

SEQ ID NO: 1609397 - RNA, 19 nt, Homo sapiens
  misc_RNA (1)...(19): siRNA sense strand
gaaugugacugguggucuu

SEQ ID NO: 1609398 - RNA, 19 nt, Homo sapiens
  misc_RNA (1)...(19): siRNA sense strand
ggagguugcuguaguaaaa

SEQ ID NO: 1609399 - RNA, 19 nt, Homo sapiens
  misc_RNA (1)...(19): siRNA sense strand
gauauacucaucugccuuu

SEQ ID NO: 1609400 - RNA, 19 nt, Homo sapiens
  misc_RNA (1)...(19): siRNA sense strand
ggauucucaugccauauaa

SEQ ID NO: 1609401 - RNA, 19 nt, Homo sapiens
  misc_RNA (1)...(19): siRNA sense strand
aagaagagguuaaagaucu

SEQ ID NO: 1609402 - RNA, 19 nt, Homo sapiens
  misc_RNA (1)...(19): siRNA sense strand
gcaguuagaagaagagguu

SEQ ID NO: 1609403 - RNA, 19 nt, Homo sapiens
  misc_RNA (1)...(19): siRNA sense strand
gaaagaacugcaugauuca

SEQ ID NO: 1609404 - RNA, 19 nt, Homo sapiens
  misc_RNA (1)...(19): siRNA sense strand
cugaagauauggcuagauu

SEQ ID NO: 1609405 - RNA, 19 nt, Homo sapiens
  misc_RNA (1)...(19): siRNA sense strand
ggagacaauaaauggauua

SEQ ID NO: 1609406 - RNA, 19 nt, Homo sapiens
  misc_RNA (1)...(19): siRNA sense strand
gaaagggauguauuaguga

SEQ ID NO: 1609407 - RNA, 19 nt, Homo sapiens
  misc_RNA (1)...(19): siRNA sense strand
gcccaaaucacagaaauaa

SEQ ID NO: 1609408 - RNA, 19 nt, Homo sapiens
  misc_RNA (1)...(19): siRNA sense strand
guucgacccuuaaacaaug

SEQ ID NO: 1609409 - RNA, 19 nt, Homo sapiens
  misc_RNA (1)...(19): siRNA sense strand
acaguaugcuccauucaaa

SEQ ID NO: 1609410 - RNA, 19 nt, Homo sapiens
  misc_RNA (1)...(19): siRNA sense strand
gagcaagacccgucacaga

SEQ ID NO: 1609411 - RNA, 19 nt, Homo sapiens
  misc_RNA (1)...(19): siRNA sense strand
gguccucuguuaugaacua

SEQ ID NO: 1609412 - RNA, 19 nt, Homo sapiens
  misc_RNA (1)...(19): siRNA sense strand
agauugaacucauuccaaa

SEQ ID NO: 1609413 - RNA, 19 nt, Homo sapiens
  misc_RNA (1)...(19): siRNA sense strand
aaacgaagaaggguuauuu

SEQ ID NO: 1609414 - RNA, 19 nt, Homo sapiens
  misc_RNA (1)...(19): siRNA sense strand
gaacauaagccauauaucu

SEQ ID NO: 1609415 - RNA, 19 nt, Homo sapiens
  misc_RNA (1)...(19): siRNA sense strand
gaagagaaauaggauaaga

SEQ ID NO: 1609416 - RNA, 19 nt, Homo sapiens
  misc_RNA (1)...(19): siRNA sense strand
gggccaagcuguugaacua

SEQ ID NO: 1609417 - RNA, 19 nt, Homo sapiens
  misc_RNA (1)...(19): siRNA sense strand
cagaaagacucaugauauu

SEQ ID NO: 1609418 - RNA, 19 nt, Homo sapiens
  misc_RNA (1)...(19): siRNA sense strand
cagcagcucuacaaauaua

SEQ ID NO: 1609419 - RNA, 19 nt, Homo sapiens
  misc_RNA (1)...(19): siRNA sense strand
ggaaacggauggcacagaa

SEQ ID NO: 1609420 - RNA, 19 nt, Homo sapiens
  misc_RNA (1)...(19): siRNA sense strand
gaaauaggauaagaaguuc

SEQ ID NO: 1609421 - RNA, 19 nt, Homo sapiens
  misc_RNA (1)...(19): siRNA sense strand
ggaagaacaagcuuacuuu

SEQ ID NO: 1609422 - RNA, 19 nt, Homo sapiens
  misc_RNA (1)...(19): siRNA sense strand
gggaguagaugcugcuauu

SEQ ID NO: 1609423 - RNA, 19 nt, Homo sapiens
  misc_RNA (1)...(19): siRNA sense strand
gaguagaugcugcuauuua

SEQ ID NO: 1609424 - RNA, 19 nt, Homo sapiens
  misc_RNA (1)...(19): siRNA sense strand
gcccgaaccugaacuggua

SEQ ID NO: 1609425 - RNA, 19 nt, Homo sapiens
  misc_RNA (1)...(19): siRNA sense strand
gaugcugggucaagugaua

SEQ ID NO: 1609426 - RNA, 19 nt, Homo sapiens
  misc_RNA (1)...(19): siRNA sense strand
uggcacagauucagguuua

SEQ ID NO: 1609427 - RNA, 19 nt, Homo sapiens
  misc_RNA (1)...(19): siRNA sense strand
ggaagugggaagagaaaua

SEQ ID NO: 1609428 - RNA, 19 nt, Homo sapiens
  misc_RNA (1)...(19): siRNA sense strand
ugcagcagcucuacaaaua

SEQ ID NO: 1609429 - RNA, 19 nt, Homo sapiens
  misc_RNA (1)...(19): siRNA sense strand
ucaagagccuucccacaaa

SEQ ID NO: 1609430 - RNA, 19 nt, Homo sapiens
  misc_RNA (1)...(19): siRNA sense strand
gagcuugucuccugucugu

SEQ ID NO: 1609431 - RNA, 19 nt, Homo sapiens
  misc_RNA (1)...(19): siRNA sense strand
gaucuuccuuggagcuaua

SEQ ID NO: 1609432 - RNA, 19 nt, Homo sapiens
  misc_RNA (1)...(19): siRNA sense strand
gagcagauauacagaaugc

SEQ ID NO: 1609433 - RNA, 19 nt, Homo sapiens
  misc_RNA (1)...(19): siRNA sense strand
gggaagagaaauaggauaa

SEQ ID NO: 1609434 - RNA, 19 nt, Homo sapiens
  misc_RNA (1)...(19): siRNA sense strand
gaguggugcuggagaguuu

SEQ ID NO: 1609435 - RNA, 19 nt, Homo sapiens
  misc_RNA (1)...(19): siRNA sense strand
ucagaaagacucaugauau

SEQ ID NO: 1609436 - RNA, 19 nt, Homo sapiens
  misc_RNA (1)...(19): siRNA sense strand
caugguugcccacaaauua

SEQ ID NO: 1609437 - RNA, 19 nt, Homo sapiens
  misc_RNA (1)...(19): siRNA sense strand
ucaaagaaguggcacagau

SEQ ID NO: 1609438 - RNA, 19 nt, Homo sapiens
  misc_RNA (1)...(19): siRNA sense strand
gaagaacaagcuuacuuug

SEQ ID NO: 1609439 - RNA, 19 nt, Homo sapiens
  misc_RNA (1)...(19): siRNA sense strand
cagcaugguugcccacaaa

SEQ ID NO: 1609440 - RNA, 19 nt, Homo sapiens
  misc_RNA (1)...(19): siRNA sense strand
gaccgaagacuaccucauu

SEQ ID NO: 1609441 - RNA, 19 nt, Homo sapiens
  misc_RNA (1)...(19): siRNA sense strand
gcacuagccuguccucacu

SEQ ID NO: 1609442 - RNA, 19 nt, Homo sapiens
  misc_RNA (1)...(19): siRNA sense strand
ggacaugaacaaagcugua

SEQ ID NO: 1609443 - RNA, 19 nt, Homo sapiens
  misc_RNA (1)...(19): siRNA sense strand
ccauucaccuccacguuaa

SEQ ID NO: 1609444 - RNA, 19 nt, Homo sapiens
  misc_RNA (1)...(19): siRNA sense strand
caaagaaguggcacagauu

SEQ ID NO: 1609445 - RNA, 19 nt, Homo sapiens
  misc_RNA (1)...(19): siRNA sense strand
agaacaagcuuacuuugca

SEQ ID NO: 1609446 - RNA, 19 nt, Homo sapiens
  misc_RNA (1)...(19): siRNA sense strand
gauauuccaugcccagauc

SEQ ID NO: 1609447 - RNA, 19 nt, Homo sapiens
  misc_RNA (1)...(19): siRNA sense strand
cacauuauaucccaaagga

SEQ ID NO: 1609448 - RNA, 19 nt, Homo sapiens
  misc_RNA (1)...(19): siRNA sense strand
guggauucauucacugaua

SEQ ID NO: 1609449 - RNA, 19 nt, Homo sapiens
  misc_RNA (1)...(19): siRNA sense strand
gcagcugggugaaagacuu

SEQ ID NO: 1609450 - RNA, 19 nt, Homo sapiens
  misc_RNA (1)...(19): siRNA sense strand
acaaauagaagcaagcaaa

SEQ ID NO: 1609451 - RNA, 19 nt, Homo sapiens
  misc_RNA (1)...(19): siRNA sense strand
ggaagacccaggcuaccua

SEQ ID NO: 1609452 - RNA, 19 nt, Homo sapiens
  misc_RNA (1)...(19): siRNA sense strand
cuaccuagaucucacacaa

SEQ ID NO: 1609453 - RNA, 19 nt, Homo sapiens
  misc_RNA (1)...(19): siRNA sense strand
gggagcagauauacagaau

SEQ ID NO: 1609454 - RNA, 19 nt, Homo sapiens
  misc_RNA (1)...(19): siRNA sense strand
gaaagggccaagcuguuga

SEQ ID NO: 1609455 - RNA, 19 nt, Homo sapiens
  misc_RNA (1)...(19): siRNA sense strand
gagaaagggccaagcuguu

SEQ ID NO: 1609456 - RNA, 19 nt, Homo sapiens
  misc_RNA (1)...(19): siRNA sense strand
cauuauaucccaaaggaaa

SEQ ID NO: 1609457 - RNA, 19 nt, Homo sapiens
  misc_RNA (1)...(19): siRNA sense strand
uggaaaggguacagugaaa

SEQ ID NO: 1609458 - RNA, 19 nt, Homo sapiens
  misc_RNA (1)...(19): siRNA sense strand
cagguuuaauccaaaguuu

SEQ ID NO: 1609459 - RNA, 19 nt, Homo sapiens
  misc_RNA (1)...(19): siRNA sense strand
gagaguuucccacugcuuu

SEQ ID NO: 1609460 - RNA, 19 nt, Homo sapiens
  misc_RNA (1)...(19): siRNA sense strand
caucacgguuauuguggua

SEQ ID NO: 1609461 - RNA, 19 nt, Homo sapiens
  misc_RNA (1)...(19): siRNA sense strand
caucagaggcaacaugcua

SEQ ID NO: 1609462 - RNA, 19 nt, Homo sapiens
  misc_RNA (1)...(19): siRNA sense strand
agggagagcuuaagaugug

SEQ ID NO: 1609463 - RNA, 19 nt, Homo sapiens
  misc_RNA (1)...(19): siRNA sense strand
gaccccagcuuuauuauga

SEQ ID NO: 1609464 - RNA, 19 nt, Homo sapiens
  misc_RNA (1)...(19): siRNA sense strand
ucaccuccacguuaacuua

SEQ ID NO: 1609465 - RNA, 19 nt, Homo sapiens
  misc_RNA (1)...(19): siRNA sense strand
agaagggacuguggagauu

SEQ ID NO: 1609466 - RNA, 19 nt, Homo sapiens
  misc_RNA (1)...(19): siRNA sense strand
ugugauggcuucuaugaca

SEQ ID NO: 1609467 - RNA, 19 nt, Homo sapiens
  misc_RNA (1)...(19): siRNA sense strand
gaacuaaugaagccacaca

SEQ ID NO: 1609468 - RNA, 19 nt, Homo sapiens
  misc_RNA (1)...(19): siRNA sense strand
gaagcaagcaaaccucaca

SEQ ID NO: 1609469 - RNA, 19 nt, Homo sapiens
  misc_RNA (1)...(19): siRNA sense strand
gcuaccaguugagauguuu

SEQ ID NO: 1609470 - RNA, 19 nt, Homo sapiens
  misc_RNA (1)...(19): siRNA sense strand
ggagaccccagcuuuauua

SEQ ID NO: 1609471 - RNA, 19 nt, Homo sapiens
  misc_RNA (1)...(19): siRNA sense strand
gaagugggaagagaaauag

SEQ ID NO: 1609472 - RNA, 19 nt, Homo sapiens
  misc_RNA (1)...(19): siRNA sense strand
aguagaugcugcuauuuau

SEQ ID NO: 1609473 - RNA, 19 nt, Homo sapiens
  misc_RNA (1)...(19): siRNA sense strand
caaccuagaggaccaggaa

SEQ ID NO: 1609474 - RNA, 19 nt, Homo sapiens
  misc_RNA (1)...(19): siRNA sense strand
gccaagcuguugaacuaau

SEQ ID NO: 1609475 - RNA, 19 nt, Homo sapiens
  misc_RNA (1)...(19): siRNA sense strand
ccaagcuguugaacuaaug

SEQ ID NO: 1609476 - RNA, 19 nt, Homo sapiens
  misc_RNA (1)...(19): siRNA sense strand
ucacgguuauugugguauu

SEQ ID NO: 1609477 - RNA, 19 nt, Homo sapiens
  misc_RNA (1)...(19): siRNA sense strand
gaaagacucaugauauucc

SEQ ID NO: 1609478 - RNA, 19 nt, Homo sapiens
  misc_RNA (1)...(19): siRNA sense strand
ugaacaaagcuguaaaugu

SEQ ID NO: 1609479 - RNA, 19 nt, Homo sapiens
  misc_RNA (1)...(19): siRNA sense strand
ggagauugagacagugaaa

SEQ ID NO: 1609480 - RNA, 19 nt, Homo sapiens
  misc_RNA (1)...(19): siRNA sense strand
gaugaggcagugaaaguug

SEQ ID NO: 1609481 - RNA, 19 nt, Homo sapiens
  misc_RNA (1)...(19): siRNA sense strand
gauucugccuccacuguuc

SEQ ID NO: 1609482 - RNA, 19 nt, Homo sapiens
  misc_RNA (1)...(19): siRNA sense strand
gagguugcguagucugguu

SEQ ID NO: 1609483 - RNA, 19 nt, Homo sapiens
  misc_RNA (1)...(19): siRNA sense strand
acaaagcuguaaauguuag

SEQ ID NO: 1609484 - RNA, 19 nt, Homo sapiens
  misc_RNA (1)...(19): siRNA sense strand
gacaugaacaaagcuguaa

SEQ ID NO: 1609485 - RNA, 19 nt, Homo sapiens
  misc_RNA (1)...(19): siRNA sense strand
ggccugugauggcuucuau

SEQ ID NO: 1609486 - RNA, 19 nt, Homo sapiens
  misc_RNA (1)...(19): siRNA sense strand
caacaggggagcagauaua

SEQ ID NO: 1609487 - RNA, 19 nt, Homo sapiens
  misc_RNA (1)...(19): siRNA sense strand
acuagccuguccucacuua

SEQ ID NO: 1609488 - RNA, 19 nt, Homo sapiens
  misc_RNA (1)...(19): siRNA sense strand
ugucugcauuccugacuuu

SEQ ID NO: 1609489 - RNA, 19 nt, Homo sapiens
  misc_RNA (1)...(19): siRNA sense strand
gcacagauucagguuuaau

SEQ ID NO: 1609490 - RNA, 19 nt, Homo sapiens
  misc_RNA (1)...(19): siRNA sense strand
gaucuuucugcacauuaua

SEQ ID NO: 1609491 - RNA, 19 nt, Homo sapiens
  misc_RNA (1)...(19): siRNA sense strand
gacccaggcuaccuagauc

SEQ ID NO: 1609492 - RNA, 19 nt, Homo sapiens
  misc_RNA (1)...(19): siRNA sense strand
gcagcaugguugcccacaa

SEQ ID NO: 1609493 - RNA, 19 nt, Homo sapiens
  misc_RNA (1)...(19): siRNA sense strand
ggucacugaugagcgguuu

SEQ ID NO: 1609494 - RNA, 19 nt, Homo sapiens
  misc_RNA (1)...(19): siRNA sense strand
gcaggaaaauggaggacaa

SEQ ID NO: 1609495 - RNA, 19 nt, Homo sapiens
  misc_RNA (1)...(19): siRNA sense strand
gcagcagcucuacaaauau

SEQ ID NO: 1609496 - RNA, 19 nt, Homo sapiens
  misc_RNA (1)...(19): siRNA sense strand
guucaggguuggaaaauga

SEQ ID NO: 1609497 - RNA, 19 nt, Homo sapiens
  misc_RNA (1)...(19): siRNA sense strand
cuagaucucacacaaauag

SEQ ID NO: 1609498 - RNA, 19 nt, Homo sapiens
  misc_RNA (1)...(19): siRNA sense strand
aaaucaacgugcuggaaga

SEQ ID NO: 1609499 - RNA, 19 nt, Homo sapiens
  misc_RNA (1)...(19): siRNA sense strand
ucaaggagggcaagaagau

SEQ ID NO: 1609500 - RNA, 19 nt, Homo sapiens
  misc_RNA (1)...(19): siRNA sense strand
ccgaccaccugaaagagaa

SEQ ID NO: 1609501 - RNA, 19 nt, Homo sapiens
  misc_RNA (1)...(19): siRNA sense strand
ccagggagagcuuaagaug

SEQ ID NO: 1609502 - RNA, 19 nt, Homo sapiens
  misc_RNA (1)...(19): siRNA sense strand
cagcaaacuacacgagauu

SEQ ID NO: 1609503 - RNA, 19 nt, Homo sapiens
  misc_RNA (1)...(19): siRNA sense strand
ucccacugcuuucaauuug

SEQ ID NO: 1609504 - RNA, 19 nt, Homo sapiens
  misc_RNA (1)...(19): siRNA sense strand
cugcaucccugaggagaaa

SEQ ID NO: 1609505 - RNA, 19 nt, Homo sapiens
  misc_RNA (1)...(19): siRNA sense strand
agauugagacagugaaauu

SEQ ID NO: 1609506 - RNA, 19 nt, Homo sapiens
  misc_RNA (1)...(19): siRNA sense strand
gcaggagaccccagcuuua

SEQ ID NO: 1609507 - RNA, 19 nt, Homo sapiens
  misc_RNA (1)...(19): siRNA sense strand
ucagcaaacuacacgagau

SEQ ID NO: 1609508 - RNA, 19 nt, Homo sapiens
  misc_RNA (1)...(19): siRNA sense strand
gaagggacuguggagauug

SEQ ID NO: 1609509 - RNA, 19 nt, Homo sapiens
  misc_RNA (1)...(19): siRNA sense strand
uauuggagaugcugaacau

SEQ ID NO: 1609510 - RNA, 19 nt, Homo sapiens
  misc_RNA (1)...(19): siRNA sense strand
ggaguagaugcugcuauuu

SEQ ID NO: 1609511 - RNA, 19 nt, Homo sapiens
  misc_RNA (1)...(19): siRNA sense strand
cugcauuccugacuuuaau

SEQ ID NO: 1609512 - RNA, 19 nt, Homo sapiens
  misc_RNA (1)...(19): siRNA sense strand
gcaugguugcccacaaauu

SEQ ID NO: 1609513 - RNA, 19 nt, Homo sapiens
  misc_RNA (1)...(19): siRNA sense strand
ugagggacaugaacaaagc

SEQ ID NO: 1609514 - RNA, 19 nt, Homo sapiens
  misc_RNA (1)...(19): siRNA sense strand
gaaaggagauggaggauug

SEQ ID NO: 1609515 - RNA, 19 nt, Homo sapiens
  misc_RNA (1)...(19): siRNA sense strand
ggaaaugccuuugguguaa

SEQ ID NO: 1609516 - RNA, 19 nt, Homo sapiens
  misc_RNA (1)...(19): siRNA sense strand
ggaagaagaugcuguggaa

SEQ ID NO: 1609517 - RNA, 19 nt, Homo sapiens
  misc_RNA (1)...(19): siRNA sense strand
ggaaggacauuauagaaga

SEQ ID NO: 1609518 - RNA, 19 nt, Homo sapiens
  misc_RNA (1)...(19): siRNA sense strand
ugaaggcgcuguauaauga

SEQ ID NO: 1609519 - RNA, 19 nt, Homo sapiens
  misc_RNA (1)...(19): siRNA sense strand
gaucaucacuccauucaga

SEQ ID NO: 1609520 - RNA, 19 nt, Homo sapiens
  misc_RNA (1)...(19): siRNA sense strand
ggacagcuauugaagcaaa

SEQ ID NO: 1609521 - RNA, 19 nt, Homo sapiens
  misc_RNA (1)...(19): siRNA sense strand
agaagcaucugaagaauuu

SEQ ID NO: 1609522 - RNA, 19 nt, Homo sapiens
  misc_RNA (1)...(19): siRNA sense strand
gcagugagagcaacaaaua

SEQ ID NO: 1609523 - RNA, 19 nt, Homo sapiens
  misc_RNA (1)...(19): siRNA sense strand
ggaguucgauuaucaacaa

SEQ ID NO: 1609524 - RNA, 19 nt, Homo sapiens
  misc_RNA (1)...(19): siRNA sense strand
gaaagugggucaugugaag

SEQ ID NO: 1609525 - RNA, 19 nt, Homo sapiens
  misc_RNA (1)...(19): siRNA sense strand
gaacucaaauugccaccaa

SEQ ID NO: 1609526 - RNA, 19 nt, Homo sapiens
  misc_RNA (1)...(19): siRNA sense strand
gaaauagccaucaauguga

SEQ ID NO: 1609527 - RNA, 19 nt, Homo sapiens
  misc_RNA (1)...(19): siRNA sense strand
ggaggaagcuaaagaugau

SEQ ID NO: 1609528 - RNA, 19 nt, Homo sapiens
  misc_RNA (1)...(19): siRNA sense strand
caacagaagcaccguauuu

SEQ ID NO: 1609529 - RNA, 19 nt, Homo sapiens
  misc_RNA (1)...(19): siRNA sense strand
guagauggauauucagaaa

SEQ ID NO: 1609530 - RNA, 19 nt, Homo sapiens
  misc_RNA (1)...(19): siRNA sense strand
ggaguauaaugacauauga

SEQ ID NO: 1609531 - RNA, 19 nt, Homo sapiens
  misc_RNA (1)...(19): siRNA sense strand
gaagugugauucugguaaa

SEQ ID NO: 1609532 - RNA, 19 nt, Homo sapiens
  misc_RNA (1)...(19): siRNA sense strand
gaacuaaagaggaugauau

SEQ ID NO: 1609533 - RNA, 19 nt, Homo sapiens
  misc_RNA (1)...(19): siRNA sense strand
cagaggagcucauuacuag

SEQ ID NO: 1609534 - RNA, 19 nt, Homo sapiens
  misc_RNA (1)...(19): siRNA sense strand
uuacagagaucguacaaga

SEQ ID NO: 1609535 - RNA, 19 nt, Homo sapiens
  misc_RNA (1)...(19): siRNA sense strand
gaauagugccaaaguuuaa

SEQ ID NO: 1609536 - RNA, 19 nt, Homo sapiens
  misc_RNA (1)...(19): siRNA sense strand
guacauccaucacgccauu

SEQ ID NO: 1609537 - RNA, 19 nt, Homo sapiens
  misc_RNA (1)...(19): siRNA sense strand
agaauaaucugcccagguu

SEQ ID NO: 1609538 - RNA, 19 nt, Homo sapiens
  misc_RNA (1)...(19): siRNA sense strand
gcaaaccaguucuuuccaa

SEQ ID NO: 1609539 - RNA, 19 nt, Homo sapiens
  misc_RNA (1)...(19): siRNA sense strand
gcucagguguuugauuuaa

SEQ ID NO: 1609540 - RNA, 19 nt, Homo sapiens
  misc_RNA (1)...(19): siRNA sense strand
gaacaauuacuuugggauu

SEQ ID NO: 1609541 - RNA, 19 nt, Homo sapiens
  misc_RNA (1)...(19): siRNA sense strand
gagcaacaaauaacuguaa

SEQ ID NO: 1609542 - RNA, 19 nt, Homo sapiens
  misc_RNA (1)...(19): siRNA sense strand
gcacuaaacagcaccgauu

SEQ ID NO: 1609543 - RNA, 19 nt, Homo sapiens
  misc_RNA (1)...(19): siRNA sense strand
gaaguugaccucucagaug

SEQ ID NO: 1609544 - RNA, 19 nt, Homo sapiens
  misc_RNA (1)...(19): siRNA sense strand
gagauuccuuggcuuuauu

SEQ ID NO: 1609545 - RNA, 19 nt, Homo sapiens
  misc_RNA (1)...(19): siRNA sense strand
gcgaguauccaaugccuua

SEQ ID NO: 1609546 - RNA, 19 nt, Homo sapiens
  misc_RNA (1)...(19): siRNA sense strand
ggaccaagaccaguauuaa

SEQ ID NO: 1609547 - RNA, 19 nt, Homo sapiens
  misc_RNA (1)...(19): siRNA sense strand
uggcaaacauugauccuuu

SEQ ID NO: 1609548 - RNA, 19 nt, Homo sapiens
  misc_RNA (1)...(19): siRNA sense strand
gcagaggagcucauuacua

SEQ ID NO: 1609549 - RNA, 19 nt, Homo sapiens
  misc_RNA (1)...(19): siRNA sense strand
caaaccaguucuuuccaaa

SEQ ID NO: 1609550 - RNA, 19 nt, Homo sapiens
  misc_RNA (1)...(19): siRNA sense strand
gaagagcgaguauccaaug

SEQ ID NO: 1609551 - RNA, 19 nt, Homo sapiens
  misc_RNA (1)...(19): siRNA sense strand
gcaccucggucuccagaug

SEQ ID NO: 1609552 - RNA, 19 nt, Homo sapiens
  misc_RNA (1)...(19): siRNA sense strand
uaaagaugauggugccaaa

SEQ ID NO: 1609553 - RNA, 19 nt, Homo sapiens
  misc_RNA (1)...(19): siRNA sense strand
cggcucagguguuugauuu

SEQ ID NO: 1609554 - RNA, 19 nt, Homo sapiens
  misc_RNA (1)...(19): siRNA sense strand
cgaauagugccaaaguuua

SEQ ID NO: 1609555 - RNA, 19 nt, Homo sapiens
  misc_RNA (1)...(19): siRNA sense strand
caagagacacugccacuga

SEQ ID NO: 1609556 - RNA, 19 nt, Homo sapiens
  misc_RNA (1)...(19): siRNA sense strand
cagaagaggugucgcagau

SEQ ID NO: 1609557 - RNA, 19 nt, Homo sapiens
  misc_RNA (1)...(19): siRNA sense strand
ccuggaaguuguagcaaua

SEQ ID NO: 1609558 - RNA, 19 nt, Homo sapiens
  misc_RNA (1)...(19): siRNA sense strand
gcugggaguucgauuauca

SEQ ID NO: 1609559 - RNA, 19 nt, Homo sapiens
  misc_RNA (1)...(19): siRNA sense strand
gggcaaauaguuuaaagaa

SEQ ID NO: 1609560 - RNA, 19 nt, Homo sapiens
  misc_RNA (1)...(19): siRNA sense strand
ggaacgagccaguaccaaa

SEQ ID NO: 1609561 - RNA, 19 nt, Homo sapiens
  misc_RNA (1)...(19): siRNA sense strand
caacuugaauaaacagugu

SEQ ID NO: 1609562 - RNA, 19 nt, Homo sapiens
  misc_RNA (1)...(19): siRNA sense strand
uaucauaccuccaauugca

SEQ ID NO: 1609563 - RNA, 19 nt, Homo sapiens
  misc_RNA (1)...(19): siRNA sense strand
gaaguuguagcaauauuug

SEQ ID NO: 1609564 - RNA, 19 nt, Homo sapiens
  misc_RNA (1)...(19): siRNA sense strand
ggaaguuguagcaauauuu

SEQ ID NO: 1609565 - RNA, 19 nt, Homo sapiens
  misc_RNA (1)...(19): siRNA sense strand
gaaaagacguaugacaaaa

SEQ ID NO: 1609566 - RNA, 19 nt, Homo sapiens
  misc_RNA (1)...(19): siRNA sense strand
gguggaguauaaugacaua

SEQ ID NO: 1609567 - RNA, 19 nt, Homo sapiens
  misc_RNA (1)...(19): siRNA sense strand
gaaggacauuauagaagau

SEQ ID NO: 1609568 - RNA, 19 nt, Homo sapiens
  misc_RNA (1)...(19): siRNA sense strand
ugaaauagccaucaaugug

SEQ ID NO: 1609569 - RNA, 19 nt, Homo sapiens
  misc_RNA (1)...(19): siRNA sense strand
ucauuaaacugcagcauca

SEQ ID NO: 1609570 - RNA, 19 nt, Homo sapiens
  misc_RNA (1)...(19): siRNA sense strand
caaaagaugugcagugaga

SEQ ID NO: 1609571 - RNA, 19 nt, Homo sapiens
  misc_RNA (1)...(19): siRNA sense strand
gcacagaaacagaugaauc

SEQ ID NO: 1609572 - RNA, 19 nt, Homo sapiens
  misc_RNA (1)...(19): siRNA sense strand
caguaaauguucaguccua

SEQ ID NO: 1609573 - RNA, 19 nt, Homo sapiens
  misc_RNA (1)...(19): siRNA sense strand
cauccaauauguccacuug

SEQ ID NO: 1609574 - RNA, 19 nt, Homo sapiens
  misc_RNA (1)...(19): siRNA sense strand
ggacuacccuggccuccau

SEQ ID NO: 1609575 - RNA, 19 nt, Homo sapiens
  misc_RNA (1)...(19): siRNA sense strand
gggcagauccggaccaaga

SEQ ID NO: 1609576 - RNA, 19 nt, Homo sapiens
  misc_RNA (1)...(19): siRNA sense strand
gacaagauccuggaaguug

SEQ ID NO: 1609577 - RNA, 19 nt, Homo sapiens
  misc_RNA (1)...(19): siRNA sense strand
ggagguggaauuacagaaa

SEQ ID NO: 1609578 - RNA, 19 nt, Homo sapiens
  misc_RNA (1)...(19): siRNA sense strand
aacaacagcuucacgauca

SEQ ID NO: 1609579 - RNA, 19 nt, Homo sapiens
  misc_RNA (1)...(19): siRNA sense strand
gaccaagaccaguauuaaa

SEQ ID NO: 1609580 - RNA, 19 nt, Homo sapiens
  misc_RNA (1)...(19): siRNA sense strand
aaacugauccgcaaagugu

SEQ ID NO: 1609581 - RNA, 19 nt, Homo sapiens
  misc_RNA (1)...(19): siRNA sense strand
gguacacacugccugcaaa

SEQ ID NO: 1609582 - RNA, 19 nt, Homo sapiens
  misc_RNA (1)...(19): siRNA sense strand
ccacugaaauagccaucaa

SEQ ID NO: 1609583 - RNA, 19 nt, Homo sapiens
  misc_RNA (1)...(19): siRNA sense strand
gaucguacaagaauuuaga

SEQ ID NO: 1609584 - RNA, 19 nt, Homo sapiens
  misc_RNA (1)...(19): siRNA sense strand
gaacaugcaguggucauau

SEQ ID NO: 1609585 - RNA, 19 nt, Homo sapiens
  misc_RNA (1)...(19): siRNA sense strand
uuggacagguggaguauaa

SEQ ID NO: 1609586 - RNA, 19 nt, Homo sapiens
  misc_RNA (1)...(19): siRNA sense strand
ccucucagaugcuagugua

SEQ ID NO: 1609587 - RNA, 19 nt, Homo sapiens
  misc_RNA (1)...(19): siRNA sense strand
ugaaacagaaucuuugcua

SEQ ID NO: 1609588 - RNA, 19 nt, Homo sapiens
  misc_RNA (1)...(19): siRNA sense strand
ggaaguguagguuggguuu

SEQ ID NO: 1609589 - RNA, 19 nt, Homo sapiens
  misc_RNA (1)...(19): siRNA sense strand
ggagaggauucgucugaca

SEQ ID NO: 1609590 - RNA, 19 nt, Homo sapiens
  misc_RNA (1)...(19): siRNA sense strand
cucaaagucucugauauuu

SEQ ID NO: 1609591 - RNA, 19 nt, Homo sapiens
  misc_RNA (1)...(19): siRNA sense strand
gccaaagaaucaauaacug

SEQ ID NO: 1609592 - RNA, 19 nt, Homo sapiens
  misc_RNA (1)...(19): siRNA sense strand
gacgcuaugugaaacugua

SEQ ID NO: 1609593 - RNA, 19 nt, Homo sapiens
  misc_RNA (1)...(19): siRNA sense strand
gaugguuucuguagagcaa

SEQ ID NO: 1609594 - RNA, 19 nt, Homo sapiens
  misc_RNA (1)...(19): siRNA sense strand
gaagcaaaccaguucuuuc

SEQ ID NO: 1609595 - RNA, 19 nt, Homo sapiens
  misc_RNA (1)...(19): siRNA sense strand
gaacuggcccaugcuguga

SEQ ID NO: 1609596 - RNA, 19 nt, Homo sapiens
  misc_RNA (1)...(19): siRNA sense strand
aagauaagcagaaguguga

SEQ ID NO: 1609597 - RNA, 19 nt, Homo sapiens
  misc_RNA (1)...(19): siRNA sense strand
ccagaaagccgucaaacca

SEQ ID NO: 1609598 - RNA, 19 nt, Homo sapiens
  misc_RNA (1)...(19): siRNA sense strand
gaagagucccugggugaaa

SEQ ID NO: 1609599 - RNA, 19 nt, Homo sapiens
  misc_RNA (1)...(19): siRNA sense strand
gccaagacgcuaugugaaa

SEQ ID NO: 1609600 - RNA, 19 nt, Homo sapiens
  misc_RNA (1)...(19): siRNA sense strand
gacaauuuccggauucuug

SEQ ID NO: 1609601 - RNA, 19 nt, Homo sapiens
  misc_RNA (1)...(19): siRNA sense strand
ucagaaguuugacaauuuc

SEQ ID NO: 1609602 - RNA, 19 nt, Homo sapiens
  misc_RNA (1)...(19): siRNA sense strand
ggagcucauuacuaggaua

SEQ ID NO: 1609603 - RNA, 19 nt, Homo sapiens
  misc_RNA (1)...(19): siRNA sense strand
gacaaaaccuuggaaaaug

SEQ ID NO: 1609604 - RNA, 19 nt, Homo sapiens
  misc_RNA (1)...(19): siRNA sense strand
ggacagguggaguauaaug

SEQ ID NO: 1609605 - RNA, 19 nt, Homo sapiens
  misc_RNA (1)...(19): siRNA sense strand
gcaccgauuccgaugguuu

SEQ ID NO: 1609606 - RNA, 19 nt, Homo sapiens
  misc_RNA (1)...(19): siRNA sense strand
gauuaugacagcacagaaa

SEQ ID NO: 1609607 - RNA, 19 nt, Homo sapiens
  misc_RNA (1)...(19): siRNA sense strand
ucagguguuugauuuaaug

SEQ ID NO: 1609608 - RNA, 19 nt, Homo sapiens
  misc_RNA (1)...(19): siRNA sense strand
gagauaaucagggaguaaa

SEQ ID NO: 1609609 - RNA, 19 nt, Homo sapiens
  misc_RNA (1)...(19): siRNA sense strand
uacagaaacugacagagau

SEQ ID NO: 1609610 - RNA, 19 nt, Homo sapiens
  misc_RNA (1)...(19): siRNA sense strand
agacacugccacugaaaua

SEQ ID NO: 1609611 - RNA, 19 nt, Homo sapiens
  misc_RNA (1)...(19): siRNA sense strand
gcaugcaaauggcaguuuc

SEQ ID NO: 1609612 - RNA, 19 nt, Homo sapiens
  misc_RNA (1)...(19): siRNA sense strand
gaugugguauggaguccuu

SEQ ID NO: 1609613 - RNA, 19 nt, Homo sapiens
  misc_RNA (1)...(19): siRNA sense strand
uagauuccguagauggaua

SEQ ID NO: 1609614 - RNA, 19 nt, Homo sapiens
  misc_RNA (1)...(19): siRNA sense strand
gaaaggagauggaggauug

SEQ ID NO: 1609615 - RNA, 19 nt, Homo sapiens
  misc_RNA (1)...(19): siRNA sense strand
ggaaaugccuuugguguaa

SEQ ID NO: 1609616 - RNA, 19 nt, Homo sapiens
  misc_RNA (1)...(19): siRNA sense strand
ggaagaagaugcuguggaa

SEQ ID NO: 1609617 - RNA, 19 nt, Homo sapiens
  misc_RNA (1)...(19): siRNA sense strand
ggaaggacauuauagaaga

SEQ ID NO: 1609618 - RNA, 19 nt, Homo sapiens
  misc_RNA (1)...(19): siRNA sense strand
ugaaggcgcuguauaauga

SEQ ID NO: 1609619 - RNA, 19 nt, Homo sapiens
  misc_RNA (1)...(19): siRNA sense strand
gaucaucacuccauucaga

SEQ ID NO: 1609620 - RNA, 19 nt, Homo sapiens
  misc_RNA (1)...(19): siRNA sense strand
ggacagcuauugaagcaaa

SEQ ID NO: 1609621 - RNA, 19 nt, Homo sapiens
  misc_RNA (1)...(19): siRNA sense strand
agaagcaucugaagaauuu

SEQ ID NO: 1609622 - RNA, 19 nt, Homo sapiens
  misc_RNA (1)...(19): siRNA sense strand
gcagugagagcaacaaaua

SEQ ID NO: 1609623 - RNA, 19 nt, Homo sapiens
  misc_RNA (1)...(19): siRNA sense strand
ggaguucgauuaucaacaa

SEQ ID NO: 1609624 - RNA, 19 nt, Homo sapiens
  misc_RNA (1)...(19): siRNA sense strand
gaaagugggucaugugaag

SEQ ID NO: 1609625 - RNA, 19 nt, Homo sapiens
  misc_RNA (1)...(19): siRNA sense strand
gaacucaaauugccaccaa

SEQ ID NO: 1609626 - RNA, 19 nt, Homo sapiens
  misc_RNA (1)...(19): siRNA sense strand
gaaauagccaucaauguga

SEQ ID NO: 1609627 - RNA, 19 nt, Homo sapiens
  misc_RNA (1)...(19): siRNA sense strand
ggaggaagcuaaagaugau

SEQ ID NO: 1609628 - RNA, 19 nt, Homo sapiens
  misc_RNA (1)...(19): siRNA sense strand
caacagaagcaccguauuu

SEQ ID NO: 1609629 - RNA, 19 nt, Homo sapiens
  misc_RNA (1)...(19): siRNA sense strand
guagauggauauucagaaa

SEQ ID NO: 1609630 - RNA, 19 nt, Homo sapiens
  misc_RNA (1)...(19): siRNA sense strand
ggaguauaaugacauauga

SEQ ID NO: 1609631 - RNA, 19 nt, Homo sapiens
  misc_RNA (1)...(19): siRNA sense strand
gaagugugauucugguaaa

SEQ ID NO: 1609632 - RNA, 19 nt, Homo sapiens
  misc_RNA (1)...(19): siRNA sense strand
gaacuaaagaggaugauau

SEQ ID NO: 1609633 - RNA, 19 nt, Homo sapiens
  misc_RNA (1)...(19): siRNA sense strand
cagaggagcucauuacuag

SEQ ID NO: 1609634 - RNA, 19 nt, Homo sapiens
  misc_RNA (1)...(19): siRNA sense strand
uuacagagaucguacaaga

SEQ ID NO: 1609635 - RNA, 19 nt, Homo sapiens
  misc_RNA (1)...(19): siRNA sense strand
gaauagugccaaaguuuaa

SEQ ID NO: 1609636 - RNA, 19 nt, Homo sapiens
  misc_RNA (1)...(19): siRNA sense strand
guacauccaucacgccauu

SEQ ID NO: 1609637 - RNA, 19 nt, Homo sapiens
  misc_RNA (1)...(19): siRNA sense strand
agaauaaucugcccagguu

SEQ ID NO: 1609638 - RNA, 19 nt, Homo sapiens
  misc_RNA (1)...(19): siRNA sense strand
gcaaaccaguucuuuccaa

SEQ ID NO: 1609639 - RNA, 19 nt, Homo sapiens
  misc_RNA (1)...(19): siRNA sense strand
gcucagguguuugauuuaa

SEQ ID NO: 1609640 - RNA, 19 nt, Homo sapiens
  misc_RNA (1)...(19): siRNA sense strand
gaacaauuacuuugggauu

SEQ ID NO: 1609641 - RNA, 19 nt, Homo sapiens
  misc_RNA (1)...(19): siRNA sense strand
gagcaacaaauaacuguaa

SEQ ID NO: 1609642 - RNA, 19 nt, Homo sapiens
  misc_RNA (1)...(19): siRNA sense strand
gcacuaaacagcaccgauu

SEQ ID NO: 1609643 - RNA, 19 nt, Homo sapiens
  misc_RNA (1)...(19): siRNA sense strand
gaaguugaccucucagaug

SEQ ID NO: 1609644 - RNA, 19 nt, Homo sapiens
  misc_RNA (1)...(19): siRNA sense strand
gagauuccuuggcuuuauu

SEQ ID NO: 1609645 - RNA, 19 nt, Homo sapiens
  misc_RNA (1)...(19): siRNA sense strand
gcgaguauccaaugccuua

SEQ ID NO: 1609646 - RNA, 19 nt, Homo sapiens
  misc_RNA (1)...(19): siRNA sense strand
ggaccaagaccaguauuaa

SEQ ID NO: 1609647 - RNA, 19 nt, Homo sapiens
  misc_RNA (1)...(19): siRNA sense strand
uggcaaacauugauccuuu

SEQ ID NO: 1609648 - RNA, 19 nt, Homo sapiens
  misc_RNA (1)...(19): siRNA sense strand
gcagaggagcucauuacua

SEQ ID NO: 1609649 - RNA, 19 nt, Homo sapiens
  misc_RNA (1)...(19): siRNA sense strand
caaaccaguucuuuccaaa

SEQ ID NO: 1609650 - RNA, 19 nt, Homo sapiens
  misc_RNA (1)...(19): siRNA sense strand
gaagagcgaguauccaaug

SEQ ID NO: 1609651 - RNA, 19 nt, Homo sapiens
  misc_RNA (1)...(19): siRNA sense strand
gcaccucggucuccagaug

SEQ ID NO: 1609652 - RNA, 19 nt, Homo sapiens
  misc_RNA (1)...(19): siRNA sense strand
uaaagaugauggugccaaa

SEQ ID NO: 1609653 - RNA, 19 nt, Homo sapiens
  misc_RNA (1)...(19): siRNA sense strand
cggcucagguguuugauuu

SEQ ID NO: 1609654 - RNA, 19 nt, Homo sapiens
  misc_RNA (1)...(19): siRNA sense strand
cgaauagugccaaaguuua

SEQ ID NO: 1609655 - RNA, 19 nt, Homo sapiens
  misc_RNA (1)...(19): siRNA sense strand
caagagacacugccacuga

SEQ ID NO: 1609656 - RNA, 19 nt, Homo sapiens
  misc_RNA (1)...(19): siRNA sense strand
cagaagaggugucgcagau

SEQ ID NO: 1609657 - RNA, 19 nt, Homo sapiens
  misc_RNA (1)...(19): siRNA sense strand
ccuggaaguuguagcaaua

SEQ ID NO: 1609658 - RNA, 19 nt, Homo sapiens
  misc_RNA (1)...(19): siRNA sense strand
gcugggaguucgauuauca

SEQ ID NO: 1609659 - RNA, 19 nt, Homo sapiens
  misc_RNA (1)...(19): siRNA sense strand
gggcaaauaguuuaaagaa

SEQ ID NO: 1609660 - RNA, 19 nt, Homo sapiens
  misc_RNA (1)...(19): siRNA sense strand
ggaacgagccaguaccaaa

SEQ ID NO: 1609661 - RNA, 19 nt, Homo sapiens
  misc_RNA (1)...(19): siRNA sense strand
caacuugaauaaacagugu

SEQ ID NO: 1609662 - RNA, 19 nt, Homo sapiens
  misc_RNA (1)...(19): siRNA sense strand
uaucauaccuccaauugca

SEQ ID NO: 1609663 - RNA, 19 nt, Homo sapiens
  misc_RNA (1)...(19): siRNA sense strand
gaaguuguagcaauauuug

SEQ ID NO: 1609664 - RNA, 19 nt, Homo sapiens
  misc_RNA (1)...(19): siRNA sense strand
ggaaguuguagcaauauuu

SEQ ID NO: 1609665 - RNA, 19 nt, Homo sapiens
  misc_RNA (1)...(19): siRNA sense strand
gaaaagacguaugacaaaa

SEQ ID NO: 1609666 - RNA, 19 nt, Homo sapiens
  misc_RNA (1)...(19): siRNA sense strand
gguggaguauaaugacaua

SEQ ID NO: 1609667 - RNA, 19 nt, Homo sapiens
  misc_RNA (1)...(19): siRNA sense strand
gaaggacauuauagaagau

SEQ ID NO: 1609668 - RNA, 19 nt, Homo sapiens
  misc_RNA (1)...(19): siRNA sense strand
ugaaauagccaucaaugug

SEQ ID NO: 1609669 - RNA, 19 nt, Homo sapiens
  misc_RNA (1)...(19): siRNA sense strand
ucauuaaacugcagcauca

SEQ ID NO: 1609670 - RNA, 19 nt, Homo sapiens
  misc_RNA (1)...(19): siRNA sense strand
caaaagaugugcagugaga

SEQ ID NO: 1609671 - RNA, 19 nt, Homo sapiens
  misc_RNA (1)...(19): siRNA sense strand
gcacagaaacagaugaauc

SEQ ID NO: 1609672 - RNA, 19 nt, Homo sapiens
  misc_RNA (1)...(19): siRNA sense strand
caguaaauguucaguccua

SEQ ID NO: 1609673 - RNA, 19 nt, Homo sapiens
  misc_RNA (1)...(19): siRNA sense strand
cauccaauauguccacuug

SEQ ID NO: 1609674 - RNA, 19 nt, Homo sapiens
  misc_RNA (1)...(19): siRNA sense strand
ggacuacccuggccuccau

SEQ ID NO: 1609675 - RNA, 19 nt, Homo sapiens
  misc_RNA (1)...(19): siRNA sense strand
gggcagauccggaccaaga

SEQ ID NO: 1609676 - RNA, 19 nt, Homo sapiens
  misc_RNA (1)...(19): siRNA sense strand
gacaagauccuggaaguug

SEQ ID NO: 1609677 - RNA, 19 nt, Homo sapiens
  misc_RNA (1)...(19): siRNA sense strand
ggagguggaauuacagaaa

SEQ ID NO: 1609678 - RNA, 19 nt, Homo sapiens
  misc_RNA (1)...(19): siRNA sense strand
aacaacagcuucacgauca

SEQ ID NO: 1609679 - RNA, 19 nt, Homo sapiens
  misc_RNA (1)...(19): siRNA sense strand
gaccaagaccaguauuaaa

SEQ ID NO: 1609680 - RNA, 19 nt, Homo sapiens
  misc_RNA (1)...(19): siRNA sense strand
aaacugauccgcaaagugu

SEQ ID NO: 1609681 - RNA, 19 nt, Homo sapiens
  misc_RNA (1)...(19): siRNA sense strand
gguacacacugccugcaaa

SEQ ID NO: 1609682 - RNA, 19 nt, Homo sapiens
  misc_RNA (1)...(19): siRNA sense strand
ccacugaaauagccaucaa

SEQ ID NO: 1609683 - RNA, 19 nt, Homo sapiens
  misc_RNA (1)...(19): siRNA sense strand
gaucguacaagaauuuaga

SEQ ID NO: 1609684 - RNA, 19 nt, Homo sapiens
  misc_RNA (1)...(19): siRNA sense strand
gaacaugcaguggucauau

SEQ ID NO: 1609685 - RNA, 19 nt, Homo sapiens
  misc_RNA (1)...(19): siRNA sense strand
uuggacagguggaguauaa

SEQ ID NO: 1609686 - RNA, 19 nt, Homo sapiens
  misc_RNA (1)...(19): siRNA sense strand
ccucucagaugcuagugua

SEQ ID NO: 1609687 - RNA, 19 nt, Homo sapiens
  misc_RNA (1)...(19): siRNA sense strand
ggaauuaaagagcuuggaa

SEQ ID NO: 1609688 - RNA, 19 nt, Homo sapiens
  misc_RNA (1)...(19): siRNA sense strand
ugaaacagaaucuuugcua

SEQ ID NO: 1609689 - RNA, 19 nt, Homo sapiens
  misc_RNA (1)...(19): siRNA sense strand
ggaaguguagguuggguuu

SEQ ID NO: 1609690 - RNA, 19 nt, Homo sapiens
  misc_RNA (1)...(19): siRNA sense strand
ggagaggauucgucugaca

SEQ ID NO: 1609691 - RNA, 19 nt, Homo sapiens
  misc_RNA (1)...(19): siRNA sense strand
cucaaagucucugauauuu

SEQ ID NO: 1609692 - RNA, 19 nt, Homo sapiens
  misc_RNA (1)...(19): siRNA sense strand
gccaaagaaucaauaacug

SEQ ID NO: 1609693 - RNA, 19 nt, Homo sapiens
  misc_RNA (1)...(19): siRNA sense strand
gacgcuaugugaaacugua

SEQ ID NO: 1609694 - RNA, 19 nt, Homo sapiens
  misc_RNA (1)...(19): siRNA sense strand
gaugguuucuguagagcaa

SEQ ID NO: 1609695 - RNA, 19 nt, Homo sapiens
  misc_RNA (1)...(19): siRNA sense strand
gaagcaaaccaguucuuuc

SEQ ID NO: 1609696 - RNA, 19 nt, Homo sapiens
  misc_RNA (1)...(19): siRNA sense strand
gaacuggcccaugcuguga

SEQ ID NO: 1609697 - RNA, 19 nt, Homo sapiens
  misc_RNA (1)...(19): siRNA sense strand
aagauaagcagaaguguga

SEQ ID NO: 1609698 - RNA, 19 nt, Homo sapiens
  misc_RNA (1)...(19): siRNA sense strand
ccagaaagccgucaaacca

SEQ ID NO: 1609699 - RNA, 19 nt, Homo sapiens
  misc_RNA (1)...(19): siRNA sense strand
gaagagucccugggugaaa

SEQ ID NO: 1609700 - RNA, 19 nt, Homo sapiens
  misc_RNA (1)...(19): siRNA sense strand
gccaagacgcuaugugaaa

SEQ ID NO: 1609701 - RNA, 19 nt, Homo sapiens
  misc_RNA (1)...(19): siRNA sense strand
gacaauuuccggauucuug

SEQ ID NO: 1609702 - RNA, 19 nt, Homo sapiens
  misc_RNA (1)...(19): siRNA sense strand
ucagaaguuugacaauuuc

SEQ ID NO: 1609703 - RNA, 19 nt, Homo sapiens
  misc_RNA (1)...(19): siRNA sense strand
ggagcucauuacuaggaua

SEQ ID NO: 1609704 - RNA, 19 nt, Homo sapiens
  misc_RNA (1)...(19): siRNA sense strand
gacaaaaccuuggaaaaug

SEQ ID NO: 1609705 - RNA, 19 nt, Homo sapiens
  misc_RNA (1)...(19): siRNA sense strand
ggacagguggaguauaaug

SEQ ID NO: 1609706 - RNA, 19 nt, Homo sapiens
  misc_RNA (1)...(19): siRNA sense strand
gcaccgauuccgaugguuu

SEQ ID NO: 1609707 - RNA, 19 nt, Homo sapiens
  misc_RNA (1)...(19): siRNA sense strand
gauuaugacagcacagaaa

SEQ ID NO: 1609708 - RNA, 19 nt, Homo sapiens
  misc_RNA (1)...(19): siRNA sense strand
ucagguguuugauuuaaug

SEQ ID NO: 1609709 - RNA, 19 nt, Homo sapiens
  misc_RNA (1)...(19): siRNA sense strand
uagauuccguagauggaua

SEQ ID NO: 1609710 - RNA, 19 nt, Homo sapiens
  misc_RNA (1)...(19): siRNA sense strand
uacagaaacugacagagau

SEQ ID NO: 1609711 - RNA, 19 nt, Homo sapiens
  misc_RNA (1)...(19): siRNA sense strand
agacacugccacugaaaua

SEQ ID NO: 1609712 - RNA, 19 nt, Homo sapiens
  misc_RNA (1)...(19): siRNA sense strand
gcaugcaaauggcaguuuc

SEQ ID NO: 1609713 - RNA, 19 nt, Homo sapiens
  misc_RNA (1)...(19): siRNA sense strand
gaugugguauggaguccuu

SEQ ID NO: 1609714 - RNA, 19 nt, Homo sapiens
  misc_RNA (1)...(19): siRNA sense strand
ggacaucaauggagaaauu

SEQ ID NO: 1609715 - RNA, 19 nt, Homo sapiens
  misc_RNA (1)...(19): siRNA sense strand
gaagguggcuguugugaau

SEQ ID NO: 1609716 - RNA, 19 nt, Homo sapiens
  misc_RNA (1)...(19): siRNA sense strand
ccaagaagcucggcaaaug

SEQ ID NO: 1609717 - RNA, 19 nt, Homo sapiens
  misc_RNA (1)...(19): siRNA sense strand
gaaguacccugacuauaag

SEQ ID NO: 1609718 - RNA, 19 nt, Homo sapiens
  misc_RNA (1)...(19): siRNA sense strand
ugacaaaccuagagaaaca

SEQ ID NO: 1609719 - RNA, 19 nt, Homo sapiens
  misc_RNA (1)...(19): siRNA sense strand
uagagaaacagccauauua

SEQ ID NO: 1609720 - RNA, 19 nt, Homo sapiens
  misc_RNA (1)...(19): siRNA sense strand
agaaguacccugacuauaa

SEQ ID NO: 1609721 - RNA, 19 nt, Homo sapiens
  misc_RNA (1)...(19): siRNA sense strand
caagaccucugauggcaaa

SEQ ID NO: 1609722 - RNA, 19 nt, Homo sapiens
  misc_RNA (1)...(19): siRNA sense strand
ggaucucgcuggaaagcua

SEQ ID NO: 1609723 - RNA, 19 nt, Homo sapiens
  misc_RNA (1)...(19): siRNA sense strand
aaacaacacuggagagucu

SEQ ID NO: 1609724 - RNA, 19 nt, Homo sapiens
  misc_RNA (1)...(19): siRNA sense strand
gaacaacaggugcuugaug

SEQ ID NO: 1609725 - RNA, 19 nt, Homo sapiens
  misc_RNA (1)...(19): siRNA sense strand
gcaagcagcaccuggagaa

SEQ ID NO: 1609726 - RNA, 19 nt, Homo sapiens
  misc_RNA (1)...(19): siRNA sense strand
uaaacagaaugaagaagga

SEQ ID NO: 1609727 - RNA, 19 nt, Homo sapiens
  misc_RNA (1)...(19): siRNA sense strand
gaguggagauucugaugga

SEQ ID NO: 1609728 - RNA, 19 nt, Homo sapiens
  misc_RNA (1)...(19): siRNA sense strand
ggaaagcuaugacaaaccu

SEQ ID NO: 1609729 - RNA, 19 nt, Homo sapiens
  misc_RNA (1)...(19): siRNA sense strand
cauaaagcguccaaugaau

SEQ ID NO: 1609730 - RNA, 19 nt, Homo sapiens
  misc_RNA (1)...(19): siRNA sense strand
gcacaauagguuacuuaaa

SEQ ID NO: 1609731 - RNA, 19 nt, Homo sapiens
  misc_RNA (1)...(19): siRNA sense strand
gagaggagccacauaucaa

SEQ ID NO: 1609732 - RNA, 19 nt, Homo sapiens
  misc_RNA (1)...(19): siRNA sense strand
ggagaaguacccugacuau

SEQ ID NO: 1609733 - RNA, 19 nt, Homo sapiens
  misc_RNA (1)...(19): siRNA sense strand
ggugugggcuaaagaugaa

SEQ ID NO: 1609734 - RNA, 19 nt, Homo sapiens
  misc_RNA (1)...(19): siRNA sense strand
gcacagccacugaaccuau

SEQ ID NO: 1609735 - RNA, 19 nt, Homo sapiens
  misc_RNA (1)...(19): siRNA sense strand
ggagaggagccacauauca

SEQ ID NO: 1609736 - RNA, 19 nt, Homo sapiens
  misc_RNA (1)...(19): siRNA sense strand
ggagccacauaucaaagaa

SEQ ID NO: 1609737 - RNA, 19 nt, Homo sapiens
  misc_RNA (1)...(19): siRNA sense strand
gcaaugaaccccacauaaa

SEQ ID NO: 1609738 - RNA, 19 nt, Homo sapiens
  misc_RNA (1)...(19): siRNA sense strand
cggcaguacuucaauguug

SEQ ID NO: 1609739 - RNA, 19 nt, Homo sapiens
  misc_RNA (1)...(19): siRNA sense strand
gaaaugcggcaguacuuca

SEQ ID NO: 1609740 - RNA, 19 nt, Homo sapiens
  misc_RNA (1)...(19): siRNA sense strand
caagaagcucggcaaauga

SEQ ID NO: 1609741 - RNA, 19 nt, Homo sapiens
  misc_RNA (1)...(19): siRNA sense strand
gagccugggaugccuguua

SEQ ID NO: 1609742 - RNA, 19 nt, Homo sapiens
  misc_RNA (1)...(19): siRNA sense strand
caacaucagcaagauauug

SEQ ID NO: 1609743 - RNA, 19 nt, Homo sapiens
  misc_RNA (1)...(19): siRNA sense strand
gcgcauuggugaauacaag

SEQ ID NO: 1609744 - RNA, 19 nt, Homo sapiens
  misc_RNA (1)...(19): siRNA sense strand
gagaaguacccugacuaua

SEQ ID NO: 1609745 - RNA, 19 nt, Homo sapiens
  misc_RNA (1)...(19): siRNA sense strand
ccacauaaagcguccaaug

SEQ ID NO: 1609746 - RNA, 19 nt, Homo sapiens
  misc_RNA (1)...(19): siRNA sense strand
ggagaaauuuaugaugagu

SEQ ID NO: 1609747 - RNA, 19 nt, Homo sapiens
  misc_RNA (1)...(19): siRNA sense strand
uaugccagcucugagaaua

SEQ ID NO: 1609748 - RNA, 19 nt, Homo sapiens
  misc_RNA (1)...(19): siRNA sense strand
gcuggaaagcuaugacaaa

SEQ ID NO: 1609749 - RNA, 19 nt, Homo sapiens
  misc_RNA (1)...(19): siRNA sense strand
aaagaugaacggagaaaga

SEQ ID NO: 1609750 - RNA, 19 nt, Homo sapiens
  misc_RNA (1)...(19): siRNA sense strand
cacauaaagcguccaauga

SEQ ID NO: 1609751 - RNA, 19 nt, Homo sapiens
  misc_RNA (1)...(19): siRNA sense strand
ggcaggaaaugcggcagua

SEQ ID NO: 1609752 - RNA, 19 nt, Homo sapiens
  misc_RNA (1)...(19): siRNA sense strand
gcaacaggcggcaggaaau

SEQ ID NO: 1609753 - RNA, 19 nt, Homo sapiens
  misc_RNA (1)...(19): siRNA sense strand
agccagaguuagcacaaua

SEQ ID NO: 1609754 - RNA, 19 nt, Homo sapiens
  misc_RNA (1)...(19): siRNA sense strand
uggaagugcuggagucuca

SEQ ID NO: 1609755 - RNA, 19 nt, Homo sapiens
  misc_RNA (1)...(19): siRNA sense strand
aaauuuagccaugcaauga

SEQ ID NO: 1609756 - RNA, 19 nt, Homo sapiens
  misc_RNA (1)...(19): siRNA sense strand
uagcacaauagguuacuua

SEQ ID NO: 1609757 - RNA, 19 nt, Homo sapiens
  misc_RNA (1)...(19): siRNA sense strand
agaguuagcacaauagguu

SEQ ID NO: 1609758 - RNA, 19 nt, Homo sapiens
  misc_RNA (1)...(19): siRNA sense strand
gggaacaacaggugcuuga

SEQ ID NO: 1609759 - RNA, 19 nt, Homo sapiens
  misc_RNA (1)...(19): siRNA sense strand
acauaaagcguccaaugaa

SEQ ID NO: 1609760 - RNA, 19 nt, Homo sapiens
  misc_RNA (1)...(19): siRNA sense strand
gcacuuacggugugaaagg

SEQ ID NO: 1609761 - RNA, 19 nt, Homo sapiens
  misc_RNA (1)...(19): siRNA sense strand
ugauccagauguagauuau

SEQ ID NO: 1609762 - RNA, 19 nt, Homo sapiens
  misc_RNA (1)...(19): siRNA sense strand
ggaagguggcuguugugaa

SEQ ID NO: 1609763 - RNA, 19 nt, Homo sapiens
  misc_RNA (1)...(19): siRNA sense strand
ccacauaucaaagaagaga

SEQ ID NO: 1609764 - RNA, 19 nt, Homo sapiens
  misc_RNA (1)...(19): siRNA sense strand
agcagcaccuggagaagua

SEQ ID NO: 1609765 - RNA, 19 nt, Homo sapiens
  misc_RNA (1)...(19): siRNA sense strand
gcaguuaaacagaaugaag

SEQ ID NO: 1609766 - RNA, 19 nt, Homo sapiens
  misc_RNA (1)...(19): siRNA sense strand
caauaacugccgaacagaa

SEQ ID NO: 1609767 - RNA, 19 nt, Homo sapiens
  misc_RNA (1)...(19): siRNA sense strand
gaguuagcacaauagguua

SEQ ID NO: 1609768 - RNA, 19 nt, Homo sapiens
  misc_RNA (1)...(19): siRNA sense strand
cuucaagccuuuccugaca

SEQ ID NO: 1609769 - RNA, 19 nt, Homo sapiens
  misc_RNA (1)...(19): siRNA sense strand
ucucagagucaagaauuua

SEQ ID NO: 1609770 - RNA, 19 nt, Homo sapiens
  misc_RNA (1)...(19): siRNA sense strand
cuagagaaacagccauauu

SEQ ID NO: 1609771 - RNA, 19 nt, Homo sapiens
  misc_RNA (1)...(19): siRNA sense strand
gaaaggagaggagccacau

SEQ ID NO: 1609772 - RNA, 19 nt, Homo sapiens
  misc_RNA (1)...(19): siRNA sense strand
agagaaacagccauauuau

SEQ ID NO: 1609773 - RNA, 19 nt, Homo sapiens
  misc_RNA (1)...(19): siRNA sense strand
ugaauagucugggucucaa

SEQ ID NO: 1609774 - RNA, 19 nt, Homo sapiens
  misc_RNA (1)...(19): siRNA sense strand
uaugacaaaccuagagaaa

SEQ ID NO: 1609775 - RNA, 19 nt, Homo sapiens
  misc_RNA (1)...(19): siRNA sense strand
gauggcaaaucacccacau

SEQ ID NO: 1609776 - RNA, 19 nt, Homo sapiens
  misc_RNA (1)...(19): siRNA sense strand
ugccagcucugagaauaaa

SEQ ID NO: 1609777 - RNA, 19 nt, Homo sapiens
  misc_RNA (1)...(19): siRNA sense strand
gagcacuuacggugugaaa

SEQ ID NO: 1609778 - RNA, 19 nt, Homo sapiens
  misc_RNA (1)...(19): siRNA sense strand
ggaaaugcggcaguacuuc

SEQ ID NO: 1609779 - RNA, 19 nt, Homo sapiens
  misc_RNA (1)...(19): siRNA sense strand
augcacaacuccaacauca

SEQ ID NO: 1609780 - RNA, 19 nt, Homo sapiens
  misc_RNA (1)...(19): siRNA sense strand
caccaaggcaauccaagaa

SEQ ID NO: 1609781 - RNA, 19 nt, Homo sapiens
  misc_RNA (1)...(19): siRNA sense strand
aauaacugccgaacagaaa

SEQ ID NO: 1609782 - RNA, 19 nt, Homo sapiens
  misc_RNA (1)...(19): siRNA sense strand
gaagugcuggagucucaga

SEQ ID NO: 1609783 - RNA, 19 nt, Homo sapiens
  misc_RNA (1)...(19): siRNA sense strand
caguuaaacagaaugaaga

SEQ ID NO: 1609784 - RNA, 19 nt, Homo sapiens
  misc_RNA (1)...(19): siRNA sense strand
caacaggcggcaggaaaug

SEQ ID NO: 1609785 - RNA, 19 nt, Homo sapiens
  misc_RNA (1)...(19): siRNA sense strand
uggcaaaucacccacauca

SEQ ID NO: 1609786 - RNA, 19 nt, Homo sapiens
  misc_RNA (1)...(19): siRNA sense strand
ucaagccuuuccugacaug

SEQ ID NO: 1609787 - RNA, 19 nt, Homo sapiens
  misc_RNA (1)...(19): siRNA sense strand
gaggacaucaauggagaaa

SEQ ID NO: 1609788 - RNA, 19 nt, Homo sapiens
  misc_RNA (1)...(19): siRNA sense strand
ucaccaaggcaauccaaga

SEQ ID NO: 1609789 - RNA, 19 nt, Homo sapiens
  misc_RNA (1)...(19): siRNA sense strand
agccacauaucaaagaaga

SEQ ID NO: 1609790 - RNA, 19 nt, Homo sapiens
  misc_RNA (1)...(19): siRNA sense strand
ccacugcugguguugugua

SEQ ID NO: 1609791 - RNA, 19 nt, Homo sapiens
  misc_RNA (1)...(19): siRNA sense strand
aauagucugggucucaaua

SEQ ID NO: 1609792 - RNA, 19 nt, Homo sapiens
  misc_RNA (1)...(19): siRNA sense strand
guacgacgaggaagaggau

SEQ ID NO: 1609793 - RNA, 19 nt, Homo sapiens
  misc_RNA (1)...(19): siRNA sense strand
gacaucaauggagaaauuu

SEQ ID NO: 1609794 - RNA, 19 nt, Homo sapiens
  misc_RNA (1)...(19): siRNA sense strand
gcuaugacaaaccuagaga

SEQ ID NO: 1609795 - RNA, 19 nt, Homo sapiens
  misc_RNA (1)...(19): siRNA sense strand
gucucagagucaagaauuu

SEQ ID NO: 1609796 - RNA, 19 nt, Homo sapiens
  misc_RNA (1)...(19): siRNA sense strand
cucaauaacugccgaacag

SEQ ID NO: 1609797 - RNA, 19 nt, Homo sapiens
  misc_RNA (1)...(19): siRNA sense strand
aagaagcucggcaaaugaa

SEQ ID NO: 1609798 - RNA, 19 nt, Homo sapiens
  misc_RNA (1)...(19): siRNA sense strand
agaggagccacauaucaaa

SEQ ID NO: 1609799 - RNA, 19 nt, Homo sapiens
  misc_RNA (1)...(19): siRNA sense strand
ugaauacaaggcaaucaug

SEQ ID NO: 1609800 - RNA, 19 nt, Homo sapiens
  misc_RNA (1)...(19): siRNA sense strand
auugggaucucgcuggaaa

SEQ ID NO: 1609801 - RNA, 19 nt, Homo sapiens
  misc_RNA (1)...(19): siRNA sense strand
auaaagcguccaaugaaug

SEQ ID NO: 1609802 - RNA, 19 nt, Homo sapiens
  misc_RNA (1)...(19): siRNA sense strand
ccauaugccagcucugaga

SEQ ID NO: 1609803 - RNA, 19 nt, Homo sapiens
  misc_RNA (1)...(19): siRNA sense strand
aaggagaggagccacauau

SEQ ID NO: 1609804 - RNA, 19 nt, Homo sapiens
  misc_RNA (1)...(19): siRNA sense strand
gugaauagucugggucuca

SEQ ID NO: 1609805 - RNA, 19 nt, Homo sapiens
  misc_RNA (1)...(19): siRNA sense strand
gcuggagucucagagucaa

SEQ ID NO: 1609806 - RNA, 19 nt, Homo sapiens
  misc_RNA (1)...(19): siRNA sense strand
gaaucccgagggcguggua

SEQ ID NO: 1609807 - RNA, 19 nt, Homo sapiens
  misc_RNA (1)...(19): siRNA sense strand
gauacaggccgaggacauc

SEQ ID NO: 1609808 - RNA, 19 nt, Homo sapiens
  misc_RNA (1)...(19): siRNA sense strand
ucacccaccucuccccaua

SEQ ID NO: 1609809 - RNA, 19 nt, Homo sapiens
  misc_RNA (1)...(19): siRNA sense strand
cuaaagaugaacggagaaa

SEQ ID NO: 1609810 - RNA, 19 nt, Homo sapiens
  misc_RNA (1)...(19): siRNA sense strand
uggagaaauuuaugaugag

SEQ ID NO: 1609811 - RNA, 19 nt, Homo sapiens
  misc_RNA (1)...(19): siRNA sense strand
gaggagcaagcccgucuca

SEQ ID NO: 1609812 - RNA, 19 nt, Homo sapiens
  misc_RNA (1)...(19): siRNA sense strand
gcaaaugaaggagcaacuc

SEQ ID NO: 1609813 - RNA, 19 nt, Homo sapiens
  misc_RNA (1)...(19): siRNA sense strand
aaaggagaggagccacaua

SEQ ID NO: 1609814 - RNA, 19 nt, Homo sapiens
  misc_RNA (1)...(19): siRNA sense strand
ggacaucaauggagaaauu

SEQ ID NO: 1609815 - RNA, 19 nt, Homo sapiens
  misc_RNA (1)...(19): siRNA sense strand
gaagguggcuguugugaau

SEQ ID NO: 1609816 - RNA, 19 nt, Homo sapiens
  misc_RNA (1)...(19): siRNA sense strand
ccaagaagcucggcaaaug

SEQ ID NO: 1609817 - RNA, 19 nt, Homo sapiens
  misc_RNA (1)...(19): siRNA sense strand
gaaguacccugacuauaag

SEQ ID NO: 1609818 - RNA, 19 nt, Homo sapiens
  misc_RNA (1)...(19): siRNA sense strand
ugacaaaccuagagaaaca

SEQ ID NO: 1609819 - RNA, 19 nt, Homo sapiens
  misc_RNA (1)...(19): siRNA sense strand
uagagaaacagccauauua

SEQ ID NO: 1609820 - RNA, 19 nt, Homo sapiens
  misc_RNA (1)...(19): siRNA sense strand
agaaguacccugacuauaa

SEQ ID NO: 1609821 - RNA, 19 nt, Homo sapiens
  misc_RNA (1)...(19): siRNA sense strand
caagaccucugauggcaaa

SEQ ID NO: 1609822 - RNA, 19 nt, Homo sapiens
  misc_RNA (1)...(19): siRNA sense strand
ggaucucgcuggaaagcua

SEQ ID NO: 1609823 - RNA, 19 nt, Homo sapiens
  misc_RNA (1)...(19): siRNA sense strand
aaacaacacuggagagucu

SEQ ID NO: 1609824 - RNA, 19 nt, Homo sapiens
  misc_RNA (1)...(19): siRNA sense strand
gaacaacaggugcuugaug

SEQ ID NO: 1609825 - RNA, 19 nt, Homo sapiens
  misc_RNA (1)...(19): siRNA sense strand
gcaagcagcaccuggagaa

SEQ ID NO: 1609826 - RNA, 19 nt, Homo sapiens
  misc_RNA (1)...(19): siRNA sense strand
uaaacagaaugaagaagga

SEQ ID NO: 1609827 - RNA, 19 nt, Homo sapiens
  misc_RNA (1)...(19): siRNA sense strand
gaguggagauucugaugga

SEQ ID NO: 1609828 - RNA, 19 nt, Homo sapiens
  misc_RNA (1)...(19): siRNA sense strand
ggaaagcuaugacaaaccu

SEQ ID NO: 1609829 - RNA, 19 nt, Homo sapiens
  misc_RNA (1)...(19): siRNA sense strand
cauaaagcguccaaugaau

SEQ ID NO: 1609830 - RNA, 19 nt, Homo sapiens
  misc_RNA (1)...(19): siRNA sense strand
gcacaauagguuacuuaaa

SEQ ID NO: 1609831 - RNA, 19 nt, Homo sapiens
  misc_RNA (1)...(19): siRNA sense strand
gagaggagccacauaucaa

SEQ ID NO: 1609832 - RNA, 19 nt, Homo sapiens
  misc_RNA (1)...(19): siRNA sense strand
ggagaaguacccugacuau

SEQ ID NO: 1609833 - RNA, 19 nt, Homo sapiens
  misc_RNA (1)...(19): siRNA sense strand
ggugugggcuaaagaugaa

SEQ ID NO: 1609834 - RNA, 19 nt, Homo sapiens
  misc_RNA (1)...(19): siRNA sense strand
gcacagccacugaaccuau

SEQ ID NO: 1609835 - RNA, 19 nt, Homo sapiens
  misc_RNA (1)...(19): siRNA sense strand
ggagaggagccacauauca

SEQ ID NO: 1609836 - RNA, 19 nt, Homo sapiens
  misc_RNA (1)...(19): siRNA sense strand
ggagccacauaucaaagaa

SEQ ID NO: 1609837 - RNA, 19 nt, Homo sapiens
  misc_RNA (1)...(19): siRNA sense strand
gcaaugaaccccacauaaa

SEQ ID NO: 1609838 - RNA, 19 nt, Homo sapiens
  misc_RNA (1)...(19): siRNA sense strand
cggcaguacuucaauguug

SEQ ID NO: 1609839 - RNA, 19 nt, Homo sapiens
  misc_RNA (1)...(19): siRNA sense strand
gaaaugcggcaguacuuca

SEQ ID NO: 1609840 - RNA, 19 nt, Homo sapiens
  misc_RNA (1)...(19): siRNA sense strand
caagaagcucggcaaauga

SEQ ID NO: 1609841 - RNA, 19 nt, Homo sapiens
  misc_RNA (1)...(19): siRNA sense strand
gagccugggaugccuguua

SEQ ID NO: 1609842 - RNA, 19 nt, Homo sapiens
  misc_RNA (1)...(19): siRNA sense strand
caacaucagcaagauauug

SEQ ID NO: 1609843 - RNA, 19 nt, Homo sapiens
  misc_RNA (1)...(19): siRNA sense strand
gcgcauuggugaauacaag

SEQ ID NO: 1609844 - RNA, 19 nt, Homo sapiens
  misc_RNA (1)...(19): siRNA sense strand
gagaaguacccugacuaua

SEQ ID NO: 1609845 - RNA, 19 nt, Homo sapiens
  misc_RNA (1)...(19): siRNA sense strand
ccacauaaagcguccaaug

SEQ ID NO: 1609846 - RNA, 19 nt, Homo sapiens
  misc_RNA (1)...(19): siRNA sense strand
ggagaaauuuaugaugagu

SEQ ID NO: 1609847 - RNA, 19 nt, Homo sapiens
  misc_RNA (1)...(19): siRNA sense strand
uaugccagcucugagaaua

SEQ ID NO: 1609848 - RNA, 19 nt, Homo sapiens
  misc_RNA (1)...(19): siRNA sense strand
gcuggaaagcuaugacaaa

SEQ ID NO: 1609849 - RNA, 19 nt, Homo sapiens
  misc_RNA (1)...(19): siRNA sense strand
aaagaugaacggagaaaga

SEQ ID NO: 1609850 - RNA, 19 nt, Homo sapiens
  misc_RNA (1)...(19): siRNA sense strand
cacauaaagcguccaauga

SEQ ID NO: 1609851 - RNA, 19 nt, Homo sapiens
  misc_RNA (1)...(19): siRNA sense strand
ggcaggaaaugcggcagua

SEQ ID NO: 1609852 - RNA, 19 nt, Homo sapiens
  misc_RNA (1)...(19): siRNA sense strand
gcaacaggcggcaggaaau

SEQ ID NO: 1609853 - RNA, 19 nt, Homo sapiens
  misc_RNA (1)...(19): siRNA sense strand
agccagaguuagcacaaua

SEQ ID NO: 1609854 - RNA, 19 nt, Homo sapiens
  misc_RNA (1)...(19): siRNA sense strand
uggaagugcuggagucuca

SEQ ID NO: 1609855 - RNA, 19 nt, Homo sapiens
  misc_RNA (1)...(19): siRNA sense strand
aaauuuagccaugcaauga

SEQ ID NO: 1609856 - RNA, 19 nt, Homo sapiens
  misc_RNA (1)...(19): siRNA sense strand
uagcacaauagguuacuua

SEQ ID NO: 1609857 - RNA, 19 nt, Homo sapiens
  misc_RNA (1)...(19): siRNA sense strand
agaguuagcacaauagguu

SEQ ID NO: 1609858 - RNA, 19 nt, Homo sapiens
  misc_RNA (1)...(19): siRNA sense strand
gggaacaacaggugcuuga

SEQ ID NO: 1609859 - RNA, 19 nt, Homo sapiens
  misc_RNA (1)...(19): siRNA sense strand
acauaaagcguccaaugaa

SEQ ID NO: 1609860 - RNA, 19 nt, Homo sapiens
  misc_RNA (1)...(19): siRNA sense strand
gcacuuacggugugaaagg

SEQ ID NO: 1609861 - RNA, 19 nt, Homo sapiens
  misc_RNA (1)...(19): siRNA sense strand
ugauccagauguagauuau

SEQ ID NO: 1609862 - RNA, 19 nt, Homo sapiens
  misc_RNA (1)...(19): siRNA sense strand
ggaagguggcuguugugaa

SEQ ID NO: 1609863 - RNA, 19 nt, Homo sapiens
  misc_RNA (1)...(19): siRNA sense strand
ccacauaucaaagaagaga

SEQ ID NO: 1609864 - RNA, 19 nt, Homo sapiens
  misc_RNA (1)...(19): siRNA sense strand
agcagcaccuggagaagua

SEQ ID NO: 1609865 - RNA, 19 nt, Homo sapiens
  misc_RNA (1)...(19): siRNA sense strand
gcaguuaaacagaaugaag

SEQ ID NO: 1609866 - RNA, 19 nt, Homo sapiens
  misc_RNA (1)...(19): siRNA sense strand
caauaacugccgaacagaa

SEQ ID NO: 1609867 - RNA, 19 nt, Homo sapiens
  misc_RNA (1)...(19): siRNA sense strand
gaguuagcacaauagguua

SEQ ID NO: 1609868 - RNA, 19 nt, Homo sapiens
  misc_RNA (1)...(19): siRNA sense strand
cuucaagccuuuccugaca

SEQ ID NO: 1609869 - RNA, 19 nt, Homo sapiens
  misc_RNA (1)...(19): siRNA sense strand
ucucagagucaagaauuua

SEQ ID NO: 1609870 - RNA, 19 nt, Homo sapiens
  misc_RNA (1)...(19): siRNA sense strand
cuagagaaacagccauauu

SEQ ID NO: 1609871 - RNA, 19 nt, Homo sapiens
  misc_RNA (1)...(19): siRNA sense strand
gaaaggagaggagccacau

SEQ ID NO: 1609872 - RNA, 19 nt, Homo sapiens
  misc_RNA (1)...(19): siRNA sense strand
agagaaacagccauauuau

SEQ ID NO: 1609873 - RNA, 19 nt, Homo sapiens
  misc_RNA (1)...(19): siRNA sense strand
ugaauagucugggucucaa

SEQ ID NO: 1609874 - RNA, 19 nt, Homo sapiens
  misc_RNA (1)...(19): siRNA sense strand
uaugacaaaccuagagaaa

SEQ ID NO: 1609875 - RNA, 19 nt, Homo sapiens
  misc_RNA (1)...(19): siRNA sense strand
gauggcaaaucacccacau

SEQ ID NO: 1609876 - RNA, 19 nt, Homo sapiens
  misc_RNA (1)...(19): siRNA sense strand
ugccagcucugagaauaaa

SEQ ID NO: 1609877 - RNA, 19 nt, Homo sapiens
  misc_RNA (1)...(19): siRNA sense strand
gagcacuuacggugugaaa

SEQ ID NO: 1609878 - RNA, 19 nt, Homo sapiens
  misc_RNA (1)...(19): siRNA sense strand
ggaaaugcggcaguacuuc

SEQ ID NO: 1609879 - RNA, 19 nt, Homo sapiens
  misc_RNA (1)...(19): siRNA sense strand
augcacaacuccaacauca

SEQ ID NO: 1609880 - RNA, 19 nt, Homo sapiens
  misc_RNA (1)...(19): siRNA sense strand
caccaaggcaauccaagaa

SEQ ID NO: 1609881 - RNA, 19 nt, Homo sapiens
  misc_RNA (1)...(19): siRNA sense strand
aauaacugccgaacagaaa

SEQ ID NO: 1609882 - RNA, 19 nt, Homo sapiens
  misc_RNA (1)...(19): siRNA sense strand
gaagugcuggagucucaga

SEQ ID NO: 1609883 - RNA, 19 nt, Homo sapiens
  misc_RNA (1)...(19): siRNA sense strand
caguuaaacagaaugaaga

SEQ ID NO: 1609884 - RNA, 19 nt, Homo sapiens
  misc_RNA (1)...(19): siRNA sense strand
caacaggcggcaggaaaug

SEQ ID NO: 1609885 - RNA, 19 nt, Homo sapiens
  misc_RNA (1)...(19): siRNA sense strand
uggcaaaucacccacauca

SEQ ID NO: 1609886 - RNA, 19 nt, Homo sapiens
  misc_RNA (1)...(19): siRNA sense strand
ucaagccuuuccugacaug

SEQ ID NO: 1609887 - RNA, 19 nt, Homo sapiens
  misc_RNA (1)...(19): siRNA sense strand
gaggacaucaauggagaaa

SEQ ID NO: 1609888 - RNA, 19 nt, Homo sapiens
  misc_RNA (1)...(19): siRNA sense strand
ucaccaaggcaauccaaga

SEQ ID NO: 1609889 - RNA, 19 nt, Homo sapiens
  misc_RNA (1)...(19): siRNA sense strand
agccacauaucaaagaaga

SEQ ID NO: 1609890 - RNA, 19 nt, Homo sapiens
  misc_RNA (1)...(19): siRNA sense strand
ccacugcugguguugugua

SEQ ID NO: 1609891 - RNA, 19 nt, Homo sapiens
  misc_RNA (1)...(19): siRNA sense strand
aauagucugggucucaaua

SEQ ID NO: 1609892 - RNA, 19 nt, Homo sapiens
  misc_RNA (1)...(19): siRNA sense strand
guacgacgaggaagaggau

SEQ ID NO: 1609893 - RNA, 19 nt, Homo sapiens
  misc_RNA (1)...(19): siRNA sense strand
gacaucaauggagaaauuu

SEQ ID NO: 1609894 - RNA, 19 nt, Homo sapiens
  misc_RNA (1)...(19): siRNA sense strand
gcuaugacaaaccuagaga

SEQ ID NO: 1609895 - RNA, 19 nt, Homo sapiens
  misc_RNA (1)...(19): siRNA sense strand
gucucagagucaagaauuu

SEQ ID NO: 1609896 - RNA, 19 nt, Homo sapiens
  misc_RNA (1)...(19): siRNA sense strand
cucaauaacugccgaacag

SEQ ID NO: 1609897 - RNA, 19 nt, Homo sapiens
  misc_RNA (1)...(19): siRNA sense strand
aagaagcucggcaaaugaa

SEQ ID NO: 1609898 - RNA, 19 nt, Homo sapiens
  misc_RNA (1)...(19): siRNA sense strand
agaggagccacauaucaaa

SEQ ID NO: 1609899 - RNA, 19 nt, Homo sapiens
  misc_RNA (1)...(19): siRNA sense strand
ugaauacaaggcaaucaug

SEQ ID NO: 1609900 - RNA, 19 nt, Homo sapiens
  misc_RNA (1)...(19): siRNA sense strand
auugggaucucgcuggaaa

SEQ ID NO: 1609901 - RNA, 19 nt, Homo sapiens
  misc_RNA (1)...(19): siRNA sense strand
auaaagcguccaaugaaug

SEQ ID NO: 1609902 - RNA, 19 nt, Homo sapiens
  misc_RNA (1)...(19): siRNA sense strand
ccauaugccagcucugaga

SEQ ID NO: 1609903 - RNA, 19 nt, Homo sapiens
  misc_RNA (1)...(19): siRNA sense strand
aaggagaggagccacauau

SEQ ID NO: 1609904 - RNA, 19 nt, Homo sapiens
  misc_RNA (1)...(19): siRNA sense strand
gugaauagucugggucuca

SEQ ID NO: 1609905 - RNA, 19 nt, Homo sapiens
  misc_RNA (1)...(19): siRNA sense strand
gcuggagucucagagucaa

SEQ ID NO: 1609906 - RNA, 19 nt, Homo sapiens
  misc_RNA (1)...(19): siRNA sense strand
gaaucccgagggcguggua

SEQ ID NO: 1609907 - RNA, 19 nt, Homo sapiens
  misc_RNA (1)...(19): siRNA sense strand
gauacaggccgaggacauc

SEQ ID NO: 1609908 - RNA, 19 nt, Homo sapiens
  misc_RNA (1)...(19): siRNA sense strand
ucacccaccucuccccaua

SEQ ID NO: 1609909 - RNA, 19 nt, Homo sapiens
  misc_RNA (1)...(19): siRNA sense strand
cuaaagaugaacggagaaa

SEQ ID NO: 1609910 - RNA, 19 nt, Homo sapiens
  misc_RNA (1)...(19): siRNA sense strand
uggagaaauuuaugaugag

SEQ ID NO: 1609911 - RNA, 19 nt, Homo sapiens
  misc_RNA (1)...(19): siRNA sense strand
gaggagcaagcccgucuca

SEQ ID NO: 1609912 - RNA, 19 nt, Homo sapiens
  misc_RNA (1)...(19): siRNA sense strand
gcaaaugaaggagcaacuc

SEQ ID NO: 1609913 - RNA, 19 nt, Homo sapiens
  misc_RNA (1)...(19): siRNA sense strand
aaaggagaggagccacaua

SEQ ID NO: 1609914 - RNA, 19 nt, Homo sapiens
  misc_RNA (1)...(19): siRNA sense strand
ggacaucaauggagaaauu

SEQ ID NO: 1609915 - RNA, 19 nt, Homo sapiens
  misc_RNA (1)...(19): siRNA sense strand
gaagguggcuguugugaau

SEQ ID NO: 1609916 - RNA, 19 nt, Homo sapiens
  misc_RNA (1)...(19): siRNA sense strand
ccaagaagcucggcaaaug

SEQ ID NO: 1609917 - RNA, 19 nt, Homo sapiens
  misc_RNA (1)...(19): siRNA sense strand
gaaguacccugacuauaag

SEQ ID NO: 1609918 - RNA, 19 nt, Homo sapiens
  misc_RNA (1)...(19): siRNA sense strand
ugacaaaccuagagaaaca

SEQ ID NO: 1609919 - RNA, 19 nt, Homo sapiens
  misc_RNA (1)...(19): siRNA sense strand
uagagaaacagccauauua

SEQ ID NO: 1609920 - RNA, 19 nt, Homo sapiens
  misc_RNA (1)...(19): siRNA sense strand
agaaguacccugacuauaa

SEQ ID NO: 1609921 - RNA, 19 nt, Homo sapiens
  misc_RNA (1)...(19): siRNA sense strand
caagaccucugauggcaaa

SEQ ID NO: 1609922 - RNA, 19 nt, Homo sapiens
  misc_RNA (1)...(19): siRNA sense strand
ggaucucgcuggaaagcua

SEQ ID NO: 1609923 - RNA, 19 nt, Homo sapiens
  misc_RNA (1)...(19): siRNA sense strand
aaacaacacuggagagucu

SEQ ID NO: 1609924 - RNA, 19 nt, Homo sapiens
  misc_RNA (1)...(19): siRNA sense strand
gaacaacaggugcuugaug

SEQ ID NO: 1609925 - RNA, 19 nt, Homo sapiens
  misc_RNA (1)...(19): siRNA sense strand
gcaagcagcaccuggagaa

SEQ ID NO: 1609926 - RNA, 19 nt, Homo sapiens
  misc_RNA (1)...(19): siRNA sense strand
uaaacagaaugaagaagga

SEQ ID NO: 1609927 - RNA, 19 nt, Homo sapiens
  misc_RNA (1)...(19): siRNA sense strand
gaguggagauucugaugga

SEQ ID NO: 1609928 - RNA, 19 nt, Homo sapiens
  misc_RNA (1)...(19): siRNA sense strand
ggaaagcuaugacaaaccu

SEQ ID NO: 1609929 - RNA, 19 nt, Homo sapiens
  misc_RNA (1)...(19): siRNA sense strand
cauaaagcguccaaugaau

SEQ ID NO: 1609930 - RNA, 19 nt, Homo sapiens
  misc_RNA (1)...(19): siRNA sense strand
gcacaauagguuacuuaaa

SEQ ID NO: 1609931 - RNA, 19 nt, Homo sapiens
  misc_RNA (1)...(19): siRNA sense strand
gagaggagccacauaucaa

SEQ ID NO: 1609932 - RNA, 19 nt, Homo sapiens
  misc_RNA (1)...(19): siRNA sense strand
ggagaaguacccugacuau

SEQ ID NO: 1609933 - RNA, 19 nt, Homo sapiens
  misc_RNA (1)...(19): siRNA sense strand
ggugugggcuaaagaugaa

SEQ ID NO: 1609934 - RNA, 19 nt, Homo sapiens
  misc_RNA (1)...(19): siRNA sense strand
gcacagccacugaaccuau

SEQ ID NO: 1609935 - RNA, 19 nt, Homo sapiens
  misc_RNA (1)...(19): siRNA sense strand
ggagaggagccacauauca

SEQ ID NO: 1609936 - RNA, 19 nt, Homo sapiens
  misc_RNA (1)...(19): siRNA sense strand
ggagccacauaucaaagaa

SEQ ID NO: 1609937 - RNA, 19 nt, Homo sapiens
  misc_RNA (1)...(19): siRNA sense strand
gcaaugaaccccacauaaa

SEQ ID NO: 1609938 - RNA, 19 nt, Homo sapiens
  misc_RNA (1)...(19): siRNA sense strand
cggcaguacuucaauguug

SEQ ID NO: 1609939 - RNA, 19 nt, Homo sapiens
  misc_RNA (1)...(19): siRNA sense strand
gaaaugcggcaguacuuca

SEQ ID NO: 1609940 - RNA, 19 nt, Homo sapiens
  misc_RNA (1)...(19): siRNA sense strand
caagaagcucggcaaauga

SEQ ID NO: 1609941 - RNA, 19 nt, Homo sapiens
  misc_RNA (1)...(19): siRNA sense strand
gagccugggaugccuguua

SEQ ID NO: 1609942 - RNA, 19 nt, Homo sapiens
  misc_RNA (1)...(19): siRNA sense strand
caacaucagcaagauauug

SEQ ID NO: 1609943 - RNA, 19 nt, Homo sapiens
  misc_RNA (1)...(19): siRNA sense strand
gcgcauuggugaauacaag

SEQ ID NO: 1609944 - RNA, 19 nt, Homo sapiens
  misc_RNA (1)...(19): siRNA sense strand
gagaaguacccugacuaua

SEQ ID NO: 1609945 - RNA, 19 nt, Homo sapiens
  misc_RNA (1)...(19): siRNA sense strand
ccacauaaagcguccaaug

SEQ ID NO: 1609946 - RNA, 19 nt, Homo sapiens
  misc_RNA (1)...(19): siRNA sense strand
ggagaaauuuaugaugagu

SEQ ID NO: 1609947 - RNA, 19 nt, Homo sapiens
  misc_RNA (1)...(19): siRNA sense strand
uaugccagcucugagaaua

SEQ ID NO: 1609948 - RNA, 19 nt, Homo sapiens
  misc_RNA (1)...(19): siRNA sense strand
gcuggaaagcuaugacaaa

SEQ ID NO: 1609949 - RNA, 19 nt, Homo sapiens
  misc_RNA (1)...(19): siRNA sense strand
aaagaugaacggagaaaga

SEQ ID NO: 1609950 - RNA, 19 nt, Homo sapiens
  misc_RNA (1)...(19): siRNA sense strand
cacauaaagcguccaauga

SEQ ID NO: 1609951 - RNA, 19 nt, Homo sapiens
  misc_RNA (1)...(19): siRNA sense strand
ggcaggaaaugcggcagua

SEQ ID NO: 1609952 - RNA, 19 nt, Homo sapiens
  misc_RNA (1)...(19): siRNA sense strand
gcaacaggcggcaggaaau

SEQ ID NO: 1609953 - RNA, 19 nt, Homo sapiens
  misc_RNA (1)...(19): siRNA sense strand
agccagaguuagcacaaua

SEQ ID NO: 1609954 - RNA, 19 nt, Homo sapiens
  misc_RNA (1)...(19): siRNA sense strand
uggaagugcuggagucuca

SEQ ID NO: 1609955 - RNA, 19 nt, Homo sapiens
  misc_RNA (1)...(19): siRNA sense strand
aaauuuagccaugcaauga

SEQ ID NO: 1609956 - RNA, 19 nt, Homo sapiens
  misc_RNA (1)...(19): siRNA sense strand
uagcacaauagguuacuua

SEQ ID NO: 1609957 - RNA, 19 nt, Homo sapiens
  misc_RNA (1)...(19): siRNA sense strand
agaguuagcacaauagguu

SEQ ID NO: 1609958 - RNA, 19 nt, Homo sapiens
  misc_RNA (1)...(19): siRNA sense strand
gggaacaacaggugcuuga

SEQ ID NO: 1609959 - RNA, 19 nt, Homo sapiens
  misc_RNA (1)...(19): siRNA sense strand
acauaaagcguccaaugaa

SEQ ID NO: 1609960 - RNA, 19 nt, Homo sapiens
  misc_RNA (1)...(19): siRNA sense strand
gcacuuacggugugaaagg

SEQ ID NO: 1609961 - RNA, 19 nt, Homo sapiens
  misc_RNA (1)...(19): siRNA sense strand
ugauccagauguagauuau

SEQ ID NO: 1609962 - RNA, 19 nt, Homo sapiens
  misc_RNA (1)...(19): siRNA sense strand
ggaagguggcuguugugaa

SEQ ID NO: 1609963 - RNA, 19 nt, Homo sapiens
  misc_RNA (1)...(19): siRNA sense strand
ccacauaucaaagaagaga

SEQ ID NO: 1609964 - RNA, 19 nt, Homo sapiens
  misc_RNA (1)...(19): siRNA sense strand
agcagcaccuggagaagua

SEQ ID NO: 1609965 - RNA, 19 nt, Homo sapiens
  misc_RNA (1)...(19): siRNA sense strand
gcaguuaaacagaaugaag

SEQ ID NO: 1609966 - RNA, 19 nt, Homo sapiens
  misc_RNA (1)...(19): siRNA sense strand
caauaacugccgaacagaa

SEQ ID NO: 1609967 - RNA, 19 nt, Homo sapiens
  misc_RNA (1)...(19): siRNA sense strand
gaguuagcacaauagguua

SEQ ID NO: 1609968 - RNA, 19 nt, Homo sapiens
  misc_RNA (1)...(19): siRNA sense strand
cuucaagccuuuccugaca

SEQ ID NO: 1609969 - RNA, 19 nt, Homo sapiens
  misc_RNA (1)...(19): siRNA sense strand
ucucagagucaagaauuua

SEQ ID NO: 1609970 - RNA, 19 nt, Homo sapiens
  misc_RNA (1)...(19): siRNA sense strand
cuagagaaacagccauauu

SEQ ID NO: 1609971 - RNA, 19 nt, Homo sapiens
  misc_RNA (1)...(19): siRNA sense strand
gaaaggagaggagccacau

SEQ ID NO: 1609972 - RNA, 19 nt, Homo sapiens
  misc_RNA (1)...(19): siRNA sense strand
agagaaacagccauauuau

SEQ ID NO: 1609973 - RNA, 19 nt, Homo sapiens
  misc_RNA (1)...(19): siRNA sense strand
ugaauagucugggucucaa

SEQ ID NO: 1609974 - RNA, 19 nt, Homo sapiens
  misc_RNA (1)...(19): siRNA sense strand
uaugacaaaccuagagaaa

SEQ ID NO: 1609975 - RNA, 19 nt, Homo sapiens
  misc_RNA (1)...(19): siRNA sense strand
gauggcaaaucacccacau

SEQ ID NO: 1609976 - RNA, 19 nt, Homo sapiens
  misc_RNA (1)...(19): siRNA sense strand
ugccagcucugagaauaaa

SEQ ID NO: 1609977 - RNA, 19 nt, Homo sapiens
  misc_RNA (1)...(19): siRNA sense strand
gagcacuuacggugugaaa

SEQ ID NO: 1609978 - RNA, 19 nt, Homo sapiens
  misc_RNA (1)...(19): siRNA sense strand
ggaaaugcggcaguacuuc

SEQ ID NO: 1609979 - RNA, 19 nt, Homo sapiens
  misc_RNA (1)...(19): siRNA sense strand
augcacaacuccaacauca

SEQ ID NO: 1609980 - RNA, 19 nt, Homo sapiens
  misc_RNA (1)...(19): siRNA sense strand
caccaaggcaauccaagaa

SEQ ID NO: 1609981 - RNA, 19 nt, Homo sapiens
  misc_RNA (1)...(19): siRNA sense strand
aauaacugccgaacagaaa

SEQ ID NO: 1609982 - RNA, 19 nt, Homo sapiens
  misc_RNA (1)...(19): siRNA sense strand
gaagugcuggagucucaga

SEQ ID NO: 1609983 - RNA, 19 nt, Homo sapiens
  misc_RNA (1)...(19): siRNA sense strand
caguuaaacagaaugaaga

SEQ ID NO: 1609984 - RNA, 19 nt, Homo sapiens
  misc_RNA (1)...(19): siRNA sense strand
caacaggcggcaggaaaug

SEQ ID NO: 1609985 - RNA, 19 nt, Homo sapiens
  misc_RNA (1)...(19): siRNA sense strand
uggcaaaucacccacauca

SEQ ID NO: 1609986 - RNA, 19 nt, Homo sapiens
  misc_RNA (1)...(19): siRNA sense strand
ucaagccuuuccugacaug

SEQ ID NO: 1609987 - RNA, 19 nt, Homo sapiens
  misc_RNA (1)...(19): siRNA sense strand
gaggacaucaauggagaaa

SEQ ID NO: 1609988 - RNA, 19 nt, Homo sapiens
  misc_RNA (1)...(19): siRNA sense strand
ucaccaaggcaauccaaga

SEQ ID NO: 1609989 - RNA, 19 nt, Homo sapiens
  misc_RNA (1)...(19): siRNA sense strand
agccacauaucaaagaaga

SEQ ID NO: 1609990 - RNA, 19 nt, Homo sapiens
  misc_RNA (1)...(19): siRNA sense strand
ccacugcugguguugugua

SEQ ID NO: 1609991 - RNA, 19 nt, Homo sapiens
  misc_RNA (1)...(19): siRNA sense strand
aauagucugggucucaaua

SEQ ID NO: 1609992 - RNA, 19 nt, Homo sapiens
  misc_RNA (1)...(19): siRNA sense strand
guacgacgaggaagaggau

SEQ ID NO: 1609993 - RNA, 19 nt, Homo sapiens
  misc_RNA (1)...(19): siRNA sense strand
gacaucaauggagaaauuu

SEQ ID NO: 1609994 - RNA, 19 nt, Homo sapiens
  misc_RNA (1)...(19): siRNA sense strand
gcuaugacaaaccuagaga

SEQ ID NO: 1609995 - RNA, 19 nt, Homo sapiens
  misc_RNA (1)...(19): siRNA sense strand
gucucagagucaagaauuu

SEQ ID NO: 1609996 - RNA, 19 nt, Homo sapiens
  misc_RNA (1)...(19): siRNA sense strand
cucaauaacugccgaacag

SEQ ID NO: 1609997 - RNA, 19 nt, Homo sapiens
  misc_RNA (1)...(19): siRNA sense strand
aagaagcucggcaaaugaa

SEQ ID NO: 1609998 - RNA, 19 nt, Homo sapiens
  misc_RNA (1)...(19): siRNA sense strand
agaggagccacauaucaaa

SEQ ID NO: 1609999 - RNA, 19 nt, Homo sapiens
  misc_RNA (1)...(19): siRNA sense strand
ugaauacaaggcaaucaug

SEQ ID NO: 1610000 - RNA, 19 nt, Homo sapiens
  misc_RNA (1)...(19): siRNA sense strand
auugggaucucgcuggaaa

SEQ ID NO: 1610001 - RNA, 19 nt, Homo sapiens
  misc_RNA (1)...(19): siRNA sense strand
auaaagcguccaaugaaug

SEQ ID NO: 1610002 - RNA, 19 nt, Homo sapiens
  misc_RNA (1)...(19): siRNA sense strand
ccauaugccagcucugaga

SEQ ID NO: 1610003 - RNA, 19 nt, Homo sapiens
  misc_RNA (1)...(19): siRNA sense strand
aaggagaggagccacauau

SEQ ID NO: 1610004 - RNA, 19 nt, Homo sapiens
  misc_RNA (1)...(19): siRNA sense strand
gugaauagucugggucuca

SEQ ID NO: 1610005 - RNA, 19 nt, Homo sapiens
  misc_RNA (1)...(19): siRNA sense strand
gcuggagucucagagucaa

SEQ ID NO: 1610006 - RNA, 19 nt, Homo sapiens
  misc_RNA (1)...(19): siRNA sense strand
gaaucccgagggcguggua

SEQ ID NO: 1610007 - RNA, 19 nt, Homo sapiens
  misc_RNA (1)...(19): siRNA sense strand
gauacaggccgaggacauc

SEQ ID NO: 1610008 - RNA, 19 nt, Homo sapiens
  misc_RNA (1)...(19): siRNA sense strand
ucacccaccucuccccaua

SEQ ID NO: 1610009 - RNA, 19 nt, Homo sapiens
  misc_RNA (1)...(19): siRNA sense strand
cuaaagaugaacggagaaa

SEQ ID NO: 1610010 - RNA, 19 nt, Homo sapiens
  misc_RNA (1)...(19): siRNA sense strand
uggagaaauuuaugaugag

SEQ ID NO: 1610011 - RNA, 19 nt, Homo sapiens
  misc_RNA (1)...(19): siRNA sense strand
gaggagcaagcccgucuca

SEQ ID NO: 1610012 - RNA, 19 nt, Homo sapiens
  misc_RNA (1)...(19): siRNA sense strand
gcaaaugaaggagcaacuc

SEQ ID NO: 1610013 - RNA, 19 nt, Homo sapiens
  misc_RNA (1)...(19): siRNA sense strand
aaaggagaggagccacaua

SEQ ID NO: 1610014 - RNA, 19 nt, Homo sapiens
  misc_RNA (1)...(19): siRNA sense strand
gaugaagacuggcccauuu

SEQ ID NO: 1610015 - RNA, 19 nt, Homo sapiens
  misc_RNA (1)...(19): siRNA sense strand
gaguguauccuguuuauua

SEQ ID NO: 1610016 - RNA, 19 nt, Homo sapiens
  misc_RNA (1)...(19): siRNA sense strand
ccggguggaugaccaaaua

SEQ ID NO: 1610017 - RNA, 19 nt, Homo sapiens
  misc_RNA (1)...(19): siRNA sense strand
ccagacacuuuguggauga

SEQ ID NO: 1610018 - RNA, 19 nt, Homo sapiens
  misc_RNA (1)...(19): siRNA sense strand
ggucucauccgcauguaua

SEQ ID NO: 1610019 - RNA, 19 nt, Homo sapiens
  misc_RNA (1)...(19): siRNA sense strand
ugccugagguggcuguuua

SEQ ID NO: 1610020 - RNA, 19 nt, Homo sapiens
  misc_RNA (1)...(19): siRNA sense strand
ccacaaggacuacauguuc

SEQ ID NO: 1610021 - RNA, 19 nt, Homo sapiens
  misc_RNA (1)...(19): siRNA sense strand
ggcauacgcugacuacauc

SEQ ID NO: 1610022 - RNA, 19 nt, Homo sapiens
  misc_RNA (1)...(19): siRNA sense strand
gcaguucgcagcugauaga

SEQ ID NO: 1610023 - RNA, 19 nt, Homo sapiens
  misc_RNA (1)...(19): siRNA sense strand
gagaaggccgugaaugaga

SEQ ID NO: 1610024 - RNA, 19 nt, Homo sapiens
  misc_RNA (1)...(19): siRNA sense strand
ccgagugccuggagaaguu

SEQ ID NO: 1610025 - RNA, 19 nt, Homo sapiens
  misc_RNA (1)...(19): siRNA sense strand
agaaggccgugaaugagaa

SEQ ID NO: 1610026 - RNA, 19 nt, Homo sapiens
  misc_RNA (1)...(19): siRNA sense strand
ugaaugagaaccacaagga

SEQ ID NO: 1610027 - RNA, 19 nt, Homo sapiens
  misc_RNA (1)...(19): siRNA sense strand
gaaccacaaggacuacaug

SEQ ID NO: 1610028 - RNA, 19 nt, Homo sapiens
  misc_RNA (1)...(19): siRNA sense strand
cuggagaaguucccuguga

SEQ ID NO: 1610029 - RNA, 19 nt, Homo sapiens
  misc_RNA (1)...(19): siRNA sense strand
gcugauagaccacccauac

SEQ ID NO: 1610030 - RNA, 19 nt, Homo sapiens
  misc_RNA (1)...(19): siRNA sense strand
uggaguguauccuguuuau

SEQ ID NO: 1610031 - RNA, 19 nt, Homo sapiens
  misc_RNA (1)...(19): siRNA sense strand
ccaaccagcuguggaacau

SEQ ID NO: 1610032 - RNA, 19 nt, Homo sapiens
  misc_RNA (1)...(19): siRNA sense strand
ggaaacuccagaaaacaua

SEQ ID NO: 1610033 - RNA, 19 nt, Homo sapiens
  misc_RNA (1)...(19): siRNA sense strand
ggagaaguucccugugauc

SEQ ID NO: 1610034 - RNA, 19 nt, Homo sapiens
  misc_RNA (1)...(19): siRNA sense strand
ccuggaguguauccuguuu

SEQ ID NO: 1610035 - RNA, 19 nt, Homo sapiens
  misc_RNA (1)...(19): siRNA sense strand
gacacuuuguggaugagaa

SEQ ID NO: 1610036 - RNA, 19 nt, Homo sapiens
  misc_RNA (1)...(19): siRNA sense strand
guggaugaccaaauagcua

SEQ ID NO: 1610037 - RNA, 19 nt, Homo sapiens
  misc_RNA (1)...(19): siRNA sense strand
gggcaguucgcagcugaua

SEQ ID NO: 1610038 - RNA, 19 nt, Homo sapiens
  misc_RNA (1)...(19): siRNA sense strand
aaccagcuguggaacauca

SEQ ID NO: 1610039 - RNA, 19 nt, Homo sapiens
  misc_RNA (1)...(19): siRNA sense strand
acauguuccuggaguguau

SEQ ID NO: 1610040 - RNA, 19 nt, Homo sapiens
  misc_RNA (1)...(19): siRNA sense strand
ggaacuccacgcgcauuga

SEQ ID NO: 1610041 - RNA, 19 nt, Homo sapiens
  misc_RNA (1)...(19): siRNA sense strand
gaagacuggcccauuugca

SEQ ID NO: 1610042 - RNA, 19 nt, Homo sapiens
  misc_RNA (1)...(19): siRNA sense strand
gcccagacacuuuguggau

SEQ ID NO: 1610043 - RNA, 19 nt, Homo sapiens
  misc_RNA (1)...(19): siRNA sense strand
augagaaggccgugaauga

SEQ ID NO: 1610044 - RNA, 19 nt, Homo sapiens
  misc_RNA (1)...(19): siRNA sense strand
gaugagaaggccgugaaug

SEQ ID NO: 1610045 - RNA, 19 nt, Homo sapiens
  misc_RNA (1)...(19): siRNA sense strand
aagcugaccuucgaguaca

SEQ ID NO: 1610046 - RNA, 19 nt, Homo sapiens
  misc_RNA (1)...(19): siRNA sense strand
gguguucaaucgguaccuu

SEQ ID NO: 1610047 - RNA, 19 nt, Homo sapiens
  misc_RNA (1)...(19): siRNA sense strand
uggagaaguucccugugau

SEQ ID NO: 1610048 - RNA, 19 nt, Homo sapiens
  misc_RNA (1)...(19): siRNA sense strand
gaacuccacgcgcauugac

SEQ ID NO: 1610049 - RNA, 19 nt, Homo sapiens
  misc_RNA (1)...(19): siRNA sense strand
uagcuauugucuucaaggu

SEQ ID NO: 1610050 - RNA, 19 nt, Homo sapiens
  misc_RNA (1)...(19): siRNA sense strand
gauucauccuuacccucaa

SEQ ID NO: 1610051 - RNA, 19 nt, Homo sapiens
  misc_RNA (1)...(19): siRNA sense strand
gcuuuccucugcugucucu

SEQ ID NO: 1610052 - RNA, 19 nt, Homo sapiens
  misc_RNA (1)...(19): siRNA sense strand
ugcugucucugcaagauug

SEQ ID NO: 1610053 - RNA, 19 nt, Homo sapiens
  misc_RNA (1)...(19): siRNA sense strand
gggaacuccacgcgcauug

SEQ ID NO: 1610054 - RNA, 19 nt, Homo sapiens
  misc_RNA (1)...(19): siRNA sense strand
aaagugaaccagggucuca

SEQ ID NO: 1610055 - RNA, 19 nt, Homo sapiens
  misc_RNA (1)...(19): siRNA sense strand
ggaguguauccuguuuauu

SEQ ID NO: 1610056 - RNA, 19 nt, Homo sapiens
  misc_RNA (1)...(19): siRNA sense strand
gaugaagacuggcccauuu

SEQ ID NO: 1610057 - RNA, 19 nt, Homo sapiens
  misc_RNA (1)...(19): siRNA sense strand
gaguguauccuguuuauua

SEQ ID NO: 1610058 - RNA, 19 nt, Homo sapiens
  misc_RNA (1)...(19): siRNA sense strand
ccggguggaugaccaaaua

SEQ ID NO: 1610059 - RNA, 19 nt, Homo sapiens
  misc_RNA (1)...(19): siRNA sense strand
ccagacacuuuguggauga

SEQ ID NO: 1610060 - RNA, 19 nt, Homo sapiens
  misc_RNA (1)...(19): siRNA sense strand
ggucucauccgcauguaua

SEQ ID NO: 1610061 - RNA, 19 nt, Homo sapiens
  misc_RNA (1)...(19): siRNA sense strand
ugccugagguggcuguuua

SEQ ID NO: 1610062 - RNA, 19 nt, Homo sapiens
  misc_RNA (1)...(19): siRNA sense strand
ccacaaggacuacauguuc

SEQ ID NO: 1610063 - RNA, 19 nt, Homo sapiens
  misc_RNA (1)...(19): siRNA sense strand
ggcauacgcugacuacauc

SEQ ID NO: 1610064 - RNA, 19 nt, Homo sapiens
  misc_RNA (1)...(19): siRNA sense strand
gcaguucgcagcugauaga

SEQ ID NO: 1610065 - RNA, 19 nt, Homo sapiens
  misc_RNA (1)...(19): siRNA sense strand
gagaaggccgugaaugaga

SEQ ID NO: 1610066 - RNA, 19 nt, Homo sapiens
  misc_RNA (1)...(19): siRNA sense strand
ccgagugccuggagaaguu

SEQ ID NO: 1610067 - RNA, 19 nt, Homo sapiens
  misc_RNA (1)...(19): siRNA sense strand
agaaggccgugaaugagaa

SEQ ID NO: 1610068 - RNA, 19 nt, Homo sapiens
  misc_RNA (1)...(19): siRNA sense strand
ugaaugagaaccacaagga

SEQ ID NO: 1610069 - RNA, 19 nt, Homo sapiens
  misc_RNA (1)...(19): siRNA sense strand
gaaccacaaggacuacaug

SEQ ID NO: 1610070 - RNA, 19 nt, Homo sapiens
  misc_RNA (1)...(19): siRNA sense strand
cuggagaaguucccuguga

SEQ ID NO: 1610071 - RNA, 19 nt, Homo sapiens
  misc_RNA (1)...(19): siRNA sense strand
gcugauagaccacccauac

SEQ ID NO: 1610072 - RNA, 19 nt, Homo sapiens
  misc_RNA (1)...(19): siRNA sense strand
uggaguguauccuguuuau

SEQ ID NO: 1610073 - RNA, 19 nt, Homo sapiens
  misc_RNA (1)...(19): siRNA sense strand
ccaaccagcuguggaacau

SEQ ID NO: 1610074 - RNA, 19 nt, Homo sapiens
  misc_RNA (1)...(19): siRNA sense strand
ggaaacuccagaaaacaua

SEQ ID NO: 1610075 - RNA, 19 nt, Homo sapiens
  misc_RNA (1)...(19): siRNA sense strand
ggagaaguucccugugauc

SEQ ID NO: 1610076 - RNA, 19 nt, Homo sapiens
  misc_RNA (1)...(19): siRNA sense strand
ccuggaguguauccuguuu

SEQ ID NO: 1610077 - RNA, 19 nt, Homo sapiens
  misc_RNA (1)...(19): siRNA sense strand
gacacuuuguggaugagaa

SEQ ID NO: 1610078 - RNA, 19 nt, Homo sapiens
  misc_RNA (1)...(19): siRNA sense strand
guggaugaccaaauagcua

SEQ ID NO: 1610079 - RNA, 19 nt, Homo sapiens
  misc_RNA (1)...(19): siRNA sense strand
gggcaguucgcagcugaua

SEQ ID NO: 1610080 - RNA, 19 nt, Homo sapiens
  misc_RNA (1)...(19): siRNA sense strand
aaccagcuguggaacauca

SEQ ID NO: 1610081 - RNA, 19 nt, Homo sapiens
  misc_RNA (1)...(19): siRNA sense strand
acauguuccuggaguguau

SEQ ID NO: 1610082 - RNA, 19 nt, Homo sapiens
  misc_RNA (1)...(19): siRNA sense strand
ggaacuccacgcgcauuga

SEQ ID NO: 1610083 - RNA, 19 nt, Homo sapiens
  misc_RNA (1)...(19): siRNA sense strand
gaagacuggcccauuugca

SEQ ID NO: 1610084 - RNA, 19 nt, Homo sapiens
  misc_RNA (1)...(19): siRNA sense strand
gcccagacacuuuguggau

SEQ ID NO: 1610085 - RNA, 19 nt, Homo sapiens
  misc_RNA (1)...(19): siRNA sense strand
augagaaggccgugaauga

SEQ ID NO: 1610086 - RNA, 19 nt, Homo sapiens
  misc_RNA (1)...(19): siRNA sense strand
gaugagaaggccgugaaug

SEQ ID NO: 1610087 - RNA, 19 nt, Homo sapiens
  misc_RNA (1)...(19): siRNA sense strand
aagcugaccuucgaguaca

SEQ ID NO: 1610088 - RNA, 19 nt, Homo sapiens
  misc_RNA (1)...(19): siRNA sense strand
gguguucaaucgguaccuu

SEQ ID NO: 1610089 - RNA, 19 nt, Homo sapiens
  misc_RNA (1)...(19): siRNA sense strand
uggagaaguucccugugau

SEQ ID NO: 1610090 - RNA, 19 nt, Homo sapiens
  misc_RNA (1)...(19): siRNA sense strand
gaacuccacgcgcauugac

SEQ ID NO: 1610091 - RNA, 19 nt, Homo sapiens
  misc_RNA (1)...(19): siRNA sense strand
uagcuauugucuucaaggu

SEQ ID NO: 1610092 - RNA, 19 nt, Homo sapiens
  misc_RNA (1)...(19): siRNA sense strand
gauucauccuuacccucaa

SEQ ID NO: 1610093 - RNA, 19 nt, Homo sapiens
  misc_RNA (1)...(19): siRNA sense strand
gcuuuccucugcugucucu

SEQ ID NO: 1610094 - RNA, 19 nt, Homo sapiens
  misc_RNA (1)...(19): siRNA sense strand
ugcugucucugcaagauug

SEQ ID NO: 1610095 - RNA, 19 nt, Homo sapiens
  misc_RNA (1)...(19): siRNA sense strand
gggaacuccacgcgcauug

SEQ ID NO: 1610096 - RNA, 19 nt, Homo sapiens
  misc_RNA (1)...(19): siRNA sense strand
aaagugaaccagggucuca

SEQ ID NO: 1610097 - RNA, 19 nt, Homo sapiens
  misc_RNA (1)...(19): siRNA sense strand
ggaguguauccuguuuauu

SEQ ID NO: 1610098 - RNA, 19 nt, Homo sapiens
  misc_RNA (1)...(19): siRNA sense strand
gaugaagacuggcccauuu

SEQ ID NO: 1610099 - RNA, 19 nt, Homo sapiens
  misc_RNA (1)...(19): siRNA sense strand
gaguguauccuguuuauua

SEQ ID NO: 1610100 - RNA, 19 nt, Homo sapiens
  misc_RNA (1)...(19): siRNA sense strand
ccggguggaugaccaaaua

SEQ ID NO: 1610101 - RNA, 19 nt, Homo sapiens
  misc_RNA (1)...(19): siRNA sense strand
ccagacacuuuguggauga

SEQ ID NO: 1610102 - RNA, 19 nt, Homo sapiens
  misc_RNA (1)...(19): siRNA sense strand
ggucucauccgcauguaua

SEQ ID NO: 1610103 - RNA, 19 nt, Homo sapiens
  misc_RNA (1)...(19): siRNA sense strand
ugccugagguggcuguuua

SEQ ID NO: 1610104 - RNA, 19 nt, Homo sapiens
  misc_RNA (1)...(19): siRNA sense strand
ccacaaggacuacauguuc

SEQ ID NO: 1610105 - RNA, 19 nt, Homo sapiens
  misc_RNA (1)...(19): siRNA sense strand
ggcauacgcugacuacauc

SEQ ID NO: 1610106 - RNA, 19 nt, Homo sapiens
  misc_RNA (1)...(19): siRNA sense strand
gcaguucgcagcugauaga

SEQ ID NO: 1610107 - RNA, 19 nt, Homo sapiens
  misc_RNA (1)...(19): siRNA sense strand
gagaaggccgugaaugaga

SEQ ID NO: 1610108 - RNA, 19 nt, Homo sapiens
  misc_RNA (1)...(19): siRNA sense strand
ccgagugccuggagaaguu

SEQ ID NO: 1610109 - RNA, 19 nt, Homo sapiens
  misc_RNA (1)...(19): siRNA sense strand
agaaggccgugaaugagaa

SEQ ID NO: 1610110 - RNA, 19 nt, Homo sapiens
  misc_RNA (1)...(19): siRNA sense strand
ugaaugagaaccacaagga

SEQ ID NO: 1610111 - RNA, 19 nt, Homo sapiens
  misc_RNA (1)...(19): siRNA sense strand
gaaccacaaggacuacaug

SEQ ID NO: 1610112 - RNA, 19 nt, Homo sapiens
  misc_RNA (1)...(19): siRNA sense strand
cuggagaaguucccuguga

SEQ ID NO: 1610113 - RNA, 19 nt, Homo sapiens
  misc_RNA (1)...(19): siRNA sense strand
gcugauagaccacccauac

SEQ ID NO: 1610114 - RNA, 19 nt, Homo sapiens
  misc_RNA (1)...(19): siRNA sense strand
uggaguguauccuguuuau

SEQ ID NO: 1610115 - RNA, 19 nt, Homo sapiens
  misc_RNA (1)...(19): siRNA sense strand
ccaaccagcuguggaacau

SEQ ID NO: 1610116 - RNA, 19 nt, Homo sapiens
  misc_RNA (1)...(19): siRNA sense strand
ggaaacuccagaaaacaua

SEQ ID NO: 1610117 - RNA, 19 nt, Homo sapiens
  misc_RNA (1)...(19): siRNA sense strand
ggagaaguucccugugauc

SEQ ID NO: 1610118 - RNA, 19 nt, Homo sapiens
  misc_RNA (1)...(19): siRNA sense strand
ccuggaguguauccuguuu

SEQ ID NO: 1610119 - RNA, 19 nt, Homo sapiens
  misc_RNA (1)...(19): siRNA sense strand
gacacuuuguggaugagaa

SEQ ID NO: 1610120 - RNA, 19 nt, Homo sapiens
  misc_RNA (1)...(19): siRNA sense strand
guggaugaccaaauagcua

SEQ ID NO: 1610121 - RNA, 19 nt, Homo sapiens
  misc_RNA (1)...(19): siRNA sense strand
gggcaguucgcagcugaua

SEQ ID NO: 1610122 - RNA, 19 nt, Homo sapiens
  misc_RNA (1)...(19): siRNA sense strand
aaccagcuguggaacauca

SEQ ID NO: 1610123 - RNA, 19 nt, Homo sapiens
  misc_RNA (1)...(19): siRNA sense strand
acauguuccuggaguguau

SEQ ID NO: 1610124 - RNA, 19 nt, Homo sapiens
  misc_RNA (1)...(19): siRNA sense strand
ggaacuccacgcgcauuga

SEQ ID NO: 1610125 - RNA, 19 nt, Homo sapiens
  misc_RNA (1)...(19): siRNA sense strand
gaagacuggcccauuugca

SEQ ID NO: 1610126 - RNA, 19 nt, Homo sapiens
  misc_RNA (1)...(19): siRNA sense strand
gcccagacacuuuguggau

SEQ ID NO: 1610127 - RNA, 19 nt, Homo sapiens
  misc_RNA (1)...(19): siRNA sense strand
augagaaggccgugaauga

SEQ ID NO: 1610128 - RNA, 19 nt, Homo sapiens
  misc_RNA (1)...(19): siRNA sense strand
gaugagaaggccgugaaug

SEQ ID NO: 1610129 - RNA, 19 nt, Homo sapiens
  misc_RNA (1)...(19): siRNA sense strand
aagcugaccuucgaguaca

SEQ ID NO: 1610130 - RNA, 19 nt, Homo sapiens
  misc_RNA (1)...(19): siRNA sense strand
gguguucaaucgguaccuu

SEQ ID NO: 1610131 - RNA, 19 nt, Homo sapiens
  misc_RNA (1)...(19): siRNA sense strand
uggagaaguucccugugau

SEQ ID NO: 1610132 - RNA, 19 nt, Homo sapiens
  misc_RNA (1)...(19): siRNA sense strand
gaacuccacgcgcauugac

SEQ ID NO: 1610133 - RNA, 19 nt, Homo sapiens
  misc_RNA (1)...(19): siRNA sense strand
uagcuauugucuucaaggu

SEQ ID NO: 1610134 - RNA, 19 nt, Homo sapiens
  misc_RNA (1)...(19): siRNA sense strand
gauucauccuuacccucaa

SEQ ID NO: 1610135 - RNA, 19 nt, Homo sapiens
  misc_RNA (1)...(19): siRNA sense strand
gcuuuccucugcugucucu

SEQ ID NO: 1610136 - RNA, 19 nt, Homo sapiens
  misc_RNA (1)...(19): siRNA sense strand
ugcugucucugcaagauug

SEQ ID NO: 1610137 - RNA, 19 nt, Homo sapiens
  misc_RNA (1)...(19): siRNA sense strand
gggaacuccacgcgcauug

SEQ ID NO: 1610138 - RNA, 19 nt, Homo sapiens
  misc_RNA (1)...(19): siRNA sense strand
aaagugaaccagggucuca

SEQ ID NO: 1610139 - RNA, 19 nt, Homo sapiens
  misc_RNA (1)...(19): siRNA sense strand
ggaguguauccuguuuauu

SEQ ID NO: 1610140 - RNA, 19 nt, Homo sapiens
  misc_RNA (1)...(19): siRNA sense strand
gaugaagacuggcccauuu

SEQ ID NO: 1610141 - RNA, 19 nt, Homo sapiens
  misc_RNA (1)...(19): siRNA sense strand
gaguguauccuguuuauua

SEQ ID NO: 1610142 - RNA, 19 nt, Homo sapiens
  misc_RNA (1)...(19): siRNA sense strand
ccagacacuuuguggauga

SEQ ID NO: 1610143 - RNA, 19 nt, Homo sapiens
  misc_RNA (1)...(19): siRNA sense strand
ggucucauccgcauguaua

SEQ ID NO: 1610144 - RNA, 19 nt, Homo sapiens
  misc_RNA (1)...(19): siRNA sense strand
ccacaaggacuacauguuc

SEQ ID NO: 1610145 - RNA, 19 nt, Homo sapiens
  misc_RNA (1)...(19): siRNA sense strand
gcaguucgcagcugauaga

SEQ ID NO: 1610146 - RNA, 19 nt, Homo sapiens
  misc_RNA (1)...(19): siRNA sense strand
gagaaggccgugaaugaga

SEQ ID NO: 1610147 - RNA, 19 nt, Homo sapiens
  misc_RNA (1)...(19): siRNA sense strand
ccgagugccuggagaaguu

SEQ ID NO: 1610148 - RNA, 19 nt, Homo sapiens
  misc_RNA (1)...(19): siRNA sense strand
agaaggccgugaaugagaa

SEQ ID NO: 1610149 - RNA, 19 nt, Homo sapiens
  misc_RNA (1)...(19): siRNA sense strand
ugaaugagaaccacaagga

SEQ ID NO: 1610150 - RNA, 19 nt, Homo sapiens
  misc_RNA (1)...(19): siRNA sense strand
gaaccacaaggacuacaug

SEQ ID NO: 1610151 - RNA, 19 nt, Homo sapiens
  misc_RNA (1)...(19): siRNA sense strand
cuggagaaguucccuguga

SEQ ID NO: 1610152 - RNA, 19 nt, Homo sapiens
  misc_RNA (1)...(19): siRNA sense strand
gcugauagaccacccauac

SEQ ID NO: 1610153 - RNA, 19 nt, Homo sapiens
  misc_RNA (1)...(19): siRNA sense strand
uggaguguauccuguuuau

SEQ ID NO: 1610154 - RNA, 19 nt, Homo sapiens
  misc_RNA (1)...(19): siRNA sense strand
ccaaccagcuguggaacau

SEQ ID NO: 1610155 - RNA, 19 nt, Homo sapiens
  misc_RNA (1)...(19): siRNA sense strand
gacacuuuguggaugagaa

SEQ ID NO: 1610156 - RNA, 19 nt, Homo sapiens
  misc_RNA (1)...(19): siRNA sense strand
ggagaaguucccugugauc

SEQ ID NO: 1610157 - RNA, 19 nt, Homo sapiens
  misc_RNA (1)...(19): siRNA sense strand
ggaaacuccagaaaacaua

SEQ ID NO: 1610158 - RNA, 19 nt, Homo sapiens
  misc_RNA (1)...(19): siRNA sense strand
ccuggaguguauccuguuu

SEQ ID NO: 1610159 - RNA, 19 nt, Homo sapiens
  misc_RNA (1)...(19): siRNA sense strand
gggcaguucgcagcugaua

SEQ ID NO: 1610160 - RNA, 19 nt, Homo sapiens
  misc_RNA (1)...(19): siRNA sense strand
aaccagcuguggaacauca

SEQ ID NO: 1610161 - RNA, 19 nt, Homo sapiens
  misc_RNA (1)...(19): siRNA sense strand
acauguuccuggaguguau

SEQ ID NO: 1610162 - RNA, 19 nt, Homo sapiens
  misc_RNA (1)...(19): siRNA sense strand
gcccagacacuuuguggau

SEQ ID NO: 1610163 - RNA, 19 nt, Homo sapiens
  misc_RNA (1)...(19): siRNA sense strand
gaagacuggcccauuugca

SEQ ID NO: 1610164 - RNA, 19 nt, Homo sapiens
  misc_RNA (1)...(19): siRNA sense strand
augagaaggccgugaauga

SEQ ID NO: 1610165 - RNA, 19 nt, Homo sapiens
  misc_RNA (1)...(19): siRNA sense strand
gaugagaaggccgugaaug

SEQ ID NO: 1610166 - RNA, 19 nt, Homo sapiens
  misc_RNA (1)...(19): siRNA sense strand
uggagaaguucccugugau

SEQ ID NO: 1610167 - RNA, 19 nt, Homo sapiens
  misc_RNA (1)...(19): siRNA sense strand
ggaguguauccuguuuauu

SEQ ID NO: 1610168 - RNA, 19 nt, Homo sapiens
  misc_RNA (1)...(19): siRNA sense strand
aaagugaaccagggucuca

SEQ ID NO: 1610169 - RNA, 19 nt, Homo sapiens
  misc_RNA (1)...(19): siRNA sense strand
gaugaagacuggcccauuu

SEQ ID NO: 1610170 - RNA, 19 nt, Homo sapiens
  misc_RNA (1)...(19): siRNA sense strand
gaguguauccuguuuauua

SEQ ID NO: 1610171 - RNA, 19 nt, Homo sapiens
  misc_RNA (1)...(19): siRNA sense strand
ccggguggaugaccaaaua

SEQ ID NO: 1610172 - RNA, 19 nt, Homo sapiens
  misc_RNA (1)...(19): siRNA sense strand
ccagacacuuuguggauga

SEQ ID NO: 1610173 - RNA, 19 nt, Homo sapiens
  misc_RNA (1)...(19): siRNA sense strand
ggucucauccgcauguaua

SEQ ID NO: 1610174 - RNA, 19 nt, Homo sapiens
  misc_RNA (1)...(19): siRNA sense strand
ugccugagguggcuguuua

SEQ ID NO: 1610175 - RNA, 19 nt, Homo sapiens
  misc_RNA (1)...(19): siRNA sense strand
ccacaaggacuacauguuc

SEQ ID NO: 1610176 - RNA, 19 nt, Homo sapiens
  misc_RNA (1)...(19): siRNA sense strand
ggcauacgcugacuacauc

SEQ ID NO: 1610177 - RNA, 19 nt, Homo sapiens
  misc_RNA (1)...(19): siRNA sense strand
gcaguucgcagcugauaga

SEQ ID NO: 1610178 - RNA, 19 nt, Homo sapiens
  misc_RNA (1)...(19): siRNA sense strand
gagaaggccgugaaugaga

SEQ ID NO: 1610179 - RNA, 19 nt, Homo sapiens
  misc_RNA (1)...(19): siRNA sense strand
ccgagugccuggagaaguu

SEQ ID NO: 1610180 - RNA, 19 nt, Homo sapiens
  misc_RNA (1)...(19): siRNA sense strand
agaaggccgugaaugagaa

SEQ ID NO: 1610181 - RNA, 19 nt, Homo sapiens
  misc_RNA (1)...(19): siRNA sense strand
ugaaugagaaccacaagga

SEQ ID NO: 1610182 - RNA, 19 nt, Homo sapiens
  misc_RNA (1)...(19): siRNA sense strand
gaaccacaaggacuacaug

SEQ ID NO: 1610183 - RNA, 19 nt, Homo sapiens
  misc_RNA (1)...(19): siRNA sense strand
cuggagaaguucccuguga

SEQ ID NO: 1610184 - RNA, 19 nt, Homo sapiens
  misc_RNA (1)...(19): siRNA sense strand
gcugauagaccacccauac

SEQ ID NO: 1610185 - RNA, 19 nt, Homo sapiens
  misc_RNA (1)...(19): siRNA sense strand
uggaguguauccuguuuau

SEQ ID NO: 1610186 - RNA, 19 nt, Homo sapiens
  misc_RNA (1)...(19): siRNA sense strand
ccaaccagcuguggaacau

SEQ ID NO: 1610187 - RNA, 19 nt, Homo sapiens
  misc_RNA (1)...(19): siRNA sense strand
ggaaacuccagaaaacaua

SEQ ID NO: 1610188 - RNA, 19 nt, Homo sapiens
  misc_RNA (1)...(19): siRNA sense strand
ggagaaguucccugugauc

SEQ ID NO: 1610189 - RNA, 19 nt, Homo sapiens
  misc_RNA (1)...(19): siRNA sense strand
ccuggaguguauccuguuu

SEQ ID NO: 1610190 - RNA, 19 nt, Homo sapiens
  misc_RNA (1)...(19): siRNA sense strand
gacacuuuguggaugagaa

SEQ ID NO: 1610191 - RNA, 19 nt, Homo sapiens
  misc_RNA (1)...(19): siRNA sense strand
guggaugaccaaauagcua

SEQ ID NO: 1610192 - RNA, 19 nt, Homo sapiens
  misc_RNA (1)...(19): siRNA sense strand
gggcaguucgcagcugaua

SEQ ID NO: 1610193 - RNA, 19 nt, Homo sapiens
  misc_RNA (1)...(19): siRNA sense strand
aaccagcuguggaacauca

SEQ ID NO: 1610194 - RNA, 19 nt, Homo sapiens
  misc_RNA (1)...(19): siRNA sense strand
acauguuccuggaguguau

SEQ ID NO: 1610195 - RNA, 19 nt, Homo sapiens
  misc_RNA (1)...(19): siRNA sense strand
ggaacuccacgcgcauuga

SEQ ID NO: 1610196 - RNA, 19 nt, Homo sapiens
  misc_RNA (1)...(19): siRNA sense strand
gaagacuggcccauuugca

SEQ ID NO: 1610197 - RNA, 19 nt, Homo sapiens
  misc_RNA (1)...(19): siRNA sense strand
gcccagacacuuuguggau

SEQ ID NO: 1610198 - RNA, 19 nt, Homo sapiens
  misc_RNA (1)...(19): siRNA sense strand
augagaaggccgugaauga

SEQ ID NO: 1610199 - RNA, 19 nt, Homo sapiens
  misc_RNA (1)...(19): siRNA sense strand
gaugagaaggccgugaaug

SEQ ID NO: 1610200 - RNA, 19 nt, Homo sapiens
  misc_RNA (1)...(19): siRNA sense strand
aagcugaccuucgaguaca

SEQ ID NO: 1610201 - RNA, 19 nt, Homo sapiens
  misc_RNA (1)...(19): siRNA sense strand
gguguucaaucgguaccuu

SEQ ID NO: 1610202 - RNA, 19 nt, Homo sapiens
  misc_RNA (1)...(19): siRNA sense strand
uggagaaguucccugugau

SEQ ID NO: 1610203 - RNA, 19 nt, Homo sapiens
  misc_RNA (1)...(19): siRNA sense strand
gaacuccacgcgcauugac

SEQ ID NO: 1610204 - RNA, 19 nt, Homo sapiens
  misc_RNA (1)...(19): siRNA sense strand
uagcuauugucuucaaggu

SEQ ID NO: 1610205 - RNA, 19 nt, Homo sapiens
  misc_RNA (1)...(19): siRNA sense strand
gauucauccuuacccucaa

SEQ ID NO: 1610206 - RNA, 19 nt, Homo sapiens
  misc_RNA (1)...(19): siRNA sense strand
gcuuuccucugcugucucu

SEQ ID NO: 1610207 - RNA, 19 nt, Homo sapiens
  misc_RNA (1)...(19): siRNA sense strand
ugcugucucugcaagauug

SEQ ID NO: 1610208 - RNA, 19 nt, Homo sapiens
  misc_RNA (1)...(19): siRNA sense strand
gggaacuccacgcgcauug

SEQ ID NO: 1610209 - RNA, 19 nt, Homo sapiens
  misc_RNA (1)...(19): siRNA sense strand
aaagugaaccagggucuca

SEQ ID NO: 1610210 - RNA, 19 nt, Homo sapiens
  misc_RNA (1)...(19): siRNA sense strand
ggaguguauccuguuuauu

SEQ ID NO: 1610211 - RNA, 19 nt, Homo sapiens
  misc_RNA (1)...(19): siRNA sense strand
gaugaagacuggcccauuu

SEQ ID NO: 1610212 - RNA, 19 nt, Homo sapiens
  misc_RNA (1)...(19): siRNA sense strand
gaguguauccuguuuauua

SEQ ID NO: 1610213 - RNA, 19 nt, Homo sapiens
  misc_RNA (1)...(19): siRNA sense strand
ccggguggaugaccaaaua

SEQ ID NO: 1610214 - RNA, 19 nt, Homo sapiens
  misc_RNA (1)...(19): siRNA sense strand
ccagacacuuuguggauga

SEQ ID NO: 1610215 - RNA, 19 nt, Homo sapiens
  misc_RNA (1)...(19): siRNA sense strand
ggucucauccgcauguaua

SEQ ID NO: 1610216 - RNA, 19 nt, Homo sapiens
  misc_RNA (1)...(19): siRNA sense strand
ugccugagguggcuguuua

SEQ ID NO: 1610217 - RNA, 19 nt, Homo sapiens
  misc_RNA (1)...(19): siRNA sense strand
ccacaaggacuacauguuc

SEQ ID NO: 1610218 - RNA, 19 nt, Homo sapiens
  misc_RNA (1)...(19): siRNA sense strand
ggcauacgcugacuacauc

SEQ ID NO: 1610219 - RNA, 19 nt, Homo sapiens
  misc_RNA (1)...(19): siRNA sense strand
gcaguucgcagcugauaga

SEQ ID NO: 1610220 - RNA, 19 nt, Homo sapiens
  misc_RNA (1)...(19): siRNA sense strand
gagaaggccgugaaugaga

SEQ ID NO: 1610221 - RNA, 19 nt, Homo sapiens
  misc_RNA (1)...(19): siRNA sense strand
ccgagugccuggagaaguu

SEQ ID NO: 1610222 - RNA, 19 nt, Homo sapiens
  misc_RNA (1)...(19): siRNA sense strand
agaaggccgugaaugagaa

SEQ ID NO: 1610223 - RNA, 19 nt, Homo sapiens
  misc_RNA (1)...(19): siRNA sense strand
ugaaugagaaccacaagga

SEQ ID NO: 1610224 - RNA, 19 nt, Homo sapiens
  misc_RNA (1)...(19): siRNA sense strand
gaaccacaaggacuacaug

SEQ ID NO: 1610225 - RNA, 19 nt, Homo sapiens
  misc_RNA (1)...(19): siRNA sense strand
cuggagaaguucccuguga

SEQ ID NO: 1610226 - RNA, 19 nt, Homo sapiens
  misc_RNA (1)...(19): siRNA sense strand
gcugauagaccacccauac

SEQ ID NO: 1610227 - RNA, 19 nt, Homo sapiens
  misc_RNA (1)...(19): siRNA sense strand
uggaguguauccuguuuau

SEQ ID NO: 1610228 - RNA, 19 nt, Homo sapiens
  misc_RNA (1)...(19): siRNA sense strand
ccaaccagcuguggaacau

SEQ ID NO: 1610229 - RNA, 19 nt, Homo sapiens
  misc_RNA (1)...(19): siRNA sense strand
ggaaacuccagaaaacaua

SEQ ID NO: 1610230 - RNA, 19 nt, Homo sapiens
  misc_RNA (1)...(19): siRNA sense strand
ggagaaguucccugugauc

SEQ ID NO: 1610231 - RNA, 19 nt, Homo sapiens
  misc_RNA (1)...(19): siRNA sense strand
ccuggaguguauccuguuu

SEQ ID NO: 1610232 - RNA, 19 nt, Homo sapiens
  misc_RNA (1)...(19): siRNA sense strand
gacacuuuguggaugagaa

SEQ ID NO: 1610233 - RNA, 19 nt, Homo sapiens
  misc_RNA (1)...(19): siRNA sense strand
guggaugaccaaauagcua

SEQ ID NO: 1610234 - RNA, 19 nt, Homo sapiens
  misc_RNA (1)...(19): siRNA sense strand
gggcaguucgcagcugaua

SEQ ID NO: 1610235 - RNA, 19 nt, Homo sapiens
  misc_RNA (1)...(19): siRNA sense strand
aaccagcuguggaacauca

SEQ ID NO: 1610236 - RNA, 19 nt, Homo sapiens
  misc_RNA (1)...(19): siRNA sense strand
acauguuccuggaguguau

SEQ ID NO: 1610237 - RNA, 19 nt, Homo sapiens
  misc_RNA (1)...(19): siRNA sense strand
ggaacuccacgcgcauuga

SEQ ID NO: 1610238 - RNA, 19 nt, Homo sapiens
  misc_RNA (1)...(19): siRNA sense strand
gaagacuggcccauuugca

SEQ ID NO: 1610239 - RNA, 19 nt, Homo sapiens
  misc_RNA (1)...(19): siRNA sense strand
gcccagacacuuuguggau

SEQ ID NO: 1610240 - RNA, 19 nt, Homo sapiens
  misc_RNA (1)...(19): siRNA sense strand
augagaaggccgugaauga

SEQ ID NO: 1610241 - RNA, 19 nt, Homo sapiens
  misc_RNA (1)...(19): siRNA sense strand
gaugagaaggccgugaaug

SEQ ID NO: 1610242 - RNA, 19 nt, Homo sapiens
  misc_RNA (1)...(19): siRNA sense strand
aagcugaccuucgaguaca

SEQ ID NO: 1610243 - RNA, 19 nt, Homo sapiens
  misc_RNA (1)...(19): siRNA sense strand
gguguucaaucgguaccuu

SEQ ID NO: 1610244 - RNA, 19 nt, Homo sapiens
  misc_RNA (1)...(19): siRNA sense strand
uggagaaguucccugugau

SEQ ID NO: 1610245 - RNA, 19 nt, Homo sapiens
  misc_RNA (1)...(19): siRNA sense strand
gaacuccacgcgcauugac

SEQ ID NO: 1610246 - RNA, 19 nt, Homo sapiens
  misc_RNA (1)...(19): siRNA sense strand
uagcuauugucuucaaggu

SEQ ID NO: 1610247 - RNA, 19 nt, Homo sapiens
  misc_RNA (1)...(19): siRNA sense strand
gauucauccuuacccucaa

SEQ ID NO: 1610248 - RNA, 19 nt, Homo sapiens
  misc_RNA (1)...(19): siRNA sense strand
gcuuuccucugcugucucu

SEQ ID NO: 1610249 - RNA, 19 nt, Homo sapiens
  misc_RNA (1)...(19): siRNA sense strand
ugcugucucugcaagauug

SEQ ID NO: 1610250 - RNA, 19 nt, Homo sapiens
  misc_RNA (1)...(19): siRNA sense strand
gggaacuccacgcgcauug

SEQ ID NO: 1610251 - RNA, 19 nt, Homo sapiens
  misc_RNA (1)...(19): siRNA sense strand
aaagugaaccagggucuca

SEQ ID NO: 1610252 - RNA, 19 nt, Homo sapiens
  misc_RNA (1)...(19): siRNA sense strand
ggaguguauccuguuuauu

SEQ ID NO: 1610253 - RNA, 19 nt, Homo sapiens
  misc_RNA (1)...(19): siRNA sense strand
gaugaagacuggcccauuu

SEQ ID NO: 1610254 - RNA, 19 nt, Homo sapiens
  misc_RNA (1)...(19): siRNA sense strand
gaguguauccuguuuauua

SEQ ID NO: 1610255 - RNA, 19 nt, Homo sapiens
  misc_RNA (1)...(19): siRNA sense strand
ccggguggaugaccaaaua

SEQ ID NO: 1610256 - RNA, 19 nt, Homo sapiens
  misc_RNA (1)...(19): siRNA sense strand
ccagacacuuuguggauga

SEQ ID NO: 1610257 - RNA, 19 nt, Homo sapiens
  misc_RNA (1)...(19): siRNA sense strand
ggucucauccgcauguaua

SEQ ID NO: 1610258 - RNA, 19 nt, Homo sapiens
  misc_RNA (1)...(19): siRNA sense strand
ugccugagguggcuguuua

SEQ ID NO: 1610259 - RNA, 19 nt, Homo sapiens
  misc_RNA (1)...(19): siRNA sense strand
ccacaaggacuacauguuc

SEQ ID NO: 1610260 - RNA, 19 nt, Homo sapiens
  misc_RNA (1)...(19): siRNA sense strand
ggcauacgcugacuacauc

SEQ ID NO: 1610261 - RNA, 19 nt, Homo sapiens
  misc_RNA (1)...(19): siRNA sense strand
gcaguucgcagcugauaga

SEQ ID NO: 1610262 - RNA, 19 nt, Homo sapiens
  misc_RNA (1)...(19): siRNA sense strand
gagaaggccgugaaugaga

SEQ ID NO: 1610263 - RNA, 19 nt, Homo sapiens
  misc_RNA (1)...(19): siRNA sense strand
ccgagugccuggagaaguu

SEQ ID NO: 1610264 - RNA, 19 nt, Homo sapiens
  misc_RNA (1)...(19): siRNA sense strand
agaaggccgugaaugagaa

SEQ ID NO: 1610265 - RNA, 19 nt, Homo sapiens
  misc_RNA (1)...(19): siRNA sense strand
ugaaugagaaccacaagga

SEQ ID NO: 1610266 - RNA, 19 nt, Homo sapiens
  misc_RNA (1)...(19): siRNA sense strand
gaaccacaaggacuacaug

SEQ ID NO: 1610267 - RNA, 19 nt, Homo sapiens
  misc_RNA (1)...(19): siRNA sense strand
cuggagaaguucccuguga

SEQ ID NO: 1610268 - RNA, 19 nt, Homo sapiens
  misc_RNA (1)...(19): siRNA sense strand
gcugauagaccacccauac

SEQ ID NO: 1610269 - RNA, 19 nt, Homo sapiens
  misc_RNA (1)...(19): siRNA sense strand
uggaguguauccuguuuau

SEQ ID NO: 1610270 - RNA, 19 nt, Homo sapiens
  misc_RNA (1)...(19): siRNA sense strand
ccaaccagcuguggaacau

SEQ ID NO: 1610271 - RNA, 19 nt, Homo sapiens
  misc_RNA (1)...(19): siRNA sense strand
ggaaacuccagaaaacaua

SEQ ID NO: 1610272 - RNA, 19 nt, Homo sapiens
  misc_RNA (1)...(19): siRNA sense strand
ggagaaguucccugugauc

SEQ ID NO: 1610273 - RNA, 19 nt, Homo sapiens
  misc_RNA (1)...(19): siRNA sense strand
ccuggaguguauccuguuu

SEQ ID NO: 1610274 - RNA, 19 nt, Homo sapiens
  misc_RNA (1)...(19): siRNA sense strand
gacacuuuguggaugagaa

SEQ ID NO: 1610275 - RNA, 19 nt, Homo sapiens
  misc_RNA (1)...(19): siRNA sense strand
guggaugaccaaauagcua

SEQ ID NO: 1610276 - RNA, 19 nt, Homo sapiens
  misc_RNA (1)...(19): siRNA sense strand
gggcaguucgcagcugaua

SEQ ID NO: 1610277 - RNA, 19 nt, Homo sapiens
  misc_RNA (1)...(19): siRNA sense strand
aaccagcuguggaacauca

SEQ ID NO: 1610278 - RNA, 19 nt, Homo sapiens
  misc_RNA (1)...(19): siRNA sense strand
acauguuccuggaguguau

SEQ ID NO: 1610279 - RNA, 19 nt, Homo sapiens
  misc_RNA (1)...(19): siRNA sense strand
ggaacuccacgcgcauuga

SEQ ID NO: 1610280 - RNA, 19 nt, Homo sapiens
  misc_RNA (1)...(19): siRNA sense strand
gaagacuggcccauuugca

SEQ ID NO: 1610281 - RNA, 19 nt, Homo sapiens
  misc_RNA (1)...(19): siRNA sense strand
gcccagacacuuuguggau

SEQ ID NO: 1610282 - RNA, 19 nt, Homo sapiens
  misc_RNA (1)...(19): siRNA sense strand
augagaaggccgugaauga

SEQ ID NO: 1610283 - RNA, 19 nt, Homo sapiens
  misc_RNA (1)...(19): siRNA sense strand
gaugagaaggccgugaaug

SEQ ID NO: 1610284 - RNA, 19 nt, Homo sapiens
  misc_RNA (1)...(19): siRNA sense strand
aagcugaccuucgaguaca

SEQ ID NO: 1610285 - RNA, 19 nt, Homo sapiens
  misc_RNA (1)...(19): siRNA sense strand
gguguucaaucgguaccuu

SEQ ID NO: 1610286 - RNA, 19 nt, Homo sapiens
  misc_RNA (1)...(19): siRNA sense strand
uggagaaguucccugugau

SEQ ID NO: 1610287 - RNA, 19 nt, Homo sapiens
  misc_RNA (1)...(19): siRNA sense strand
gaacuccacgcgcauugac

SEQ ID NO: 1610288 - RNA, 19 nt, Homo sapiens
  misc_RNA (1)...(19): siRNA sense strand
uagcuauugucuucaaggu

SEQ ID NO: 1610289 - RNA, 19 nt, Homo sapiens
  misc_RNA (1)...(19): siRNA sense strand
gauucauccuuacccucaa

SEQ ID NO: 1610290 - RNA, 19 nt, Homo sapiens
  misc_RNA (1)...(19): siRNA sense strand
gcuuuccucugcugucucu

SEQ ID NO: 1610291 - RNA, 19 nt, Homo sapiens
  misc_RNA (1)...(19): siRNA sense strand
ugcugucucugcaagauug

SEQ ID NO: 1610292 - RNA, 19 nt, Homo sapiens
  misc_RNA (1)...(19): siRNA sense strand
gggaacuccacgcgcauug

SEQ ID NO: 1610293 - RNA, 19 nt, Homo sapiens
  misc_RNA (1)...(19): siRNA sense strand
aaagugaaccagggucuca

SEQ ID NO: 1610294 - RNA, 19 nt, Homo sapiens
  misc_RNA (1)...(19): siRNA sense strand
ggaguguauccuguuuauu

SEQ ID NO: 1610295 - RNA, 19 nt, Homo sapiens
  misc_RNA (1)...(19): siRNA sense strand
gaugaagacuggcccauuu

SEQ ID NO: 1610296 - RNA, 19 nt, Homo sapiens
  misc_RNA (1)...(19): siRNA sense strand
gaguguauccuguuuauua

SEQ ID NO: 1610297 - RNA, 19 nt, Homo sapiens
  misc_RNA (1)...(19): siRNA sense strand
ccggguggaugaccaaaua

SEQ ID NO: 1610298 - RNA, 19 nt, Homo sapiens
  misc_RNA (1)...(19): siRNA sense strand
ccagacacuuuguggauga

SEQ ID NO: 1610299 - RNA, 19 nt, Homo sapiens
  misc_RNA (1)...(19): siRNA sense strand
ggucucauccgcauguaua

SEQ ID NO: 1610300 - RNA, 19 nt, Homo sapiens
  misc_RNA (1)...(19): siRNA sense strand
ugccugagguggcuguuua

SEQ ID NO: 1610301 - RNA, 19 nt, Homo sapiens
  misc_RNA (1)...(19): siRNA sense strand
ccacaaggacuacauguuc

SEQ ID NO: 1610302 - RNA, 19 nt, Homo sapiens
  misc_RNA (1)...(19): siRNA sense strand
ggcauacgcugacuacauc

SEQ ID NO: 1610303 - RNA, 19 nt, Homo sapiens
  misc_RNA (1)...(19): siRNA sense strand
gcaguucgcagcugauaga

SEQ ID NO: 1610304 - RNA, 19 nt, Homo sapiens
  misc_RNA (1)...(19): siRNA sense strand
gagaaggccgugaaugaga

SEQ ID NO: 1610305 - RNA, 19 nt, Homo sapiens
  misc_RNA (1)...(19): siRNA sense strand
ccgagugccuggagaaguu

SEQ ID NO: 1610306 - RNA, 19 nt, Homo sapiens
  misc_RNA (1)...(19): siRNA sense strand
agaaggccgugaaugagaa

SEQ ID NO: 1610307 - RNA, 19 nt, Homo sapiens
  misc_RNA (1)...(19): siRNA sense strand
ugaaugagaaccacaagga

SEQ ID NO: 1610308 - RNA, 19 nt, Homo sapiens
  misc_RNA (1)...(19): siRNA sense strand
gaaccacaaggacuacaug

SEQ ID NO: 1610309 - RNA, 19 nt, Homo sapiens
  misc_RNA (1)...(19): siRNA sense strand
cuggagaaguucccuguga

SEQ ID NO: 1610310 - RNA, 19 nt, Homo sapiens
  misc_RNA (1)...(19): siRNA sense strand
gcugauagaccacccauac

SEQ ID NO: 1610311 - RNA, 19 nt, Homo sapiens
  misc_RNA (1)...(19): siRNA sense strand
uggaguguauccuguuuau

SEQ ID NO: 1610312 - RNA, 19 nt, Homo sapiens
  misc_RNA (1)...(19): siRNA sense strand
ccaaccagcuguggaacau

SEQ ID NO: 1610313 - RNA, 19 nt, Homo sapiens
  misc_RNA (1)...(19): siRNA sense strand
ggaaacuccagaaaacaua

SEQ ID NO: 1610314 - RNA, 19 nt, Homo sapiens
  misc_RNA (1)...(19): siRNA sense strand
ggagaaguucccugugauc

SEQ ID NO: 1610315 - RNA, 19 nt, Homo sapiens
  misc_RNA (1)...(19): siRNA sense strand
ccuggaguguauccuguuu

SEQ ID NO: 1610316 - RNA, 19 nt, Homo sapiens
  misc_RNA (1)...(19): siRNA sense strand
gacacuuuguggaugagaa

SEQ ID NO: 1610317 - RNA, 19 nt, Homo sapiens
  misc_RNA (1)...(19): siRNA sense strand
guggaugaccaaauagcua

SEQ ID NO: 1610318 - RNA, 19 nt, Homo sapiens
  misc_RNA (1)...(19): siRNA sense strand
gggcaguucgcagcugaua

SEQ ID NO: 1610319 - RNA, 19 nt, Homo sapiens
  misc_RNA (1)...(19): siRNA sense strand
aaccagcuguggaacauca

SEQ ID NO: 1610320 - RNA, 19 nt, Homo sapiens
  misc_RNA (1)...(19): siRNA sense strand
acauguuccuggaguguau

SEQ ID NO: 1610321 - RNA, 19 nt, Homo sapiens
  misc_RNA (1)...(19): siRNA sense strand
ggaacuccacgcgcauuga

SEQ ID NO: 1610322 - RNA, 19 nt, Homo sapiens
  misc_RNA (1)...(19): siRNA sense strand
gaagacuggcccauuugca

SEQ ID NO: 1610323 - RNA, 19 nt, Homo sapiens
  misc_RNA (1)...(19): siRNA sense strand
gcccagacacuuuguggau

SEQ ID NO: 1610324 - RNA, 19 nt, Homo sapiens
  misc_RNA (1)...(19): siRNA sense strand
augagaaggccgugaauga

SEQ ID NO: 1610325 - RNA, 19 nt, Homo sapiens
  misc_RNA (1)...(19): siRNA sense strand
gaugagaaggccgugaaug

SEQ ID NO: 1610326 - RNA, 19 nt, Homo sapiens
  misc_RNA (1)...(19): siRNA sense strand
aagcugaccuucgaguaca

SEQ ID NO: 1610327 - RNA, 19 nt, Homo sapiens
  misc_RNA (1)...(19): siRNA sense strand
gguguucaaucgguaccuu

SEQ ID NO: 1610328 - RNA, 19 nt, Homo sapiens
  misc_RNA (1)...(19): siRNA sense strand
uggagaaguucccugugau

SEQ ID NO: 1610329 - RNA, 19 nt, Homo sapiens
  misc_RNA (1)...(19): siRNA sense strand
gaacuccacgcgcauugac

SEQ ID NO: 1610330 - RNA, 19 nt, Homo sapiens
  misc_RNA (1)...(19): siRNA sense strand
uagcuauugucuucaaggu

SEQ ID NO: 1610331 - RNA, 19 nt, Homo sapiens
  misc_RNA (1)...(19): siRNA sense strand
gauucauccuuacccucaa

SEQ ID NO: 1610332 - RNA, 19 nt, Homo sapiens
  misc_RNA (1)...(19): siRNA sense strand
gcuuuccucugcugucucu

SEQ ID NO: 1610333 - RNA, 19 nt, Homo sapiens
  misc_RNA (1)...(19): siRNA sense strand
ugcugucucugcaagauug

SEQ ID NO: 1610334 - RNA, 19 nt, Homo sapiens
  misc_RNA (1)...(19): siRNA sense strand
gggaacuccacgcgcauug

SEQ ID NO: 1610335 - RNA, 19 nt, Homo sapiens
  misc_RNA (1)...(19): siRNA sense strand
aaagugaaccagggucuca

SEQ ID NO: 1610336 - RNA, 19 nt, Homo sapiens
  misc_RNA (1)...(19): siRNA sense strand
ggaguguauccuguuuauu

SEQ ID NO: 1610337 - RNA, 19 nt, Homo sapiens
  misc_RNA (1)...(19): siRNA sense strand
gaugaagacuggcccauuu

SEQ ID NO: 1610338 - RNA, 19 nt, Homo sapiens
  misc_RNA (1)...(19): siRNA sense strand
gaguguauccuguuuauua

SEQ ID NO: 1610339 - RNA, 19 nt, Homo sapiens
  misc_RNA (1)...(19): siRNA sense strand
ccagacacuuuguggauga

SEQ ID NO: 1610340 - RNA, 19 nt, Homo sapiens
  misc_RNA (1)...(19): siRNA sense strand
ggucucauccgcauguaua

SEQ ID NO: 1610341 - RNA, 19 nt, Homo sapiens
  misc_RNA (1)...(19): siRNA sense strand
ccacaaggacuacauguuc

SEQ ID NO: 1610342 - RNA, 19 nt, Homo sapiens
  misc_RNA (1)...(19): siRNA sense strand
gcaguucgcagcugauaga

SEQ ID NO: 1610343 - RNA, 19 nt, Homo sapiens
  misc_RNA (1)...(19): siRNA sense strand
gagaaggccgugaaugaga

SEQ ID NO: 1610344 - RNA, 19 nt, Homo sapiens
  misc_RNA (1)...(19): siRNA sense strand
ccgagugccuggagaaguu

SEQ ID NO: 1610345 - RNA, 19 nt, Homo sapiens
  misc_RNA (1)...(19): siRNA sense strand
agaaggccgugaaugagaa

SEQ ID NO: 1610346 - RNA, 19 nt, Homo sapiens
  misc_RNA (1)...(19): siRNA sense strand
ugaaugagaaccacaagga

SEQ ID NO: 1610347 - RNA, 19 nt, Homo sapiens
  misc_RNA (1)...(19): siRNA sense strand
gaaccacaaggacuacaug

SEQ ID NO: 1610348 - RNA, 19 nt, Homo sapiens
  misc_RNA (1)...(19): siRNA sense strand
cuggagaaguucccuguga

SEQ ID NO: 1610349 - RNA, 19 nt, Homo sapiens
  misc_RNA (1)...(19): siRNA sense strand
gcugauagaccacccauac

SEQ ID NO: 1610350 - RNA, 19 nt, Homo sapiens
  misc_RNA (1)...(19): siRNA sense strand
uggaguguauccuguuuau

SEQ ID NO: 1610351 - RNA, 19 nt, Homo sapiens
  misc_RNA (1)...(19): siRNA sense strand
ccaaccagcuguggaacau

SEQ ID NO: 1610352 - RNA, 19 nt, Homo sapiens
  misc_RNA (1)...(19): siRNA sense strand
gacacuuuguggaugagaa

SEQ ID NO: 1610353 - RNA, 19 nt, Homo sapiens
  misc_RNA (1)...(19): siRNA sense strand
ggagaaguucccugugauc

SEQ ID NO: 1610354 - RNA, 19 nt, Homo sapiens
  misc_RNA (1)...(19): siRNA sense strand
ggaaacuccagaaaacaua

SEQ ID NO: 1610355 - RNA, 19 nt, Homo sapiens
  misc_RNA (1)...(19): siRNA sense strand
ccuggaguguauccuguuu

SEQ ID NO: 1610356 - RNA, 19 nt, Homo sapiens
  misc_RNA (1)...(19): siRNA sense strand
gggcaguucgcagcugaua

SEQ ID NO: 1610357 - RNA, 19 nt, Homo sapiens
  misc_RNA (1)...(19): siRNA sense strand
aaccagcuguggaacauca

SEQ ID NO: 1610358 - RNA, 19 nt, Homo sapiens
  misc_RNA (1)...(19): siRNA sense strand
acauguuccuggaguguau

SEQ ID NO: 1610359 - RNA, 19 nt, Homo sapiens
  misc_RNA (1)...(19): siRNA sense strand
gcccagacacuuuguggau

SEQ ID NO: 1610360 - RNA, 19 nt, Homo sapiens
  misc_RNA (1)...(19): siRNA sense strand
gaagacuggcccauuugca

SEQ ID NO: 1610361 - RNA, 19 nt, Homo sapiens
  misc_RNA (1)...(19): siRNA sense strand
augagaaggccgugaauga

SEQ ID NO: 1610362 - RNA, 19 nt, Homo sapiens
  misc_RNA (1)...(19): siRNA sense strand
gaugagaaggccgugaaug

SEQ ID NO: 1610363 - RNA, 19 nt, Homo sapiens
  misc_RNA (1)...(19): siRNA sense strand
uggagaaguucccugugau

SEQ ID NO: 1610364 - RNA, 19 nt, Homo sapiens
  misc_RNA (1)...(19): siRNA sense strand
ggaguguauccuguuuauu

SEQ ID NO: 1610365 - RNA, 19 nt, Homo sapiens
  misc_RNA (1)...(19): siRNA sense strand
aaagugaaccagggucuca

SEQ ID NO: 1610366 - RNA, 19 nt, Homo sapiens
  misc_RNA (1)...(19): siRNA sense strand
gaugaagacuggcccauuu

SEQ ID NO: 1610367 - RNA, 19 nt, Homo sapiens
  misc_RNA (1)...(19): siRNA sense strand
gaguguauccuguuuauua

SEQ ID NO: 1610368 - RNA, 19 nt, Homo sapiens
  misc_RNA (1)...(19): siRNA sense strand
ccggguggaugaccaaaua

SEQ ID NO: 1610369 - RNA, 19 nt, Homo sapiens
  misc_RNA (1)...(19): siRNA sense strand
ccagacacuuuguggauga

SEQ ID NO: 1610370 - RNA, 19 nt, Homo sapiens
  misc_RNA (1)...(19): siRNA sense strand
ggucucauccgcauguaua

SEQ ID NO: 1610371 - RNA, 19 nt, Homo sapiens
  misc_RNA (1)...(19): siRNA sense strand
ugccugagguggcuguuua

SEQ ID NO: 1610372 - RNA, 19 nt, Homo sapiens
  misc_RNA (1)...(19): siRNA sense strand
ccacaaggacuacauguuc

SEQ ID NO: 1610373 - RNA, 19 nt, Homo sapiens
  misc_RNA (1)...(19): siRNA sense strand
ggcauacgcugacuacauc

SEQ ID NO: 1610374 - RNA, 19 nt, Homo sapiens
  misc_RNA (1)...(19): siRNA sense strand
gcaguucgcagcugauaga

SEQ ID NO: 1610375 - RNA, 19 nt, Homo sapiens
  misc_RNA (1)...(19): siRNA sense strand
gagaaggccgugaaugaga

SEQ ID NO: 1610376 - RNA, 19 nt, Homo sapiens
  misc_RNA (1)...(19): siRNA sense strand
ccgagugccuggagaaguu

SEQ ID NO: 1610377 - RNA, 19 nt, Homo sapiens
  misc_RNA (1)...(19): siRNA sense strand
agaaggccgugaaugagaa

SEQ ID NO: 1610378 - RNA, 19 nt, Homo sapiens
  misc_RNA (1)...(19): siRNA sense strand
ugaaugagaaccacaagga

SEQ ID NO: 1610379 - RNA, 19 nt, Homo sapiens
  misc_RNA (1)...(19): siRNA sense strand
gaaccacaaggacuacaug

SEQ ID NO: 1610380 - RNA, 19 nt, Homo sapiens
  misc_RNA (1)...(19): siRNA sense strand
cuggagaaguucccuguga

SEQ ID NO: 1610381 - RNA, 19 nt, Homo sapiens
  misc_RNA (1)...(19): siRNA sense strand
gcugauagaccacccauac

SEQ ID NO: 1610382 - RNA, 19 nt, Homo sapiens
  misc_RNA (1)...(19): siRNA sense strand
uggaguguauccuguuuau

SEQ ID NO: 1610383 - RNA, 19 nt, Homo sapiens
  misc_RNA (1)...(19): siRNA sense strand
ccaaccagcuguggaacau

SEQ ID NO: 1610384 - RNA, 19 nt, Homo sapiens
  misc_RNA (1)...(19): siRNA sense strand
ggaaacuccagaaaacaua

SEQ ID NO: 1610385 - RNA, 19 nt, Homo sapiens
  misc_RNA (1)...(19): siRNA sense strand
ggagaaguucccugugauc

SEQ ID NO: 1610386 - RNA, 19 nt, Homo sapiens
  misc_RNA (1)...(19): siRNA sense strand
ccuggaguguauccuguuu

SEQ ID NO: 1610387 - RNA, 19 nt, Homo sapiens
  misc_RNA (1)...(19): siRNA sense strand
gacacuuuguggaugagaa

SEQ ID NO: 1610388 - RNA, 19 nt, Homo sapiens
  misc_RNA (1)...(19): siRNA sense strand
guggaugaccaaauagcua

SEQ ID NO: 1610389 - RNA, 19 nt, Homo sapiens
  misc_RNA (1)...(19): siRNA sense strand
gggcaguucgcagcugaua

SEQ ID NO: 1610390 - RNA, 19 nt, Homo sapiens
  misc_RNA (1)...(19): siRNA sense strand
aaccagcuguggaacauca

SEQ ID NO: 1610391 - RNA, 19 nt, Homo sapiens
  misc_RNA (1)...(19): siRNA sense strand
acauguuccuggaguguau

SEQ ID NO: 1610392 - RNA, 19 nt, Homo sapiens
  misc_RNA (1)...(19): siRNA sense strand
ggaacuccacgcgcauuga

SEQ ID NO: 1610393 - RNA, 19 nt, Homo sapiens
  misc_RNA (1)...(19): siRNA sense strand
gaagacuggcccauuugca

SEQ ID NO: 1610394 - RNA, 19 nt, Homo sapiens
  misc_RNA (1)...(19): siRNA sense strand
gcccagacacuuuguggau

SEQ ID NO: 1610395 - RNA, 19 nt, Homo sapiens
  misc_RNA (1)...(19): siRNA sense strand
augagaaggccgugaauga

SEQ ID NO: 1610396 - RNA, 19 nt, Homo sapiens
  misc_RNA (1)...(19): siRNA sense strand
gaugagaaggccgugaaug

SEQ ID NO: 1610397 - RNA, 19 nt, Homo sapiens
  misc_RNA (1)...(19): siRNA sense strand
aagcugaccuucgaguaca

SEQ ID NO: 1610398 - RNA, 19 nt, Homo sapiens
  misc_RNA (1)...(19): siRNA sense strand
gguguucaaucgguaccuu

SEQ ID NO: 1610399 - RNA, 19 nt, Homo sapiens
  misc_RNA (1)...(19): siRNA sense strand
uggagaaguucccugugau

SEQ ID NO: 1610400 - RNA, 19 nt, Homo sapiens
  misc_RNA (1)...(19): siRNA sense strand
gaacuccacgcgcauugac

SEQ ID NO: 1610401 - RNA, 19 nt, Homo sapiens
  misc_RNA (1)...(19): siRNA sense strand
uagcuauugucuucaaggu

SEQ ID NO: 1610402 - RNA, 19 nt, Homo sapiens
  misc_RNA (1)...(19): siRNA sense strand
gauucauccuuacccucaa

SEQ ID NO: 1610403 - RNA, 19 nt, Homo sapiens
  misc_RNA (1)...(19): siRNA sense strand
gcuuuccucugcugucucu

SEQ ID NO: 1610404 - RNA, 19 nt, Homo sapiens
  misc_RNA (1)...(19): siRNA sense strand
ugcugucucugcaagauug

SEQ ID NO: 1610405 - RNA, 19 nt, Homo sapiens
  misc_RNA (1)...(19): siRNA sense strand
gggaacuccacgcgcauug

SEQ ID NO: 1610406 - RNA, 19 nt, Homo sapiens
  misc_RNA (1)...(19): siRNA sense strand
aaagugaaccagggucuca

SEQ ID NO: 1610407 - RNA, 19 nt, Homo sapiens
  misc_RNA (1)...(19): siRNA sense strand
ggaguguauccuguuuauu

SEQ ID NO: 1610408 - RNA, 19 nt, Homo sapiens
  misc_RNA (1)...(19): siRNA sense strand
gaugaagacuggcccauuu

SEQ ID NO: 1610409 - RNA, 19 nt, Homo sapiens
  misc_RNA (1)...(19): siRNA sense strand
gaguguauccuguuuauua

SEQ ID NO: 1610410 - RNA, 19 nt, Homo sapiens
  misc_RNA (1)...(19): siRNA sense strand
ccggguggaugaccaaaua

SEQ ID NO: 1610411 - RNA, 19 nt, Homo sapiens
  misc_RNA (1)...(19): siRNA sense strand
ccagacacuuuguggauga

SEQ ID NO: 1610412 - RNA, 19 nt, Homo sapiens
  misc_RNA (1)...(19): siRNA sense strand
ggucucauccgcauguaua

SEQ ID NO: 1610413 - RNA, 19 nt, Homo sapiens
  misc_RNA (1)...(19): siRNA sense strand
ugccugagguggcuguuua

SEQ ID NO: 1610414 - RNA, 19 nt, Homo sapiens
  misc_RNA (1)...(19): siRNA sense strand
ccacaaggacuacauguuc

SEQ ID NO: 1610415 - RNA, 19 nt, Homo sapiens
  misc_RNA (1)...(19): siRNA sense strand
ggcauacgcugacuacauc

SEQ ID NO: 1610416 - RNA, 19 nt, Homo sapiens
  misc_RNA (1)...(19): siRNA sense strand
gcaguucgcagcugauaga

SEQ ID NO: 1610417 - RNA, 19 nt, Homo sapiens
  misc_RNA (1)...(19): siRNA sense strand
gagaaggccgugaaugaga

SEQ ID NO: 1610418 - RNA, 19 nt, Homo sapiens
  misc_RNA (1)...(19): siRNA sense strand
ccgagugccuggagaaguu

SEQ ID NO: 1610419 - RNA, 19 nt, Homo sapiens
  misc_RNA (1)...(19): siRNA sense strand
agaaggccgugaaugagaa

SEQ ID NO: 1610420 - RNA, 19 nt, Homo sapiens
  misc_RNA (1)...(19): siRNA sense strand
ugaaugagaaccacaagga

SEQ ID NO: 1610421 - RNA, 19 nt, Homo sapiens
  misc_RNA (1)...(19): siRNA sense strand
gaaccacaaggacuacaug

SEQ ID NO: 1610422 - RNA, 19 nt, Homo sapiens
  misc_RNA (1)...(19): siRNA sense strand
cuggagaaguucccuguga

SEQ ID NO: 1610423 - RNA, 19 nt, Homo sapiens
  misc_RNA (1)...(19): siRNA sense strand
gcugauagaccacccauac

SEQ ID NO: 1610424 - RNA, 19 nt, Homo sapiens
  misc_RNA (1)...(19): siRNA sense strand
uggaguguauccuguuuau

SEQ ID NO: 1610425 - RNA, 19 nt, Homo sapiens
  misc_RNA (1)...(19): siRNA sense strand
ccaaccagcuguggaacau

SEQ ID NO: 1610426 - RNA, 19 nt, Homo sapiens
  misc_RNA (1)...(19): siRNA sense strand
ggaaacuccagaaaacaua

SEQ ID NO: 1610427 - RNA, 19 nt, Homo sapiens
  misc_RNA (1)...(19): siRNA sense strand
ggagaaguucccugugauc

SEQ ID NO: 1610428 - RNA, 19 nt, Homo sapiens
  misc_RNA (1)...(19): siRNA sense strand
ccuggaguguauccuguuu

SEQ ID NO: 1610429 - RNA, 19 nt, Homo sapiens
  misc_RNA (1)...(19): siRNA sense strand
gacacuuuguggaugagaa

SEQ ID NO: 1610430 - RNA, 19 nt, Homo sapiens
  misc_RNA (1)...(19): siRNA sense strand
guggaugaccaaauagcua

SEQ ID NO: 1610431 - RNA, 19 nt, Homo sapiens
  misc_RNA (1)...(19): siRNA sense strand
gggcaguucgcagcugaua

SEQ ID NO: 1610432 - RNA, 19 nt, Homo sapiens
  misc_RNA (1)...(19): siRNA sense strand
aaccagcuguggaacauca

SEQ ID NO: 1610433 - RNA, 19 nt, Homo sapiens
  misc_RNA (1)...(19): siRNA sense strand
acauguuccuggaguguau

SEQ ID NO: 1610434 - RNA, 19 nt, Homo sapiens
  misc_RNA (1)...(19): siRNA sense strand
ggaacuccacgcgcauuga

SEQ ID NO: 1610435 - RNA, 19 nt, Homo sapiens
  misc_RNA (1)...(19): siRNA sense strand
gaagacuggcccauuugca

SEQ ID NO: 1610436 - RNA, 19 nt, Homo sapiens
  misc_RNA (1)...(19): siRNA sense strand
gcccagacacuuuguggau

SEQ ID NO: 1610437 - RNA, 19 nt, Homo sapiens
  misc_RNA (1)...(19): siRNA sense strand
augagaaggccgugaauga

SEQ ID NO: 1610438 - RNA, 19 nt, Homo sapiens
  misc_RNA (1)...(19): siRNA sense strand
gaugagaaggccgugaaug

SEQ ID NO: 1610439 - RNA, 19 nt, Homo sapiens
  misc_RNA (1)...(19): siRNA sense strand
aagcugaccuucgaguaca

SEQ ID NO: 1610440 - RNA, 19 nt, Homo sapiens
  misc_RNA (1)...(19): siRNA sense strand
gguguucaaucgguaccuu

SEQ ID NO: 1610441 - RNA, 19 nt, Homo sapiens
  misc_RNA (1)...(19): siRNA sense strand
uggagaaguucccugugau

SEQ ID NO: 1610442 - RNA, 19 nt, Homo sapiens
  misc_RNA (1)...(19): siRNA sense strand
gaacuccacgcgcauugac

SEQ ID NO: 1610443 - RNA, 19 nt, Homo sapiens
  misc_RNA (1)...(19): siRNA sense strand
uagcuauugucuucaaggu

SEQ ID NO: 1610444 - RNA, 19 nt, Homo sapiens
  misc_RNA (1)...(19): siRNA sense strand
gauucauccuuacccucaa

SEQ ID NO: 1610445 - RNA, 19 nt, Homo sapiens
  misc_RNA (1)...(19): siRNA sense strand
gcuuuccucugcugucucu

SEQ ID NO: 1610446 - RNA, 19 nt, Homo sapiens
  misc_RNA (1)...(19): siRNA sense strand
ugcugucucugcaagauug

SEQ ID NO: 1610447 - RNA, 19 nt, Homo sapiens
  misc_RNA (1)...(19): siRNA sense strand
gggaacuccacgcgcauug

SEQ ID NO: 1610448 - RNA, 19 nt, Homo sapiens
  misc_RNA (1)...(19): siRNA sense strand
aaagugaaccagggucuca

SEQ ID NO: 1610449 - RNA, 19 nt, Homo sapiens
  misc_RNA (1)...(19): siRNA sense strand
ggaguguauccuguuuauu

SEQ ID NO: 1610450 - RNA, 19 nt, Homo sapiens
  misc_RNA (1)...(19): siRNA sense strand
gaugaagacuggcccauuu

SEQ ID NO: 1610451 - RNA, 19 nt, Homo sapiens
  misc_RNA (1)...(19): siRNA sense strand
gaguguauccuguuuauua

SEQ ID NO: 1610452 - RNA, 19 nt, Homo sapiens
  misc_RNA (1)...(19): siRNA sense strand
ccggguggaugaccaaaua

SEQ ID NO: 1610453 - RNA, 19 nt, Homo sapiens
  misc_RNA (1)...(19): siRNA sense strand
ccagacacuuuguggauga

SEQ ID NO: 1610454 - RNA, 19 nt, Homo sapiens
  misc_RNA (1)...(19): siRNA sense strand
ggucucauccgcauguaua

SEQ ID NO: 1610455 - RNA, 19 nt, Homo sapiens
  misc_RNA (1)...(19): siRNA sense strand
ugccugagguggcuguuua

SEQ ID NO: 1610456 - RNA, 19 nt, Homo sapiens
  misc_RNA (1)...(19): siRNA sense strand
ccacaaggacuacauguuc

SEQ ID NO: 1610457 - RNA, 19 nt, Homo sapiens
  misc_RNA (1)...(19): siRNA sense strand
ggcauacgcugacuacauc

SEQ ID NO: 1610458 - RNA, 19 nt, Homo sapiens
  misc_RNA (1)...(19): siRNA sense strand
gcaguucgcagcugauaga

SEQ ID NO: 1610459 - RNA, 19 nt, Homo sapiens
  misc_RNA (1)...(19): siRNA sense strand
gagaaggccgugaaugaga

SEQ ID NO: 1610460 - RNA, 19 nt, Homo sapiens
  misc_RNA (1)...(19): siRNA sense strand
ccgagugccuggagaaguu

SEQ ID NO: 1610461 - RNA, 19 nt, Homo sapiens
  misc_RNA (1)...(19): siRNA sense strand
agaaggccgugaaugagaa

SEQ ID NO: 1610462 - RNA, 19 nt, Homo sapiens
  misc_RNA (1)...(19): siRNA sense strand
ugaaugagaaccacaagga

SEQ ID NO: 1610463 - RNA, 19 nt, Homo sapiens
  misc_RNA (1)...(19): siRNA sense strand
gaaccacaaggacuacaug

SEQ ID NO: 1610464 - RNA, 19 nt, Homo sapiens
  misc_RNA (1)...(19): siRNA sense strand
cuggagaaguucccuguga

SEQ ID NO: 1610465 - RNA, 19 nt, Homo sapiens
  misc_RNA (1)...(19): siRNA sense strand
gcugauagaccacccauac

SEQ ID NO: 1610466 - RNA, 19 nt, Homo sapiens
  misc_RNA (1)...(19): siRNA sense strand
uggaguguauccuguuuau

SEQ ID NO: 1610467 - RNA, 19 nt, Homo sapiens
  misc_RNA (1)...(19): siRNA sense strand
ccaaccagcuguggaacau

SEQ ID NO: 1610468 - RNA, 19 nt, Homo sapiens
  misc_RNA (1)...(19): siRNA sense strand
ggaaacuccagaaaacaua

SEQ ID NO: 1610469 - RNA, 19 nt, Homo sapiens
  misc_RNA (1)...(19): siRNA sense strand
ggagaaguucccugugauc

SEQ ID NO: 1610470 - RNA, 19 nt, Homo sapiens
  misc_RNA (1)...(19): siRNA sense strand
ccuggaguguauccuguuu

SEQ ID NO: 1610471 - RNA, 19 nt, Homo sapiens
  misc_RNA (1)...(19): siRNA sense strand
gacacuuuguggaugagaa

SEQ ID NO: 1610472 - RNA, 19 nt, Homo sapiens
  misc_RNA (1)...(19): siRNA sense strand
guggaugaccaaauagcua

SEQ ID NO: 1610473 - RNA, 19 nt, Homo sapiens
  misc_RNA (1)...(19): siRNA sense strand
gggcaguucgcagcugaua

SEQ ID NO: 1610474 - RNA, 19 nt, Homo sapiens
  misc_RNA (1)...(19): siRNA sense strand
aaccagcuguggaacauca

SEQ ID NO: 1610475 - RNA, 19 nt, Homo sapiens
  misc_RNA (1)...(19): siRNA sense strand
acauguuccuggaguguau

SEQ ID NO: 1610476 - RNA, 19 nt, Homo sapiens
  misc_RNA (1)...(19): siRNA sense strand
ggaacuccacgcgcauuga

SEQ ID NO: 1610477 - RNA, 19 nt, Homo sapiens
  misc_RNA (1)...(19): siRNA sense strand
gaagacuggcccauuugca

SEQ ID NO: 1610478 - RNA, 19 nt, Homo sapiens
  misc_RNA (1)...(19): siRNA sense strand
gcccagacacuuuguggau

SEQ ID NO: 1610479 - RNA, 19 nt, Homo sapiens
  misc_RNA (1)...(19): siRNA sense strand
augagaaggccgugaauga

SEQ ID NO: 1610480 - RNA, 19 nt, Homo sapiens
  misc_RNA (1)...(19): siRNA sense strand
gaugagaaggccgugaaug

SEQ ID NO: 1610481 - RNA, 19 nt, Homo sapiens
  misc_RNA (1)...(19): siRNA sense strand
aagcugaccuucgaguaca

SEQ ID NO: 1610482 - RNA, 19 nt, Homo sapiens
  misc_RNA (1)...(19): siRNA sense strand
gguguucaaucgguaccuu

SEQ ID NO: 1610483 - RNA, 19 nt, Homo sapiens
  misc_RNA (1)...(19): siRNA sense strand
uggagaaguucccugugau

SEQ ID NO: 1610484 - RNA, 19 nt, Homo sapiens
  misc_RNA (1)...(19): siRNA sense strand
gaacuccacgcgcauugac

SEQ ID NO: 1610485 - RNA, 19 nt, Homo sapiens
  misc_RNA (1)...(19): siRNA sense strand
uagcuauugucuucaaggu

SEQ ID NO: 1610486 - RNA, 19 nt, Homo sapiens
  misc_RNA (1)...(19): siRNA sense strand
gauucauccuuacccucaa

SEQ ID NO: 1610487 - RNA, 19 nt, Homo sapiens
  misc_RNA (1)...(19): siRNA sense strand
gcuuuccucugcugucucu

SEQ ID NO: 1610488 - RNA, 19 nt, Homo sapiens
  misc_RNA (1)...(19): siRNA sense strand
ugcugucucugcaagauug

SEQ ID NO: 1610489 - RNA, 19 nt, Homo sapiens
  misc_RNA (1)...(19): siRNA sense strand
gggaacuccacgcgcauug

SEQ ID NO: 1610490 - RNA, 19 nt, Homo sapiens
  misc_RNA (1)...(19): siRNA sense strand
aaagugaaccagggucuca

SEQ ID NO: 1610491 - RNA, 19 nt, Homo sapiens
  misc_RNA (1)...(19): siRNA sense strand
ggaguguauccuguuuauu

SEQ ID NO: 1610492 - RNA, 19 nt, Homo sapiens
  misc_RNA (1)...(19): siRNA sense strand
gaugaagacuggcccauuu

SEQ ID NO: 1610493 - RNA, 19 nt, Homo sapiens
  misc_RNA (1)...(19): siRNA sense strand
gaguguauccuguuuauua

SEQ ID NO: 1610494 - RNA, 19 nt, Homo sapiens
  misc_RNA (1)...(19): siRNA sense strand
ccggguggaugaccaaaua

SEQ ID NO: 1610495 - RNA, 19 nt, Homo sapiens
  misc_RNA (1)...(19): siRNA sense strand
ccagacacuuuguggauga

SEQ ID NO: 1610496 - RNA, 19 nt, Homo sapiens
  misc_RNA (1)...(19): siRNA sense strand
ggucucauccgcauguaua

SEQ ID NO: 1610497 - RNA, 19 nt, Homo sapiens
  misc_RNA (1)...(19): siRNA sense strand
ugccugagguggcuguuua

SEQ ID NO: 1610498 - RNA, 19 nt, Homo sapiens
  misc_RNA (1)...(19): siRNA sense strand
ccacaaggacuacauguuc

SEQ ID NO: 1610499 - RNA, 19 nt, Homo sapiens
  misc_RNA (1)...(19): siRNA sense strand
ggcauacgcugacuacauc

SEQ ID NO: 1610500 - RNA, 19 nt, Homo sapiens
  misc_RNA (1)...(19): siRNA sense strand
gcaguucgcagcugauaga

SEQ ID NO: 1610501 - RNA, 19 nt, Homo sapiens
  misc_RNA (1)...(19): siRNA sense strand
gagaaggccgugaaugaga

SEQ ID NO: 1610502 - RNA, 19 nt, Homo sapiens
  misc_RNA (1)...(19): siRNA sense strand
ccgagugccuggagaaguu

SEQ ID NO: 1610503 - RNA, 19 nt, Homo sapiens
  misc_RNA (1)...(19): siRNA sense strand
agaaggccgugaaugagaa

SEQ ID NO: 1610504 - RNA, 19 nt, Homo sapiens
  misc_RNA (1)...(19): siRNA sense strand
ugaaugagaaccacaagga

SEQ ID NO: 1610505 - RNA, 19 nt, Homo sapiens
  misc_RNA (1)...(19): siRNA sense strand
gaaccacaaggacuacaug

SEQ ID NO: 1610506 - RNA, 19 nt, Homo sapiens
  misc_RNA (1)...(19): siRNA sense strand
cuggagaaguucccuguga

SEQ ID NO: 1610507 - RNA, 19 nt, Homo sapiens
  misc_RNA (1)...(19): siRNA sense strand
gcugauagaccacccauac

SEQ ID NO: 1610508 - RNA, 19 nt, Homo sapiens
  misc_RNA (1)...(19): siRNA sense strand
uggaguguauccuguuuau

SEQ ID NO: 1610509 - RNA, 19 nt, Homo sapiens
  misc_RNA (1)...(19): siRNA sense strand
ccaaccagcuguggaacau

SEQ ID NO: 1610510 - RNA, 19 nt, Homo sapiens
  misc_RNA (1)...(19): siRNA sense strand
ggaaacuccagaaaacaua

SEQ ID NO: 1610511 - RNA, 19 nt, Homo sapiens
  misc_RNA (1)...(19): siRNA sense strand
ggagaaguucccugugauc

SEQ ID NO: 1610512 - RNA, 19 nt, Homo sapiens
  misc_RNA (1)...(19): siRNA sense strand
ccuggaguguauccuguuu

SEQ ID NO: 1610513 - RNA, 19 nt, Homo sapiens
  misc_RNA (1)...(19): siRNA sense strand
gacacuuuguggaugagaa

SEQ ID NO: 1610514 - RNA, 19 nt, Homo sapiens
  misc_RNA (1)...(19): siRNA sense strand
guggaugaccaaauagcua

SEQ ID NO: 1610515 - RNA, 19 nt, Homo sapiens
  misc_RNA (1)...(19): siRNA sense strand
gggcaguucgcagcugaua

SEQ ID NO: 1610516 - RNA, 19 nt, Homo sapiens
  misc_RNA (1)...(19): siRNA sense strand
aaccagcuguggaacauca

SEQ ID NO: 1610517 - RNA, 19 nt, Homo sapiens
  misc_RNA (1)...(19): siRNA sense strand
acauguuccuggaguguau

SEQ ID NO: 1610518 - RNA, 19 nt, Homo sapiens
  misc_RNA (1)...(19): siRNA sense strand
ggaacuccacgcgcauuga

SEQ ID NO: 1610519 - RNA, 19 nt, Homo sapiens
  misc_RNA (1)...(19): siRNA sense strand
gaagacuggcccauuugca

SEQ ID NO: 1610520 - RNA, 19 nt, Homo sapiens
  misc_RNA (1)...(19): siRNA sense strand
gcccagacacuuuguggau

SEQ ID NO: 1610521 - RNA, 19 nt, Homo sapiens
  misc_RNA (1)...(19): siRNA sense strand
augagaaggccgugaauga

SEQ ID NO: 1610522 - RNA, 19 nt, Homo sapiens
  misc_RNA (1)...(19): siRNA sense strand
gaugagaaggccgugaaug

SEQ ID NO: 1610523 - RNA, 19 nt, Homo sapiens
  misc_RNA (1)...(19): siRNA sense strand
aagcugaccuucgaguaca

SEQ ID NO: 1610524 - RNA, 19 nt, Homo sapiens
  misc_RNA (1)...(19): siRNA sense strand
gguguucaaucgguaccuu

SEQ ID NO: 1610525 - RNA, 19 nt, Homo sapiens
  misc_RNA (1)...(19): siRNA sense strand
uggagaaguucccugugau

SEQ ID NO: 1610526 - RNA, 19 nt, Homo sapiens
  misc_RNA (1)...(19): siRNA sense strand
gaacuccacgcgcauugac

SEQ ID NO: 1610527 - RNA, 19 nt, Homo sapiens
  misc_RNA (1)...(19): siRNA sense strand
uagcuauugucuucaaggu

SEQ ID NO: 1610528 - RNA, 19 nt, Homo sapiens
  misc_RNA (1)...(19): siRNA sense strand
gauucauccuuacccucaa

SEQ ID NO: 1610529 - RNA, 19 nt, Homo sapiens
  misc_RNA (1)...(19): siRNA sense strand
gcuuuccucugcugucucu

SEQ ID NO: 1610530 - RNA, 19 nt, Homo sapiens
  misc_RNA (1)...(19): siRNA sense strand
ugcugucucugcaagauug

SEQ ID NO: 1610531 - RNA, 19 nt, Homo sapiens
  misc_RNA (1)...(19): siRNA sense strand
gggaacuccacgcgcauug

SEQ ID NO: 1610532 - RNA, 19 nt, Homo sapiens
  misc_RNA (1)...(19): siRNA sense strand
aaagugaaccagggucuca

SEQ ID NO: 1610533 - RNA, 19 nt, Homo sapiens
  misc_RNA (1)...(19): siRNA sense strand
ggaguguauccuguuuauu

SEQ ID NO: 1610534 - RNA, 19 nt, Homo sapiens
  misc_RNA (1)...(19): siRNA sense strand
gaugaagacuggcccauuu

SEQ ID NO: 1610535 - RNA, 19 nt, Homo sapiens
  misc_RNA (1)...(19): siRNA sense strand
gaguguauccuguuuauua

SEQ ID NO: 1610536 - RNA, 19 nt, Homo sapiens
  misc_RNA (1)...(19): siRNA sense strand
ccagacacuuuguggauga

SEQ ID NO: 1610537 - RNA, 19 nt, Homo sapiens
  misc_RNA (1)...(19): siRNA sense strand
ggucucauccgcauguaua

SEQ ID NO: 1610538 - RNA, 19 nt, Homo sapiens
  misc_RNA (1)...(19): siRNA sense strand
ccacaaggacuacauguuc

SEQ ID NO: 1610539 - RNA, 19 nt, Homo sapiens
  misc_RNA (1)...(19): siRNA sense strand
gcaguucgcagcugauaga

SEQ ID NO: 1610540 - RNA, 19 nt, Homo sapiens
  misc_RNA (1)...(19): siRNA sense strand
gagaaggccgugaaugaga

SEQ ID NO: 1610541 - RNA, 19 nt, Homo sapiens
  misc_RNA (1)...(19): siRNA sense strand
ccgagugccuggagaaguu

SEQ ID NO: 1610542 - RNA, 19 nt, Homo sapiens
  misc_RNA (1)...(19): siRNA sense strand
agaaggccgugaaugagaa

SEQ ID NO: 1610543 - RNA, 19 nt, Homo sapiens
  misc_RNA (1)...(19): siRNA sense strand
ugaaugagaaccacaagga

SEQ ID NO: 1610544 - RNA, 19 nt, Homo sapiens
  misc_RNA (1)...(19): siRNA sense strand
gaaccacaaggacuacaug

SEQ ID NO: 1610545 - RNA, 19 nt, Homo sapiens
  misc_RNA (1)...(19): siRNA sense strand
cuggagaaguucccuguga

SEQ ID NO: 1610546 - RNA, 19 nt, Homo sapiens
  misc_RNA (1)...(19): siRNA sense strand
gcugauagaccacccauac

SEQ ID NO: 1610547 - RNA, 19 nt, Homo sapiens
  misc_RNA (1)...(19): siRNA sense strand
uggaguguauccuguuuau

SEQ ID NO: 1610548 - RNA, 19 nt, Homo sapiens
  misc_RNA (1)...(19): siRNA sense strand
ccaaccagcuguggaacau

SEQ ID NO: 1610549 - RNA, 19 nt, Homo sapiens
  misc_RNA (1)...(19): siRNA sense strand
gacacuuuguggaugagaa

SEQ ID NO: 1610550 - RNA, 19 nt, Homo sapiens
  misc_RNA (1)...(19): siRNA sense strand
ggagaaguucccugugauc

SEQ ID NO: 1610551 - RNA, 19 nt, Homo sapiens
  misc_RNA (1)...(19): siRNA sense strand
ggaaacuccagaaaacaua

SEQ ID NO: 1610552 - RNA, 19 nt, Homo sapiens
  misc_RNA (1)...(19): siRNA sense strand
ccuggaguguauccuguuu

SEQ ID NO: 1610553 - RNA, 19 nt, Homo sapiens
  misc_RNA (1)...(19): siRNA sense strand
gggcaguucgcagcugaua

SEQ ID NO: 1610554 - RNA, 19 nt, Homo sapiens
  misc_RNA (1)...(19): siRNA sense strand
aaccagcuguggaacauca

SEQ ID NO: 1610555 - RNA, 19 nt, Homo sapiens
  misc_RNA (1)...(19): siRNA sense strand
acauguuccuggaguguau

SEQ ID NO: 1610556 - RNA, 19 nt, Homo sapiens
  misc_RNA (1)...(19): siRNA sense strand
gcccagacacuuuguggau

SEQ ID NO: 1610557 - RNA, 19 nt, Homo sapiens
  misc_RNA (1)...(19): siRNA sense strand
gaagacuggcccauuugca

SEQ ID NO: 1610558 - RNA, 19 nt, Homo sapiens
  misc_RNA (1)...(19): siRNA sense strand
augagaaggccgugaauga

SEQ ID NO: 1610559 - RNA, 19 nt, Homo sapiens
  misc_RNA (1)...(19): siRNA sense strand
gaugagaaggccgugaaug

SEQ ID NO: 1610560 - RNA, 19 nt, Homo sapiens
  misc_RNA (1)...(19): siRNA sense strand
uggagaaguucccugugau

SEQ ID NO: 1610561 - RNA, 19 nt, Homo sapiens
  misc_RNA (1)...(19): siRNA sense strand
ggaguguauccuguuuauu

SEQ ID NO: 1610562 - RNA, 19 nt, Homo sapiens
  misc_RNA (1)...(19): siRNA sense strand
aaagugaaccagggucuca

SEQ ID NO: 1610563 - RNA, 19 nt, Homo sapiens
  misc_RNA (1)...(19): siRNA sense strand
gaugaagacuggcccauuu

SEQ ID NO: 1610564 - RNA, 19 nt, Homo sapiens
  misc_RNA (1)...(19): siRNA sense strand
gaguguauccuguuuauua

SEQ ID NO: 1610565 - RNA, 19 nt, Homo sapiens
  misc_RNA (1)...(19): siRNA sense strand
ccggguggaugaccaaaua

SEQ ID NO: 1610566 - RNA, 19 nt, Homo sapiens
  misc_RNA (1)...(19): siRNA sense strand
ccagacacuuuguggauga

SEQ ID NO: 1610567 - RNA, 19 nt, Homo sapiens
  misc_RNA (1)...(19): siRNA sense strand
ggucucauccgcauguaua

SEQ ID NO: 1610568 - RNA, 19 nt, Homo sapiens
  misc_RNA (1)...(19): siRNA sense strand
ugccugagguggcuguuua

SEQ ID NO: 1610569 - RNA, 19 nt, Homo sapiens
  misc_RNA (1)...(19): siRNA sense strand
ccacaaggacuacauguuc

SEQ ID NO: 1610570 - RNA, 19 nt, Homo sapiens
  misc_RNA (1)...(19): siRNA sense strand
ggcauacgcugacuacauc

SEQ ID NO: 1610571 - RNA, 19 nt, Homo sapiens
  misc_RNA (1)...(19): siRNA sense strand
gcaguucgcagcugauaga

SEQ ID NO: 1610572 - RNA, 19 nt, Homo sapiens
  misc_RNA (1)...(19): siRNA sense strand
gagaaggccgugaaugaga

SEQ ID NO: 1610573 - RNA, 19 nt, Homo sapiens
  misc_RNA (1)...(19): siRNA sense strand
ccgagugccuggagaaguu

SEQ ID NO: 1610574 - RNA, 19 nt, Homo sapiens
  misc_RNA (1)...(19): siRNA sense strand
agaaggccgugaaugagaa

SEQ ID NO: 1610575 - RNA, 19 nt, Homo sapiens
  misc_RNA (1)...(19): siRNA sense strand
ugaaugagaaccacaagga

SEQ ID NO: 1610576 - RNA, 19 nt, Homo sapiens
  misc_RNA (1)...(19): siRNA sense strand
gaaccacaaggacuacaug

SEQ ID NO: 1610577 - RNA, 19 nt, Homo sapiens
  misc_RNA (1)...(19): siRNA sense strand
cuggagaaguucccuguga

SEQ ID NO: 1610578 - RNA, 19 nt, Homo sapiens
  misc_RNA (1)...(19): siRNA sense strand
gcugauagaccacccauac

SEQ ID NO: 1610579 - RNA, 19 nt, Homo sapiens
  misc_RNA (1)...(19): siRNA sense strand
uggaguguauccuguuuau

SEQ ID NO: 1610580 - RNA, 19 nt, Homo sapiens
  misc_RNA (1)...(19): siRNA sense strand
ccaaccagcuguggaacau

SEQ ID NO: 1610581 - RNA, 19 nt, Homo sapiens
  misc_RNA (1)...(19): siRNA sense strand
ggaaacuccagaaaacaua

SEQ ID NO: 1610582 - RNA, 19 nt, Homo sapiens
  misc_RNA (1)...(19): siRNA sense strand
ggagaaguucccugugauc

SEQ ID NO: 1610583 - RNA, 19 nt, Homo sapiens
  misc_RNA (1)...(19): siRNA sense strand
ccuggaguguauccuguuu

SEQ ID NO: 1610584 - RNA, 19 nt, Homo sapiens
  misc_RNA (1)...(19): siRNA sense strand
gacacuuuguggaugagaa

SEQ ID NO: 1610585 - RNA, 19 nt, Homo sapiens
  misc_RNA (1)...(19): siRNA sense strand
guggaugaccaaauagcua

SEQ ID NO: 1610586 - RNA, 19 nt, Homo sapiens
  misc_RNA (1)...(19): siRNA sense strand
gggcaguucgcagcugaua

SEQ ID NO: 1610587 - RNA, 19 nt, Homo sapiens
  misc_RNA (1)...(19): siRNA sense strand
aaccagcuguggaacauca

SEQ ID NO: 1610588 - RNA, 19 nt, Homo sapiens
  misc_RNA (1)...(19): siRNA sense strand
acauguuccuggaguguau

SEQ ID NO: 1610589 - RNA, 19 nt, Homo sapiens
  misc_RNA (1)...(19): siRNA sense strand
ggaacuccacgcgcauuga

SEQ ID NO: 1610590 - RNA, 19 nt, Homo sapiens
  misc_RNA (1)...(19): siRNA sense strand
gaagacuggcccauuugca

SEQ ID NO: 1610591 - RNA, 19 nt, Homo sapiens
  misc_RNA (1)...(19): siRNA sense strand
gcccagacacuuuguggau

SEQ ID NO: 1610592 - RNA, 19 nt, Homo sapiens
  misc_RNA (1)...(19): siRNA sense strand
augagaaggccgugaauga

SEQ ID NO: 1610593 - RNA, 19 nt, Homo sapiens
  misc_RNA (1)...(19): siRNA sense strand
gaugagaaggccgugaaug

SEQ ID NO: 1610594 - RNA, 19 nt, Homo sapiens
  misc_RNA (1)...(19): siRNA sense strand
aagcugaccuucgaguaca

SEQ ID NO: 1610595 - RNA, 19 nt, Homo sapiens
  misc_RNA (1)...(19): siRNA sense strand
gguguucaaucgguaccuu

SEQ ID NO: 1610596 - RNA, 19 nt, Homo sapiens
  misc_RNA (1)...(19): siRNA sense strand
uggagaaguucccugugau

SEQ ID NO: 1610597 - RNA, 19 nt, Homo sapiens
  misc_RNA (1)...(19): siRNA sense strand
gaacuccacgcgcauugac

SEQ ID NO: 1610598 - RNA, 19 nt, Homo sapiens
  misc_RNA (1)...(19): siRNA sense strand
uagcuauugucuucaaggu

SEQ ID NO: 1610599 - RNA, 19 nt, Homo sapiens
  misc_RNA (1)...(19): siRNA sense strand
gauucauccuuacccucaa

SEQ ID NO: 1610600 - RNA, 19 nt, Homo sapiens
  misc_RNA (1)...(19): siRNA sense strand
gcuuuccucugcugucucu

SEQ ID NO: 1610601 - RNA, 19 nt, Homo sapiens
  misc_RNA (1)...(19): siRNA sense strand
ugcugucucugcaagauug

SEQ ID NO: 1610602 - RNA, 19 nt, Homo sapiens
  misc_RNA (1)...(19): siRNA sense strand
gggaacuccacgcgcauug

SEQ ID NO: 1610603 - RNA, 19 nt, Homo sapiens
  misc_RNA (1)...(19): siRNA sense strand
aaagugaaccagggucuca

SEQ ID NO: 1610604 - RNA, 19 nt, Homo sapiens
  misc_RNA (1)...(19): siRNA sense strand
ggaguguauccuguuuauu

SEQ ID NO: 1610605 - RNA, 19 nt, Homo sapiens
  misc_RNA (1)...(19): siRNA sense strand
gaugaagacuggcccauuu

SEQ ID NO: 1610606 - RNA, 19 nt, Homo sapiens
  misc_RNA (1)...(19): siRNA sense strand
gaguguauccuguuuauua

SEQ ID NO: 1610607 - RNA, 19 nt, Homo sapiens
  misc_RNA (1)...(19): siRNA sense strand
ccggguggaugaccaaaua

SEQ ID NO: 1610608 - RNA, 19 nt, Homo sapiens
  misc_RNA (1)...(19): siRNA sense strand
ccagacacuuuguggauga

SEQ ID NO: 1610609 - RNA, 19 nt, Homo sapiens
  misc_RNA (1)...(19): siRNA sense strand
ggucucauccgcauguaua

SEQ ID NO: 1610610 - RNA, 19 nt, Homo sapiens
  misc_RNA (1)...(19): siRNA sense strand
ugccugagguggcuguuua

SEQ ID NO: 1610611 - RNA, 19 nt, Homo sapiens
  misc_RNA (1)...(19): siRNA sense strand
ccacaaggacuacauguuc

SEQ ID NO: 1610612 - RNA, 19 nt, Homo sapiens
  misc_RNA (1)...(19): siRNA sense strand
ggcauacgcugacuacauc

SEQ ID NO: 1610613 - RNA, 19 nt, Homo sapiens
  misc_RNA (1)...(19): siRNA sense strand
gcaguucgcagcugauaga

SEQ ID NO: 1610614 - RNA, 19 nt, Homo sapiens
  misc_RNA (1)...(19): siRNA sense strand
gagaaggccgugaaugaga

SEQ ID NO: 1610615 - RNA, 19 nt, Homo sapiens
  misc_RNA (1)...(19): siRNA sense strand
ccgagugccuggagaaguu

SEQ ID NO: 1610616 - RNA, 19 nt, Homo sapiens
  misc_RNA (1)...(19): siRNA sense strand
agaaggccgugaaugagaa

SEQ ID NO: 1610617 - RNA, 19 nt, Homo sapiens
  misc_RNA (1)...(19): siRNA sense strand
ugaaugagaaccacaagga

SEQ ID NO: 1610618 - RNA, 19 nt, Homo sapiens
  misc_RNA (1)...(19): siRNA sense strand
gaaccacaaggacuacaug

SEQ ID NO: 1610619 - RNA, 19 nt, Homo sapiens
  misc_RNA (1)...(19): siRNA sense strand
cuggagaaguucccuguga

SEQ ID NO: 1610620 - RNA, 19 nt, Homo sapiens
  misc_RNA (1)...(19): siRNA sense strand
gcugauagaccacccauac

SEQ ID NO: 1610621 - RNA, 19 nt, Homo sapiens
  misc_RNA (1)...(19): siRNA sense strand
uggaguguauccuguuuau

SEQ ID NO: 1610622 - RNA, 19 nt, Homo sapiens
  misc_RNA (1)...(19): siRNA sense strand
ccaaccagcuguggaacau

SEQ ID NO: 1610623 - RNA, 19 nt, Homo sapiens
  misc_RNA (1)...(19): siRNA sense strand
ggaaacuccagaaaacaua

SEQ ID NO: 1610624 - RNA, 19 nt, Homo sapiens
  misc_RNA (1)...(19): siRNA sense strand
ggagaaguucccugugauc

SEQ ID NO: 1610625 - RNA, 19 nt, Homo sapiens
  misc_RNA (1)...(19): siRNA sense strand
ccuggaguguauccuguuu

SEQ ID NO: 1610626 - RNA, 19 nt, Homo sapiens
  misc_RNA (1)...(19): siRNA sense strand
gacacuuuguggaugagaa

SEQ ID NO: 1610627 - RNA, 19 nt, Homo sapiens
  misc_RNA (1)...(19): siRNA sense strand
guggaugaccaaauagcua

SEQ ID NO: 1610628 - RNA, 19 nt, Homo sapiens
  misc_RNA (1)...(19): siRNA sense strand
gggcaguucgcagcugaua

SEQ ID NO: 1610629 - RNA, 19 nt, Homo sapiens
  misc_RNA (1)...(19): siRNA sense strand
aaccagcuguggaacauca

SEQ ID NO: 1610630 - RNA, 19 nt, Homo sapiens
  misc_RNA (1)...(19): siRNA sense strand
acauguuccuggaguguau

SEQ ID NO: 1610631 - RNA, 19 nt, Homo sapiens
  misc_RNA (1)...(19): siRNA sense strand
ggaacuccacgcgcauuga

SEQ ID NO: 1610632 - RNA, 19 nt, Homo sapiens
  misc_RNA (1)...(19): siRNA sense strand
gaagacuggcccauuugca

SEQ ID NO: 1610633 - RNA, 19 nt, Homo sapiens
  misc_RNA (1)...(19): siRNA sense strand
gcccagacacuuuguggau

SEQ ID NO: 1610634 - RNA, 19 nt, Homo sapiens
  misc_RNA (1)...(19): siRNA sense strand
augagaaggccgugaauga

SEQ ID NO: 1610635 - RNA, 19 nt, Homo sapiens
  misc_RNA (1)...(19): siRNA sense strand
gaugagaaggccgugaaug

SEQ ID NO: 1610636 - RNA, 19 nt, Homo sapiens
  misc_RNA (1)...(19): siRNA sense strand
aagcugaccuucgaguaca

SEQ ID NO: 1610637 - RNA, 19 nt, Homo sapiens
  misc_RNA (1)...(19): siRNA sense strand
gguguucaaucgguaccuu

SEQ ID NO: 1610638 - RNA, 19 nt, Homo sapiens
  misc_RNA (1)...(19): siRNA sense strand
uggagaaguucccugugau

SEQ ID NO: 1610639 - RNA, 19 nt, Homo sapiens
  misc_RNA (1)...(19): siRNA sense strand
gaacuccacgcgcauugac

SEQ ID NO: 1610640 - RNA, 19 nt, Homo sapiens
  misc_RNA (1)...(19): siRNA sense strand
uagcuauugucuucaaggu

SEQ ID NO: 1610641 - RNA, 19 nt, Homo sapiens
  misc_RNA (1)...(19): siRNA sense strand
gauucauccuuacccucaa

SEQ ID NO: 1610642 - RNA, 19 nt, Homo sapiens
  misc_RNA (1)...(19): siRNA sense strand
gcuuuccucugcugucucu

SEQ ID NO: 1610643 - RNA, 19 nt, Homo sapiens
  misc_RNA (1)...(19): siRNA sense strand
ugcugucucugcaagauug

SEQ ID NO: 1610644 - RNA, 19 nt, Homo sapiens
  misc_RNA (1)...(19): siRNA sense strand
gggaacuccacgcgcauug

SEQ ID NO: 1610645 - RNA, 19 nt, Homo sapiens
  misc_RNA (1)...(19): siRNA sense strand
aaagugaaccagggucuca

SEQ ID NO: 1610646 - RNA, 19 nt, Homo sapiens
  misc_RNA (1)...(19): siRNA sense strand
ggaguguauccuguuuauu

SEQ ID NO: 1610647 - RNA, 19 nt, Homo sapiens
  misc_RNA (1)...(19): siRNA sense strand
gaugaagacuggcccauuu

SEQ ID NO: 1610648 - RNA, 19 nt, Homo sapiens
  misc_RNA (1)...(19): siRNA sense strand
gaguguauccuguuuauua

SEQ ID NO: 1610649 - RNA, 19 nt, Homo sapiens
  misc_RNA (1)...(19): siRNA sense strand
ccggguggaugaccaaaua

SEQ ID NO: 1610650 - RNA, 19 nt, Homo sapiens
  misc_RNA (1)...(19): siRNA sense strand
ccagacacuuuguggauga

SEQ ID NO: 1610651 - RNA, 19 nt, Homo sapiens
  misc_RNA (1)...(19): siRNA sense strand
ggucucauccgcauguaua

SEQ ID NO: 1610652 - RNA, 19 nt, Homo sapiens
  misc_RNA (1)...(19): siRNA sense strand
ugccugagguggcuguuua

SEQ ID NO: 1610653 - RNA, 19 nt, Homo sapiens
  misc_RNA (1)...(19): siRNA sense strand
ccacaaggacuacauguuc

SEQ ID NO: 1610654 - RNA, 19 nt, Homo sapiens
  misc_RNA (1)...(19): siRNA sense strand
ggcauacgcugacuacauc

SEQ ID NO: 1610655 - RNA, 19 nt, Homo sapiens
  misc_RNA (1)...(19): siRNA sense strand
gcaguucgcagcugauaga

SEQ ID NO: 1610656 - RNA, 19 nt, Homo sapiens
  misc_RNA (1)...(19): siRNA sense strand
gagaaggccgugaaugaga

SEQ ID NO: 1610657 - RNA, 19 nt, Homo sapiens
  misc_RNA (1)...(19): siRNA sense strand
ccgagugccuggagaaguu

SEQ ID NO: 1610658 - RNA, 19 nt, Homo sapiens
  misc_RNA (1)...(19): siRNA sense strand
agaaggccgugaaugagaa

SEQ ID NO: 1610659 - RNA, 19 nt, Homo sapiens
  misc_RNA (1)...(19): siRNA sense strand
ugaaugagaaccacaagga

SEQ ID NO: 1610660 - RNA, 19 nt, Homo sapiens
  misc_RNA (1)...(19): siRNA sense strand
gaaccacaaggacuacaug

SEQ ID NO: 1610661 - RNA, 19 nt, Homo sapiens
  misc_RNA (1)...(19): siRNA sense strand
cuggagaaguucccuguga

SEQ ID NO: 1610662 - RNA, 19 nt, Homo sapiens
  misc_RNA (1)...(19): siRNA sense strand
gcugauagaccacccauac

SEQ ID NO: 1610663 - RNA, 19 nt, Homo sapiens
  misc_RNA (1)...(19): siRNA sense strand
uggaguguauccuguuuau

SEQ ID NO: 1610664 - RNA, 19 nt, Homo sapiens
  misc_RNA (1)...(19): siRNA sense strand
ccaaccagcuguggaacau

SEQ ID NO: 1610665 - RNA, 19 nt, Homo sapiens
  misc_RNA (1)...(19): siRNA sense strand
ggaaacuccagaaaacaua

SEQ ID NO: 1610666 - RNA, 19 nt, Homo sapiens
  misc_RNA (1)...(19): siRNA sense strand
ggagaaguucccugugauc

SEQ ID NO: 1610667 - RNA, 19 nt, Homo sapiens
  misc_RNA (1)...(19): siRNA sense strand
ccuggaguguauccuguuu

SEQ ID NO: 1610668 - RNA, 19 nt, Homo sapiens
  misc_RNA (1)...(19): siRNA sense strand
gacacuuuguggaugagaa

SEQ ID NO: 1610669 - RNA, 19 nt, Homo sapiens
  misc_RNA (1)...(19): siRNA sense strand
guggaugaccaaauagcua

SEQ ID NO: 1610670 - RNA, 19 nt, Homo sapiens
  misc_RNA (1)...(19): siRNA sense strand
gggcaguucgcagcugaua

SEQ ID NO: 1610671 - RNA, 19 nt, Homo sapiens
  misc_RNA (1)...(19): siRNA sense strand
aaccagcuguggaacauca

SEQ ID NO: 1610672 - RNA, 19 nt, Homo sapiens
  misc_RNA (1)...(19): siRNA sense strand
acauguuccuggaguguau

SEQ ID NO: 1610673 - RNA, 19 nt, Homo sapiens
  misc_RNA (1)...(19): siRNA sense strand
ggaacuccacgcgcauuga

SEQ ID NO: 1610674 - RNA, 19 nt, Homo sapiens
  misc_RNA (1)...(19): siRNA sense strand
gaagacuggcccauuugca

SEQ ID NO: 1610675 - RNA, 19 nt, Homo sapiens
  misc_RNA (1)...(19): siRNA sense strand
gcccagacacuuuguggau

SEQ ID NO: 1610676 - RNA, 19 nt, Homo sapiens
  misc_RNA (1)...(19): siRNA sense strand
augagaaggccgugaauga

SEQ ID NO: 1610677 - RNA, 19 nt, Homo sapiens
  misc_RNA (1)...(19): siRNA sense strand
gaugagaaggccgugaaug

SEQ ID NO: 1610678 - RNA, 19 nt, Homo sapiens
  misc_RNA (1)...(19): siRNA sense strand
aagcugaccuucgaguaca

SEQ ID NO: 1610679 - RNA, 19 nt, Homo sapiens
  misc_RNA (1)...(19): siRNA sense strand
gguguucaaucgguaccuu

SEQ ID NO: 1610680 - RNA, 19 nt, Homo sapiens
  misc_RNA (1)...(19): siRNA sense strand
uggagaaguucccugugau

SEQ ID NO: 1610681 - RNA, 19 nt, Homo sapiens
  misc_RNA (1)...(19): siRNA sense strand
gaacuccacgcgcauugac

SEQ ID NO: 1610682 - RNA, 19 nt, Homo sapiens
  misc_RNA (1)...(19): siRNA sense strand
uagcuauugucuucaaggu

SEQ ID NO: 1610683 - RNA, 19 nt, Homo sapiens
  misc_RNA (1)...(19): siRNA sense strand
gauucauccuuacccucaa

SEQ ID NO: 1610684 - RNA, 19 nt, Homo sapiens
  misc_RNA (1)...(19): siRNA sense strand
gcuuuccucugcugucucu

SEQ ID NO: 1610685 - RNA, 19 nt, Homo sapiens
  misc_RNA (1)...(19): siRNA sense strand
ugcugucucugcaagauug

SEQ ID NO: 1610686 - RNA, 19 nt, Homo sapiens
  misc_RNA (1)...(19): siRNA sense strand
gggaacuccacgcgcauug

SEQ ID NO: 1610687 - RNA, 19 nt, Homo sapiens
  misc_RNA (1)...(19): siRNA sense strand
aaagugaaccagggucuca

SEQ ID NO: 1610688 - RNA, 19 nt, Homo sapiens
  misc_RNA (1)...(19): siRNA sense strand
ggaguguauccuguuuauu

SEQ ID NO: 1610689 - RNA, 19 nt, Homo sapiens
  misc_RNA (1)...(19): siRNA sense strand
gaugaagacuggcccauuu

SEQ ID NO: 1610690 - RNA, 19 nt, Homo sapiens
  misc_RNA (1)...(19): siRNA sense strand
gaguguauccuguuuauua

SEQ ID NO: 1610691 - RNA, 19 nt, Homo sapiens
  misc_RNA (1)...(19): siRNA sense strand
ccggguggaugaccaaaua

SEQ ID NO: 1610692 - RNA, 19 nt, Homo sapiens
  misc_RNA (1)...(19): siRNA sense strand
ccagacacuuuguggauga

SEQ ID NO: 1610693 - RNA, 19 nt, Homo sapiens
  misc_RNA (1)...(19): siRNA sense strand
ggucucauccgcauguaua

SEQ ID NO: 1610694 - RNA, 19 nt, Homo sapiens
  misc_RNA (1)...(19): siRNA sense strand
ugccugagguggcuguuua

SEQ ID NO: 1610695 - RNA, 19 nt, Homo sapiens
  misc_RNA (1)...(19): siRNA sense strand
ccacaaggacuacauguuc

SEQ ID NO: 1610696 - RNA, 19 nt, Homo sapiens
  misc_RNA (1)...(19): siRNA sense strand
ggcauacgcugacuacauc

SEQ ID NO: 1610697 - RNA, 19 nt, Homo sapiens
  misc_RNA (1)...(19): siRNA sense strand
gcaguucgcagcugauaga

SEQ ID NO: 1610698 - RNA, 19 nt, Homo sapiens
  misc_RNA (1)...(19): siRNA sense strand
gagaaggccgugaaugaga

SEQ ID NO: 1610699 - RNA, 19 nt, Homo sapiens
  misc_RNA (1)...(19): siRNA sense strand
ccgagugccuggagaaguu

SEQ ID NO: 1610700 - RNA, 19 nt, Homo sapiens
  misc_RNA (1)...(19): siRNA sense strand
agaaggccgugaaugagaa

SEQ ID NO: 1610701 - RNA, 19 nt, Homo sapiens
  misc_RNA (1)...(19): siRNA sense strand
ugaaugagaaccacaagga

SEQ ID NO: 1610702 - RNA, 19 nt, Homo sapiens
  misc_RNA (1)...(19): siRNA sense strand
gaaccacaaggacuacaug

SEQ ID NO: 1610703 - RNA, 19 nt, Homo sapiens
  misc_RNA (1)...(19): siRNA sense strand
cuggagaaguucccuguga

SEQ ID NO: 1610704 - RNA, 19 nt, Homo sapiens
  misc_RNA (1)...(19): siRNA sense strand
gcugauagaccacccauac

SEQ ID NO: 1610705 - RNA, 19 nt, Homo sapiens
  misc_RNA (1)...(19): siRNA sense strand
uggaguguauccuguuuau

SEQ ID NO: 1610706 - RNA, 19 nt, Homo sapiens
  misc_RNA (1)...(19): siRNA sense strand
ccaaccagcuguggaacau

SEQ ID NO: 1610707 - RNA, 19 nt, Homo sapiens
  misc_RNA (1)...(19): siRNA sense strand
ggaaacuccagaaaacaua

SEQ ID NO: 1610708 - RNA, 19 nt, Homo sapiens
  misc_RNA (1)...(19): siRNA sense strand
ggagaaguucccugugauc

SEQ ID NO: 1610709 - RNA, 19 nt, Homo sapiens
  misc_RNA (1)...(19): siRNA sense strand
ccuggaguguauccuguuu

SEQ ID NO: 1610710 - RNA, 19 nt, Homo sapiens
  misc_RNA (1)...(19): siRNA sense strand
gacacuuuguggaugagaa

SEQ ID NO: 1610711 - RNA, 19 nt, Homo sapiens
  misc_RNA (1)...(19): siRNA sense strand
guggaugaccaaauagcua

SEQ ID NO: 1610712 - RNA, 19 nt, Homo sapiens
  misc_RNA (1)...(19): siRNA sense strand
gggcaguucgcagcugaua

SEQ ID NO: 1610713 - RNA, 19 nt, Homo sapiens
  misc_RNA (1)...(19): siRNA sense strand
aaccagcuguggaacauca

SEQ ID NO: 1610714 - RNA, 19 nt, Homo sapiens
  misc_RNA (1)...(19): siRNA sense strand
acauguuccuggaguguau

SEQ ID NO: 1610715 - RNA, 19 nt, Homo sapiens
  misc_RNA (1)...(19): siRNA sense strand
ggaacuccacgcgcauuga

SEQ ID NO: 1610716 - RNA, 19 nt, Homo sapiens
  misc_RNA (1)...(19): siRNA sense strand
gaagacuggcccauuugca

SEQ ID NO: 1610717 - RNA, 19 nt, Homo sapiens
  misc_RNA (1)...(19): siRNA sense strand
gcccagacacuuuguggau

SEQ ID NO: 1610718 - RNA, 19 nt, Homo sapiens
  misc_RNA (1)...(19): siRNA sense strand
augagaaggccgugaauga

SEQ ID NO: 1610719 - RNA, 19 nt, Homo sapiens
  misc_RNA (1)...(19): siRNA sense strand
gaugagaaggccgugaaug

SEQ ID NO: 1610720 - RNA, 19 nt, Homo sapiens
  misc_RNA (1)...(19): siRNA sense strand
aagcugaccuucgaguaca

SEQ ID NO: 1610721 - RNA, 19 nt, Homo sapiens
  misc_RNA (1)...(19): siRNA sense strand
gguguucaaucgguaccuu

SEQ ID NO: 1610722 - RNA, 19 nt, Homo sapiens
  misc_RNA (1)...(19): siRNA sense strand
uggagaaguucccugugau

SEQ ID NO: 1610723 - RNA, 19 nt, Homo sapiens
  misc_RNA (1)...(19): siRNA sense strand
gaacuccacgcgcauugac

SEQ ID NO: 1610724 - RNA, 19 nt, Homo sapiens
  misc_RNA (1)...(19): siRNA sense strand
uagcuauugucuucaaggu

SEQ ID NO: 1610725 - RNA, 19 nt, Homo sapiens
  misc_RNA (1)...(19): siRNA sense strand
gauucauccuuacccucaa

SEQ ID NO: 1610726 - RNA, 19 nt, Homo sapiens
  misc_RNA (1)...(19): siRNA sense strand
gcuuuccucugcugucucu

SEQ ID NO: 1610727 - RNA, 19 nt, Homo sapiens
  misc_RNA (1)...(19): siRNA sense strand
ugcugucucugcaagauug

SEQ ID NO: 1610728 - RNA, 19 nt, Homo sapiens
  misc_RNA (1)...(19): siRNA sense strand
gggaacuccacgcgcauug

SEQ ID NO: 1610729 - RNA, 19 nt, Homo sapiens
  misc_RNA (1)...(19): siRNA sense strand
aaagugaaccagggucuca

SEQ ID NO: 1610730 - RNA, 19 nt, Homo sapiens
  misc_RNA (1)...(19): siRNA sense strand
ggaguguauccuguuuauu

SEQ ID NO: 1610731 - RNA, 19 nt, Homo sapiens
  misc_RNA (1)...(19): siRNA sense strand
gaugaagacuggcccauuu

SEQ ID NO: 1610732 - RNA, 19 nt, Homo sapiens
  misc_RNA (1)...(19): siRNA sense strand
gaguguauccuguuuauua

SEQ ID NO: 1610733 - RNA, 19 nt, Homo sapiens
  misc_RNA (1)...(19): siRNA sense strand
ccagacacuuuguggauga

SEQ ID NO: 1610734 - RNA, 19 nt, Homo sapiens
  misc_RNA (1)...(19): siRNA sense strand
ggucucauccgcauguaua

SEQ ID NO: 1610735 - RNA, 19 nt, Homo sapiens
  misc_RNA (1)...(19): siRNA sense strand
ccacaaggacuacauguuc

SEQ ID NO: 1610736 - RNA, 19 nt, Homo sapiens
  misc_RNA (1)...(19): siRNA sense strand
gcaguucgcagcugauaga

SEQ ID NO: 1610737 - RNA, 19 nt, Homo sapiens
  misc_RNA (1)...(19): siRNA sense strand
gagaaggccgugaaugaga

SEQ ID NO: 1610738 - RNA, 19 nt, Homo sapiens
  misc_RNA (1)...(19): siRNA sense strand
ccgagugccuggagaaguu

SEQ ID NO: 1610739 - RNA, 19 nt, Homo sapiens
  misc_RNA (1)...(19): siRNA sense strand
agaaggccgugaaugagaa

SEQ ID NO: 1610740 - RNA, 19 nt, Homo sapiens
  misc_RNA (1)...(19): siRNA sense strand
ugaaugagaaccacaagga

SEQ ID NO: 1610741 - RNA, 19 nt, Homo sapiens
  misc_RNA (1)...(19): siRNA sense strand
gaaccacaaggacuacaug

SEQ ID NO: 1610742 - RNA, 19 nt, Homo sapiens
  misc_RNA (1)...(19): siRNA sense strand
cuggagaaguucccuguga

SEQ ID NO: 1610743 - RNA, 19 nt, Homo sapiens
  misc_RNA (1)...(19): siRNA sense strand
gcugauagaccacccauac

SEQ ID NO: 1610744 - RNA, 19 nt, Homo sapiens
  misc_RNA (1)...(19): siRNA sense strand
uggaguguauccuguuuau

SEQ ID NO: 1610745 - RNA, 19 nt, Homo sapiens
  misc_RNA (1)...(19): siRNA sense strand
ccaaccagcuguggaacau

SEQ ID NO: 1610746 - RNA, 19 nt, Homo sapiens
  misc_RNA (1)...(19): siRNA sense strand
gacacuuuguggaugagaa

SEQ ID NO: 1610747 - RNA, 19 nt, Homo sapiens
  misc_RNA (1)...(19): siRNA sense strand
ggagaaguucccugugauc

SEQ ID NO: 1610748 - RNA, 19 nt, Homo sapiens
  misc_RNA (1)...(19): siRNA sense strand
ggaaacuccagaaaacaua

SEQ ID NO: 1610749 - RNA, 19 nt, Homo sapiens
  misc_RNA (1)...(19): siRNA sense strand
ccuggaguguauccuguuu

SEQ ID NO: 1610750 - RNA, 19 nt, Homo sapiens
  misc_RNA (1)...(19): siRNA sense strand
gggcaguucgcagcugaua

SEQ ID NO: 1610751 - RNA, 19 nt, Homo sapiens
  misc_RNA (1)...(19): siRNA sense strand
aaccagcuguggaacauca

SEQ ID NO: 1610752 - RNA, 19 nt, Homo sapiens
  misc_RNA (1)...(19): siRNA sense strand
acauguuccuggaguguau

SEQ ID NO: 1610753 - RNA, 19 nt, Homo sapiens
  misc_RNA (1)...(19): siRNA sense strand
gcccagacacuuuguggau

SEQ ID NO: 1610754 - RNA, 19 nt, Homo sapiens
  misc_RNA (1)...(19): siRNA sense strand
gaagacuggcccauuugca

SEQ ID NO: 1610755 - RNA, 19 nt, Homo sapiens
  misc_RNA (1)...(19): siRNA sense strand
augagaaggccgugaauga

SEQ ID NO: 1610756 - RNA, 19 nt, Homo sapiens
  misc_RNA (1)...(19): siRNA sense strand
gaugagaaggccgugaaug

SEQ ID NO: 1610757 - RNA, 19 nt, Homo sapiens
  misc_RNA (1)...(19): siRNA sense strand
uggagaaguucccugugau

SEQ ID NO: 1610758 - RNA, 19 nt, Homo sapiens
  misc_RNA (1)...(19): siRNA sense strand
ggaguguauccuguuuauu

SEQ ID NO: 1610759 - RNA, 19 nt, Homo sapiens
  misc_RNA (1)...(19): siRNA sense strand
aaagugaaccagggucuca

SEQ ID NO: 1610760 - RNA, 19 nt, Homo sapiens
  misc_RNA (1)...(19): siRNA sense strand
gaugaagacuggcccauuu

SEQ ID NO: 1610761 - RNA, 19 nt, Homo sapiens
  misc_RNA (1)...(19): siRNA sense strand
gaguguauccuguuuauua

SEQ ID NO: 1610762 - RNA, 19 nt, Homo sapiens
  misc_RNA (1)...(19): siRNA sense strand
ccggguggaugaccaaaua

SEQ ID NO: 1610763 - RNA, 19 nt, Homo sapiens
  misc_RNA (1)...(19): siRNA sense strand
ccagacacuuuguggauga

SEQ ID NO: 1610764 - RNA, 19 nt, Homo sapiens
  misc_RNA (1)...(19): siRNA sense strand
ggucucauccgcauguaua

SEQ ID NO: 1610765 - RNA, 19 nt, Homo sapiens
  misc_RNA (1)...(19): siRNA sense strand
ugccugagguggcuguuua

SEQ ID NO: 1610766 - RNA, 19 nt, Homo sapiens
  misc_RNA (1)...(19): siRNA sense strand
ccacaaggacuacauguuc

SEQ ID NO: 1610767 - RNA, 19 nt, Homo sapiens
  misc_RNA (1)...(19): siRNA sense strand
ggcauacgcugacuacauc

SEQ ID NO: 1610768 - RNA, 19 nt, Homo sapiens
  misc_RNA (1)...(19): siRNA sense strand
gcaguucgcagcugauaga

SEQ ID NO: 1610769 - RNA, 19 nt, Homo sapiens
  misc_RNA (1)...(19): siRNA sense strand
gagaaggccgugaaugaga

SEQ ID NO: 1610770 - RNA, 19 nt, Homo sapiens
  misc_RNA (1)...(19): siRNA sense strand
ccgagugccuggagaaguu

SEQ ID NO: 1610771 - RNA, 19 nt, Homo sapiens
  misc_RNA (1)...(19): siRNA sense strand
agaaggccgugaaugagaa

SEQ ID NO: 1610772 - RNA, 19 nt, Homo sapiens
  misc_RNA (1)...(19): siRNA sense strand
ugaaugagaaccacaagga

SEQ ID NO: 1610773 - RNA, 19 nt, Homo sapiens
  misc_RNA (1)...(19): siRNA sense strand
gaaccacaaggacuacaug

SEQ ID NO: 1610774 - RNA, 19 nt, Homo sapiens
  misc_RNA (1)...(19): siRNA sense strand
cuggagaaguucccuguga

SEQ ID NO: 1610775 - RNA, 19 nt, Homo sapiens
  misc_RNA (1)...(19): siRNA sense strand
gcugauagaccacccauac

SEQ ID NO: 1610776 - RNA, 19 nt, Homo sapiens
  misc_RNA (1)...(19): siRNA sense strand
uggaguguauccuguuuau

SEQ ID NO: 1610777 - RNA, 19 nt, Homo sapiens
  misc_RNA (1)...(19): siRNA sense strand
ccaaccagcuguggaacau

SEQ ID NO: 1610778 - RNA, 19 nt, Homo sapiens
  misc_RNA (1)...(19): siRNA sense strand
ggaaacuccagaaaacaua

SEQ ID NO: 1610779 - RNA, 19 nt, Homo sapiens
  misc_RNA (1)...(19): siRNA sense strand
ggagaaguucccugugauc

SEQ ID NO: 1610780 - RNA, 19 nt, Homo sapiens
  misc_RNA (1)...(19): siRNA sense strand
ccuggaguguauccuguuu

SEQ ID NO: 1610781 - RNA, 19 nt, Homo sapiens
  misc_RNA (1)...(19): siRNA sense strand
gacacuuuguggaugagaa

SEQ ID NO: 1610782 - RNA, 19 nt, Homo sapiens
  misc_RNA (1)...(19): siRNA sense strand
guggaugaccaaauagcua

SEQ ID NO: 1610783 - RNA, 19 nt, Homo sapiens
  misc_RNA (1)...(19): siRNA sense strand
gggcaguucgcagcugaua

SEQ ID NO: 1610784 - RNA, 19 nt, Homo sapiens
  misc_RNA (1)...(19): siRNA sense strand
aaccagcuguggaacauca

SEQ ID NO: 1610785 - RNA, 19 nt, Homo sapiens
  misc_RNA (1)...(19): siRNA sense strand
acauguuccuggaguguau

SEQ ID NO: 1610786 - RNA, 19 nt, Homo sapiens
  misc_RNA (1)...(19): siRNA sense strand
ggaacuccacgcgcauuga

SEQ ID NO: 1610787 - RNA, 19 nt, Homo sapiens
  misc_RNA (1)...(19): siRNA sense strand
gaagacuggcccauuugca

SEQ ID NO: 1610788 - RNA, 19 nt, Homo sapiens
  misc_RNA (1)...(19): siRNA sense strand
gcccagacacuuuguggau

SEQ ID NO: 1610789 - RNA, 19 nt, Homo sapiens
  misc_RNA (1)...(19): siRNA sense strand
augagaaggccgugaauga

SEQ ID NO: 1610790 - RNA, 19 nt, Homo sapiens
  misc_RNA (1)...(19): siRNA sense strand
gaugagaaggccgugaaug

SEQ ID NO: 1610791 - RNA, 19 nt, Homo sapiens
  misc_RNA (1)...(19): siRNA sense strand
aagcugaccuucgaguaca

SEQ ID NO: 1610792 - RNA, 19 nt, Homo sapiens
  misc_RNA (1)...(19): siRNA sense strand
gguguucaaucgguaccuu

SEQ ID NO: 1610793 - RNA, 19 nt, Homo sapiens
  misc_RNA (1)...(19): siRNA sense strand
uggagaaguucccugugau

SEQ ID NO: 1610794 - RNA, 19 nt, Homo sapiens
  misc_RNA (1)...(19): siRNA sense strand
gaacuccacgcgcauugac

SEQ ID NO: 1610795 - RNA, 19 nt, Homo sapiens
  misc_RNA (1)...(19): siRNA sense strand
uagcuauugucuucaaggu

SEQ ID NO: 1610796 - RNA, 19 nt, Homo sapiens
  misc_RNA (1)...(19): siRNA sense strand
gauucauccuuacccucaa

SEQ ID NO: 1610797 - RNA, 19 nt, Homo sapiens
  misc_RNA (1)...(19): siRNA sense strand
gcuuuccucugcugucucu

SEQ ID NO: 1610798 - RNA, 19 nt, Homo sapiens
  misc_RNA (1)...(19): siRNA sense strand
ugcugucucugcaagauug

SEQ ID NO: 1610799 - RNA, 19 nt, Homo sapiens
  misc_RNA (1)...(19): siRNA sense strand
gggaacuccacgcgcauug

SEQ ID NO: 1610800 - RNA, 19 nt, Homo sapiens
  misc_RNA (1)...(19): siRNA sense strand
aaagugaaccagggucuca

SEQ ID NO: 1610801 - RNA, 19 nt, Homo sapiens
  misc_RNA (1)...(19): siRNA sense strand
ggaguguauccuguuuauu

SEQ ID NO: 1610802 - RNA, 19 nt, Homo sapiens
  misc_RNA (1)...(19): siRNA sense strand
gaacauucgucucuuacug

SEQ ID NO: 1610803 - RNA, 19 nt, Homo sapiens
  misc_RNA (1)...(19): siRNA sense strand
ggaggaucaucuucgagua

SEQ ID NO: 1610804 - RNA, 19 nt, Homo sapiens
  misc_RNA (1)...(19): siRNA sense strand
gcaacgcccugcucaagau

SEQ ID NO: 1610805 - RNA, 19 nt, Homo sapiens
  misc_RNA (1)...(19): siRNA sense strand
ccacaauacugagaacauu

SEQ ID NO: 1610806 - RNA, 19 nt, Homo sapiens
  misc_RNA (1)...(19): siRNA sense strand
ccgacaggcugaaguggua

SEQ ID NO: 1610807 - RNA, 19 nt, Homo sapiens
  misc_RNA (1)...(19): siRNA sense strand
gcacaguggcuccguggaa

SEQ ID NO: 1610808 - RNA, 19 nt, Homo sapiens
  misc_RNA (1)...(19): siRNA sense strand
gcuuucacaucaucuuuga

SEQ ID NO: 1610809 - RNA, 19 nt, Homo sapiens
  misc_RNA (1)...(19): siRNA sense strand
gauccaggcccuccacuuc

SEQ ID NO: 1610810 - RNA, 19 nt, Homo sapiens
  misc_RNA (1)...(19): siRNA sense strand
gaccaacucucagaaacuc

SEQ ID NO: 1610811 - RNA, 19 nt, Homo sapiens
  misc_RNA (1)...(19): siRNA sense strand
gaauccuuguucucacuga

SEQ ID NO: 1610812 - RNA, 19 nt, Homo sapiens
  misc_RNA (1)...(19): siRNA sense strand
cugaagugguaccuccuua

SEQ ID NO: 1610813 - RNA, 19 nt, Homo sapiens
  misc_RNA (1)...(19): siRNA sense strand
caaagaggaggcccagaug

SEQ ID NO: 1610814 - RNA, 19 nt, Homo sapiens
  misc_RNA (1)...(19): siRNA sense strand
gcccuccacuucuccuuga

SEQ ID NO: 1610815 - RNA, 19 nt, Homo sapiens
  misc_RNA (1)...(19): siRNA sense strand
gggugcagauccacaauac

SEQ ID NO: 1610816 - RNA, 19 nt, Homo sapiens
  misc_RNA (1)...(19): siRNA sense strand
gaggaggcccagaugauca

SEQ ID NO: 1610817 - RNA, 19 nt, Homo sapiens
  misc_RNA (1)...(19): siRNA sense strand
gugcagauccacaauacug

SEQ ID NO: 1610818 - RNA, 19 nt, Homo sapiens
  misc_RNA (1)...(19): siRNA sense strand
ucaaggccaccaccaaaga

SEQ ID NO: 1610819 - RNA, 19 nt, Homo sapiens
  misc_RNA (1)...(19): siRNA sense strand
cgucaaggccaccaccaaa

SEQ ID NO: 1610820 - RNA, 19 nt, Homo sapiens
  misc_RNA (1)...(19): siRNA sense strand
acccacaucugccugaaga

SEQ ID NO: 1610821 - RNA, 19 nt, Homo sapiens
  misc_RNA (1)...(19): siRNA sense strand
ggugaccaacucucagaaa

SEQ ID NO: 1610822 - RNA, 19 nt, Homo sapiens
  misc_RNA (1)...(19): siRNA sense strand
ggagagccgaauccuuguu

SEQ ID NO: 1610823 - RNA, 19 nt, Homo sapiens
  misc_RNA (1)...(19): siRNA sense strand
gagagccgaauccuuguuc

SEQ ID NO: 1610824 - RNA, 19 nt, Homo sapiens
  misc_RNA (1)...(19): siRNA sense strand
aaagaggaggcccagauga

SEQ ID NO: 1610825 - RNA, 19 nt, Homo sapiens
  misc_RNA (1)...(19): siRNA sense strand
acaaagaggaggcccagau

SEQ ID NO: 1610826 - RNA, 19 nt, Homo sapiens
  misc_RNA (1)...(19): siRNA sense strand
gauccacaauacugagaac

SEQ ID NO: 1610827 - RNA, 19 nt, Homo sapiens
  misc_RNA (1)...(19): siRNA sense strand
ggucuggcuuucacaucau

SEQ ID NO: 1610828 - RNA, 19 nt, Homo sapiens
  misc_RNA (1)...(19): siRNA sense strand
guggcuccguggaagauga

SEQ ID NO: 1610829 - RNA, 19 nt, Homo sapiens
  misc_RNA (1)...(19): siRNA sense strand
gugaccaacucucagaaac

SEQ ID NO: 1610830 - RNA, 19 nt, Homo sapiens
  misc_RNA (1)...(19): siRNA sense strand
gaagugguaccuccuuagc

SEQ ID NO: 1610831 - RNA, 19 nt, Homo sapiens
  misc_RNA (1)...(19): siRNA sense strand
uugaagacccagucaccua

SEQ ID NO: 1610832 - RNA, 19 nt, Homo sapiens
  misc_RNA (1)...(19): siRNA sense strand
ccauccggcucuaccuuca

SEQ ID NO: 1610833 - RNA, 19 nt, Homo sapiens
  misc_RNA (1)...(19): siRNA sense strand
aagacccagucaccuacua

SEQ ID NO: 1610834 - RNA, 19 nt, Homo sapiens
  misc_RNA (1)...(19): siRNA sense strand
gaggaucaucuucgaguac

SEQ ID NO: 1610835 - RNA, 19 nt, Homo sapiens
  misc_RNA (1)...(19): siRNA sense strand
guguucaccugcaucaucu

SEQ ID NO: 1610836 - RNA, 19 nt, Homo sapiens
  misc_RNA (1)...(19): siRNA sense strand
uggagcugcuggugcauca

SEQ ID NO: 1610837 - RNA, 19 nt, Homo sapiens
  misc_RNA (1)...(19): siRNA sense strand
uggucuggcuuucacauca

SEQ ID NO: 1610838 - RNA, 19 nt, Homo sapiens
  misc_RNA (1)...(19): siRNA sense strand
caaggccaccaccaaagau

SEQ ID NO: 1610839 - RNA, 19 nt, Homo sapiens
  misc_RNA (1)...(19): siRNA sense strand
uuucacaucaucuuugaga

SEQ ID NO: 1610840 - RNA, 19 nt, Homo sapiens
  misc_RNA (1)...(19): siRNA sense strand
gcugguggaugcgauucug

SEQ ID NO: 1610841 - RNA, 19 nt, Homo sapiens
  misc_RNA (1)...(19): siRNA sense strand
cugagcugcuggagaggaa

SEQ ID NO: 1610842 - RNA, 19 nt, Homo sapiens
  misc_RNA (1)...(19): siRNA sense strand
aaacuccagcugcccgaaa

SEQ ID NO: 1610843 - RNA, 19 nt, Homo sapiens
  misc_RNA (1)...(19): siRNA sense strand
gaacauucgucucuuacug

SEQ ID NO: 1610844 - RNA, 19 nt, Homo sapiens
  misc_RNA (1)...(19): siRNA sense strand
ggaggaucaucuucgagua

SEQ ID NO: 1610845 - RNA, 19 nt, Homo sapiens
  misc_RNA (1)...(19): siRNA sense strand
gcaacgcccugcucaagau

SEQ ID NO: 1610846 - RNA, 19 nt, Homo sapiens
  misc_RNA (1)...(19): siRNA sense strand
ccacaauacugagaacauu

SEQ ID NO: 1610847 - RNA, 19 nt, Homo sapiens
  misc_RNA (1)...(19): siRNA sense strand
gaauccuuguucucacuga

SEQ ID NO: 1610848 - RNA, 19 nt, Homo sapiens
  misc_RNA (1)...(19): siRNA sense strand
caaagaggaggcccagaug

SEQ ID NO: 1610849 - RNA, 19 nt, Homo sapiens
  misc_RNA (1)...(19): siRNA sense strand
gggugcagauccacaauac

SEQ ID NO: 1610850 - RNA, 19 nt, Homo sapiens
  misc_RNA (1)...(19): siRNA sense strand
gugcagauccacaauacug

SEQ ID NO: 1610851 - RNA, 19 nt, Homo sapiens
  misc_RNA (1)...(19): siRNA sense strand
ucaaggccaccaccaaaga

SEQ ID NO: 1610852 - RNA, 19 nt, Homo sapiens
  misc_RNA (1)...(19): siRNA sense strand
cgucaaggccaccaccaaa

SEQ ID NO: 1610853 - RNA, 19 nt, Homo sapiens
  misc_RNA (1)...(19): siRNA sense strand
ggagagccgaauccuuguu

SEQ ID NO: 1610854 - RNA, 19 nt, Homo sapiens
  misc_RNA (1)...(19): siRNA sense strand
aaagaggaggcccagauga

SEQ ID NO: 1610855 - RNA, 19 nt, Homo sapiens
  misc_RNA (1)...(19): siRNA sense strand
acaaagaggaggcccagau

SEQ ID NO: 1610856 - RNA, 19 nt, Homo sapiens
  misc_RNA (1)...(19): siRNA sense strand
gagagccgaauccuuguuc

SEQ ID NO: 1610857 - RNA, 19 nt, Homo sapiens
  misc_RNA (1)...(19): siRNA sense strand
gauccacaauacugagaac

SEQ ID NO: 1610858 - RNA, 19 nt, Homo sapiens
  misc_RNA (1)...(19): siRNA sense strand
uugaagacccagucaccua

SEQ ID NO: 1610859 - RNA, 19 nt, Homo sapiens
  misc_RNA (1)...(19): siRNA sense strand
aagacccagucaccuacua

SEQ ID NO: 1610860 - RNA, 19 nt, Homo sapiens
  misc_RNA (1)...(19): siRNA sense strand
guguucaccugcaucaucu

SEQ ID NO: 1610861 - RNA, 19 nt, Homo sapiens
  misc_RNA (1)...(19): siRNA sense strand
gaggaucaucuucgaguac

SEQ ID NO: 1610862 - RNA, 19 nt, Homo sapiens
  misc_RNA (1)...(19): siRNA sense strand
uggagcugcuggugcauca

SEQ ID NO: 1610863 - RNA, 19 nt, Homo sapiens
  misc_RNA (1)...(19): siRNA sense strand
caaggccaccaccaaagau

SEQ ID NO: 1610864 - RNA, 19 nt, Homo sapiens
  misc_RNA (1)...(19): siRNA sense strand
cugagcugcuggagaggaa

SEQ ID NO: 1610865 - RNA, 19 nt, Homo sapiens
  misc_RNA (1)...(19): siRNA sense strand
gcugguggaugcgauucug

SEQ ID NO: 1610866 - RNA, 19 nt, Homo sapiens
  misc_RNA (1)...(19): siRNA sense strand
gaugaagacuggcccauuu

SEQ ID NO: 1610867 - RNA, 19 nt, Homo sapiens
  misc_RNA (1)...(19): siRNA sense strand
gaguguauccuguuuauua

SEQ ID NO: 1610868 - RNA, 19 nt, Homo sapiens
  misc_RNA (1)...(19): siRNA sense strand
ccggguggaugaccaaaua

SEQ ID NO: 1610869 - RNA, 19 nt, Homo sapiens
  misc_RNA (1)...(19): siRNA sense strand
ccagacacuuuguggauga

SEQ ID NO: 1610870 - RNA, 19 nt, Homo sapiens
  misc_RNA (1)...(19): siRNA sense strand
ggucucauccgcauguaua

SEQ ID NO: 1610871 - RNA, 19 nt, Homo sapiens
  misc_RNA (1)...(19): siRNA sense strand
ugccugagguggcuguuua

SEQ ID NO: 1610872 - RNA, 19 nt, Homo sapiens
  misc_RNA (1)...(19): siRNA sense strand
ccacaaggacuacauguuc

SEQ ID NO: 1610873 - RNA, 19 nt, Homo sapiens
  misc_RNA (1)...(19): siRNA sense strand
ggcauacgcugacuacauc

SEQ ID NO: 1610874 - RNA, 19 nt, Homo sapiens
  misc_RNA (1)...(19): siRNA sense strand
gcaguucgcagcugauaga

SEQ ID NO: 1610875 - RNA, 19 nt, Homo sapiens
  misc_RNA (1)...(19): siRNA sense strand
gagaaggccgugaaugaga

SEQ ID NO: 1610876 - RNA, 19 nt, Homo sapiens
  misc_RNA (1)...(19): siRNA sense strand
ccgagugccuggagaaguu

SEQ ID NO: 1610877 - RNA, 19 nt, Homo sapiens
  misc_RNA (1)...(19): siRNA sense strand
agaaggccgugaaugagaa

SEQ ID NO: 1610878 - RNA, 19 nt, Homo sapiens
  misc_RNA (1)...(19): siRNA sense strand
ugaaugagaaccacaagga

SEQ ID NO: 1610879 - RNA, 19 nt, Homo sapiens
  misc_RNA (1)...(19): siRNA sense strand
gaaccacaaggacuacaug

SEQ ID NO: 1610880 - RNA, 19 nt, Homo sapiens
  misc_RNA (1)...(19): siRNA sense strand
cuggagaaguucccuguga

SEQ ID NO: 1610881 - RNA, 19 nt, Homo sapiens
  misc_RNA (1)...(19): siRNA sense strand
gcugauagaccacccauac

SEQ ID NO: 1610882 - RNA, 19 nt, Homo sapiens
  misc_RNA (1)...(19): siRNA sense strand
uggaguguauccuguuuau

SEQ ID NO: 1610883 - RNA, 19 nt, Homo sapiens
  misc_RNA (1)...(19): siRNA sense strand
ccaaccagcuguggaacau

SEQ ID NO: 1610884 - RNA, 19 nt, Homo sapiens
  misc_RNA (1)...(19): siRNA sense strand
ggaaacuccagaaaacaua

SEQ ID NO: 1610885 - RNA, 19 nt, Homo sapiens
  misc_RNA (1)...(19): siRNA sense strand
ggagaaguucccugugauc

SEQ ID NO: 1610886 - RNA, 19 nt, Homo sapiens
  misc_RNA (1)...(19): siRNA sense strand
ccuggaguguauccuguuu

SEQ ID NO: 1610887 - RNA, 19 nt, Homo sapiens
  misc_RNA (1)...(19): siRNA sense strand
gacacuuuguggaugagaa

SEQ ID NO: 1610888 - RNA, 19 nt, Homo sapiens
  misc_RNA (1)...(19): siRNA sense strand
guggaugaccaaauagcua

SEQ ID NO: 1610889 - RNA, 19 nt, Homo sapiens
  misc_RNA (1)...(19): siRNA sense strand
gggcaguucgcagcugaua

SEQ ID NO: 1610890 - RNA, 19 nt, Homo sapiens
  misc_RNA (1)...(19): siRNA sense strand
aaccagcuguggaacauca

SEQ ID NO: 1610891 - RNA, 19 nt, Homo sapiens
  misc_RNA (1)...(19): siRNA sense strand
acauguuccuggaguguau

SEQ ID NO: 1610892 - RNA, 19 nt, Homo sapiens
  misc_RNA (1)...(19): siRNA sense strand
ggaacuccacgcgcauuga

SEQ ID NO: 1610893 - RNA, 19 nt, Homo sapiens
  misc_RNA (1)...(19): siRNA sense strand
gaagacuggcccauuugca

SEQ ID NO: 1610894 - RNA, 19 nt, Homo sapiens
  misc_RNA (1)...(19): siRNA sense strand
gcccagacacuuuguggau

SEQ ID NO: 1610895 - RNA, 19 nt, Homo sapiens
  misc_RNA (1)...(19): siRNA sense strand
augagaaggccgugaauga

SEQ ID NO: 1610896 - RNA, 19 nt, Homo sapiens
  misc_RNA (1)...(19): siRNA sense strand
gaugagaaggccgugaaug

SEQ ID NO: 1610897 - RNA, 19 nt, Homo sapiens
  misc_RNA (1)...(19): siRNA sense strand
aagcugaccuucgaguaca

SEQ ID NO: 1610898 - RNA, 19 nt, Homo sapiens
  misc_RNA (1)...(19): siRNA sense strand
gguguucaaucgguaccuu

SEQ ID NO: 1610899 - RNA, 19 nt, Homo sapiens
  misc_RNA (1)...(19): siRNA sense strand
uggagaaguucccugugau

SEQ ID NO: 1610900 - RNA, 19 nt, Homo sapiens
  misc_RNA (1)...(19): siRNA sense strand
gaacuccacgcgcauugac

SEQ ID NO: 1610901 - RNA, 19 nt, Homo sapiens
  misc_RNA (1)...(19): siRNA sense strand
uagcuauugucuucaaggu

SEQ ID NO: 1610902 - RNA, 19 nt, Homo sapiens
  misc_RNA (1)...(19): siRNA sense strand
gauucauccuuacccucaa

SEQ ID NO: 1610903 - RNA, 19 nt, Homo sapiens
  misc_RNA (1)...(19): siRNA sense strand
gcuuuccucugcugucucu

SEQ ID NO: 1610904 - RNA, 19 nt, Homo sapiens
  misc_RNA (1)...(19): siRNA sense strand
ugcugucucugcaagauug

SEQ ID NO: 1610905 - RNA, 19 nt, Homo sapiens
  misc_RNA (1)...(19): siRNA sense strand
gggaacuccacgcgcauug

SEQ ID NO: 1610906 - RNA, 19 nt, Homo sapiens
  misc_RNA (1)...(19): siRNA sense strand
aaagugaaccagggucuca

SEQ ID NO: 1610907 - RNA, 19 nt, Homo sapiens
  misc_RNA (1)...(19): siRNA sense strand
ggaguguauccuguuuauu

SEQ ID NO: 1610908 - RNA, 19 nt, Homo sapiens
  misc_RNA (1)...(19): siRNA sense strand
gaugaagacuggcccauuu

SEQ ID NO: 1610909 - RNA, 19 nt, Homo sapiens
  misc_RNA (1)...(19): siRNA sense strand
gaguguauccuguuuauua

SEQ ID NO: 1610910 - RNA, 19 nt, Homo sapiens
  misc_RNA (1)...(19): siRNA sense strand
ccggguggaugaccaaaua

SEQ ID NO: 1610911 - RNA, 19 nt, Homo sapiens
  misc_RNA (1)...(19): siRNA sense strand
ccagacacuuuguggauga

SEQ ID NO: 1610912 - RNA, 19 nt, Homo sapiens
  misc_RNA (1)...(19): siRNA sense strand
ggucucauccgcauguaua

SEQ ID NO: 1610913 - RNA, 19 nt, Homo sapiens
  misc_RNA (1)...(19): siRNA sense strand
ugccugagguggcuguuua

SEQ ID NO: 1610914 - RNA, 19 nt, Homo sapiens
  misc_RNA (1)...(19): siRNA sense strand
ccacaaggacuacauguuc

SEQ ID NO: 1610915 - RNA, 19 nt, Homo sapiens
  misc_RNA (1)...(19): siRNA sense strand
ggcauacgcugacuacauc

SEQ ID NO: 1610916 - RNA, 19 nt, Homo sapiens
  misc_RNA (1)...(19): siRNA sense strand
gcaguucgcagcugauaga

SEQ ID NO: 1610917 - RNA, 19 nt, Homo sapiens
  misc_RNA (1)...(19): siRNA sense strand
gagaaggccgugaaugaga

SEQ ID NO: 1610918 - RNA, 19 nt, Homo sapiens
  misc_RNA (1)...(19): siRNA sense strand
ccgagugccuggagaaguu

SEQ ID NO: 1610919 - RNA, 19 nt, Homo sapiens
  misc_RNA (1)...(19): siRNA sense strand
agaaggccgugaaugagaa

SEQ ID NO: 1610920 - RNA, 19 nt, Homo sapiens
  misc_RNA (1)...(19): siRNA sense strand
ugaaugagaaccacaagga

SEQ ID NO: 1610921 - RNA, 19 nt, Homo sapiens
  misc_RNA (1)...(19): siRNA sense strand
gaaccacaaggacuacaug

SEQ ID NO: 1610922 - RNA, 19 nt, Homo sapiens
  misc_RNA (1)...(19): siRNA sense strand
cuggagaaguucccuguga

SEQ ID NO: 1610923 - RNA, 19 nt, Homo sapiens
  misc_RNA (1)...(19): siRNA sense strand
gcugauagaccacccauac

SEQ ID NO: 1610924 - RNA, 19 nt, Homo sapiens
  misc_RNA (1)...(19): siRNA sense strand
uggaguguauccuguuuau

SEQ ID NO: 1610925 - RNA, 19 nt, Homo sapiens
  misc_RNA (1)...(19): siRNA sense strand
ccaaccagcuguggaacau

SEQ ID NO: 1610926 - RNA, 19 nt, Homo sapiens
  misc_RNA (1)...(19): siRNA sense strand
ggaaacuccagaaaacaua

SEQ ID NO: 1610927 - RNA, 19 nt, Homo sapiens
  misc_RNA (1)...(19): siRNA sense strand
ggagaaguucccugugauc

SEQ ID NO: 1610928 - RNA, 19 nt, Homo sapiens
  misc_RNA (1)...(19): siRNA sense strand
ccuggaguguauccuguuu

SEQ ID NO: 1610929 - RNA, 19 nt, Homo sapiens
  misc_RNA (1)...(19): siRNA sense strand
gacacuuuguggaugagaa

SEQ ID NO: 1610930 - RNA, 19 nt, Homo sapiens
  misc_RNA (1)...(19): siRNA sense strand
guggaugaccaaauagcua

SEQ ID NO: 1610931 - RNA, 19 nt, Homo sapiens
  misc_RNA (1)...(19): siRNA sense strand
gggcaguucgcagcugaua

SEQ ID NO: 1610932 - RNA, 19 nt, Homo sapiens
  misc_RNA (1)...(19): siRNA sense strand
aaccagcuguggaacauca

SEQ ID NO: 1610933 - RNA, 19 nt, Homo sapiens
  misc_RNA (1)...(19): siRNA sense strand
acauguuccuggaguguau

SEQ ID NO: 1610934 - RNA, 19 nt, Homo sapiens
  misc_RNA (1)...(19): siRNA sense strand
ggaacuccacgcgcauuga

SEQ ID NO: 1610935 - RNA, 19 nt, Homo sapiens
  misc_RNA (1)...(19): siRNA sense strand
gaagacuggcccauuugca

SEQ ID NO: 1610936 - RNA, 19 nt, Homo sapiens
  misc_RNA (1)...(19): siRNA sense strand
gcccagacacuuuguggau

SEQ ID NO: 1610937 - RNA, 19 nt, Homo sapiens
  misc_RNA (1)...(19): siRNA sense strand
augagaaggccgugaauga

SEQ ID NO: 1610938 - RNA, 19 nt, Homo sapiens
  misc_RNA (1)...(19): siRNA sense strand
gaugagaaggccgugaaug

SEQ ID NO: 1610939 - RNA, 19 nt, Homo sapiens
  misc_RNA (1)...(19): siRNA sense strand
aagcugaccuucgaguaca

SEQ ID NO: 1610940 - RNA, 19 nt, Homo sapiens
  misc_RNA (1)...(19): siRNA sense strand
gguguucaaucgguaccuu

SEQ ID NO: 1610941 - RNA, 19 nt, Homo sapiens
  misc_RNA (1)...(19): siRNA sense strand
uggagaaguucccugugau

SEQ ID NO: 1610942 - RNA, 19 nt, Homo sapiens
  misc_RNA (1)...(19): siRNA sense strand
gaacuccacgcgcauugac

SEQ ID NO: 1610943 - RNA, 19 nt, Homo sapiens
  misc_RNA (1)...(19): siRNA sense strand
uagcuauugucuucaaggu

SEQ ID NO: 1610944 - RNA, 19 nt, Homo sapiens
  misc_RNA (1)...(19): siRNA sense strand
gauucauccuuacccucaa

SEQ ID NO: 1610945 - RNA, 19 nt, Homo sapiens
  misc_RNA (1)...(19): siRNA sense strand
gcuuuccucugcugucucu

SEQ ID NO: 1610946 - RNA, 19 nt, Homo sapiens
  misc_RNA (1)...(19): siRNA sense strand
ugcugucucugcaagauug

SEQ ID NO: 1610947 - RNA, 19 nt, Homo sapiens
  misc_RNA (1)...(19): siRNA sense strand
gggaacuccacgcgcauug

SEQ ID NO: 1610948 - RNA, 19 nt, Homo sapiens
  misc_RNA (1)...(19): siRNA sense strand
aaagugaaccagggucuca

SEQ ID NO: 1610949 - RNA, 19 nt, Homo sapiens
  misc_RNA (1)...(19): siRNA sense strand
ggaguguauccuguuuauu

SEQ ID NO: 1610950 - RNA, 19 nt, Homo sapiens
  misc_RNA (1)...(19): siRNA sense strand
gaugaagacuggcccauuu

SEQ ID NO: 1610951 - RNA, 19 nt, Homo sapiens
  misc_RNA (1)...(19): siRNA sense strand
gaguguauccuguuuauua

SEQ ID NO: 1610952 - RNA, 19 nt, Homo sapiens
  misc_RNA (1)...(19): siRNA sense strand
ccggguggaugaccaaaua

SEQ ID NO: 1610953 - RNA, 19 nt, Homo sapiens
  misc_RNA (1)...(19): siRNA sense strand
ccagacacuuuguggauga

SEQ ID NO: 1610954 - RNA, 19 nt, Homo sapiens
  misc_RNA (1)...(19): siRNA sense strand
ggucucauccgcauguaua

SEQ ID NO: 1610955 - RNA, 19 nt, Homo sapiens
  misc_RNA (1)...(19): siRNA sense strand
ugccugagguggcuguuua

SEQ ID NO: 1610956 - RNA, 19 nt, Homo sapiens
  misc_RNA (1)...(19): siRNA sense strand
ccacaaggacuacauguuc

SEQ ID NO: 1610957 - RNA, 19 nt, Homo sapiens
  misc_RNA (1)...(19): siRNA sense strand
ggcauacgcugacuacauc

SEQ ID NO: 1610958 - RNA, 19 nt, Homo sapiens
  misc_RNA (1)...(19): siRNA sense strand
gcaguucgcagcugauaga

SEQ ID NO: 1610959 - RNA, 19 nt, Homo sapiens
  misc_RNA (1)...(19): siRNA sense strand
gagaaggccgugaaugaga

SEQ ID NO: 1610960 - RNA, 19 nt, Homo sapiens
  misc_RNA (1)...(19): siRNA sense strand
ccgagugccuggagaaguu

SEQ ID NO: 1610961 - RNA, 19 nt, Homo sapiens
  misc_RNA (1)...(19): siRNA sense strand
agaaggccgugaaugagaa

SEQ ID NO: 1610962 - RNA, 19 nt, Homo sapiens
  misc_RNA (1)...(19): siRNA sense strand
ugaaugagaaccacaagga

SEQ ID NO: 1610963 - RNA, 19 nt, Homo sapiens
  misc_RNA (1)...(19): siRNA sense strand
gaaccacaaggacuacaug

SEQ ID NO: 1610964 - RNA, 19 nt, Homo sapiens
  misc_RNA (1)...(19): siRNA sense strand
cuggagaaguucccuguga

SEQ ID NO: 1610965 - RNA, 19 nt, Homo sapiens
  misc_RNA (1)...(19): siRNA sense strand
gcugauagaccacccauac

SEQ ID NO: 1610966 - RNA, 19 nt, Homo sapiens
  misc_RNA (1)...(19): siRNA sense strand
uggaguguauccuguuuau

SEQ ID NO: 1610967 - RNA, 19 nt, Homo sapiens
  misc_RNA (1)...(19): siRNA sense strand
ccaaccagcuguggaacau

SEQ ID NO: 1610968 - RNA, 19 nt, Homo sapiens
  misc_RNA (1)...(19): siRNA sense strand
ggaaacuccagaaaacaua

SEQ ID NO: 1610969 - RNA, 19 nt, Homo sapiens
  misc_RNA (1)...(19): siRNA sense strand
ggagaaguucccugugauc

SEQ ID NO: 1610970 - RNA, 19 nt, Homo sapiens
  misc_RNA (1)...(19): siRNA sense strand
ccuggaguguauccuguuu

SEQ ID NO: 1610971 - RNA, 19 nt, Homo sapiens
  misc_RNA (1)...(19): siRNA sense strand
gacacuuuguggaugagaa

SEQ ID NO: 1610972 - RNA, 19 nt, Homo sapiens
  misc_RNA (1)...(19): siRNA sense strand
guggaugaccaaauagcua

SEQ ID NO: 1610973 - RNA, 19 nt, Homo sapiens
  misc_RNA (1)...(19): siRNA sense strand
gggcaguucgcagcugaua

SEQ ID NO: 1610974 - RNA, 19 nt, Homo sapiens
  misc_RNA (1)...(19): siRNA sense strand
aaccagcuguggaacauca

SEQ ID NO: 1610975 - RNA, 19 nt, Homo sapiens
  misc_RNA (1)...(19): siRNA sense strand
acauguuccuggaguguau

SEQ ID NO: 1610976 - RNA, 19 nt, Homo sapiens
  misc_RNA (1)...(19): siRNA sense strand
ggaacuccacgcgcauuga

SEQ ID NO: 1610977 - RNA, 19 nt, Homo sapiens
  misc_RNA (1)...(19): siRNA sense strand
gaagacuggcccauuugca

SEQ ID NO: 1610978 - RNA, 19 nt, Homo sapiens
  misc_RNA (1)...(19): siRNA sense strand
gcccagacacuuuguggau

SEQ ID NO: 1610979 - RNA, 19 nt, Homo sapiens
  misc_RNA (1)...(19): siRNA sense strand
augagaaggccgugaauga

SEQ ID NO: 1610980 - RNA, 19 nt, Homo sapiens
  misc_RNA (1)...(19): siRNA sense strand
gaugagaaggccgugaaug

SEQ ID NO: 1610981 - RNA, 19 nt, Homo sapiens
  misc_RNA (1)...(19): siRNA sense strand
aagcugaccuucgaguaca

SEQ ID NO: 1610982 - RNA, 19 nt, Homo sapiens
  misc_RNA (1)...(19): siRNA sense strand
gguguucaaucgguaccuu

SEQ ID NO: 1610983 - RNA, 19 nt, Homo sapiens
  misc_RNA (1)...(19): siRNA sense strand
uggagaaguucccugugau

SEQ ID NO: 1610984 - RNA, 19 nt, Homo sapiens
  misc_RNA (1)...(19): siRNA sense strand
gaacuccacgcgcauugac

SEQ ID NO: 1610985 - RNA, 19 nt, Homo sapiens
  misc_RNA (1)...(19): siRNA sense strand
uagcuauugucuucaaggu

SEQ ID NO: 1610986 - RNA, 19 nt, Homo sapiens
  misc_RNA (1)...(19): siRNA sense strand
gauucauccuuacccucaa

SEQ ID NO: 1610987 - RNA, 19 nt, Homo sapiens
  misc_RNA (1)...(19): siRNA sense strand
gcuuuccucugcugucucu

SEQ ID NO: 1610988 - RNA, 19 nt, Homo sapiens
  misc_RNA (1)...(19): siRNA sense strand
ugcugucucugcaagauug

SEQ ID NO: 1610989 - RNA, 19 nt, Homo sapiens
  misc_RNA (1)...(19): siRNA sense strand
gggaacuccacgcgcauug

SEQ ID NO: 1610990 - RNA, 19 nt, Homo sapiens
  misc_RNA (1)...(19): siRNA sense strand
aaagugaaccagggucuca

SEQ ID NO: 1610991 - RNA, 19 nt, Homo sapiens
  misc_RNA (1)...(19): siRNA sense strand
ggaguguauccuguuuauu

SEQ ID NO: 1610992 - RNA, 19 nt, Homo sapiens
  misc_RNA (1)...(19): siRNA sense strand
gaugaagacuggcccauuu

SEQ ID NO: 1610993 - RNA, 19 nt, Homo sapiens
  misc_RNA (1)...(19): siRNA sense strand
gaguguauccuguuuauua

SEQ ID NO: 1610994 - RNA, 19 nt, Homo sapiens
  misc_RNA (1)...(19): siRNA sense strand
ccagacacuuuguggauga

SEQ ID NO: 1610995 - RNA, 19 nt, Homo sapiens
  misc_RNA (1)...(19): siRNA sense strand
ggucucauccgcauguaua

SEQ ID NO: 1610996 - RNA, 19 nt, Homo sapiens
  misc_RNA (1)...(19): siRNA sense strand
ccacaaggacuacauguuc

SEQ ID NO: 1610997 - RNA, 19 nt, Homo sapiens
  misc_RNA (1)...(19): siRNA sense strand
gcaguucgcagcugauaga

SEQ ID NO: 1610998 - RNA, 19 nt, Homo sapiens
  misc_RNA (1)...(19): siRNA sense strand
gagaaggccgugaaugaga

SEQ ID NO: 1610999 - RNA, 19 nt, Homo sapiens
  misc_RNA (1)...(19): siRNA sense strand
ccgagugccuggagaaguu

SEQ ID NO: 1611000 - RNA, 19 nt, Homo sapiens
  misc_RNA (1)...(19): siRNA sense strand
agaaggccgugaaugagaa

SEQ ID NO: 1611001 - RNA, 19 nt, Homo sapiens
  misc_RNA (1)...(19): siRNA sense strand
ugaaugagaaccacaagga

SEQ ID NO: 1611002 - RNA, 19 nt, Homo sapiens
  misc_RNA (1)...(19): siRNA sense strand
gaaccacaaggacuacaug

SEQ ID NO: 1611003 - RNA, 19 nt, Homo sapiens
  misc_RNA (1)...(19): siRNA sense strand
cuggagaaguucccuguga

SEQ ID NO: 1611004 - RNA, 19 nt, Homo sapiens
  misc_RNA (1)...(19): siRNA sense strand
gcugauagaccacccauac

SEQ ID NO: 1611005 - RNA, 19 nt, Homo sapiens
  misc_RNA (1)...(19): siRNA sense strand
uggaguguauccuguuuau

SEQ ID NO: 1611006 - RNA, 19 nt, Homo sapiens
  misc_RNA (1)...(19): siRNA sense strand
ccaaccagcuguggaacau

SEQ ID NO: 1611007 - RNA, 19 nt, Homo sapiens
  misc_RNA (1)...(19): siRNA sense strand
gacacuuuguggaugagaa

SEQ ID NO: 1611008 - RNA, 19 nt, Homo sapiens
  misc_RNA (1)...(19): siRNA sense strand
ggagaaguucccugugauc

SEQ ID NO: 1611009 - RNA, 19 nt, Homo sapiens
  misc_RNA (1)...(19): siRNA sense strand
ggaaacuccagaaaacaua

SEQ ID NO: 1611010 - RNA, 19 nt, Homo sapiens
  misc_RNA (1)...(19): siRNA sense strand
ccuggaguguauccuguuu

SEQ ID NO: 1611011 - RNA, 19 nt, Homo sapiens
  misc_RNA (1)...(19): siRNA sense strand
gggcaguucgcagcugaua

SEQ ID NO: 1611012 - RNA, 19 nt, Homo sapiens
  misc_RNA (1)...(19): siRNA sense strand
aaccagcuguggaacauca

SEQ ID NO: 1611013 - RNA, 19 nt, Homo sapiens
  misc_RNA (1)...(19): siRNA sense strand
acauguuccuggaguguau

SEQ ID NO: 1611014 - RNA, 19 nt, Homo sapiens
  misc_RNA (1)...(19): siRNA sense strand
gcccagacacuuuguggau

SEQ ID NO: 1611015 - RNA, 19 nt, Homo sapiens
  misc_RNA (1)...(19): siRNA sense strand
gaagacuggcccauuugca

SEQ ID NO: 1611016 - RNA, 19 nt, Homo sapiens
  misc_RNA (1)...(19): siRNA sense strand
augagaaggccgugaauga

SEQ ID NO: 1611017 - RNA, 19 nt, Homo sapiens
  misc_RNA (1)...(19): siRNA sense strand
gaugagaaggccgugaaug

SEQ ID NO: 1611018 - RNA, 19 nt, Homo sapiens
  misc_RNA (1)...(19): siRNA sense strand
uggagaaguucccugugau

SEQ ID NO: 1611019 - RNA, 19 nt, Homo sapiens
  misc_RNA (1)...(19): siRNA sense strand
ggaguguauccuguuuauu

SEQ ID NO: 1611020 - RNA, 19 nt, Homo sapiens
  misc_RNA (1)...(19): siRNA sense strand
aaagugaaccagggucuca

SEQ ID NO: 1611021 - RNA, 19 nt, Homo sapiens
  misc_RNA (1)...(19): siRNA sense strand
gaugaagacuggcccauuu

SEQ ID NO: 1611022 - RNA, 19 nt, Homo sapiens
  misc_RNA (1)...(19): siRNA sense strand
gaguguauccuguuuauua

SEQ ID NO: 1611023 - RNA, 19 nt, Homo sapiens
  misc_RNA (1)...(19): siRNA sense strand
ccggguggaugaccaaaua

SEQ ID NO: 1611024 - RNA, 19 nt, Homo sapiens
  misc_RNA (1)...(19): siRNA sense strand
ccagacacuuuguggauga

SEQ ID NO: 1611025 - RNA, 19 nt, Homo sapiens
  misc_RNA (1)...(19): siRNA sense strand
ggucucauccgcauguaua

SEQ ID NO: 1611026 - RNA, 19 nt, Homo sapiens
  misc_RNA (1)...(19): siRNA sense strand
ugccugagguggcuguuua

SEQ ID NO: 1611027 - RNA, 19 nt, Homo sapiens
  misc_RNA (1)...(19): siRNA sense strand
ccacaaggacuacauguuc

SEQ ID NO: 1611028 - RNA, 19 nt, Homo sapiens
  misc_RNA (1)...(19): siRNA sense strand
ggcauacgcugacuacauc

SEQ ID NO: 1611029 - RNA, 19 nt, Homo sapiens
  misc_RNA (1)...(19): siRNA sense strand
gcaguucgcagcugauaga

SEQ ID NO: 1611030 - RNA, 19 nt, Homo sapiens
  misc_RNA (1)...(19): siRNA sense strand
gagaaggccgugaaugaga

SEQ ID NO: 1611031 - RNA, 19 nt, Homo sapiens
  misc_RNA (1)...(19): siRNA sense strand
ccgagugccuggagaaguu

SEQ ID NO: 1611032 - RNA, 19 nt, Homo sapiens
  misc_RNA (1)...(19): siRNA sense strand
agaaggccgugaaugagaa

SEQ ID NO: 1611033 - RNA, 19 nt, Homo sapiens
  misc_RNA (1)...(19): siRNA sense strand
ugaaugagaaccacaagga

SEQ ID NO: 1611034 - RNA, 19 nt, Homo sapiens
  misc_RNA (1)...(19): siRNA sense strand
gaaccacaaggacuacaug

SEQ ID NO: 1611035 - RNA, 19 nt, Homo sapiens
  misc_RNA (1)...(19): siRNA sense strand
cuggagaaguucccuguga

SEQ ID NO: 1611036 - RNA, 19 nt, Homo sapiens
  misc_RNA (1)...(19): siRNA sense strand
gcugauagaccacccauac

SEQ ID NO: 1611037 - RNA, 19 nt, Homo sapiens
  misc_RNA (1)...(19): siRNA sense strand
uggaguguauccuguuuau

SEQ ID NO: 1611038 - RNA, 19 nt, Homo sapiens
  misc_RNA (1)...(19): siRNA sense strand
ccaaccagcuguggaacau

SEQ ID NO: 1611039 - RNA, 19 nt, Homo sapiens
  misc_RNA (1)...(19): siRNA sense strand
ggaaacuccagaaaacaua

SEQ ID NO: 1611040 - RNA, 19 nt, Homo sapiens
  misc_RNA (1)...(19): siRNA sense strand
ggagaaguucccugugauc

SEQ ID NO: 1611041 - RNA, 19 nt, Homo sapiens
  misc_RNA (1)...(19): siRNA sense strand
ccuggaguguauccuguuu

SEQ ID NO: 1611042 - RNA, 19 nt, Homo sapiens
  misc_RNA (1)...(19): siRNA sense strand
gacacuuuguggaugagaa

SEQ ID NO: 1611043 - RNA, 19 nt, Homo sapiens
  misc_RNA (1)...(19): siRNA sense strand
guggaugaccaaauagcua

SEQ ID NO: 1611044 - RNA, 19 nt, Homo sapiens
  misc_RNA (1)...(19): siRNA sense strand
gggcaguucgcagcugaua

SEQ ID NO: 1611045 - RNA, 19 nt, Homo sapiens
  misc_RNA (1)...(19): siRNA sense strand
aaccagcuguggaacauca

SEQ ID NO: 1611046 - RNA, 19 nt, Homo sapiens
  misc_RNA (1)...(19): siRNA sense strand
acauguuccuggaguguau

SEQ ID NO: 1611047 - RNA, 19 nt, Homo sapiens
  misc_RNA (1)...(19): siRNA sense strand
ggaacuccacgcgcauuga

SEQ ID NO: 1611048 - RNA, 19 nt, Homo sapiens
  misc_RNA (1)...(19): siRNA sense strand
gaagacuggcccauuugca

SEQ ID NO: 1611049 - RNA, 19 nt, Homo sapiens
  misc_RNA (1)...(19): siRNA sense strand
gcccagacacuuuguggau

SEQ ID NO: 1611050 - RNA, 19 nt, Homo sapiens
  misc_RNA (1)...(19): siRNA sense strand
augagaaggccgugaauga

SEQ ID NO: 1611051 - RNA, 19 nt, Homo sapiens
  misc_RNA (1)...(19): siRNA sense strand
gaugagaaggccgugaaug

SEQ ID NO: 1611052 - RNA, 19 nt, Homo sapiens
  misc_RNA (1)...(19): siRNA sense strand
aagcugaccuucgaguaca

SEQ ID NO: 1611053 - RNA, 19 nt, Homo sapiens
  misc_RNA (1)...(19): siRNA sense strand
gguguucaaucgguaccuu

SEQ ID NO: 1611054 - RNA, 19 nt, Homo sapiens
  misc_RNA (1)...(19): siRNA sense strand
uggagaaguucccugugau

SEQ ID NO: 1611055 - RNA, 19 nt, Homo sapiens
  misc_RNA (1)...(19): siRNA sense strand
gaacuccacgcgcauugac

SEQ ID NO: 1611056 - RNA, 19 nt, Homo sapiens
  misc_RNA (1)...(19): siRNA sense strand
uagcuauugucuucaaggu

SEQ ID NO: 1611057 - RNA, 19 nt, Homo sapiens
  misc_RNA (1)...(19): siRNA sense strand
gauucauccuuacccucaa

SEQ ID NO: 1611058 - RNA, 19 nt, Homo sapiens
  misc_RNA (1)...(19): siRNA sense strand
gcuuuccucugcugucucu

SEQ ID NO: 1611059 - RNA, 19 nt, Homo sapiens
  misc_RNA (1)...(19): siRNA sense strand
ugcugucucugcaagauug

SEQ ID NO: 1611060 - RNA, 19 nt, Homo sapiens
  misc_RNA (1)...(19): siRNA sense strand
gggaacuccacgcgcauug

SEQ ID NO: 1611061 - RNA, 19 nt, Homo sapiens
  misc_RNA (1)...(19): siRNA sense strand
aaagugaaccagggucuca

SEQ ID NO: 1611062 - RNA, 19 nt, Homo sapiens
  misc_RNA (1)...(19): siRNA sense strand
ggaguguauccuguuuauu

SEQ ID NO: 1611063 - RNA, 19 nt, Homo sapiens
  misc_RNA (1)...(19): siRNA sense strand
ccaagaagcuuuccaugua

SEQ ID NO: 1611064 - RNA, 19 nt, Homo sapiens
  misc_RNA (1)...(19): siRNA sense strand
cagaagacaucacaagaua

SEQ ID NO: 1611065 - RNA, 19 nt, Homo sapiens
  misc_RNA (1)...(19): siRNA sense strand
gaaauccacuucuuagaga

SEQ ID NO: 1611066 - RNA, 19 nt, Homo sapiens
  misc_RNA (1)...(19): siRNA sense strand
gagaagcgaaucaucauua

SEQ ID NO: 1611067 - RNA, 19 nt, Homo sapiens
  misc_RNA (1)...(19): siRNA sense strand
ccaaggagaucaagaagca

SEQ ID NO: 1611068 - RNA, 19 nt, Homo sapiens
  misc_RNA (1)...(19): siRNA sense strand
ccaauggccugcucaucua

SEQ ID NO: 1611069 - RNA, 19 nt, Homo sapiens
  misc_RNA (1)...(19): siRNA sense strand
ggaguaacuucuauaucaa

SEQ ID NO: 1611070 - RNA, 19 nt, Homo sapiens
  misc_RNA (1)...(19): siRNA sense strand
caagaggaguaacuucuau

SEQ ID NO: 1611071 - RNA, 19 nt, Homo sapiens
  misc_RNA (1)...(19): siRNA sense strand
aggaguaacuucuauauca

SEQ ID NO: 1611072 - RNA, 19 nt, Homo sapiens
  misc_RNA (1)...(19): siRNA sense strand
aaccaaagcugucguauac

SEQ ID NO: 1611073 - RNA, 19 nt, Homo sapiens
  misc_RNA (1)...(19): siRNA sense strand
ggccugaccuucugugaug

SEQ ID NO: 1611074 - RNA, 19 nt, Homo sapiens
  misc_RNA (1)...(19): siRNA sense strand
ccagaagauugccaagaaa

SEQ ID NO: 1611075 - RNA, 19 nt, Homo sapiens
  misc_RNA (1)...(19): siRNA sense strand
cccagaagauugccaagaa

SEQ ID NO: 1611076 - RNA, 19 nt, Homo sapiens
  misc_RNA (1)...(19): siRNA sense strand
uaaccaaagcugucguaua

SEQ ID NO: 1611077 - RNA, 19 nt, Homo sapiens
  misc_RNA (1)...(19): siRNA sense strand
ugagaaagccaaugagaga

SEQ ID NO: 1611078 - RNA, 19 nt, Homo sapiens
  misc_RNA (1)...(19): siRNA sense strand
gcaucgagcaucauacauu

SEQ ID NO: 1611079 - RNA, 19 nt, Homo sapiens
  misc_RNA (1)...(19): siRNA sense strand
gagaaugccaagaagcuuu

SEQ ID NO: 1611080 - RNA, 19 nt, Homo sapiens
  misc_RNA (1)...(19): siRNA sense strand
gagcacaauuggcuuuaag

SEQ ID NO: 1611081 - RNA, 19 nt, Homo sapiens
  misc_RNA (1)...(19): siRNA sense strand
ugaaggagcccaacagcaa

SEQ ID NO: 1611082 - RNA, 19 nt, Homo sapiens
  misc_RNA (1)...(19): siRNA sense strand
gaaggagcccaacagcaaa

SEQ ID NO: 1611083 - RNA, 19 nt, Homo sapiens
  misc_RNA (1)...(19): siRNA sense strand
cucaagaucuccuacaaga

SEQ ID NO: 1611084 - RNA, 19 nt, Homo sapiens
  misc_RNA (1)...(19): siRNA sense strand
ggacaagaagccacaggaa

SEQ ID NO: 1611085 - RNA, 19 nt, Homo sapiens
  misc_RNA (1)...(19): siRNA sense strand
cagcaucaaugagcucaaa

SEQ ID NO: 1611086 - RNA, 19 nt, Homo sapiens
  misc_RNA (1)...(19): siRNA sense strand
caucgagcaucauacauuc

SEQ ID NO: 1611087 - RNA, 19 nt, Homo sapiens
  misc_RNA (1)...(19): siRNA sense strand
gaagacaucacaagauacu

SEQ ID NO: 1611088 - RNA, 19 nt, Homo sapiens
  misc_RNA (1)...(19): siRNA sense strand
acaaccaccuggccauuga

SEQ ID NO: 1611089 - RNA, 19 nt, Homo sapiens
  misc_RNA (1)...(19): siRNA sense strand
caagaagcuuuccauguac

SEQ ID NO: 1611090 - RNA, 19 nt, Homo sapiens
  misc_RNA (1)...(19): siRNA sense strand
gaagauugccaagaaauac

SEQ ID NO: 1611091 - RNA, 19 nt, Homo sapiens
  misc_RNA (1)...(19): siRNA sense strand
gacagaagacaucacaaga

SEQ ID NO: 1611092 - RNA, 19 nt, Homo sapiens
  misc_RNA (1)...(19): siRNA sense strand
gggaguaugagcaauuuga

SEQ ID NO: 1611093 - RNA, 19 nt, Homo sapiens
  misc_RNA (1)...(19): siRNA sense strand
ggcccaagauccucaagau

SEQ ID NO: 1611094 - RNA, 19 nt, Homo sapiens
  misc_RNA (1)...(19): siRNA sense strand
ucauggagcugcauaagac

SEQ ID NO: 1611095 - RNA, 19 nt, Homo sapiens
  misc_RNA (1)...(19): siRNA sense strand
ggaugaggauggcgagucu

SEQ ID NO: 1611096 - RNA, 19 nt, Homo sapiens
  misc_RNA (1)...(19): siRNA sense strand
agaagauugccaagaaaua

SEQ ID NO: 1611097 - RNA, 19 nt, Homo sapiens
  misc_RNA (1)...(19): siRNA sense strand
gcaccaggccagcaucaau

SEQ ID NO: 1611098 - RNA, 19 nt, Homo sapiens
  misc_RNA (1)...(19): siRNA sense strand
cagaggagagggacaagaa

SEQ ID NO: 1611099 - RNA, 19 nt, Homo sapiens
  misc_RNA (1)...(19): siRNA sense strand
aaacugcagcauccugaua

SEQ ID NO: 1611100 - RNA, 19 nt, Homo sapiens
  misc_RNA (1)...(19): siRNA sense strand
gccuagacauggaggagaa

SEQ ID NO: 1611101 - RNA, 19 nt, Homo sapiens
  misc_RNA (1)...(19): siRNA sense strand
ccaagagacuguggaaggu

SEQ ID NO: 1611102 - RNA, 19 nt, Homo sapiens
  misc_RNA (1)...(19): siRNA sense strand
gacaagaagccacaggaau

SEQ ID NO: 1611103 - RNA, 19 nt, Homo sapiens
  misc_RNA (1)...(19): siRNA sense strand
ggacaaccaccuggccauu

SEQ ID NO: 1611104 - RNA, 19 nt, Homo sapiens
  misc_RNA (1)...(19): siRNA sense strand
aggcugagcugggugacua

SEQ ID NO: 1611105 - RNA, 19 nt, Homo sapiens
  misc_RNA (1)...(19): siRNA sense strand
gagagcacaauuggcuuua

SEQ ID NO: 1611106 - RNA, 19 nt, Homo sapiens
  misc_RNA (1)...(19): siRNA sense strand
gccaagaagcuuuccaugu

SEQ ID NO: 1611107 - RNA, 19 nt, Homo sapiens
  misc_RNA (1)...(19): siRNA sense strand
gcagucuggccauuagaaa

SEQ ID NO: 1611108 - RNA, 19 nt, Homo sapiens
  misc_RNA (1)...(19): siRNA sense strand
ggugaugggcuccaaguuc

SEQ ID NO: 1611109 - RNA, 19 nt, Homo sapiens
  misc_RNA (1)...(19): siRNA sense strand
acaagaagccacaggaauc

SEQ ID NO: 1611110 - RNA, 19 nt, Homo sapiens
  misc_RNA (1)...(19): siRNA sense strand
gaccagagucuccgcuaug

SEQ ID NO: 1611111 - RNA, 19 nt, Homo sapiens
  misc_RNA (1)...(19): siRNA sense strand
gccauuagaaagaagauug

SEQ ID NO: 1611112 - RNA, 19 nt, Homo sapiens
  misc_RNA (1)...(19): siRNA sense strand
gagcugcauaagacauaua

SEQ ID NO: 1611113 - RNA, 19 nt, Homo sapiens
  misc_RNA (1)...(19): siRNA sense strand
ggccugcacccuucuuuga

SEQ ID NO: 1611114 - RNA, 19 nt, Homo sapiens
  misc_RNA (1)...(19): siRNA sense strand
ggagcugcauaagacauau

SEQ ID NO: 1611115 - RNA, 19 nt, Homo sapiens
  misc_RNA (1)...(19): siRNA sense strand
ucagcagucuggccauuag

SEQ ID NO: 1611116 - RNA, 19 nt, Homo sapiens
  misc_RNA (1)...(19): siRNA sense strand
ggacuucacggucauuggu

SEQ ID NO: 1611117 - RNA, 19 nt, Homo sapiens
  misc_RNA (1)...(19): siRNA sense strand
ggacuccaaccaagaucaa

SEQ ID NO: 1611118 - RNA, 19 nt, Homo sapiens
  misc_RNA (1)...(19): siRNA sense strand
acaagaggaguaacuucua

SEQ ID NO: 1611119 - RNA, 19 nt, Homo sapiens
  misc_RNA (1)...(19): siRNA sense strand
gguaaccaaagcugucgua

SEQ ID NO: 1611120 - RNA, 19 nt, Homo sapiens
  misc_RNA (1)...(19): siRNA sense strand
agugugagguggagaaaca

SEQ ID NO: 1611121 - RNA, 19 nt, Homo sapiens
  misc_RNA (1)...(19): siRNA sense strand
agaagcagauccggaguag

SEQ ID NO: 1611122 - RNA, 19 nt, Homo sapiens
  misc_RNA (1)...(19): siRNA sense strand
caccacccaugucaccaaa

SEQ ID NO: 1611123 - RNA, 19 nt, Homo sapiens
  misc_RNA (1)...(19): siRNA sense strand
ugagagcacaauuggcuuu

SEQ ID NO: 1611124 - RNA, 19 nt, Homo sapiens
  misc_RNA (1)...(19): siRNA sense strand
gcugagaaucaaccgcuuu

SEQ ID NO: 1611125 - RNA, 19 nt, Homo sapiens
  misc_RNA (1)...(19): siRNA sense strand
guuaggcguuugugccaau

SEQ ID NO: 1611126 - RNA, 19 nt, Homo sapiens
  misc_RNA (1)...(19): siRNA sense strand
gagcaugugggcaacuaug

SEQ ID NO: 1611127 - RNA, 19 nt, Homo sapiens
  misc_RNA (1)...(19): siRNA sense strand
ugacagaagacaucacaag

SEQ ID NO: 1611128 - RNA, 19 nt, Homo sapiens
  misc_RNA (1)...(19): siRNA sense strand
cugcccagcugacagaaga

SEQ ID NO: 1611129 - RNA, 19 nt, Homo sapiens
  misc_RNA (1)...(19): siRNA sense strand
ugagcguucuuccagcaaa

SEQ ID NO: 1611130 - RNA, 19 nt, Homo sapiens
  misc_RNA (1)...(19): siRNA sense strand
ccagcaaggcccagaaauc

SEQ ID NO: 1611131 - RNA, 19 nt, Homo sapiens
  misc_RNA (1)...(19): siRNA sense strand
gcagcgccuucgaagacuu

SEQ ID NO: 1611132 - RNA, 19 nt, Homo sapiens
  misc_RNA (1)...(19): siRNA sense strand
acggucagcucuacgucua

SEQ ID NO: 1611133 - RNA, 19 nt, Homo sapiens
  misc_RNA (1)...(19): siRNA sense strand
agagcacaauuggcuuuaa

SEQ ID NO: 1611134 - RNA, 19 nt, Homo sapiens
  misc_RNA (1)...(19): siRNA sense strand
cagccaggaugaugagucu

SEQ ID NO: 1611135 - RNA, 19 nt, Homo sapiens
  misc_RNA (1)...(19): siRNA sense strand
gagcccaacagcaaacuca

SEQ ID NO: 1611136 - RNA, 19 nt, Homo sapiens
  misc_RNA (1)...(19): siRNA sense strand
cagaagauugccaagaaau

SEQ ID NO: 1611137 - RNA, 19 nt, Homo sapiens
  misc_RNA (1)...(19): siRNA sense strand
uagacaagccagaagaugu

SEQ ID NO: 1611138 - RNA, 19 nt, Homo sapiens
  misc_RNA (1)...(19): siRNA sense strand
cggcugccaugcuccuuug

SEQ ID NO: 1611139 - RNA, 19 nt, Homo sapiens
  misc_RNA (1)...(19): siRNA sense strand
gaguaugagcaauuugaga

SEQ ID NO: 1611140 - RNA, 19 nt, Homo sapiens
  misc_RNA (1)...(19): siRNA sense strand
ugagcugggugacuaugau

SEQ ID NO: 1611141 - RNA, 19 nt, Homo sapiens
  misc_RNA (1)...(19): siRNA sense strand
acagaagacaucacaagau

SEQ ID NO: 1611142 - RNA, 19 nt, Homo sapiens
  misc_RNA (1)...(19): siRNA sense strand
agaagcgaaucaucauuac

SEQ ID NO: 1611143 - RNA, 19 nt, Homo sapiens
  misc_RNA (1)...(19): siRNA sense strand
gagucuccgcuauggauaa

SEQ ID NO: 1611144 - RNA, 19 nt, Homo sapiens
  misc_RNA (1)...(19): siRNA sense strand
gacaaccaccuggccauug

SEQ ID NO: 1611145 - RNA, 19 nt, Homo sapiens
  misc_RNA (1)...(19): siRNA sense strand
gaggaguaacuucuauauc

SEQ ID NO: 1611146 - RNA, 19 nt, Homo sapiens
  misc_RNA (1)...(19): siRNA sense strand
gagaagcagaaauccacuu

SEQ ID NO: 1611147 - RNA, 19 nt, Homo sapiens
  misc_RNA (1)...(19): siRNA sense strand
cgagaagcgaaucaucauu

SEQ ID NO: 1611148 - RNA, 19 nt, Homo sapiens
  misc_RNA (1)...(19): siRNA sense strand
gaucgagaagcgaaucauc

SEQ ID NO: 1611149 - RNA, 19 nt, Homo sapiens
  misc_RNA (1)...(19): siRNA sense strand
ggaguagccccuggaauuu

SEQ ID NO: 1611150 - RNA, 19 nt, Homo sapiens
  misc_RNA (1)...(19): siRNA sense strand
gcugacagaagacaucaca

SEQ ID NO: 1611151 - RNA, 19 nt, Homo sapiens
  misc_RNA (1)...(19): siRNA sense strand
caucaaggaggccaaacug

SEQ ID NO: 1611152 - RNA, 19 nt, Homo sapiens
  misc_RNA (1)...(19): siRNA sense strand
aaaggaggguuuucugaga

SEQ ID NO: 1611153 - RNA, 19 nt, Homo sapiens
  misc_RNA (1)...(19): siRNA sense strand
ccauuagaaagaagauuga

SEQ ID NO: 1611154 - RNA, 19 nt, Homo sapiens
  misc_RNA (1)...(19): siRNA sense strand
caccucaaccuccuagaga

SEQ ID NO: 1611155 - RNA, 19 nt, Homo sapiens
  misc_RNA (1)...(19): siRNA sense strand
gggaccggcugagaaucaa

SEQ ID NO: 1611156 - RNA, 19 nt, Homo sapiens
  misc_RNA (1)...(19): siRNA sense strand
gaucauggagcugcauaag

SEQ ID NO: 1611157 - RNA, 19 nt, Homo sapiens
  misc_RNA (1)...(19): siRNA sense strand
ggaucauggagcugcauaa

SEQ ID NO: 1611158 - RNA, 19 nt, Homo sapiens
  misc_RNA (1)...(19): siRNA sense strand
agaggaguaacuucuauau

SEQ ID NO: 1611159 - RNA, 19 nt, Homo sapiens
  misc_RNA (1)...(19): siRNA sense strand
ccucggaguaugaguguga

SEQ ID NO: 1611160 - RNA, 19 nt, Homo sapiens
  misc_RNA (1)...(19): siRNA sense strand
aagcgaaucaucauuacug

SEQ ID NO: 1611161 - RNA, 19 nt, Homo sapiens
  misc_RNA (1)...(19): siRNA sense strand
caccaaaacugugaaagga

SEQ ID NO: 1611162 - RNA, 19 nt, Homo sapiens
  misc_RNA (1)...(19): siRNA sense strand
cagagucuccgcuauggau

SEQ ID NO: 1611163 - RNA, 19 nt, Homo sapiens
  misc_RNA (1)...(19): siRNA sense strand
ccaagaagcuuuccaugua

SEQ ID NO: 1611164 - RNA, 19 nt, Homo sapiens
  misc_RNA (1)...(19): siRNA sense strand
cagaagacaucacaagaua

SEQ ID NO: 1611165 - RNA, 19 nt, Homo sapiens
  misc_RNA (1)...(19): siRNA sense strand
gaaauccacuucuuagaga

SEQ ID NO: 1611166 - RNA, 19 nt, Homo sapiens
  misc_RNA (1)...(19): siRNA sense strand
gagaagcgaaucaucauua

SEQ ID NO: 1611167 - RNA, 19 nt, Homo sapiens
  misc_RNA (1)...(19): siRNA sense strand
ccaaggagaucaagaagca

SEQ ID NO: 1611168 - RNA, 19 nt, Homo sapiens
  misc_RNA (1)...(19): siRNA sense strand
ccaauggccugcucaucua

SEQ ID NO: 1611169 - RNA, 19 nt, Homo sapiens
  misc_RNA (1)...(19): siRNA sense strand
ggaguaacuucuauaucaa

SEQ ID NO: 1611170 - RNA, 19 nt, Homo sapiens
  misc_RNA (1)...(19): siRNA sense strand
caagaggaguaacuucuau

SEQ ID NO: 1611171 - RNA, 19 nt, Homo sapiens
  misc_RNA (1)...(19): siRNA sense strand
aggaguaacuucuauauca

SEQ ID NO: 1611172 - RNA, 19 nt, Homo sapiens
  misc_RNA (1)...(19): siRNA sense strand
aaccaaagcugucguauac

SEQ ID NO: 1611173 - RNA, 19 nt, Homo sapiens
  misc_RNA (1)...(19): siRNA sense strand
ggccugaccuucugugaug

SEQ ID NO: 1611174 - RNA, 19 nt, Homo sapiens
  misc_RNA (1)...(19): siRNA sense strand
ccagaagauugccaagaaa

SEQ ID NO: 1611175 - RNA, 19 nt, Homo sapiens
  misc_RNA (1)...(19): siRNA sense strand
gcaucgagcaucauacauu

SEQ ID NO: 1611176 - RNA, 19 nt, Homo sapiens
  misc_RNA (1)...(19): siRNA sense strand
uaaccaaagcugucguaua

SEQ ID NO: 1611177 - RNA, 19 nt, Homo sapiens
  misc_RNA (1)...(19): siRNA sense strand
cccagaagauugccaagaa

SEQ ID NO: 1611178 - RNA, 19 nt, Homo sapiens
  misc_RNA (1)...(19): siRNA sense strand
ugagaaagccaaugagaga

SEQ ID NO: 1611179 - RNA, 19 nt, Homo sapiens
  misc_RNA (1)...(19): siRNA sense strand
gagaaugccaagaagcuuu

SEQ ID NO: 1611180 - RNA, 19 nt, Homo sapiens
  misc_RNA (1)...(19): siRNA sense strand
gagcacaauuggcuuuaag

SEQ ID NO: 1611181 - RNA, 19 nt, Homo sapiens
  misc_RNA (1)...(19): siRNA sense strand
ugaaggagcccaacagcaa

SEQ ID NO: 1611182 - RNA, 19 nt, Homo sapiens
  misc_RNA (1)...(19): siRNA sense strand
gaaggagcccaacagcaaa

SEQ ID NO: 1611183 - RNA, 19 nt, Homo sapiens
  misc_RNA (1)...(19): siRNA sense strand
cucaagaucuccuacaaga

SEQ ID NO: 1611184 - RNA, 19 nt, Homo sapiens
  misc_RNA (1)...(19): siRNA sense strand
ggacaagaagccacaggaa

SEQ ID NO: 1611185 - RNA, 19 nt, Homo sapiens
  misc_RNA (1)...(19): siRNA sense strand
cagcaucaaugagcucaaa

SEQ ID NO: 1611186 - RNA, 19 nt, Homo sapiens
  misc_RNA (1)...(19): siRNA sense strand
caucgagcaucauacauuc

SEQ ID NO: 1611187 - RNA, 19 nt, Homo sapiens
  misc_RNA (1)...(19): siRNA sense strand
gaagacaucacaagauacu

SEQ ID NO: 1611188 - RNA, 19 nt, Homo sapiens
  misc_RNA (1)...(19): siRNA sense strand
acaaccaccuggccauuga

SEQ ID NO: 1611189 - RNA, 19 nt, Homo sapiens
  misc_RNA (1)...(19): siRNA sense strand
caagaagcuuuccauguac

SEQ ID NO: 1611190 - RNA, 19 nt, Homo sapiens
  misc_RNA (1)...(19): siRNA sense strand
gaagauugccaagaaauac

SEQ ID NO: 1611191 - RNA, 19 nt, Homo sapiens
  misc_RNA (1)...(19): siRNA sense strand
gacagaagacaucacaaga

SEQ ID NO: 1611192 - RNA, 19 nt, Homo sapiens
  misc_RNA (1)...(19): siRNA sense strand
gggaguaugagcaauuuga

SEQ ID NO: 1611193 - RNA, 19 nt, Homo sapiens
  misc_RNA (1)...(19): siRNA sense strand
ggcccaagauccucaagau

SEQ ID NO: 1611194 - RNA, 19 nt, Homo sapiens
  misc_RNA (1)...(19): siRNA sense strand
ucauggagcugcauaagac

SEQ ID NO: 1611195 - RNA, 19 nt, Homo sapiens
  misc_RNA (1)...(19): siRNA sense strand
ggaugaggauggcgagucu

SEQ ID NO: 1611196 - RNA, 19 nt, Homo sapiens
  misc_RNA (1)...(19): siRNA sense strand
agaagauugccaagaaaua

SEQ ID NO: 1611197 - RNA, 19 nt, Homo sapiens
  misc_RNA (1)...(19): siRNA sense strand
gcaccaggccagcaucaau

SEQ ID NO: 1611198 - RNA, 19 nt, Homo sapiens
  misc_RNA (1)...(19): siRNA sense strand
cagaggagagggacaagaa

SEQ ID NO: 1611199 - RNA, 19 nt, Homo sapiens
  misc_RNA (1)...(19): siRNA sense strand
aaacugcagcauccugaua

SEQ ID NO: 1611200 - RNA, 19 nt, Homo sapiens
  misc_RNA (1)...(19): siRNA sense strand
ccaagagacuguggaaggu

SEQ ID NO: 1611201 - RNA, 19 nt, Homo sapiens
  misc_RNA (1)...(19): siRNA sense strand
gacaagaagccacaggaau

SEQ ID NO: 1611202 - RNA, 19 nt, Homo sapiens
  misc_RNA (1)...(19): siRNA sense strand
ggacaaccaccuggccauu

SEQ ID NO: 1611203 - RNA, 19 nt, Homo sapiens
  misc_RNA (1)...(19): siRNA sense strand
aggcugagcugggugacua

SEQ ID NO: 1611204 - RNA, 19 nt, Homo sapiens
  misc_RNA (1)...(19): siRNA sense strand
gagagcacaauuggcuuua

SEQ ID NO: 1611205 - RNA, 19 nt, Homo sapiens
  misc_RNA (1)...(19): siRNA sense strand
gccaagaagcuuuccaugu

SEQ ID NO: 1611206 - RNA, 19 nt, Homo sapiens
  misc_RNA (1)...(19): siRNA sense strand
gcagucuggccauuagaaa

SEQ ID NO: 1611207 - RNA, 19 nt, Homo sapiens
  misc_RNA (1)...(19): siRNA sense strand
ggugaugggcuccaaguuc

SEQ ID NO: 1611208 - RNA, 19 nt, Homo sapiens
  misc_RNA (1)...(19): siRNA sense strand
acaagaagccacaggaauc

SEQ ID NO: 1611209 - RNA, 19 nt, Homo sapiens
  misc_RNA (1)...(19): siRNA sense strand
gaccagagucuccgcuaug

SEQ ID NO: 1611210 - RNA, 19 nt, Homo sapiens
  misc_RNA (1)...(19): siRNA sense strand
gccauuagaaagaagauug

SEQ ID NO: 1611211 - RNA, 19 nt, Homo sapiens
  misc_RNA (1)...(19): siRNA sense strand
gagcugcauaagacauaua

SEQ ID NO: 1611212 - RNA, 19 nt, Homo sapiens
  misc_RNA (1)...(19): siRNA sense strand
ggccugcacccuucuuuga

SEQ ID NO: 1611213 - RNA, 19 nt, Homo sapiens
  misc_RNA (1)...(19): siRNA sense strand
ggagcugcauaagacauau

SEQ ID NO: 1611214 - RNA, 19 nt, Homo sapiens
  misc_RNA (1)...(19): siRNA sense strand
ucagcagucuggccauuag

SEQ ID NO: 1611215 - RNA, 19 nt, Homo sapiens
  misc_RNA (1)...(19): siRNA sense strand
ggacuucacggucauuggu

SEQ ID NO: 1611216 - RNA, 19 nt, Homo sapiens
  misc_RNA (1)...(19): siRNA sense strand
ggacuccaaccaagaucaa

SEQ ID NO: 1611217 - RNA, 19 nt, Homo sapiens
  misc_RNA (1)...(19): siRNA sense strand
agugugagguggagaaaca

SEQ ID NO: 1611218 - RNA, 19 nt, Homo sapiens
  misc_RNA (1)...(19): siRNA sense strand
gguaaccaaagcugucgua

SEQ ID NO: 1611219 - RNA, 19 nt, Homo sapiens
  misc_RNA (1)...(19): siRNA sense strand
acaagaggaguaacuucua

SEQ ID NO: 1611220 - RNA, 19 nt, Homo sapiens
  misc_RNA (1)...(19): siRNA sense strand
agaagcagauccggaguag

SEQ ID NO: 1611221 - RNA, 19 nt, Homo sapiens
  misc_RNA (1)...(19): siRNA sense strand
caccacccaugucaccaaa

SEQ ID NO: 1611222 - RNA, 19 nt, Homo sapiens
  misc_RNA (1)...(19): siRNA sense strand
ugagagcacaauuggcuuu

SEQ ID NO: 1611223 - RNA, 19 nt, Homo sapiens
  misc_RNA (1)...(19): siRNA sense strand
gcugagaaucaaccgcuuu

SEQ ID NO: 1611224 - RNA, 19 nt, Homo sapiens
  misc_RNA (1)...(19): siRNA sense strand
guuaggcguuugugccaau

SEQ ID NO: 1611225 - RNA, 19 nt, Homo sapiens
  misc_RNA (1)...(19): siRNA sense strand
gagcaugugggcaacuaug

SEQ ID NO: 1611226 - RNA, 19 nt, Homo sapiens
  misc_RNA (1)...(19): siRNA sense strand
ugacagaagacaucacaag

SEQ ID NO: 1611227 - RNA, 19 nt, Homo sapiens
  misc_RNA (1)...(19): siRNA sense strand
cugcccagcugacagaaga

SEQ ID NO: 1611228 - RNA, 19 nt, Homo sapiens
  misc_RNA (1)...(19): siRNA sense strand
ugagcguucuuccagcaaa

SEQ ID NO: 1611229 - RNA, 19 nt, Homo sapiens
  misc_RNA (1)...(19): siRNA sense strand
gcagcgccuucgaagacuu

SEQ ID NO: 1611230 - RNA, 19 nt, Homo sapiens
  misc_RNA (1)...(19): siRNA sense strand
acggucagcucuacgucua

SEQ ID NO: 1611231 - RNA, 19 nt, Homo sapiens
  misc_RNA (1)...(19): siRNA sense strand
ccagcaaggcccagaaauc

SEQ ID NO: 1611232 - RNA, 19 nt, Homo sapiens
  misc_RNA (1)...(19): siRNA sense strand
agagcacaauuggcuuuaa

SEQ ID NO: 1611233 - RNA, 19 nt, Homo sapiens
  misc_RNA (1)...(19): siRNA sense strand
cagccaggaugaugagucu

SEQ ID NO: 1611234 - RNA, 19 nt, Homo sapiens
  misc_RNA (1)...(19): siRNA sense strand
cagaagauugccaagaaau

SEQ ID NO: 1611235 - RNA, 19 nt, Homo sapiens
  misc_RNA (1)...(19): siRNA sense strand
gagcccaacagcaaacuca

SEQ ID NO: 1611236 - RNA, 19 nt, Homo sapiens
  misc_RNA (1)...(19): siRNA sense strand
uagacaagccagaagaugu

SEQ ID NO: 1611237 - RNA, 19 nt, Homo sapiens
  misc_RNA (1)...(19): siRNA sense strand
cggcugccaugcuccuuug

SEQ ID NO: 1611238 - RNA, 19 nt, Homo sapiens
  misc_RNA (1)...(19): siRNA sense strand
gaguaugagcaauuugaga

SEQ ID NO: 1611239 - RNA, 19 nt, Homo sapiens
  misc_RNA (1)...(19): siRNA sense strand
ugagcugggugacuaugau

SEQ ID NO: 1611240 - RNA, 19 nt, Homo sapiens
  misc_RNA (1)...(19): siRNA sense strand
acagaagacaucacaagau

SEQ ID NO: 1611241 - RNA, 19 nt, Homo sapiens
  misc_RNA (1)...(19): siRNA sense strand
agaagcgaaucaucauuac

SEQ ID NO: 1611242 - RNA, 19 nt, Homo sapiens
  misc_RNA (1)...(19): siRNA sense strand
gagucuccgcuauggauaa

SEQ ID NO: 1611243 - RNA, 19 nt, Homo sapiens
  misc_RNA (1)...(19): siRNA sense strand
gacaaccaccuggccauug

SEQ ID NO: 1611244 - RNA, 19 nt, Homo sapiens
  misc_RNA (1)...(19): siRNA sense strand
gaggaguaacuucuauauc

SEQ ID NO: 1611245 - RNA, 19 nt, Homo sapiens
  misc_RNA (1)...(19): siRNA sense strand
gagaagcagaaauccacuu

SEQ ID NO: 1611246 - RNA, 19 nt, Homo sapiens
  misc_RNA (1)...(19): siRNA sense strand
cgagaagcgaaucaucauu

SEQ ID NO: 1611247 - RNA, 19 nt, Homo sapiens
  misc_RNA (1)...(19): siRNA sense strand
gaucgagaagcgaaucauc

SEQ ID NO: 1611248 - RNA, 19 nt, Homo sapiens
  misc_RNA (1)...(19): siRNA sense strand
ggaguagccccuggaauuu

SEQ ID NO: 1611249 - RNA, 19 nt, Homo sapiens
  misc_RNA (1)...(19): siRNA sense strand
gcugacagaagacaucaca

SEQ ID NO: 1611250 - RNA, 19 nt, Homo sapiens
  misc_RNA (1)...(19): siRNA sense strand
caucaaggaggccaaacug

SEQ ID NO: 1611251 - RNA, 19 nt, Homo sapiens
  misc_RNA (1)...(19): siRNA sense strand
aaaggaggguuuucugaga

SEQ ID NO: 1611252 - RNA, 19 nt, Homo sapiens
  misc_RNA (1)...(19): siRNA sense strand
ccauuagaaagaagauuga

SEQ ID NO: 1611253 - RNA, 19 nt, Homo sapiens
  misc_RNA (1)...(19): siRNA sense strand
gggaccggcugagaaucaa

SEQ ID NO: 1611254 - RNA, 19 nt, Homo sapiens
  misc_RNA (1)...(19): siRNA sense strand
caccucaaccuccuagaga

SEQ ID NO: 1611255 - RNA, 19 nt, Homo sapiens
  misc_RNA (1)...(19): siRNA sense strand
gaucauggagcugcauaag

SEQ ID NO: 1611256 - RNA, 19 nt, Homo sapiens
  misc_RNA (1)...(19): siRNA sense strand
ggaucauggagcugcauaa

SEQ ID NO: 1611257 - RNA, 19 nt, Homo sapiens
  misc_RNA (1)...(19): siRNA sense strand
agaggaguaacuucuauau

SEQ ID NO: 1611258 - RNA, 19 nt, Homo sapiens
  misc_RNA (1)...(19): siRNA sense strand
aagcgaaucaucauuacug

SEQ ID NO: 1611259 - RNA, 19 nt, Homo sapiens
  misc_RNA (1)...(19): siRNA sense strand
caccaaaacugugaaagga

SEQ ID NO: 1611260 - RNA, 19 nt, Homo sapiens
  misc_RNA (1)...(19): siRNA sense strand
cagagucuccgcuauggau

SEQ ID NO: 1611261 - RNA, 19 nt, Homo sapiens
  misc_RNA (1)...(19): siRNA sense strand
ccucggaguaugaguguga

SEQ ID NO: 1611262 - RNA, 19 nt, Homo sapiens
  misc_RNA (1)...(19): siRNA sense strand
gcaaacgguacaccauguc

SEQ ID NO: 1611263 - RNA, 19 nt, Homo sapiens
  misc_RNA (1)...(19): siRNA sense strand
gaagauggcagaagucaug

SEQ ID NO: 1611264 - RNA, 19 nt, Homo sapiens
  misc_RNA (1)...(19): siRNA sense strand
ucacggagcuccucaugca

SEQ ID NO: 1611265 - RNA, 19 nt, Homo sapiens
  misc_RNA (1)...(19): siRNA sense strand
ggagaaccgugagaagaug

SEQ ID NO: 1611266 - RNA, 19 nt, Homo sapiens
  misc_RNA (1)...(19): siRNA sense strand
gugagaagauggcagaagu

SEQ ID NO: 1611267 - RNA, 19 nt, Homo sapiens
  misc_RNA (1)...(19): siRNA sense strand
cagcagaggccaaccagaa

SEQ ID NO: 1611268 - RNA, 19 nt, Homo sapiens
  misc_RNA (1)...(19): siRNA sense strand
cagaagucauguucgagaa

SEQ ID NO: 1611269 - RNA, 19 nt, Homo sapiens
  misc_RNA (1)...(19): siRNA sense strand
gggaggaggcccuguacaa

SEQ ID NO: 1611270 - RNA, 19 nt, Homo sapiens
  misc_RNA (1)...(19): siRNA sense strand
ccgcagacuucaaggaguu

SEQ ID NO: 1611271 - RNA, 19 nt, Homo sapiens
  misc_RNA (1)...(19): siRNA sense strand
gggagaaccgugagaagau

SEQ ID NO: 1611272 - RNA, 19 nt, Homo sapiens
  misc_RNA (1)...(19): siRNA sense strand
gcagaggccaaccagaaga

SEQ ID NO: 1611273 - RNA, 19 nt, Homo sapiens
  misc_RNA (1)...(19): siRNA sense strand
gggaugacguggagagacu

SEQ ID NO: 1611274 - RNA, 19 nt, Homo sapiens
  misc_RNA (1)...(19): siRNA sense strand
gagaagauggcagaaguca

SEQ ID NO: 1611275 - RNA, 19 nt, Homo sapiens
  misc_RNA (1)...(19): siRNA sense strand
uggcagaagucauguucga

SEQ ID NO: 1611276 - RNA, 19 nt, Homo sapiens
  misc_RNA (1)...(19): siRNA sense strand
caagugugauaccgacauc

SEQ ID NO: 1611277 - RNA, 19 nt, Homo sapiens
  misc_RNA (1)...(19): siRNA sense strand
gauggcagaagucauguuc

SEQ ID NO: 1611278 - RNA, 19 nt, Homo sapiens
  misc_RNA (1)...(19): siRNA sense strand
ucuggaagcaccucuuuga

SEQ ID NO: 1611279 - RNA, 19 nt, Homo sapiens
  misc_RNA (1)...(19): siRNA sense strand
ccagcagcaucaccaagug

SEQ ID NO: 1611280 - RNA, 19 nt, Homo sapiens
  misc_RNA (1)...(19): siRNA sense strand
ggaggaggcccuguacaag

SEQ ID NO: 1611281 - RNA, 19 nt, Homo sapiens
  misc_RNA (1)...(19): siRNA sense strand
auaccgacauccagaagau

SEQ ID NO: 1611282 - RNA, 19 nt, Homo sapiens
  misc_RNA (1)...(19): siRNA sense strand
ccaaccagaagaaguacuu

SEQ ID NO: 1611283 - RNA, 19 nt, Homo sapiens
  misc_RNA (1)...(19): siRNA sense strand
ucaccucucugaguagcuu

SEQ ID NO: 1611284 - RNA, 19 nt, Homo sapiens
  misc_RNA (1)...(19): siRNA sense strand
aggccaaccagaagaagua

SEQ ID NO: 1611285 - RNA, 19 nt, Homo sapiens
  misc_RNA (1)...(19): siRNA sense strand
caucgucaccucucugagu

SEQ ID NO: 1611286 - RNA, 19 nt, Homo sapiens
  misc_RNA (1)...(19): siRNA sense strand
gauaccgacauccagaaga

SEQ ID NO: 1611287 - RNA, 19 nt, Homo sapiens
  misc_RNA (1)...(19): siRNA sense strand
gcacuguccccaucuuuga

SEQ ID NO: 1611288 - RNA, 19 nt, Homo sapiens
  misc_RNA (1)...(19): siRNA sense strand
ccagaagaaguacuuugug

SEQ ID NO: 1611289 - RNA, 19 nt, Homo sapiens
  misc_RNA (1)...(19): siRNA sense strand
guuuaauccgcacgcuuua

SEQ ID NO: 1611290 - RNA, 19 nt, Homo sapiens
  misc_RNA (1)...(19): siRNA sense strand
uuaauccgcacgcuuuaga

SEQ ID NO: 1611291 - RNA, 19 nt, Homo sapiens
  misc_RNA (1)...(19): siRNA sense strand
aaaagaagcugugcuacgu

SEQ ID NO: 1611292 - RNA, 19 nt, Homo sapiens
  misc_RNA (1)...(19): siRNA sense strand
caaccagaagaaguacuuu

SEQ ID NO: 1611293 - RNA, 19 nt, Homo sapiens
  misc_RNA (1)...(19): siRNA sense strand
cagaggccaaccagaagaa

SEQ ID NO: 1611294 - RNA, 19 nt, Homo sapiens
  misc_RNA (1)...(19): siRNA sense strand
aggaggcccuguacaagca

SEQ ID NO: 1611295 - RNA, 19 nt, Homo sapiens
  misc_RNA (1)...(19): siRNA sense strand
uggaagcaccucuuugagu

SEQ ID NO: 1611296 - RNA, 19 nt, Homo sapiens
  misc_RNA (1)...(19): siRNA sense strand
aggcggugcuggcucucua

SEQ ID NO: 1611297 - RNA, 19 nt, Homo sapiens
  misc_RNA (1)...(19): siRNA sense strand
ccagggagaaccgugagaa

SEQ ID NO: 1611298 - RNA, 19 nt, Homo sapiens
  misc_RNA (1)...(19): siRNA sense strand
caucacggagcuccucaug

SEQ ID NO: 1611299 - RNA, 19 nt, Homo sapiens
  misc_RNA (1)...(19): siRNA sense strand
gauaaugggucaccaauuu

SEQ ID NO: 1611300 - RNA, 19 nt, Homo sapiens
  misc_RNA (1)...(19): siRNA sense strand
ccaaagcccuagcaaauuu

SEQ ID NO: 1611301 - RNA, 19 nt, Homo sapiens
  misc_RNA (1)...(19): siRNA sense strand
gcagcuggauaaagaguua

SEQ ID NO: 1611302 - RNA, 19 nt, Homo sapiens
  misc_RNA (1)...(19): siRNA sense strand
gagaaugacugcugaccaa

SEQ ID NO: 1611303 - RNA, 19 nt, Homo sapiens
  misc_RNA (1)...(19): siRNA sense strand
ccaccuaguuugcaaauug

SEQ ID NO: 1611304 - RNA, 19 nt, Homo sapiens
  misc_RNA (1)...(19): siRNA sense strand
uggaaggacucaaagauaa

SEQ ID NO: 1611305 - RNA, 19 nt, Homo sapiens
  misc_RNA (1)...(19): siRNA sense strand
ggaauuuacucaguuucua

SEQ ID NO: 1611306 - RNA, 19 nt, Homo sapiens
  misc_RNA (1)...(19): siRNA sense strand
gaaaguggcuucacauacc

SEQ ID NO: 1611307 - RNA, 19 nt, Homo sapiens
  misc_RNA (1)...(19): siRNA sense strand
gaaaauggaccaacaguuu

SEQ ID NO: 1611308 - RNA, 19 nt, Homo sapiens
  misc_RNA (1)...(19): siRNA sense strand
caccuuaccucaauaucua

SEQ ID NO: 1611309 - RNA, 19 nt, Homo sapiens
  misc_RNA (1)...(19): siRNA sense strand
ccaugcagcuggauaaaga

SEQ ID NO: 1611310 - RNA, 19 nt, Homo sapiens
  misc_RNA (1)...(19): siRNA sense strand
ggacagcaccagacuauuc

SEQ ID NO: 1611311 - RNA, 19 nt, Homo sapiens
  misc_RNA (1)...(19): siRNA sense strand
gaaggaucauuccaaagga

SEQ ID NO: 1611312 - RNA, 19 nt, Homo sapiens
  misc_RNA (1)...(19): siRNA sense strand
guagaaauguggcagaaag

SEQ ID NO: 1611313 - RNA, 19 nt, Homo sapiens
  misc_RNA (1)...(19): siRNA sense strand
gagcuuaauucccgagaug

SEQ ID NO: 1611314 - RNA, 19 nt, Homo sapiens
  misc_RNA (1)...(19): siRNA sense strand
cgguagagcuugcaaguau

SEQ ID NO: 1611315 - RNA, 19 nt, Homo sapiens
  misc_RNA (1)...(19): siRNA sense strand
ggagaaguaccacaucauu

SEQ ID NO: 1611316 - RNA, 19 nt, Homo sapiens
  misc_RNA (1)...(19): siRNA sense strand
ggaacccucuggaacaaga

SEQ ID NO: 1611317 - RNA, 19 nt, Homo sapiens
  misc_RNA (1)...(19): siRNA sense strand
cuacagugacucagauuua

SEQ ID NO: 1611318 - RNA, 19 nt, Homo sapiens
  misc_RNA (1)...(19): siRNA sense strand
cauccugggucacugauaa

SEQ ID NO: 1611319 - RNA, 19 nt, Homo sapiens
  misc_RNA (1)...(19): siRNA sense strand
uaagggaauuuacucaguu

SEQ ID NO: 1611320 - RNA, 19 nt, Homo sapiens
  misc_RNA (1)...(19): siRNA sense strand
uagcgucucuuacuacuau

SEQ ID NO: 1611321 - RNA, 19 nt, Homo sapiens
  misc_RNA (1)...(19): siRNA sense strand
ccaaugagcaacaguuuga

SEQ ID NO: 1611322 - RNA, 19 nt, Homo sapiens
  misc_RNA (1)...(19): siRNA sense strand
ggcauuuacuucuacaauu

SEQ ID NO: 1611323 - RNA, 19 nt, Homo sapiens
  misc_RNA (1)...(19): siRNA sense strand
ggugaugacauuugccuua

SEQ ID NO: 1611324 - RNA, 19 nt, Homo sapiens
  misc_RNA (1)...(19): siRNA sense strand
uaacuccucuccgcaauau

SEQ ID NO: 1611325 - RNA, 19 nt, Homo sapiens
  misc_RNA (1)...(19): siRNA sense strand
gguguagcgucucuuacua

SEQ ID NO: 1611326 - RNA, 19 nt, Homo sapiens
  misc_RNA (1)...(19): siRNA sense strand
ggccaaagcccuagcaaau

SEQ ID NO: 1611327 - RNA, 19 nt, Homo sapiens
  misc_RNA (1)...(19): siRNA sense strand
gggcaaagcgacccaauuc

SEQ ID NO: 1611328 - RNA, 19 nt, Homo sapiens
  misc_RNA (1)...(19): siRNA sense strand
gcgagcagaugccgcagaa

SEQ ID NO: 1611329 - RNA, 19 nt, Homo sapiens
  misc_RNA (1)...(19): siRNA sense strand
gaacaggccagugaugaug

SEQ ID NO: 1611330 - RNA, 19 nt, Homo sapiens
  misc_RNA (1)...(19): siRNA sense strand
cauaagccauuguuacauc

SEQ ID NO: 1611331 - RNA, 19 nt, Homo sapiens
  misc_RNA (1)...(19): siRNA sense strand
cugggucacugauaauaua

SEQ ID NO: 1611332 - RNA, 19 nt, Homo sapiens
  misc_RNA (1)...(19): siRNA sense strand
gcauuacagucugaauuga

SEQ ID NO: 1611333 - RNA, 19 nt, Homo sapiens
  misc_RNA (1)...(19): siRNA sense strand
gcugucaccuuaccucaau

SEQ ID NO: 1611334 - RNA, 19 nt, Homo sapiens
  misc_RNA (1)...(19): siRNA sense strand
gucaucugcuucaugguua

SEQ ID NO: 1611335 - RNA, 19 nt, Homo sapiens
  misc_RNA (1)...(19): siRNA sense strand
caacugaaggagccuguaa

SEQ ID NO: 1611336 - RNA, 19 nt, Homo sapiens
  misc_RNA (1)...(19): siRNA sense strand
aaaggaagguagaaaugug

SEQ ID NO: 1611337 - RNA, 19 nt, Homo sapiens
  misc_RNA (1)...(19): siRNA sense strand
ucacccagcuuugcaaaug

SEQ ID NO: 1611338 - RNA, 19 nt, Homo sapiens
  misc_RNA (1)...(19): siRNA sense strand
gagaacaggccagugauga

SEQ ID NO: 1611339 - RNA, 19 nt, Homo sapiens
  misc_RNA (1)...(19): siRNA sense strand
gcagcacacuuucuuucug

SEQ ID NO: 1611340 - RNA, 19 nt, Homo sapiens
  misc_RNA (1)...(19): siRNA sense strand
gagaaguaccacaucauug

SEQ ID NO: 1611341 - RNA, 19 nt, Homo sapiens
  misc_RNA (1)...(19): siRNA sense strand
gcagacaauucccguggau

SEQ ID NO: 1611342 - RNA, 19 nt, Homo sapiens
  misc_RNA (1)...(19): siRNA sense strand
agaaguaccacaucauuga

SEQ ID NO: 1611343 - RNA, 19 nt, Homo sapiens
  misc_RNA (1)...(19): siRNA sense strand
acaagaaaguggcuucaca

SEQ ID NO: 1611344 - RNA, 19 nt, Homo sapiens
  misc_RNA (1)...(19): siRNA sense strand
ccauuaaggcauucacuaa

SEQ ID NO: 1611345 - RNA, 19 nt, Homo sapiens
  misc_RNA (1)...(19): siRNA sense strand
agauggagcuugggaaaga

SEQ ID NO: 1611346 - RNA, 19 nt, Homo sapiens
  misc_RNA (1)...(19): siRNA sense strand
uacagugacucagauuuaa

SEQ ID NO: 1611347 - RNA, 19 nt, Homo sapiens
  misc_RNA (1)...(19): siRNA sense strand
uuaauagccuguuacuuag

SEQ ID NO: 1611348 - RNA, 19 nt, Homo sapiens
  misc_RNA (1)...(19): siRNA sense strand
cgacccaauuccauacaaa

SEQ ID NO: 1611349 - RNA, 19 nt, Homo sapiens
  misc_RNA (1)...(19): siRNA sense strand
caacaccaaaguacacaaa

SEQ ID NO: 1611350 - RNA, 19 nt, Homo sapiens
  misc_RNA (1)...(19): siRNA sense strand
gaacguccaacaccaaagu

SEQ ID NO: 1611351 - RNA, 19 nt, Homo sapiens
  misc_RNA (1)...(19): siRNA sense strand
gagcaggagcaagccauua

SEQ ID NO: 1611352 - RNA, 19 nt, Homo sapiens
  misc_RNA (1)...(19): siRNA sense strand
aaaaguagcuauccauugu

SEQ ID NO: 1611353 - RNA, 19 nt, Homo sapiens
  misc_RNA (1)...(19): siRNA sense strand
caaagcccuagcaaauuua

SEQ ID NO: 1611354 - RNA, 19 nt, Homo sapiens
  misc_RNA (1)...(19): siRNA sense strand
gacagugccugcccagauc

SEQ ID NO: 1611355 - RNA, 19 nt, Homo sapiens
  misc_RNA (1)...(19): siRNA sense strand
ggccagugaugaugaagga

SEQ ID NO: 1611356 - RNA, 19 nt, Homo sapiens
  misc_RNA (1)...(19): siRNA sense strand
gaccaagcaauuauauuug

SEQ ID NO: 1611357 - RNA, 19 nt, Homo sapiens
  misc_RNA (1)...(19): siRNA sense strand
gcggagaacaggccaguga

SEQ ID NO: 1611358 - RNA, 19 nt, Homo sapiens
  misc_RNA (1)...(19): siRNA sense strand
aagcacaguucuugguuga

SEQ ID NO: 1611359 - RNA, 19 nt, Homo sapiens
  misc_RNA (1)...(19): siRNA sense strand
uugcaaauguccauaagga

SEQ ID NO: 1611360 - RNA, 19 nt, Homo sapiens
  misc_RNA (1)...(19): siRNA sense strand
cauggaggcuggcauuuac

SEQ ID NO: 1611361 - RNA, 19 nt, Homo sapiens
  misc_RNA (1)...(19): siRNA sense strand
ggaaggacucaaagauaau

SEQ ID NO: 1611362 - RNA, 19 nt, Homo sapiens
  misc_RNA (1)...(19): siRNA sense strand
gcaaagcgacccaauucca

SEQ ID NO: 1611363 - RNA, 19 nt, Homo sapiens
  misc_RNA (1)...(19): siRNA sense strand
gacauuugccuuacaggaa

SEQ ID NO: 1611364 - RNA, 19 nt, Homo sapiens
  misc_RNA (1)...(19): siRNA sense strand
ggaaaaggcggaauguuga

SEQ ID NO: 1611365 - RNA, 19 nt, Homo sapiens
  misc_RNA (1)...(19): siRNA sense strand
uauauucucuugcugugau

SEQ ID NO: 1611366 - RNA, 19 nt, Homo sapiens
  misc_RNA (1)...(19): siRNA sense strand
gaaggacucaaagauaaug

SEQ ID NO: 1611367 - RNA, 19 nt, Homo sapiens
  misc_RNA (1)...(19): siRNA sense strand
ucucucugcugaaauagaa

SEQ ID NO: 1611368 - RNA, 19 nt, Homo sapiens
  misc_RNA (1)...(19): siRNA sense strand
uggugaaggugaugacauu

SEQ ID NO: 1611369 - RNA, 19 nt, Homo sapiens
  misc_RNA (1)...(19): siRNA sense strand
uagugaaccugcagacaau

SEQ ID NO: 1611370 - RNA, 19 nt, Homo sapiens
  misc_RNA (1)...(19): siRNA sense strand
gccaaagcccuagcaaauu

SEQ ID NO: 1611371 - RNA, 19 nt, Homo sapiens
  misc_RNA (1)...(19): siRNA sense strand
caguaaagaucugucugaa

SEQ ID NO: 1611372 - RNA, 19 nt, Homo sapiens
  misc_RNA (1)...(19): siRNA sense strand
guagagcuugcaaguauga

SEQ ID NO: 1611373 - RNA, 19 nt, Homo sapiens
  misc_RNA (1)...(19): siRNA sense strand
caaauugcugcuggacuua

SEQ ID NO: 1611374 - RNA, 19 nt, Homo sapiens
  misc_RNA (1)...(19): siRNA sense strand
gaacaagaaaguggcuuca

SEQ ID NO: 1611375 - RNA, 19 nt, Homo sapiens
  misc_RNA (1)...(19): siRNA sense strand
gcagcuugauguggucuug

SEQ ID NO: 1611376 - RNA, 19 nt, Homo sapiens
  misc_RNA (1)...(19): siRNA sense strand
gcagaaagagcuuaauucc

SEQ ID NO: 1611377 - RNA, 19 nt, Homo sapiens
  misc_RNA (1)...(19): siRNA sense strand
caaagcacaguucuugguu

SEQ ID NO: 1611378 - RNA, 19 nt, Homo sapiens
  misc_RNA (1)...(19): siRNA sense strand
cagaagcucauaagccauu

SEQ ID NO: 1611379 - RNA, 19 nt, Homo sapiens
  misc_RNA (1)...(19): siRNA sense strand
uggucucucugcugaaaua

SEQ ID NO: 1611380 - RNA, 19 nt, Homo sapiens
  misc_RNA (1)...(19): siRNA sense strand
ucauggaggcuggcauuua

SEQ ID NO: 1611381 - RNA, 19 nt, Homo sapiens
  misc_RNA (1)...(19): siRNA sense strand
gaaaaguagcuauccauug

SEQ ID NO: 1611382 - RNA, 19 nt, Homo sapiens
  misc_RNA (1)...(19): siRNA sense strand
ggaccaacaguuuacaaca

SEQ ID NO: 1611383 - RNA, 19 nt, Homo sapiens
  misc_RNA (1)...(19): siRNA sense strand
guuugacccucuuuggaaa

SEQ ID NO: 1611384 - RNA, 19 nt, Homo sapiens
  misc_RNA (1)...(19): siRNA sense strand
aaagcgacccaauuccaua

SEQ ID NO: 1611385 - RNA, 19 nt, Homo sapiens
  misc_RNA (1)...(19): siRNA sense strand
ccaagcaauuauauuugug

SEQ ID NO: 1611386 - RNA, 19 nt, Homo sapiens
  misc_RNA (1)...(19): siRNA sense strand
gaugacauuugccuuacag

SEQ ID NO: 1611387 - RNA, 19 nt, Homo sapiens
  misc_RNA (1)...(19): siRNA sense strand
gaccaacaguuuacaacac

SEQ ID NO: 1611388 - RNA, 19 nt, Homo sapiens
  misc_RNA (1)...(19): siRNA sense strand
gcucauaagccauuguuac

SEQ ID NO: 1611389 - RNA, 19 nt, Homo sapiens
  misc_RNA (1)...(19): siRNA sense strand
gcaacaguuugacccucuu

SEQ ID NO: 1611390 - RNA, 19 nt, Homo sapiens
  misc_RNA (1)...(19): siRNA sense strand
ggagaacaggccagugaug

SEQ ID NO: 1611391 - RNA, 19 nt, Homo sapiens
  misc_RNA (1)...(19): siRNA sense strand
aagggaauuuacucaguuu

SEQ ID NO: 1611392 - RNA, 19 nt, Homo sapiens
  misc_RNA (1)...(19): siRNA sense strand
aauagccuguuacuuaguu

SEQ ID NO: 1611393 - RNA, 19 nt, Homo sapiens
  misc_RNA (1)...(19): siRNA sense strand
aagaaaguggcuucacaua

SEQ ID NO: 1611394 - RNA, 19 nt, Homo sapiens
  misc_RNA (1)...(19): siRNA sense strand
uuacaacacccugaagaaa

SEQ ID NO: 1611395 - RNA, 19 nt, Homo sapiens
  misc_RNA (1)...(19): siRNA sense strand
ggucuuggguggagcaacu

SEQ ID NO: 1611396 - RNA, 19 nt, Homo sapiens
  misc_RNA (1)...(19): siRNA sense strand
gauggagcuugggaaagaa

SEQ ID NO: 1611397 - RNA, 19 nt, Homo sapiens
  misc_RNA (1)...(19): siRNA sense strand
ggucacugauaauauacug

SEQ ID NO: 1611398 - RNA, 19 nt, Homo sapiens
  misc_RNA (1)...(19): siRNA sense strand
cuggaaggacucaaagaua

SEQ ID NO: 1611399 - RNA, 19 nt, Homo sapiens
  misc_RNA (1)...(19): siRNA sense strand
gauaaugggucaccaauuu

SEQ ID NO: 1611400 - RNA, 19 nt, Homo sapiens
  misc_RNA (1)...(19): siRNA sense strand
ccaaagcccuagcaaauuu

SEQ ID NO: 1611401 - RNA, 19 nt, Homo sapiens
  misc_RNA (1)...(19): siRNA sense strand
gcagcuggauaaagaguua

SEQ ID NO: 1611402 - RNA, 19 nt, Homo sapiens
  misc_RNA (1)...(19): siRNA sense strand
gagaaugacugcugaccaa

SEQ ID NO: 1611403 - RNA, 19 nt, Homo sapiens
  misc_RNA (1)...(19): siRNA sense strand
ccaccuaguuugcaaauug

SEQ ID NO: 1611404 - RNA, 19 nt, Homo sapiens
  misc_RNA (1)...(19): siRNA sense strand
uggaaggacucaaagauaa

SEQ ID NO: 1611405 - RNA, 19 nt, Homo sapiens
  misc_RNA (1)...(19): siRNA sense strand
ggaauuuacucaguuucua

SEQ ID NO: 1611406 - RNA, 19 nt, Homo sapiens
  misc_RNA (1)...(19): siRNA sense strand
gaaaguggcuucacauacc

SEQ ID NO: 1611407 - RNA, 19 nt, Homo sapiens
  misc_RNA (1)...(19): siRNA sense strand
gaaaauggaccaacaguuu

SEQ ID NO: 1611408 - RNA, 19 nt, Homo sapiens
  misc_RNA (1)...(19): siRNA sense strand
caccuuaccucaauaucua

SEQ ID NO: 1611409 - RNA, 19 nt, Homo sapiens
  misc_RNA (1)...(19): siRNA sense strand
ccaugcagcuggauaaaga

SEQ ID NO: 1611410 - RNA, 19 nt, Homo sapiens
  misc_RNA (1)...(19): siRNA sense strand
ggacagcaccagacuauuc

SEQ ID NO: 1611411 - RNA, 19 nt, Homo sapiens
  misc_RNA (1)...(19): siRNA sense strand
gaaggaucauuccaaagga

SEQ ID NO: 1611412 - RNA, 19 nt, Homo sapiens
  misc_RNA (1)...(19): siRNA sense strand
guagaaauguggcagaaag

SEQ ID NO: 1611413 - RNA, 19 nt, Homo sapiens
  misc_RNA (1)...(19): siRNA sense strand
gagcuuaauucccgagaug

SEQ ID NO: 1611414 - RNA, 19 nt, Homo sapiens
  misc_RNA (1)...(19): siRNA sense strand
cgguagagcuugcaaguau

SEQ ID NO: 1611415 - RNA, 19 nt, Homo sapiens
  misc_RNA (1)...(19): siRNA sense strand
ggagaaguaccacaucauu

SEQ ID NO: 1611416 - RNA, 19 nt, Homo sapiens
  misc_RNA (1)...(19): siRNA sense strand
ggaacccucuggaacaaga

SEQ ID NO: 1611417 - RNA, 19 nt, Homo sapiens
  misc_RNA (1)...(19): siRNA sense strand
cuacagugacucagauuua

SEQ ID NO: 1611418 - RNA, 19 nt, Homo sapiens
  misc_RNA (1)...(19): siRNA sense strand
cauccugggucacugauaa

SEQ ID NO: 1611419 - RNA, 19 nt, Homo sapiens
  misc_RNA (1)...(19): siRNA sense strand
uaagggaauuuacucaguu

SEQ ID NO: 1611420 - RNA, 19 nt, Homo sapiens
  misc_RNA (1)...(19): siRNA sense strand
uagcgucucuuacuacuau

SEQ ID NO: 1611421 - RNA, 19 nt, Homo sapiens
  misc_RNA (1)...(19): siRNA sense strand
ccaaugagcaacaguuuga

SEQ ID NO: 1611422 - RNA, 19 nt, Homo sapiens
  misc_RNA (1)...(19): siRNA sense strand
ggcauuuacuucuacaauu

SEQ ID NO: 1611423 - RNA, 19 nt, Homo sapiens
  misc_RNA (1)...(19): siRNA sense strand
ggugaugacauuugccuua

SEQ ID NO: 1611424 - RNA, 19 nt, Homo sapiens
  misc_RNA (1)...(19): siRNA sense strand
uaacuccucuccgcaauau

SEQ ID NO: 1611425 - RNA, 19 nt, Homo sapiens
  misc_RNA (1)...(19): siRNA sense strand
gguguagcgucucuuacua

SEQ ID NO: 1611426 - RNA, 19 nt, Homo sapiens
  misc_RNA (1)...(19): siRNA sense strand
ggccaaagcccuagcaaau

SEQ ID NO: 1611427 - RNA, 19 nt, Homo sapiens
  misc_RNA (1)...(19): siRNA sense strand
gggcaaagcgacccaauuc

SEQ ID NO: 1611428 - RNA, 19 nt, Homo sapiens
  misc_RNA (1)...(19): siRNA sense strand
gcgagcagaugccgcagaa

SEQ ID NO: 1611429 - RNA, 19 nt, Homo sapiens
  misc_RNA (1)...(19): siRNA sense strand
gaacaggccagugaugaug

SEQ ID NO: 1611430 - RNA, 19 nt, Homo sapiens
  misc_RNA (1)...(19): siRNA sense strand
cauaagccauuguuacauc

SEQ ID NO: 1611431 - RNA, 19 nt, Homo sapiens
  misc_RNA (1)...(19): siRNA sense strand
cugggucacugauaauaua

SEQ ID NO: 1611432 - RNA, 19 nt, Homo sapiens
  misc_RNA (1)...(19): siRNA sense strand
gcauuacagucugaauuga

SEQ ID NO: 1611433 - RNA, 19 nt, Homo sapiens
  misc_RNA (1)...(19): siRNA sense strand
gcugucaccuuaccucaau

SEQ ID NO: 1611434 - RNA, 19 nt, Homo sapiens
  misc_RNA (1)...(19): siRNA sense strand
gucaucugcuucaugguua

SEQ ID NO: 1611435 - RNA, 19 nt, Homo sapiens
  misc_RNA (1)...(19): siRNA sense strand
caacugaaggagccuguaa

SEQ ID NO: 1611436 - RNA, 19 nt, Homo sapiens
  misc_RNA (1)...(19): siRNA sense strand
aaaggaagguagaaaugug

SEQ ID NO: 1611437 - RNA, 19 nt, Homo sapiens
  misc_RNA (1)...(19): siRNA sense strand
ucacccagcuuugcaaaug

SEQ ID NO: 1611438 - RNA, 19 nt, Homo sapiens
  misc_RNA (1)...(19): siRNA sense strand
gagaacaggccagugauga

SEQ ID NO: 1611439 - RNA, 19 nt, Homo sapiens
  misc_RNA (1)...(19): siRNA sense strand
gcagcacacuuucuuucug

SEQ ID NO: 1611440 - RNA, 19 nt, Homo sapiens
  misc_RNA (1)...(19): siRNA sense strand
gagaaguaccacaucauug

SEQ ID NO: 1611441 - RNA, 19 nt, Homo sapiens
  misc_RNA (1)...(19): siRNA sense strand
gcagacaauucccguggau

SEQ ID NO: 1611442 - RNA, 19 nt, Homo sapiens
  misc_RNA (1)...(19): siRNA sense strand
agaaguaccacaucauuga

SEQ ID NO: 1611443 - RNA, 19 nt, Homo sapiens
  misc_RNA (1)...(19): siRNA sense strand
acaagaaaguggcuucaca

SEQ ID NO: 1611444 - RNA, 19 nt, Homo sapiens
  misc_RNA (1)...(19): siRNA sense strand
ccauuaaggcauucacuaa

SEQ ID NO: 1611445 - RNA, 19 nt, Homo sapiens
  misc_RNA (1)...(19): siRNA sense strand
agauggagcuugggaaaga

SEQ ID NO: 1611446 - RNA, 19 nt, Homo sapiens
  misc_RNA (1)...(19): siRNA sense strand
uacagugacucagauuuaa

SEQ ID NO: 1611447 - RNA, 19 nt, Homo sapiens
  misc_RNA (1)...(19): siRNA sense strand
uuaauagccuguuacuuag

SEQ ID NO: 1611448 - RNA, 19 nt, Homo sapiens
  misc_RNA (1)...(19): siRNA sense strand
cgacccaauuccauacaaa

SEQ ID NO: 1611449 - RNA, 19 nt, Homo sapiens
  misc_RNA (1)...(19): siRNA sense strand
caacaccaaaguacacaaa

SEQ ID NO: 1611450 - RNA, 19 nt, Homo sapiens
  misc_RNA (1)...(19): siRNA sense strand
gaacguccaacaccaaagu

SEQ ID NO: 1611451 - RNA, 19 nt, Homo sapiens
  misc_RNA (1)...(19): siRNA sense strand
gagcaggagcaagccauua

SEQ ID NO: 1611452 - RNA, 19 nt, Homo sapiens
  misc_RNA (1)...(19): siRNA sense strand
aaaaguagcuauccauugu

SEQ ID NO: 1611453 - RNA, 19 nt, Homo sapiens
  misc_RNA (1)...(19): siRNA sense strand
caaagcccuagcaaauuua

SEQ ID NO: 1611454 - RNA, 19 nt, Homo sapiens
  misc_RNA (1)...(19): siRNA sense strand
gacagugccugcccagauc

SEQ ID NO: 1611455 - RNA, 19 nt, Homo sapiens
  misc_RNA (1)...(19): siRNA sense strand
ggccagugaugaugaagga

SEQ ID NO: 1611456 - RNA, 19 nt, Homo sapiens
  misc_RNA (1)...(19): siRNA sense strand
gaccaagcaauuauauuug

SEQ ID NO: 1611457 - RNA, 19 nt, Homo sapiens
  misc_RNA (1)...(19): siRNA sense strand
gcggagaacaggccaguga

SEQ ID NO: 1611458 - RNA, 19 nt, Homo sapiens
  misc_RNA (1)...(19): siRNA sense strand
aagcacaguucuugguuga

SEQ ID NO: 1611459 - RNA, 19 nt, Homo sapiens
  misc_RNA (1)...(19): siRNA sense strand
uugcaaauguccauaagga

SEQ ID NO: 1611460 - RNA, 19 nt, Homo sapiens
  misc_RNA (1)...(19): siRNA sense strand
cauggaggcuggcauuuac

SEQ ID NO: 1611461 - RNA, 19 nt, Homo sapiens
  misc_RNA (1)...(19): siRNA sense strand
ggaaggacucaaagauaau

SEQ ID NO: 1611462 - RNA, 19 nt, Homo sapiens
  misc_RNA (1)...(19): siRNA sense strand
gcaaagcgacccaauucca

SEQ ID NO: 1611463 - RNA, 19 nt, Homo sapiens
  misc_RNA (1)...(19): siRNA sense strand
gacauuugccuuacaggaa

SEQ ID NO: 1611464 - RNA, 19 nt, Homo sapiens
  misc_RNA (1)...(19): siRNA sense strand
ggaaaaggcggaauguuga

SEQ ID NO: 1611465 - RNA, 19 nt, Homo sapiens
  misc_RNA (1)...(19): siRNA sense strand
uauauucucuugcugugau

SEQ ID NO: 1611466 - RNA, 19 nt, Homo sapiens
  misc_RNA (1)...(19): siRNA sense strand
gaaggacucaaagauaaug

SEQ ID NO: 1611467 - RNA, 19 nt, Homo sapiens
  misc_RNA (1)...(19): siRNA sense strand
ucucucugcugaaauagaa

SEQ ID NO: 1611468 - RNA, 19 nt, Homo sapiens
  misc_RNA (1)...(19): siRNA sense strand
uggugaaggugaugacauu

SEQ ID NO: 1611469 - RNA, 19 nt, Homo sapiens
  misc_RNA (1)...(19): siRNA sense strand
uagugaaccugcagacaau

SEQ ID NO: 1611470 - RNA, 19 nt, Homo sapiens
  misc_RNA (1)...(19): siRNA sense strand
gccaaagcccuagcaaauu

SEQ ID NO: 1611471 - RNA, 19 nt, Homo sapiens
  misc_RNA (1)...(19): siRNA sense strand
caguaaagaucugucugaa

SEQ ID NO: 1611472 - RNA, 19 nt, Homo sapiens
  misc_RNA (1)...(19): siRNA sense strand
guagagcuugcaaguauga

SEQ ID NO: 1611473 - RNA, 19 nt, Homo sapiens
  misc_RNA (1)...(19): siRNA sense strand
caaauugcugcuggacuua

SEQ ID NO: 1611474 - RNA, 19 nt, Homo sapiens
  misc_RNA (1)...(19): siRNA sense strand
gaacaagaaaguggcuuca

SEQ ID NO: 1611475 - RNA, 19 nt, Homo sapiens
  misc_RNA (1)...(19): siRNA sense strand
gcagcuugauguggucuug

SEQ ID NO: 1611476 - RNA, 19 nt, Homo sapiens
  misc_RNA (1)...(19): siRNA sense strand
gcagaaagagcuuaauucc

SEQ ID NO: 1611477 - RNA, 19 nt, Homo sapiens
  misc_RNA (1)...(19): siRNA sense strand
caaagcacaguucuugguu

SEQ ID NO: 1611478 - RNA, 19 nt, Homo sapiens
  misc_RNA (1)...(19): siRNA sense strand
cagaagcucauaagccauu

SEQ ID NO: 1611479 - RNA, 19 nt, Homo sapiens
  misc_RNA (1)...(19): siRNA sense strand
uggucucucugcugaaaua

SEQ ID NO: 1611480 - RNA, 19 nt, Homo sapiens
  misc_RNA (1)...(19): siRNA sense strand
ucauggaggcuggcauuua

SEQ ID NO: 1611481 - RNA, 19 nt, Homo sapiens
  misc_RNA (1)...(19): siRNA sense strand
gaaaaguagcuauccauug

SEQ ID NO: 1611482 - RNA, 19 nt, Homo sapiens
  misc_RNA (1)...(19): siRNA sense strand
ggaccaacaguuuacaaca

SEQ ID NO: 1611483 - RNA, 19 nt, Homo sapiens
  misc_RNA (1)...(19): siRNA sense strand
guuugacccucuuuggaaa

SEQ ID NO: 1611484 - RNA, 19 nt, Homo sapiens
  misc_RNA (1)...(19): siRNA sense strand
aaagcgacccaauuccaua

SEQ ID NO: 1611485 - RNA, 19 nt, Homo sapiens
  misc_RNA (1)...(19): siRNA sense strand
ccaagcaauuauauuugug

SEQ ID NO: 1611486 - RNA, 19 nt, Homo sapiens
  misc_RNA (1)...(19): siRNA sense strand
gaugacauuugccuuacag

SEQ ID NO: 1611487 - RNA, 19 nt, Homo sapiens
  misc_RNA (1)...(19): siRNA sense strand
gaccaacaguuuacaacac

SEQ ID NO: 1611488 - RNA, 19 nt, Homo sapiens
  misc_RNA (1)...(19): siRNA sense strand
gcucauaagccauuguuac

SEQ ID NO: 1611489 - RNA, 19 nt, Homo sapiens
  misc_RNA (1)...(19): siRNA sense strand
gcaacaguuugacccucuu

SEQ ID NO: 1611490 - RNA, 19 nt, Homo sapiens
  misc_RNA (1)...(19): siRNA sense strand
ggagaacaggccagugaug

SEQ ID NO: 1611491 - RNA, 19 nt, Homo sapiens
  misc_RNA (1)...(19): siRNA sense strand
aagggaauuuacucaguuu

SEQ ID NO: 1611492 - RNA, 19 nt, Homo sapiens
  misc_RNA (1)...(19): siRNA sense strand
aauagccuguuacuuaguu

SEQ ID NO: 1611493 - RNA, 19 nt, Homo sapiens
  misc_RNA (1)...(19): siRNA sense strand
aagaaaguggcuucacaua

SEQ ID NO: 1611494 - RNA, 19 nt, Homo sapiens
  misc_RNA (1)...(19): siRNA sense strand
uuacaacacccugaagaaa

SEQ ID NO: 1611495 - RNA, 19 nt, Homo sapiens
  misc_RNA (1)...(19): siRNA sense strand
ggucuuggguggagcaacu

SEQ ID NO: 1611496 - RNA, 19 nt, Homo sapiens
  misc_RNA (1)...(19): siRNA sense strand
gauggagcuugggaaagaa

SEQ ID NO: 1611497 - RNA, 19 nt, Homo sapiens
  misc_RNA (1)...(19): siRNA sense strand
ggucacugauaauauacug

SEQ ID NO: 1611498 - RNA, 19 nt, Homo sapiens
  misc_RNA (1)...(19): siRNA sense strand
cuggaaggacucaaagaua

SEQ ID NO: 1611499 - RNA, 19 nt, Homo sapiens
  misc_RNA (1)...(19): siRNA sense strand
ccaagaagcuuuccaugua

SEQ ID NO: 1611500 - RNA, 19 nt, Homo sapiens
  misc_RNA (1)...(19): siRNA sense strand
cagaagacaucacaagaua

SEQ ID NO: 1611501 - RNA, 19 nt, Homo sapiens
  misc_RNA (1)...(19): siRNA sense strand
gaaauccacuucuuagaga

SEQ ID NO: 1611502 - RNA, 19 nt, Homo sapiens
  misc_RNA (1)...(19): siRNA sense strand
gagaagcgaaucaucauua

SEQ ID NO: 1611503 - RNA, 19 nt, Homo sapiens
  misc_RNA (1)...(19): siRNA sense strand
ccaaggagaucaagaagca

SEQ ID NO: 1611504 - RNA, 19 nt, Homo sapiens
  misc_RNA (1)...(19): siRNA sense strand
ccaauggccugcucaucua

SEQ ID NO: 1611505 - RNA, 19 nt, Homo sapiens
  misc_RNA (1)...(19): siRNA sense strand
ggaguaacuucuauaucaa

SEQ ID NO: 1611506 - RNA, 19 nt, Homo sapiens
  misc_RNA (1)...(19): siRNA sense strand
caagaggaguaacuucuau

SEQ ID NO: 1611507 - RNA, 19 nt, Homo sapiens
  misc_RNA (1)...(19): siRNA sense strand
aggaguaacuucuauauca

SEQ ID NO: 1611508 - RNA, 19 nt, Homo sapiens
  misc_RNA (1)...(19): siRNA sense strand
aaccaaagcugucguauac

SEQ ID NO: 1611509 - RNA, 19 nt, Homo sapiens
  misc_RNA (1)...(19): siRNA sense strand
ggccugaccuucugugaug

SEQ ID NO: 1611510 - RNA, 19 nt, Homo sapiens
  misc_RNA (1)...(19): siRNA sense strand
ccagaagauugccaagaaa

SEQ ID NO: 1611511 - RNA, 19 nt, Homo sapiens
  misc_RNA (1)...(19): siRNA sense strand
cccagaagauugccaagaa

SEQ ID NO: 1611512 - RNA, 19 nt, Homo sapiens
  misc_RNA (1)...(19): siRNA sense strand
uaaccaaagcugucguaua

SEQ ID NO: 1611513 - RNA, 19 nt, Homo sapiens
  misc_RNA (1)...(19): siRNA sense strand
ugagaaagccaaugagaga

SEQ ID NO: 1611514 - RNA, 19 nt, Homo sapiens
  misc_RNA (1)...(19): siRNA sense strand
gcaucgagcaucauacauu

SEQ ID NO: 1611515 - RNA, 19 nt, Homo sapiens
  misc_RNA (1)...(19): siRNA sense strand
gagaaugccaagaagcuuu

SEQ ID NO: 1611516 - RNA, 19 nt, Homo sapiens
  misc_RNA (1)...(19): siRNA sense strand
gagcacaauuggcuuuaag

SEQ ID NO: 1611517 - RNA, 19 nt, Homo sapiens
  misc_RNA (1)...(19): siRNA sense strand
ugaaggagcccaacagcaa

SEQ ID NO: 1611518 - RNA, 19 nt, Homo sapiens
  misc_RNA (1)...(19): siRNA sense strand
gaaggagcccaacagcaaa

SEQ ID NO: 1611519 - RNA, 19 nt, Homo sapiens
  misc_RNA (1)...(19): siRNA sense strand
cucaagaucuccuacaaga

SEQ ID NO: 1611520 - RNA, 19 nt, Homo sapiens
  misc_RNA (1)...(19): siRNA sense strand
ggacaagaagccacaggaa

SEQ ID NO: 1611521 - RNA, 19 nt, Homo sapiens
  misc_RNA (1)...(19): siRNA sense strand
cagcaucaaugagcucaaa

SEQ ID NO: 1611522 - RNA, 19 nt, Homo sapiens
  misc_RNA (1)...(19): siRNA sense strand
caucgagcaucauacauuc

SEQ ID NO: 1611523 - RNA, 19 nt, Homo sapiens
  misc_RNA (1)...(19): siRNA sense strand
gaagacaucacaagauacu

SEQ ID NO: 1611524 - RNA, 19 nt, Homo sapiens
  misc_RNA (1)...(19): siRNA sense strand
acaaccaccuggccauuga

SEQ ID NO: 1611525 - RNA, 19 nt, Homo sapiens
  misc_RNA (1)...(19): siRNA sense strand
caagaagcuuuccauguac

SEQ ID NO: 1611526 - RNA, 19 nt, Homo sapiens
  misc_RNA (1)...(19): siRNA sense strand
gaagauugccaagaaauac

SEQ ID NO: 1611527 - RNA, 19 nt, Homo sapiens
  misc_RNA (1)...(19): siRNA sense strand
gacagaagacaucacaaga

SEQ ID NO: 1611528 - RNA, 19 nt, Homo sapiens
  misc_RNA (1)...(19): siRNA sense strand
gggaguaugagcaauuuga

SEQ ID NO: 1611529 - RNA, 19 nt, Homo sapiens
  misc_RNA (1)...(19): siRNA sense strand
ggcccaagauccucaagau

SEQ ID NO: 1611530 - RNA, 19 nt, Homo sapiens
  misc_RNA (1)...(19): siRNA sense strand
ucauggagcugcauaagac

SEQ ID NO: 1611531 - RNA, 19 nt, Homo sapiens
  misc_RNA (1)...(19): siRNA sense strand
ggaugaggauggcgagucu

SEQ ID NO: 1611532 - RNA, 19 nt, Homo sapiens
  misc_RNA (1)...(19): siRNA sense strand
agaagauugccaagaaaua

SEQ ID NO: 1611533 - RNA, 19 nt, Homo sapiens
  misc_RNA (1)...(19): siRNA sense strand
gcaccaggccagcaucaau

SEQ ID NO: 1611534 - RNA, 19 nt, Homo sapiens
  misc_RNA (1)...(19): siRNA sense strand
cagaggagagggacaagaa

SEQ ID NO: 1611535 - RNA, 19 nt, Homo sapiens
  misc_RNA (1)...(19): siRNA sense strand
aaacugcagcauccugaua

SEQ ID NO: 1611536 - RNA, 19 nt, Homo sapiens
  misc_RNA (1)...(19): siRNA sense strand
gccuagacauggaggagaa

SEQ ID NO: 1611537 - RNA, 19 nt, Homo sapiens
  misc_RNA (1)...(19): siRNA sense strand
ccaagagacuguggaaggu

SEQ ID NO: 1611538 - RNA, 19 nt, Homo sapiens
  misc_RNA (1)...(19): siRNA sense strand
gacaagaagccacaggaau

SEQ ID NO: 1611539 - RNA, 19 nt, Homo sapiens
  misc_RNA (1)...(19): siRNA sense strand
ggacaaccaccuggccauu

SEQ ID NO: 1611540 - RNA, 19 nt, Homo sapiens
  misc_RNA (1)...(19): siRNA sense strand
aggcugagcugggugacua

SEQ ID NO: 1611541 - RNA, 19 nt, Homo sapiens
  misc_RNA (1)...(19): siRNA sense strand
gagagcacaauuggcuuua

SEQ ID NO: 1611542 - RNA, 19 nt, Homo sapiens
  misc_RNA (1)...(19): siRNA sense strand
gccaagaagcuuuccaugu

SEQ ID NO: 1611543 - RNA, 19 nt, Homo sapiens
  misc_RNA (1)...(19): siRNA sense strand
gcagucuggccauuagaaa

SEQ ID NO: 1611544 - RNA, 19 nt, Homo sapiens
  misc_RNA (1)...(19): siRNA sense strand
ggugaugggcuccaaguuc

SEQ ID NO: 1611545 - RNA, 19 nt, Homo sapiens
  misc_RNA (1)...(19): siRNA sense strand
acaagaagccacaggaauc

SEQ ID NO: 1611546 - RNA, 19 nt, Homo sapiens
  misc_RNA (1)...(19): siRNA sense strand
gaccagagucuccgcuaug

SEQ ID NO: 1611547 - RNA, 19 nt, Homo sapiens
  misc_RNA (1)...(19): siRNA sense strand
gccauuagaaagaagauug

SEQ ID NO: 1611548 - RNA, 19 nt, Homo sapiens
  misc_RNA (1)...(19): siRNA sense strand
gagcugcauaagacauaua

SEQ ID NO: 1611549 - RNA, 19 nt, Homo sapiens
  misc_RNA (1)...(19): siRNA sense strand
ggccugcacccuucuuuga

SEQ ID NO: 1611550 - RNA, 19 nt, Homo sapiens
  misc_RNA (1)...(19): siRNA sense strand
ggagcugcauaagacauau

SEQ ID NO: 1611551 - RNA, 19 nt, Homo sapiens
  misc_RNA (1)...(19): siRNA sense strand
ucagcagucuggccauuag

SEQ ID NO: 1611552 - RNA, 19 nt, Homo sapiens
  misc_RNA (1)...(19): siRNA sense strand
ggacuucacggucauuggu

SEQ ID NO: 1611553 - RNA, 19 nt, Homo sapiens
  misc_RNA (1)...(19): siRNA sense strand
ggacuccaaccaagaucaa

SEQ ID NO: 1611554 - RNA, 19 nt, Homo sapiens
  misc_RNA (1)...(19): siRNA sense strand
acaagaggaguaacuucua

SEQ ID NO: 1611555 - RNA, 19 nt, Homo sapiens
  misc_RNA (1)...(19): siRNA sense strand
gguaaccaaagcugucgua

SEQ ID NO: 1611556 - RNA, 19 nt, Homo sapiens
  misc_RNA (1)...(19): siRNA sense strand
agugugagguggagaaaca

SEQ ID NO: 1611557 - RNA, 19 nt, Homo sapiens
  misc_RNA (1)...(19): siRNA sense strand
agaagcagauccggaguag

SEQ ID NO: 1611558 - RNA, 19 nt, Homo sapiens
  misc_RNA (1)...(19): siRNA sense strand
caccacccaugucaccaaa

SEQ ID NO: 1611559 - RNA, 19 nt, Homo sapiens
  misc_RNA (1)...(19): siRNA sense strand
ugagagcacaauuggcuuu

SEQ ID NO: 1611560 - RNA, 19 nt, Homo sapiens
  misc_RNA (1)...(19): siRNA sense strand
gcugagaaucaaccgcuuu

SEQ ID NO: 1611561 - RNA, 19 nt, Homo sapiens
  misc_RNA (1)...(19): siRNA sense strand
guuaggcguuugugccaau

SEQ ID NO: 1611562 - RNA, 19 nt, Homo sapiens
  misc_RNA (1)...(19): siRNA sense strand
gagcaugugggcaacuaug

SEQ ID NO: 1611563 - RNA, 19 nt, Homo sapiens
  misc_RNA (1)...(19): siRNA sense strand
ugacagaagacaucacaag

SEQ ID NO: 1611564 - RNA, 19 nt, Homo sapiens
  misc_RNA (1)...(19): siRNA sense strand
cugcccagcugacagaaga

SEQ ID NO: 1611565 - RNA, 19 nt, Homo sapiens
  misc_RNA (1)...(19): siRNA sense strand
ugagcguucuuccagcaaa

SEQ ID NO: 1611566 - RNA, 19 nt, Homo sapiens
  misc_RNA (1)...(19): siRNA sense strand
ccagcaaggcccagaaauc

SEQ ID NO: 1611567 - RNA, 19 nt, Homo sapiens
  misc_RNA (1)...(19): siRNA sense strand
gcagcgccuucgaagacuu

SEQ ID NO: 1611568 - RNA, 19 nt, Homo sapiens
  misc_RNA (1)...(19): siRNA sense strand
acggucagcucuacgucua

SEQ ID NO: 1611569 - RNA, 19 nt, Homo sapiens
  misc_RNA (1)...(19): siRNA sense strand
agagcacaauuggcuuuaa

SEQ ID NO: 1611570 - RNA, 19 nt, Homo sapiens
  misc_RNA (1)...(19): siRNA sense strand
cagccaggaugaugagucu

SEQ ID NO: 1611571 - RNA, 19 nt, Homo sapiens
  misc_RNA (1)...(19): siRNA sense strand
gagcccaacagcaaacuca

SEQ ID NO: 1611572 - RNA, 19 nt, Homo sapiens
  misc_RNA (1)...(19): siRNA sense strand
cagaagauugccaagaaau

SEQ ID NO: 1611573 - RNA, 19 nt, Homo sapiens
  misc_RNA (1)...(19): siRNA sense strand
uagacaagccagaagaugu

SEQ ID NO: 1611574 - RNA, 19 nt, Homo sapiens
  misc_RNA (1)...(19): siRNA sense strand
cggcugccaugcuccuuug

SEQ ID NO: 1611575 - RNA, 19 nt, Homo sapiens
  misc_RNA (1)...(19): siRNA sense strand
gaguaugagcaauuugaga

SEQ ID NO: 1611576 - RNA, 19 nt, Homo sapiens
  misc_RNA (1)...(19): siRNA sense strand
ugagcugggugacuaugau

SEQ ID NO: 1611577 - RNA, 19 nt, Homo sapiens
  misc_RNA (1)...(19): siRNA sense strand
acagaagacaucacaagau

SEQ ID NO: 1611578 - RNA, 19 nt, Homo sapiens
  misc_RNA (1)...(19): siRNA sense strand
agaagcgaaucaucauuac

SEQ ID NO: 1611579 - RNA, 19 nt, Homo sapiens
  misc_RNA (1)...(19): siRNA sense strand
gagucuccgcuauggauaa

SEQ ID NO: 1611580 - RNA, 19 nt, Homo sapiens
  misc_RNA (1)...(19): siRNA sense strand
gacaaccaccuggccauug

SEQ ID NO: 1611581 - RNA, 19 nt, Homo sapiens
  misc_RNA (1)...(19): siRNA sense strand
gaggaguaacuucuauauc

SEQ ID NO: 1611582 - RNA, 19 nt, Homo sapiens
  misc_RNA (1)...(19): siRNA sense strand
gagaagcagaaauccacuu

SEQ ID NO: 1611583 - RNA, 19 nt, Homo sapiens
  misc_RNA (1)...(19): siRNA sense strand
cgagaagcgaaucaucauu

SEQ ID NO: 1611584 - RNA, 19 nt, Homo sapiens
  misc_RNA (1)...(19): siRNA sense strand
gaucgagaagcgaaucauc

SEQ ID NO: 1611585 - RNA, 19 nt, Homo sapiens
  misc_RNA (1)...(19): siRNA sense strand
ggaguagccccuggaauuu

SEQ ID NO: 1611586 - RNA, 19 nt, Homo sapiens
  misc_RNA (1)...(19): siRNA sense strand
gcugacagaagacaucaca

SEQ ID NO: 1611587 - RNA, 19 nt, Homo sapiens
  misc_RNA (1)...(19): siRNA sense strand
caucaaggaggccaaacug

SEQ ID NO: 1611588 - RNA, 19 nt, Homo sapiens
  misc_RNA (1)...(19): siRNA sense strand
aaaggaggguuuucugaga

SEQ ID NO: 1611589 - RNA, 19 nt, Homo sapiens
  misc_RNA (1)...(19): siRNA sense strand
ccauuagaaagaagauuga

SEQ ID NO: 1611590 - RNA, 19 nt, Homo sapiens
  misc_RNA (1)...(19): siRNA sense strand
caccucaaccuccuagaga

SEQ ID NO: 1611591 - RNA, 19 nt, Homo sapiens
  misc_RNA (1)...(19): siRNA sense strand
gggaccggcugagaaucaa

SEQ ID NO: 1611592 - RNA, 19 nt, Homo sapiens
  misc_RNA (1)...(19): siRNA sense strand
gaucauggagcugcauaag

SEQ ID NO: 1611593 - RNA, 19 nt, Homo sapiens
  misc_RNA (1)...(19): siRNA sense strand
ggaucauggagcugcauaa

SEQ ID NO: 1611594 - RNA, 19 nt, Homo sapiens
  misc_RNA (1)...(19): siRNA sense strand
agaggaguaacuucuauau

SEQ ID NO: 1611595 - RNA, 19 nt, Homo sapiens
  misc_RNA (1)...(19): siRNA sense strand
ccucggaguaugaguguga

SEQ ID NO: 1611596 - RNA, 19 nt, Homo sapiens
  misc_RNA (1)...(19): siRNA sense strand
aagcgaaucaucauuacug

SEQ ID NO: 1611597 - RNA, 19 nt, Homo sapiens
  misc_RNA (1)...(19): siRNA sense strand
caccaaaacugugaaagga

SEQ ID NO: 1611598 - RNA, 19 nt, Homo sapiens
  misc_RNA (1)...(19): siRNA sense strand
cagagucuccgcuauggau

SEQ ID NO: 1611599 - RNA, 19 nt, Homo sapiens
  misc_RNA (1)...(19): siRNA sense strand
ccaagaagcuuuccaugua

SEQ ID NO: 1611600 - RNA, 19 nt, Homo sapiens
  misc_RNA (1)...(19): siRNA sense strand
cagaagacaucacaagaua

SEQ ID NO: 1611601 - RNA, 19 nt, Homo sapiens
  misc_RNA (1)...(19): siRNA sense strand
gaaauccacuucuuagaga

SEQ ID NO: 1611602 - RNA, 19 nt, Homo sapiens
  misc_RNA (1)...(19): siRNA sense strand
gagaagcgaaucaucauua

SEQ ID NO: 1611603 - RNA, 19 nt, Homo sapiens
  misc_RNA (1)...(19): siRNA sense strand
ccaaggagaucaagaagca

SEQ ID NO: 1611604 - RNA, 19 nt, Homo sapiens
  misc_RNA (1)...(19): siRNA sense strand
ccaauggccugcucaucua

SEQ ID NO: 1611605 - RNA, 19 nt, Homo sapiens
  misc_RNA (1)...(19): siRNA sense strand
ggaguaacuucuauaucaa

SEQ ID NO: 1611606 - RNA, 19 nt, Homo sapiens
  misc_RNA (1)...(19): siRNA sense strand
caagaggaguaacuucuau

SEQ ID NO: 1611607 - RNA, 19 nt, Homo sapiens
  misc_RNA (1)...(19): siRNA sense strand
aggaguaacuucuauauca

SEQ ID NO: 1611608 - RNA, 19 nt, Homo sapiens
  misc_RNA (1)...(19): siRNA sense strand
aaccaaagcugucguauac

SEQ ID NO: 1611609 - RNA, 19 nt, Homo sapiens
  misc_RNA (1)...(19): siRNA sense strand
ggccugaccuucugugaug

SEQ ID NO: 1611610 - RNA, 19 nt, Homo sapiens
  misc_RNA (1)...(19): siRNA sense strand
ccagaagauugccaagaaa

SEQ ID NO: 1611611 - RNA, 19 nt, Homo sapiens
  misc_RNA (1)...(19): siRNA sense strand
gcaucgagcaucauacauu

SEQ ID NO: 1611612 - RNA, 19 nt, Homo sapiens
  misc_RNA (1)...(19): siRNA sense strand
uaaccaaagcugucguaua

SEQ ID NO: 1611613 - RNA, 19 nt, Homo sapiens
  misc_RNA (1)...(19): siRNA sense strand
cccagaagauugccaagaa

SEQ ID NO: 1611614 - RNA, 19 nt, Homo sapiens
  misc_RNA (1)...(19): siRNA sense strand
ugagaaagccaaugagaga

SEQ ID NO: 1611615 - RNA, 19 nt, Homo sapiens
  misc_RNA (1)...(19): siRNA sense strand
gagaaugccaagaagcuuu

SEQ ID NO: 1611616 - RNA, 19 nt, Homo sapiens
  misc_RNA (1)...(19): siRNA sense strand
gagcacaauuggcuuuaag

SEQ ID NO: 1611617 - RNA, 19 nt, Homo sapiens
  misc_RNA (1)...(19): siRNA sense strand
ugaaggagcccaacagcaa

SEQ ID NO: 1611618 - RNA, 19 nt, Homo sapiens
  misc_RNA (1)...(19): siRNA sense strand
gaaggagcccaacagcaaa

SEQ ID NO: 1611619 - RNA, 19 nt, Homo sapiens
  misc_RNA (1)...(19): siRNA sense strand
cucaagaucuccuacaaga

SEQ ID NO: 1611620 - RNA, 19 nt, Homo sapiens
  misc_RNA (1)...(19): siRNA sense strand
ggacaagaagccacaggaa

SEQ ID NO: 1611621 - RNA, 19 nt, Homo sapiens
  misc_RNA (1)...(19): siRNA sense strand
cagcaucaaugagcucaaa

SEQ ID NO: 1611622 - RNA, 19 nt, Homo sapiens
  misc_RNA (1)...(19): siRNA sense strand
caucgagcaucauacauuc

SEQ ID NO: 1611623 - RNA, 19 nt, Homo sapiens
  misc_RNA (1)...(19): siRNA sense strand
gaagacaucacaagauacu

SEQ ID NO: 1611624 - RNA, 19 nt, Homo sapiens
  misc_RNA (1)...(19): siRNA sense strand
acaaccaccuggccauuga

SEQ ID NO: 1611625 - RNA, 19 nt, Homo sapiens
  misc_RNA (1)...(19): siRNA sense strand
caagaagcuuuccauguac

SEQ ID NO: 1611626 - RNA, 19 nt, Homo sapiens
  misc_RNA (1)...(19): siRNA sense strand
gaagauugccaagaaauac

SEQ ID NO: 1611627 - RNA, 19 nt, Homo sapiens
  misc_RNA (1)...(19): siRNA sense strand
gacagaagacaucacaaga

SEQ ID NO: 1611628 - RNA, 19 nt, Homo sapiens
  misc_RNA (1)...(19): siRNA sense strand
gggaguaugagcaauuuga

SEQ ID NO: 1611629 - RNA, 19 nt, Homo sapiens
  misc_RNA (1)...(19): siRNA sense strand
ggcccaagauccucaagau

SEQ ID NO: 1611630 - RNA, 19 nt, Homo sapiens
  misc_RNA (1)...(19): siRNA sense strand
ucauggagcugcauaagac

SEQ ID NO: 1611631 - RNA, 19 nt, Homo sapiens
  misc_RNA (1)...(19): siRNA sense strand
ggaugaggauggcgagucu

SEQ ID NO: 1611632 - RNA, 19 nt, Homo sapiens
  misc_RNA (1)...(19): siRNA sense strand
agaagauugccaagaaaua

SEQ ID NO: 1611633 - RNA, 19 nt, Homo sapiens
  misc_RNA (1)...(19): siRNA sense strand
gcaccaggccagcaucaau

SEQ ID NO: 1611634 - RNA, 19 nt, Homo sapiens
  misc_RNA (1)...(19): siRNA sense strand
cagaggagagggacaagaa

SEQ ID NO: 1611635 - RNA, 19 nt, Homo sapiens
  misc_RNA (1)...(19): siRNA sense strand
aaacugcagcauccugaua

SEQ ID NO: 1611636 - RNA, 19 nt, Homo sapiens
  misc_RNA (1)...(19): siRNA sense strand
ccaagagacuguggaaggu

SEQ ID NO: 1611637 - RNA, 19 nt, Homo sapiens
  misc_RNA (1)...(19): siRNA sense strand
gacaagaagccacaggaau

SEQ ID NO: 1611638 - RNA, 19 nt, Homo sapiens
  misc_RNA (1)...(19): siRNA sense strand
ggacaaccaccuggccauu

SEQ ID NO: 1611639 - RNA, 19 nt, Homo sapiens
  misc_RNA (1)...(19): siRNA sense strand
aggcugagcugggugacua

SEQ ID NO: 1611640 - RNA, 19 nt, Homo sapiens
  misc_RNA (1)...(19): siRNA sense strand
gagagcacaauuggcuuua

SEQ ID NO: 1611641 - RNA, 19 nt, Homo sapiens
  misc_RNA (1)...(19): siRNA sense strand
gccaagaagcuuuccaugu

SEQ ID NO: 1611642 - RNA, 19 nt, Homo sapiens
  misc_RNA (1)...(19): siRNA sense strand
gcagucuggccauuagaaa

SEQ ID NO: 1611643 - RNA, 19 nt, Homo sapiens
  misc_RNA (1)...(19): siRNA sense strand
ggugaugggcuccaaguuc

SEQ ID NO: 1611644 - RNA, 19 nt, Homo sapiens
  misc_RNA (1)...(19): siRNA sense strand
acaagaagccacaggaauc

SEQ ID NO: 1611645 - RNA, 19 nt, Homo sapiens
  misc_RNA (1)...(19): siRNA sense strand
gaccagagucuccgcuaug

SEQ ID NO: 1611646 - RNA, 19 nt, Homo sapiens
  misc_RNA (1)...(19): siRNA sense strand
gccauuagaaagaagauug

SEQ ID NO: 1611647 - RNA, 19 nt, Homo sapiens
  misc_RNA (1)...(19): siRNA sense strand
gagcugcauaagacauaua

SEQ ID NO: 1611648 - RNA, 19 nt, Homo sapiens
  misc_RNA (1)...(19): siRNA sense strand
ggccugcacccuucuuuga

SEQ ID NO: 1611649 - RNA, 19 nt, Homo sapiens
  misc_RNA (1)...(19): siRNA sense strand
ggagcugcauaagacauau

SEQ ID NO: 1611650 - RNA, 19 nt, Homo sapiens
  misc_RNA (1)...(19): siRNA sense strand
ucagcagucuggccauuag

SEQ ID NO: 1611651 - RNA, 19 nt, Homo sapiens
  misc_RNA (1)...(19): siRNA sense strand
ggacuucacggucauuggu

SEQ ID NO: 1611652 - RNA, 19 nt, Homo sapiens
  misc_RNA (1)...(19): siRNA sense strand
ggacuccaaccaagaucaa

SEQ ID NO: 1611653 - RNA, 19 nt, Homo sapiens
  misc_RNA (1)...(19): siRNA sense strand
agugugagguggagaaaca

SEQ ID NO: 1611654 - RNA, 19 nt, Homo sapiens
  misc_RNA (1)...(19): siRNA sense strand
gguaaccaaagcugucgua

SEQ ID NO: 1611655 - RNA, 19 nt, Homo sapiens
  misc_RNA (1)...(19): siRNA sense strand
acaagaggaguaacuucua

SEQ ID NO: 1611656 - RNA, 19 nt, Homo sapiens
  misc_RNA (1)...(19): siRNA sense strand
agaagcagauccggaguag

SEQ ID NO: 1611657 - RNA, 19 nt, Homo sapiens
  misc_RNA (1)...(19): siRNA sense strand
caccacccaugucaccaaa

SEQ ID NO: 1611658 - RNA, 19 nt, Homo sapiens
  misc_RNA (1)...(19): siRNA sense strand
ugagagcacaauuggcuuu

SEQ ID NO: 1611659 - RNA, 19 nt, Homo sapiens
  misc_RNA (1)...(19): siRNA sense strand
gcugagaaucaaccgcuuu

SEQ ID NO: 1611660 - RNA, 19 nt, Homo sapiens
  misc_RNA (1)...(19): siRNA sense strand
guuaggcguuugugccaau

SEQ ID NO: 1611661 - RNA, 19 nt, Homo sapiens
  misc_RNA (1)...(19): siRNA sense strand
gagcaugugggcaacuaug

SEQ ID NO: 1611662 - RNA, 19 nt, Homo sapiens
  misc_RNA (1)...(19): siRNA sense strand
ugacagaagacaucacaag

SEQ ID NO: 1611663 - RNA, 19 nt, Homo sapiens
  misc_RNA (1)...(19): siRNA sense strand
cugcccagcugacagaaga

SEQ ID NO: 1611664 - RNA, 19 nt, Homo sapiens
  misc_RNA (1)...(19): siRNA sense strand
ugagcguucuuccagcaaa

SEQ ID NO: 1611665 - RNA, 19 nt, Homo sapiens
  misc_RNA (1)...(19): siRNA sense strand
gcagcgccuucgaagacuu

SEQ ID NO: 1611666 - RNA, 19 nt, Homo sapiens
  misc_RNA (1)...(19): siRNA sense strand
acggucagcucuacgucua

SEQ ID NO: 1611667 - RNA, 19 nt, Homo sapiens
  misc_RNA (1)...(19): siRNA sense strand
ccagcaaggcccagaaauc

SEQ ID NO: 1611668 - RNA, 19 nt, Homo sapiens
  misc_RNA (1)...(19): siRNA sense strand
agagcacaauuggcuuuaa

SEQ ID NO: 1611669 - RNA, 19 nt, Homo sapiens
  misc_RNA (1)...(19): siRNA sense strand
cagccaggaugaugagucu

SEQ ID NO: 1611670 - RNA, 19 nt, Homo sapiens
  misc_RNA (1)...(19): siRNA sense strand
cagaagauugccaagaaau

SEQ ID NO: 1611671 - RNA, 19 nt, Homo sapiens
  misc_RNA (1)...(19): siRNA sense strand
gagcccaacagcaaacuca

SEQ ID NO: 1611672 - RNA, 19 nt, Homo sapiens
  misc_RNA (1)...(19): siRNA sense strand
uagacaagccagaagaugu

SEQ ID NO: 1611673 - RNA, 19 nt, Homo sapiens
  misc_RNA (1)...(19): siRNA sense strand
cggcugccaugcuccuuug

SEQ ID NO: 1611674 - RNA, 19 nt, Homo sapiens
  misc_RNA (1)...(19): siRNA sense strand
gaguaugagcaauuugaga

SEQ ID NO: 1611675 - RNA, 19 nt, Homo sapiens
  misc_RNA (1)...(19): siRNA sense strand
ugagcugggugacuaugau

SEQ ID NO: 1611676 - RNA, 19 nt, Homo sapiens
  misc_RNA (1)...(19): siRNA sense strand
acagaagacaucacaagau

SEQ ID NO: 1611677 - RNA, 19 nt, Homo sapiens
  misc_RNA (1)...(19): siRNA sense strand
agaagcgaaucaucauuac

SEQ ID NO: 1611678 - RNA, 19 nt, Homo sapiens
  misc_RNA (1)...(19): siRNA sense strand
gagucuccgcuauggauaa

SEQ ID NO: 1611679 - RNA, 19 nt, Homo sapiens
  misc_RNA (1)...(19): siRNA sense strand
gacaaccaccuggccauug

SEQ ID NO: 1611680 - RNA, 19 nt, Homo sapiens
  misc_RNA (1)...(19): siRNA sense strand
gaggaguaacuucuauauc

SEQ ID NO: 1611681 - RNA, 19 nt, Homo sapiens
  misc_RNA (1)...(19): siRNA sense strand
gagaagcagaaauccacuu

SEQ ID NO: 1611682 - RNA, 19 nt, Homo sapiens
  misc_RNA (1)...(19): siRNA sense strand
cgagaagcgaaucaucauu

SEQ ID NO: 1611683 - RNA, 19 nt, Homo sapiens
  misc_RNA (1)...(19): siRNA sense strand
gaucgagaagcgaaucauc

SEQ ID NO: 1611684 - RNA, 19 nt, Homo sapiens
  misc_RNA (1)...(19): siRNA sense strand
ggaguagccccuggaauuu

SEQ ID NO: 1611685 - RNA, 19 nt, Homo sapiens
  misc_RNA (1)...(19): siRNA sense strand
gcugacagaagacaucaca

SEQ ID NO: 1611686 - RNA, 19 nt, Homo sapiens
  misc_RNA (1)...(19): siRNA sense strand
caucaaggaggccaaacug

SEQ ID NO: 1611687 - RNA, 19 nt, Homo sapiens
  misc_RNA (1)...(19): siRNA sense strand
aaaggaggguuuucugaga

SEQ ID NO: 1611688 - RNA, 19 nt, Homo sapiens
  misc_RNA (1)...(19): siRNA sense strand
ccauuagaaagaagauuga

SEQ ID NO: 1611689 - RNA, 19 nt, Homo sapiens
  misc_RNA (1)...(19): siRNA sense strand
gggaccggcugagaaucaa

SEQ ID NO: 1611690 - RNA, 19 nt, Homo sapiens
  misc_RNA (1)...(19): siRNA sense strand
caccucaaccuccuagaga

SEQ ID NO: 1611691 - RNA, 19 nt, Homo sapiens
  misc_RNA (1)...(19): siRNA sense strand
gaucauggagcugcauaag

SEQ ID NO: 1611692 - RNA, 19 nt, Homo sapiens
  misc_RNA (1)...(19): siRNA sense strand
ggaucauggagcugcauaa

SEQ ID NO: 1611693 - RNA, 19 nt, Homo sapiens
  misc_RNA (1)...(19): siRNA sense strand
agaggaguaacuucuauau

SEQ ID NO: 1611694 - RNA, 19 nt, Homo sapiens
  misc_RNA (1)...(19): siRNA sense strand
aagcgaaucaucauuacug

SEQ ID NO: 1611695 - RNA, 19 nt, Homo sapiens
  misc_RNA (1)...(19): siRNA sense strand
caccaaaacugugaaagga

SEQ ID NO: 1611696 - RNA, 19 nt, Homo sapiens
  misc_RNA (1)...(19): siRNA sense strand
cagagucuccgcuauggau

SEQ ID NO: 1611697 - RNA, 19 nt, Homo sapiens
  misc_RNA (1)...(19): siRNA sense strand
ccucggaguaugaguguga

SEQ ID NO: 1611698 - RNA, 19 nt, Homo sapiens
  misc_RNA (1)...(19): siRNA sense strand
gcaaacgguacaccauguc

SEQ ID NO: 1611699 - RNA, 19 nt, Homo sapiens
  misc_RNA (1)...(19): siRNA sense strand
ggauaaaguugucugauuu

SEQ ID NO: 1611700 - RNA, 19 nt, Homo sapiens
  misc_RNA (1)...(19): siRNA sense strand
ggaaacaaguugcagugaa

SEQ ID NO: 1611701 - RNA, 19 nt, Homo sapiens
  misc_RNA (1)...(19): siRNA sense strand
gacaagcgauggccggaua

SEQ ID NO: 1611702 - RNA, 19 nt, Homo sapiens
  misc_RNA (1)...(19): siRNA sense strand
gaaacaaguugcagugaag

SEQ ID NO: 1611703 - RNA, 19 nt, Homo sapiens
  misc_RNA (1)...(19): siRNA sense strand
ccucggacauccauucuua

SEQ ID NO: 1611704 - RNA, 19 nt, Homo sapiens
  misc_RNA (1)...(19): siRNA sense strand
ugacagacauugugacuca

SEQ ID NO: 1611705 - RNA, 19 nt, Homo sapiens
  misc_RNA (1)...(19): siRNA sense strand
caaacuaccucaaagucaa

SEQ ID NO: 1611706 - RNA, 19 nt, Homo sapiens
  misc_RNA (1)...(19): siRNA sense strand
ccaaagaggugccgaagag

SEQ ID NO: 1611707 - RNA, 19 nt, Homo sapiens
  misc_RNA (1)...(19): siRNA sense strand
aaacaaacccugcaaggaa

SEQ ID NO: 1611708 - RNA, 19 nt, Homo sapiens
  misc_RNA (1)...(19): siRNA sense strand
gggaauacuuggccaacuu

SEQ ID NO: 1611709 - RNA, 19 nt, Homo sapiens
  misc_RNA (1)...(19): siRNA sense strand
cggauaaaguugucugauu

SEQ ID NO: 1611710 - RNA, 19 nt, Homo sapiens
  misc_RNA (1)...(19): siRNA sense strand
gaaacaaacccugcaagga

SEQ ID NO: 1611711 - RNA, 19 nt, Homo sapiens
  misc_RNA (1)...(19): siRNA sense strand
gauuaucacucacauuugg

SEQ ID NO: 1611712 - RNA, 19 nt, Homo sapiens
  misc_RNA (1)...(19): siRNA sense strand
gaaccgaugaugccauuug

SEQ ID NO: 1611713 - RNA, 19 nt, Homo sapiens
  misc_RNA (1)...(19): siRNA sense strand
gaagaggaaaucauugguu

SEQ ID NO: 1611714 - RNA, 19 nt, Homo sapiens
  misc_RNA (1)...(19): siRNA sense strand
gagaacugcuuuucaauga

SEQ ID NO: 1611715 - RNA, 19 nt, Homo sapiens
  misc_RNA (1)...(19): siRNA sense strand
ccacaagagcagaaguuua

SEQ ID NO: 1611716 - RNA, 19 nt, Homo sapiens
  misc_RNA (1)...(19): siRNA sense strand
gcaaggaaaccuccaucaa

SEQ ID NO: 1611717 - RNA, 19 nt, Homo sapiens
  misc_RNA (1)...(19): siRNA sense strand
ggucauggaguuucuagaa

SEQ ID NO: 1611718 - RNA, 19 nt, Homo sapiens
  misc_RNA (1)...(19): siRNA sense strand
caaagcaaaucgggcuauu

SEQ ID NO: 1611719 - RNA, 19 nt, Homo sapiens
  misc_RNA (1)...(19): siRNA sense strand
gugcucaaguuuccaaaga

SEQ ID NO: 1611720 - RNA, 19 nt, Homo sapiens
  misc_RNA (1)...(19): siRNA sense strand
gagcaaaccaagugaauac

SEQ ID NO: 1611721 - RNA, 19 nt, Homo sapiens
  misc_RNA (1)...(19): siRNA sense strand
ggaauacuuggccaacuuu

SEQ ID NO: 1611722 - RNA, 19 nt, Homo sapiens
  misc_RNA (1)...(19): siRNA sense strand
ccgauuaucacucacauuu

SEQ ID NO: 1611723 - RNA, 19 nt, Homo sapiens
  misc_RNA (1)...(19): siRNA sense strand
uaucagagagccucgagua

SEQ ID NO: 1611724 - RNA, 19 nt, Homo sapiens
  misc_RNA (1)...(19): siRNA sense strand
caaaccaagugaauacagu

SEQ ID NO: 1611725 - RNA, 19 nt, Homo sapiens
  misc_RNA (1)...(19): siRNA sense strand
gcucucuccuaccuucaua

SEQ ID NO: 1611726 - RNA, 19 nt, Homo sapiens
  misc_RNA (1)...(19): siRNA sense strand
ggugucccaugaacaguuu

SEQ ID NO: 1611727 - RNA, 19 nt, Homo sapiens
  misc_RNA (1)...(19): siRNA sense strand
gaggauccgggacaguuua

SEQ ID NO: 1611728 - RNA, 19 nt, Homo sapiens
  misc_RNA (1)...(19): siRNA sense strand
ccucagcccuccacuguca

SEQ ID NO: 1611729 - RNA, 19 nt, Homo sapiens
  misc_RNA (1)...(19): siRNA sense strand
aacaaacccugcaaggaaa

SEQ ID NO: 1611730 - RNA, 19 nt, Homo sapiens
  misc_RNA (1)...(19): siRNA sense strand
ccuaugaagacaaucguua

SEQ ID NO: 1611731 - RNA, 19 nt, Homo sapiens
  misc_RNA (1)...(19): siRNA sense strand
ggacauccauucuuaaaac

SEQ ID NO: 1611732 - RNA, 19 nt, Homo sapiens
  misc_RNA (1)...(19): siRNA sense strand
auucugaggugaagccuuu

SEQ ID NO: 1611733 - RNA, 19 nt, Homo sapiens
  misc_RNA (1)...(19): siRNA sense strand
cagaaugaaugaagaacag

SEQ ID NO: 1611734 - RNA, 19 nt, Homo sapiens
  misc_RNA (1)...(19): siRNA sense strand
gaauacuuggccaacuuua

SEQ ID NO: 1611735 - RNA, 19 nt, Homo sapiens
  misc_RNA (1)...(19): siRNA sense strand
uggagcaagugcauuuaaa

SEQ ID NO: 1611736 - RNA, 19 nt, Homo sapiens
  misc_RNA (1)...(19): siRNA sense strand
gaggugaagccuuugaaau

SEQ ID NO: 1611737 - RNA, 19 nt, Homo sapiens
  misc_RNA (1)...(19): siRNA sense strand
ccagcuggcuccuaugaag

SEQ ID NO: 1611738 - RNA, 19 nt, Homo sapiens
  misc_RNA (1)...(19): siRNA sense strand
ggaggauccgggacaguuu

SEQ ID NO: 1611739 - RNA, 19 nt, Homo sapiens
  misc_RNA (1)...(19): siRNA sense strand
gguggugccuugacagaca

SEQ ID NO: 1611740 - RNA, 19 nt, Homo sapiens
  misc_RNA (1)...(19): siRNA sense strand
aaagguggauuacgaucga

SEQ ID NO: 1611741 - RNA, 19 nt, Homo sapiens
  misc_RNA (1)...(19): siRNA sense strand
ugaauacagugaccucaag

SEQ ID NO: 1611742 - RNA, 19 nt, Homo sapiens
  misc_RNA (1)...(19): siRNA sense strand
caaggaaaccuccaucaac

SEQ ID NO: 1611743 - RNA, 19 nt, Homo sapiens
  misc_RNA (1)...(19): siRNA sense strand
gaaacacacagggaaacaa

SEQ ID NO: 1611744 - RNA, 19 nt, Homo sapiens
  misc_RNA (1)...(19): siRNA sense strand
gcagagcaguucgcaguac

SEQ ID NO: 1611745 - RNA, 19 nt, Homo sapiens
  misc_RNA (1)...(19): siRNA sense strand
ccaacucccuaaggaaaga

SEQ ID NO: 1611746 - RNA, 19 nt, Homo sapiens
  misc_RNA (1)...(19): siRNA sense strand
gcgauggccggauaaaguu

SEQ ID NO: 1611747 - RNA, 19 nt, Homo sapiens
  misc_RNA (1)...(19): siRNA sense strand
acaccagaaugaaugaaga

SEQ ID NO: 1611748 - RNA, 19 nt, Homo sapiens
  misc_RNA (1)...(19): siRNA sense strand
gggauuaccaccaugacaa

SEQ ID NO: 1611749 - RNA, 19 nt, Homo sapiens
  misc_RNA (1)...(19): siRNA sense strand
caauucacaccuucuagaa

SEQ ID NO: 1611750 - RNA, 19 nt, Homo sapiens
  misc_RNA (1)...(19): siRNA sense strand
caagugggaguaucagaga

SEQ ID NO: 1611751 - RNA, 19 nt, Homo sapiens
  misc_RNA (1)...(19): siRNA sense strand
gagagcaacagcccaggaa

SEQ ID NO: 1611752 - RNA, 19 nt, Homo sapiens
  misc_RNA (1)...(19): siRNA sense strand
ccauccagcuggcuccuau

SEQ ID NO: 1611753 - RNA, 19 nt, Homo sapiens
  misc_RNA (1)...(19): siRNA sense strand
ggauuauucauuccaauuc

SEQ ID NO: 1611754 - RNA, 19 nt, Homo sapiens
  misc_RNA (1)...(19): siRNA sense strand
cgagaaacacacagggaaa

SEQ ID NO: 1611755 - RNA, 19 nt, Homo sapiens
  misc_RNA (1)...(19): siRNA sense strand
cacaagagcagaaguuuac

SEQ ID NO: 1611756 - RNA, 19 nt, Homo sapiens
  misc_RNA (1)...(19): siRNA sense strand
gacgagaacugcuuuucaa

SEQ ID NO: 1611757 - RNA, 19 nt, Homo sapiens
  misc_RNA (1)...(19): siRNA sense strand
ucacucacauuuggacuca

SEQ ID NO: 1611758 - RNA, 19 nt, Homo sapiens
  misc_RNA (1)...(19): siRNA sense strand
ccaauucacaccuucuaga

SEQ ID NO: 1611759 - RNA, 19 nt, Homo sapiens
  misc_RNA (1)...(19): siRNA sense strand
ccuccagggugucccauga

SEQ ID NO: 1611760 - RNA, 19 nt, Homo sapiens
  misc_RNA (1)...(19): siRNA sense strand
ccaaacuaccucaaaguca

SEQ ID NO: 1611761 - RNA, 19 nt, Homo sapiens
  misc_RNA (1)...(19): siRNA sense strand
gacaaucguuagaggaaac

SEQ ID NO: 1611762 - RNA, 19 nt, Homo sapiens
  misc_RNA (1)...(19): siRNA sense strand
gaagcaacagagacgagaa

SEQ ID NO: 1611763 - RNA, 19 nt, Homo sapiens
  misc_RNA (1)...(19): siRNA sense strand
gacaggaggccaaagucuu

SEQ ID NO: 1611764 - RNA, 19 nt, Homo sapiens
  misc_RNA (1)...(19): siRNA sense strand
uacacaagguuucuucagu

SEQ ID NO: 1611765 - RNA, 19 nt, Homo sapiens
  misc_RNA (1)...(19): siRNA sense strand
ggaggccaaagucuucgua

SEQ ID NO: 1611766 - RNA, 19 nt, Homo sapiens
  misc_RNA (1)...(19): siRNA sense strand
gaacuccucggacauccau

SEQ ID NO: 1611767 - RNA, 19 nt, Homo sapiens
  misc_RNA (1)...(19): siRNA sense strand
gaagaacagauagcuacug

SEQ ID NO: 1611768 - RNA, 19 nt, Homo sapiens
  misc_RNA (1)...(19): siRNA sense strand
ggauuaccaccaugacaau

SEQ ID NO: 1611769 - RNA, 19 nt, Homo sapiens
  misc_RNA (1)...(19): siRNA sense strand
caaagucuucguaccugaa

SEQ ID NO: 1611770 - RNA, 19 nt, Homo sapiens
  misc_RNA (1)...(19): siRNA sense strand
ugagcaaaccaagugaaua

SEQ ID NO: 1611771 - RNA, 19 nt, Homo sapiens
  misc_RNA (1)...(19): siRNA sense strand
gaaugaaugaagaacagau

SEQ ID NO: 1611772 - RNA, 19 nt, Homo sapiens
  misc_RNA (1)...(19): siRNA sense strand
guacagcagcuaccuuguc

SEQ ID NO: 1611773 - RNA, 19 nt, Homo sapiens
  misc_RNA (1)...(19): siRNA sense strand
acacacagggaaacaaguu

SEQ ID NO: 1611774 - RNA, 19 nt, Homo sapiens
  misc_RNA (1)...(19): siRNA sense strand
aggaaccgaugaugccauu

SEQ ID NO: 1611775 - RNA, 19 nt, Homo sapiens
  misc_RNA (1)...(19): siRNA sense strand
gagccuggcguacagugaa

SEQ ID NO: 1611776 - RNA, 19 nt, Homo sapiens
  misc_RNA (1)...(19): siRNA sense strand
agacaaucguuagaggaaa

SEQ ID NO: 1611777 - RNA, 19 nt, Homo sapiens
  misc_RNA (1)...(19): siRNA sense strand
cagagagccucgaguagcu

SEQ ID NO: 1611778 - RNA, 19 nt, Homo sapiens
  misc_RNA (1)...(19): siRNA sense strand
ggugaagccuuugaaaucc

SEQ ID NO: 1611779 - RNA, 19 nt, Homo sapiens
  misc_RNA (1)...(19): siRNA sense strand
ggacaguuuaccuccaaga

SEQ ID NO: 1611780 - RNA, 19 nt, Homo sapiens
  misc_RNA (1)...(19): siRNA sense strand
gcaguucgcaguacaucuc

SEQ ID NO: 1611781 - RNA, 19 nt, Homo sapiens
  misc_RNA (1)...(19): siRNA sense strand
ucuccuaccuucauaacca

SEQ ID NO: 1611782 - RNA, 19 nt, Homo sapiens
  misc_RNA (1)...(19): siRNA sense strand
uagcagguccaccgucuug

SEQ ID NO: 1611783 - RNA, 19 nt, Homo sapiens
  misc_RNA (1)...(19): siRNA sense strand
uuucuaggcuaccuuaugg

SEQ ID NO: 1611784 - RNA, 19 nt, Homo sapiens
  misc_RNA (1)...(19): siRNA sense strand
ggcguacagugaaagugaa

SEQ ID NO: 1611785 - RNA, 19 nt, Homo sapiens
  misc_RNA (1)...(19): siRNA sense strand
cgggacaguuuaccuccaa

SEQ ID NO: 1611786 - RNA, 19 nt, Homo sapiens
  misc_RNA (1)...(19): siRNA sense strand
aaauggaccuccggaagca

SEQ ID NO: 1611787 - RNA, 19 nt, Homo sapiens
  misc_RNA (1)...(19): siRNA sense strand
ccucaaagucaaagcaaau

SEQ ID NO: 1611788 - RNA, 19 nt, Homo sapiens
  misc_RNA (1)...(19): siRNA sense strand
aaacuaccucaaagucaaa

SEQ ID NO: 1611789 - RNA, 19 nt, Homo sapiens
  misc_RNA (1)...(19): siRNA sense strand
gcaaaccaagugaauacag

SEQ ID NO: 1611790 - RNA, 19 nt, Homo sapiens
  misc_RNA (1)...(19): siRNA sense strand
gagugaaggaccuacacaa

SEQ ID NO: 1611791 - RNA, 19 nt, Homo sapiens
  misc_RNA (1)...(19): siRNA sense strand
ugauuucuaggcuaccuua

SEQ ID NO: 1611792 - RNA, 19 nt, Homo sapiens
  misc_RNA (1)...(19): siRNA sense strand
gggaaacaaguugcaguga

SEQ ID NO: 1611793 - RNA, 19 nt, Homo sapiens
  misc_RNA (1)...(19): siRNA sense strand
cagagcaguucgcaguaca

SEQ ID NO: 1611794 - RNA, 19 nt, Homo sapiens
  misc_RNA (1)...(19): siRNA sense strand
guacagugaaagugaaugg

SEQ ID NO: 1611795 - RNA, 19 nt, Homo sapiens
  misc_RNA (1)...(19): siRNA sense strand
acaauacaggcaucacuga

SEQ ID NO: 1611796 - RNA, 19 nt, Homo sapiens
  misc_RNA (1)...(19): siRNA sense strand
uaucuggcccguccaacuu

SEQ ID NO: 1611797 - RNA, 19 nt, Homo sapiens
  misc_RNA (1)...(19): siRNA sense strand
gaggaaacaaacccugcaa

SEQ ID NO: 1611798 - RNA, 19 nt, Homo sapiens
  misc_RNA (1)...(19): siRNA sense strand
ccucaagcagucaccagua

SEQ ID NO: 1611799 - RNA, 19 nt, Homo sapiens
  misc_RNA (1)...(19): siRNA sense strand
ggauaaaguugucugauuu

SEQ ID NO: 1611800 - RNA, 19 nt, Homo sapiens
  misc_RNA (1)...(19): siRNA sense strand
ggaaacaaguugcagugaa

SEQ ID NO: 1611801 - RNA, 19 nt, Homo sapiens
  misc_RNA (1)...(19): siRNA sense strand
gacaagcgauggccggaua

SEQ ID NO: 1611802 - RNA, 19 nt, Homo sapiens
  misc_RNA (1)...(19): siRNA sense strand
gaaacaaguugcagugaag

SEQ ID NO: 1611803 - RNA, 19 nt, Homo sapiens
  misc_RNA (1)...(19): siRNA sense strand
ccucggacauccauucuua

SEQ ID NO: 1611804 - RNA, 19 nt, Homo sapiens
  misc_RNA (1)...(19): siRNA sense strand
ugacagacauugugacuca

SEQ ID NO: 1611805 - RNA, 19 nt, Homo sapiens
  misc_RNA (1)...(19): siRNA sense strand
caaacuaccucaaagucaa

SEQ ID NO: 1611806 - RNA, 19 nt, Homo sapiens
  misc_RNA (1)...(19): siRNA sense strand
ccaaagaggugccgaagag

SEQ ID NO: 1611807 - RNA, 19 nt, Homo sapiens
  misc_RNA (1)...(19): siRNA sense strand
aaacaaacccugcaaggaa

SEQ ID NO: 1611808 - RNA, 19 nt, Homo sapiens
  misc_RNA (1)...(19): siRNA sense strand
gggaauacuuggccaacuu

SEQ ID NO: 1611809 - RNA, 19 nt, Homo sapiens
  misc_RNA (1)...(19): siRNA sense strand
cggauaaaguugucugauu

SEQ ID NO: 1611810 - RNA, 19 nt, Homo sapiens
  misc_RNA (1)...(19): siRNA sense strand
gaaacaaacccugcaagga

SEQ ID NO: 1611811 - RNA, 19 nt, Homo sapiens
  misc_RNA (1)...(19): siRNA sense strand
gauuaucacucacauuugg

SEQ ID NO: 1611812 - RNA, 19 nt, Homo sapiens
  misc_RNA (1)...(19): siRNA sense strand
gaaccgaugaugccauuug

SEQ ID NO: 1611813 - RNA, 19 nt, Homo sapiens
  misc_RNA (1)...(19): siRNA sense strand
gaagaggaaaucauugguu

SEQ ID NO: 1611814 - RNA, 19 nt, Homo sapiens
  misc_RNA (1)...(19): siRNA sense strand
gagaacugcuuuucaauga

SEQ ID NO: 1611815 - RNA, 19 nt, Homo sapiens
  misc_RNA (1)...(19): siRNA sense strand
ccacaagagcagaaguuua

SEQ ID NO: 1611816 - RNA, 19 nt, Homo sapiens
  misc_RNA (1)...(19): siRNA sense strand
gcaaggaaaccuccaucaa

SEQ ID NO: 1611817 - RNA, 19 nt, Homo sapiens
  misc_RNA (1)...(19): siRNA sense strand
ggucauggaguuucuagaa

SEQ ID NO: 1611818 - RNA, 19 nt, Homo sapiens
  misc_RNA (1)...(19): siRNA sense strand
caaagcaaaucgggcuauu

SEQ ID NO: 1611819 - RNA, 19 nt, Homo sapiens
  misc_RNA (1)...(19): siRNA sense strand
gugcucaaguuuccaaaga

SEQ ID NO: 1611820 - RNA, 19 nt, Homo sapiens
  misc_RNA (1)...(19): siRNA sense strand
gagcaaaccaagugaauac

SEQ ID NO: 1611821 - RNA, 19 nt, Homo sapiens
  misc_RNA (1)...(19): siRNA sense strand
ggaauacuuggccaacuuu

SEQ ID NO: 1611822 - RNA, 19 nt, Homo sapiens
  misc_RNA (1)...(19): siRNA sense strand
ccgauuaucacucacauuu

SEQ ID NO: 1611823 - RNA, 19 nt, Homo sapiens
  misc_RNA (1)...(19): siRNA sense strand
uaucagagagccucgagua

SEQ ID NO: 1611824 - RNA, 19 nt, Homo sapiens
  misc_RNA (1)...(19): siRNA sense strand
caaaccaagugaauacagu

SEQ ID NO: 1611825 - RNA, 19 nt, Homo sapiens
  misc_RNA (1)...(19): siRNA sense strand
gcucucuccuaccuucaua

SEQ ID NO: 1611826 - RNA, 19 nt, Homo sapiens
  misc_RNA (1)...(19): siRNA sense strand
ggugucccaugaacaguuu

SEQ ID NO: 1611827 - RNA, 19 nt, Homo sapiens
  misc_RNA (1)...(19): siRNA sense strand
gaggauccgggacaguuua

SEQ ID NO: 1611828 - RNA, 19 nt, Homo sapiens
  misc_RNA (1)...(19): siRNA sense strand
ccucagcccuccacuguca

SEQ ID NO: 1611829 - RNA, 19 nt, Homo sapiens
  misc_RNA (1)...(19): siRNA sense strand
aacaaacccugcaaggaaa

SEQ ID NO: 1611830 - RNA, 19 nt, Homo sapiens
  misc_RNA (1)...(19): siRNA sense strand
ccuaugaagacaaucguua

SEQ ID NO: 1611831 - RNA, 19 nt, Homo sapiens
  misc_RNA (1)...(19): siRNA sense strand
ggacauccauucuuaaaac

SEQ ID NO: 1611832 - RNA, 19 nt, Homo sapiens
  misc_RNA (1)...(19): siRNA sense strand
auucugaggugaagccuuu

SEQ ID NO: 1611833 - RNA, 19 nt, Homo sapiens
  misc_RNA (1)...(19): siRNA sense strand
cagaaugaaugaagaacag

SEQ ID NO: 1611834 - RNA, 19 nt, Homo sapiens
  misc_RNA (1)...(19): siRNA sense strand
gaauacuuggccaacuuua

SEQ ID NO: 1611835 - RNA, 19 nt, Homo sapiens
  misc_RNA (1)...(19): siRNA sense strand
uggagcaagugcauuuaaa

SEQ ID NO: 1611836 - RNA, 19 nt, Homo sapiens
  misc_RNA (1)...(19): siRNA sense strand
gaggugaagccuuugaaau

SEQ ID NO: 1611837 - RNA, 19 nt, Homo sapiens
  misc_RNA (1)...(19): siRNA sense strand
ccagcuggcuccuaugaag

SEQ ID NO: 1611838 - RNA, 19 nt, Homo sapiens
  misc_RNA (1)...(19): siRNA sense strand
ggaggauccgggacaguuu

SEQ ID NO: 1611839 - RNA, 19 nt, Homo sapiens
  misc_RNA (1)...(19): siRNA sense strand
gguggugccuugacagaca

SEQ ID NO: 1611840 - RNA, 19 nt, Homo sapiens
  misc_RNA (1)...(19): siRNA sense strand
aaagguggauuacgaucga

SEQ ID NO: 1611841 - RNA, 19 nt, Homo sapiens
  misc_RNA (1)...(19): siRNA sense strand
ugaauacagugaccucaag

SEQ ID NO: 1611842 - RNA, 19 nt, Homo sapiens
  misc_RNA (1)...(19): siRNA sense strand
caaggaaaccuccaucaac

SEQ ID NO: 1611843 - RNA, 19 nt, Homo sapiens
  misc_RNA (1)...(19): siRNA sense strand
gaaacacacagggaaacaa

SEQ ID NO: 1611844 - RNA, 19 nt, Homo sapiens
  misc_RNA (1)...(19): siRNA sense strand
gcagagcaguucgcaguac

SEQ ID NO: 1611845 - RNA, 19 nt, Homo sapiens
  misc_RNA (1)...(19): siRNA sense strand
ccaacucccuaaggaaaga

SEQ ID NO: 1611846 - RNA, 19 nt, Homo sapiens
  misc_RNA (1)...(19): siRNA sense strand
gcgauggccggauaaaguu

SEQ ID NO: 1611847 - RNA, 19 nt, Homo sapiens
  misc_RNA (1)...(19): siRNA sense strand
acaccagaaugaaugaaga

SEQ ID NO: 1611848 - RNA, 19 nt, Homo sapiens
  misc_RNA (1)...(19): siRNA sense strand
gggauuaccaccaugacaa

SEQ ID NO: 1611849 - RNA, 19 nt, Homo sapiens
  misc_RNA (1)...(19): siRNA sense strand
caauucacaccuucuagaa

SEQ ID NO: 1611850 - RNA, 19 nt, Homo sapiens
  misc_RNA (1)...(19): siRNA sense strand
caagugggaguaucagaga

SEQ ID NO: 1611851 - RNA, 19 nt, Homo sapiens
  misc_RNA (1)...(19): siRNA sense strand
gagagcaacagcccaggaa

SEQ ID NO: 1611852 - RNA, 19 nt, Homo sapiens
  misc_RNA (1)...(19): siRNA sense strand
ccauccagcuggcuccuau

SEQ ID NO: 1611853 - RNA, 19 nt, Homo sapiens
  misc_RNA (1)...(19): siRNA sense strand
ggauuauucauuccaauuc

SEQ ID NO: 1611854 - RNA, 19 nt, Homo sapiens
  misc_RNA (1)...(19): siRNA sense strand
cgagaaacacacagggaaa

SEQ ID NO: 1611855 - RNA, 19 nt, Homo sapiens
  misc_RNA (1)...(19): siRNA sense strand
cacaagagcagaaguuuac

SEQ ID NO: 1611856 - RNA, 19 nt, Homo sapiens
  misc_RNA (1)...(19): siRNA sense strand
gacgagaacugcuuuucaa

SEQ ID NO: 1611857 - RNA, 19 nt, Homo sapiens
  misc_RNA (1)...(19): siRNA sense strand
ucacucacauuuggacuca

SEQ ID NO: 1611858 - RNA, 19 nt, Homo sapiens
  misc_RNA (1)...(19): siRNA sense strand
ccaauucacaccuucuaga

SEQ ID NO: 1611859 - RNA, 19 nt, Homo sapiens
  misc_RNA (1)...(19): siRNA sense strand
ccuccagggugucccauga

SEQ ID NO: 1611860 - RNA, 19 nt, Homo sapiens
  misc_RNA (1)...(19): siRNA sense strand
ccaaacuaccucaaaguca

SEQ ID NO: 1611861 - RNA, 19 nt, Homo sapiens
  misc_RNA (1)...(19): siRNA sense strand
gacaaucguuagaggaaac

SEQ ID NO: 1611862 - RNA, 19 nt, Homo sapiens
  misc_RNA (1)...(19): siRNA sense strand
gaagcaacagagacgagaa

SEQ ID NO: 1611863 - RNA, 19 nt, Homo sapiens
  misc_RNA (1)...(19): siRNA sense strand
gacaggaggccaaagucuu

SEQ ID NO: 1611864 - RNA, 19 nt, Homo sapiens
  misc_RNA (1)...(19): siRNA sense strand
uacacaagguuucuucagu

SEQ ID NO: 1611865 - RNA, 19 nt, Homo sapiens
  misc_RNA (1)...(19): siRNA sense strand
ggaggccaaagucuucgua

SEQ ID NO: 1611866 - RNA, 19 nt, Homo sapiens
  misc_RNA (1)...(19): siRNA sense strand
gaacuccucggacauccau

SEQ ID NO: 1611867 - RNA, 19 nt, Homo sapiens
  misc_RNA (1)...(19): siRNA sense strand
gaagaacagauagcuacug

SEQ ID NO: 1611868 - RNA, 19 nt, Homo sapiens
  misc_RNA (1)...(19): siRNA sense strand
ggauuaccaccaugacaau

SEQ ID NO: 1611869 - RNA, 19 nt, Homo sapiens
  misc_RNA (1)...(19): siRNA sense strand
caaagucuucguaccugaa

SEQ ID NO: 1611870 - RNA, 19 nt, Homo sapiens
  misc_RNA (1)...(19): siRNA sense strand
ugagcaaaccaagugaaua

SEQ ID NO: 1611871 - RNA, 19 nt, Homo sapiens
  misc_RNA (1)...(19): siRNA sense strand
gaaugaaugaagaacagau

SEQ ID NO: 1611872 - RNA, 19 nt, Homo sapiens
  misc_RNA (1)...(19): siRNA sense strand
guacagcagcuaccuuguc

SEQ ID NO: 1611873 - RNA, 19 nt, Homo sapiens
  misc_RNA (1)...(19): siRNA sense strand
acacacagggaaacaaguu

SEQ ID NO: 1611874 - RNA, 19 nt, Homo sapiens
  misc_RNA (1)...(19): siRNA sense strand
aggaaccgaugaugccauu

SEQ ID NO: 1611875 - RNA, 19 nt, Homo sapiens
  misc_RNA (1)...(19): siRNA sense strand
gagccuggcguacagugaa

SEQ ID NO: 1611876 - RNA, 19 nt, Homo sapiens
  misc_RNA (1)...(19): siRNA sense strand
agacaaucguuagaggaaa

SEQ ID NO: 1611877 - RNA, 19 nt, Homo sapiens
  misc_RNA (1)...(19): siRNA sense strand
cagagagccucgaguagcu

SEQ ID NO: 1611878 - RNA, 19 nt, Homo sapiens
  misc_RNA (1)...(19): siRNA sense strand
ggugaagccuuugaaaucc

SEQ ID NO: 1611879 - RNA, 19 nt, Homo sapiens
  misc_RNA (1)...(19): siRNA sense strand
ggacaguuuaccuccaaga

SEQ ID NO: 1611880 - RNA, 19 nt, Homo sapiens
  misc_RNA (1)...(19): siRNA sense strand
gcaguucgcaguacaucuc

SEQ ID NO: 1611881 - RNA, 19 nt, Homo sapiens
  misc_RNA (1)...(19): siRNA sense strand
ucuccuaccuucauaacca

SEQ ID NO: 1611882 - RNA, 19 nt, Homo sapiens
  misc_RNA (1)...(19): siRNA sense strand
uagcagguccaccgucuug

SEQ ID NO: 1611883 - RNA, 19 nt, Homo sapiens
  misc_RNA (1)...(19): siRNA sense strand
uuucuaggcuaccuuaugg

SEQ ID NO: 1611884 - RNA, 19 nt, Homo sapiens
  misc_RNA (1)...(19): siRNA sense strand
ggcguacagugaaagugaa

SEQ ID NO: 1611885 - RNA, 19 nt, Homo sapiens
  misc_RNA (1)...(19): siRNA sense strand
cgggacaguuuaccuccaa

SEQ ID NO: 1611886 - RNA, 19 nt, Homo sapiens
  misc_RNA (1)...(19): siRNA sense strand
aaauggaccuccggaagca

SEQ ID NO: 1611887 - RNA, 19 nt, Homo sapiens
  misc_RNA (1)...(19): siRNA sense strand
ccucaaagucaaagcaaau

SEQ ID NO: 1611888 - RNA, 19 nt, Homo sapiens
  misc_RNA (1)...(19): siRNA sense strand
aaacuaccucaaagucaaa

SEQ ID NO: 1611889 - RNA, 19 nt, Homo sapiens
  misc_RNA (1)...(19): siRNA sense strand
gcaaaccaagugaauacag

SEQ ID NO: 1611890 - RNA, 19 nt, Homo sapiens
  misc_RNA (1)...(19): siRNA sense strand
gagugaaggaccuacacaa

SEQ ID NO: 1611891 - RNA, 19 nt, Homo sapiens
  misc_RNA (1)...(19): siRNA sense strand
ugauuucuaggcuaccuua

SEQ ID NO: 1611892 - RNA, 19 nt, Homo sapiens
  misc_RNA (1)...(19): siRNA sense strand
gggaaacaaguugcaguga

SEQ ID NO: 1611893 - RNA, 19 nt, Homo sapiens
  misc_RNA (1)...(19): siRNA sense strand
cagagcaguucgcaguaca

SEQ ID NO: 1611894 - RNA, 19 nt, Homo sapiens
  misc_RNA (1)...(19): siRNA sense strand
guacagugaaagugaaugg

SEQ ID NO: 1611895 - RNA, 19 nt, Homo sapiens
  misc_RNA (1)...(19): siRNA sense strand
acaauacaggcaucacuga

SEQ ID NO: 1611896 - RNA, 19 nt, Homo sapiens
  misc_RNA (1)...(19): siRNA sense strand
uaucuggcccguccaacuu

SEQ ID NO: 1611897 - RNA, 19 nt, Homo sapiens
  misc_RNA (1)...(19): siRNA sense strand
gaggaaacaaacccugcaa

SEQ ID NO: 1611898 - RNA, 19 nt, Homo sapiens
  misc_RNA (1)...(19): siRNA sense strand
ccucaagcagucaccagua

SEQ ID NO: 1611899 - RNA, 19 nt, Homo sapiens
  misc_RNA (1)...(19): siRNA sense strand
gaaauaagaucacacacau

SEQ ID NO: 1611900 - RNA, 19 nt, Homo sapiens
  misc_RNA (1)...(19): siRNA sense strand
caaagaauguaucaacuuc

SEQ ID NO: 1611901 - RNA, 19 nt, Homo sapiens
  misc_RNA (1)...(19): siRNA sense strand
ucacacacaucaucucuau

SEQ ID NO: 1611902 - RNA, 19 nt, Homo sapiens
  misc_RNA (1)...(19): siRNA sense strand
gaucagcugggccgaaaua

SEQ ID NO: 1611903 - RNA, 19 nt, Homo sapiens
  misc_RNA (1)...(19): siRNA sense strand
ggcagcagcuugaagaguu

SEQ ID NO: 1611904 - RNA, 19 nt, Homo sapiens
  misc_RNA (1)...(19): siRNA sense strand
gcagcagcuugaagaguuu

SEQ ID NO: 1611905 - RNA, 19 nt, Homo sapiens
  misc_RNA (1)...(19): siRNA sense strand
cagcguaugugaugacugu

SEQ ID NO: 1611906 - RNA, 19 nt, Homo sapiens
  misc_RNA (1)...(19): siRNA sense strand
aaacuucauugaugccaaa

SEQ ID NO: 1611907 - RNA, 19 nt, Homo sapiens
  misc_RNA (1)...(19): siRNA sense strand
cagcugggccgaaauaaga

SEQ ID NO: 1611908 - RNA, 19 nt, Homo sapiens
  misc_RNA (1)...(19): siRNA sense strand
cgaaauaagaucacacaca

SEQ ID NO: 1611909 - RNA, 19 nt, Homo sapiens
  misc_RNA (1)...(19): siRNA sense strand
aauaagaucacacacauca

SEQ ID NO: 1611910 - RNA, 19 nt, Homo sapiens
  misc_RNA (1)...(19): siRNA sense strand
uaagaucacacacaucauc

SEQ ID NO: 1611911 - RNA, 19 nt, Homo sapiens
  misc_RNA (1)...(19): siRNA sense strand
gcacuucaaagaauguauc

SEQ ID NO: 1611912 - RNA, 19 nt, Homo sapiens
  misc_RNA (1)...(19): siRNA sense strand
cucggaaacuucauugaug

SEQ ID NO: 1611913 - RNA, 19 nt, Homo sapiens
  misc_RNA (1)...(19): siRNA sense strand
uggaucagcugggccgaaa

SEQ ID NO: 1611914 - RNA, 19 nt, Homo sapiens
  misc_RNA (1)...(19): siRNA sense strand
gaucacacacaucaucucu

SEQ ID NO: 1611915 - RNA, 19 nt, Homo sapiens
  misc_RNA (1)...(19): siRNA sense strand
gacucuaccucggaaacuu

SEQ ID NO: 1611916 - RNA, 19 nt, Homo sapiens
  misc_RNA (1)...(19): siRNA sense strand
ccacugcugccgccuuaau

SEQ ID NO: 1611917 - RNA, 19 nt, Homo sapiens
  misc_RNA (1)...(19): siRNA sense strand
gcuuuaggcagcagcuuga

SEQ ID NO: 1611918 - RNA, 19 nt, Homo sapiens
  misc_RNA (1)...(19): siRNA sense strand
ucucgcagcaccacgauug

SEQ ID NO: 1611919 - RNA, 19 nt, Homo sapiens
  misc_RNA (1)...(19): siRNA sense strand
ugugacagcguaugugaug

SEQ ID NO: 1611920 - RNA, 19 nt, Homo sapiens
  misc_RNA (1)...(19): siRNA sense strand
gcaucccggucgcugauac

SEQ ID NO: 1611921 - RNA, 19 nt, Homo sapiens
  misc_RNA (1)...(19): siRNA sense strand
uuaggcagcagcuugaaga

SEQ ID NO: 1611922 - RNA, 19 nt, Homo sapiens
  misc_RNA (1)...(19): siRNA sense strand
gcguaugugaugacuguga

SEQ ID NO: 1611923 - RNA, 19 nt, Homo sapiens
  misc_RNA (1)...(19): siRNA sense strand
auccacugcugccgccuua

SEQ ID NO: 1611924 - RNA, 19 nt, Homo sapiens
  misc_RNA (1)...(19): siRNA sense strand
gggccgaaauaagaucaca

SEQ ID NO: 1611925 - RNA, 19 nt, Homo sapiens
  misc_RNA (1)...(19): siRNA sense strand
aaaagcacuucaaagaaug

SEQ ID NO: 1611926 - RNA, 19 nt, Homo sapiens
  misc_RNA (1)...(19): siRNA sense strand
ccucggaaacuucauugau

SEQ ID NO: 1611927 - RNA, 19 nt, Homo sapiens
  misc_RNA (1)...(19): siRNA sense strand
gccgaaauaagaucacaca

SEQ ID NO: 1611928 - RNA, 19 nt, Homo sapiens
  misc_RNA (1)...(19): siRNA sense strand
ggcagcagcuugaagaguu

SEQ ID NO: 1611929 - RNA, 19 nt, Homo sapiens
  misc_RNA (1)...(19): siRNA sense strand
gcagcagcuugaagaguuu

SEQ ID NO: 1611930 - RNA, 19 nt, Homo sapiens
  misc_RNA (1)...(19): siRNA sense strand
gcuuuaggcagcagcuuga

SEQ ID NO: 1611931 - RNA, 19 nt, Homo sapiens
  misc_RNA (1)...(19): siRNA sense strand
uuaggcagcagcuugaaga

SEQ ID NO: 1611932 - RNA, 19 nt, Homo sapiens
  misc_RNA (1)...(19): siRNA sense strand
gaaacgagcccgcaucaaa

SEQ ID NO: 1611933 - RNA, 19 nt, Homo sapiens
  misc_RNA (1)...(19): siRNA sense strand
gaaaucuucccgaucguua

SEQ ID NO: 1611934 - RNA, 19 nt, Homo sapiens
  misc_RNA (1)...(19): siRNA sense strand
gguaguagauuccauggau

SEQ ID NO: 1611935 - RNA, 19 nt, Homo sapiens
  misc_RNA (1)...(19): siRNA sense strand
gaaggaaaauuuagagaga

SEQ ID NO: 1611936 - RNA, 19 nt, Homo sapiens
  misc_RNA (1)...(19): siRNA sense strand
gcgguuagauaagguagua

SEQ ID NO: 1611937 - RNA, 19 nt, Homo sapiens
  misc_RNA (1)...(19): siRNA sense strand
guccagagcgguuagauaa

SEQ ID NO: 1611938 - RNA, 19 nt, Homo sapiens
  misc_RNA (1)...(19): siRNA sense strand
uagauaagguaguagauuc

SEQ ID NO: 1611939 - RNA, 19 nt, Homo sapiens
  misc_RNA (1)...(19): siRNA sense strand
gguuauaccuuggcaccua

SEQ ID NO: 1611940 - RNA, 19 nt, Homo sapiens
  misc_RNA (1)...(19): siRNA sense strand
gaaagaaagaaacaugcuu

SEQ ID NO: 1611941 - RNA, 19 nt, Homo sapiens
  misc_RNA (1)...(19): siRNA sense strand
agauaaaguuguccaggaa

SEQ ID NO: 1611942 - RNA, 19 nt, Homo sapiens
  misc_RNA (1)...(19): siRNA sense strand
gaagaaucaucuggcacaa

SEQ ID NO: 1611943 - RNA, 19 nt, Homo sapiens
  misc_RNA (1)...(19): siRNA sense strand
caauaggaaacgauucuuu

SEQ ID NO: 1611944 - RNA, 19 nt, Homo sapiens
  misc_RNA (1)...(19): siRNA sense strand
agaaucaucuggcacaagu

SEQ ID NO: 1611945 - RNA, 19 nt, Homo sapiens
  misc_RNA (1)...(19): siRNA sense strand
ugccuuauguggaccauuu

SEQ ID NO: 1611946 - RNA, 19 nt, Homo sapiens
  misc_RNA (1)...(19): siRNA sense strand
uaccuuggcaccuaaauaa

SEQ ID NO: 1611947 - RNA, 19 nt, Homo sapiens
  misc_RNA (1)...(19): siRNA sense strand
ucagacuggucaagaaaga

SEQ ID NO: 1611948 - RNA, 19 nt, Homo sapiens
  misc_RNA (1)...(19): siRNA sense strand
uagauuccauggaugcauu

SEQ ID NO: 1611949 - RNA, 19 nt, Homo sapiens
  misc_RNA (1)...(19): siRNA sense strand
cauccgcccugaaaucuuc

SEQ ID NO: 1611950 - RNA, 19 nt, Homo sapiens
  misc_RNA (1)...(19): siRNA sense strand
gagaaacgagcccgcauca

SEQ ID NO: 1611951 - RNA, 19 nt, Homo sapiens
  misc_RNA (1)...(19): siRNA sense strand
guuauaccuuggcaccuaa

SEQ ID NO: 1611952 - RNA, 19 nt, Homo sapiens
  misc_RNA (1)...(19): siRNA sense strand
gauacaauaggaaacgauu

SEQ ID NO: 1611953 - RNA, 19 nt, Homo sapiens
  misc_RNA (1)...(19): siRNA sense strand
caucaaagcacggaaggaa

SEQ ID NO: 1611954 - RNA, 19 nt, Homo sapiens
  misc_RNA (1)...(19): siRNA sense strand
aagagaagaugcccuaagg

SEQ ID NO: 1611955 - RNA, 19 nt, Homo sapiens
  misc_RNA (1)...(19): siRNA sense strand
caacuaaggaacaaaagua

SEQ ID NO: 1611956 - RNA, 19 nt, Homo sapiens
  misc_RNA (1)...(19): siRNA sense strand
gcccuaaggcuucuucaga

SEQ ID NO: 1611957 - RNA, 19 nt, Homo sapiens
  misc_RNA (1)...(19): siRNA sense strand
gauaaaguuguccaggaaa

SEQ ID NO: 1611958 - RNA, 19 nt, Homo sapiens
  misc_RNA (1)...(19): siRNA sense strand
ccauggaugcauuagauaa

SEQ ID NO: 1611959 - RNA, 19 nt, Homo sapiens
  misc_RNA (1)...(19): siRNA sense strand
gaaagagaagaugcccuaa

SEQ ID NO: 1611960 - RNA, 19 nt, Homo sapiens
  misc_RNA (1)...(19): siRNA sense strand
ccagagcgguuagauaagg

SEQ ID NO: 1611961 - RNA, 19 nt, Homo sapiens
  misc_RNA (1)...(19): siRNA sense strand
gguuuggcccuucuuugua

SEQ ID NO: 1611962 - RNA, 19 nt, Homo sapiens
  misc_RNA (1)...(19): siRNA sense strand
cauggaugcauuagauaaa

SEQ ID NO: 1611963 - RNA, 19 nt, Homo sapiens
  misc_RNA (1)...(19): siRNA sense strand
aauaggaaacgauucuuug

SEQ ID NO: 1611964 - RNA, 19 nt, Homo sapiens
  misc_RNA (1)...(19): siRNA sense strand
guuuggcccuucuuuguag

SEQ ID NO: 1611965 - RNA, 19 nt, Homo sapiens
  misc_RNA (1)...(19): siRNA sense strand
ggaugcauuagauaaaguu

SEQ ID NO: 1611966 - RNA, 19 nt, Homo sapiens
  misc_RNA (1)...(19): siRNA sense strand
gcaccuaaauaaaagauac

SEQ ID NO: 1611967 - RNA, 19 nt, Homo sapiens
  misc_RNA (1)...(19): siRNA sense strand
aaacgagcccgcaucaaag

SEQ ID NO: 1611968 - RNA, 19 nt, Homo sapiens
  misc_RNA (1)...(19): siRNA sense strand
uuccauggaugcauuagau

SEQ ID NO: 1611969 - RNA, 19 nt, Homo sapiens
  misc_RNA (1)...(19): siRNA sense strand
ugguaugucuuacugaaag

SEQ ID NO: 1611970 - RNA, 19 nt, Homo sapiens
  misc_RNA (1)...(19): siRNA sense strand
ucuucccgaucguuaauaa

SEQ ID NO: 1611971 - RNA, 19 nt, Homo sapiens
  misc_RNA (1)...(19): siRNA sense strand
guucaagcaguggguuaua

SEQ ID NO: 1611972 - RNA, 19 nt, Homo sapiens
  misc_RNA (1)...(19): siRNA sense strand
gagcagcauggaccuguca

SEQ ID NO: 1611973 - RNA, 19 nt, Homo sapiens
  misc_RNA (1)...(19): siRNA sense strand
uuugguaugucuuacugaa

SEQ ID NO: 1611974 - RNA, 19 nt, Homo sapiens
  misc_RNA (1)...(19): siRNA sense strand
uaaaguuguccaggaaaga

SEQ ID NO: 1611975 - RNA, 19 nt, Homo sapiens
  misc_RNA (1)...(19): siRNA sense strand
ugcauuagauaaaguuguc

SEQ ID NO: 1611976 - RNA, 19 nt, Homo sapiens
  misc_RNA (1)...(19): siRNA sense strand
gguuagauaagguaguaga

SEQ ID NO: 1611977 - RNA, 19 nt, Homo sapiens
  misc_RNA (1)...(19): siRNA sense strand
ggaccugucagcaacuaag

SEQ ID NO: 1611978 - RNA, 19 nt, Homo sapiens
  misc_RNA (1)...(19): siRNA sense strand
cagacuggaacgugagaaa

SEQ ID NO: 1611979 - RNA, 19 nt, Homo sapiens
  misc_RNA (1)...(19): siRNA sense strand
ggaacaaaaguaaugaaga

SEQ ID NO: 1611980 - RNA, 19 nt, Homo sapiens
  misc_RNA (1)...(19): siRNA sense strand
auaaaguuguccaggaaag

SEQ ID NO: 1611981 - RNA, 19 nt, Homo sapiens
  misc_RNA (1)...(19): siRNA sense strand
gauucuuugccuugccuua

SEQ ID NO: 1611982 - RNA, 19 nt, Homo sapiens
  misc_RNA (1)...(19): siRNA sense strand
gucagcaacuaaggaacaa

SEQ ID NO: 1611983 - RNA, 19 nt, Homo sapiens
  misc_RNA (1)...(19): siRNA sense strand
uuagagagaaagaaagcaa

SEQ ID NO: 1611984 - RNA, 19 nt, Homo sapiens
  misc_RNA (1)...(19): siRNA sense strand
ucaaagcacggaaggaaaa

SEQ ID NO: 1611985 - RNA, 19 nt, Homo sapiens
  misc_RNA (1)...(19): siRNA sense strand
uagagagaaagaaagcaaa

SEQ ID NO: 1611986 - RNA, 19 nt, Homo sapiens
  misc_RNA (1)...(19): siRNA sense strand
gccaaguccagagcgguua

SEQ ID NO: 1611987 - RNA, 19 nt, Homo sapiens
  misc_RNA (1)...(19): siRNA sense strand
gaaacgagcccgcaucaaa

SEQ ID NO: 1611988 - RNA, 19 nt, Homo sapiens
  misc_RNA (1)...(19): siRNA sense strand
gguaguagauuccauggau

SEQ ID NO: 1611989 - RNA, 19 nt, Homo sapiens
  misc_RNA (1)...(19): siRNA sense strand
gaaggaaaauuuagagaga

SEQ ID NO: 1611990 - RNA, 19 nt, Homo sapiens
  misc_RNA (1)...(19): siRNA sense strand
gcgguuagauaagguagua

SEQ ID NO: 1611991 - RNA, 19 nt, Homo sapiens
  misc_RNA (1)...(19): siRNA sense strand
guccagagcgguuagauaa

SEQ ID NO: 1611992 - RNA, 19 nt, Homo sapiens
  misc_RNA (1)...(19): siRNA sense strand
uagauaagguaguagauuc

SEQ ID NO: 1611993 - RNA, 19 nt, Homo sapiens
  misc_RNA (1)...(19): siRNA sense strand
gguuauaccuuggcaccua

SEQ ID NO: 1611994 - RNA, 19 nt, Homo sapiens
  misc_RNA (1)...(19): siRNA sense strand
agauaaaguuguccaggaa

SEQ ID NO: 1611995 - RNA, 19 nt, Homo sapiens
  misc_RNA (1)...(19): siRNA sense strand
gaagaaucaucuggcacaa

SEQ ID NO: 1611996 - RNA, 19 nt, Homo sapiens
  misc_RNA (1)...(19): siRNA sense strand
caauaggaaacgauucuuu

SEQ ID NO: 1611997 - RNA, 19 nt, Homo sapiens
  misc_RNA (1)...(19): siRNA sense strand
agaaucaucuggcacaagu

SEQ ID NO: 1611998 - RNA, 19 nt, Homo sapiens
  misc_RNA (1)...(19): siRNA sense strand
ugccuuauguggaccauuu

SEQ ID NO: 1611999 - RNA, 19 nt, Homo sapiens
  misc_RNA (1)...(19): siRNA sense strand
uaccuuggcaccuaaauaa

SEQ ID NO: 1612000 - RNA, 19 nt, Homo sapiens
  misc_RNA (1)...(19): siRNA sense strand
ucagacuggucaagaaaga

SEQ ID NO: 1612001 - RNA, 19 nt, Homo sapiens
  misc_RNA (1)...(19): siRNA sense strand
uagauuccauggaugcauu

SEQ ID NO: 1612002 - RNA, 19 nt, Homo sapiens
  misc_RNA (1)...(19): siRNA sense strand
guuauaccuuggcaccuaa

SEQ ID NO: 1612003 - RNA, 19 nt, Homo sapiens
  misc_RNA (1)...(19): siRNA sense strand
gagaaacgagcccgcauca

SEQ ID NO: 1612004 - RNA, 19 nt, Homo sapiens
  misc_RNA (1)...(19): siRNA sense strand
gauacaauaggaaacgauu

SEQ ID NO: 1612005 - RNA, 19 nt, Homo sapiens
  misc_RNA (1)...(19): siRNA sense strand
caucaaagcacggaaggaa

SEQ ID NO: 1612006 - RNA, 19 nt, Homo sapiens
  misc_RNA (1)...(19): siRNA sense strand
aagagaagaugcccuaagg

SEQ ID NO: 1612007 - RNA, 19 nt, Homo sapiens
  misc_RNA (1)...(19): siRNA sense strand
gcccuaaggcuucuucaga

SEQ ID NO: 1612008 - RNA, 19 nt, Homo sapiens
  misc_RNA (1)...(19): siRNA sense strand
gauaaaguuguccaggaaa

SEQ ID NO: 1612009 - RNA, 19 nt, Homo sapiens
  misc_RNA (1)...(19): siRNA sense strand
ccauggaugcauuagauaa

SEQ ID NO: 1612010 - RNA, 19 nt, Homo sapiens
  misc_RNA (1)...(19): siRNA sense strand
gaaagagaagaugcccuaa

SEQ ID NO: 1612011 - RNA, 19 nt, Homo sapiens
  misc_RNA (1)...(19): siRNA sense strand
ccagagcgguuagauaagg

SEQ ID NO: 1612012 - RNA, 19 nt, Homo sapiens
  misc_RNA (1)...(19): siRNA sense strand
cauggaugcauuagauaaa

SEQ ID NO: 1612013 - RNA, 19 nt, Homo sapiens
  misc_RNA (1)...(19): siRNA sense strand
aauaggaaacgauucuuug

SEQ ID NO: 1612014 - RNA, 19 nt, Homo sapiens
  misc_RNA (1)...(19): siRNA sense strand
ggaugcauuagauaaaguu

SEQ ID NO: 1612015 - RNA, 19 nt, Homo sapiens
  misc_RNA (1)...(19): siRNA sense strand
gcaccuaaauaaaagauac

SEQ ID NO: 1612016 - RNA, 19 nt, Homo sapiens
  misc_RNA (1)...(19): siRNA sense strand
aaacgagcccgcaucaaag

SEQ ID NO: 1612017 - RNA, 19 nt, Homo sapiens
  misc_RNA (1)...(19): siRNA sense strand
uuccauggaugcauuagau

SEQ ID NO: 1612018 - RNA, 19 nt, Homo sapiens
  misc_RNA (1)...(19): siRNA sense strand
guucaagcaguggguuaua

SEQ ID NO: 1612019 - RNA, 19 nt, Homo sapiens
  misc_RNA (1)...(19): siRNA sense strand
ugcauuagauaaaguuguc

SEQ ID NO: 1612020 - RNA, 19 nt, Homo sapiens
  misc_RNA (1)...(19): siRNA sense strand
gguuagauaagguaguaga

SEQ ID NO: 1612021 - RNA, 19 nt, Homo sapiens
  misc_RNA (1)...(19): siRNA sense strand
uaaaguuguccaggaaaga

SEQ ID NO: 1612022 - RNA, 19 nt, Homo sapiens
  misc_RNA (1)...(19): siRNA sense strand
auaaaguuguccaggaaag

SEQ ID NO: 1612023 - RNA, 19 nt, Homo sapiens
  misc_RNA (1)...(19): siRNA sense strand
cagacuggaacgugagaaa

SEQ ID NO: 1612024 - RNA, 19 nt, Homo sapiens
  misc_RNA (1)...(19): siRNA sense strand
gauucuuugccuugccuua

SEQ ID NO: 1612025 - RNA, 19 nt, Homo sapiens
  misc_RNA (1)...(19): siRNA sense strand
uuagagagaaagaaagcaa

SEQ ID NO: 1612026 - RNA, 19 nt, Homo sapiens
  misc_RNA (1)...(19): siRNA sense strand
ucaaagcacggaaggaaaa

SEQ ID NO: 1612027 - RNA, 19 nt, Homo sapiens
  misc_RNA (1)...(19): siRNA sense strand
uagagagaaagaaagcaaa

SEQ ID NO: 1612028 - RNA, 19 nt, Homo sapiens
  misc_RNA (1)...(19): siRNA sense strand
gccaaguccagagcgguua

SEQ ID NO: 1612029 - RNA, 19 nt, Homo sapiens
  misc_RNA (1)...(19): siRNA sense strand
ggaaauagauggcgauaaa

SEQ ID NO: 1612030 - RNA, 19 nt, Homo sapiens
  misc_RNA (1)...(19): siRNA sense strand
gcaagaauaugaagaagga

SEQ ID NO: 1612031 - RNA, 19 nt, Homo sapiens
  misc_RNA (1)...(19): siRNA sense strand
caacaucccugccuucuuc

SEQ ID NO: 1612032 - RNA, 19 nt, Homo sapiens
  misc_RNA (1)...(19): siRNA sense strand
ggaagcacauuaauggaaa

SEQ ID NO: 1612033 - RNA, 19 nt, Homo sapiens
  misc_RNA (1)...(19): siRNA sense strand
gcacauuaauggaaauaga

SEQ ID NO: 1612034 - RNA, 19 nt, Homo sapiens
  misc_RNA (1)...(19): siRNA sense strand
gaacggagguuuagcucau

SEQ ID NO: 1612035 - RNA, 19 nt, Homo sapiens
  misc_RNA (1)...(19): siRNA sense strand
ugacagaguuaauguuuga

SEQ ID NO: 1612036 - RNA, 19 nt, Homo sapiens
  misc_RNA (1)...(19): siRNA sense strand
gcaaagagagagaaacuga

SEQ ID NO: 1612037 - RNA, 19 nt, Homo sapiens
  misc_RNA (1)...(19): siRNA sense strand
gcuggagacuuuauuacua

SEQ ID NO: 1612038 - RNA, 19 nt, Homo sapiens
  misc_RNA (1)...(19): siRNA sense strand
gaagcaguguguagaaaga

SEQ ID NO: 1612039 - RNA, 19 nt, Homo sapiens
  misc_RNA (1)...(19): siRNA sense strand
ggaaacacacuaauacaga

SEQ ID NO: 1612040 - RNA, 19 nt, Homo sapiens
  misc_RNA (1)...(19): siRNA sense strand
gaaguuggagcccuuguuu

SEQ ID NO: 1612041 - RNA, 19 nt, Homo sapiens
  misc_RNA (1)...(19): siRNA sense strand
gaugccaacuguucauuau

SEQ ID NO: 1612042 - RNA, 19 nt, Homo sapiens
  misc_RNA (1)...(19): siRNA sense strand
ggucuuggcacaauuauau

SEQ ID NO: 1612043 - RNA, 19 nt, Homo sapiens
  misc_RNA (1)...(19): siRNA sense strand
acaaguggcugcacagaug

SEQ ID NO: 1612044 - RNA, 19 nt, Homo sapiens
  misc_RNA (1)...(19): siRNA sense strand
ugaauugguuccuccauau

SEQ ID NO: 1612045 - RNA, 19 nt, Homo sapiens
  misc_RNA (1)...(19): siRNA sense strand
gcagagcggcuaaagauuc

SEQ ID NO: 1612046 - RNA, 19 nt, Homo sapiens
  misc_RNA (1)...(19): siRNA sense strand
caaaaugcaugucaaauca

SEQ ID NO: 1612047 - RNA, 19 nt, Homo sapiens
  misc_RNA (1)...(19): siRNA sense strand
gcuaaagauuccagaagga

SEQ ID NO: 1612048 - RNA, 19 nt, Homo sapiens
  misc_RNA (1)...(19): siRNA sense strand
gagaaguugccucagguua

SEQ ID NO: 1612049 - RNA, 19 nt, Homo sapiens
  misc_RNA (1)...(19): siRNA sense strand
gacauuggauccuauacug

SEQ ID NO: 1612050 - RNA, 19 nt, Homo sapiens
  misc_RNA (1)...(19): siRNA sense strand
gaauugguuccuccauaua

SEQ ID NO: 1612051 - RNA, 19 nt, Homo sapiens
  misc_RNA (1)...(19): siRNA sense strand
caaguaugcgguugaaauu

SEQ ID NO: 1612052 - RNA, 19 nt, Homo sapiens
  misc_RNA (1)...(19): siRNA sense strand
ggaggaaacacacuaauac

SEQ ID NO: 1612053 - RNA, 19 nt, Homo sapiens
  misc_RNA (1)...(19): siRNA sense strand
aaagauuccagaaggauua

SEQ ID NO: 1612054 - RNA, 19 nt, Homo sapiens
  misc_RNA (1)...(19): siRNA sense strand
gggaagcaguguguagaaa

SEQ ID NO: 1612055 - RNA, 19 nt, Homo sapiens
  misc_RNA (1)...(19): siRNA sense strand
ugaaggaucuccagcaaac

SEQ ID NO: 1612056 - RNA, 19 nt, Homo sapiens
  misc_RNA (1)...(19): siRNA sense strand
caagcaagaauaugaagaa

SEQ ID NO: 1612057 - RNA, 19 nt, Homo sapiens
  misc_RNA (1)...(19): siRNA sense strand
ccuacuacauagauacuaa

SEQ ID NO: 1612058 - RNA, 19 nt, Homo sapiens
  misc_RNA (1)...(19): siRNA sense strand
guaaagggguuaucaggaa

SEQ ID NO: 1612059 - RNA, 19 nt, Homo sapiens
  misc_RNA (1)...(19): siRNA sense strand
aaaagaagcuguucgugaa

SEQ ID NO: 1612060 - RNA, 19 nt, Homo sapiens
  misc_RNA (1)...(19): siRNA sense strand
gaggcaccguggaauacua

SEQ ID NO: 1612061 - RNA, 19 nt, Homo sapiens
  misc_RNA (1)...(19): siRNA sense strand
gaugacggaagcacauuaa

SEQ ID NO: 1612062 - RNA, 19 nt, Homo sapiens
  misc_RNA (1)...(19): siRNA sense strand
ggauuuccaagcaagaaua

SEQ ID NO: 1612063 - RNA, 19 nt, Homo sapiens
  misc_RNA (1)...(19): siRNA sense strand
gcaggaggaaacacacuaa

SEQ ID NO: 1612064 - RNA, 19 nt, Homo sapiens
  misc_RNA (1)...(19): siRNA sense strand
ugggauaguuuccaagcua

SEQ ID NO: 1612065 - RNA, 19 nt, Homo sapiens
  misc_RNA (1)...(19): siRNA sense strand
guugaagacugggauaguu

SEQ ID NO: 1612066 - RNA, 19 nt, Homo sapiens
  misc_RNA (1)...(19): siRNA sense strand
gaagcacauuaauggaaau

SEQ ID NO: 1612067 - RNA, 19 nt, Homo sapiens
  misc_RNA (1)...(19): siRNA sense strand
agguuuagcucauggauug

SEQ ID NO: 1612068 - RNA, 19 nt, Homo sapiens
  misc_RNA (1)...(19): siRNA sense strand
aguaugcgguugaaauuga

SEQ ID NO: 1612069 - RNA, 19 nt, Homo sapiens
  misc_RNA (1)...(19): siRNA sense strand
gaucauaccuacaaaaugc

SEQ ID NO: 1612070 - RNA, 19 nt, Homo sapiens
  misc_RNA (1)...(19): siRNA sense strand
gguugaaauugauugcaaa

SEQ ID NO: 1612071 - RNA, 19 nt, Homo sapiens
  misc_RNA (1)...(19): siRNA sense strand
ccaaguaugcgguugaaau

SEQ ID NO: 1612072 - RNA, 19 nt, Homo sapiens
  misc_RNA (1)...(19): siRNA sense strand
guugggaugugugauauug

SEQ ID NO: 1612073 - RNA, 19 nt, Homo sapiens
  misc_RNA (1)...(19): siRNA sense strand
gugcagagcggcuaaagau

SEQ ID NO: 1612074 - RNA, 19 nt, Homo sapiens
  misc_RNA (1)...(19): siRNA sense strand
cuacauagauacuaaugcu

SEQ ID NO: 1612075 - RNA, 19 nt, Homo sapiens
  misc_RNA (1)...(19): siRNA sense strand
gcuccauucuagccucuuu

SEQ ID NO: 1612076 - RNA, 19 nt, Homo sapiens
  misc_RNA (1)...(19): siRNA sense strand
ucagaggcaccguggaaua

SEQ ID NO: 1612077 - RNA, 19 nt, Homo sapiens
  misc_RNA (1)...(19): siRNA sense strand
gaacaaguggcugcacaga

SEQ ID NO: 1612078 - RNA, 19 nt, Homo sapiens
  misc_RNA (1)...(19): siRNA sense strand
cagauucaacuuaugauga

SEQ ID NO: 1612079 - RNA, 19 nt, Homo sapiens
  misc_RNA (1)...(19): siRNA sense strand
aaaugcaugucaaaucaga

SEQ ID NO: 1612080 - RNA, 19 nt, Homo sapiens
  misc_RNA (1)...(19): siRNA sense strand
gacggaagcacauuaaugg

SEQ ID NO: 1612081 - RNA, 19 nt, Homo sapiens
  misc_RNA (1)...(19): siRNA sense strand
gaaaacuccuccaaguaug

SEQ ID NO: 1612082 - RNA, 19 nt, Homo sapiens
  misc_RNA (1)...(19): siRNA sense strand
gauuccagaaggauuauuu

SEQ ID NO: 1612083 - RNA, 19 nt, Homo sapiens
  misc_RNA (1)...(19): siRNA sense strand
cgaggucuuggcacaauua

SEQ ID NO: 1612084 - RNA, 19 nt, Homo sapiens
  misc_RNA (1)...(19): siRNA sense strand
uugaauugguuccuccaua

SEQ ID NO: 1612085 - RNA, 19 nt, Homo sapiens
  misc_RNA (1)...(19): siRNA sense strand
gagcaaagagagagaaacu

SEQ ID NO: 1612086 - RNA, 19 nt, Homo sapiens
  misc_RNA (1)...(19): siRNA sense strand
acacacuaauacagaguuu

SEQ ID NO: 1612087 - RNA, 19 nt, Homo sapiens
  misc_RNA (1)...(19): siRNA sense strand
gaaaagaaaagagaaguug

SEQ ID NO: 1612088 - RNA, 19 nt, Homo sapiens
  misc_RNA (1)...(19): siRNA sense strand
cuggagacuuuauuacuau

SEQ ID NO: 1612089 - RNA, 19 nt, Homo sapiens
  misc_RNA (1)...(19): siRNA sense strand
agacugggauaguuuccaa

SEQ ID NO: 1612090 - RNA, 19 nt, Homo sapiens
  misc_RNA (1)...(19): siRNA sense strand
gaggaaacacacuaauaca

SEQ ID NO: 1612091 - RNA, 19 nt, Homo sapiens
  misc_RNA (1)...(19): siRNA sense strand
gaaguugccucagguuacg

SEQ ID NO: 1612092 - RNA, 19 nt, Homo sapiens
  misc_RNA (1)...(19): siRNA sense strand
ugacggaagcacauuaaug

SEQ ID NO: 1612093 - RNA, 19 nt, Homo sapiens
  misc_RNA (1)...(19): siRNA sense strand
ggucccaccuacuacauag

SEQ ID NO: 1612094 - RNA, 19 nt, Homo sapiens
  misc_RNA (1)...(19): siRNA sense strand
cgugaaggaucuccagcaa

SEQ ID NO: 1612095 - RNA, 19 nt, Homo sapiens
  misc_RNA (1)...(19): siRNA sense strand
aaaaugggaugguugaaga

SEQ ID NO: 1612096 - RNA, 19 nt, Homo sapiens
  misc_RNA (1)...(19): siRNA sense strand
uuggguaccuuucaacaga

SEQ ID NO: 1612097 - RNA, 19 nt, Homo sapiens
  misc_RNA (1)...(19): siRNA sense strand
uaaagauuccagaaggauu

SEQ ID NO: 1612098 - RNA, 19 nt, Homo sapiens
  misc_RNA (1)...(19): siRNA sense strand
gcuaauggucguucuacug

SEQ ID NO: 1612099 - RNA, 19 nt, Homo sapiens
  misc_RNA (1)...(19): siRNA sense strand
ggagggaagcaguguguag

SEQ ID NO: 1612100 - RNA, 19 nt, Homo sapiens
  misc_RNA (1)...(19): siRNA sense strand
aggaggaaacacacuaaua

SEQ ID NO: 1612101 - RNA, 19 nt, Homo sapiens
  misc_RNA (1)...(19): siRNA sense strand
ugugagagcugguuaugcu

SEQ ID NO: 1612102 - RNA, 19 nt, Homo sapiens
  misc_RNA (1)...(19): siRNA sense strand
guuccuccauauaugauug

SEQ ID NO: 1612103 - RNA, 19 nt, Homo sapiens
  misc_RNA (1)...(19): siRNA sense strand
ugucagauucaacuuauga

SEQ ID NO: 1612104 - RNA, 19 nt, Homo sapiens
  misc_RNA (1)...(19): siRNA sense strand
ggaagcaguguguagaaag

SEQ ID NO: 1612105 - RNA, 19 nt, Homo sapiens
  misc_RNA (1)...(19): siRNA sense strand
gagacuuuauuacuaugca

SEQ ID NO: 1612106 - RNA, 19 nt, Homo sapiens
  misc_RNA (1)...(19): siRNA sense strand
gauuggcggcuccauucua

SEQ ID NO: 1612107 - RNA, 19 nt, Homo sapiens
  misc_RNA (1)...(19): siRNA sense strand
acaguggaacggagguuua

SEQ ID NO: 1612108 - RNA, 19 nt, Homo sapiens
  misc_RNA (1)...(19): siRNA sense strand
ucagaaaacuccuccaagu

SEQ ID NO: 1612109 - RNA, 19 nt, Homo sapiens
  misc_RNA (1)...(19): siRNA sense strand
guauggugguagaaagaga

SEQ ID NO: 1612110 - RNA, 19 nt, Homo sapiens
  misc_RNA (1)...(19): siRNA sense strand
cggaagcacauuaauggaa

SEQ ID NO: 1612111 - RNA, 19 nt, Homo sapiens
  misc_RNA (1)...(19): siRNA sense strand
uauuugacccuuccaaugu

SEQ ID NO: 1612112 - RNA, 19 nt, Homo sapiens
  misc_RNA (1)...(19): siRNA sense strand
gagggaagcaguguguaga

SEQ ID NO: 1612113 - RNA, 19 nt, Homo sapiens
  misc_RNA (1)...(19): siRNA sense strand
aaagagagagaaacugaca

SEQ ID NO: 1612114 - RNA, 19 nt, Homo sapiens
  misc_RNA (1)...(19): siRNA sense strand
gaaauagauggcgauaaag

SEQ ID NO: 1612115 - RNA, 19 nt, Homo sapiens
  misc_RNA (1)...(19): siRNA sense strand
agugucagauucaacuuau

SEQ ID NO: 1612116 - RNA, 19 nt, Homo sapiens
  misc_RNA (1)...(19): siRNA sense strand
cgauggcuauguccuucaa

SEQ ID NO: 1612117 - RNA, 19 nt, Homo sapiens
  misc_RNA (1)...(19): siRNA sense strand
uuacugacagguugaauag

SEQ ID NO: 1612118 - RNA, 19 nt, Homo sapiens
  misc_RNA (1)...(19): siRNA sense strand
cgguugaaauugauugcaa

SEQ ID NO: 1612119 - RNA, 19 nt, Homo sapiens
  misc_RNA (1)...(19): siRNA sense strand
caagcuauuuuggaucaua

SEQ ID NO: 1612120 - RNA, 19 nt, Homo sapiens
  misc_RNA (1)...(19): siRNA sense strand
cuacugggcugauuuugga

SEQ ID NO: 1612121 - RNA, 19 nt, Homo sapiens
  misc_RNA (1)...(19): siRNA sense strand
acugacagaguuaauguuu

SEQ ID NO: 1612122 - RNA, 19 nt, Homo sapiens
  misc_RNA (1)...(19): siRNA sense strand
agagagagaaacugacaga

SEQ ID NO: 1612123 - RNA, 19 nt, Homo sapiens
  misc_RNA (1)...(19): siRNA sense strand
ucucuauggcaguguaaua

SEQ ID NO: 1612124 - RNA, 19 nt, Homo sapiens
  misc_RNA (1)...(19): siRNA sense strand
agauggcgauaaaggcaaa

SEQ ID NO: 1612125 - RNA, 19 nt, Homo sapiens
  misc_RNA (1)...(19): siRNA sense strand
agagagaaacugacagagu

SEQ ID NO: 1612126 - RNA, 19 nt, Homo sapiens
  misc_RNA (1)...(19): siRNA sense strand
guaugcgguugaaauugau

SEQ ID NO: 1612127 - RNA, 19 nt, Homo sapiens
  misc_RNA (1)...(19): siRNA sense strand
acugacagguugaauagag

SEQ ID NO: 1612128 - RNA, 19 nt, Homo sapiens
  misc_RNA (1)...(19): siRNA sense strand
ccacucauaccacugcaau

SEQ ID NO: 1612129 - RNA, 19 nt, Homo sapiens
  misc_RNA (1)...(19): siRNA sense strand
ggaaauagauggcgauaaa

SEQ ID NO: 1612130 - RNA, 19 nt, Homo sapiens
  misc_RNA (1)...(19): siRNA sense strand
gcaagaauaugaagaagga

SEQ ID NO: 1612131 - RNA, 19 nt, Homo sapiens
  misc_RNA (1)...(19): siRNA sense strand
caacaucccugccuucuuc

SEQ ID NO: 1612132 - RNA, 19 nt, Homo sapiens
  misc_RNA (1)...(19): siRNA sense strand
ggaagcacauuaauggaaa

SEQ ID NO: 1612133 - RNA, 19 nt, Homo sapiens
  misc_RNA (1)...(19): siRNA sense strand
gcacauuaauggaaauaga

SEQ ID NO: 1612134 - RNA, 19 nt, Homo sapiens
  misc_RNA (1)...(19): siRNA sense strand
gaacggagguuuagcucau

SEQ ID NO: 1612135 - RNA, 19 nt, Homo sapiens
  misc_RNA (1)...(19): siRNA sense strand
ugacagaguuaauguuuga

SEQ ID NO: 1612136 - RNA, 19 nt, Homo sapiens
  misc_RNA (1)...(19): siRNA sense strand
gcaaagagagagaaacuga

SEQ ID NO: 1612137 - RNA, 19 nt, Homo sapiens
  misc_RNA (1)...(19): siRNA sense strand
gcuggagacuuuauuacua

SEQ ID NO: 1612138 - RNA, 19 nt, Homo sapiens
  misc_RNA (1)...(19): siRNA sense strand
gaagcaguguguagaaaga

SEQ ID NO: 1612139 - RNA, 19 nt, Homo sapiens
  misc_RNA (1)...(19): siRNA sense strand
ggaaacacacuaauacaga

SEQ ID NO: 1612140 - RNA, 19 nt, Homo sapiens
  misc_RNA (1)...(19): siRNA sense strand
gaugccaacuguucauuau

SEQ ID NO: 1612141 - RNA, 19 nt, Homo sapiens
  misc_RNA (1)...(19): siRNA sense strand
ggucuuggcacaauuauau

SEQ ID NO: 1612142 - RNA, 19 nt, Homo sapiens
  misc_RNA (1)...(19): siRNA sense strand
acaaguggcugcacagaug

SEQ ID NO: 1612143 - RNA, 19 nt, Homo sapiens
  misc_RNA (1)...(19): siRNA sense strand
ugaauugguuccuccauau

SEQ ID NO: 1612144 - RNA, 19 nt, Homo sapiens
  misc_RNA (1)...(19): siRNA sense strand
gcagagcggcuaaagauuc

SEQ ID NO: 1612145 - RNA, 19 nt, Homo sapiens
  misc_RNA (1)...(19): siRNA sense strand
caaaaugcaugucaaauca

SEQ ID NO: 1612146 - RNA, 19 nt, Homo sapiens
  misc_RNA (1)...(19): siRNA sense strand
gcuaaagauuccagaagga

SEQ ID NO: 1612147 - RNA, 19 nt, Homo sapiens
  misc_RNA (1)...(19): siRNA sense strand
gagaaguugccucagguua

SEQ ID NO: 1612148 - RNA, 19 nt, Homo sapiens
  misc_RNA (1)...(19): siRNA sense strand
gaauugguuccuccauaua

SEQ ID NO: 1612149 - RNA, 19 nt, Homo sapiens
  misc_RNA (1)...(19): siRNA sense strand
caaguaugcgguugaaauu

SEQ ID NO: 1612150 - RNA, 19 nt, Homo sapiens
  misc_RNA (1)...(19): siRNA sense strand
ggaggaaacacacuaauac

SEQ ID NO: 1612151 - RNA, 19 nt, Homo sapiens
  misc_RNA (1)...(19): siRNA sense strand
aaagauuccagaaggauua

SEQ ID NO: 1612152 - RNA, 19 nt, Homo sapiens
  misc_RNA (1)...(19): siRNA sense strand
gggaagcaguguguagaaa

SEQ ID NO: 1612153 - RNA, 19 nt, Homo sapiens
  misc_RNA (1)...(19): siRNA sense strand
ugaaggaucuccagcaaac

SEQ ID NO: 1612154 - RNA, 19 nt, Homo sapiens
  misc_RNA (1)...(19): siRNA sense strand
caagcaagaauaugaagaa

SEQ ID NO: 1612155 - RNA, 19 nt, Homo sapiens
  misc_RNA (1)...(19): siRNA sense strand
ccuacuacauagauacuaa

SEQ ID NO: 1612156 - RNA, 19 nt, Homo sapiens
  misc_RNA (1)...(19): siRNA sense strand
guaaagggguuaucaggaa

SEQ ID NO: 1612157 - RNA, 19 nt, Homo sapiens
  misc_RNA (1)...(19): siRNA sense strand
aaaagaagcuguucgugaa

SEQ ID NO: 1612158 - RNA, 19 nt, Homo sapiens
  misc_RNA (1)...(19): siRNA sense strand
gaggcaccguggaauacua

SEQ ID NO: 1612159 - RNA, 19 nt, Homo sapiens
  misc_RNA (1)...(19): siRNA sense strand
guugaagacugggauaguu

SEQ ID NO: 1612160 - RNA, 19 nt, Homo sapiens
  misc_RNA (1)...(19): siRNA sense strand
ggauuuccaagcaagaaua

SEQ ID NO: 1612161 - RNA, 19 nt, Homo sapiens
  misc_RNA (1)...(19): siRNA sense strand
gaugacggaagcacauuaa

SEQ ID NO: 1612162 - RNA, 19 nt, Homo sapiens
  misc_RNA (1)...(19): siRNA sense strand
gcaggaggaaacacacuaa

SEQ ID NO: 1612163 - RNA, 19 nt, Homo sapiens
  misc_RNA (1)...(19): siRNA sense strand
ugggauaguuuccaagcua

SEQ ID NO: 1612164 - RNA, 19 nt, Homo sapiens
  misc_RNA (1)...(19): siRNA sense strand
gaagcacauuaauggaaau

SEQ ID NO: 1612165 - RNA, 19 nt, Homo sapiens
  misc_RNA (1)...(19): siRNA sense strand
agguuuagcucauggauug

SEQ ID NO: 1612166 - RNA, 19 nt, Homo sapiens
  misc_RNA (1)...(19): siRNA sense strand
aguaugcgguugaaauuga

SEQ ID NO: 1612167 - RNA, 19 nt, Homo sapiens
  misc_RNA (1)...(19): siRNA sense strand
gaucauaccuacaaaaugc

SEQ ID NO: 1612168 - RNA, 19 nt, Homo sapiens
  misc_RNA (1)...(19): siRNA sense strand
gguugaaauugauugcaaa

SEQ ID NO: 1612169 - RNA, 19 nt, Homo sapiens
  misc_RNA (1)...(19): siRNA sense strand
ccaaguaugcgguugaaau

SEQ ID NO: 1612170 - RNA, 19 nt, Homo sapiens
  misc_RNA (1)...(19): siRNA sense strand
guugggaugugugauauug

SEQ ID NO: 1612171 - RNA, 19 nt, Homo sapiens
  misc_RNA (1)...(19): siRNA sense strand
gugcagagcggcuaaagau

SEQ ID NO: 1612172 - RNA, 19 nt, Homo sapiens
  misc_RNA (1)...(19): siRNA sense strand
cuacauagauacuaaugcu

SEQ ID NO: 1612173 - RNA, 19 nt, Homo sapiens
  misc_RNA (1)...(19): siRNA sense strand
gcuccauucuagccucuuu

SEQ ID NO: 1612174 - RNA, 19 nt, Homo sapiens
  misc_RNA (1)...(19): siRNA sense strand
ucagaggcaccguggaaua

SEQ ID NO: 1612175 - RNA, 19 nt, Homo sapiens
  misc_RNA (1)...(19): siRNA sense strand
gaacaaguggcugcacaga

SEQ ID NO: 1612176 - RNA, 19 nt, Homo sapiens
  misc_RNA (1)...(19): siRNA sense strand
cagauucaacuuaugauga

SEQ ID NO: 1612177 - RNA, 19 nt, Homo sapiens
  misc_RNA (1)...(19): siRNA sense strand
aaaugcaugucaaaucaga

SEQ ID NO: 1612178 - RNA, 19 nt, Homo sapiens
  misc_RNA (1)...(19): siRNA sense strand
gacggaagcacauuaaugg

SEQ ID NO: 1612179 - RNA, 19 nt, Homo sapiens
  misc_RNA (1)...(19): siRNA sense strand
gaaaacuccuccaaguaug

SEQ ID NO: 1612180 - RNA, 19 nt, Homo sapiens
  misc_RNA (1)...(19): siRNA sense strand
gauuccagaaggauuauuu

SEQ ID NO: 1612181 - RNA, 19 nt, Homo sapiens
  misc_RNA (1)...(19): siRNA sense strand
cgaggucuuggcacaauua

SEQ ID NO: 1612182 - RNA, 19 nt, Homo sapiens
  misc_RNA (1)...(19): siRNA sense strand
uugaauugguuccuccaua

SEQ ID NO: 1612183 - RNA, 19 nt, Homo sapiens
  misc_RNA (1)...(19): siRNA sense strand
gagcaaagagagagaaacu

SEQ ID NO: 1612184 - RNA, 19 nt, Homo sapiens
  misc_RNA (1)...(19): siRNA sense strand
acacacuaauacagaguuu

SEQ ID NO: 1612185 - RNA, 19 nt, Homo sapiens
  misc_RNA (1)...(19): siRNA sense strand
gaaaagaaaagagaaguug

SEQ ID NO: 1612186 - RNA, 19 nt, Homo sapiens
  misc_RNA (1)...(19): siRNA sense strand
cuggagacuuuauuacuau

SEQ ID NO: 1612187 - RNA, 19 nt, Homo sapiens
  misc_RNA (1)...(19): siRNA sense strand
agacugggauaguuuccaa

SEQ ID NO: 1612188 - RNA, 19 nt, Homo sapiens
  misc_RNA (1)...(19): siRNA sense strand
gaggaaacacacuaauaca

SEQ ID NO: 1612189 - RNA, 19 nt, Homo sapiens
  misc_RNA (1)...(19): siRNA sense strand
gaaguugccucagguuacg

SEQ ID NO: 1612190 - RNA, 19 nt, Homo sapiens
  misc_RNA (1)...(19): siRNA sense strand
ugacggaagcacauuaaug

SEQ ID NO: 1612191 - RNA, 19 nt, Homo sapiens
  misc_RNA (1)...(19): siRNA sense strand
cgugaaggaucuccagcaa

SEQ ID NO: 1612192 - RNA, 19 nt, Homo sapiens
  misc_RNA (1)...(19): siRNA sense strand
ggucccaccuacuacauag

SEQ ID NO: 1612193 - RNA, 19 nt, Homo sapiens
  misc_RNA (1)...(19): siRNA sense strand
aaaaugggaugguugaaga

SEQ ID NO: 1612194 - RNA, 19 nt, Homo sapiens
  misc_RNA (1)...(19): siRNA sense strand
uuggguaccuuucaacaga

SEQ ID NO: 1612195 - RNA, 19 nt, Homo sapiens
  misc_RNA (1)...(19): siRNA sense strand
uaaagauuccagaaggauu

SEQ ID NO: 1612196 - RNA, 19 nt, Homo sapiens
  misc_RNA (1)...(19): siRNA sense strand
gcuaauggucguucuacug

SEQ ID NO: 1612197 - RNA, 19 nt, Homo sapiens
  misc_RNA (1)...(19): siRNA sense strand
ggagggaagcaguguguag

SEQ ID NO: 1612198 - RNA, 19 nt, Homo sapiens
  misc_RNA (1)...(19): siRNA sense strand
aggaggaaacacacuaaua

SEQ ID NO: 1612199 - RNA, 19 nt, Homo sapiens
  misc_RNA (1)...(19): siRNA sense strand
guuccuccauauaugauug

SEQ ID NO: 1612200 - RNA, 19 nt, Homo sapiens
  misc_RNA (1)...(19): siRNA sense strand
ugucagauucaacuuauga

SEQ ID NO: 1612201 - RNA, 19 nt, Homo sapiens
  misc_RNA (1)...(19): siRNA sense strand
ggaagcaguguguagaaag

SEQ ID NO: 1612202 - RNA, 19 nt, Homo sapiens
  misc_RNA (1)...(19): siRNA sense strand
gagacuuuauuacuaugca

SEQ ID NO: 1612203 - RNA, 19 nt, Homo sapiens
  misc_RNA (1)...(19): siRNA sense strand
gauuggcggcuccauucua

SEQ ID NO: 1612204 - RNA, 19 nt, Homo sapiens
  misc_RNA (1)...(19): siRNA sense strand
acaguggaacggagguuua

SEQ ID NO: 1612205 - RNA, 19 nt, Homo sapiens
  misc_RNA (1)...(19): siRNA sense strand
ucagaaaacuccuccaagu

SEQ ID NO: 1612206 - RNA, 19 nt, Homo sapiens
  misc_RNA (1)...(19): siRNA sense strand
cggaagcacauuaauggaa

SEQ ID NO: 1612207 - RNA, 19 nt, Homo sapiens
  misc_RNA (1)...(19): siRNA sense strand
uauuugacccuuccaaugu

SEQ ID NO: 1612208 - RNA, 19 nt, Homo sapiens
  misc_RNA (1)...(19): siRNA sense strand
gagggaagcaguguguaga

SEQ ID NO: 1612209 - RNA, 19 nt, Homo sapiens
  misc_RNA (1)...(19): siRNA sense strand
gaaauagauggcgauaaag

SEQ ID NO: 1612210 - RNA, 19 nt, Homo sapiens
  misc_RNA (1)...(19): siRNA sense strand
agugucagauucaacuuau

SEQ ID NO: 1612211 - RNA, 19 nt, Homo sapiens
  misc_RNA (1)...(19): siRNA sense strand
cgauggcuauguccuucaa

SEQ ID NO: 1612212 - RNA, 19 nt, Homo sapiens
  misc_RNA (1)...(19): siRNA sense strand
aaagagagagaaacugaca

SEQ ID NO: 1612213 - RNA, 19 nt, Homo sapiens
  misc_RNA (1)...(19): siRNA sense strand
uuacugacagguugaauag

SEQ ID NO: 1612214 - RNA, 19 nt, Homo sapiens
  misc_RNA (1)...(19): siRNA sense strand
cgguugaaauugauugcaa

SEQ ID NO: 1612215 - RNA, 19 nt, Homo sapiens
  misc_RNA (1)...(19): siRNA sense strand
acugacagaguuaauguuu

SEQ ID NO: 1612216 - RNA, 19 nt, Homo sapiens
  misc_RNA (1)...(19): siRNA sense strand
caagcuauuuuggaucaua

SEQ ID NO: 1612217 - RNA, 19 nt, Homo sapiens
  misc_RNA (1)...(19): siRNA sense strand
cuacugggcugauuuugga

SEQ ID NO: 1612218 - RNA, 19 nt, Homo sapiens
  misc_RNA (1)...(19): siRNA sense strand
agagagagaaacugacaga

SEQ ID NO: 1612219 - RNA, 19 nt, Homo sapiens
  misc_RNA (1)...(19): siRNA sense strand
agauggcgauaaaggcaaa

SEQ ID NO: 1612220 - RNA, 19 nt, Homo sapiens
  misc_RNA (1)...(19): siRNA sense strand
ucucuauggcaguguaaua

SEQ ID NO: 1612221 - RNA, 19 nt, Homo sapiens
  misc_RNA (1)...(19): siRNA sense strand
ggaauacuagagcaaagag

SEQ ID NO: 1612222 - RNA, 19 nt, Homo sapiens
  misc_RNA (1)...(19): siRNA sense strand
guaugcgguugaaauugau

SEQ ID NO: 1612223 - RNA, 19 nt, Homo sapiens
  misc_RNA (1)...(19): siRNA sense strand
acugacagguugaauagag

SEQ ID NO: 1612224 - RNA, 19 nt, Homo sapiens
  misc_RNA (1)...(19): siRNA sense strand
ccacucauaccacugcaau

SEQ ID NO: 1612225 - RNA, 19 nt, Homo sapiens
  misc_RNA (1)...(19): siRNA sense strand
agagagaaacugacagagu

SEQ ID NO: 1612226 - RNA, 19 nt, Homo sapiens
  misc_RNA (1)...(19): siRNA sense strand
agaugccaacuguucauua

SEQ ID NO: 1612227 - RNA, 19 nt, Homo sapiens
  misc_RNA (1)...(19): siRNA sense strand
cagaaaacuccuccaagua

SEQ ID NO: 1612228 - RNA, 19 nt, Homo sapiens
  misc_RNA (1)...(19): siRNA sense strand
gagaugacggaagcacauu

SEQ ID NO: 1612229 - RNA, 19 nt, Homo sapiens
  misc_RNA (1)...(19): siRNA sense strand
ggaaauagauggcgauaaa

SEQ ID NO: 1612230 - RNA, 19 nt, Homo sapiens
  misc_RNA (1)...(19): siRNA sense strand
gcaagaauaugaagaagga

SEQ ID NO: 1612231 - RNA, 19 nt, Homo sapiens
  misc_RNA (1)...(19): siRNA sense strand
caacaucccugccuucuuc

SEQ ID NO: 1612232 - RNA, 19 nt, Homo sapiens
  misc_RNA (1)...(19): siRNA sense strand
ggaagcacauuaauggaaa

SEQ ID NO: 1612233 - RNA, 19 nt, Homo sapiens
  misc_RNA (1)...(19): siRNA sense strand
gcacauuaauggaaauaga

SEQ ID NO: 1612234 - RNA, 19 nt, Homo sapiens
  misc_RNA (1)...(19): siRNA sense strand
gaacggagguuuagcucau

SEQ ID NO: 1612235 - RNA, 19 nt, Homo sapiens
  misc_RNA (1)...(19): siRNA sense strand
ugacagaguuaauguuuga

SEQ ID NO: 1612236 - RNA, 19 nt, Homo sapiens
  misc_RNA (1)...(19): siRNA sense strand
gcaaagagagagaaacuga

SEQ ID NO: 1612237 - RNA, 19 nt, Homo sapiens
  misc_RNA (1)...(19): siRNA sense strand
gcuggagacuuuauuacua

SEQ ID NO: 1612238 - RNA, 19 nt, Homo sapiens
  misc_RNA (1)...(19): siRNA sense strand
gaagcaguguguagaaaga

SEQ ID NO: 1612239 - RNA, 19 nt, Homo sapiens
  misc_RNA (1)...(19): siRNA sense strand
ggaaacacacuaauacaga

SEQ ID NO: 1612240 - RNA, 19 nt, Homo sapiens
  misc_RNA (1)...(19): siRNA sense strand
gaugccaacuguucauuau

SEQ ID NO: 1612241 - RNA, 19 nt, Homo sapiens
  misc_RNA (1)...(19): siRNA sense strand
ggucuuggcacaauuauau

SEQ ID NO: 1612242 - RNA, 19 nt, Homo sapiens
  misc_RNA (1)...(19): siRNA sense strand
acaaguggcugcacagaug

SEQ ID NO: 1612243 - RNA, 19 nt, Homo sapiens
  misc_RNA (1)...(19): siRNA sense strand
ugaauugguuccuccauau

SEQ ID NO: 1612244 - RNA, 19 nt, Homo sapiens
  misc_RNA (1)...(19): siRNA sense strand
gcagagcggcuaaagauuc

SEQ ID NO: 1612245 - RNA, 19 nt, Homo sapiens
  misc_RNA (1)...(19): siRNA sense strand
caaaaugcaugucaaauca

SEQ ID NO: 1612246 - RNA, 19 nt, Homo sapiens
  misc_RNA (1)...(19): siRNA sense strand
gcuaaagauuccagaagga

SEQ ID NO: 1612247 - RNA, 19 nt, Homo sapiens
  misc_RNA (1)...(19): siRNA sense strand
gagaaguugccucagguua

SEQ ID NO: 1612248 - RNA, 19 nt, Homo sapiens
  misc_RNA (1)...(19): siRNA sense strand
gaauugguuccuccauaua

SEQ ID NO: 1612249 - RNA, 19 nt, Homo sapiens
  misc_RNA (1)...(19): siRNA sense strand
caaguaugcgguugaaauu

SEQ ID NO: 1612250 - RNA, 19 nt, Homo sapiens
  misc_RNA (1)...(19): siRNA sense strand
ggaggaaacacacuaauac

SEQ ID NO: 1612251 - RNA, 19 nt, Homo sapiens
  misc_RNA (1)...(19): siRNA sense strand
aaagauuccagaaggauua

SEQ ID NO: 1612252 - RNA, 19 nt, Homo sapiens
  misc_RNA (1)...(19): siRNA sense strand
gggaagcaguguguagaaa

SEQ ID NO: 1612253 - RNA, 19 nt, Homo sapiens
  misc_RNA (1)...(19): siRNA sense strand
ugaaggaucuccagcaaac

SEQ ID NO: 1612254 - RNA, 19 nt, Homo sapiens
  misc_RNA (1)...(19): siRNA sense strand
caagcaagaauaugaagaa

SEQ ID NO: 1612255 - RNA, 19 nt, Homo sapiens
  misc_RNA (1)...(19): siRNA sense strand
ccuacuacauagauacuaa

SEQ ID NO: 1612256 - RNA, 19 nt, Homo sapiens
  misc_RNA (1)...(19): siRNA sense strand
guaaagggguuaucaggaa

SEQ ID NO: 1612257 - RNA, 19 nt, Homo sapiens
  misc_RNA (1)...(19): siRNA sense strand
aaaagaagcuguucgugaa

SEQ ID NO: 1612258 - RNA, 19 nt, Homo sapiens
  misc_RNA (1)...(19): siRNA sense strand
gaggcaccguggaauacua

SEQ ID NO: 1612259 - RNA, 19 nt, Homo sapiens
  misc_RNA (1)...(19): siRNA sense strand
guugaagacugggauaguu

SEQ ID NO: 1612260 - RNA, 19 nt, Homo sapiens
  misc_RNA (1)...(19): siRNA sense strand
ggauuuccaagcaagaaua

SEQ ID NO: 1612261 - RNA, 19 nt, Homo sapiens
  misc_RNA (1)...(19): siRNA sense strand
gaugacggaagcacauuaa

SEQ ID NO: 1612262 - RNA, 19 nt, Homo sapiens
  misc_RNA (1)...(19): siRNA sense strand
gcaggaggaaacacacuaa

SEQ ID NO: 1612263 - RNA, 19 nt, Homo sapiens
  misc_RNA (1)...(19): siRNA sense strand
ugggauaguuuccaagcua

SEQ ID NO: 1612264 - RNA, 19 nt, Homo sapiens
  misc_RNA (1)...(19): siRNA sense strand
gaagcacauuaauggaaau

SEQ ID NO: 1612265 - RNA, 19 nt, Homo sapiens
  misc_RNA (1)...(19): siRNA sense strand
agguuuagcucauggauug

SEQ ID NO: 1612266 - RNA, 19 nt, Homo sapiens
  misc_RNA (1)...(19): siRNA sense strand
aguaugcgguugaaauuga

SEQ ID NO: 1612267 - RNA, 19 nt, Homo sapiens
  misc_RNA (1)...(19): siRNA sense strand
gaucauaccuacaaaaugc

SEQ ID NO: 1612268 - RNA, 19 nt, Homo sapiens
  misc_RNA (1)...(19): siRNA sense strand
gguugaaauugauugcaaa

SEQ ID NO: 1612269 - RNA, 19 nt, Homo sapiens
  misc_RNA (1)...(19): siRNA sense strand
ccaaguaugcgguugaaau

SEQ ID NO: 1612270 - RNA, 19 nt, Homo sapiens
  misc_RNA (1)...(19): siRNA sense strand
guugggaugugugauauug

SEQ ID NO: 1612271 - RNA, 19 nt, Homo sapiens
  misc_RNA (1)...(19): siRNA sense strand
gugcagagcggcuaaagau

SEQ ID NO: 1612272 - RNA, 19 nt, Homo sapiens
  misc_RNA (1)...(19): siRNA sense strand
cuacauagauacuaaugcu

SEQ ID NO: 1612273 - RNA, 19 nt, Homo sapiens
  misc_RNA (1)...(19): siRNA sense strand
gcuccauucuagccucuuu

SEQ ID NO: 1612274 - RNA, 19 nt, Homo sapiens
  misc_RNA (1)...(19): siRNA sense strand
ucagaggcaccguggaaua

SEQ ID NO: 1612275 - RNA, 19 nt, Homo sapiens
  misc_RNA (1)...(19): siRNA sense strand
gaacaaguggcugcacaga

SEQ ID NO: 1612276 - RNA, 19 nt, Homo sapiens
  misc_RNA (1)...(19): siRNA sense strand
cagauucaacuuaugauga

SEQ ID NO: 1612277 - RNA, 19 nt, Homo sapiens
  misc_RNA (1)...(19): siRNA sense strand
aaaugcaugucaaaucaga

SEQ ID NO: 1612278 - RNA, 19 nt, Homo sapiens
  misc_RNA (1)...(19): siRNA sense strand
gacggaagcacauuaaugg

SEQ ID NO: 1612279 - RNA, 19 nt, Homo sapiens
  misc_RNA (1)...(19): siRNA sense strand
gaaaacuccuccaaguaug

SEQ ID NO: 1612280 - RNA, 19 nt, Homo sapiens
  misc_RNA (1)...(19): siRNA sense strand
gauuccagaaggauuauuu

SEQ ID NO: 1612281 - RNA, 19 nt, Homo sapiens
  misc_RNA (1)...(19): siRNA sense strand
cgaggucuuggcacaauua

SEQ ID NO: 1612282 - RNA, 19 nt, Homo sapiens
  misc_RNA (1)...(19): siRNA sense strand
uugaauugguuccuccaua

SEQ ID NO: 1612283 - RNA, 19 nt, Homo sapiens
  misc_RNA (1)...(19): siRNA sense strand
gagcaaagagagagaaacu

SEQ ID NO: 1612284 - RNA, 19 nt, Homo sapiens
  misc_RNA (1)...(19): siRNA sense strand
acacacuaauacagaguuu

SEQ ID NO: 1612285 - RNA, 19 nt, Homo sapiens
  misc_RNA (1)...(19): siRNA sense strand
gaaaagaaaagagaaguug

SEQ ID NO: 1612286 - RNA, 19 nt, Homo sapiens
  misc_RNA (1)...(19): siRNA sense strand
cuggagacuuuauuacuau

SEQ ID NO: 1612287 - RNA, 19 nt, Homo sapiens
  misc_RNA (1)...(19): siRNA sense strand
agacugggauaguuuccaa

SEQ ID NO: 1612288 - RNA, 19 nt, Homo sapiens
  misc_RNA (1)...(19): siRNA sense strand
gaggaaacacacuaauaca

SEQ ID NO: 1612289 - RNA, 19 nt, Homo sapiens
  misc_RNA (1)...(19): siRNA sense strand
gaaguugccucagguuacg

SEQ ID NO: 1612290 - RNA, 19 nt, Homo sapiens
  misc_RNA (1)...(19): siRNA sense strand
ugacggaagcacauuaaug

SEQ ID NO: 1612291 - RNA, 19 nt, Homo sapiens
  misc_RNA (1)...(19): siRNA sense strand
cgugaaggaucuccagcaa

SEQ ID NO: 1612292 - RNA, 19 nt, Homo sapiens
  misc_RNA (1)...(19): siRNA sense strand
ggucccaccuacuacauag

SEQ ID NO: 1612293 - RNA, 19 nt, Homo sapiens
  misc_RNA (1)...(19): siRNA sense strand
aaaaugggaugguugaaga

SEQ ID NO: 1612294 - RNA, 19 nt, Homo sapiens
  misc_RNA (1)...(19): siRNA sense strand
uuggguaccuuucaacaga

SEQ ID NO: 1612295 - RNA, 19 nt, Homo sapiens
  misc_RNA (1)...(19): siRNA sense strand
uaaagauuccagaaggauu

SEQ ID NO: 1612296 - RNA, 19 nt, Homo sapiens
  misc_RNA (1)...(19): siRNA sense strand
gcuaauggucguucuacug

SEQ ID NO: 1612297 - RNA, 19 nt, Homo sapiens
  misc_RNA (1)...(19): siRNA sense strand
ggagggaagcaguguguag

SEQ ID NO: 1612298 - RNA, 19 nt, Homo sapiens
  misc_RNA (1)...(19): siRNA sense strand
aggaggaaacacacuaaua

SEQ ID NO: 1612299 - RNA, 19 nt, Homo sapiens
  misc_RNA (1)...(19): siRNA sense strand
guuccuccauauaugauug

SEQ ID NO: 1612300 - RNA, 19 nt, Homo sapiens
  misc_RNA (1)...(19): siRNA sense strand
ugucagauucaacuuauga

SEQ ID NO: 1612301 - RNA, 19 nt, Homo sapiens
  misc_RNA (1)...(19): siRNA sense strand
ggaagcaguguguagaaag

SEQ ID NO: 1612302 - RNA, 19 nt, Homo sapiens
  misc_RNA (1)...(19): siRNA sense strand
gagacuuuauuacuaugca

SEQ ID NO: 1612303 - RNA, 19 nt, Homo sapiens
  misc_RNA (1)...(19): siRNA sense strand
gauuggcggcuccauucua

SEQ ID NO: 1612304 - RNA, 19 nt, Homo sapiens
  misc_RNA (1)...(19): siRNA sense strand
acaguggaacggagguuua

SEQ ID NO: 1612305 - RNA, 19 nt, Homo sapiens
  misc_RNA (1)...(19): siRNA sense strand
ucagaaaacuccuccaagu

SEQ ID NO: 1612306 - RNA, 19 nt, Homo sapiens
  misc_RNA (1)...(19): siRNA sense strand
cggaagcacauuaauggaa

SEQ ID NO: 1612307 - RNA, 19 nt, Homo sapiens
  misc_RNA (1)...(19): siRNA sense strand
uauuugacccuuccaaugu

SEQ ID NO: 1612308 - RNA, 19 nt, Homo sapiens
  misc_RNA (1)...(19): siRNA sense strand
gagggaagcaguguguaga

SEQ ID NO: 1612309 - RNA, 19 nt, Homo sapiens
  misc_RNA (1)...(19): siRNA sense strand
gaaauagauggcgauaaag

SEQ ID NO: 1612310 - RNA, 19 nt, Homo sapiens
  misc_RNA (1)...(19): siRNA sense strand
agugucagauucaacuuau

SEQ ID NO: 1612311 - RNA, 19 nt, Homo sapiens
  misc_RNA (1)...(19): siRNA sense strand
cgauggcuauguccuucaa

SEQ ID NO: 1612312 - RNA, 19 nt, Homo sapiens
  misc_RNA (1)...(19): siRNA sense strand
aaagagagagaaacugaca

SEQ ID NO: 1612313 - RNA, 19 nt, Homo sapiens
  misc_RNA (1)...(19): siRNA sense strand
uuacugacagguugaauag

SEQ ID NO: 1612314 - RNA, 19 nt, Homo sapiens
  misc_RNA (1)...(19): siRNA sense strand
cgguugaaauugauugcaa

SEQ ID NO: 1612315 - RNA, 19 nt, Homo sapiens
  misc_RNA (1)...(19): siRNA sense strand
acugacagaguuaauguuu

SEQ ID NO: 1612316 - RNA, 19 nt, Homo sapiens
  misc_RNA (1)...(19): siRNA sense strand
caagcuauuuuggaucaua

SEQ ID NO: 1612317 - RNA, 19 nt, Homo sapiens
  misc_RNA (1)...(19): siRNA sense strand
cuacugggcugauuuugga

SEQ ID NO: 1612318 - RNA, 19 nt, Homo sapiens
  misc_RNA (1)...(19): siRNA sense strand
agagagagaaacugacaga

SEQ ID NO: 1612319 - RNA, 19 nt, Homo sapiens
  misc_RNA (1)...(19): siRNA sense strand
agauggcgauaaaggcaaa

SEQ ID NO: 1612320 - RNA, 19 nt, Homo sapiens
  misc_RNA (1)...(19): siRNA sense strand
ucucuauggcaguguaaua

SEQ ID NO: 1612321 - RNA, 19 nt, Homo sapiens
  misc_RNA (1)...(19): siRNA sense strand
ggaauacuagagcaaagag

SEQ ID NO: 1612322 - RNA, 19 nt, Homo sapiens
  misc_RNA (1)...(19): siRNA sense strand
guaugcgguugaaauugau

SEQ ID NO: 1612323 - RNA, 19 nt, Homo sapiens
  misc_RNA (1)...(19): siRNA sense strand
acugacagguugaauagag

SEQ ID NO: 1612324 - RNA, 19 nt, Homo sapiens
  misc_RNA (1)...(19): siRNA sense strand
ccacucauaccacugcaau

SEQ ID NO: 1612325 - RNA, 19 nt, Homo sapiens
  misc_RNA (1)...(19): siRNA sense strand
agagagaaacugacagagu

SEQ ID NO: 1612326 - RNA, 19 nt, Homo sapiens
  misc_RNA (1)...(19): siRNA sense strand
agaugccaacuguucauua

SEQ ID NO: 1612327 - RNA, 19 nt, Homo sapiens
  misc_RNA (1)...(19): siRNA sense strand
cagaaaacuccuccaagua

SEQ ID NO: 1612328 - RNA, 19 nt, Homo sapiens
  misc_RNA (1)...(19): siRNA sense strand
gagaugacggaagcacauu

SEQ ID NO: 1612329 - RNA, 19 nt, Homo sapiens
  misc_RNA (1)...(19): siRNA sense strand
guacauacaucuccuacaa

SEQ ID NO: 1612330 - RNA, 19 nt, Homo sapiens
  misc_RNA (1)...(19): siRNA sense strand
gcagaaaucucccaguuuu

SEQ ID NO: 1612331 - RNA, 19 nt, Homo sapiens
  misc_RNA (1)...(19): siRNA sense strand
ggacuugaauggaugaugu

SEQ ID NO: 1612332 - RNA, 19 nt, Homo sapiens
  misc_RNA (1)...(19): siRNA sense strand
acauacaucuccuacaaua

SEQ ID NO: 1612333 - RNA, 19 nt, Homo sapiens
  misc_RNA (1)...(19): siRNA sense strand
gaaguaauguagaagagau

SEQ ID NO: 1612334 - RNA, 19 nt, Homo sapiens
  misc_RNA (1)...(19): siRNA sense strand
uggaugaugucacgacuua

SEQ ID NO: 1612335 - RNA, 19 nt, Homo sapiens
  misc_RNA (1)...(19): siRNA sense strand
gagaggauuucuguaacua

SEQ ID NO: 1612336 - RNA, 19 nt, Homo sapiens
  misc_RNA (1)...(19): siRNA sense strand
uaauacacguuuccuaaug

SEQ ID NO: 1612337 - RNA, 19 nt, Homo sapiens
  misc_RNA (1)...(19): siRNA sense strand
aaagcuggauugcugauuu

SEQ ID NO: 1612338 - RNA, 19 nt, Homo sapiens
  misc_RNA (1)...(19): siRNA sense strand
gaggauuucuguaacuaga

SEQ ID NO: 1612339 - RNA, 19 nt, Homo sapiens
  misc_RNA (1)...(19): siRNA sense strand
uagcagaaaucucccaguu

SEQ ID NO: 1612340 - RNA, 19 nt, Homo sapiens
  misc_RNA (1)...(19): siRNA sense strand
acacagaguuuguaauagu

SEQ ID NO: 1612341 - RNA, 19 nt, Homo sapiens
  misc_RNA (1)...(19): siRNA sense strand
ugaaugaaguuguacauac

SEQ ID NO: 1612342 - RNA, 19 nt, Homo sapiens
  misc_RNA (1)...(19): siRNA sense strand
ggaaaacuaccauucuuua

SEQ ID NO: 1612343 - RNA, 19 nt, Homo sapiens
  misc_RNA (1)...(19): siRNA sense strand
gagcacaaaguuaucauug

SEQ ID NO: 1612344 - RNA, 19 nt, Homo sapiens
  misc_RNA (1)...(19): siRNA sense strand
agagagaggauuucuguaa

SEQ ID NO: 1612345 - RNA, 19 nt, Homo sapiens
  misc_RNA (1)...(19): siRNA sense strand
guagaagagauagugauua

SEQ ID NO: 1612346 - RNA, 19 nt, Homo sapiens
  misc_RNA (1)...(19): siRNA sense strand
ggauuucuguaacuagaga

SEQ ID NO: 1612347 - RNA, 19 nt, Homo sapiens
  misc_RNA (1)...(19): siRNA sense strand
cuaccauucuuuaccaauu

SEQ ID NO: 1612348 - RNA, 19 nt, Homo sapiens
  misc_RNA (1)...(19): siRNA sense strand
gagagaggauuucuguaac

SEQ ID NO: 1612349 - RNA, 19 nt, Homo sapiens
  misc_RNA (1)...(19): siRNA sense strand
ggaacacuuacuauacuaa

SEQ ID NO: 1612350 - RNA, 19 nt, Homo sapiens
  misc_RNA (1)...(19): siRNA sense strand
aaagaucaccaguggcaua

SEQ ID NO: 1612351 - RNA, 19 nt, Homo sapiens
  misc_RNA (1)...(19): siRNA sense strand
aaacuaccauucuuuacca

SEQ ID NO: 1612352 - RNA, 19 nt, Homo sapiens
  misc_RNA (1)...(19): siRNA sense strand
gauguuaaagaaugcauga

SEQ ID NO: 1612353 - RNA, 19 nt, Homo sapiens
  misc_RNA (1)...(19): siRNA sense strand
cacagaguuuguaauaguu

SEQ ID NO: 1612354 - RNA, 19 nt, Homo sapiens
  misc_RNA (1)...(19): siRNA sense strand
ugucacgacuuaagauuag

SEQ ID NO: 1612355 - RNA, 19 nt, Homo sapiens
  misc_RNA (1)...(19): siRNA sense strand
gcaugacuguagcagaaau

SEQ ID NO: 1612356 - RNA, 19 nt, Homo sapiens
  misc_RNA (1)...(19): siRNA sense strand
uggaacacuuacuauacua

SEQ ID NO: 1612357 - RNA, 19 nt, Homo sapiens
  misc_RNA (1)...(19): siRNA sense strand
ggaaguaauguagaagaga

SEQ ID NO: 1612358 - RNA, 19 nt, Homo sapiens
  misc_RNA (1)...(19): siRNA sense strand
ggagcacaaaguuaucauu

SEQ ID NO: 1612359 - RNA, 19 nt, Homo sapiens
  misc_RNA (1)...(19): siRNA sense strand
gaugucacgacuuaagauu

SEQ ID NO: 1612360 - RNA, 19 nt, Homo sapiens
  misc_RNA (1)...(19): siRNA sense strand
gaucaccaguggcauaucc

SEQ ID NO: 1612361 - RNA, 19 nt, Homo sapiens
  misc_RNA (1)...(19): siRNA sense strand
augcaugacuguagcagaa

SEQ ID NO: 1612362 - RNA, 19 nt, Homo sapiens
  misc_RNA (1)...(19): siRNA sense strand
uaaagaaugcaugacugua

SEQ ID NO: 1612363 - RNA, 19 nt, Homo sapiens
  misc_RNA (1)...(19): siRNA sense strand
gaugaugucacgacuuaag

SEQ ID NO: 1612364 - RNA, 19 nt, Homo sapiens
  misc_RNA (1)...(19): siRNA sense strand
aauacacguuuccuaaugu

SEQ ID NO: 1612365 - RNA, 19 nt, Homo sapiens
  misc_RNA (1)...(19): siRNA sense strand
gcuggauaaugcagggaaa

SEQ ID NO: 1612366 - RNA, 19 nt, Homo sapiens
  misc_RNA (1)...(19): siRNA sense strand
aaagaaugcaugacuguag

SEQ ID NO: 1612367 - RNA, 19 nt, Homo sapiens
  misc_RNA (1)...(19): siRNA sense strand
caggcaugcugugcucuaa

SEQ ID NO: 1612368 - RNA, 19 nt, Homo sapiens
  misc_RNA (1)...(19): siRNA sense strand
gaacacuuacuauacuaac

SEQ ID NO: 1612369 - RNA, 19 nt, Homo sapiens
  misc_RNA (1)...(19): siRNA sense strand
acagacagagagaggauuu

SEQ ID NO: 1612370 - RNA, 19 nt, Homo sapiens
  misc_RNA (1)...(19): siRNA sense strand
guacagacagagagaggau

SEQ ID NO: 1612371 - RNA, 19 nt, Homo sapiens
  misc_RNA (1)...(19): siRNA sense strand
caauaggaaguaauguaga

SEQ ID NO: 1612372 - RNA, 19 nt, Homo sapiens
  misc_RNA (1)...(19): siRNA sense strand
acaauaggaaguaauguag

SEQ ID NO: 1612373 - RNA, 19 nt, Homo sapiens
  misc_RNA (1)...(19): siRNA sense strand
uguagaagagauagugauu

SEQ ID NO: 1612374 - RNA, 19 nt, Homo sapiens
  misc_RNA (1)...(19): siRNA sense strand
gcgcaugaggaccuaagaa

SEQ ID NO: 1612375 - RNA, 19 nt, Homo sapiens
  misc_RNA (1)...(19): siRNA sense strand
gauaaugcagggaaaacua

SEQ ID NO: 1612376 - RNA, 19 nt, Homo sapiens
  misc_RNA (1)...(19): siRNA sense strand
agagaggauuucuguaacu

SEQ ID NO: 1612377 - RNA, 19 nt, Homo sapiens
  misc_RNA (1)...(19): siRNA sense strand
ggcaugcugugcucuaacu

SEQ ID NO: 1612378 - RNA, 19 nt, Homo sapiens
  misc_RNA (1)...(19): siRNA sense strand
cgcaugaggaccuaagaaa

SEQ ID NO: 1612379 - RNA, 19 nt, Homo sapiens
  misc_RNA (1)...(19): siRNA sense strand
uuaaagaaugcaugacugu

SEQ ID NO: 1612380 - RNA, 19 nt, Homo sapiens
  misc_RNA (1)...(19): siRNA sense strand
uuccuaaugugggauauug

SEQ ID NO: 1612381 - RNA, 19 nt, Homo sapiens
  misc_RNA (1)...(19): siRNA sense strand
uaauguagaagagauagug

SEQ ID NO: 1612382 - RNA, 19 nt, Homo sapiens
  misc_RNA (1)...(19): siRNA sense strand
gacaguacagacagagaga

SEQ ID NO: 1612383 - RNA, 19 nt, Homo sapiens
  misc_RNA (1)...(19): siRNA sense strand
cuggaacacuuacuauacu

SEQ ID NO: 1612384 - RNA, 19 nt, Homo sapiens
  misc_RNA (1)...(19): siRNA sense strand
gggauugugccaaggacuu

SEQ ID NO: 1612385 - RNA, 19 nt, Homo sapiens
  misc_RNA (1)...(19): siRNA sense strand
cagaguuuguaauaguugu

SEQ ID NO: 1612386 - RNA, 19 nt, Homo sapiens
  misc_RNA (1)...(19): siRNA sense strand
gggaaaacuaccauucuuu

SEQ ID NO: 1612387 - RNA, 19 nt, Homo sapiens
  misc_RNA (1)...(19): siRNA sense strand
gcaugaggaccuaagaaaa

SEQ ID NO: 1612388 - RNA, 19 nt, Homo sapiens
  misc_RNA (1)...(19): siRNA sense strand
uaggaaguaauguagaaga

SEQ ID NO: 1612389 - RNA, 19 nt, Homo sapiens
  misc_RNA (1)...(19): siRNA sense strand
ccuggaacacuuacuauac

SEQ ID NO: 1612390 - RNA, 19 nt, Homo sapiens
  misc_RNA (1)...(19): siRNA sense strand
ccaggcaugcugugcucua

SEQ ID NO: 1612391 - RNA, 19 nt, Homo sapiens
  misc_RNA (1)...(19): siRNA sense strand
acaagauguuaaagaaugc

SEQ ID NO: 1612392 - RNA, 19 nt, Homo sapiens
  misc_RNA (1)...(19): siRNA sense strand
auacacguuuccuaaugug

SEQ ID NO: 1612393 - RNA, 19 nt, Homo sapiens
  misc_RNA (1)...(19): siRNA sense strand
guacauacaucuccuacaa

SEQ ID NO: 1612394 - RNA, 19 nt, Homo sapiens
  misc_RNA (1)...(19): siRNA sense strand
gcagaaaucucccaguuuu

SEQ ID NO: 1612395 - RNA, 19 nt, Homo sapiens
  misc_RNA (1)...(19): siRNA sense strand
ggacuugaauggaugaugu

SEQ ID NO: 1612396 - RNA, 19 nt, Homo sapiens
  misc_RNA (1)...(19): siRNA sense strand
acauacaucuccuacaaua

SEQ ID NO: 1612397 - RNA, 19 nt, Homo sapiens
  misc_RNA (1)...(19): siRNA sense strand
gaaguaauguagaagagau

SEQ ID NO: 1612398 - RNA, 19 nt, Homo sapiens
  misc_RNA (1)...(19): siRNA sense strand
uggaugaugucacgacuua

SEQ ID NO: 1612399 - RNA, 19 nt, Homo sapiens
  misc_RNA (1)...(19): siRNA sense strand
gagaggauuucuguaacua

SEQ ID NO: 1612400 - RNA, 19 nt, Homo sapiens
  misc_RNA (1)...(19): siRNA sense strand
uaauacacguuuccuaaug

SEQ ID NO: 1612401 - RNA, 19 nt, Homo sapiens
  misc_RNA (1)...(19): siRNA sense strand
aaagcuggauugcugauuu

SEQ ID NO: 1612402 - RNA, 19 nt, Homo sapiens
  misc_RNA (1)...(19): siRNA sense strand
gaggauuucuguaacuaga

SEQ ID NO: 1612403 - RNA, 19 nt, Homo sapiens
  misc_RNA (1)...(19): siRNA sense strand
uagcagaaaucucccaguu

SEQ ID NO: 1612404 - RNA, 19 nt, Homo sapiens
  misc_RNA (1)...(19): siRNA sense strand
acacagaguuuguaauagu

SEQ ID NO: 1612405 - RNA, 19 nt, Homo sapiens
  misc_RNA (1)...(19): siRNA sense strand
ugaaugaaguuguacauac

SEQ ID NO: 1612406 - RNA, 19 nt, Homo sapiens
  misc_RNA (1)...(19): siRNA sense strand
ggaaaacuaccauucuuua

SEQ ID NO: 1612407 - RNA, 19 nt, Homo sapiens
  misc_RNA (1)...(19): siRNA sense strand
gagcacaaaguuaucauug

SEQ ID NO: 1612408 - RNA, 19 nt, Homo sapiens
  misc_RNA (1)...(19): siRNA sense strand
agagagaggauuucuguaa

SEQ ID NO: 1612409 - RNA, 19 nt, Homo sapiens
  misc_RNA (1)...(19): siRNA sense strand
guagaagagauagugauua

SEQ ID NO: 1612410 - RNA, 19 nt, Homo sapiens
  misc_RNA (1)...(19): siRNA sense strand
ggauuucuguaacuagaga

SEQ ID NO: 1612411 - RNA, 19 nt, Homo sapiens
  misc_RNA (1)...(19): siRNA sense strand
cuaccauucuuuaccaauu

SEQ ID NO: 1612412 - RNA, 19 nt, Homo sapiens
  misc_RNA (1)...(19): siRNA sense strand
gagagaggauuucuguaac

SEQ ID NO: 1612413 - RNA, 19 nt, Homo sapiens
  misc_RNA (1)...(19): siRNA sense strand
ggaacacuuacuauacuaa

SEQ ID NO: 1612414 - RNA, 19 nt, Homo sapiens
  misc_RNA (1)...(19): siRNA sense strand
aaagaucaccaguggcaua

SEQ ID NO: 1612415 - RNA, 19 nt, Homo sapiens
  misc_RNA (1)...(19): siRNA sense strand
aaacuaccauucuuuacca

SEQ ID NO: 1612416 - RNA, 19 nt, Homo sapiens
  misc_RNA (1)...(19): siRNA sense strand
gauguuaaagaaugcauga

SEQ ID NO: 1612417 - RNA, 19 nt, Homo sapiens
  misc_RNA (1)...(19): siRNA sense strand
cacagaguuuguaauaguu

SEQ ID NO: 1612418 - RNA, 19 nt, Homo sapiens
  misc_RNA (1)...(19): siRNA sense strand
ugucacgacuuaagauuag

SEQ ID NO: 1612419 - RNA, 19 nt, Homo sapiens
  misc_RNA (1)...(19): siRNA sense strand
gcaugacuguagcagaaau

SEQ ID NO: 1612420 - RNA, 19 nt, Homo sapiens
  misc_RNA (1)...(19): siRNA sense strand
uggaacacuuacuauacua

SEQ ID NO: 1612421 - RNA, 19 nt, Homo sapiens
  misc_RNA (1)...(19): siRNA sense strand
ggaaguaauguagaagaga

SEQ ID NO: 1612422 - RNA, 19 nt, Homo sapiens
  misc_RNA (1)...(19): siRNA sense strand
ggagcacaaaguuaucauu

SEQ ID NO: 1612423 - RNA, 19 nt, Homo sapiens
  misc_RNA (1)...(19): siRNA sense strand
gaugucacgacuuaagauu

SEQ ID NO: 1612424 - RNA, 19 nt, Homo sapiens
  misc_RNA (1)...(19): siRNA sense strand
gaucaccaguggcauaucc

SEQ ID NO: 1612425 - RNA, 19 nt, Homo sapiens
  misc_RNA (1)...(19): siRNA sense strand
augcaugacuguagcagaa

SEQ ID NO: 1612426 - RNA, 19 nt, Homo sapiens
  misc_RNA (1)...(19): siRNA sense strand
uaaagaaugcaugacugua

SEQ ID NO: 1612427 - RNA, 19 nt, Homo sapiens
  misc_RNA (1)...(19): siRNA sense strand
gaugaugucacgacuuaag

SEQ ID NO: 1612428 - RNA, 19 nt, Homo sapiens
  misc_RNA (1)...(19): siRNA sense strand
aauacacguuuccuaaugu

SEQ ID NO: 1612429 - RNA, 19 nt, Homo sapiens
  misc_RNA (1)...(19): siRNA sense strand
gcuggauaaugcagggaaa

SEQ ID NO: 1612430 - RNA, 19 nt, Homo sapiens
  misc_RNA (1)...(19): siRNA sense strand
aaagaaugcaugacuguag

SEQ ID NO: 1612431 - RNA, 19 nt, Homo sapiens
  misc_RNA (1)...(19): siRNA sense strand
caggcaugcugugcucuaa

SEQ ID NO: 1612432 - RNA, 19 nt, Homo sapiens
  misc_RNA (1)...(19): siRNA sense strand
gaacacuuacuauacuaac

SEQ ID NO: 1612433 - RNA, 19 nt, Homo sapiens
  misc_RNA (1)...(19): siRNA sense strand
acagacagagagaggauuu

SEQ ID NO: 1612434 - RNA, 19 nt, Homo sapiens
  misc_RNA (1)...(19): siRNA sense strand
guacagacagagagaggau

SEQ ID NO: 1612435 - RNA, 19 nt, Homo sapiens
  misc_RNA (1)...(19): siRNA sense strand
caauaggaaguaauguaga

SEQ ID NO: 1612436 - RNA, 19 nt, Homo sapiens
  misc_RNA (1)...(19): siRNA sense strand
acaauaggaaguaauguag

SEQ ID NO: 1612437 - RNA, 19 nt, Homo sapiens
  misc_RNA (1)...(19): siRNA sense strand
uguagaagagauagugauu

SEQ ID NO: 1612438 - RNA, 19 nt, Homo sapiens
  misc_RNA (1)...(19): siRNA sense strand
gcgcaugaggaccuaagaa

SEQ ID NO: 1612439 - RNA, 19 nt, Homo sapiens
  misc_RNA (1)...(19): siRNA sense strand
gauaaugcagggaaaacua

SEQ ID NO: 1612440 - RNA, 19 nt, Homo sapiens
  misc_RNA (1)...(19): siRNA sense strand
agagaggauuucuguaacu

SEQ ID NO: 1612441 - RNA, 19 nt, Homo sapiens
  misc_RNA (1)...(19): siRNA sense strand
ggcaugcugugcucuaacu

SEQ ID NO: 1612442 - RNA, 19 nt, Homo sapiens
  misc_RNA (1)...(19): siRNA sense strand
cgcaugaggaccuaagaaa

SEQ ID NO: 1612443 - RNA, 19 nt, Homo sapiens
  misc_RNA (1)...(19): siRNA sense strand
uuaaagaaugcaugacugu

SEQ ID NO: 1612444 - RNA, 19 nt, Homo sapiens
  misc_RNA (1)...(19): siRNA sense strand
uuccuaaugugggauauug

SEQ ID NO: 1612445 - RNA, 19 nt, Homo sapiens
  misc_RNA (1)...(19): siRNA sense strand
uaauguagaagagauagug

SEQ ID NO: 1612446 - RNA, 19 nt, Homo sapiens
  misc_RNA (1)...(19): siRNA sense strand
gacaguacagacagagaga

SEQ ID NO: 1612447 - RNA, 19 nt, Homo sapiens
  misc_RNA (1)...(19): siRNA sense strand
cuggaacacuuacuauacu

SEQ ID NO: 1612448 - RNA, 19 nt, Homo sapiens
  misc_RNA (1)...(19): siRNA sense strand
gggauugugccaaggacuu

SEQ ID NO: 1612449 - RNA, 19 nt, Homo sapiens
  misc_RNA (1)...(19): siRNA sense strand
cagaguuuguaauaguugu

SEQ ID NO: 1612450 - RNA, 19 nt, Homo sapiens
  misc_RNA (1)...(19): siRNA sense strand
gggaaaacuaccauucuuu

SEQ ID NO: 1612451 - RNA, 19 nt, Homo sapiens
  misc_RNA (1)...(19): siRNA sense strand
gcaugaggaccuaagaaaa

SEQ ID NO: 1612452 - RNA, 19 nt, Homo sapiens
  misc_RNA (1)...(19): siRNA sense strand
uaggaaguaauguagaaga

SEQ ID NO: 1612453 - RNA, 19 nt, Homo sapiens
  misc_RNA (1)...(19): siRNA sense strand
ccuggaacacuuacuauac

SEQ ID NO: 1612454 - RNA, 19 nt, Homo sapiens
  misc_RNA (1)...(19): siRNA sense strand
ccaggcaugcugugcucua

SEQ ID NO: 1612455 - RNA, 19 nt, Homo sapiens
  misc_RNA (1)...(19): siRNA sense strand
acaagauguuaaagaaugc

SEQ ID NO: 1612456 - RNA, 19 nt, Homo sapiens
  misc_RNA (1)...(19): siRNA sense strand
auacacguuuccuaaugug

SEQ ID NO: 1612457 - RNA, 19 nt, Homo sapiens
  misc_RNA (1)...(19): siRNA sense strand
acaaagagcuggcugauga

SEQ ID NO: 1612458 - RNA, 19 nt, Homo sapiens
  misc_RNA (1)...(19): siRNA sense strand
caaagagcauggagcugua

SEQ ID NO: 1612459 - RNA, 19 nt, Homo sapiens
  misc_RNA (1)...(19): siRNA sense strand
aaucagagccuaccacaaa

SEQ ID NO: 1612460 - RNA, 19 nt, Homo sapiens
  misc_RNA (1)...(19): siRNA sense strand
ggaggcuggugcagaaauu

SEQ ID NO: 1612461 - RNA, 19 nt, Homo sapiens
  misc_RNA (1)...(19): siRNA sense strand
agccagcucuuccaucuua

SEQ ID NO: 1612462 - RNA, 19 nt, Homo sapiens
  misc_RNA (1)...(19): siRNA sense strand
ccacaaacauccaaauucg

SEQ ID NO: 1612463 - RNA, 19 nt, Homo sapiens
  misc_RNA (1)...(19): siRNA sense strand
ggacaggugaacuuggaua

SEQ ID NO: 1612464 - RNA, 19 nt, Homo sapiens
  misc_RNA (1)...(19): siRNA sense strand
gaagccaaccugcucaaug

SEQ ID NO: 1612465 - RNA, 19 nt, Homo sapiens
  misc_RNA (1)...(19): siRNA sense strand
gauaauggagaacucagaa

SEQ ID NO: 1612466 - RNA, 19 nt, Homo sapiens
  misc_RNA (1)...(19): siRNA sense strand
gaacaaagagcuggcugau

SEQ ID NO: 1612467 - RNA, 19 nt, Homo sapiens
  misc_RNA (1)...(19): siRNA sense strand
ggacgaggacuuugugaag

SEQ ID NO: 1612468 - RNA, 19 nt, Homo sapiens
  misc_RNA (1)...(19): siRNA sense strand
ggauucagccuggauaaug

SEQ ID NO: 1612469 - RNA, 19 nt, Homo sapiens
  misc_RNA (1)...(19): siRNA sense strand
ugaccaagaugaagaugag

SEQ ID NO: 1612470 - RNA, 19 nt, Homo sapiens
  misc_RNA (1)...(19): siRNA sense strand
gcucuuccaucuuaaucga

SEQ ID NO: 1612471 - RNA, 19 nt, Homo sapiens
  misc_RNA (1)...(19): siRNA sense strand
ugacuacuuucccgaacaa

SEQ ID NO: 1612472 - RNA, 19 nt, Homo sapiens
  misc_RNA (1)...(19): siRNA sense strand
guggacaggugaacuugga

SEQ ID NO: 1612473 - RNA, 19 nt, Homo sapiens
  misc_RNA (1)...(19): siRNA sense strand
caggugaacuuggauaugg

SEQ ID NO: 1612474 - RNA, 19 nt, Homo sapiens
  misc_RNA (1)...(19): siRNA sense strand
gauucagccuggauaaugg

SEQ ID NO: 1612475 - RNA, 19 nt, Homo sapiens
  misc_RNA (1)...(19): siRNA sense strand
aaagccagcucuuccaucu

SEQ ID NO: 1612476 - RNA, 19 nt, Homo sapiens
  misc_RNA (1)...(19): siRNA sense strand
guauugaaacucuggaaga

SEQ ID NO: 1612477 - RNA, 19 nt, Homo sapiens
  misc_RNA (1)...(19): siRNA sense strand
caucuuaaucgacgaauca

SEQ ID NO: 1612478 - RNA, 19 nt, Homo sapiens
  misc_RNA (1)...(19): siRNA sense strand
cagccuggauaauggagaa

SEQ ID NO: 1612479 - RNA, 19 nt, Homo sapiens
  misc_RNA (1)...(19): siRNA sense strand
cauguaguauugaaacucu

SEQ ID NO: 1612480 - RNA, 19 nt, Homo sapiens
  misc_RNA (1)...(19): siRNA sense strand
ggauaauggagaacucaga

SEQ ID NO: 1612481 - RNA, 19 nt, Homo sapiens
  misc_RNA (1)...(19): siRNA sense strand
agaugaagaugaggaggaa

SEQ ID NO: 1612482 - RNA, 19 nt, Homo sapiens
  misc_RNA (1)...(19): siRNA sense strand
gauaauagagugacauccu

SEQ ID NO: 1612483 - RNA, 19 nt, Homo sapiens
  misc_RNA (1)...(19): siRNA sense strand
auaauagagugacauccuu

SEQ ID NO: 1612484 - RNA, 19 nt, Homo sapiens
  misc_RNA (1)...(19): siRNA sense strand
ggaggugccagcagagcuu

SEQ ID NO: 1612485 - RNA, 19 nt, Homo sapiens
  misc_RNA (1)...(19): siRNA sense strand
uaccaagacccauccaaug

SEQ ID NO: 1612486 - RNA, 19 nt, Homo sapiens
  misc_RNA (1)...(19): siRNA sense strand
uaccacaaacauccaaauu

SEQ ID NO: 1612487 - RNA, 19 nt, Homo sapiens
  misc_RNA (1)...(19): siRNA sense strand
auggagaacucagaagcua

SEQ ID NO: 1612488 - RNA, 19 nt, Homo sapiens
  misc_RNA (1)...(19): siRNA sense strand
cccauccaaugcccaguuu

SEQ ID NO: 1612489 - RNA, 19 nt, Homo sapiens
  misc_RNA (1)...(19): siRNA sense strand
ggcagaaaaugaagccaaa

SEQ ID NO: 1612490 - RNA, 19 nt, Homo sapiens
  misc_RNA (1)...(19): siRNA sense strand
gcuuuauccucaugacuac

SEQ ID NO: 1612491 - RNA, 19 nt, Homo sapiens
  misc_RNA (1)...(19): siRNA sense strand
gacaggugaacuuggauau

SEQ ID NO: 1612492 - RNA, 19 nt, Homo sapiens
  misc_RNA (1)...(19): siRNA sense strand
cgacauccgacucuucauc

SEQ ID NO: 1612493 - RNA, 19 nt, Homo sapiens
  misc_RNA (1)...(19): siRNA sense strand
gaaucagagccuaccacaa

SEQ ID NO: 1612494 - RNA, 19 nt, Homo sapiens
  misc_RNA (1)...(19): siRNA sense strand
uagagugacauccuucaga

SEQ ID NO: 1612495 - RNA, 19 nt, Homo sapiens
  misc_RNA (1)...(19): siRNA sense strand
cuaccaagacccauccaau

SEQ ID NO: 1612496 - RNA, 19 nt, Homo sapiens
  misc_RNA (1)...(19): siRNA sense strand
caccagcuuuauccucaug

SEQ ID NO: 1612497 - RNA, 19 nt, Homo sapiens
  misc_RNA (1)...(19): siRNA sense strand
gggacgaggacuuugugaa

SEQ ID NO: 1612498 - RNA, 19 nt, Homo sapiens
  misc_RNA (1)...(19): siRNA sense strand
gagccagacccugaaggaa

SEQ ID NO: 1612499 - RNA, 19 nt, Homo sapiens
  misc_RNA (1)...(19): siRNA sense strand
ucgugcagcgguuaacaua

SEQ ID NO: 1612500 - RNA, 19 nt, Homo sapiens
  misc_RNA (1)...(19): siRNA sense strand
aggcuggugcagaaauuua

SEQ ID NO: 1612501 - RNA, 19 nt, Homo sapiens
  misc_RNA (1)...(19): siRNA sense strand
aggaggcgcugagggaguu

SEQ ID NO: 1612502 - RNA, 19 nt, Homo sapiens
  misc_RNA (1)...(19): siRNA sense strand
gaggcuggugcagaaauuu

SEQ ID NO: 1612503 - RNA, 19 nt, Homo sapiens
  misc_RNA (1)...(19): siRNA sense strand
ggaagccaaccugcucaau

SEQ ID NO: 1612504 - RNA, 19 nt, Homo sapiens
  misc_RNA (1)...(19): siRNA sense strand
ggcuggugcagaaauuuaa

SEQ ID NO: 1612505 - RNA, 19 nt, Homo sapiens
  misc_RNA (1)...(19): siRNA sense strand
cuucagagaccucauucau

SEQ ID NO: 1612506 - RNA, 19 nt, Homo sapiens
  misc_RNA (1)...(19): siRNA sense strand
acaaagagcuggcugauga

SEQ ID NO: 1612507 - RNA, 19 nt, Homo sapiens
  misc_RNA (1)...(19): siRNA sense strand
caaagagcauggagcugua

SEQ ID NO: 1612508 - RNA, 19 nt, Homo sapiens
  misc_RNA (1)...(19): siRNA sense strand
aaucagagccuaccacaaa

SEQ ID NO: 1612509 - RNA, 19 nt, Homo sapiens
  misc_RNA (1)...(19): siRNA sense strand
ggaggcuggugcagaaauu

SEQ ID NO: 1612510 - RNA, 19 nt, Homo sapiens
  misc_RNA (1)...(19): siRNA sense strand
agccagcucuuccaucuua

SEQ ID NO: 1612511 - RNA, 19 nt, Homo sapiens
  misc_RNA (1)...(19): siRNA sense strand
ccacaaacauccaaauucg

SEQ ID NO: 1612512 - RNA, 19 nt, Homo sapiens
  misc_RNA (1)...(19): siRNA sense strand
ggacaggugaacuuggaua

SEQ ID NO: 1612513 - RNA, 19 nt, Homo sapiens
  misc_RNA (1)...(19): siRNA sense strand
gaagccaaccugcucaaug

SEQ ID NO: 1612514 - RNA, 19 nt, Homo sapiens
  misc_RNA (1)...(19): siRNA sense strand
gauaauggagaacucagaa

SEQ ID NO: 1612515 - RNA, 19 nt, Homo sapiens
  misc_RNA (1)...(19): siRNA sense strand
gaacaaagagcuggcugau

SEQ ID NO: 1612516 - RNA, 19 nt, Homo sapiens
  misc_RNA (1)...(19): siRNA sense strand
ggacgaggacuuugugaag

SEQ ID NO: 1612517 - RNA, 19 nt, Homo sapiens
  misc_RNA (1)...(19): siRNA sense strand
ggauucagccuggauaaug

SEQ ID NO: 1612518 - RNA, 19 nt, Homo sapiens
  misc_RNA (1)...(19): siRNA sense strand
ugaccaagaugaagaugag

SEQ ID NO: 1612519 - RNA, 19 nt, Homo sapiens
  misc_RNA (1)...(19): siRNA sense strand
gcucuuccaucuuaaucga

SEQ ID NO: 1612520 - RNA, 19 nt, Homo sapiens
  misc_RNA (1)...(19): siRNA sense strand
ugacuacuuucccgaacaa

SEQ ID NO: 1612521 - RNA, 19 nt, Homo sapiens
  misc_RNA (1)...(19): siRNA sense strand
guggacaggugaacuugga

SEQ ID NO: 1612522 - RNA, 19 nt, Homo sapiens
  misc_RNA (1)...(19): siRNA sense strand
caggugaacuuggauaugg

SEQ ID NO: 1612523 - RNA, 19 nt, Homo sapiens
  misc_RNA (1)...(19): siRNA sense strand
gauucagccuggauaaugg

SEQ ID NO: 1612524 - RNA, 19 nt, Homo sapiens
  misc_RNA (1)...(19): siRNA sense strand
aaagccagcucuuccaucu

SEQ ID NO: 1612525 - RNA, 19 nt, Homo sapiens
  misc_RNA (1)...(19): siRNA sense strand
guauugaaacucuggaaga

SEQ ID NO: 1612526 - RNA, 19 nt, Homo sapiens
  misc_RNA (1)...(19): siRNA sense strand
caucuuaaucgacgaauca

SEQ ID NO: 1612527 - RNA, 19 nt, Homo sapiens
  misc_RNA (1)...(19): siRNA sense strand
cagccuggauaauggagaa

SEQ ID NO: 1612528 - RNA, 19 nt, Homo sapiens
  misc_RNA (1)...(19): siRNA sense strand
cauguaguauugaaacucu

SEQ ID NO: 1612529 - RNA, 19 nt, Homo sapiens
  misc_RNA (1)...(19): siRNA sense strand
ggauaauggagaacucaga

SEQ ID NO: 1612530 - RNA, 19 nt, Homo sapiens
  misc_RNA (1)...(19): siRNA sense strand
agaugaagaugaggaggaa

SEQ ID NO: 1612531 - RNA, 19 nt, Homo sapiens
  misc_RNA (1)...(19): siRNA sense strand
gauaauagagugacauccu

SEQ ID NO: 1612532 - RNA, 19 nt, Homo sapiens
  misc_RNA (1)...(19): siRNA sense strand
auaauagagugacauccuu

SEQ ID NO: 1612533 - RNA, 19 nt, Homo sapiens
  misc_RNA (1)...(19): siRNA sense strand
ggaggugccagcagagcuu

SEQ ID NO: 1612534 - RNA, 19 nt, Homo sapiens
  misc_RNA (1)...(19): siRNA sense strand
uaccaagacccauccaaug

SEQ ID NO: 1612535 - RNA, 19 nt, Homo sapiens
  misc_RNA (1)...(19): siRNA sense strand
uaccacaaacauccaaauu

SEQ ID NO: 1612536 - RNA, 19 nt, Homo sapiens
  misc_RNA (1)...(19): siRNA sense strand
auggagaacucagaagcua

SEQ ID NO: 1612537 - RNA, 19 nt, Homo sapiens
  misc_RNA (1)...(19): siRNA sense strand
cccauccaaugcccaguuu

SEQ ID NO: 1612538 - RNA, 19 nt, Homo sapiens
  misc_RNA (1)...(19): siRNA sense strand
ggcagaaaaugaagccaaa

SEQ ID NO: 1612539 - RNA, 19 nt, Homo sapiens
  misc_RNA (1)...(19): siRNA sense strand
gcuuuauccucaugacuac

SEQ ID NO: 1612540 - RNA, 19 nt, Homo sapiens
  misc_RNA (1)...(19): siRNA sense strand
gacaggugaacuuggauau

SEQ ID NO: 1612541 - RNA, 19 nt, Homo sapiens
  misc_RNA (1)...(19): siRNA sense strand
cgacauccgacucuucauc

SEQ ID NO: 1612542 - RNA, 19 nt, Homo sapiens
  misc_RNA (1)...(19): siRNA sense strand
gaaucagagccuaccacaa

SEQ ID NO: 1612543 - RNA, 19 nt, Homo sapiens
  misc_RNA (1)...(19): siRNA sense strand
uagagugacauccuucaga

SEQ ID NO: 1612544 - RNA, 19 nt, Homo sapiens
  misc_RNA (1)...(19): siRNA sense strand
cuaccaagacccauccaau

SEQ ID NO: 1612545 - RNA, 19 nt, Homo sapiens
  misc_RNA (1)...(19): siRNA sense strand
caccagcuuuauccucaug

SEQ ID NO: 1612546 - RNA, 19 nt, Homo sapiens
  misc_RNA (1)...(19): siRNA sense strand
gggacgaggacuuugugaa

SEQ ID NO: 1612547 - RNA, 19 nt, Homo sapiens
  misc_RNA (1)...(19): siRNA sense strand
gagccagacccugaaggaa

SEQ ID NO: 1612548 - RNA, 19 nt, Homo sapiens
  misc_RNA (1)...(19): siRNA sense strand
ucgugcagcgguuaacaua

SEQ ID NO: 1612549 - RNA, 19 nt, Homo sapiens
  misc_RNA (1)...(19): siRNA sense strand
aggcuggugcagaaauuua

SEQ ID NO: 1612550 - RNA, 19 nt, Homo sapiens
  misc_RNA (1)...(19): siRNA sense strand
aggaggcgcugagggaguu

SEQ ID NO: 1612551 - RNA, 19 nt, Homo sapiens
  misc_RNA (1)...(19): siRNA sense strand
gaggcuggugcagaaauuu

SEQ ID NO: 1612552 - RNA, 19 nt, Homo sapiens
  misc_RNA (1)...(19): siRNA sense strand
ggaagccaaccugcucaau

SEQ ID NO: 1612553 - RNA, 19 nt, Homo sapiens
  misc_RNA (1)...(19): siRNA sense strand
ggcuggugcagaaauuuaa

SEQ ID NO: 1612554 - RNA, 19 nt, Homo sapiens
  misc_RNA (1)...(19): siRNA sense strand
cuucagagaccucauucau

SEQ ID NO: 1612555 - RNA, 19 nt, Homo sapiens
  misc_RNA (1)...(19): siRNA sense strand
acaaagagcuggcugauga

SEQ ID NO: 1612556 - RNA, 19 nt, Homo sapiens
  misc_RNA (1)...(19): siRNA sense strand
caaagagcauggagcugua

SEQ ID NO: 1612557 - RNA, 19 nt, Homo sapiens
  misc_RNA (1)...(19): siRNA sense strand
aaucagagccuaccacaaa

SEQ ID NO: 1612558 - RNA, 19 nt, Homo sapiens
  misc_RNA (1)...(19): siRNA sense strand
ggaggcuggugcagaaauu

SEQ ID NO: 1612559 - RNA, 19 nt, Homo sapiens
  misc_RNA (1)...(19): siRNA sense strand
agccagcucuuccaucuua

SEQ ID NO: 1612560 - RNA, 19 nt, Homo sapiens
  misc_RNA (1)...(19): siRNA sense strand
ccacaaacauccaaauucg

SEQ ID NO: 1612561 - RNA, 19 nt, Homo sapiens
  misc_RNA (1)...(19): siRNA sense strand
ggacaggugaacuuggaua

SEQ ID NO: 1612562 - RNA, 19 nt, Homo sapiens
  misc_RNA (1)...(19): siRNA sense strand
gaagccaaccugcucaaug

SEQ ID NO: 1612563 - RNA, 19 nt, Homo sapiens
  misc_RNA (1)...(19): siRNA sense strand
gauaauggagaacucagaa

SEQ ID NO: 1612564 - RNA, 19 nt, Homo sapiens
  misc_RNA (1)...(19): siRNA sense strand
gaacaaagagcuggcugau

SEQ ID NO: 1612565 - RNA, 19 nt, Homo sapiens
  misc_RNA (1)...(19): siRNA sense strand
ggacgaggacuuugugaag

SEQ ID NO: 1612566 - RNA, 19 nt, Homo sapiens
  misc_RNA (1)...(19): siRNA sense strand
ggauucagccuggauaaug

SEQ ID NO: 1612567 - RNA, 19 nt, Homo sapiens
  misc_RNA (1)...(19): siRNA sense strand
gcucuuccaucuuaaucga

SEQ ID NO: 1612568 - RNA, 19 nt, Homo sapiens
  misc_RNA (1)...(19): siRNA sense strand
ugacuacuuucccgaacaa

SEQ ID NO: 1612569 - RNA, 19 nt, Homo sapiens
  misc_RNA (1)...(19): siRNA sense strand
guggacaggugaacuugga

SEQ ID NO: 1612570 - RNA, 19 nt, Homo sapiens
  misc_RNA (1)...(19): siRNA sense strand
caggugaacuuggauaugg

SEQ ID NO: 1612571 - RNA, 19 nt, Homo sapiens
  misc_RNA (1)...(19): siRNA sense strand
gauucagccuggauaaugg

SEQ ID NO: 1612572 - RNA, 19 nt, Homo sapiens
  misc_RNA (1)...(19): siRNA sense strand
aaagccagcucuuccaucu

SEQ ID NO: 1612573 - RNA, 19 nt, Homo sapiens
  misc_RNA (1)...(19): siRNA sense strand
guauugaaacucuggaaga

SEQ ID NO: 1612574 - RNA, 19 nt, Homo sapiens
  misc_RNA (1)...(19): siRNA sense strand
caucuuaaucgacgaauca

SEQ ID NO: 1612575 - RNA, 19 nt, Homo sapiens
  misc_RNA (1)...(19): siRNA sense strand
cagccuggauaauggagaa

SEQ ID NO: 1612576 - RNA, 19 nt, Homo sapiens
  misc_RNA (1)...(19): siRNA sense strand
cauguaguauugaaacucu

SEQ ID NO: 1612577 - RNA, 19 nt, Homo sapiens
  misc_RNA (1)...(19): siRNA sense strand
ggauaauggagaacucaga

SEQ ID NO: 1612578 - RNA, 19 nt, Homo sapiens
  misc_RNA (1)...(19): siRNA sense strand
agaugaagaugaggaggaa

SEQ ID NO: 1612579 - RNA, 19 nt, Homo sapiens
  misc_RNA (1)...(19): siRNA sense strand
ggaggugccagcagagcuu

SEQ ID NO: 1612580 - RNA, 19 nt, Homo sapiens
  misc_RNA (1)...(19): siRNA sense strand
uaccaagacccauccaaug

SEQ ID NO: 1612581 - RNA, 19 nt, Homo sapiens
  misc_RNA (1)...(19): siRNA sense strand
uaccacaaacauccaaauu

SEQ ID NO: 1612582 - RNA, 19 nt, Homo sapiens
  misc_RNA (1)...(19): siRNA sense strand
auggagaacucagaagcua

SEQ ID NO: 1612583 - RNA, 19 nt, Homo sapiens
  misc_RNA (1)...(19): siRNA sense strand
cccauccaaugcccaguuu

SEQ ID NO: 1612584 - RNA, 19 nt, Homo sapiens
  misc_RNA (1)...(19): siRNA sense strand
ggcagaaaaugaagccaaa

SEQ ID NO: 1612585 - RNA, 19 nt, Homo sapiens
  misc_RNA (1)...(19): siRNA sense strand
gcuuuauccucaugacuac

SEQ ID NO: 1612586 - RNA, 19 nt, Homo sapiens
  misc_RNA (1)...(19): siRNA sense strand
gacaggugaacuuggauau

SEQ ID NO: 1612587 - RNA, 19 nt, Homo sapiens
  misc_RNA (1)...(19): siRNA sense strand
cgacauccgacucuucauc

SEQ ID NO: 1612588 - RNA, 19 nt, Homo sapiens
  misc_RNA (1)...(19): siRNA sense strand
gaaucagagccuaccacaa

SEQ ID NO: 1612589 - RNA, 19 nt, Homo sapiens
  misc_RNA (1)...(19): siRNA sense strand
cuaccaagacccauccaau

SEQ ID NO: 1612590 - RNA, 19 nt, Homo sapiens
  misc_RNA (1)...(19): siRNA sense strand
caccagcuuuauccucaug

SEQ ID NO: 1612591 - RNA, 19 nt, Homo sapiens
  misc_RNA (1)...(19): siRNA sense strand
gggacgaggacuuugugaa

SEQ ID NO: 1612592 - RNA, 19 nt, Homo sapiens
  misc_RNA (1)...(19): siRNA sense strand
gagccagacccugaaggaa

SEQ ID NO: 1612593 - RNA, 19 nt, Homo sapiens
  misc_RNA (1)...(19): siRNA sense strand
ucgugcagcgguuaacaua

SEQ ID NO: 1612594 - RNA, 19 nt, Homo sapiens
  misc_RNA (1)...(19): siRNA sense strand
aggcuggugcagaaauuua

SEQ ID NO: 1612595 - RNA, 19 nt, Homo sapiens
  misc_RNA (1)...(19): siRNA sense strand
gaggcuggugcagaaauuu

SEQ ID NO: 1612596 - RNA, 19 nt, Homo sapiens
  misc_RNA (1)...(19): siRNA sense strand
ggaagccaaccugcucaau

SEQ ID NO: 1612597 - RNA, 19 nt, Homo sapiens
  misc_RNA (1)...(19): siRNA sense strand
ggcuggugcagaaauuuaa

SEQ ID NO: 1612598 - RNA, 19 nt, Homo sapiens
  misc_RNA (1)...(19): siRNA sense strand
uaaggaggcuuucaacaug

SEQ ID NO: 1612599 - RNA, 19 nt, Homo sapiens
  misc_RNA (1)...(19): siRNA sense strand
gaaccgugauggcuucauu

SEQ ID NO: 1612600 - RNA, 19 nt, Homo sapiens
  misc_RNA (1)...(19): siRNA sense strand
aaacauggcgccaaggaua

SEQ ID NO: 1612601 - RNA, 19 nt, Homo sapiens
  misc_RNA (1)...(19): siRNA sense strand
gggaggcacccauugauaa

SEQ ID NO: 1612602 - RNA, 19 nt, Homo sapiens
  misc_RNA (1)...(19): siRNA sense strand
gaaaggcaacuucaacuac

SEQ ID NO: 1612603 - RNA, 19 nt, Homo sapiens
  misc_RNA (1)...(19): siRNA sense strand
cgugauggcuucauugaca

SEQ ID NO: 1612604 - RNA, 19 nt, Homo sapiens
  misc_RNA (1)...(19): siRNA sense strand
gauaagaaaggcaacuuca

SEQ ID NO: 1612605 - RNA, 19 nt, Homo sapiens
  misc_RNA (1)...(19): siRNA sense strand
caacaugauugaccagaac

SEQ ID NO: 1612606 - RNA, 19 nt, Homo sapiens
  misc_RNA (1)...(19): siRNA sense strand
agaaaggcaacuucaacua

SEQ ID NO: 1612607 - RNA, 19 nt, Homo sapiens
  misc_RNA (1)...(19): siRNA sense strand
cauccaaugucuucgcaau

SEQ ID NO: 1612608 - RNA, 19 nt, Homo sapiens
  misc_RNA (1)...(19): siRNA sense strand
ccaaugucuucgcaauguu

SEQ ID NO: 1612609 - RNA, 19 nt, Homo sapiens
  misc_RNA (1)...(19): siRNA sense strand
caaugucuucgcaauguuu

SEQ ID NO: 1612610 - RNA, 19 nt, Homo sapiens
  misc_RNA (1)...(19): siRNA sense strand
uaagaaaggcaacuucaac

SEQ ID NO: 1612611 - RNA, 19 nt, Homo sapiens
  misc_RNA (1)...(19): siRNA sense strand
aaggaggcuuucaacauga

SEQ ID NO: 1612612 - RNA, 19 nt, Homo sapiens
  misc_RNA (1)...(19): siRNA sense strand
ccaaggauaaagacgacua

SEQ ID NO: 1612613 - RNA, 19 nt, Homo sapiens
  misc_RNA (1)...(19): siRNA sense strand
ggaaguggacgagauguac

SEQ ID NO: 1612614 - RNA, 19 nt, Homo sapiens
  misc_RNA (1)...(19): siRNA sense strand
uuaaggaggcuuucaacau

SEQ ID NO: 1612615 - RNA, 19 nt, Homo sapiens
  misc_RNA (1)...(19): siRNA sense strand
aggcacccauugauaagaa

SEQ ID NO: 1612616 - RNA, 19 nt, Homo sapiens
  misc_RNA (1)...(19): siRNA sense strand
uccaaugucuucgcaaugu

SEQ ID NO: 1612617 - RNA, 19 nt, Homo sapiens
  misc_RNA (1)...(19): siRNA sense strand
ggaggcacccauugauaag

SEQ ID NO: 1612618 - RNA, 19 nt, Homo sapiens
  misc_RNA (1)...(19): siRNA sense strand
gugauggcuucauugacaa

SEQ ID NO: 1612619 - RNA, 19 nt, Homo sapiens
  misc_RNA (1)...(19): siRNA sense strand
aagccaagaccaccaagaa

SEQ ID NO: 1612620 - RNA, 19 nt, Homo sapiens
  misc_RNA (1)...(19): siRNA sense strand
cgggaggcacccauugaua

SEQ ID NO: 1612621 - RNA, 19 nt, Homo sapiens
  misc_RNA (1)...(19): siRNA sense strand
ucaaacauggcgccaagga

SEQ ID NO: 1612622 - RNA, 19 nt, Homo sapiens
  misc_RNA (1)...(19): siRNA sense strand
ccaaagccaagaccaccaa

SEQ ID NO: 1612623 - RNA, 19 nt, Homo sapiens
  misc_RNA (1)...(19): siRNA sense strand
ucccagauccaggaguuua

SEQ ID NO: 1612624 - RNA, 19 nt, Homo sapiens
  misc_RNA (1)...(19): siRNA sense strand
ucacccgcauccucaaaca

SEQ ID NO: 1612625 - RNA, 19 nt, Homo sapiens
  misc_RNA (1)...(19): siRNA sense strand
ggcacccauugauaagaaa

SEQ ID NO: 1612626 - RNA, 19 nt, Homo sapiens
  misc_RNA (1)...(19): siRNA sense strand
aggaggaccugcacgacau

SEQ ID NO: 1612627 - RNA, 19 nt, Homo sapiens
  misc_RNA (1)...(19): siRNA sense strand
guaccgggaggcacccauu

SEQ ID NO: 1612628 - RNA, 19 nt, Homo sapiens
  misc_RNA (1)...(19): siRNA sense strand
ugaggaaguggacgagaug

SEQ ID NO: 1612629 - RNA, 19 nt, Homo sapiens
  misc_RNA (1)...(19): siRNA sense strand
agucccagauccaggaguu

SEQ ID NO: 1612630 - RNA, 19 nt, Homo sapiens
  misc_RNA (1)...(19): siRNA sense strand
uaaggaggcuuucaacaug

SEQ ID NO: 1612631 - RNA, 19 nt, Homo sapiens
  misc_RNA (1)...(19): siRNA sense strand
gaaccgugauggcuucauu

SEQ ID NO: 1612632 - RNA, 19 nt, Homo sapiens
  misc_RNA (1)...(19): siRNA sense strand
aaacauggcgccaaggaua

SEQ ID NO: 1612633 - RNA, 19 nt, Homo sapiens
  misc_RNA (1)...(19): siRNA sense strand
gggaggcacccauugauaa

SEQ ID NO: 1612634 - RNA, 19 nt, Homo sapiens
  misc_RNA (1)...(19): siRNA sense strand
gaaaggcaacuucaacuac

SEQ ID NO: 1612635 - RNA, 19 nt, Homo sapiens
  misc_RNA (1)...(19): siRNA sense strand
cgugauggcuucauugaca

SEQ ID NO: 1612636 - RNA, 19 nt, Homo sapiens
  misc_RNA (1)...(19): siRNA sense strand
gauaagaaaggcaacuuca

SEQ ID NO: 1612637 - RNA, 19 nt, Homo sapiens
  misc_RNA (1)...(19): siRNA sense strand
caacaugauugaccagaac

SEQ ID NO: 1612638 - RNA, 19 nt, Homo sapiens
  misc_RNA (1)...(19): siRNA sense strand
agaaaggcaacuucaacua

SEQ ID NO: 1612639 - RNA, 19 nt, Homo sapiens
  misc_RNA (1)...(19): siRNA sense strand
cauccaaugucuucgcaau

SEQ ID NO: 1612640 - RNA, 19 nt, Homo sapiens
  misc_RNA (1)...(19): siRNA sense strand
ccaaugucuucgcaauguu

SEQ ID NO: 1612641 - RNA, 19 nt, Homo sapiens
  misc_RNA (1)...(19): siRNA sense strand
caaugucuucgcaauguuu

SEQ ID NO: 1612642 - RNA, 19 nt, Homo sapiens
  misc_RNA (1)...(19): siRNA sense strand
uaagaaaggcaacuucaac

SEQ ID NO: 1612643 - RNA, 19 nt, Homo sapiens
  misc_RNA (1)...(19): siRNA sense strand
aaggaggcuuucaacauga

SEQ ID NO: 1612644 - RNA, 19 nt, Homo sapiens
  misc_RNA (1)...(19): siRNA sense strand
ccaaggauaaagacgacua

SEQ ID NO: 1612645 - RNA, 19 nt, Homo sapiens
  misc_RNA (1)...(19): siRNA sense strand
ggaaguggacgagauguac

SEQ ID NO: 1612646 - RNA, 19 nt, Homo sapiens
  misc_RNA (1)...(19): siRNA sense strand
uuaaggaggcuuucaacau

SEQ ID NO: 1612647 - RNA, 19 nt, Homo sapiens
  misc_RNA (1)...(19): siRNA sense strand
aggcacccauugauaagaa

SEQ ID NO: 1612648 - RNA, 19 nt, Homo sapiens
  misc_RNA (1)...(19): siRNA sense strand
uccaaugucuucgcaaugu

SEQ ID NO: 1612649 - RNA, 19 nt, Homo sapiens
  misc_RNA (1)...(19): siRNA sense strand
ggaggcacccauugauaag

SEQ ID NO: 1612650 - RNA, 19 nt, Homo sapiens
  misc_RNA (1)...(19): siRNA sense strand
gugauggcuucauugacaa

SEQ ID NO: 1612651 - RNA, 19 nt, Homo sapiens
  misc_RNA (1)...(19): siRNA sense strand
aagccaagaccaccaagaa

SEQ ID NO: 1612652 - RNA, 19 nt, Homo sapiens
  misc_RNA (1)...(19): siRNA sense strand
cgggaggcacccauugaua

SEQ ID NO: 1612653 - RNA, 19 nt, Homo sapiens
  misc_RNA (1)...(19): siRNA sense strand
ucaaacauggcgccaagga

SEQ ID NO: 1612654 - RNA, 19 nt, Homo sapiens
  misc_RNA (1)...(19): siRNA sense strand
ccaaagccaagaccaccaa

SEQ ID NO: 1612655 - RNA, 19 nt, Homo sapiens
  misc_RNA (1)...(19): siRNA sense strand
ucccagauccaggaguuua

SEQ ID NO: 1612656 - RNA, 19 nt, Homo sapiens
  misc_RNA (1)...(19): siRNA sense strand
ucacccgcauccucaaaca

SEQ ID NO: 1612657 - RNA, 19 nt, Homo sapiens
  misc_RNA (1)...(19): siRNA sense strand
ggcacccauugauaagaaa

SEQ ID NO: 1612658 - RNA, 19 nt, Homo sapiens
  misc_RNA (1)...(19): siRNA sense strand
aggaggaccugcacgacau

SEQ ID NO: 1612659 - RNA, 19 nt, Homo sapiens
  misc_RNA (1)...(19): siRNA sense strand
guaccgggaggcacccauu

SEQ ID NO: 1612660 - RNA, 19 nt, Homo sapiens
  misc_RNA (1)...(19): siRNA sense strand
ugaggaaguggacgagaug

SEQ ID NO: 1612661 - RNA, 19 nt, Homo sapiens
  misc_RNA (1)...(19): siRNA sense strand
agucccagauccaggaguu

SEQ ID NO: 1612662 - RNA, 19 nt, Homo sapiens
  misc_RNA (1)...(19): siRNA sense strand
gaagaucuauucagccuua

SEQ ID NO: 1612663 - RNA, 19 nt, Homo sapiens
  misc_RNA (1)...(19): siRNA sense strand
gaauccagcuacuacauua

SEQ ID NO: 1612664 - RNA, 19 nt, Homo sapiens
  misc_RNA (1)...(19): siRNA sense strand
gaaugagucugaagaucua

SEQ ID NO: 1612665 - RNA, 19 nt, Homo sapiens
  misc_RNA (1)...(19): siRNA sense strand
caggagagcugcugucuuc

SEQ ID NO: 1612666 - RNA, 19 nt, Homo sapiens
  misc_RNA (1)...(19): siRNA sense strand
cauugaaacuguaugugua

SEQ ID NO: 1612667 - RNA, 19 nt, Homo sapiens
  misc_RNA (1)...(19): siRNA sense strand
ugacuggacuuucuauuag

SEQ ID NO: 1612668 - RNA, 19 nt, Homo sapiens
  misc_RNA (1)...(19): siRNA sense strand
guccagcuguccucaguua

SEQ ID NO: 1612669 - RNA, 19 nt, Homo sapiens
  misc_RNA (1)...(19): siRNA sense strand
aaacuuaccuggcauugca

SEQ ID NO: 1612670 - RNA, 19 nt, Homo sapiens
  misc_RNA (1)...(19): siRNA sense strand
gcagauacagucaugaaug

SEQ ID NO: 1612671 - RNA, 19 nt, Homo sapiens
  misc_RNA (1)...(19): siRNA sense strand
gagcugguuuggagccuuu

SEQ ID NO: 1612672 - RNA, 19 nt, Homo sapiens
  misc_RNA (1)...(19): siRNA sense strand
ccacacagugauuauauaa

SEQ ID NO: 1612673 - RNA, 19 nt, Homo sapiens
  misc_RNA (1)...(19): siRNA sense strand
uaccaggucugaugccuuu

SEQ ID NO: 1612674 - RNA, 19 nt, Homo sapiens
  misc_RNA (1)...(19): siRNA sense strand
caaugacacucuuaaggau

SEQ ID NO: 1612675 - RNA, 19 nt, Homo sapiens
  misc_RNA (1)...(19): siRNA sense strand
cauuggauaugguuauuug

SEQ ID NO: 1612676 - RNA, 19 nt, Homo sapiens
  misc_RNA (1)...(19): siRNA sense strand
gagcagauacagucaugaa

SEQ ID NO: 1612677 - RNA, 19 nt, Homo sapiens
  misc_RNA (1)...(19): siRNA sense strand
ggagugagcauucguuucu

SEQ ID NO: 1612678 - RNA, 19 nt, Homo sapiens
  misc_RNA (1)...(19): siRNA sense strand
gcaaaaccauugaaacugu

SEQ ID NO: 1612679 - RNA, 19 nt, Homo sapiens
  misc_RNA (1)...(19): siRNA sense strand
guaaaccagucccucacuu

SEQ ID NO: 1612680 - RNA, 19 nt, Homo sapiens
  misc_RNA (1)...(19): siRNA sense strand
gcugaaagcaaacguugaa

SEQ ID NO: 1612681 - RNA, 19 nt, Homo sapiens
  misc_RNA (1)...(19): siRNA sense strand
gaccacacagugauuauau

SEQ ID NO: 1612682 - RNA, 19 nt, Homo sapiens
  misc_RNA (1)...(19): siRNA sense strand
gaagugauuauuacaccaa

SEQ ID NO: 1612683 - RNA, 19 nt, Homo sapiens
  misc_RNA (1)...(19): siRNA sense strand
cgaaacacaugaagcaaaa

SEQ ID NO: 1612684 - RNA, 19 nt, Homo sapiens
  misc_RNA (1)...(19): siRNA sense strand
guuuggagccuuucuuuga

SEQ ID NO: 1612685 - RNA, 19 nt, Homo sapiens
  misc_RNA (1)...(19): siRNA sense strand
guuauugccaccacaagua

SEQ ID NO: 1612686 - RNA, 19 nt, Homo sapiens
  misc_RNA (1)...(19): siRNA sense strand
uuaaggaucugcugaaagc

SEQ ID NO: 1612687 - RNA, 19 nt, Homo sapiens
  misc_RNA (1)...(19): siRNA sense strand
ugaaaagccuguaaagaug

SEQ ID NO: 1612688 - RNA, 19 nt, Homo sapiens
  misc_RNA (1)...(19): siRNA sense strand
ugucgagaagugauuauua

SEQ ID NO: 1612689 - RNA, 19 nt, Homo sapiens
  misc_RNA (1)...(19): siRNA sense strand
cugacuggacuuucuauua

SEQ ID NO: 1612690 - RNA, 19 nt, Homo sapiens
  misc_RNA (1)...(19): siRNA sense strand
ugauaacugucgagaagug

SEQ ID NO: 1612691 - RNA, 19 nt, Homo sapiens
  misc_RNA (1)...(19): siRNA sense strand
acaaugacacucuuaagga

SEQ ID NO: 1612692 - RNA, 19 nt, Homo sapiens
  misc_RNA (1)...(19): siRNA sense strand
gcuuaucuauagcagcaaa

SEQ ID NO: 1612693 - RNA, 19 nt, Homo sapiens
  misc_RNA (1)...(19): siRNA sense strand
gaacuacaggaauugaaca

SEQ ID NO: 1612694 - RNA, 19 nt, Homo sapiens
  misc_RNA (1)...(19): siRNA sense strand
acugauaacugucgagaag

SEQ ID NO: 1612695 - RNA, 19 nt, Homo sapiens
  misc_RNA (1)...(19): siRNA sense strand
ucacuucugugccaccaau

SEQ ID NO: 1612696 - RNA, 19 nt, Homo sapiens
  misc_RNA (1)...(19): siRNA sense strand
ggcauuggauaugguuauu

SEQ ID NO: 1612697 - RNA, 19 nt, Homo sapiens
  misc_RNA (1)...(19): siRNA sense strand
ccuaggauguggcauugga

SEQ ID NO: 1612698 - RNA, 19 nt, Homo sapiens
  misc_RNA (1)...(19): siRNA sense strand
acacagacacugauaacug

SEQ ID NO: 1612699 - RNA, 19 nt, Homo sapiens
  misc_RNA (1)...(19): siRNA sense strand
uaccaacaguaccguuauu

SEQ ID NO: 1612700 - RNA, 19 nt, Homo sapiens
  misc_RNA (1)...(19): siRNA sense strand
gagccuuucuuugauuuua

SEQ ID NO: 1612701 - RNA, 19 nt, Homo sapiens
  misc_RNA (1)...(19): siRNA sense strand
guacaacacagacacugau

SEQ ID NO: 1612702 - RNA, 19 nt, Homo sapiens
  misc_RNA (1)...(19): siRNA sense strand
ccgaguuccucccgucauu

SEQ ID NO: 1612703 - RNA, 19 nt, Homo sapiens
  misc_RNA (1)...(19): siRNA sense strand
uggcuuaccagaacuugua

SEQ ID NO: 1612704 - RNA, 19 nt, Homo sapiens
  misc_RNA (1)...(19): siRNA sense strand
ccaaugaauccagcuacua

SEQ ID NO: 1612705 - RNA, 19 nt, Homo sapiens
  misc_RNA (1)...(19): siRNA sense strand
gucgagaagugauuauuac

SEQ ID NO: 1612706 - RNA, 19 nt, Homo sapiens
  misc_RNA (1)...(19): siRNA sense strand
caacacagacacugauaac

SEQ ID NO: 1612707 - RNA, 19 nt, Homo sapiens
  misc_RNA (1)...(19): siRNA sense strand
caaaaccauugaaacugua

SEQ ID NO: 1612708 - RNA, 19 nt, Homo sapiens
  misc_RNA (1)...(19): siRNA sense strand
ugccaaugcuucugaguca

SEQ ID NO: 1612709 - RNA, 19 nt, Homo sapiens
  misc_RNA (1)...(19): siRNA sense strand
acaccuauuacaccucuua

SEQ ID NO: 1612710 - RNA, 19 nt, Homo sapiens
  misc_RNA (1)...(19): siRNA sense strand
gauguggcauuggauaugg

SEQ ID NO: 1612711 - RNA, 19 nt, Homo sapiens
  misc_RNA (1)...(19): siRNA sense strand
gacaaugacacucuuaagg

SEQ ID NO: 1612712 - RNA, 19 nt, Homo sapiens
  misc_RNA (1)...(19): siRNA sense strand
accaggaacuacaggaauu

SEQ ID NO: 1612713 - RNA, 19 nt, Homo sapiens
  misc_RNA (1)...(19): siRNA sense strand
cuauucagccuuaucgaaa

SEQ ID NO: 1612714 - RNA, 19 nt, Homo sapiens
  misc_RNA (1)...(19): siRNA sense strand
ugaaugagucugaagaucu

SEQ ID NO: 1612715 - RNA, 19 nt, Homo sapiens
  misc_RNA (1)...(19): siRNA sense strand
gacgcugccuccucacuca

SEQ ID NO: 1612716 - RNA, 19 nt, Homo sapiens
  misc_RNA (1)...(19): siRNA sense strand
ucaguaguguucucaguac

SEQ ID NO: 1612717 - RNA, 19 nt, Homo sapiens
  misc_RNA (1)...(19): siRNA sense strand
ccauugaaacuguaugugu

SEQ ID NO: 1612718 - RNA, 19 nt, Homo sapiens
  misc_RNA (1)...(19): siRNA sense strand
ugaauccagcuacuacauu

SEQ ID NO: 1612719 - RNA, 19 nt, Homo sapiens
  misc_RNA (1)...(19): siRNA sense strand
caaauggcugguacaccua

SEQ ID NO: 1612720 - RNA, 19 nt, Homo sapiens
  misc_RNA (1)...(19): siRNA sense strand
gaaagcaaacguugaaaag

SEQ ID NO: 1612721 - RNA, 19 nt, Homo sapiens
  misc_RNA (1)...(19): siRNA sense strand
gcgagagaccucagucaca

SEQ ID NO: 1612722 - RNA, 19 nt, Homo sapiens
  misc_RNA (1)...(19): siRNA sense strand
caaugaauccagcuacuac

SEQ ID NO: 1612723 - RNA, 19 nt, Homo sapiens
  misc_RNA (1)...(19): siRNA sense strand
uggagccuuucuuugauuu

SEQ ID NO: 1612724 - RNA, 19 nt, Homo sapiens
  misc_RNA (1)...(19): siRNA sense strand
ccuauuacaccucuuaaag

SEQ ID NO: 1612725 - RNA, 19 nt, Homo sapiens
  misc_RNA (1)...(19): siRNA sense strand
ggacacagagcugguuugg

SEQ ID NO: 1612726 - RNA, 19 nt, Homo sapiens
  misc_RNA (1)...(19): siRNA sense strand
gcagcacuggcaggucuua

SEQ ID NO: 1612727 - RNA, 19 nt, Homo sapiens
  misc_RNA (1)...(19): siRNA sense strand
ggaacuacaggaauugaac

SEQ ID NO: 1612728 - RNA, 19 nt, Homo sapiens
  misc_RNA (1)...(19): siRNA sense strand
cagcuguccucaguuaauc

SEQ ID NO: 1612729 - RNA, 19 nt, Homo sapiens
  misc_RNA (1)...(19): siRNA sense strand
gaggaaggaaagaaaauuu

SEQ ID NO: 1612730 - RNA, 19 nt, Homo sapiens
  misc_RNA (1)...(19): siRNA sense strand
gcauuggauaugguuauuu

SEQ ID NO: 1612731 - RNA, 19 nt, Homo sapiens
  misc_RNA (1)...(19): siRNA sense strand
ggauguggcauuggauaug

SEQ ID NO: 1612732 - RNA, 19 nt, Homo sapiens
  misc_RNA (1)...(19): siRNA sense strand
uaucgaaacacaugaagca

SEQ ID NO: 1612733 - RNA, 19 nt, Homo sapiens
  misc_RNA (1)...(19): siRNA sense strand
uggagcagauacagucaug

SEQ ID NO: 1612734 - RNA, 19 nt, Homo sapiens
  misc_RNA (1)...(19): siRNA sense strand
accacacagugauuauaua

SEQ ID NO: 1612735 - RNA, 19 nt, Homo sapiens
  misc_RNA (1)...(19): siRNA sense strand
ugcuggagguggaaucaaa

SEQ ID NO: 1612736 - RNA, 19 nt, Homo sapiens
  misc_RNA (1)...(19): siRNA sense strand
gucaguaguguucucagua

SEQ ID NO: 1612737 - RNA, 19 nt, Homo sapiens
  misc_RNA (1)...(19): siRNA sense strand
uaacugucgagaagugauu

SEQ ID NO: 1612738 - RNA, 19 nt, Homo sapiens
  misc_RNA (1)...(19): siRNA sense strand
ucuuaaggaucugcugaaa

SEQ ID NO: 1612739 - RNA, 19 nt, Homo sapiens
  misc_RNA (1)...(19): siRNA sense strand
ucgaaacacaugaagcaaa

SEQ ID NO: 1612740 - RNA, 19 nt, Homo sapiens
  misc_RNA (1)...(19): siRNA sense strand
uaaaccagucccucacuuc

SEQ ID NO: 1612741 - RNA, 19 nt, Homo sapiens
  misc_RNA (1)...(19): siRNA sense strand
uuagaccacacagugauua

SEQ ID NO: 1612742 - RNA, 19 nt, Homo sapiens
  misc_RNA (1)...(19): siRNA sense strand
uaggauguggcauuggaua

SEQ ID NO: 1612743 - RNA, 19 nt, Homo sapiens
  misc_RNA (1)...(19): siRNA sense strand
uacaggaauugaacagagu

SEQ ID NO: 1612744 - RNA, 19 nt, Homo sapiens
  misc_RNA (1)...(19): siRNA sense strand
acaacacagacacugauaa

SEQ ID NO: 1612745 - RNA, 19 nt, Homo sapiens
  misc_RNA (1)...(19): siRNA sense strand
uacauuaccaggucugaug

SEQ ID NO: 1612746 - RNA, 19 nt, Homo sapiens
  misc_RNA (1)...(19): siRNA sense strand
ccaccaggaacuacaggaa

SEQ ID NO: 1612747 - RNA, 19 nt, Homo sapiens
  misc_RNA (1)...(19): siRNA sense strand
ccagcuguccucaguuaau

SEQ ID NO: 1612748 - RNA, 19 nt, Homo sapiens
  misc_RNA (1)...(19): siRNA sense strand
gauaacugucgagaaguga

SEQ ID NO: 1612749 - RNA, 19 nt, Homo sapiens
  misc_RNA (1)...(19): siRNA sense strand
agaccacacagugauuaua

SEQ ID NO: 1612750 - RNA, 19 nt, Homo sapiens
  misc_RNA (1)...(19): siRNA sense strand
caccagcugucaguagugu

SEQ ID NO: 1612751 - RNA, 19 nt, Homo sapiens
  misc_RNA (1)...(19): siRNA sense strand
cagccuaggauguggcauu

SEQ ID NO: 1612752 - RNA, 19 nt, Homo sapiens
  misc_RNA (1)...(19): siRNA sense strand
gaucuauucagccuuaucg

SEQ ID NO: 1612753 - RNA, 19 nt, Homo sapiens
  misc_RNA (1)...(19): siRNA sense strand
uuggagccuuucuuugauu

SEQ ID NO: 1612754 - RNA, 19 nt, Homo sapiens
  misc_RNA (1)...(19): siRNA sense strand
uacaacacagacacugaua

SEQ ID NO: 1612755 - RNA, 19 nt, Homo sapiens
  misc_RNA (1)...(19): siRNA sense strand
ccaccaaugaauccagcua

SEQ ID NO: 1612756 - RNA, 19 nt, Homo sapiens
  misc_RNA (1)...(19): siRNA sense strand
ggacaaauggcugguacac

SEQ ID NO: 1612757 - RNA, 19 nt, Homo sapiens
  misc_RNA (1)...(19): siRNA sense strand
ggucugccaccucuuccuu

SEQ ID NO: 1612758 - RNA, 19 nt, Homo sapiens
  misc_RNA (1)...(19): siRNA sense strand
uuauugccaccacaaguaa

SEQ ID NO: 1612759 - RNA, 19 nt, Homo sapiens
  misc_RNA (1)...(19): siRNA sense strand
ugucaguaguguucucagu

SEQ ID NO: 1612760 - RNA, 19 nt, Homo sapiens
  misc_RNA (1)...(19): siRNA sense strand
ugccacaacuacugcaaag

SEQ ID NO: 1612761 - RNA, 19 nt, Homo sapiens
  misc_RNA (1)...(19): siRNA sense strand
accagucccucacuucugu

SEQ ID NO: 1612762 - RNA, 19 nt, Homo sapiens
  misc_RNA (1)...(19): siRNA sense strand
ugacagacgugcuaauuau

SEQ ID NO: 1612763 - RNA, 19 nt, Homo sapiens
  misc_RNA (1)...(19): siRNA sense strand
gacaaagacuacaagaauu

SEQ ID NO: 1612764 - RNA, 19 nt, Homo sapiens
  misc_RNA (1)...(19): siRNA sense strand
caaagggacugcuguguuc

SEQ ID NO: 1612765 - RNA, 19 nt, Homo sapiens
  misc_RNA (1)...(19): siRNA sense strand
gugcaaaccugaagagaug

SEQ ID NO: 1612766 - RNA, 19 nt, Homo sapiens
  misc_RNA (1)...(19): siRNA sense strand
caacagcaacaacaacuuu

SEQ ID NO: 1612767 - RNA, 19 nt, Homo sapiens
  misc_RNA (1)...(19): siRNA sense strand
cugaagagaugcauguaaa

SEQ ID NO: 1612768 - RNA, 19 nt, Homo sapiens
  misc_RNA (1)...(19): siRNA sense strand
gaagagaugcauguaaaga

SEQ ID NO: 1612769 - RNA, 19 nt, Homo sapiens
  misc_RNA (1)...(19): siRNA sense strand
gcaaugugcggcaaacaaa

SEQ ID NO: 1612770 - RNA, 19 nt, Homo sapiens
  misc_RNA (1)...(19): siRNA sense strand
gcaacaacaacuuugauga

SEQ ID NO: 1612771 - RNA, 19 nt, Homo sapiens
  misc_RNA (1)...(19): siRNA sense strand
caacuuugaugaugacuac

SEQ ID NO: 1612772 - RNA, 19 nt, Homo sapiens
  misc_RNA (1)...(19): siRNA sense strand
ucagguaauugguauguga

SEQ ID NO: 1612773 - RNA, 19 nt, Homo sapiens
  misc_RNA (1)...(19): siRNA sense strand
agacaaagacuacaagaau

SEQ ID NO: 1612774 - RNA, 19 nt, Homo sapiens
  misc_RNA (1)...(19): siRNA sense strand
ggucucagguaauugguau

SEQ ID NO: 1612775 - RNA, 19 nt, Homo sapiens
  misc_RNA (1)...(19): siRNA sense strand
cuacaagaauuucaacagu

SEQ ID NO: 1612776 - RNA, 19 nt, Homo sapiens
  misc_RNA (1)...(19): siRNA sense strand
caacaacaacuuugaugau

SEQ ID NO: 1612777 - RNA, 19 nt, Homo sapiens
  misc_RNA (1)...(19): siRNA sense strand
acaacaacuuugaugauga

SEQ ID NO: 1612778 - RNA, 19 nt, Homo sapiens
  misc_RNA (1)...(19): siRNA sense strand
agagaugcauguaaagaau

SEQ ID NO: 1612779 - RNA, 19 nt, Homo sapiens
  misc_RNA (1)...(19): siRNA sense strand
gaagaagugcaaaccugaa

SEQ ID NO: 1612780 - RNA, 19 nt, Homo sapiens
  misc_RNA (1)...(19): siRNA sense strand
gcaacaacagcaacaacaa

SEQ ID NO: 1612781 - RNA, 19 nt, Homo sapiens
  misc_RNA (1)...(19): siRNA sense strand
caacaacuuugaugaugac

SEQ ID NO: 1612782 - RNA, 19 nt, Homo sapiens
  misc_RNA (1)...(19): siRNA sense strand
guuggaauuugcaagaaga

SEQ ID NO: 1612783 - RNA, 19 nt, Homo sapiens
  misc_RNA (1)...(19): siRNA sense strand
gcugacagacgugcuaauu

SEQ ID NO: 1612784 - RNA, 19 nt, Homo sapiens
  misc_RNA (1)...(19): siRNA sense strand
cccaauuggucucagguaa

SEQ ID NO: 1612785 - RNA, 19 nt, Homo sapiens
  misc_RNA (1)...(19): siRNA sense strand
gaauuugcaagaagaagug

SEQ ID NO: 1612786 - RNA, 19 nt, Homo sapiens
  misc_RNA (1)...(19): siRNA sense strand
ggaauuugcaagaagaagu

SEQ ID NO: 1612787 - RNA, 19 nt, Homo sapiens
  misc_RNA (1)...(19): siRNA sense strand
aacaacaacuuugaugaug

SEQ ID NO: 1612788 - RNA, 19 nt, Homo sapiens
  misc_RNA (1)...(19): siRNA sense strand
aaagaaugguugggcaaug

SEQ ID NO: 1612789 - RNA, 19 nt, Homo sapiens
  misc_RNA (1)...(19): siRNA sense strand
acaaagggacugcuguguu

SEQ ID NO: 1612790 - RNA, 19 nt, Homo sapiens
  misc_RNA (1)...(19): siRNA sense strand
cugacagacgugcuaauua

SEQ ID NO: 1612791 - RNA, 19 nt, Homo sapiens
  misc_RNA (1)...(19): siRNA sense strand
gaagugcaaaccugaagag

SEQ ID NO: 1612792 - RNA, 19 nt, Homo sapiens
  misc_RNA (1)...(19): siRNA sense strand
aagaaugguugggcaaugu

SEQ ID NO: 1612793 - RNA, 19 nt, Homo sapiens
  misc_RNA (1)...(19): siRNA sense strand
gagaugcauguaaagaaug

SEQ ID NO: 1612794 - RNA, 19 nt, Homo sapiens
  misc_RNA (1)...(19): siRNA sense strand
cagacaaagacuacaagaa

SEQ ID NO: 1612795 - RNA, 19 nt, Homo sapiens
  misc_RNA (1)...(19): siRNA sense strand
cgugcuaauuauccuguuu

SEQ ID NO: 1612796 - RNA, 19 nt, Homo sapiens
  misc_RNA (1)...(19): siRNA sense strand
aagagaugcauguaaagaa

SEQ ID NO: 1612797 - RNA, 19 nt, Homo sapiens
  misc_RNA (1)...(19): siRNA sense strand
ccaauuggucucagguaau

SEQ ID NO: 1612798 - RNA, 19 nt, Homo sapiens
  misc_RNA (1)...(19): siRNA sense strand
caacaacagcaacaacaac

SEQ ID NO: 1612799 - RNA, 19 nt, Homo sapiens
  misc_RNA (1)...(19): siRNA sense strand
caaagacuacaagaauuuc

SEQ ID NO: 1612800 - RNA, 19 nt, Homo sapiens
  misc_RNA (1)...(19): siRNA sense strand
ggcaaugugcggcaaacaa

SEQ ID NO: 1612801 - RNA, 19 nt, Homo sapiens
  misc_RNA (1)...(19): siRNA sense strand
gacguuggaauuugcaaga

SEQ ID NO: 1612802 - RNA, 19 nt, Homo sapiens
  misc_RNA (1)...(19): siRNA sense strand
ccugaagagaugcauguaa

SEQ ID NO: 1612803 - RNA, 19 nt, Homo sapiens
  misc_RNA (1)...(19): siRNA sense strand
ccagacaaagacuacaaga

SEQ ID NO: 1612804 - RNA, 19 nt, Homo sapiens
  misc_RNA (1)...(19): siRNA sense strand
gcaagaagaagugcaaacc

SEQ ID NO: 1612805 - RNA, 19 nt, Homo sapiens
  misc_RNA (1)...(19): siRNA sense strand
uaaagaaugguugggcaau

SEQ ID NO: 1612806 - RNA, 19 nt, Homo sapiens
  misc_RNA (1)...(19): siRNA sense strand
gguaauugguaugugaaaa

SEQ ID NO: 1612807 - RNA, 19 nt, Homo sapiens
  misc_RNA (1)...(19): siRNA sense strand
gcccaauuggucucaggua

SEQ ID NO: 1612808 - RNA, 19 nt, Homo sapiens
  misc_RNA (1)...(19): siRNA sense strand
cagcaacaacaacuuugau

SEQ ID NO: 1612809 - RNA, 19 nt, Homo sapiens
  misc_RNA (1)...(19): siRNA sense strand
acagcaacaacaacuuuga

SEQ ID NO: 1612810 - RNA, 19 nt, Homo sapiens
  misc_RNA (1)...(19): siRNA sense strand
gcaagaaggugaaauaucg

SEQ ID NO: 1612811 - RNA, 19 nt, Homo sapiens
  misc_RNA (1)...(19): siRNA sense strand
gaauacaaaugaggagauu

SEQ ID NO: 1612812 - RNA, 19 nt, Homo sapiens
  misc_RNA (1)...(19): siRNA sense strand
caucaucucucccaaagug

SEQ ID NO: 1612813 - RNA, 19 nt, Homo sapiens
  misc_RNA (1)...(19): siRNA sense strand
caacguggaucauuucucu

SEQ ID NO: 1612814 - RNA, 19 nt, Homo sapiens
  misc_RNA (1)...(19): siRNA sense strand
ugagggaacugaagcagaa

SEQ ID NO: 1612815 - RNA, 19 nt, Homo sapiens
  misc_RNA (1)...(19): siRNA sense strand
gcauuacuccugugucuuu

SEQ ID NO: 1612816 - RNA, 19 nt, Homo sapiens
  misc_RNA (1)...(19): siRNA sense strand
ugggagaacucaucaguga

SEQ ID NO: 1612817 - RNA, 19 nt, Homo sapiens
  misc_RNA (1)...(19): siRNA sense strand
ccagcgaacugcccuuuga

SEQ ID NO: 1612818 - RNA, 19 nt, Homo sapiens
  misc_RNA (1)...(19): siRNA sense strand
guaguggucuugguagaaa

SEQ ID NO: 1612819 - RNA, 19 nt, Homo sapiens
  misc_RNA (1)...(19): siRNA sense strand
ugaccuggauugcacuuaa

SEQ ID NO: 1612820 - RNA, 19 nt, Homo sapiens
  misc_RNA (1)...(19): siRNA sense strand
gcacuuaaguuugcacucu

SEQ ID NO: 1612821 - RNA, 19 nt, Homo sapiens
  misc_RNA (1)...(19): siRNA sense strand
gagaggcuacgguggaaua

SEQ ID NO: 1612822 - RNA, 19 nt, Homo sapiens
  misc_RNA (1)...(19): siRNA sense strand
gagcauuacuccugugucu

SEQ ID NO: 1612823 - RNA, 19 nt, Homo sapiens
  misc_RNA (1)...(19): siRNA sense strand
gauccuaggccuuccauga

SEQ ID NO: 1612824 - RNA, 19 nt, Homo sapiens
  misc_RNA (1)...(19): siRNA sense strand
agaggaaacugcuucuuca

SEQ ID NO: 1612825 - RNA, 19 nt, Homo sapiens
  misc_RNA (1)...(19): siRNA sense strand
guggcaagauggaaaguga

SEQ ID NO: 1612826 - RNA, 19 nt, Homo sapiens
  misc_RNA (1)...(19): siRNA sense strand
ccucugagaugacuaugga

SEQ ID NO: 1612827 - RNA, 19 nt, Homo sapiens
  misc_RNA (1)...(19): siRNA sense strand
cauccuaccugaucaccuu

SEQ ID NO: 1612828 - RNA, 19 nt, Homo sapiens
  misc_RNA (1)...(19): siRNA sense strand
ggauugcacuuaaguuugc

SEQ ID NO: 1612829 - RNA, 19 nt, Homo sapiens
  misc_RNA (1)...(19): siRNA sense strand
acaagcagcugaccuggau

SEQ ID NO: 1612830 - RNA, 19 nt, Homo sapiens
  misc_RNA (1)...(19): siRNA sense strand
cuucugugcucuuugagua

SEQ ID NO: 1612831 - RNA, 19 nt, Homo sapiens
  misc_RNA (1)...(19): siRNA sense strand
cuggagcccuucagucuuu

SEQ ID NO: 1612832 - RNA, 19 nt, Homo sapiens
  misc_RNA (1)...(19): siRNA sense strand
gaagaggagaggccuuguu

SEQ ID NO: 1612833 - RNA, 19 nt, Homo sapiens
  misc_RNA (1)...(19): siRNA sense strand
gaacgucuggcccauggaa

SEQ ID NO: 1612834 - RNA, 19 nt, Homo sapiens
  misc_RNA (1)...(19): siRNA sense strand
agacaaggccucagaaugg

SEQ ID NO: 1612835 - RNA, 19 nt, Homo sapiens
  misc_RNA (1)...(19): siRNA sense strand
ggacuuagagcaggagguu

SEQ ID NO: 1612836 - RNA, 19 nt, Homo sapiens
  misc_RNA (1)...(19): siRNA sense strand
gcacacaccuccccaucuu

SEQ ID NO: 1612837 - RNA, 19 nt, Homo sapiens
  misc_RNA (1)...(19): siRNA sense strand
ggaauggaacagaagaguu

SEQ ID NO: 1612838 - RNA, 19 nt, Homo sapiens
  misc_RNA (1)...(19): siRNA sense strand
cccggaagaucaugagauu

SEQ ID NO: 1612839 - RNA, 19 nt, Homo sapiens
  misc_RNA (1)...(19): siRNA sense strand
gcugucggauggcaccuuu

SEQ ID NO: 1612840 - RNA, 19 nt, Homo sapiens
  misc_RNA (1)...(19): siRNA sense strand
agguagggcuggugucuuu

SEQ ID NO: 1612841 - RNA, 19 nt, Homo sapiens
  misc_RNA (1)...(19): siRNA sense strand
gaggagaggccuuguuugg

SEQ ID NO: 1612842 - RNA, 19 nt, Homo sapiens
  misc_RNA (1)...(19): siRNA sense strand
ccaaagacaaggccucaga

SEQ ID NO: 1612843 - RNA, 19 nt, Homo sapiens
  misc_RNA (1)...(19): siRNA sense strand
gggcauggagugucucuau

SEQ ID NO: 1612844 - RNA, 19 nt, Homo sapiens
  misc_RNA (1)...(19): siRNA sense strand
gacaaccaguuccggaugu

SEQ ID NO: 1612845 - RNA, 19 nt, Homo sapiens
  misc_RNA (1)...(19): siRNA sense strand
ggugaaauaucggaaggau

SEQ ID NO: 1612846 - RNA, 19 nt, Homo sapiens
  misc_RNA (1)...(19): siRNA sense strand
ggaagcugcugugcuccuu

SEQ ID NO: 1612847 - RNA, 19 nt, Homo sapiens
  misc_RNA (1)...(19): siRNA sense strand
gcccuucagucuuucauca

SEQ ID NO: 1612848 - RNA, 19 nt, Homo sapiens
  misc_RNA (1)...(19): siRNA sense strand
gcugcuacguucacucuuc

SEQ ID NO: 1612849 - RNA, 19 nt, Homo sapiens
  misc_RNA (1)...(19): siRNA sense strand
gaaacugcuucuucaucca

SEQ ID NO: 1612850 - RNA, 19 nt, Homo sapiens
  misc_RNA (1)...(19): siRNA sense strand
gaagcuacuaugaacagaa

SEQ ID NO: 1612851 - RNA, 19 nt, Homo sapiens
  misc_RNA (1)...(19): siRNA sense strand
gcaggugggagaagaggaa

SEQ ID NO: 1612852 - RNA, 19 nt, Homo sapiens
  misc_RNA (1)...(19): siRNA sense strand
ccaccgagguugcugaaaa

SEQ ID NO: 1612853 - RNA, 19 nt, Homo sapiens
  misc_RNA (1)...(19): siRNA sense strand
gcuguuaccggaaguacaa

SEQ ID NO: 1612854 - RNA, 19 nt, Homo sapiens
  misc_RNA (1)...(19): siRNA sense strand
cgacaggcacugagcauuc

SEQ ID NO: 1612855 - RNA, 19 nt, Homo sapiens
  misc_RNA (1)...(19): siRNA sense strand
ggaauacaaaugaggagau

SEQ ID NO: 1612856 - RNA, 19 nt, Homo sapiens
  misc_RNA (1)...(19): siRNA sense strand
caaagacaaggccucagaa

SEQ ID NO: 1612857 - RNA, 19 nt, Homo sapiens
  misc_RNA (1)...(19): siRNA sense strand
aagaggagaggccuuguuu

SEQ ID NO: 1612858 - RNA, 19 nt, Homo sapiens
  misc_RNA (1)...(19): siRNA sense strand
gggaguaagcccagacuuc

SEQ ID NO: 1612859 - RNA, 19 nt, Homo sapiens
  misc_RNA (1)...(19): siRNA sense strand
cagagaggcuacgguggaa

SEQ ID NO: 1612860 - RNA, 19 nt, Homo sapiens
  misc_RNA (1)...(19): siRNA sense strand
cagacggccuuccgaaagu

SEQ ID NO: 1612861 - RNA, 19 nt, Homo sapiens
  misc_RNA (1)...(19): siRNA sense strand
caaaugcagcagcacgaaa

SEQ ID NO: 1612862 - RNA, 19 nt, Homo sapiens
  misc_RNA (1)...(19): siRNA sense strand
gcaagauggaaagugauuu

SEQ ID NO: 1612863 - RNA, 19 nt, Homo sapiens
  misc_RNA (1)...(19): siRNA sense strand
gaaggagcagcaggaggua

SEQ ID NO: 1612864 - RNA, 19 nt, Homo sapiens
  misc_RNA (1)...(19): siRNA sense strand
gaugguuaccucuggaaga

SEQ ID NO: 1612865 - RNA, 19 nt, Homo sapiens
  misc_RNA (1)...(19): siRNA sense strand
aguuugcacucuauaagaa

SEQ ID NO: 1612866 - RNA, 19 nt, Homo sapiens
  misc_RNA (1)...(19): siRNA sense strand
agacggccuuccgaaagua

SEQ ID NO: 1612867 - RNA, 19 nt, Homo sapiens
  misc_RNA (1)...(19): siRNA sense strand
gacuggaagcuuggacuua

SEQ ID NO: 1612868 - RNA, 19 nt, Homo sapiens
  misc_RNA (1)...(19): siRNA sense strand
cugcuucugugcucuuuga

SEQ ID NO: 1612869 - RNA, 19 nt, Homo sapiens
  misc_RNA (1)...(19): siRNA sense strand
aggcuacgguggaauacaa

SEQ ID NO: 1612870 - RNA, 19 nt, Homo sapiens
  misc_RNA (1)...(19): siRNA sense strand
gaccuagcccucccacuuc

SEQ ID NO: 1612871 - RNA, 19 nt, Homo sapiens
  misc_RNA (1)...(19): siRNA sense strand
cuuuaacccugaccucuau

SEQ ID NO: 1612872 - RNA, 19 nt, Homo sapiens
  misc_RNA (1)...(19): siRNA sense strand
gcuuuaacccugaccucua

SEQ ID NO: 1612873 - RNA, 19 nt, Homo sapiens
  misc_RNA (1)...(19): siRNA sense strand
ggcauggagugucucuaug

SEQ ID NO: 1612874 - RNA, 19 nt, Homo sapiens
  misc_RNA (1)...(19): siRNA sense strand
ggcaagauggaaagugauu

SEQ ID NO: 1612875 - RNA, 19 nt, Homo sapiens
  misc_RNA (1)...(19): siRNA sense strand
gccaccaccugaagaucuu

SEQ ID NO: 1612876 - RNA, 19 nt, Homo sapiens
  misc_RNA (1)...(19): siRNA sense strand
ggauuaaacgagaggacuu

SEQ ID NO: 1612877 - RNA, 19 nt, Homo sapiens
  misc_RNA (1)...(19): siRNA sense strand
gcucaacguggaucauuuc

SEQ ID NO: 1612878 - RNA, 19 nt, Homo sapiens
  misc_RNA (1)...(19): siRNA sense strand
gacuggagcagauggagaa

SEQ ID NO: 1612879 - RNA, 19 nt, Homo sapiens
  misc_RNA (1)...(19): siRNA sense strand
ccuucagucuuucaucauu

SEQ ID NO: 1612880 - RNA, 19 nt, Homo sapiens
  misc_RNA (1)...(19): siRNA sense strand
caaggacaccaccgagguu

SEQ ID NO: 1612881 - RNA, 19 nt, Homo sapiens
  misc_RNA (1)...(19): siRNA sense strand
ucaagaggaggcacugcua

SEQ ID NO: 1612882 - RNA, 19 nt, Homo sapiens
  misc_RNA (1)...(19): siRNA sense strand
ggacagcugaagcccaugu

SEQ ID NO: 1612883 - RNA, 19 nt, Homo sapiens
  misc_RNA (1)...(19): siRNA sense strand
gagaggaccacaugaagcu

SEQ ID NO: 1612884 - RNA, 19 nt, Homo sapiens
  misc_RNA (1)...(19): siRNA sense strand
caugaugaguggcugucuu

SEQ ID NO: 1612885 - RNA, 19 nt, Homo sapiens
  misc_RNA (1)...(19): siRNA sense strand
agaccuagcccucccacuu

SEQ ID NO: 1612886 - RNA, 19 nt, Homo sapiens
  misc_RNA (1)...(19): siRNA sense strand
cacuuaaguuugcacucua

SEQ ID NO: 1612887 - RNA, 19 nt, Homo sapiens
  misc_RNA (1)...(19): siRNA sense strand
gcuccaucauccucuacaa

SEQ ID NO: 1612888 - RNA, 19 nt, Homo sapiens
  misc_RNA (1)...(19): siRNA sense strand
gaccuggauugcacuuaag

SEQ ID NO: 1612889 - RNA, 19 nt, Homo sapiens
  misc_RNA (1)...(19): siRNA sense strand
ggguaguggucuugguaga

SEQ ID NO: 1612890 - RNA, 19 nt, Homo sapiens
  misc_RNA (1)...(19): siRNA sense strand
gagaagcggauggcagaga

SEQ ID NO: 1612891 - RNA, 19 nt, Homo sapiens
  misc_RNA (1)...(19): siRNA sense strand
gaguuuggcagugguugua

SEQ ID NO: 1612892 - RNA, 19 nt, Homo sapiens
  misc_RNA (1)...(19): siRNA sense strand
caagaggaggcacugcuau

SEQ ID NO: 1612893 - RNA, 19 nt, Homo sapiens
  misc_RNA (1)...(19): siRNA sense strand
gcauggagugucucuaugg

SEQ ID NO: 1612894 - RNA, 19 nt, Homo sapiens
  misc_RNA (1)...(19): siRNA sense strand
gcacgaaacaccgcaucau

SEQ ID NO: 1612895 - RNA, 19 nt, Homo sapiens
  misc_RNA (1)...(19): siRNA sense strand
aagcuacuaugaacagaag

SEQ ID NO: 1612896 - RNA, 19 nt, Homo sapiens
  misc_RNA (1)...(19): siRNA sense strand
gcaaguuccgaagcuacua

SEQ ID NO: 1612897 - RNA, 19 nt, Homo sapiens
  misc_RNA (1)...(19): siRNA sense strand
gaugaguggcugucuugug

SEQ ID NO: 1612898 - RNA, 19 nt, Homo sapiens
  misc_RNA (1)...(19): siRNA sense strand
gaagcugcugugcuccuuu

SEQ ID NO: 1612899 - RNA, 19 nt, Homo sapiens
  misc_RNA (1)...(19): siRNA sense strand
agaagcggauggcagagau

SEQ ID NO: 1612900 - RNA, 19 nt, Homo sapiens
  misc_RNA (1)...(19): siRNA sense strand
ccagcugucuccugcucuu

SEQ ID NO: 1612901 - RNA, 19 nt, Homo sapiens
  misc_RNA (1)...(19): siRNA sense strand
ccuuugacccugaucguuu

SEQ ID NO: 1612902 - RNA, 19 nt, Homo sapiens
  misc_RNA (1)...(19): siRNA sense strand
agagccuccuccacugaua

SEQ ID NO: 1612903 - RNA, 19 nt, Homo sapiens
  misc_RNA (1)...(19): siRNA sense strand
gauugcauccuaccugauc

SEQ ID NO: 1612904 - RNA, 19 nt, Homo sapiens
  misc_RNA (1)...(19): siRNA sense strand
ccagacggccuuccgaaag

SEQ ID NO: 1612905 - RNA, 19 nt, Homo sapiens
  misc_RNA (1)...(19): siRNA sense strand
gagcagcgggaacuguaug

SEQ ID NO: 1612906 - RNA, 19 nt, Homo sapiens
  misc_RNA (1)...(19): siRNA sense strand
aauaucggaaggaugguua

SEQ ID NO: 1612907 - RNA, 19 nt, Homo sapiens
  misc_RNA (1)...(19): siRNA sense strand
ccacaccggagcggauuaa

SEQ ID NO: 1612908 - RNA, 19 nt, Homo sapiens
  misc_RNA (1)...(19): siRNA sense strand
cauugucuguggcucauuc

SEQ ID NO: 1612909 - RNA, 19 nt, Homo sapiens
  misc_RNA (1)...(19): siRNA sense strand
ccucuacaaucgcaagaag

SEQ ID NO: 1612910 - RNA, 19 nt, Homo sapiens
  misc_RNA (1)...(19): siRNA sense strand
ggaaacuccuucacaagaa

SEQ ID NO: 1612911 - RNA, 19 nt, Homo sapiens
  misc_RNA (1)...(19): siRNA sense strand
gaaacuccuucacaagaaa

SEQ ID NO: 1612912 - RNA, 19 nt, Homo sapiens
  misc_RNA (1)...(19): siRNA sense strand
uggcaaagcuuuagacaug

SEQ ID NO: 1612913 - RNA, 19 nt, Homo sapiens
  misc_RNA (1)...(19): siRNA sense strand
gggaggaaguugccuugua

SEQ ID NO: 1612914 - RNA, 19 nt, Homo sapiens
  misc_RNA (1)...(19): siRNA sense strand
uuaaagagcuggcacagau

SEQ ID NO: 1612915 - RNA, 19 nt, Homo sapiens
  misc_RNA (1)...(19): siRNA sense strand
gccaggaaguuguagauuu

SEQ ID NO: 1612916 - RNA, 19 nt, Homo sapiens
  misc_RNA (1)...(19): siRNA sense strand
ggaggaugcucacaacugu

SEQ ID NO: 1612917 - RNA, 19 nt, Homo sapiens
  misc_RNA (1)...(19): siRNA sense strand
uggaagagcugcuggauca

SEQ ID NO: 1612918 - RNA, 19 nt, Homo sapiens
  misc_RNA (1)...(19): siRNA sense strand
acagaaggcuuuagaagau

SEQ ID NO: 1612919 - RNA, 19 nt, Homo sapiens
  misc_RNA (1)...(19): siRNA sense strand
aagaugauguggacaauga

SEQ ID NO: 1612920 - RNA, 19 nt, Homo sapiens
  misc_RNA (1)...(19): siRNA sense strand
cugaagaagucauuaaaga

SEQ ID NO: 1612921 - RNA, 19 nt, Homo sapiens
  misc_RNA (1)...(19): siRNA sense strand
gaacuagcacgcaucaaga

SEQ ID NO: 1612922 - RNA, 19 nt, Homo sapiens
  misc_RNA (1)...(19): siRNA sense strand
ggaggaaguugccuuguac

SEQ ID NO: 1612923 - RNA, 19 nt, Homo sapiens
  misc_RNA (1)...(19): siRNA sense strand
ccaggaaguuguagauuuc

SEQ ID NO: 1612924 - RNA, 19 nt, Homo sapiens
  misc_RNA (1)...(19): siRNA sense strand
caaauugaccacugaagaa

SEQ ID NO: 1612925 - RNA, 19 nt, Homo sapiens
  misc_RNA (1)...(19): siRNA sense strand
gggaagcaguugauuguag

SEQ ID NO: 1612926 - RNA, 19 nt, Homo sapiens
  misc_RNA (1)...(19): siRNA sense strand
aaaaguagcugaugaagau

SEQ ID NO: 1612927 - RNA, 19 nt, Homo sapiens
  misc_RNA (1)...(19): siRNA sense strand
caaaccagaggaugaagua

SEQ ID NO: 1612928 - RNA, 19 nt, Homo sapiens
  misc_RNA (1)...(19): siRNA sense strand
ccacugaggaugaagauga

SEQ ID NO: 1612929 - RNA, 19 nt, Homo sapiens
  misc_RNA (1)...(19): siRNA sense strand
gggaaacuccuucacaaga

SEQ ID NO: 1612930 - RNA, 19 nt, Homo sapiens
  misc_RNA (1)...(19): siRNA sense strand
agaggacgaugaagaagaa

SEQ ID NO: 1612931 - RNA, 19 nt, Homo sapiens
  misc_RNA (1)...(19): siRNA sense strand
ggaagaagaggaagacagu

SEQ ID NO: 1612932 - RNA, 19 nt, Homo sapiens
  misc_RNA (1)...(19): siRNA sense strand
ucagaaggccuacaaggaa

SEQ ID NO: 1612933 - RNA, 19 nt, Homo sapiens
  misc_RNA (1)...(19): siRNA sense strand
gagggaagcaguugauugu

SEQ ID NO: 1612934 - RNA, 19 nt, Homo sapiens
  misc_RNA (1)...(19): siRNA sense strand
ggacgaugaagaagaagaa

SEQ ID NO: 1612935 - RNA, 19 nt, Homo sapiens
  misc_RNA (1)...(19): siRNA sense strand
gaggcuaccaugacuauug

SEQ ID NO: 1612936 - RNA, 19 nt, Homo sapiens
  misc_RNA (1)...(19): siRNA sense strand
gagcuucgguuauugucau

SEQ ID NO: 1612937 - RNA, 19 nt, Homo sapiens
  misc_RNA (1)...(19): siRNA sense strand
gagcagccaggaaguugua

SEQ ID NO: 1612938 - RNA, 19 nt, Homo sapiens
  misc_RNA (1)...(19): siRNA sense strand
gcaaagcuuuagacauguc

SEQ ID NO: 1612939 - RNA, 19 nt, Homo sapiens
  misc_RNA (1)...(19): siRNA sense strand
ugaagaggacgaugaagaa

SEQ ID NO: 1612940 - RNA, 19 nt, Homo sapiens
  misc_RNA (1)...(19): siRNA sense strand
gcagugaggaggcagagaa

SEQ ID NO: 1612941 - RNA, 19 nt, Homo sapiens
  misc_RNA (1)...(19): siRNA sense strand
uagggaaacuccuucacaa

SEQ ID NO: 1612942 - RNA, 19 nt, Homo sapiens
  misc_RNA (1)...(19): siRNA sense strand
ugaccugcaucaucauuug

SEQ ID NO: 1612943 - RNA, 19 nt, Homo sapiens
  misc_RNA (1)...(19): siRNA sense strand
gcuauugacgccaaauuga

SEQ ID NO: 1612944 - RNA, 19 nt, Homo sapiens
  misc_RNA (1)...(19): siRNA sense strand
gaaccugccaccugaggaa

SEQ ID NO: 1612945 - RNA, 19 nt, Homo sapiens
  misc_RNA (1)...(19): siRNA sense strand
cuuuagacauguccuauga

SEQ ID NO: 1612946 - RNA, 19 nt, Homo sapiens
  misc_RNA (1)...(19): siRNA sense strand
ccacugaagaagucauuaa

SEQ ID NO: 1612947 - RNA, 19 nt, Homo sapiens
  misc_RNA (1)...(19): siRNA sense strand
ccaaauugaccacugaaga

SEQ ID NO: 1612948 - RNA, 19 nt, Homo sapiens
  misc_RNA (1)...(19): siRNA sense strand
ggaaguuguagauuucauu

SEQ ID NO: 1612949 - RNA, 19 nt, Homo sapiens
  misc_RNA (1)...(19): siRNA sense strand
gaagaggcuaccaugacua

SEQ ID NO: 1612950 - RNA, 19 nt, Homo sapiens
  misc_RNA (1)...(19): siRNA sense strand
ggacucaacuagggaaacu

SEQ ID NO: 1612951 - RNA, 19 nt, Homo sapiens
  misc_RNA (1)...(19): siRNA sense strand
gcagagcuccagccagaga

SEQ ID NO: 1612952 - RNA, 19 nt, Homo sapiens
  misc_RNA (1)...(19): siRNA sense strand
uuccugagcuggacaguga

SEQ ID NO: 1612953 - RNA, 19 nt, Homo sapiens
  misc_RNA (1)...(19): siRNA sense strand
ggacagugaggaugaguca

SEQ ID NO: 1612954 - RNA, 19 nt, Homo sapiens
  misc_RNA (1)...(19): siRNA sense strand
ggaagacagugaggaaugc

SEQ ID NO: 1612955 - RNA, 19 nt, Homo sapiens
  misc_RNA (1)...(19): siRNA sense strand
ggaaguugccuuguacugu

SEQ ID NO: 1612956 - RNA, 19 nt, Homo sapiens
  misc_RNA (1)...(19): siRNA sense strand
gaaguuguagauuucauuc

SEQ ID NO: 1612957 - RNA, 19 nt, Homo sapiens
  misc_RNA (1)...(19): siRNA sense strand
gugaggaggcagagaauga

SEQ ID NO: 1612958 - RNA, 19 nt, Homo sapiens
  misc_RNA (1)...(19): siRNA sense strand
cgaugaagaagaagaagaa

SEQ ID NO: 1612959 - RNA, 19 nt, Homo sapiens
  misc_RNA (1)...(19): siRNA sense strand
gaagaagaagaagagauga

SEQ ID NO: 1612960 - RNA, 19 nt, Homo sapiens
  misc_RNA (1)...(19): siRNA sense strand
gacaagcugccucgaguug

SEQ ID NO: 1612961 - RNA, 19 nt, Homo sapiens
  misc_RNA (1)...(19): siRNA sense strand
caucaucauuugcuucaag

SEQ ID NO: 1612962 - RNA, 19 nt, Homo sapiens
  misc_RNA (1)...(19): siRNA sense strand
cauguccuaugaucacaaa

SEQ ID NO: 1612963 - RNA, 19 nt, Homo sapiens
  misc_RNA (1)...(19): siRNA sense strand
cagaugaggcggaggaaga

SEQ ID NO: 1612964 - RNA, 19 nt, Homo sapiens
  misc_RNA (1)...(19): siRNA sense strand
ugaagaggcuaccaugacu

SEQ ID NO: 1612965 - RNA, 19 nt, Homo sapiens
  misc_RNA (1)...(19): siRNA sense strand
gcaacagcgacaagaagaa

SEQ ID NO: 1612966 - RNA, 19 nt, Homo sapiens
  misc_RNA (1)...(19): siRNA sense strand
ucacugacgaccaugaauu

SEQ ID NO: 1612967 - RNA, 19 nt, Homo sapiens
  misc_RNA (1)...(19): siRNA sense strand
agaagaagaagaagagaug

SEQ ID NO: 1612968 - RNA, 19 nt, Homo sapiens
  misc_RNA (1)...(19): siRNA sense strand
cagagaaugaggaagauga

SEQ ID NO: 1612969 - RNA, 19 nt, Homo sapiens
  misc_RNA (1)...(19): siRNA sense strand
ucacaaaccagaggaugaa

SEQ ID NO: 1612970 - RNA, 19 nt, Homo sapiens
  misc_RNA (1)...(19): siRNA sense strand
cuacaaggaaggcaagcua

SEQ ID NO: 1612971 - RNA, 19 nt, Homo sapiens
  misc_RNA (1)...(19): siRNA sense strand
aggaggugcucucuacuga

SEQ ID NO: 1612972 - RNA, 19 nt, Homo sapiens
  misc_RNA (1)...(19): siRNA sense strand
guacugugccaaauaucuu

SEQ ID NO: 1612973 - RNA, 19 nt, Homo sapiens
  misc_RNA (1)...(19): siRNA sense strand
ggaccacuucuauaagaga

SEQ ID NO: 1612974 - RNA, 19 nt, Homo sapiens
  misc_RNA (1)...(19): siRNA sense strand
uuagacauguccuaugauc

SEQ ID NO: 1612975 - RNA, 19 nt, Homo sapiens
  misc_RNA (1)...(19): siRNA sense strand
uacagaaggcuuuagaaga

SEQ ID NO: 1612976 - RNA, 19 nt, Homo sapiens
  misc_RNA (1)...(19): siRNA sense strand
ugaagaagaagaagaagag

SEQ ID NO: 1612977 - RNA, 19 nt, Homo sapiens
  misc_RNA (1)...(19): siRNA sense strand
aggcuaccaugacuauuga

SEQ ID NO: 1612978 - RNA, 19 nt, Homo sapiens
  misc_RNA (1)...(19): siRNA sense strand
gaagaagaagaagaagaga

SEQ ID NO: 1612979 - RNA, 19 nt, Homo sapiens
  misc_RNA (1)...(19): siRNA sense strand
gaaugaggaagaugaggau

SEQ ID NO: 1612980 - RNA, 19 nt, Homo sapiens
  misc_RNA (1)...(19): siRNA sense strand
cagaaggcuuuagaagaug

SEQ ID NO: 1612981 - RNA, 19 nt, Homo sapiens
  misc_RNA (1)...(19): siRNA sense strand
cuuguacugugccaaauau

SEQ ID NO: 1612982 - RNA, 19 nt, Homo sapiens
  misc_RNA (1)...(19): siRNA sense strand
accagaggaugaaguagaa

SEQ ID NO: 1612983 - RNA, 19 nt, Homo sapiens
  misc_RNA (1)...(19): siRNA sense strand
uaccaugacuauugaagag

SEQ ID NO: 1612984 - RNA, 19 nt, Homo sapiens
  misc_RNA (1)...(19): siRNA sense strand
ugaagaugauguggacaau

SEQ ID NO: 1612985 - RNA, 19 nt, Homo sapiens
  misc_RNA (1)...(19): siRNA sense strand
aagaagaggaagacaguga

SEQ ID NO: 1612986 - RNA, 19 nt, Homo sapiens
  misc_RNA (1)...(19): siRNA sense strand
gaagagcugcuggaucagu

SEQ ID NO: 1612987 - RNA, 19 nt, Homo sapiens
  misc_RNA (1)...(19): siRNA sense strand
cgagggaagcaguugauug

SEQ ID NO: 1612988 - RNA, 19 nt, Homo sapiens
  misc_RNA (1)...(19): siRNA sense strand
ggaggcagagaaugaggaa

SEQ ID NO: 1612989 - RNA, 19 nt, Homo sapiens
  misc_RNA (1)...(19): siRNA sense strand
gaagaugauguggacaaug

SEQ ID NO: 1612990 - RNA, 19 nt, Homo sapiens
  misc_RNA (1)...(19): siRNA sense strand
ggcaacagcgacaagaaga

SEQ ID NO: 1612991 - RNA, 19 nt, Homo sapiens
  misc_RNA (1)...(19): siRNA sense strand
guagaacuagcacgcauca

SEQ ID NO: 1612992 - RNA, 19 nt, Homo sapiens
  misc_RNA (1)...(19): siRNA sense strand
gugaggaugagucagauga

SEQ ID NO: 1612993 - RNA, 19 nt, Homo sapiens
  misc_RNA (1)...(19): siRNA sense strand
aaagagcuggcacagauug

SEQ ID NO: 1612994 - RNA, 19 nt, Homo sapiens
  misc_RNA (1)...(19): siRNA sense strand
ggaaggcaagcuacagaag

SEQ ID NO: 1612995 - RNA, 19 nt, Homo sapiens
  misc_RNA (1)...(19): siRNA sense strand
gaugagcagccaggaaguu

SEQ ID NO: 1612996 - RNA, 19 nt, Homo sapiens
  misc_RNA (1)...(19): siRNA sense strand
ggggaccacuucuauaaga

SEQ ID NO: 1612997 - RNA, 19 nt, Homo sapiens
  misc_RNA (1)...(19): siRNA sense strand
guggcaaggucaccaugga

SEQ ID NO: 1612998 - RNA, 19 nt, Homo sapiens
  misc_RNA (1)...(19): siRNA sense strand
gaugccuucuuggcuauug

SEQ ID NO: 1612999 - RNA, 19 nt, Homo sapiens
  misc_RNA (1)...(19): siRNA sense strand
uaaagagcuggcacagauu

SEQ ID NO: 1613000 - RNA, 19 nt, Homo sapiens
  misc_RNA (1)...(19): siRNA sense strand
gacaacaugaccugcauca

SEQ ID NO: 1613001 - RNA, 19 nt, Homo sapiens
  misc_RNA (1)...(19): siRNA sense strand
guacagggugugacaacau

SEQ ID NO: 1613002 - RNA, 19 nt, Homo sapiens
  misc_RNA (1)...(19): siRNA sense strand
ggaugaaguagaacuagca

SEQ ID NO: 1613003 - RNA, 19 nt, Homo sapiens
  misc_RNA (1)...(19): siRNA sense strand
cuaaguccaaguucuuuga

SEQ ID NO: 1613004 - RNA, 19 nt, Homo sapiens
  misc_RNA (1)...(19): siRNA sense strand
gauaucaucaaagaucaga

SEQ ID NO: 1613005 - RNA, 19 nt, Homo sapiens
  misc_RNA (1)...(19): siRNA sense strand
cacugaggaugaagaugaa

SEQ ID NO: 1613006 - RNA, 19 nt, Homo sapiens
  misc_RNA (1)...(19): siRNA sense strand
ugaagaagucauuaaagag

SEQ ID NO: 1613007 - RNA, 19 nt, Homo sapiens
  misc_RNA (1)...(19): siRNA sense strand
gaggaggugcucucuacug

SEQ ID NO: 1613008 - RNA, 19 nt, Homo sapiens
  misc_RNA (1)...(19): siRNA sense strand
uacagggugugacaacaug

SEQ ID NO: 1613009 - RNA, 19 nt, Homo sapiens
  misc_RNA (1)...(19): siRNA sense strand
gaagaggacgaugaagaag

SEQ ID NO: 1613010 - RNA, 19 nt, Homo sapiens
  misc_RNA (1)...(19): siRNA sense strand
ggaaacuccuucacaagaa

SEQ ID NO: 1613011 - RNA, 19 nt, Homo sapiens
  misc_RNA (1)...(19): siRNA sense strand
gaaacuccuucacaagaaa

SEQ ID NO: 1613012 - RNA, 19 nt, Homo sapiens
  misc_RNA (1)...(19): siRNA sense strand
uggcaaagcuuuagacaug

SEQ ID NO: 1613013 - RNA, 19 nt, Homo sapiens
  misc_RNA (1)...(19): siRNA sense strand
gggaggaaguugccuugua

SEQ ID NO: 1613014 - RNA, 19 nt, Homo sapiens
  misc_RNA (1)...(19): siRNA sense strand
uuaaagagcuggcacagau

SEQ ID NO: 1613015 - RNA, 19 nt, Homo sapiens
  misc_RNA (1)...(19): siRNA sense strand
gccaggaaguuguagauuu

SEQ ID NO: 1613016 - RNA, 19 nt, Homo sapiens
  misc_RNA (1)...(19): siRNA sense strand
ggaggaugcucacaacugu

SEQ ID NO: 1613017 - RNA, 19 nt, Homo sapiens
  misc_RNA (1)...(19): siRNA sense strand
uggaagagcugcuggauca

SEQ ID NO: 1613018 - RNA, 19 nt, Homo sapiens
  misc_RNA (1)...(19): siRNA sense strand
acagaaggcuuuagaagau

SEQ ID NO: 1613019 - RNA, 19 nt, Homo sapiens
  misc_RNA (1)...(19): siRNA sense strand
aagaugauguggacaauga

SEQ ID NO: 1613020 - RNA, 19 nt, Homo sapiens
  misc_RNA (1)...(19): siRNA sense strand
cugaagaagucauuaaaga

SEQ ID NO: 1613021 - RNA, 19 nt, Homo sapiens
  misc_RNA (1)...(19): siRNA sense strand
gaacuagcacgcaucaaga

SEQ ID NO: 1613022 - RNA, 19 nt, Homo sapiens
  misc_RNA (1)...(19): siRNA sense strand
ggaggaaguugccuuguac

SEQ ID NO: 1613023 - RNA, 19 nt, Homo sapiens
  misc_RNA (1)...(19): siRNA sense strand
ccaggaaguuguagauuuc

SEQ ID NO: 1613024 - RNA, 19 nt, Homo sapiens
  misc_RNA (1)...(19): siRNA sense strand
caaauugaccacugaagaa

SEQ ID NO: 1613025 - RNA, 19 nt, Homo sapiens
  misc_RNA (1)...(19): siRNA sense strand
gggaagcaguugauuguag

SEQ ID NO: 1613026 - RNA, 19 nt, Homo sapiens
  misc_RNA (1)...(19): siRNA sense strand
aaaaguagcugaugaagau

SEQ ID NO: 1613027 - RNA, 19 nt, Homo sapiens
  misc_RNA (1)...(19): siRNA sense strand
caaaccagaggaugaagua

SEQ ID NO: 1613028 - RNA, 19 nt, Homo sapiens
  misc_RNA (1)...(19): siRNA sense strand
ccacugaggaugaagauga

SEQ ID NO: 1613029 - RNA, 19 nt, Homo sapiens
  misc_RNA (1)...(19): siRNA sense strand
gggaaacuccuucacaaga

SEQ ID NO: 1613030 - RNA, 19 nt, Homo sapiens
  misc_RNA (1)...(19): siRNA sense strand
agaggacgaugaagaagaa

SEQ ID NO: 1613031 - RNA, 19 nt, Homo sapiens
  misc_RNA (1)...(19): siRNA sense strand
ggaagaagaggaagacagu

SEQ ID NO: 1613032 - RNA, 19 nt, Homo sapiens
  misc_RNA (1)...(19): siRNA sense strand
ucagaaggccuacaaggaa

SEQ ID NO: 1613033 - RNA, 19 nt, Homo sapiens
  misc_RNA (1)...(19): siRNA sense strand
gagggaagcaguugauugu

SEQ ID NO: 1613034 - RNA, 19 nt, Homo sapiens
  misc_RNA (1)...(19): siRNA sense strand
ggacgaugaagaagaagaa

SEQ ID NO: 1613035 - RNA, 19 nt, Homo sapiens
  misc_RNA (1)...(19): siRNA sense strand
gaggcuaccaugacuauug

SEQ ID NO: 1613036 - RNA, 19 nt, Homo sapiens
  misc_RNA (1)...(19): siRNA sense strand
gagcuucgguuauugucau

SEQ ID NO: 1613037 - RNA, 19 nt, Homo sapiens
  misc_RNA (1)...(19): siRNA sense strand
gagcagccaggaaguugua

SEQ ID NO: 1613038 - RNA, 19 nt, Homo sapiens
  misc_RNA (1)...(19): siRNA sense strand
gcaaagcuuuagacauguc

SEQ ID NO: 1613039 - RNA, 19 nt, Homo sapiens
  misc_RNA (1)...(19): siRNA sense strand
ugaagaggacgaugaagaa

SEQ ID NO: 1613040 - RNA, 19 nt, Homo sapiens
  misc_RNA (1)...(19): siRNA sense strand
gcagugaggaggcagagaa

SEQ ID NO: 1613041 - RNA, 19 nt, Homo sapiens
  misc_RNA (1)...(19): siRNA sense strand
uagggaaacuccuucacaa

SEQ ID NO: 1613042 - RNA, 19 nt, Homo sapiens
  misc_RNA (1)...(19): siRNA sense strand
ugaccugcaucaucauuug

SEQ ID NO: 1613043 - RNA, 19 nt, Homo sapiens
  misc_RNA (1)...(19): siRNA sense strand
gcuauugacgccaaauuga

SEQ ID NO: 1613044 - RNA, 19 nt, Homo sapiens
  misc_RNA (1)...(19): siRNA sense strand
gaaccugccaccugaggaa

SEQ ID NO: 1613045 - RNA, 19 nt, Homo sapiens
  misc_RNA (1)...(19): siRNA sense strand
cuuuagacauguccuauga

SEQ ID NO: 1613046 - RNA, 19 nt, Homo sapiens
  misc_RNA (1)...(19): siRNA sense strand
ccacugaagaagucauuaa

SEQ ID NO: 1613047 - RNA, 19 nt, Homo sapiens
  misc_RNA (1)...(19): siRNA sense strand
ccaaauugaccacugaaga

SEQ ID NO: 1613048 - RNA, 19 nt, Homo sapiens
  misc_RNA (1)...(19): siRNA sense strand
ggaaguuguagauuucauu

SEQ ID NO: 1613049 - RNA, 19 nt, Homo sapiens
  misc_RNA (1)...(19): siRNA sense strand
gaagaggcuaccaugacua

SEQ ID NO: 1613050 - RNA, 19 nt, Homo sapiens
  misc_RNA (1)...(19): siRNA sense strand
ggacucaacuagggaaacu

SEQ ID NO: 1613051 - RNA, 19 nt, Homo sapiens
  misc_RNA (1)...(19): siRNA sense strand
gcagagcuccagccagaga

SEQ ID NO: 1613052 - RNA, 19 nt, Homo sapiens
  misc_RNA (1)...(19): siRNA sense strand
uuccugagcuggacaguga

SEQ ID NO: 1613053 - RNA, 19 nt, Homo sapiens
  misc_RNA (1)...(19): siRNA sense strand
ggacagugaggaugaguca

SEQ ID NO: 1613054 - RNA, 19 nt, Homo sapiens
  misc_RNA (1)...(19): siRNA sense strand
ggaagacagugaggaaugc

SEQ ID NO: 1613055 - RNA, 19 nt, Homo sapiens
  misc_RNA (1)...(19): siRNA sense strand
ggaaguugccuuguacugu

SEQ ID NO: 1613056 - RNA, 19 nt, Homo sapiens
  misc_RNA (1)...(19): siRNA sense strand
gaaguuguagauuucauuc

SEQ ID NO: 1613057 - RNA, 19 nt, Homo sapiens
  misc_RNA (1)...(19): siRNA sense strand
gugaggaggcagagaauga

SEQ ID NO: 1613058 - RNA, 19 nt, Homo sapiens
  misc_RNA (1)...(19): siRNA sense strand
cgaugaagaagaagaagaa

SEQ ID NO: 1613059 - RNA, 19 nt, Homo sapiens
  misc_RNA (1)...(19): siRNA sense strand
gaagaagaagaagagauga

SEQ ID NO: 1613060 - RNA, 19 nt, Homo sapiens
  misc_RNA (1)...(19): siRNA sense strand
gacaagcugccucgaguug

SEQ ID NO: 1613061 - RNA, 19 nt, Homo sapiens
  misc_RNA (1)...(19): siRNA sense strand
caucaucauuugcuucaag

SEQ ID NO: 1613062 - RNA, 19 nt, Homo sapiens
  misc_RNA (1)...(19): siRNA sense strand
cauguccuaugaucacaaa

SEQ ID NO: 1613063 - RNA, 19 nt, Homo sapiens
  misc_RNA (1)...(19): siRNA sense strand
cagaugaggcggaggaaga

SEQ ID NO: 1613064 - RNA, 19 nt, Homo sapiens
  misc_RNA (1)...(19): siRNA sense strand
ugaagaggcuaccaugacu

SEQ ID NO: 1613065 - RNA, 19 nt, Homo sapiens
  misc_RNA (1)...(19): siRNA sense strand
gcaacagcgacaagaagaa

SEQ ID NO: 1613066 - RNA, 19 nt, Homo sapiens
  misc_RNA (1)...(19): siRNA sense strand
ucacugacgaccaugaauu

SEQ ID NO: 1613067 - RNA, 19 nt, Homo sapiens
  misc_RNA (1)...(19): siRNA sense strand
agaagaagaagaagagaug

SEQ ID NO: 1613068 - RNA, 19 nt, Homo sapiens
  misc_RNA (1)...(19): siRNA sense strand
cagagaaugaggaagauga

SEQ ID NO: 1613069 - RNA, 19 nt, Homo sapiens
  misc_RNA (1)...(19): siRNA sense strand
ucacaaaccagaggaugaa

SEQ ID NO: 1613070 - RNA, 19 nt, Homo sapiens
  misc_RNA (1)...(19): siRNA sense strand
cuacaaggaaggcaagcua

SEQ ID NO: 1613071 - RNA, 19 nt, Homo sapiens
  misc_RNA (1)...(19): siRNA sense strand
aggaggugcucucuacuga

SEQ ID NO: 1613072 - RNA, 19 nt, Homo sapiens
  misc_RNA (1)...(19): siRNA sense strand
guacugugccaaauaucuu

SEQ ID NO: 1613073 - RNA, 19 nt, Homo sapiens
  misc_RNA (1)...(19): siRNA sense strand
ggaccacuucuauaagaga

SEQ ID NO: 1613074 - RNA, 19 nt, Homo sapiens
  misc_RNA (1)...(19): siRNA sense strand
uuagacauguccuaugauc

SEQ ID NO: 1613075 - RNA, 19 nt, Homo sapiens
  misc_RNA (1)...(19): siRNA sense strand
uacagaaggcuuuagaaga

SEQ ID NO: 1613076 - RNA, 19 nt, Homo sapiens
  misc_RNA (1)...(19): siRNA sense strand
ugaagaagaagaagaagag

SEQ ID NO: 1613077 - RNA, 19 nt, Homo sapiens
  misc_RNA (1)...(19): siRNA sense strand
aggcuaccaugacuauuga

SEQ ID NO: 1613078 - RNA, 19 nt, Homo sapiens
  misc_RNA (1)...(19): siRNA sense strand
gaagaagaagaagaagaga

SEQ ID NO: 1613079 - RNA, 19 nt, Homo sapiens
  misc_RNA (1)...(19): siRNA sense strand
gaaugaggaagaugaggau

SEQ ID NO: 1613080 - RNA, 19 nt, Homo sapiens
  misc_RNA (1)...(19): siRNA sense strand
cagaaggcuuuagaagaug

SEQ ID NO: 1613081 - RNA, 19 nt, Homo sapiens
  misc_RNA (1)...(19): siRNA sense strand
cuuguacugugccaaauau

SEQ ID NO: 1613082 - RNA, 19 nt, Homo sapiens
  misc_RNA (1)...(19): siRNA sense strand
accagaggaugaaguagaa

SEQ ID NO: 1613083 - RNA, 19 nt, Homo sapiens
  misc_RNA (1)...(19): siRNA sense strand
uaccaugacuauugaagag

SEQ ID NO: 1613084 - RNA, 19 nt, Homo sapiens
  misc_RNA (1)...(19): siRNA sense strand
ugaagaugauguggacaau

SEQ ID NO: 1613085 - RNA, 19 nt, Homo sapiens
  misc_RNA (1)...(19): siRNA sense strand
aagaagaggaagacaguga

SEQ ID NO: 1613086 - RNA, 19 nt, Homo sapiens
  misc_RNA (1)...(19): siRNA sense strand
gaagagcugcuggaucagu

SEQ ID NO: 1613087 - RNA, 19 nt, Homo sapiens
  misc_RNA (1)...(19): siRNA sense strand
cgagggaagcaguugauug

SEQ ID NO: 1613088 - RNA, 19 nt, Homo sapiens
  misc_RNA (1)...(19): siRNA sense strand
ggaggcagagaaugaggaa

SEQ ID NO: 1613089 - RNA, 19 nt, Homo sapiens
  misc_RNA (1)...(19): siRNA sense strand
gaagaugauguggacaaug

SEQ ID NO: 1613090 - RNA, 19 nt, Homo sapiens
  misc_RNA (1)...(19): siRNA sense strand
ggcaacagcgacaagaaga

SEQ ID NO: 1613091 - RNA, 19 nt, Homo sapiens
  misc_RNA (1)...(19): siRNA sense strand
guagaacuagcacgcauca

SEQ ID NO: 1613092 - RNA, 19 nt, Homo sapiens
  misc_RNA (1)...(19): siRNA sense strand
gugaggaugagucagauga

SEQ ID NO: 1613093 - RNA, 19 nt, Homo sapiens
  misc_RNA (1)...(19): siRNA sense strand
aaagagcuggcacagauug

SEQ ID NO: 1613094 - RNA, 19 nt, Homo sapiens
  misc_RNA (1)...(19): siRNA sense strand
ggaaggcaagcuacagaag

SEQ ID NO: 1613095 - RNA, 19 nt, Homo sapiens
  misc_RNA (1)...(19): siRNA sense strand
gaugagcagccaggaaguu

SEQ ID NO: 1613096 - RNA, 19 nt, Homo sapiens
  misc_RNA (1)...(19): siRNA sense strand
ggggaccacuucuauaaga

SEQ ID NO: 1613097 - RNA, 19 nt, Homo sapiens
  misc_RNA (1)...(19): siRNA sense strand
guggcaaggucaccaugga

SEQ ID NO: 1613098 - RNA, 19 nt, Homo sapiens
  misc_RNA (1)...(19): siRNA sense strand
gaugccuucuuggcuauug

SEQ ID NO: 1613099 - RNA, 19 nt, Homo sapiens
  misc_RNA (1)...(19): siRNA sense strand
uaaagagcuggcacagauu

SEQ ID NO: 1613100 - RNA, 19 nt, Homo sapiens
  misc_RNA (1)...(19): siRNA sense strand
gacaacaugaccugcauca

SEQ ID NO: 1613101 - RNA, 19 nt, Homo sapiens
  misc_RNA (1)...(19): siRNA sense strand
guacagggugugacaacau

SEQ ID NO: 1613102 - RNA, 19 nt, Homo sapiens
  misc_RNA (1)...(19): siRNA sense strand
ggaugaaguagaacuagca

SEQ ID NO: 1613103 - RNA, 19 nt, Homo sapiens
  misc_RNA (1)...(19): siRNA sense strand
cuaaguccaaguucuuuga

SEQ ID NO: 1613104 - RNA, 19 nt, Homo sapiens
  misc_RNA (1)...(19): siRNA sense strand
gauaucaucaaagaucaga

SEQ ID NO: 1613105 - RNA, 19 nt, Homo sapiens
  misc_RNA (1)...(19): siRNA sense strand
cacugaggaugaagaugaa

SEQ ID NO: 1613106 - RNA, 19 nt, Homo sapiens
  misc_RNA (1)...(19): siRNA sense strand
ugaagaagucauuaaagag

SEQ ID NO: 1613107 - RNA, 19 nt, Homo sapiens
  misc_RNA (1)...(19): siRNA sense strand
gaggaggugcucucuacug

SEQ ID NO: 1613108 - RNA, 19 nt, Homo sapiens
  misc_RNA (1)...(19): siRNA sense strand
uacagggugugacaacaug

SEQ ID NO: 1613109 - RNA, 19 nt, Homo sapiens
  misc_RNA (1)...(19): siRNA sense strand
gaagaggacgaugaagaag

SEQ ID NO: 1613110 - RNA, 19 nt, Homo sapiens
  misc_RNA (1)...(19): siRNA sense strand
ggaaauauauucagaguca

SEQ ID NO: 1613111 - RNA, 19 nt, Homo sapiens
  misc_RNA (1)...(19): siRNA sense strand
gcagagacauugaaucaga

SEQ ID NO: 1613112 - RNA, 19 nt, Homo sapiens
  misc_RNA (1)...(19): siRNA sense strand
ccaaugugcuggaagauga

SEQ ID NO: 1613113 - RNA, 19 nt, Homo sapiens
  misc_RNA (1)...(19): siRNA sense strand
gaaacuccauguugccaau

SEQ ID NO: 1613114 - RNA, 19 nt, Homo sapiens
  misc_RNA (1)...(19): siRNA sense strand
gaggaaauauauucagagu

SEQ ID NO: 1613115 - RNA, 19 nt, Homo sapiens
  misc_RNA (1)...(19): siRNA sense strand
uuaaggaucucgaggaagu

SEQ ID NO: 1613116 - RNA, 19 nt, Homo sapiens
  misc_RNA (1)...(19): siRNA sense strand
cugauuugcuggacucuuu

SEQ ID NO: 1613117 - RNA, 19 nt, Homo sapiens
  misc_RNA (1)...(19): siRNA sense strand
gaaggaaggauggcagaga

SEQ ID NO: 1613118 - RNA, 19 nt, Homo sapiens
  misc_RNA (1)...(19): siRNA sense strand
gaaggauggcagagacauu

SEQ ID NO: 1613119 - RNA, 19 nt, Homo sapiens
  misc_RNA (1)...(19): siRNA sense strand
aaucagaaacuccauguug

SEQ ID NO: 1613120 - RNA, 19 nt, Homo sapiens
  misc_RNA (1)...(19): siRNA sense strand
cagagacauugaaucagaa

SEQ ID NO: 1613121 - RNA, 19 nt, Homo sapiens
  misc_RNA (1)...(19): siRNA sense strand
cuaccuaccucacgucuac

SEQ ID NO: 1613122 - RNA, 19 nt, Homo sapiens
  misc_RNA (1)...(19): siRNA sense strand
cgacuccguuugaggaaau

SEQ ID NO: 1613123 - RNA, 19 nt, Homo sapiens
  misc_RNA (1)...(19): siRNA sense strand
ggaguugcaaccugauuug

SEQ ID NO: 1613124 - RNA, 19 nt, Homo sapiens
  misc_RNA (1)...(19): siRNA sense strand
uuacccagaugccacaaug

SEQ ID NO: 1613125 - RNA, 19 nt, Homo sapiens
  misc_RNA (1)...(19): siRNA sense strand
agucagguguuccuuccua

SEQ ID NO: 1613126 - RNA, 19 nt, Homo sapiens
  misc_RNA (1)...(19): siRNA sense strand
uggcagagacauugaauca

SEQ ID NO: 1613127 - RNA, 19 nt, Homo sapiens
  misc_RNA (1)...(19): siRNA sense strand
ggacccacgcagggaguua

SEQ ID NO: 1613128 - RNA, 19 nt, Homo sapiens
  misc_RNA (1)...(19): siRNA sense strand
gcuggacucuuuggguuca

SEQ ID NO: 1613129 - RNA, 19 nt, Homo sapiens
  misc_RNA (1)...(19): siRNA sense strand
gacauugaaucagaaacuc

SEQ ID NO: 1613130 - RNA, 19 nt, Homo sapiens
  misc_RNA (1)...(19): siRNA sense strand
aguuaaggaucucgaggaa

SEQ ID NO: 1613131 - RNA, 19 nt, Homo sapiens
  misc_RNA (1)...(19): siRNA sense strand
gucagguguuccuuccuaa

SEQ ID NO: 1613132 - RNA, 19 nt, Homo sapiens
  misc_RNA (1)...(19): siRNA sense strand
gaaucagaaacuccauguu

SEQ ID NO: 1613133 - RNA, 19 nt, Homo sapiens
  misc_RNA (1)...(19): siRNA sense strand
gcgacuccguuugaggaaa

SEQ ID NO: 1613134 - RNA, 19 nt, Homo sapiens
  misc_RNA (1)...(19): siRNA sense strand
ggauggcagagacauugaa

SEQ ID NO: 1613135 - RNA, 19 nt, Homo sapiens
  misc_RNA (1)...(19): siRNA sense strand
gcagggaguuaaggaucuc

SEQ ID NO: 1613136 - RNA, 19 nt, Homo sapiens
  misc_RNA (1)...(19): siRNA sense strand
gauggcagagacauugaau

SEQ ID NO: 1613137 - RNA, 19 nt, Homo sapiens
  misc_RNA (1)...(19): siRNA sense strand
ccacgcagggaguuaagga

SEQ ID NO: 1613138 - RNA, 19 nt, Homo sapiens
  misc_RNA (1)...(19): siRNA sense strand
ugaaucagaaacuccaugu

SEQ ID NO: 1613139 - RNA, 19 nt, Homo sapiens
  misc_RNA (1)...(19): siRNA sense strand
gguuauggcaagcccuuug

SEQ ID NO: 1613140 - RNA, 19 nt, Homo sapiens
  misc_RNA (1)...(19): siRNA sense strand
uacacucuacuccugcuua

SEQ ID NO: 1613141 - RNA, 19 nt, Homo sapiens
  misc_RNA (1)...(19): siRNA sense strand
uugccaaugugcuggaaga

SEQ ID NO: 1613142 - RNA, 19 nt, Homo sapiens
  misc_RNA (1)...(19): siRNA sense strand
guuauggcaagcccuuuga

SEQ ID NO: 1613143 - RNA, 19 nt, Homo sapiens
  misc_RNA (1)...(19): siRNA sense strand
ggaaggauggcagagacau

SEQ ID NO: 1613144 - RNA, 19 nt, Homo sapiens
  misc_RNA (1)...(19): siRNA sense strand
gacccacgcagggaguuaa

SEQ ID NO: 1613145 - RNA, 19 nt, Homo sapiens
  misc_RNA (1)...(19): siRNA sense strand
ggaaauauauucagaguca

SEQ ID NO: 1613146 - RNA, 19 nt, Homo sapiens
  misc_RNA (1)...(19): siRNA sense strand
gcagagacauugaaucaga

SEQ ID NO: 1613147 - RNA, 19 nt, Homo sapiens
  misc_RNA (1)...(19): siRNA sense strand
ccaaugugcuggaagauga

SEQ ID NO: 1613148 - RNA, 19 nt, Homo sapiens
  misc_RNA (1)...(19): siRNA sense strand
gaaacuccauguugccaau

SEQ ID NO: 1613149 - RNA, 19 nt, Homo sapiens
  misc_RNA (1)...(19): siRNA sense strand
gaggaaauauauucagagu

SEQ ID NO: 1613150 - RNA, 19 nt, Homo sapiens
  misc_RNA (1)...(19): siRNA sense strand
uuaaggaucucgaggaagu

SEQ ID NO: 1613151 - RNA, 19 nt, Homo sapiens
  misc_RNA (1)...(19): siRNA sense strand
cugauuugcuggacucuuu

SEQ ID NO: 1613152 - RNA, 19 nt, Homo sapiens
  misc_RNA (1)...(19): siRNA sense strand
gaaggaaggauggcagaga

SEQ ID NO: 1613153 - RNA, 19 nt, Homo sapiens
  misc_RNA (1)...(19): siRNA sense strand
gaaggauggcagagacauu

SEQ ID NO: 1613154 - RNA, 19 nt, Homo sapiens
  misc_RNA (1)...(19): siRNA sense strand
aaucagaaacuccauguug

SEQ ID NO: 1613155 - RNA, 19 nt, Homo sapiens
  misc_RNA (1)...(19): siRNA sense strand
cagagacauugaaucagaa

SEQ ID NO: 1613156 - RNA, 19 nt, Homo sapiens
  misc_RNA (1)...(19): siRNA sense strand
cuaccuaccucacgucuac

SEQ ID NO: 1613157 - RNA, 19 nt, Homo sapiens
  misc_RNA (1)...(19): siRNA sense strand
cgacuccguuugaggaaau

SEQ ID NO: 1613158 - RNA, 19 nt, Homo sapiens
  misc_RNA (1)...(19): siRNA sense strand
ggaguugcaaccugauuug

SEQ ID NO: 1613159 - RNA, 19 nt, Homo sapiens
  misc_RNA (1)...(19): siRNA sense strand
uuacccagaugccacaaug

SEQ ID NO: 1613160 - RNA, 19 nt, Homo sapiens
  misc_RNA (1)...(19): siRNA sense strand
agucagguguuccuuccua

SEQ ID NO: 1613161 - RNA, 19 nt, Homo sapiens
  misc_RNA (1)...(19): siRNA sense strand
uggcagagacauugaauca

SEQ ID NO: 1613162 - RNA, 19 nt, Homo sapiens
  misc_RNA (1)...(19): siRNA sense strand
ggacccacgcagggaguua

SEQ ID NO: 1613163 - RNA, 19 nt, Homo sapiens
  misc_RNA (1)...(19): siRNA sense strand
gcuggacucuuuggguuca

SEQ ID NO: 1613164 - RNA, 19 nt, Homo sapiens
  misc_RNA (1)...(19): siRNA sense strand
gacauugaaucagaaacuc

SEQ ID NO: 1613165 - RNA, 19 nt, Homo sapiens
  misc_RNA (1)...(19): siRNA sense strand
aguuaaggaucucgaggaa

SEQ ID NO: 1613166 - RNA, 19 nt, Homo sapiens
  misc_RNA (1)...(19): siRNA sense strand
gucagguguuccuuccuaa

SEQ ID NO: 1613167 - RNA, 19 nt, Homo sapiens
  misc_RNA (1)...(19): siRNA sense strand
gaaucagaaacuccauguu

SEQ ID NO: 1613168 - RNA, 19 nt, Homo sapiens
  misc_RNA (1)...(19): siRNA sense strand
gcgacuccguuugaggaaa

SEQ ID NO: 1613169 - RNA, 19 nt, Homo sapiens
  misc_RNA (1)...(19): siRNA sense strand
ggauggcagagacauugaa

SEQ ID NO: 1613170 - RNA, 19 nt, Homo sapiens
  misc_RNA (1)...(19): siRNA sense strand
gcagggaguuaaggaucuc

SEQ ID NO: 1613171 - RNA, 19 nt, Homo sapiens
  misc_RNA (1)...(19): siRNA sense strand
gauggcagagacauugaau

SEQ ID NO: 1613172 - RNA, 19 nt, Homo sapiens
  misc_RNA (1)...(19): siRNA sense strand
ccacgcagggaguuaagga

SEQ ID NO: 1613173 - RNA, 19 nt, Homo sapiens
  misc_RNA (1)...(19): siRNA sense strand
ugaaucagaaacuccaugu

SEQ ID NO: 1613174 - RNA, 19 nt, Homo sapiens
  misc_RNA (1)...(19): siRNA sense strand
gguuauggcaagcccuuug

SEQ ID NO: 1613175 - RNA, 19 nt, Homo sapiens
  misc_RNA (1)...(19): siRNA sense strand
uacacucuacuccugcuua

SEQ ID NO: 1613176 - RNA, 19 nt, Homo sapiens
  misc_RNA (1)...(19): siRNA sense strand
uugccaaugugcuggaaga

SEQ ID NO: 1613177 - RNA, 19 nt, Homo sapiens
  misc_RNA (1)...(19): siRNA sense strand
guuauggcaagcccuuuga

SEQ ID NO: 1613178 - RNA, 19 nt, Homo sapiens
  misc_RNA (1)...(19): siRNA sense strand
ggaaggauggcagagacau

SEQ ID NO: 1613179 - RNA, 19 nt, Homo sapiens
  misc_RNA (1)...(19): siRNA sense strand
gacccacgcagggaguuaa

SEQ ID NO: 1613180 - RNA, 19 nt, Homo sapiens
  misc_RNA (1)...(19): siRNA sense strand
ggaaauggcucccugaucu

SEQ ID NO: 1613181 - RNA, 19 nt, Homo sapiens
  misc_RNA (1)...(19): siRNA sense strand
gaccagugcugcccuguuu

SEQ ID NO: 1613182 - RNA, 19 nt, Homo sapiens
  misc_RNA (1)...(19): siRNA sense strand
agaaugagcucuuccugaa

SEQ ID NO: 1613183 - RNA, 19 nt, Homo sapiens
  misc_RNA (1)...(19): siRNA sense strand
gacgaacggugaucuguga

SEQ ID NO: 1613184 - RNA, 19 nt, Homo sapiens
  misc_RNA (1)...(19): siRNA sense strand
gcgcaucaguggacacauu

SEQ ID NO: 1613185 - RNA, 19 nt, Homo sapiens
  misc_RNA (1)...(19): siRNA sense strand
ggagagggcugcuauuuug

SEQ ID NO: 1613186 - RNA, 19 nt, Homo sapiens
  misc_RNA (1)...(19): siRNA sense strand
caauggcaguguccuguuu

SEQ ID NO: 1613187 - RNA, 19 nt, Homo sapiens
  misc_RNA (1)...(19): siRNA sense strand
ggagagaugagcuguauca

SEQ ID NO: 1613188 - RNA, 19 nt, Homo sapiens
  misc_RNA (1)...(19): siRNA sense strand
gaaauggcucccugaucua

SEQ ID NO: 1613189 - RNA, 19 nt, Homo sapiens
  misc_RNA (1)...(19): siRNA sense strand
ggcauggccucccugauga

SEQ ID NO: 1613190 - RNA, 19 nt, Homo sapiens
  misc_RNA (1)...(19): siRNA sense strand
gggcagugguucccagaga

SEQ ID NO: 1613191 - RNA, 19 nt, Homo sapiens
  misc_RNA (1)...(19): siRNA sense strand
cuggagaggugcacuguga

SEQ ID NO: 1613192 - RNA, 19 nt, Homo sapiens
  misc_RNA (1)...(19): siRNA sense strand
acugucaccugcacuauga

SEQ ID NO: 1613193 - RNA, 19 nt, Homo sapiens
  misc_RNA (1)...(19): siRNA sense strand
gacacucacucacccuuca

SEQ ID NO: 1613194 - RNA, 19 nt, Homo sapiens
  misc_RNA (1)...(19): siRNA sense strand
gaacuucaggccaaugucu

SEQ ID NO: 1613195 - RNA, 19 nt, Homo sapiens
  misc_RNA (1)...(19): siRNA sense strand
caggagagggcugcuauuu

SEQ ID NO: 1613196 - RNA, 19 nt, Homo sapiens
  misc_RNA (1)...(19): siRNA sense strand
ccaugacacuggagaccaa

SEQ ID NO: 1613197 - RNA, 19 nt, Homo sapiens
  misc_RNA (1)...(19): siRNA sense strand
ccagagaccagaacugauc

SEQ ID NO: 1613198 - RNA, 19 nt, Homo sapiens
  misc_RNA (1)...(19): siRNA sense strand
ugagaaacaagaugucaga

SEQ ID NO: 1613199 - RNA, 19 nt, Homo sapiens
  misc_RNA (1)...(19): siRNA sense strand
ggagaggugcacugugaga

SEQ ID NO: 1613200 - RNA, 19 nt, Homo sapiens
  misc_RNA (1)...(19): siRNA sense strand
gcaucacccugcucacucu

SEQ ID NO: 1613201 - RNA, 19 nt, Homo sapiens
  misc_RNA (1)...(19): siRNA sense strand
gagcugcgacguccugcaa

SEQ ID NO: 1613202 - RNA, 19 nt, Homo sapiens
  misc_RNA (1)...(19): siRNA sense strand
uguaucaccugcagaugug

SEQ ID NO: 1613203 - RNA, 19 nt, Homo sapiens
  misc_RNA (1)...(19): siRNA sense strand
gcauguggcacuugugaca

SEQ ID NO: 1613204 - RNA, 19 nt, Homo sapiens
  misc_RNA (1)...(19): siRNA sense strand
gagaacuucaggccaaugu

SEQ ID NO: 1613205 - RNA, 19 nt, Homo sapiens
  misc_RNA (1)...(19): siRNA sense strand
gcgacguccugcaaagugu

SEQ ID NO: 1613206 - RNA, 19 nt, Homo sapiens
  misc_RNA (1)...(19): siRNA sense strand
gacccgcucugcucacucu

SEQ ID NO: 1613207 - RNA, 19 nt, Homo sapiens
  misc_RNA (1)...(19): siRNA sense strand
uuggagagaugagcuguau

SEQ ID NO: 1613208 - RNA, 19 nt, Homo sapiens
  misc_RNA (1)...(19): siRNA sense strand
uuaauuaagugugcugucu

SEQ ID NO: 1613209 - RNA, 19 nt, Homo sapiens
  misc_RNA (1)...(19): siRNA sense strand
gccucacgcugcuaggaaa

SEQ ID NO: 1613210 - RNA, 19 nt, Homo sapiens
  misc_RNA (1)...(19): siRNA sense strand
agaaacaagaugucagaga

SEQ ID NO: 1613211 - RNA, 19 nt, Homo sapiens
  misc_RNA (1)...(19): siRNA sense strand
ggagggaucagcgcacugu

SEQ ID NO: 1613212 - RNA, 19 nt, Homo sapiens
  misc_RNA (1)...(19): siRNA sense strand
gagggcaggugcacauagc

SEQ ID NO: 1613213 - RNA, 19 nt, Homo sapiens
  misc_RNA (1)...(19): siRNA sense strand
ugagcgggaugacuguuca

SEQ ID NO: 1613214 - RNA, 19 nt, Homo sapiens
  misc_RNA (1)...(19): siRNA sense strand
gcgagaacuucaggccaau

SEQ ID NO: 1613215 - RNA, 19 nt, Homo sapiens
  misc_RNA (1)...(19): siRNA sense strand
caaugucucagcccaggaa

SEQ ID NO: 1613216 - RNA, 19 nt, Homo sapiens
  misc_RNA (1)...(19): siRNA sense strand
gcugcgacguccugcaaag

SEQ ID NO: 1613217 - RNA, 19 nt, Homo sapiens
  misc_RNA (1)...(19): siRNA sense strand
agggucagcugcaagaaca

SEQ ID NO: 1613218 - RNA, 19 nt, Homo sapiens
  misc_RNA (1)...(19): siRNA sense strand
aacaagaugucagagacuu

SEQ ID NO: 1613219 - RNA, 19 nt, Homo sapiens
  misc_RNA (1)...(19): siRNA sense strand
gagacgaacggugaucugu

SEQ ID NO: 1613220 - RNA, 19 nt, Homo sapiens
  misc_RNA (1)...(19): siRNA sense strand
gagaggugcacugugagaa

SEQ ID NO: 1613221 - RNA, 19 nt, Homo sapiens
  misc_RNA (1)...(19): siRNA sense strand
gccuggcuuuccuuggaua

SEQ ID NO: 1613222 - RNA, 19 nt, Homo sapiens
  misc_RNA (1)...(19): siRNA sense strand
ggcggcugcugaagggauu

SEQ ID NO: 1613223 - RNA, 19 nt, Homo sapiens
  misc_RNA (1)...(19): siRNA sense strand
gcucagaacaaggcacugu

SEQ ID NO: 1613224 - RNA, 19 nt, Homo sapiens
  misc_RNA (1)...(19): siRNA sense strand
acgccuggcuuuccuugga

SEQ ID NO: 1613225 - RNA, 19 nt, Homo sapiens
  misc_RNA (1)...(19): siRNA sense strand
ccggagcaucgcaguuaua

SEQ ID NO: 1613226 - RNA, 19 nt, Homo sapiens
  misc_RNA (1)...(19): siRNA sense strand
gugccauccugacucuaga

SEQ ID NO: 1613227 - RNA, 19 nt, Homo sapiens
  misc_RNA (1)...(19): siRNA sense strand
acccggagcaucgcaguua

SEQ ID NO: 1613228 - RNA, 19 nt, Homo sapiens
  misc_RNA (1)...(19): siRNA sense strand
gcccugagaaacaagaugu

SEQ ID NO: 1613229 - RNA, 19 nt, Homo sapiens
  misc_RNA (1)...(19): siRNA sense strand
ucagaacaaggcacuguca

SEQ ID NO: 1613230 - RNA, 19 nt, Homo sapiens
  misc_RNA (1)...(19): siRNA sense strand
cccaggguguggugaagga

SEQ ID NO: 1613231 - RNA, 19 nt, Homo sapiens
  misc_RNA (1)...(19): siRNA sense strand
gcucuagccuccgcuucuc

SEQ ID NO: 1613232 - RNA, 19 nt, Homo sapiens
  misc_RNA (1)...(19): siRNA sense strand
caauggcaguguccuguuu

SEQ ID NO: 1613233 - RNA, 19 nt, Homo sapiens
  misc_RNA (1)...(19): siRNA sense strand
gacacucacucacccuuca

SEQ ID NO: 1613234 - RNA, 19 nt, Homo sapiens
  misc_RNA (1)...(19): siRNA sense strand
gaacuucaggccaaugucu

SEQ ID NO: 1613235 - RNA, 19 nt, Homo sapiens
  misc_RNA (1)...(19): siRNA sense strand
gcaucacccugcucacucu

SEQ ID NO: 1613236 - RNA, 19 nt, Homo sapiens
  misc_RNA (1)...(19): siRNA sense strand
gcauguggcacuugugaca

SEQ ID NO: 1613237 - RNA, 19 nt, Homo sapiens
  misc_RNA (1)...(19): siRNA sense strand
gagaacuucaggccaaugu

SEQ ID NO: 1613238 - RNA, 19 nt, Homo sapiens
  misc_RNA (1)...(19): siRNA sense strand
gcgagaacuucaggccaau

SEQ ID NO: 1613239 - RNA, 19 nt, Homo sapiens
  misc_RNA (1)...(19): siRNA sense strand
caaugucucagcccaggaa

SEQ ID NO: 1613240 - RNA, 19 nt, Homo sapiens
  misc_RNA (1)...(19): siRNA sense strand
agggucagcugcaagaaca

SEQ ID NO: 1613241 - RNA, 19 nt, Homo sapiens
  misc_RNA (1)...(19): siRNA sense strand
ccggagcaucgcaguuaua

SEQ ID NO: 1613242 - RNA, 19 nt, Homo sapiens
  misc_RNA (1)...(19): siRNA sense strand
gugccauccugacucuaga

SEQ ID NO: 1613243 - RNA, 19 nt, Homo sapiens
  misc_RNA (1)...(19): siRNA sense strand
acccggagcaucgcaguua

SEQ ID NO: 1613244 - RNA, 19 nt, Homo sapiens
  misc_RNA (1)...(19): siRNA sense strand
gcucuagccuccgcuucuc

SEQ ID NO: 1613245 - RNA, 19 nt, Homo sapiens
  misc_RNA (1)...(19): siRNA sense strand
ggaaauggcucccugaucu

SEQ ID NO: 1613246 - RNA, 19 nt, Homo sapiens
  misc_RNA (1)...(19): siRNA sense strand
gaccagugcugcccuguuu

SEQ ID NO: 1613247 - RNA, 19 nt, Homo sapiens
  misc_RNA (1)...(19): siRNA sense strand
agaaugagcucuuccugaa

SEQ ID NO: 1613248 - RNA, 19 nt, Homo sapiens
  misc_RNA (1)...(19): siRNA sense strand
gacgaacggugaucuguga

SEQ ID NO: 1613249 - RNA, 19 nt, Homo sapiens
  misc_RNA (1)...(19): siRNA sense strand
gcgcaucaguggacacauu

SEQ ID NO: 1613250 - RNA, 19 nt, Homo sapiens
  misc_RNA (1)...(19): siRNA sense strand
ggagagggcugcuauuuug

SEQ ID NO: 1613251 - RNA, 19 nt, Homo sapiens
  misc_RNA (1)...(19): siRNA sense strand
caauggcaguguccuguuu

SEQ ID NO: 1613252 - RNA, 19 nt, Homo sapiens
  misc_RNA (1)...(19): siRNA sense strand
ggagagaugagcuguauca

SEQ ID NO: 1613253 - RNA, 19 nt, Homo sapiens
  misc_RNA (1)...(19): siRNA sense strand
gaaauggcucccugaucua

SEQ ID NO: 1613254 - RNA, 19 nt, Homo sapiens
  misc_RNA (1)...(19): siRNA sense strand
ggcauggccucccugauga

SEQ ID NO: 1613255 - RNA, 19 nt, Homo sapiens
  misc_RNA (1)...(19): siRNA sense strand
gggcagugguucccagaga

SEQ ID NO: 1613256 - RNA, 19 nt, Homo sapiens
  misc_RNA (1)...(19): siRNA sense strand
cuggagaggugcacuguga

SEQ ID NO: 1613257 - RNA, 19 nt, Homo sapiens
  misc_RNA (1)...(19): siRNA sense strand
acugucaccugcacuauga

SEQ ID NO: 1613258 - RNA, 19 nt, Homo sapiens
  misc_RNA (1)...(19): siRNA sense strand
gacacucacucacccuuca

SEQ ID NO: 1613259 - RNA, 19 nt, Homo sapiens
  misc_RNA (1)...(19): siRNA sense strand
gaacuucaggccaaugucu

SEQ ID NO: 1613260 - RNA, 19 nt, Homo sapiens
  misc_RNA (1)...(19): siRNA sense strand
caggagagggcugcuauuu

SEQ ID NO: 1613261 - RNA, 19 nt, Homo sapiens
  misc_RNA (1)...(19): siRNA sense strand
ccaugacacuggagaccaa

SEQ ID NO: 1613262 - RNA, 19 nt, Homo sapiens
  misc_RNA (1)...(19): siRNA sense strand
ccagagaccagaacugauc

SEQ ID NO: 1613263 - RNA, 19 nt, Homo sapiens
  misc_RNA (1)...(19): siRNA sense strand
ugagaaacaagaugucaga

SEQ ID NO: 1613264 - RNA, 19 nt, Homo sapiens
  misc_RNA (1)...(19): siRNA sense strand
ggagaggugcacugugaga

SEQ ID NO: 1613265 - RNA, 19 nt, Homo sapiens
  misc_RNA (1)...(19): siRNA sense strand
gcaucacccugcucacucu

SEQ ID NO: 1613266 - RNA, 19 nt, Homo sapiens
  misc_RNA (1)...(19): siRNA sense strand
gagcugcgacguccugcaa

SEQ ID NO: 1613267 - RNA, 19 nt, Homo sapiens
  misc_RNA (1)...(19): siRNA sense strand
uguaucaccugcagaugug

SEQ ID NO: 1613268 - RNA, 19 nt, Homo sapiens
  misc_RNA (1)...(19): siRNA sense strand
gcauguggcacuugugaca

SEQ ID NO: 1613269 - RNA, 19 nt, Homo sapiens
  misc_RNA (1)...(19): siRNA sense strand
gagaacuucaggccaaugu

SEQ ID NO: 1613270 - RNA, 19 nt, Homo sapiens
  misc_RNA (1)...(19): siRNA sense strand
gcgacguccugcaaagugu

SEQ ID NO: 1613271 - RNA, 19 nt, Homo sapiens
  misc_RNA (1)...(19): siRNA sense strand
gacccgcucugcucacucu

SEQ ID NO: 1613272 - RNA, 19 nt, Homo sapiens
  misc_RNA (1)...(19): siRNA sense strand
uuggagagaugagcuguau

SEQ ID NO: 1613273 - RNA, 19 nt, Homo sapiens
  misc_RNA (1)...(19): siRNA sense strand
uuaauuaagugugcugucu

SEQ ID NO: 1613274 - RNA, 19 nt, Homo sapiens
  misc_RNA (1)...(19): siRNA sense strand
gccucacgcugcuaggaaa

SEQ ID NO: 1613275 - RNA, 19 nt, Homo sapiens
  misc_RNA (1)...(19): siRNA sense strand
agaaacaagaugucagaga

SEQ ID NO: 1613276 - RNA, 19 nt, Homo sapiens
  misc_RNA (1)...(19): siRNA sense strand
ggagggaucagcgcacugu

SEQ ID NO: 1613277 - RNA, 19 nt, Homo sapiens
  misc_RNA (1)...(19): siRNA sense strand
gagggcaggugcacauagc

SEQ ID NO: 1613278 - RNA, 19 nt, Homo sapiens
  misc_RNA (1)...(19): siRNA sense strand
ugagcgggaugacuguuca

SEQ ID NO: 1613279 - RNA, 19 nt, Homo sapiens
  misc_RNA (1)...(19): siRNA sense strand
gcgagaacuucaggccaau

SEQ ID NO: 1613280 - RNA, 19 nt, Homo sapiens
  misc_RNA (1)...(19): siRNA sense strand
caaugucucagcccaggaa

SEQ ID NO: 1613281 - RNA, 19 nt, Homo sapiens
  misc_RNA (1)...(19): siRNA sense strand
gcugcgacguccugcaaag

SEQ ID NO: 1613282 - RNA, 19 nt, Homo sapiens
  misc_RNA (1)...(19): siRNA sense strand
agggucagcugcaagaaca

SEQ ID NO: 1613283 - RNA, 19 nt, Homo sapiens
  misc_RNA (1)...(19): siRNA sense strand
aacaagaugucagagacuu

SEQ ID NO: 1613284 - RNA, 19 nt, Homo sapiens
  misc_RNA (1)...(19): siRNA sense strand
gagacgaacggugaucugu

SEQ ID NO: 1613285 - RNA, 19 nt, Homo sapiens
  misc_RNA (1)...(19): siRNA sense strand
gagaggugcacugugagaa

SEQ ID NO: 1613286 - RNA, 19 nt, Homo sapiens
  misc_RNA (1)...(19): siRNA sense strand
gccuggcuuuccuuggaua

SEQ ID NO: 1613287 - RNA, 19 nt, Homo sapiens
  misc_RNA (1)...(19): siRNA sense strand
ggcggcugcugaagggauu

SEQ ID NO: 1613288 - RNA, 19 nt, Homo sapiens
  misc_RNA (1)...(19): siRNA sense strand
gcucagaacaaggcacugu

SEQ ID NO: 1613289 - RNA, 19 nt, Homo sapiens
  misc_RNA (1)...(19): siRNA sense strand
acgccuggcuuuccuugga

SEQ ID NO: 1613290 - RNA, 19 nt, Homo sapiens
  misc_RNA (1)...(19): siRNA sense strand
ccggagcaucgcaguuaua

SEQ ID NO: 1613291 - RNA, 19 nt, Homo sapiens
  misc_RNA (1)...(19): siRNA sense strand
gugccauccugacucuaga

SEQ ID NO: 1613292 - RNA, 19 nt, Homo sapiens
  misc_RNA (1)...(19): siRNA sense strand
acccggagcaucgcaguua

SEQ ID NO: 1613293 - RNA, 19 nt, Homo sapiens
  misc_RNA (1)...(19): siRNA sense strand
gcccugagaaacaagaugu

SEQ ID NO: 1613294 - RNA, 19 nt, Homo sapiens
  misc_RNA (1)...(19): siRNA sense strand
ucagaacaaggcacuguca

SEQ ID NO: 1613295 - RNA, 19 nt, Homo sapiens
  misc_RNA (1)...(19): siRNA sense strand
cccaggguguggugaagga

SEQ ID NO: 1613296 - RNA, 19 nt, Homo sapiens
  misc_RNA (1)...(19): siRNA sense strand
gcucuagccuccgcuucuc

SEQ ID NO: 1613297 - RNA, 19 nt, Homo sapiens
  misc_RNA (1)...(19): siRNA sense strand
caauggcaguguccuguuu

SEQ ID NO: 1613298 - RNA, 19 nt, Homo sapiens
  misc_RNA (1)...(19): siRNA sense strand
gacacucacucacccuuca

SEQ ID NO: 1613299 - RNA, 19 nt, Homo sapiens
  misc_RNA (1)...(19): siRNA sense strand
gaacuucaggccaaugucu

SEQ ID NO: 1613300 - RNA, 19 nt, Homo sapiens
  misc_RNA (1)...(19): siRNA sense strand
gcaucacccugcucacucu

SEQ ID NO: 1613301 - RNA, 19 nt, Homo sapiens
  misc_RNA (1)...(19): siRNA sense strand
gcauguggcacuugugaca

SEQ ID NO: 1613302 - RNA, 19 nt, Homo sapiens
  misc_RNA (1)...(19): siRNA sense strand
gagaacuucaggccaaugu

SEQ ID NO: 1613303 - RNA, 19 nt, Homo sapiens
  misc_RNA (1)...(19): siRNA sense strand
gcgagaacuucaggccaau

SEQ ID NO: 1613304 - RNA, 19 nt, Homo sapiens
  misc_RNA (1)...(19): siRNA sense strand
caaugucucagcccaggaa

SEQ ID NO: 1613305 - RNA, 19 nt, Homo sapiens
  misc_RNA (1)...(19): siRNA sense strand
agggucagcugcaagaaca

SEQ ID NO: 1613306 - RNA, 19 nt, Homo sapiens
  misc_RNA (1)...(19): siRNA sense strand
ccggagcaucgcaguuaua

SEQ ID NO: 1613307 - RNA, 19 nt, Homo sapiens
  misc_RNA (1)...(19): siRNA sense strand
gugccauccugacucuaga

SEQ ID NO: 1613308 - RNA, 19 nt, Homo sapiens
  misc_RNA (1)...(19): siRNA sense strand
acccggagcaucgcaguua

SEQ ID NO: 1613309 - RNA, 19 nt, Homo sapiens
  misc_RNA (1)...(19): siRNA sense strand
gcucuagccuccgcuucuc

SEQ ID NO: 1613310 - RNA, 19 nt, Homo sapiens
  misc_RNA (1)...(19): siRNA sense strand
ggaaauggacgcuggauua

SEQ ID NO: 1613311 - RNA, 19 nt, Homo sapiens
  misc_RNA (1)...(19): siRNA sense strand
gaacaaaggaagcaggaaa

SEQ ID NO: 1613312 - RNA, 19 nt, Homo sapiens
  misc_RNA (1)...(19): siRNA sense strand
gcaggaaaaugcucuuaaa

SEQ ID NO: 1613313 - RNA, 19 nt, Homo sapiens
  misc_RNA (1)...(19): siRNA sense strand
aauggacgcuggauuacaa

SEQ ID NO: 1613314 - RNA, 19 nt, Homo sapiens
  misc_RNA (1)...(19): siRNA sense strand
gaaguugcaggaagaacaa

SEQ ID NO: 1613315 - RNA, 19 nt, Homo sapiens
  misc_RNA (1)...(19): siRNA sense strand
gaaauggacgcuggauuac

SEQ ID NO: 1613316 - RNA, 19 nt, Homo sapiens
  misc_RNA (1)...(19): siRNA sense strand
uuuagggacuguucucuuc

SEQ ID NO: 1613317 - RNA, 19 nt, Homo sapiens
  misc_RNA (1)...(19): siRNA sense strand
gaguuguacugcugucaca

SEQ ID NO: 1613318 - RNA, 19 nt, Homo sapiens
  misc_RNA (1)...(19): siRNA sense strand
gcagaaguugcaggaagaa

SEQ ID NO: 1613319 - RNA, 19 nt, Homo sapiens
  misc_RNA (1)...(19): siRNA sense strand
agcagaaguugcaggaaga

SEQ ID NO: 1613320 - RNA, 19 nt, Homo sapiens
  misc_RNA (1)...(19): siRNA sense strand
gacgcuggauuacaagcau

SEQ ID NO: 1613321 - RNA, 19 nt, Homo sapiens
  misc_RNA (1)...(19): siRNA sense strand
gcucaggcagcagaaguug

SEQ ID NO: 1613322 - RNA, 19 nt, Homo sapiens
  misc_RNA (1)...(19): siRNA sense strand
uuuagggacuguucucuuc

SEQ ID NO: 1613323 - RNA, 19 nt, Homo sapiens
  misc_RNA (1)...(19): siRNA sense strand
ggaaauggacgcuggauua

SEQ ID NO: 1613324 - RNA, 19 nt, Homo sapiens
  misc_RNA (1)...(19): siRNA sense strand
gaacaaaggaagcaggaaa

SEQ ID NO: 1613325 - RNA, 19 nt, Homo sapiens
  misc_RNA (1)...(19): siRNA sense strand
gcaggaaaaugcucuuaaa

SEQ ID NO: 1613326 - RNA, 19 nt, Homo sapiens
  misc_RNA (1)...(19): siRNA sense strand
aauggacgcuggauuacaa

SEQ ID NO: 1613327 - RNA, 19 nt, Homo sapiens
  misc_RNA (1)...(19): siRNA sense strand
gaaguugcaggaagaacaa

SEQ ID NO: 1613328 - RNA, 19 nt, Homo sapiens
  misc_RNA (1)...(19): siRNA sense strand
gaaauggacgcuggauuac

SEQ ID NO: 1613329 - RNA, 19 nt, Homo sapiens
  misc_RNA (1)...(19): siRNA sense strand
uuuagggacuguucucuuc

SEQ ID NO: 1613330 - RNA, 19 nt, Homo sapiens
  misc_RNA (1)...(19): siRNA sense strand
gaguuguacugcugucaca

SEQ ID NO: 1613331 - RNA, 19 nt, Homo sapiens
  misc_RNA (1)...(19): siRNA sense strand
gcagaaguugcaggaagaa

SEQ ID NO: 1613332 - RNA, 19 nt, Homo sapiens
  misc_RNA (1)...(19): siRNA sense strand
agcagaaguugcaggaaga

SEQ ID NO: 1613333 - RNA, 19 nt, Homo sapiens
  misc_RNA (1)...(19): siRNA sense strand
gacgcuggauuacaagcau

SEQ ID NO: 1613334 - RNA, 19 nt, Homo sapiens
  misc_RNA (1)...(19): siRNA sense strand
gcucaggcagcagaaguug

SEQ ID NO: 1613335 - RNA, 19 nt, Homo sapiens
  misc_RNA (1)...(19): siRNA sense strand
ggaaauggacgcuggauua

SEQ ID NO: 1613336 - RNA, 19 nt, Homo sapiens
  misc_RNA (1)...(19): siRNA sense strand
gaacaaaggaagcaggaaa

SEQ ID NO: 1613337 - RNA, 19 nt, Homo sapiens
  misc_RNA (1)...(19): siRNA sense strand
gcaggaaaaugcucuuaaa

SEQ ID NO: 1613338 - RNA, 19 nt, Homo sapiens
  misc_RNA (1)...(19): siRNA sense strand
aauggacgcuggauuacaa

SEQ ID NO: 1613339 - RNA, 19 nt, Homo sapiens
  misc_RNA (1)...(19): siRNA sense strand
gaaguugcaggaagaacaa

SEQ ID NO: 1613340 - RNA, 19 nt, Homo sapiens
  misc_RNA (1)...(19): siRNA sense strand
gaaauggacgcuggauuac

SEQ ID NO: 1613341 - RNA, 19 nt, Homo sapiens
  misc_RNA (1)...(19): siRNA sense strand
gaguuguacugcugucaca

SEQ ID NO: 1613342 - RNA, 19 nt, Homo sapiens
  misc_RNA (1)...(19): siRNA sense strand
gcagaaguugcaggaagaa

SEQ ID NO: 1613343 - RNA, 19 nt, Homo sapiens
  misc_RNA (1)...(19): siRNA sense strand
agcagaaguugcaggaaga

SEQ ID NO: 1613344 - RNA, 19 nt, Homo sapiens
  misc_RNA (1)...(19): siRNA sense strand
gacgcuggauuacaagcau

SEQ ID NO: 1613345 - RNA, 19 nt, Homo sapiens
  misc_RNA (1)...(19): siRNA sense strand
gcucaggcagcagaaguug

SEQ ID NO: 1613346 - RNA, 19 nt, Homo sapiens
  misc_RNA (1)...(19): siRNA sense strand
ggaaauggacgcuggauua

SEQ ID NO: 1613347 - RNA, 19 nt, Homo sapiens
  misc_RNA (1)...(19): siRNA sense strand
gaacaaaggaagcaggaaa

SEQ ID NO: 1613348 - RNA, 19 nt, Homo sapiens
  misc_RNA (1)...(19): siRNA sense strand
gcaggaaaaugcucuuaaa

SEQ ID NO: 1613349 - RNA, 19 nt, Homo sapiens
  misc_RNA (1)...(19): siRNA sense strand
aauggacgcuggauuacaa

SEQ ID NO: 1613350 - RNA, 19 nt, Homo sapiens
  misc_RNA (1)...(19): siRNA sense strand
gaaguugcaggaagaacaa

SEQ ID NO: 1613351 - RNA, 19 nt, Homo sapiens
  misc_RNA (1)...(19): siRNA sense strand
gaaauggacgcuggauuac

SEQ ID NO: 1613352 - RNA, 19 nt, Homo sapiens
  misc_RNA (1)...(19): siRNA sense strand
gaguuguacugcugucaca

SEQ ID NO: 1613353 - RNA, 19 nt, Homo sapiens
  misc_RNA (1)...(19): siRNA sense strand
gcagaaguugcaggaagaa

SEQ ID NO: 1613354 - RNA, 19 nt, Homo sapiens
  misc_RNA (1)...(19): siRNA sense strand
agcagaaguugcaggaaga

SEQ ID NO: 1613355 - RNA, 19 nt, Homo sapiens
  misc_RNA (1)...(19): siRNA sense strand
gacgcuggauuacaagcau

SEQ ID NO: 1613356 - RNA, 19 nt, Homo sapiens
  misc_RNA (1)...(19): siRNA sense strand
gcucaggcagcagaaguug

SEQ ID NO: 1613357 - RNA, 19 nt, Homo sapiens
  misc_RNA (1)...(19): siRNA sense strand
ggaaauggacgcuggauua

SEQ ID NO: 1613358 - RNA, 19 nt, Homo sapiens
  misc_RNA (1)...(19): siRNA sense strand
gaacaaaggaagcaggaaa

SEQ ID NO: 1613359 - RNA, 19 nt, Homo sapiens
  misc_RNA (1)...(19): siRNA sense strand
gcaggaaaaugcucuuaaa

SEQ ID NO: 1613360 - RNA, 19 nt, Homo sapiens
  misc_RNA (1)...(19): siRNA sense strand
aauggacgcuggauuacaa

SEQ ID NO: 1613361 - RNA, 19 nt, Homo sapiens
  misc_RNA (1)...(19): siRNA sense strand
gaaguugcaggaagaacaa

SEQ ID NO: 1613362 - RNA, 19 nt, Homo sapiens
  misc_RNA (1)...(19): siRNA sense strand
gaaauggacgcuggauuac

SEQ ID NO: 1613363 - RNA, 19 nt, Homo sapiens
  misc_RNA (1)...(19): siRNA sense strand
gaguuguacugcugucaca

SEQ ID NO: 1613364 - RNA, 19 nt, Homo sapiens
  misc_RNA (1)...(19): siRNA sense strand
gcagaaguugcaggaagaa

SEQ ID NO: 1613365 - RNA, 19 nt, Homo sapiens
  misc_RNA (1)...(19): siRNA sense strand
agcagaaguugcaggaaga

SEQ ID NO: 1613366 - RNA, 19 nt, Homo sapiens
  misc_RNA (1)...(19): siRNA sense strand
gacgcuggauuacaagcau

SEQ ID NO: 1613367 - RNA, 19 nt, Homo sapiens
  misc_RNA (1)...(19): siRNA sense strand
gcucaggcagcagaaguug

SEQ ID NO: 1613368 - RNA, 19 nt, Homo sapiens
  misc_RNA (1)...(19): siRNA sense strand
ggaaauggacgcuggauua

SEQ ID NO: 1613369 - RNA, 19 nt, Homo sapiens
  misc_RNA (1)...(19): siRNA sense strand
gaacaaaggaagcaggaaa

SEQ ID NO: 1613370 - RNA, 19 nt, Homo sapiens
  misc_RNA (1)...(19): siRNA sense strand
aauggacgcuggauuacaa

SEQ ID NO: 1613371 - RNA, 19 nt, Homo sapiens
  misc_RNA (1)...(19): siRNA sense strand
gaaguugcaggaagaacaa

SEQ ID NO: 1613372 - RNA, 19 nt, Homo sapiens
  misc_RNA (1)...(19): siRNA sense strand
gaaauggacgcuggauuac

SEQ ID NO: 1613373 - RNA, 19 nt, Homo sapiens
  misc_RNA (1)...(19): siRNA sense strand
uuuagggacuguucucuuc

SEQ ID NO: 1613374 - RNA, 19 nt, Homo sapiens
  misc_RNA (1)...(19): siRNA sense strand
gaguuguacugcugucaca

SEQ ID NO: 1613375 - RNA, 19 nt, Homo sapiens
  misc_RNA (1)...(19): siRNA sense strand
gcagaaguugcaggaagaa

SEQ ID NO: 1613376 - RNA, 19 nt, Homo sapiens
  misc_RNA (1)...(19): siRNA sense strand
agcagaaguugcaggaaga

SEQ ID NO: 1613377 - RNA, 19 nt, Homo sapiens
  misc_RNA (1)...(19): siRNA sense strand
gacgcuggauuacaagcau

SEQ ID NO: 1613378 - RNA, 19 nt, Homo sapiens
  misc_RNA (1)...(19): siRNA sense strand
gcucaggcagcagaaguug

SEQ ID NO: 1613379 - RNA, 19 nt, Homo sapiens
  misc_RNA (1)...(19): siRNA sense strand
ggaaauggacgcuggauua

SEQ ID NO: 1613380 - RNA, 19 nt, Homo sapiens
  misc_RNA (1)...(19): siRNA sense strand
gaacaaaggaagcaggaaa

SEQ ID NO: 1613381 - RNA, 19 nt, Homo sapiens
  misc_RNA (1)...(19): siRNA sense strand
gcaggaaaaugcucuuaaa

SEQ ID NO: 1613382 - RNA, 19 nt, Homo sapiens
  misc_RNA (1)...(19): siRNA sense strand
aauggacgcuggauuacaa

SEQ ID NO: 1613383 - RNA, 19 nt, Homo sapiens
  misc_RNA (1)...(19): siRNA sense strand
gaaguugcaggaagaacaa

SEQ ID NO: 1613384 - RNA, 19 nt, Homo sapiens
  misc_RNA (1)...(19): siRNA sense strand
gaaauggacgcuggauuac

SEQ ID NO: 1613385 - RNA, 19 nt, Homo sapiens
  misc_RNA (1)...(19): siRNA sense strand
uuuagggacuguucucuuc

SEQ ID NO: 1613386 - RNA, 19 nt, Homo sapiens
  misc_RNA (1)...(19): siRNA sense strand
gaguuguacugcugucaca

SEQ ID NO: 1613387 - RNA, 19 nt, Homo sapiens
  misc_RNA (1)...(19): siRNA sense strand
gcagaaguugcaggaagaa

SEQ ID NO: 1613388 - RNA, 19 nt, Homo sapiens
  misc_RNA (1)...(19): siRNA sense strand
agcagaaguugcaggaaga

SEQ ID NO: 1613389 - RNA, 19 nt, Homo sapiens
  misc_RNA (1)...(19): siRNA sense strand
gacgcuggauuacaagcau

SEQ ID NO: 1613390 - RNA, 19 nt, Homo sapiens
  misc_RNA (1)...(19): siRNA sense strand
gcucaggcagcagaaguug

SEQ ID NO: 1613391 - RNA, 19 nt, Homo sapiens
  misc_RNA (1)...(19): siRNA sense strand
uuuagggacuguucucuuc

SEQ ID NO: 1613392 - RNA, 19 nt, Homo sapiens
  misc_RNA (1)...(19): siRNA sense strand
ggaaauggacgcuggauua

SEQ ID NO: 1613393 - RNA, 19 nt, Homo sapiens
  misc_RNA (1)...(19): siRNA sense strand
gaacaaaggaagcaggaaa

SEQ ID NO: 1613394 - RNA, 19 nt, Homo sapiens
  misc_RNA (1)...(19): siRNA sense strand
gcaggaaaaugcucuuaaa

SEQ ID NO: 1613395 - RNA, 19 nt, Homo sapiens
  misc_RNA (1)...(19): siRNA sense strand
aauggacgcuggauuacaa

SEQ ID NO: 1613396 - RNA, 19 nt, Homo sapiens
  misc_RNA (1)...(19): siRNA sense strand
gaaguugcaggaagaacaa

SEQ ID NO: 1613397 - RNA, 19 nt, Homo sapiens
  misc_RNA (1)...(19): siRNA sense strand
gaaauggacgcuggauuac

SEQ ID NO: 1613398 - RNA, 19 nt, Homo sapiens
  misc_RNA (1)...(19): siRNA sense strand
uuuagggacuguucucuuc

SEQ ID NO: 1613399 - RNA, 19 nt, Homo sapiens
  misc_RNA (1)...(19): siRNA sense strand
gaguuguacugcugucaca

SEQ ID NO: 1613400 - RNA, 19 nt, Homo sapiens
  misc_RNA (1)...(19): siRNA sense strand
gcagaaguugcaggaagaa

SEQ ID NO: 1613401 - RNA, 19 nt, Homo sapiens
  misc_RNA (1)...(19): siRNA sense strand
agcagaaguugcaggaaga

SEQ ID NO: 1613402 - RNA, 19 nt, Homo sapiens
  misc_RNA (1)...(19): siRNA sense strand
gacgcuggauuacaagcau

SEQ ID NO: 1613403 - RNA, 19 nt, Homo sapiens
  misc_RNA (1)...(19): siRNA sense strand
gcucaggcagcagaaguug

SEQ ID NO: 1613404 - RNA, 19 nt, Homo sapiens
  misc_RNA (1)...(19): siRNA sense strand
ggaaauggacgcuggauua

SEQ ID NO: 1613405 - RNA, 19 nt, Homo sapiens
  misc_RNA (1)...(19): siRNA sense strand
gaacaaaggaagcaggaaa

SEQ ID NO: 1613406 - RNA, 19 nt, Homo sapiens
  misc_RNA (1)...(19): siRNA sense strand
gcaggaaaaugcucuuaaa

SEQ ID NO: 1613407 - RNA, 19 nt, Homo sapiens
  misc_RNA (1)...(19): siRNA sense strand
aauggacgcuggauuacaa

SEQ ID NO: 1613408 - RNA, 19 nt, Homo sapiens
  misc_RNA (1)...(19): siRNA sense strand
gaaguugcaggaagaacaa

SEQ ID NO: 1613409 - RNA, 19 nt, Homo sapiens
  misc_RNA (1)...(19): siRNA sense strand
gaaauggacgcuggauuac

SEQ ID NO: 1613410 - RNA, 19 nt, Homo sapiens
  misc_RNA (1)...(19): siRNA sense strand
gaguuguacugcugucaca

SEQ ID NO: 1613411 - RNA, 19 nt, Homo sapiens
  misc_RNA (1)...(19): siRNA sense strand
gcagaaguugcaggaagaa

SEQ ID NO: 1613412 - RNA, 19 nt, Homo sapiens
  misc_RNA (1)...(19): siRNA sense strand
agcagaaguugcaggaaga

SEQ ID NO: 1613413 - RNA, 19 nt, Homo sapiens
  misc_RNA (1)...(19): siRNA sense strand
gacgcuggauuacaagcau

SEQ ID NO: 1613414 - RNA, 19 nt, Homo sapiens
  misc_RNA (1)...(19): siRNA sense strand
gcucaggcagcagaaguug

SEQ ID NO: 1613415 - RNA, 19 nt, Homo sapiens
  misc_RNA (1)...(19): siRNA sense strand
ggaaauggacgcuggauua

SEQ ID NO: 1613416 - RNA, 19 nt, Homo sapiens
  misc_RNA (1)...(19): siRNA sense strand
gaacaaaggaagcaggaaa

SEQ ID NO: 1613417 - RNA, 19 nt, Homo sapiens
  misc_RNA (1)...(19): siRNA sense strand
gcaggaaaaugcucuuaaa

SEQ ID NO: 1613418 - RNA, 19 nt, Homo sapiens
  misc_RNA (1)...(19): siRNA sense strand
aauggacgcuggauuacaa

SEQ ID NO: 1613419 - RNA, 19 nt, Homo sapiens
  misc_RNA (1)...(19): siRNA sense strand
gaaguugcaggaagaacaa

SEQ ID NO: 1613420 - RNA, 19 nt, Homo sapiens
  misc_RNA (1)...(19): siRNA sense strand
gaaauggacgcuggauuac

SEQ ID NO: 1613421 - RNA, 19 nt, Homo sapiens
  misc_RNA (1)...(19): siRNA sense strand
gaguuguacugcugucaca

SEQ ID NO: 1613422 - RNA, 19 nt, Homo sapiens
  misc_RNA (1)...(19): siRNA sense strand
gcagaaguugcaggaagaa

SEQ ID NO: 1613423 - RNA, 19 nt, Homo sapiens
  misc_RNA (1)...(19): siRNA sense strand
agcagaaguugcaggaaga

SEQ ID NO: 1613424 - RNA, 19 nt, Homo sapiens
  misc_RNA (1)...(19): siRNA sense strand
gacgcuggauuacaagcau

SEQ ID NO: 1613425 - RNA, 19 nt, Homo sapiens
  misc_RNA (1)...(19): siRNA sense strand
gcucaggcagcagaaguug

SEQ ID NO: 1613426 - RNA, 19 nt, Homo sapiens
  misc_RNA (1)...(19): siRNA sense strand
ggaaauggacgcuggauua

SEQ ID NO: 1613427 - RNA, 19 nt, Homo sapiens
  misc_RNA (1)...(19): siRNA sense strand
gaacaaaggaagcaggaaa

SEQ ID NO: 1613428 - RNA, 19 nt, Homo sapiens
  misc_RNA (1)...(19): siRNA sense strand
gcaggaaaaugcucuuaaa

SEQ ID NO: 1613429 - RNA, 19 nt, Homo sapiens
  misc_RNA (1)...(19): siRNA sense strand
aauggacgcuggauuacaa

SEQ ID NO: 1613430 - RNA, 19 nt, Homo sapiens
  misc_RNA (1)...(19): siRNA sense strand
gaaguugcaggaagaacaa

SEQ ID NO: 1613431 - RNA, 19 nt, Homo sapiens
  misc_RNA (1)...(19): siRNA sense strand
gaaauggacgcuggauuac

SEQ ID NO: 1613432 - RNA, 19 nt, Homo sapiens
  misc_RNA (1)...(19): siRNA sense strand
gaguuguacugcugucaca

SEQ ID NO: 1613433 - RNA, 19 nt, Homo sapiens
  misc_RNA (1)...(19): siRNA sense strand
gcagaaguugcaggaagaa

SEQ ID NO: 1613434 - RNA, 19 nt, Homo sapiens
  misc_RNA (1)...(19): siRNA sense strand
agcagaaguugcaggaaga

SEQ ID NO: 1613435 - RNA, 19 nt, Homo sapiens
  misc_RNA (1)...(19): siRNA sense strand
gacgcuggauuacaagcau

SEQ ID NO: 1613436 - RNA, 19 nt, Homo sapiens
  misc_RNA (1)...(19): siRNA sense strand
gcucaggcagcagaaguug

SEQ ID NO: 1613437 - RNA, 19 nt, Homo sapiens
  misc_RNA (1)...(19): siRNA sense strand
ggaaauggacgcuggauua

SEQ ID NO: 1613438 - RNA, 19 nt, Homo sapiens
  misc_RNA (1)...(19): siRNA sense strand
gaacaaaggaagcaggaaa

SEQ ID NO: 1613439 - RNA, 19 nt, Homo sapiens
  misc_RNA (1)...(19): siRNA sense strand
aauggacgcuggauuacaa

SEQ ID NO: 1613440 - RNA, 19 nt, Homo sapiens
  misc_RNA (1)...(19): siRNA sense strand
gaaguugcaggaagaacaa

SEQ ID NO: 1613441 - RNA, 19 nt, Homo sapiens
  misc_RNA (1)...(19): siRNA sense strand
gaaauggacgcuggauuac

SEQ ID NO: 1613442 - RNA, 19 nt, Homo sapiens
  misc_RNA (1)...(19): siRNA sense strand
uuuagggacuguucucuuc

SEQ ID NO: 1613443 - RNA, 19 nt, Homo sapiens
  misc_RNA (1)...(19): siRNA sense strand
gaguuguacugcugucaca

SEQ ID NO: 1613444 - RNA, 19 nt, Homo sapiens
  misc_RNA (1)...(19): siRNA sense strand
gcagaaguugcaggaagaa

SEQ ID NO: 1613445 - RNA, 19 nt, Homo sapiens
  misc_RNA (1)...(19): siRNA sense strand
agcagaaguugcaggaaga

SEQ ID NO: 1613446 - RNA, 19 nt, Homo sapiens
  misc_RNA (1)...(19): siRNA sense strand
gacgcuggauuacaagcau

SEQ ID NO: 1613447 - RNA, 19 nt, Homo sapiens
  misc_RNA (1)...(19): siRNA sense strand
gcucaggcagcagaaguug

SEQ ID NO: 1613448 - RNA, 19 nt, Homo sapiens
  misc_RNA (1)...(19): siRNA sense strand
gauaaacccuggcauauuu

SEQ ID NO: 1613449 - RNA, 19 nt, Homo sapiens
  misc_RNA (1)...(19): siRNA sense strand
ggagaaggcuugcaagaag

SEQ ID NO: 1613450 - RNA, 19 nt, Homo sapiens
  misc_RNA (1)...(19): siRNA sense strand
caaggaagauacagaaauc

SEQ ID NO: 1613451 - RNA, 19 nt, Homo sapiens
  misc_RNA (1)...(19): siRNA sense strand
aaacgacgaucauuaacaa

SEQ ID NO: 1613452 - RNA, 19 nt, Homo sapiens
  misc_RNA (1)...(19): siRNA sense strand
aaagaaggccaagcuauua

SEQ ID NO: 1613453 - RNA, 19 nt, Homo sapiens
  misc_RNA (1)...(19): siRNA sense strand
gaagaaggagguucauguu

SEQ ID NO: 1613454 - RNA, 19 nt, Homo sapiens
  misc_RNA (1)...(19): siRNA sense strand
uaaagaaggccaagcuauu

SEQ ID NO: 1613455 - RNA, 19 nt, Homo sapiens
  misc_RNA (1)...(19): siRNA sense strand
gaaggccaagcuauuauuu

SEQ ID NO: 1613456 - RNA, 19 nt, Homo sapiens
  misc_RNA (1)...(19): siRNA sense strand
aaagauaaacccuggcaua

SEQ ID NO: 1613457 - RNA, 19 nt, Homo sapiens
  misc_RNA (1)...(19): siRNA sense strand
gcaaaacgacgaucauuaa

SEQ ID NO: 1613458 - RNA, 19 nt, Homo sapiens
  misc_RNA (1)...(19): siRNA sense strand
gaaugguuguggccaaaga

SEQ ID NO: 1613459 - RNA, 19 nt, Homo sapiens
  misc_RNA (1)...(19): siRNA sense strand
aagaagaacucgauacucu

SEQ ID NO: 1613460 - RNA, 19 nt, Homo sapiens
  misc_RNA (1)...(19): siRNA sense strand
acaauaggauucagcauag

SEQ ID NO: 1613461 - RNA, 19 nt, Homo sapiens
  misc_RNA (1)...(19): siRNA sense strand
caaaauauccuuccaacaa

SEQ ID NO: 1613462 - RNA, 19 nt, Homo sapiens
  misc_RNA (1)...(19): siRNA sense strand
ucgauacucuucugaauca

SEQ ID NO: 1613463 - RNA, 19 nt, Homo sapiens
  misc_RNA (1)...(19): siRNA sense strand
ucauccaguuugucauuua

SEQ ID NO: 1613464 - RNA, 19 nt, Homo sapiens
  misc_RNA (1)...(19): siRNA sense strand
cagcauagagaaauucaaa

SEQ ID NO: 1613465 - RNA, 19 nt, Homo sapiens
  misc_RNA (1)...(19): siRNA sense strand
uagacuggcuucaagauca

SEQ ID NO: 1613466 - RNA, 19 nt, Homo sapiens
  misc_RNA (1)...(19): siRNA sense strand
gaaggagguucauguuuug

SEQ ID NO: 1613467 - RNA, 19 nt, Homo sapiens
  misc_RNA (1)...(19): siRNA sense strand
agugauagauuaagaaugg

SEQ ID NO: 1613468 - RNA, 19 nt, Homo sapiens
  misc_RNA (1)...(19): siRNA sense strand
gcauagagaaauucaaauc

SEQ ID NO: 1613469 - RNA, 19 nt, Homo sapiens
  misc_RNA (1)...(19): siRNA sense strand
gauauuaaacaccgucgaa

SEQ ID NO: 1613470 - RNA, 19 nt, Homo sapiens
  misc_RNA (1)...(19): siRNA sense strand
caugucaggucaaggaaga

SEQ ID NO: 1613471 - RNA, 19 nt, Homo sapiens
  misc_RNA (1)...(19): siRNA sense strand
ugucucaguugcuguguuu

SEQ ID NO: 1613472 - RNA, 19 nt, Homo sapiens
  misc_RNA (1)...(19): siRNA sense strand
ggucaaggaagauacagaa

SEQ ID NO: 1613473 - RNA, 19 nt, Homo sapiens
  misc_RNA (1)...(19): siRNA sense strand
ucugggaacacuauuauaa

SEQ ID NO: 1613474 - RNA, 19 nt, Homo sapiens
  misc_RNA (1)...(19): siRNA sense strand
gauucagcauagagaaauu

SEQ ID NO: 1613475 - RNA, 19 nt, Homo sapiens
  misc_RNA (1)...(19): siRNA sense strand
agaaggagguucauguuuu

SEQ ID NO: 1613476 - RNA, 19 nt, Homo sapiens
  misc_RNA (1)...(19): siRNA sense strand
gaacucgauacucuucuga

SEQ ID NO: 1613477 - RNA, 19 nt, Homo sapiens
  misc_RNA (1)...(19): siRNA sense strand
gguguagacuggcuucaag

SEQ ID NO: 1613478 - RNA, 19 nt, Homo sapiens
  misc_RNA (1)...(19): siRNA sense strand
aacaauaggauucagcaua

SEQ ID NO: 1613479 - RNA, 19 nt, Homo sapiens
  misc_RNA (1)...(19): siRNA sense strand
caaagaagaacucgauacu

SEQ ID NO: 1613480 - RNA, 19 nt, Homo sapiens
  misc_RNA (1)...(19): siRNA sense strand
gacgaucauuaacaaacuu

SEQ ID NO: 1613481 - RNA, 19 nt, Homo sapiens
  misc_RNA (1)...(19): siRNA sense strand
gauccagacugugaagaca

SEQ ID NO: 1613482 - RNA, 19 nt, Homo sapiens
  misc_RNA (1)...(19): siRNA sense strand
gggaacacuauuauaaaga

SEQ ID NO: 1613483 - RNA, 19 nt, Homo sapiens
  misc_RNA (1)...(19): siRNA sense strand
guuuagagaacaucaaaga

SEQ ID NO: 1613484 - RNA, 19 nt, Homo sapiens
  misc_RNA (1)...(19): siRNA sense strand
gccuugggcuagauaauag

SEQ ID NO: 1613485 - RNA, 19 nt, Homo sapiens
  misc_RNA (1)...(19): siRNA sense strand
gcuagauaauaguggcaaa

SEQ ID NO: 1613486 - RNA, 19 nt, Homo sapiens
  misc_RNA (1)...(19): siRNA sense strand
gcauauuugugcuagugau

SEQ ID NO: 1613487 - RNA, 19 nt, Homo sapiens
  misc_RNA (1)...(19): siRNA sense strand
ccgucgaauuccaaucuua

SEQ ID NO: 1613488 - RNA, 19 nt, Homo sapiens
  misc_RNA (1)...(19): siRNA sense strand
cgacgaucauuaacaaacu

SEQ ID NO: 1613489 - RNA, 19 nt, Homo sapiens
  misc_RNA (1)...(19): siRNA sense strand
ccaaucuuauucuuugcaa

SEQ ID NO: 1613490 - RNA, 19 nt, Homo sapiens
  misc_RNA (1)...(19): siRNA sense strand
ugggaacacuauuauaaag

SEQ ID NO: 1613491 - RNA, 19 nt, Homo sapiens
  misc_RNA (1)...(19): siRNA sense strand
caauaggauucagcauaga

SEQ ID NO: 1613492 - RNA, 19 nt, Homo sapiens
  misc_RNA (1)...(19): siRNA sense strand
ucaaggaagauacagaaau

SEQ ID NO: 1613493 - RNA, 19 nt, Homo sapiens
  misc_RNA (1)...(19): siRNA sense strand
ucaaaugcucaaucucaaa

SEQ ID NO: 1613494 - RNA, 19 nt, Homo sapiens
  misc_RNA (1)...(19): siRNA sense strand
ucuuagagaugcagugaca

SEQ ID NO: 1613495 - RNA, 19 nt, Homo sapiens
  misc_RNA (1)...(19): siRNA sense strand
uauuaaacaccgucgaauu

SEQ ID NO: 1613496 - RNA, 19 nt, Homo sapiens
  misc_RNA (1)...(19): siRNA sense strand
agaagaaggagguucaugu

SEQ ID NO: 1613497 - RNA, 19 nt, Homo sapiens
  misc_RNA (1)...(19): siRNA sense strand
ggauucagcauagagaaau

SEQ ID NO: 1613498 - RNA, 19 nt, Homo sapiens
  misc_RNA (1)...(19): siRNA sense strand
gguuguggccaaagaagaa

SEQ ID NO: 1613499 - RNA, 19 nt, Homo sapiens
  misc_RNA (1)...(19): siRNA sense strand
aagaaggagguucauguuu

SEQ ID NO: 1613500 - RNA, 19 nt, Homo sapiens
  misc_RNA (1)...(19): siRNA sense strand
agaaaucucugggaacacu

SEQ ID NO: 1613501 - RNA, 19 nt, Homo sapiens
  misc_RNA (1)...(19): siRNA sense strand
ggauugcuagacagacuuu

SEQ ID NO: 1613502 - RNA, 19 nt, Homo sapiens
  misc_RNA (1)...(19): siRNA sense strand
agauaaacccuggcauauu

SEQ ID NO: 1613503 - RNA, 19 nt, Homo sapiens
  misc_RNA (1)...(19): siRNA sense strand
caguugcuguguuuagaga

SEQ ID NO: 1613504 - RNA, 19 nt, Homo sapiens
  misc_RNA (1)...(19): siRNA sense strand
cugaaucauccagauauua

SEQ ID NO: 1613505 - RNA, 19 nt, Homo sapiens
  misc_RNA (1)...(19): siRNA sense strand
ggccaaagaagaacucgau

SEQ ID NO: 1613506 - RNA, 19 nt, Homo sapiens
  misc_RNA (1)...(19): siRNA sense strand
cuucaaaugcucaaucuca

SEQ ID NO: 1613507 - RNA, 19 nt, Homo sapiens
  misc_RNA (1)...(19): siRNA sense strand
aagaaugguuguggccaaa

SEQ ID NO: 1613508 - RNA, 19 nt, Homo sapiens
  misc_RNA (1)...(19): siRNA sense strand
ggcaaaacgacgaucauua

SEQ ID NO: 1613509 - RNA, 19 nt, Homo sapiens
  misc_RNA (1)...(19): siRNA sense strand
aagauaaacccuggcauau

SEQ ID NO: 1613510 - RNA, 19 nt, Homo sapiens
  misc_RNA (1)...(19): siRNA sense strand
uauaaagaaggccaagcua

SEQ ID NO: 1613511 - RNA, 19 nt, Homo sapiens
  misc_RNA (1)...(19): siRNA sense strand
aaucauccaguuugucauu

SEQ ID NO: 1613512 - RNA, 19 nt, Homo sapiens
  misc_RNA (1)...(19): siRNA sense strand
uggcauauuugugcuagug

SEQ ID NO: 1613513 - RNA, 19 nt, Homo sapiens
  misc_RNA (1)...(19): siRNA sense strand
ccaaagaagaacucgauac

SEQ ID NO: 1613514 - RNA, 19 nt, Homo sapiens
  misc_RNA (1)...(19): siRNA sense strand
gaaaucucugggaacacua

SEQ ID NO: 1613515 - RNA, 19 nt, Homo sapiens
  misc_RNA (1)...(19): siRNA sense strand
gcagugacaucuguaaaag

SEQ ID NO: 1613516 - RNA, 19 nt, Homo sapiens
  misc_RNA (1)...(19): siRNA sense strand
uaaacaccgucgaauucca

SEQ ID NO: 1613517 - RNA, 19 nt, Homo sapiens
  misc_RNA (1)...(19): siRNA sense strand
gccaaagaagaacucgaua

SEQ ID NO: 1613518 - RNA, 19 nt, Homo sapiens
  misc_RNA (1)...(19): siRNA sense strand
aaacaccgucgaauuccaa

SEQ ID NO: 1613519 - RNA, 19 nt, Homo sapiens
  misc_RNA (1)...(19): siRNA sense strand
uuacaguguuugacauguc

SEQ ID NO: 1613520 - RNA, 19 nt, Homo sapiens
  misc_RNA (1)...(19): siRNA sense strand
gagaacaucaaagauaaac

SEQ ID NO: 1613521 - RNA, 19 nt, Homo sapiens
  misc_RNA (1)...(19): siRNA sense strand
auuaaacaccgucgaauuc

SEQ ID NO: 1613522 - RNA, 19 nt, Homo sapiens
  misc_RNA (1)...(19): siRNA sense strand
acucgauacucuucugaau

SEQ ID NO: 1613523 - RNA, 19 nt, Homo sapiens
  misc_RNA (1)...(19): siRNA sense strand
agaaggccaagcuauuauu

SEQ ID NO: 1613524 - RNA, 19 nt, Homo sapiens
  misc_RNA (1)...(19): siRNA sense strand
auaaagaaggccaagcuau

SEQ ID NO: 1613525 - RNA, 19 nt, Homo sapiens
  misc_RNA (1)...(19): siRNA sense strand
cugggaacacuauuauaaa

SEQ ID NO: 1613526 - RNA, 19 nt, Homo sapiens
  misc_RNA (1)...(19): siRNA sense strand
gaagaagaaggagguucau

SEQ ID NO: 1613527 - RNA, 19 nt, Homo sapiens
  misc_RNA (1)...(19): siRNA sense strand
ugccuugggcuagauaaua

SEQ ID NO: 1613528 - RNA, 19 nt, Homo sapiens
  misc_RNA (1)...(19): siRNA sense strand
gugcuagugaugccauaaa

SEQ ID NO: 1613529 - RNA, 19 nt, Homo sapiens
  misc_RNA (1)...(19): siRNA sense strand
caaaugcucaaucucaaaa

SEQ ID NO: 1613530 - RNA, 19 nt, Homo sapiens
  misc_RNA (1)...(19): siRNA sense strand
cauccaguuugucauuuac

SEQ ID NO: 1613531 - RNA, 19 nt, Homo sapiens
  misc_RNA (1)...(19): siRNA sense strand
gauaauaguggcaaaacga

SEQ ID NO: 1613532 - RNA, 19 nt, Homo sapiens
  misc_RNA (1)...(19): siRNA sense strand
cgucgaauuccaaucuuau

SEQ ID NO: 1613533 - RNA, 19 nt, Homo sapiens
  misc_RNA (1)...(19): siRNA sense strand
gauacucuucugaaucauc

SEQ ID NO: 1613534 - RNA, 19 nt, Homo sapiens
  misc_RNA (1)...(19): siRNA sense strand
uucaaaugcucaaucucaa

SEQ ID NO: 1613535 - RNA, 19 nt, Homo sapiens
  misc_RNA (1)...(19): siRNA sense strand
aagaaggccaagcuauuau

SEQ ID NO: 1613536 - RNA, 19 nt, Homo sapiens
  misc_RNA (1)...(19): siRNA sense strand
uugcuuggccugaagaaga

SEQ ID NO: 1613537 - RNA, 19 nt, Homo sapiens
  misc_RNA (1)...(19): siRNA sense strand
gucauugauaguagugaua

SEQ ID NO: 1613538 - RNA, 19 nt, Homo sapiens
  misc_RNA (1)...(19): siRNA sense strand
uccagacugugaagacaug

SEQ ID NO: 1613539 - RNA, 19 nt, Homo sapiens
  misc_RNA (1)...(19): siRNA sense strand
guagacuggcuucaagauc

SEQ ID NO: 1613540 - RNA, 19 nt, Homo sapiens
  misc_RNA (1)...(19): siRNA sense strand
ugcuuggccugaagaagaa

SEQ ID NO: 1613541 - RNA, 19 nt, Homo sapiens
  misc_RNA (1)...(19): siRNA sense strand
cauuuacaguguuugacau

SEQ ID NO: 1613542 - RNA, 19 nt, Homo sapiens
  misc_RNA (1)...(19): siRNA sense strand
ucucugggaacacuauuau

SEQ ID NO: 1613543 - RNA, 19 nt, Homo sapiens
  misc_RNA (1)...(19): siRNA sense strand
gauaaacccuggcauauuu

SEQ ID NO: 1613544 - RNA, 19 nt, Homo sapiens
  misc_RNA (1)...(19): siRNA sense strand
ggagaaggcuugcaagaag

SEQ ID NO: 1613545 - RNA, 19 nt, Homo sapiens
  misc_RNA (1)...(19): siRNA sense strand
caaggaagauacagaaauc

SEQ ID NO: 1613546 - RNA, 19 nt, Homo sapiens
  misc_RNA (1)...(19): siRNA sense strand
aaacgacgaucauuaacaa

SEQ ID NO: 1613547 - RNA, 19 nt, Homo sapiens
  misc_RNA (1)...(19): siRNA sense strand
aaagaaggccaagcuauua

SEQ ID NO: 1613548 - RNA, 19 nt, Homo sapiens
  misc_RNA (1)...(19): siRNA sense strand
gaagaaggagguucauguu

SEQ ID NO: 1613549 - RNA, 19 nt, Homo sapiens
  misc_RNA (1)...(19): siRNA sense strand
uaaagaaggccaagcuauu

SEQ ID NO: 1613550 - RNA, 19 nt, Homo sapiens
  misc_RNA (1)...(19): siRNA sense strand
gaaggccaagcuauuauuu

SEQ ID NO: 1613551 - RNA, 19 nt, Homo sapiens
  misc_RNA (1)...(19): siRNA sense strand
aaagauaaacccuggcaua

SEQ ID NO: 1613552 - RNA, 19 nt, Homo sapiens
  misc_RNA (1)...(19): siRNA sense strand
gcaaaacgacgaucauuaa

SEQ ID NO: 1613553 - RNA, 19 nt, Homo sapiens
  misc_RNA (1)...(19): siRNA sense strand
gaaugguuguggccaaaga

SEQ ID NO: 1613554 - RNA, 19 nt, Homo sapiens
  misc_RNA (1)...(19): siRNA sense strand
aagaagaacucgauacucu

SEQ ID NO: 1613555 - RNA, 19 nt, Homo sapiens
  misc_RNA (1)...(19): siRNA sense strand
acaauaggauucagcauag

SEQ ID NO: 1613556 - RNA, 19 nt, Homo sapiens
  misc_RNA (1)...(19): siRNA sense strand
caaaauauccuuccaacaa

SEQ ID NO: 1613557 - RNA, 19 nt, Homo sapiens
  misc_RNA (1)...(19): siRNA sense strand
ucgauacucuucugaauca

SEQ ID NO: 1613558 - RNA, 19 nt, Homo sapiens
  misc_RNA (1)...(19): siRNA sense strand
ucauccaguuugucauuua

SEQ ID NO: 1613559 - RNA, 19 nt, Homo sapiens
  misc_RNA (1)...(19): siRNA sense strand
cagcauagagaaauucaaa

SEQ ID NO: 1613560 - RNA, 19 nt, Homo sapiens
  misc_RNA (1)...(19): siRNA sense strand
uagacuggcuucaagauca

SEQ ID NO: 1613561 - RNA, 19 nt, Homo sapiens
  misc_RNA (1)...(19): siRNA sense strand
gaaggagguucauguuuug

SEQ ID NO: 1613562 - RNA, 19 nt, Homo sapiens
  misc_RNA (1)...(19): siRNA sense strand
agugauagauuaagaaugg

SEQ ID NO: 1613563 - RNA, 19 nt, Homo sapiens
  misc_RNA (1)...(19): siRNA sense strand
gcauagagaaauucaaauc

SEQ ID NO: 1613564 - RNA, 19 nt, Homo sapiens
  misc_RNA (1)...(19): siRNA sense strand
gauauuaaacaccgucgaa

SEQ ID NO: 1613565 - RNA, 19 nt, Homo sapiens
  misc_RNA (1)...(19): siRNA sense strand
caugucaggucaaggaaga

SEQ ID NO: 1613566 - RNA, 19 nt, Homo sapiens
  misc_RNA (1)...(19): siRNA sense strand
ugucucaguugcuguguuu

SEQ ID NO: 1613567 - RNA, 19 nt, Homo sapiens
  misc_RNA (1)...(19): siRNA sense strand
ggucaaggaagauacagaa

SEQ ID NO: 1613568 - RNA, 19 nt, Homo sapiens
  misc_RNA (1)...(19): siRNA sense strand
ucugggaacacuauuauaa

SEQ ID NO: 1613569 - RNA, 19 nt, Homo sapiens
  misc_RNA (1)...(19): siRNA sense strand
gauucagcauagagaaauu

SEQ ID NO: 1613570 - RNA, 19 nt, Homo sapiens
  misc_RNA (1)...(19): siRNA sense strand
agaaggagguucauguuuu

SEQ ID NO: 1613571 - RNA, 19 nt, Homo sapiens
  misc_RNA (1)...(19): siRNA sense strand
gaacucgauacucuucuga

SEQ ID NO: 1613572 - RNA, 19 nt, Homo sapiens
  misc_RNA (1)...(19): siRNA sense strand
gguguagacuggcuucaag

SEQ ID NO: 1613573 - RNA, 19 nt, Homo sapiens
  misc_RNA (1)...(19): siRNA sense strand
aacaauaggauucagcaua

SEQ ID NO: 1613574 - RNA, 19 nt, Homo sapiens
  misc_RNA (1)...(19): siRNA sense strand
caaagaagaacucgauacu

SEQ ID NO: 1613575 - RNA, 19 nt, Homo sapiens
  misc_RNA (1)...(19): siRNA sense strand
gacgaucauuaacaaacuu

SEQ ID NO: 1613576 - RNA, 19 nt, Homo sapiens
  misc_RNA (1)...(19): siRNA sense strand
gauccagacugugaagaca

SEQ ID NO: 1613577 - RNA, 19 nt, Homo sapiens
  misc_RNA (1)...(19): siRNA sense strand
gggaacacuauuauaaaga

SEQ ID NO: 1613578 - RNA, 19 nt, Homo sapiens
  misc_RNA (1)...(19): siRNA sense strand
guuuagagaacaucaaaga

SEQ ID NO: 1613579 - RNA, 19 nt, Homo sapiens
  misc_RNA (1)...(19): siRNA sense strand
gccuugggcuagauaauag

SEQ ID NO: 1613580 - RNA, 19 nt, Homo sapiens
  misc_RNA (1)...(19): siRNA sense strand
gcuagauaauaguggcaaa

SEQ ID NO: 1613581 - RNA, 19 nt, Homo sapiens
  misc_RNA (1)...(19): siRNA sense strand
gcauauuugugcuagugau

SEQ ID NO: 1613582 - RNA, 19 nt, Homo sapiens
  misc_RNA (1)...(19): siRNA sense strand
ccgucgaauuccaaucuua

SEQ ID NO: 1613583 - RNA, 19 nt, Homo sapiens
  misc_RNA (1)...(19): siRNA sense strand
cgacgaucauuaacaaacu

SEQ ID NO: 1613584 - RNA, 19 nt, Homo sapiens
  misc_RNA (1)...(19): siRNA sense strand
ccaaucuuauucuuugcaa

SEQ ID NO: 1613585 - RNA, 19 nt, Homo sapiens
  misc_RNA (1)...(19): siRNA sense strand
ugggaacacuauuauaaag

SEQ ID NO: 1613586 - RNA, 19 nt, Homo sapiens
  misc_RNA (1)...(19): siRNA sense strand
caauaggauucagcauaga

SEQ ID NO: 1613587 - RNA, 19 nt, Homo sapiens
  misc_RNA (1)...(19): siRNA sense strand
ucaaggaagauacagaaau

SEQ ID NO: 1613588 - RNA, 19 nt, Homo sapiens
  misc_RNA (1)...(19): siRNA sense strand
ucaaaugcucaaucucaaa

SEQ ID NO: 1613589 - RNA, 19 nt, Homo sapiens
  misc_RNA (1)...(19): siRNA sense strand
ucuuagagaugcagugaca

SEQ ID NO: 1613590 - RNA, 19 nt, Homo sapiens
  misc_RNA (1)...(19): siRNA sense strand
uauuaaacaccgucgaauu

SEQ ID NO: 1613591 - RNA, 19 nt, Homo sapiens
  misc_RNA (1)...(19): siRNA sense strand
agaagaaggagguucaugu

SEQ ID NO: 1613592 - RNA, 19 nt, Homo sapiens
  misc_RNA (1)...(19): siRNA sense strand
ggauucagcauagagaaau

SEQ ID NO: 1613593 - RNA, 19 nt, Homo sapiens
  misc_RNA (1)...(19): siRNA sense strand
gguuguggccaaagaagaa

SEQ ID NO: 1613594 - RNA, 19 nt, Homo sapiens
  misc_RNA (1)...(19): siRNA sense strand
aagaaggagguucauguuu

SEQ ID NO: 1613595 - RNA, 19 nt, Homo sapiens
  misc_RNA (1)...(19): siRNA sense strand
agaaaucucugggaacacu

SEQ ID NO: 1613596 - RNA, 19 nt, Homo sapiens
  misc_RNA (1)...(19): siRNA sense strand
ggauugcuagacagacuuu

SEQ ID NO: 1613597 - RNA, 19 nt, Homo sapiens
  misc_RNA (1)...(19): siRNA sense strand
agauaaacccuggcauauu

SEQ ID NO: 1613598 - RNA, 19 nt, Homo sapiens
  misc_RNA (1)...(19): siRNA sense strand
caguugcuguguuuagaga

SEQ ID NO: 1613599 - RNA, 19 nt, Homo sapiens
  misc_RNA (1)...(19): siRNA sense strand
cugaaucauccagauauua

SEQ ID NO: 1613600 - RNA, 19 nt, Homo sapiens
  misc_RNA (1)...(19): siRNA sense strand
ggccaaagaagaacucgau

SEQ ID NO: 1613601 - RNA, 19 nt, Homo sapiens
  misc_RNA (1)...(19): siRNA sense strand
cuucaaaugcucaaucuca

SEQ ID NO: 1613602 - RNA, 19 nt, Homo sapiens
  misc_RNA (1)...(19): siRNA sense strand
aagaaugguuguggccaaa

SEQ ID NO: 1613603 - RNA, 19 nt, Homo sapiens
  misc_RNA (1)...(19): siRNA sense strand
ggcaaaacgacgaucauua

SEQ ID NO: 1613604 - RNA, 19 nt, Homo sapiens
  misc_RNA (1)...(19): siRNA sense strand
aagauaaacccuggcauau

SEQ ID NO: 1613605 - RNA, 19 nt, Homo sapiens
  misc_RNA (1)...(19): siRNA sense strand
uauaaagaaggccaagcua

SEQ ID NO: 1613606 - RNA, 19 nt, Homo sapiens
  misc_RNA (1)...(19): siRNA sense strand
aaucauccaguuugucauu

SEQ ID NO: 1613607 - RNA, 19 nt, Homo sapiens
  misc_RNA (1)...(19): siRNA sense strand
uggcauauuugugcuagug

SEQ ID NO: 1613608 - RNA, 19 nt, Homo sapiens
  misc_RNA (1)...(19): siRNA sense strand
ccaaagaagaacucgauac

SEQ ID NO: 1613609 - RNA, 19 nt, Homo sapiens
  misc_RNA (1)...(19): siRNA sense strand
gaaaucucugggaacacua

SEQ ID NO: 1613610 - RNA, 19 nt, Homo sapiens
  misc_RNA (1)...(19): siRNA sense strand
gcagugacaucuguaaaag

SEQ ID NO: 1613611 - RNA, 19 nt, Homo sapiens
  misc_RNA (1)...(19): siRNA sense strand
uaaacaccgucgaauucca

SEQ ID NO: 1613612 - RNA, 19 nt, Homo sapiens
  misc_RNA (1)...(19): siRNA sense strand
gccaaagaagaacucgaua

SEQ ID NO: 1613613 - RNA, 19 nt, Homo sapiens
  misc_RNA (1)...(19): siRNA sense strand
aaacaccgucgaauuccaa

SEQ ID NO: 1613614 - RNA, 19 nt, Homo sapiens
  misc_RNA (1)...(19): siRNA sense strand
uuacaguguuugacauguc

SEQ ID NO: 1613615 - RNA, 19 nt, Homo sapiens
  misc_RNA (1)...(19): siRNA sense strand
gagaacaucaaagauaaac

SEQ ID NO: 1613616 - RNA, 19 nt, Homo sapiens
  misc_RNA (1)...(19): siRNA sense strand
auuaaacaccgucgaauuc

SEQ ID NO: 1613617 - RNA, 19 nt, Homo sapiens
  misc_RNA (1)...(19): siRNA sense strand
acucgauacucuucugaau

SEQ ID NO: 1613618 - RNA, 19 nt, Homo sapiens
  misc_RNA (1)...(19): siRNA sense strand
agaaggccaagcuauuauu

SEQ ID NO: 1613619 - RNA, 19 nt, Homo sapiens
  misc_RNA (1)...(19): siRNA sense strand
auaaagaaggccaagcuau

SEQ ID NO: 1613620 - RNA, 19 nt, Homo sapiens
  misc_RNA (1)...(19): siRNA sense strand
cugggaacacuauuauaaa

SEQ ID NO: 1613621 - RNA, 19 nt, Homo sapiens
  misc_RNA (1)...(19): siRNA sense strand
gaagaagaaggagguucau

SEQ ID NO: 1613622 - RNA, 19 nt, Homo sapiens
  misc_RNA (1)...(19): siRNA sense strand
ugccuugggcuagauaaua

SEQ ID NO: 1613623 - RNA, 19 nt, Homo sapiens
  misc_RNA (1)...(19): siRNA sense strand
gugcuagugaugccauaaa

SEQ ID NO: 1613624 - RNA, 19 nt, Homo sapiens
  misc_RNA (1)...(19): siRNA sense strand
caaaugcucaaucucaaaa

SEQ ID NO: 1613625 - RNA, 19 nt, Homo sapiens
  misc_RNA (1)...(19): siRNA sense strand
cauccaguuugucauuuac

SEQ ID NO: 1613626 - RNA, 19 nt, Homo sapiens
  misc_RNA (1)...(19): siRNA sense strand
gauaauaguggcaaaacga

SEQ ID NO: 1613627 - RNA, 19 nt, Homo sapiens
  misc_RNA (1)...(19): siRNA sense strand
cgucgaauuccaaucuuau

SEQ ID NO: 1613628 - RNA, 19 nt, Homo sapiens
  misc_RNA (1)...(19): siRNA sense strand
gauacucuucugaaucauc

SEQ ID NO: 1613629 - RNA, 19 nt, Homo sapiens
  misc_RNA (1)...(19): siRNA sense strand
uucaaaugcucaaucucaa

SEQ ID NO: 1613630 - RNA, 19 nt, Homo sapiens
  misc_RNA (1)...(19): siRNA sense strand
aagaaggccaagcuauuau

SEQ ID NO: 1613631 - RNA, 19 nt, Homo sapiens
  misc_RNA (1)...(19): siRNA sense strand
uugcuuggccugaagaaga

SEQ ID NO: 1613632 - RNA, 19 nt, Homo sapiens
  misc_RNA (1)...(19): siRNA sense strand
gucauugauaguagugaua

SEQ ID NO: 1613633 - RNA, 19 nt, Homo sapiens
  misc_RNA (1)...(19): siRNA sense strand
uccagacugugaagacaug

SEQ ID NO: 1613634 - RNA, 19 nt, Homo sapiens
  misc_RNA (1)...(19): siRNA sense strand
guagacuggcuucaagauc

SEQ ID NO: 1613635 - RNA, 19 nt, Homo sapiens
  misc_RNA (1)...(19): siRNA sense strand
ugcuuggccugaagaagaa

SEQ ID NO: 1613636 - RNA, 19 nt, Homo sapiens
  misc_RNA (1)...(19): siRNA sense strand
cauuuacaguguuugacau

SEQ ID NO: 1613637 - RNA, 19 nt, Homo sapiens
  misc_RNA (1)...(19): siRNA sense strand
ucucugggaacacuauuau

SEQ ID NO: 1613638 - RNA, 19 nt, Homo sapiens
  misc_RNA (1)...(19): siRNA sense strand
ggagaggaauuaugagaug

SEQ ID NO: 1613639 - RNA, 19 nt, Homo sapiens
  misc_RNA (1)...(19): siRNA sense strand
ggaagaugcuccagaaagg

SEQ ID NO: 1613640 - RNA, 19 nt, Homo sapiens
  misc_RNA (1)...(19): siRNA sense strand
ucucagacccuguguauuu

SEQ ID NO: 1613641 - RNA, 19 nt, Homo sapiens
  misc_RNA (1)...(19): siRNA sense strand
uaaggaggaugaucucaga

SEQ ID NO: 1613642 - RNA, 19 nt, Homo sapiens
  misc_RNA (1)...(19): siRNA sense strand
aggcagagcuggugucaga

SEQ ID NO: 1613643 - RNA, 19 nt, Homo sapiens
  misc_RNA (1)...(19): siRNA sense strand
gagcucagaacgucucuaa

SEQ ID NO: 1613644 - RNA, 19 nt, Homo sapiens
  misc_RNA (1)...(19): siRNA sense strand
gaacgucucuaaggaggau

SEQ ID NO: 1613645 - RNA, 19 nt, Homo sapiens
  misc_RNA (1)...(19): siRNA sense strand
gaucucagacccuguguau

SEQ ID NO: 1613646 - RNA, 19 nt, Homo sapiens
  misc_RNA (1)...(19): siRNA sense strand
ggaugaggaugaagaagag

SEQ ID NO: 1613647 - RNA, 19 nt, Homo sapiens
  misc_RNA (1)...(19): siRNA sense strand
ggaacaggaagaagaagaa

SEQ ID NO: 1613648 - RNA, 19 nt, Homo sapiens
  misc_RNA (1)...(19): siRNA sense strand
ggaugguccugcagagaga

SEQ ID NO: 1613649 - RNA, 19 nt, Homo sapiens
  misc_RNA (1)...(19): siRNA sense strand
gaaggugccggcugaggaa

SEQ ID NO: 1613650 - RNA, 19 nt, Homo sapiens
  misc_RNA (1)...(19): siRNA sense strand
ggagaaucaucagcugaga

SEQ ID NO: 1613651 - RNA, 19 nt, Homo sapiens
  misc_RNA (1)...(19): siRNA sense strand
ggucuaugcccgacaauuc

SEQ ID NO: 1613652 - RNA, 19 nt, Homo sapiens
  misc_RNA (1)...(19): siRNA sense strand
ggacacauccagccuaagg

SEQ ID NO: 1613653 - RNA, 19 nt, Homo sapiens
  misc_RNA (1)...(19): siRNA sense strand
ccaggaagacgucaaagug

SEQ ID NO: 1613654 - RNA, 19 nt, Homo sapiens
  misc_RNA (1)...(19): siRNA sense strand
gggagagcguuaccuaugg

SEQ ID NO: 1613655 - RNA, 19 nt, Homo sapiens
  misc_RNA (1)...(19): siRNA sense strand
agaugcagcuccaggaaga

SEQ ID NO: 1613656 - RNA, 19 nt, Homo sapiens
  misc_RNA (1)...(19): siRNA sense strand
ggaagacgucaaagugaug

SEQ ID NO: 1613657 - RNA, 19 nt, Homo sapiens
  misc_RNA (1)...(19): siRNA sense strand
gcucagaacgucucuaagg

SEQ ID NO: 1613658 - RNA, 19 nt, Homo sapiens
  misc_RNA (1)...(19): siRNA sense strand
ggagaaggaaauccagaug

SEQ ID NO: 1613659 - RNA, 19 nt, Homo sapiens
  misc_RNA (1)...(19): siRNA sense strand
agaaggaaauccagaugca

SEQ ID NO: 1613660 - RNA, 19 nt, Homo sapiens
  misc_RNA (1)...(19): siRNA sense strand
ggaggaugaggaugaagaa

SEQ ID NO: 1613661 - RNA, 19 nt, Homo sapiens
  misc_RNA (1)...(19): siRNA sense strand
ucgacacucuugaggauga

SEQ ID NO: 1613662 - RNA, 19 nt, Homo sapiens
  misc_RNA (1)...(19): siRNA sense strand
ccaaggaggagauuuuaua

SEQ ID NO: 1613663 - RNA, 19 nt, Homo sapiens
  misc_RNA (1)...(19): siRNA sense strand
caggaagacgucaaaguga

SEQ ID NO: 1613664 - RNA, 19 nt, Homo sapiens
  misc_RNA (1)...(19): siRNA sense strand
agaagaagaagcagaggaa

SEQ ID NO: 1613665 - RNA, 19 nt, Homo sapiens
  misc_RNA (1)...(19): siRNA sense strand
gcagcgggcaucuggaaga

SEQ ID NO: 1613666 - RNA, 19 nt, Homo sapiens
  misc_RNA (1)...(19): siRNA sense strand
cauccagccuaagguauga

SEQ ID NO: 1613667 - RNA, 19 nt, Homo sapiens
  misc_RNA (1)...(19): siRNA sense strand
ugaggaggaugaggaugaa

SEQ ID NO: 1613668 - RNA, 19 nt, Homo sapiens
  misc_RNA (1)...(19): siRNA sense strand
cagaagaggaacaggaaga

SEQ ID NO: 1613669 - RNA, 19 nt, Homo sapiens
  misc_RNA (1)...(19): siRNA sense strand
aaaggaggcagaagaggaa

SEQ ID NO: 1613670 - RNA, 19 nt, Homo sapiens
  misc_RNA (1)...(19): siRNA sense strand
gagcuucucccaccugucu

SEQ ID NO: 1613671 - RNA, 19 nt, Homo sapiens
  misc_RNA (1)...(19): siRNA sense strand
gaugaggcaacgcggauga

SEQ ID NO: 1613672 - RNA, 19 nt, Homo sapiens
  misc_RNA (1)...(19): siRNA sense strand
acacauccagccuaaggua

SEQ ID NO: 1613673 - RNA, 19 nt, Homo sapiens
  misc_RNA (1)...(19): siRNA sense strand
uuauggagaggaauuauga

SEQ ID NO: 1613674 - RNA, 19 nt, Homo sapiens
  misc_RNA (1)...(19): siRNA sense strand
gaagaggaggaggaagaaa

SEQ ID NO: 1613675 - RNA, 19 nt, Homo sapiens
  misc_RNA (1)...(19): siRNA sense strand
ccucucaacucgacacucu

SEQ ID NO: 1613676 - RNA, 19 nt, Homo sapiens
  misc_RNA (1)...(19): siRNA sense strand
aagaagaggaggaggaaga

SEQ ID NO: 1613677 - RNA, 19 nt, Homo sapiens
  misc_RNA (1)...(19): siRNA sense strand
gaggaacagaugcucauuc

SEQ ID NO: 1613678 - RNA, 19 nt, Homo sapiens
  misc_RNA (1)...(19): siRNA sense strand
ggcagaagaggaacaggaa

SEQ ID NO: 1613679 - RNA, 19 nt, Homo sapiens
  misc_RNA (1)...(19): siRNA sense strand
acgucaaagugauguuaua

SEQ ID NO: 1613680 - RNA, 19 nt, Homo sapiens
  misc_RNA (1)...(19): siRNA sense strand
aggaacagaugcucauucu

SEQ ID NO: 1613681 - RNA, 19 nt, Homo sapiens
  misc_RNA (1)...(19): siRNA sense strand
cuccagcucuacucagauu

SEQ ID NO: 1613682 - RNA, 19 nt, Homo sapiens
  misc_RNA (1)...(19): siRNA sense strand
gaagcacuguguccuaacc

SEQ ID NO: 1613683 - RNA, 19 nt, Homo sapiens
  misc_RNA (1)...(19): siRNA sense strand
agacgucaaagugauguua

SEQ ID NO: 1613684 - RNA, 19 nt, Homo sapiens
  misc_RNA (1)...(19): siRNA sense strand
aagaggaacaggaagaaga

SEQ ID NO: 1613685 - RNA, 19 nt, Homo sapiens
  misc_RNA (1)...(19): siRNA sense strand
ggagacucuuccugguuuc

SEQ ID NO: 1613686 - RNA, 19 nt, Homo sapiens
  misc_RNA (1)...(19): siRNA sense strand
agaaucaucagcugagaga

SEQ ID NO: 1613687 - RNA, 19 nt, Homo sapiens
  misc_RNA (1)...(19): siRNA sense strand
aggaagacgucaaagugau

SEQ ID NO: 1613688 - RNA, 19 nt, Homo sapiens
  misc_RNA (1)...(19): siRNA sense strand
gggcugagacugaaaaguu

SEQ ID NO: 1613689 - RNA, 19 nt, Homo sapiens
  misc_RNA (1)...(19): siRNA sense strand
gaacaggaagaagaagaag

SEQ ID NO: 1613690 - RNA, 19 nt, Homo sapiens
  misc_RNA (1)...(19): siRNA sense strand
ugaagaagaggaggaggaa

SEQ ID NO: 1613691 - RNA, 19 nt, Homo sapiens
  misc_RNA (1)...(19): siRNA sense strand
cggacaagcugcagaucgu

SEQ ID NO: 1613692 - RNA, 19 nt, Homo sapiens
  misc_RNA (1)...(19): siRNA sense strand
cucagaacgucucuaagga

SEQ ID NO: 1613693 - RNA, 19 nt, Homo sapiens
  misc_RNA (1)...(19): siRNA sense strand
uggaguguguggagcaguu

SEQ ID NO: 1613694 - RNA, 19 nt, Homo sapiens
  misc_RNA (1)...(19): siRNA sense strand
gaagacgucaaagugaugu

SEQ ID NO: 1613695 - RNA, 19 nt, Homo sapiens
  misc_RNA (1)...(19): siRNA sense strand
uggaagccuugcaggagaa

SEQ ID NO: 1613696 - RNA, 19 nt, Homo sapiens
  misc_RNA (1)...(19): siRNA sense strand
agaggaacaggaagaagaa

SEQ ID NO: 1613697 - RNA, 19 nt, Homo sapiens
  misc_RNA (1)...(19): siRNA sense strand
gaagaugcuccagaaaggu

SEQ ID NO: 1613698 - RNA, 19 nt, Homo sapiens
  misc_RNA (1)...(19): siRNA sense strand
agagagagagggaccugaa

SEQ ID NO: 1613699 - RNA, 19 nt, Homo sapiens
  misc_RNA (1)...(19): siRNA sense strand
acucgacacucuugaggau

SEQ ID NO: 1613700 - RNA, 19 nt, Homo sapiens
  misc_RNA (1)...(19): siRNA sense strand
aagaagaagcagaggaaga

SEQ ID NO: 1613701 - RNA, 19 nt, Homo sapiens
  misc_RNA (1)...(19): siRNA sense strand
gaagaggaacaggaagaag

SEQ ID NO: 1613702 - RNA, 19 nt, Homo sapiens
  misc_RNA (1)...(19): siRNA sense strand
ggaggccagccaacagaug

SEQ ID NO: 1613703 - RNA, 19 nt, Homo sapiens
  misc_RNA (1)...(19): siRNA sense strand
ggggacacauccagccuaa

SEQ ID NO: 1613704 - RNA, 19 nt, Homo sapiens
  misc_RNA (1)...(19): siRNA sense strand
ugggagagcguuaccuaug

SEQ ID NO: 1613705 - RNA, 19 nt, Homo sapiens
  misc_RNA (1)...(19): siRNA sense strand
ccagaugcagcuccaggaa

SEQ ID NO: 1613706 - RNA, 19 nt, Homo sapiens
  misc_RNA (1)...(19): siRNA sense strand
gaccugcagugugcucauc

SEQ ID NO: 1613707 - RNA, 19 nt, Homo sapiens
  misc_RNA (1)...(19): siRNA sense strand
ugauuucgcaggaggcauu

SEQ ID NO: 1613708 - RNA, 19 nt, Homo sapiens
  misc_RNA (1)...(19): siRNA sense strand
cgucaaagugauguuauau

SEQ ID NO: 1613709 - RNA, 19 nt, Homo sapiens
  misc_RNA (1)...(19): siRNA sense strand
gaaaggcagcgggcaucug

SEQ ID NO: 1613710 - RNA, 19 nt, Homo sapiens
  misc_RNA (1)...(19): siRNA sense strand
acaggaagaagaagaagca

SEQ ID NO: 1613711 - RNA, 19 nt, Homo sapiens
  misc_RNA (1)...(19): siRNA sense strand
caccuggacaugaauuaug

SEQ ID NO: 1613712 - RNA, 19 nt, Homo sapiens
  misc_RNA (1)...(19): siRNA sense strand
uggaggaggagaaucauca

SEQ ID NO: 1613713 - RNA, 19 nt, Homo sapiens
  misc_RNA (1)...(19): siRNA sense strand
aggaugaggaugaagaaga

SEQ ID NO: 1613714 - RNA, 19 nt, Homo sapiens
  misc_RNA (1)...(19): siRNA sense strand
ggaguguguggagcaguuu

SEQ ID NO: 1613715 - RNA, 19 nt, Homo sapiens
  misc_RNA (1)...(19): siRNA sense strand
ucucaacucgacacucuug

SEQ ID NO: 1613716 - RNA, 19 nt, Homo sapiens
  misc_RNA (1)...(19): siRNA sense strand
agaagaggaacaggaagaa

SEQ ID NO: 1613717 - RNA, 19 nt, Homo sapiens
  misc_RNA (1)...(19): siRNA sense strand
ggagaggaauuaugagaug

SEQ ID NO: 1613718 - RNA, 19 nt, Homo sapiens
  misc_RNA (1)...(19): siRNA sense strand
ggaagaugcuccagaaagg

SEQ ID NO: 1613719 - RNA, 19 nt, Homo sapiens
  misc_RNA (1)...(19): siRNA sense strand
ucucagacccuguguauuu

SEQ ID NO: 1613720 - RNA, 19 nt, Homo sapiens
  misc_RNA (1)...(19): siRNA sense strand
uaaggaggaugaucucaga

SEQ ID NO: 1613721 - RNA, 19 nt, Homo sapiens
  misc_RNA (1)...(19): siRNA sense strand
aggcagagcuggugucaga

SEQ ID NO: 1613722 - RNA, 19 nt, Homo sapiens
  misc_RNA (1)...(19): siRNA sense strand
gagcucagaacgucucuaa

SEQ ID NO: 1613723 - RNA, 19 nt, Homo sapiens
  misc_RNA (1)...(19): siRNA sense strand
gaacgucucuaaggaggau

SEQ ID NO: 1613724 - RNA, 19 nt, Homo sapiens
  misc_RNA (1)...(19): siRNA sense strand
gaucucagacccuguguau

SEQ ID NO: 1613725 - RNA, 19 nt, Homo sapiens
  misc_RNA (1)...(19): siRNA sense strand
ggaugaggaugaagaagag

SEQ ID NO: 1613726 - RNA, 19 nt, Homo sapiens
  misc_RNA (1)...(19): siRNA sense strand
ggaacaggaagaagaagaa

SEQ ID NO: 1613727 - RNA, 19 nt, Homo sapiens
  misc_RNA (1)...(19): siRNA sense strand
ggaugguccugcagagaga

SEQ ID NO: 1613728 - RNA, 19 nt, Homo sapiens
  misc_RNA (1)...(19): siRNA sense strand
gaaggugccggcugaggaa

SEQ ID NO: 1613729 - RNA, 19 nt, Homo sapiens
  misc_RNA (1)...(19): siRNA sense strand
ggagaaucaucagcugaga

SEQ ID NO: 1613730 - RNA, 19 nt, Homo sapiens
  misc_RNA (1)...(19): siRNA sense strand
ggucuaugcccgacaauuc

SEQ ID NO: 1613731 - RNA, 19 nt, Homo sapiens
  misc_RNA (1)...(19): siRNA sense strand
ggacacauccagccuaagg

SEQ ID NO: 1613732 - RNA, 19 nt, Homo sapiens
  misc_RNA (1)...(19): siRNA sense strand
ccaggaagacgucaaagug

SEQ ID NO: 1613733 - RNA, 19 nt, Homo sapiens
  misc_RNA (1)...(19): siRNA sense strand
gggagagcguuaccuaugg

SEQ ID NO: 1613734 - RNA, 19 nt, Homo sapiens
  misc_RNA (1)...(19): siRNA sense strand
agaugcagcuccaggaaga

SEQ ID NO: 1613735 - RNA, 19 nt, Homo sapiens
  misc_RNA (1)...(19): siRNA sense strand
ggaagacgucaaagugaug

SEQ ID NO: 1613736 - RNA, 19 nt, Homo sapiens
  misc_RNA (1)...(19): siRNA sense strand
gcucagaacgucucuaagg

SEQ ID NO: 1613737 - RNA, 19 nt, Homo sapiens
  misc_RNA (1)...(19): siRNA sense strand
ggagaaggaaauccagaug

SEQ ID NO: 1613738 - RNA, 19 nt, Homo sapiens
  misc_RNA (1)...(19): siRNA sense strand
agaaggaaauccagaugca

SEQ ID NO: 1613739 - RNA, 19 nt, Homo sapiens
  misc_RNA (1)...(19): siRNA sense strand
ggaggaugaggaugaagaa

SEQ ID NO: 1613740 - RNA, 19 nt, Homo sapiens
  misc_RNA (1)...(19): siRNA sense strand
ucgacacucuugaggauga

SEQ ID NO: 1613741 - RNA, 19 nt, Homo sapiens
  misc_RNA (1)...(19): siRNA sense strand
ccaaggaggagauuuuaua

SEQ ID NO: 1613742 - RNA, 19 nt, Homo sapiens
  misc_RNA (1)...(19): siRNA sense strand
caggaagacgucaaaguga

SEQ ID NO: 1613743 - RNA, 19 nt, Homo sapiens
  misc_RNA (1)...(19): siRNA sense strand
agaagaagaagcagaggaa

SEQ ID NO: 1613744 - RNA, 19 nt, Homo sapiens
  misc_RNA (1)...(19): siRNA sense strand
gcagcgggcaucuggaaga

SEQ ID NO: 1613745 - RNA, 19 nt, Homo sapiens
  misc_RNA (1)...(19): siRNA sense strand
cauccagccuaagguauga

SEQ ID NO: 1613746 - RNA, 19 nt, Homo sapiens
  misc_RNA (1)...(19): siRNA sense strand
ugaggaggaugaggaugaa

SEQ ID NO: 1613747 - RNA, 19 nt, Homo sapiens
  misc_RNA (1)...(19): siRNA sense strand
cagaagaggaacaggaaga

SEQ ID NO: 1613748 - RNA, 19 nt, Homo sapiens
  misc_RNA (1)...(19): siRNA sense strand
aaaggaggcagaagaggaa

SEQ ID NO: 1613749 - RNA, 19 nt, Homo sapiens
  misc_RNA (1)...(19): siRNA sense strand
gagcuucucccaccugucu

SEQ ID NO: 1613750 - RNA, 19 nt, Homo sapiens
  misc_RNA (1)...(19): siRNA sense strand
gaugaggcaacgcggauga

SEQ ID NO: 1613751 - RNA, 19 nt, Homo sapiens
  misc_RNA (1)...(19): siRNA sense strand
acacauccagccuaaggua

SEQ ID NO: 1613752 - RNA, 19 nt, Homo sapiens
  misc_RNA (1)...(19): siRNA sense strand
uuauggagaggaauuauga

SEQ ID NO: 1613753 - RNA, 19 nt, Homo sapiens
  misc_RNA (1)...(19): siRNA sense strand
gaagaggaggaggaagaaa

SEQ ID NO: 1613754 - RNA, 19 nt, Homo sapiens
  misc_RNA (1)...(19): siRNA sense strand
ccucucaacucgacacucu

SEQ ID NO: 1613755 - RNA, 19 nt, Homo sapiens
  misc_RNA (1)...(19): siRNA sense strand
aagaagaggaggaggaaga

SEQ ID NO: 1613756 - RNA, 19 nt, Homo sapiens
  misc_RNA (1)...(19): siRNA sense strand
gaggaacagaugcucauuc

SEQ ID NO: 1613757 - RNA, 19 nt, Homo sapiens
  misc_RNA (1)...(19): siRNA sense strand
ggcagaagaggaacaggaa

SEQ ID NO: 1613758 - RNA, 19 nt, Homo sapiens
  misc_RNA (1)...(19): siRNA sense strand
acgucaaagugauguuaua

SEQ ID NO: 1613759 - RNA, 19 nt, Homo sapiens
  misc_RNA (1)...(19): siRNA sense strand
aggaacagaugcucauucu

SEQ ID NO: 1613760 - RNA, 19 nt, Homo sapiens
  misc_RNA (1)...(19): siRNA sense strand
cuccagcucuacucagauu

SEQ ID NO: 1613761 - RNA, 19 nt, Homo sapiens
  misc_RNA (1)...(19): siRNA sense strand
gaagcacuguguccuaacc

SEQ ID NO: 1613762 - RNA, 19 nt, Homo sapiens
  misc_RNA (1)...(19): siRNA sense strand
agacgucaaagugauguua

SEQ ID NO: 1613763 - RNA, 19 nt, Homo sapiens
  misc_RNA (1)...(19): siRNA sense strand
aagaggaacaggaagaaga

SEQ ID NO: 1613764 - RNA, 19 nt, Homo sapiens
  misc_RNA (1)...(19): siRNA sense strand
ggagacucuuccugguuuc

SEQ ID NO: 1613765 - RNA, 19 nt, Homo sapiens
  misc_RNA (1)...(19): siRNA sense strand
agaaucaucagcugagaga

SEQ ID NO: 1613766 - RNA, 19 nt, Homo sapiens
  misc_RNA (1)...(19): siRNA sense strand
aggaagacgucaaagugau

SEQ ID NO: 1613767 - RNA, 19 nt, Homo sapiens
  misc_RNA (1)...(19): siRNA sense strand
gggcugagacugaaaaguu

SEQ ID NO: 1613768 - RNA, 19 nt, Homo sapiens
  misc_RNA (1)...(19): siRNA sense strand
gaacaggaagaagaagaag

SEQ ID NO: 1613769 - RNA, 19 nt, Homo sapiens
  misc_RNA (1)...(19): siRNA sense strand
ugaagaagaggaggaggaa

SEQ ID NO: 1613770 - RNA, 19 nt, Homo sapiens
  misc_RNA (1)...(19): siRNA sense strand
cggacaagcugcagaucgu

SEQ ID NO: 1613771 - RNA, 19 nt, Homo sapiens
  misc_RNA (1)...(19): siRNA sense strand
cucagaacgucucuaagga

SEQ ID NO: 1613772 - RNA, 19 nt, Homo sapiens
  misc_RNA (1)...(19): siRNA sense strand
uggaguguguggagcaguu

SEQ ID NO: 1613773 - RNA, 19 nt, Homo sapiens
  misc_RNA (1)...(19): siRNA sense strand
gaagacgucaaagugaugu

SEQ ID NO: 1613774 - RNA, 19 nt, Homo sapiens
  misc_RNA (1)...(19): siRNA sense strand
uggaagccuugcaggagaa

SEQ ID NO: 1613775 - RNA, 19 nt, Homo sapiens
  misc_RNA (1)...(19): siRNA sense strand
agaggaacaggaagaagaa

SEQ ID NO: 1613776 - RNA, 19 nt, Homo sapiens
  misc_RNA (1)...(19): siRNA sense strand
gaagaugcuccagaaaggu

SEQ ID NO: 1613777 - RNA, 19 nt, Homo sapiens
  misc_RNA (1)...(19): siRNA sense strand
agagagagagggaccugaa

SEQ ID NO: 1613778 - RNA, 19 nt, Homo sapiens
  misc_RNA (1)...(19): siRNA sense strand
acucgacacucuugaggau

SEQ ID NO: 1613779 - RNA, 19 nt, Homo sapiens
  misc_RNA (1)...(19): siRNA sense strand
aagaagaagcagaggaaga

SEQ ID NO: 1613780 - RNA, 19 nt, Homo sapiens
  misc_RNA (1)...(19): siRNA sense strand
gaagaggaacaggaagaag

SEQ ID NO: 1613781 - RNA, 19 nt, Homo sapiens
  misc_RNA (1)...(19): siRNA sense strand
ggaggccagccaacagaug

SEQ ID NO: 1613782 - RNA, 19 nt, Homo sapiens
  misc_RNA (1)...(19): siRNA sense strand
ggggacacauccagccuaa

SEQ ID NO: 1613783 - RNA, 19 nt, Homo sapiens
  misc_RNA (1)...(19): siRNA sense strand
ugggagagcguuaccuaug

SEQ ID NO: 1613784 - RNA, 19 nt, Homo sapiens
  misc_RNA (1)...(19): siRNA sense strand
ccagaugcagcuccaggaa

SEQ ID NO: 1613785 - RNA, 19 nt, Homo sapiens
  misc_RNA (1)...(19): siRNA sense strand
gaccugcagugugcucauc

SEQ ID NO: 1613786 - RNA, 19 nt, Homo sapiens
  misc_RNA (1)...(19): siRNA sense strand
ugauuucgcaggaggcauu

SEQ ID NO: 1613787 - RNA, 19 nt, Homo sapiens
  misc_RNA (1)...(19): siRNA sense strand
cgucaaagugauguuauau

SEQ ID NO: 1613788 - RNA, 19 nt, Homo sapiens
  misc_RNA (1)...(19): siRNA sense strand
gaaaggcagcgggcaucug

SEQ ID NO: 1613789 - RNA, 19 nt, Homo sapiens
  misc_RNA (1)...(19): siRNA sense strand
acaggaagaagaagaagca

SEQ ID NO: 1613790 - RNA, 19 nt, Homo sapiens
  misc_RNA (1)...(19): siRNA sense strand
caccuggacaugaauuaug

SEQ ID NO: 1613791 - RNA, 19 nt, Homo sapiens
  misc_RNA (1)...(19): siRNA sense strand
uggaggaggagaaucauca

SEQ ID NO: 1613792 - RNA, 19 nt, Homo sapiens
  misc_RNA (1)...(19): siRNA sense strand
aggaugaggaugaagaaga

SEQ ID NO: 1613793 - RNA, 19 nt, Homo sapiens
  misc_RNA (1)...(19): siRNA sense strand
ggaguguguggagcaguuu

SEQ ID NO: 1613794 - RNA, 19 nt, Homo sapiens
  misc_RNA (1)...(19): siRNA sense strand
ucucaacucgacacucuug

SEQ ID NO: 1613795 - RNA, 19 nt, Homo sapiens
  misc_RNA (1)...(19): siRNA sense strand
agaagaggaacaggaagaa

SEQ ID NO: 1613796 - RNA, 19 nt, Homo sapiens
  misc_RNA (1)...(19): siRNA sense strand
ggaaauggacgcuggauua

SEQ ID NO: 1613797 - RNA, 19 nt, Homo sapiens
  misc_RNA (1)...(19): siRNA sense strand
gaacaaaggaagcaggaaa

SEQ ID NO: 1613798 - RNA, 19 nt, Homo sapiens
  misc_RNA (1)...(19): siRNA sense strand
gcaggaaaaugcucuuaaa

SEQ ID NO: 1613799 - RNA, 19 nt, Homo sapiens
  misc_RNA (1)...(19): siRNA sense strand
aauggacgcuggauuacaa

SEQ ID NO: 1613800 - RNA, 19 nt, Homo sapiens
  misc_RNA (1)...(19): siRNA sense strand
gaaguugcaggaagaacaa

SEQ ID NO: 1613801 - RNA, 19 nt, Homo sapiens
  misc_RNA (1)...(19): siRNA sense strand
gaaauggacgcuggauuac

SEQ ID NO: 1613802 - RNA, 19 nt, Homo sapiens
  misc_RNA (1)...(19): siRNA sense strand
uuuagggacuguucucuuc

SEQ ID NO: 1613803 - RNA, 19 nt, Homo sapiens
  misc_RNA (1)...(19): siRNA sense strand
gaguuguacugcugucaca

SEQ ID NO: 1613804 - RNA, 19 nt, Homo sapiens
  misc_RNA (1)...(19): siRNA sense strand
gcagaaguugcaggaagaa

SEQ ID NO: 1613805 - RNA, 19 nt, Homo sapiens
  misc_RNA (1)...(19): siRNA sense strand
agcagaaguugcaggaaga

SEQ ID NO: 1613806 - RNA, 19 nt, Homo sapiens
  misc_RNA (1)...(19): siRNA sense strand
gacgcuggauuacaagcau

SEQ ID NO: 1613807 - RNA, 19 nt, Homo sapiens
  misc_RNA (1)...(19): siRNA sense strand
gcucaggcagcagaaguug

SEQ ID NO: 1613808 - RNA, 19 nt, Homo sapiens
  misc_RNA (1)...(19): siRNA sense strand
uuuagggacuguucucuuc

SEQ ID NO: 1613809 - RNA, 19 nt, Homo sapiens
  misc_RNA (1)...(19): siRNA sense strand
ggaaauggacgcuggauua

SEQ ID NO: 1613810 - RNA, 19 nt, Homo sapiens
  misc_RNA (1)...(19): siRNA sense strand
gaacaaaggaagcaggaaa

SEQ ID NO: 1613811 - RNA, 19 nt, Homo sapiens
  misc_RNA (1)...(19): siRNA sense strand
gcaggaaaaugcucuuaaa

SEQ ID NO: 1613812 - RNA, 19 nt, Homo sapiens
  misc_RNA (1)...(19): siRNA sense strand
aauggacgcuggauuacaa

SEQ ID NO: 1613813 - RNA, 19 nt, Homo sapiens
  misc_RNA (1)...(19): siRNA sense strand
gaaguugcaggaagaacaa

SEQ ID NO: 1613814 - RNA, 19 nt, Homo sapiens
  misc_RNA (1)...(19): siRNA sense strand
gaaauggacgcuggauuac

SEQ ID NO: 1613815 - RNA, 19 nt, Homo sapiens
  misc_RNA (1)...(19): siRNA sense strand
uuuagggacuguucucuuc

SEQ ID NO: 1613816 - RNA, 19 nt, Homo sapiens
  misc_RNA (1)...(19): siRNA sense strand
gaguuguacugcugucaca

SEQ ID NO: 1613817 - RNA, 19 nt, Homo sapiens
  misc_RNA (1)...(19): siRNA sense strand
gcagaaguugcaggaagaa

SEQ ID NO: 1613818 - RNA, 19 nt, Homo sapiens
  misc_RNA (1)...(19): siRNA sense strand
agcagaaguugcaggaaga

SEQ ID NO: 1613819 - RNA, 19 nt, Homo sapiens
  misc_RNA (1)...(19): siRNA sense strand
gacgcuggauuacaagcau

SEQ ID NO: 1613820 - RNA, 19 nt, Homo sapiens
  misc_RNA (1)...(19): siRNA sense strand
gcucaggcagcagaaguug

SEQ ID NO: 1613821 - RNA, 19 nt, Homo sapiens
  misc_RNA (1)...(19): siRNA sense strand
ggaaauggacgcuggauua

SEQ ID NO: 1613822 - RNA, 19 nt, Homo sapiens
  misc_RNA (1)...(19): siRNA sense strand
gaacaaaggaagcaggaaa

SEQ ID NO: 1613823 - RNA, 19 nt, Homo sapiens
  misc_RNA (1)...(19): siRNA sense strand
gcaggaaaaugcucuuaaa

SEQ ID NO: 1613824 - RNA, 19 nt, Homo sapiens
  misc_RNA (1)...(19): siRNA sense strand
aauggacgcuggauuacaa

SEQ ID NO: 1613825 - RNA, 19 nt, Homo sapiens
  misc_RNA (1)...(19): siRNA sense strand
gaaguugcaggaagaacaa

SEQ ID NO: 1613826 - RNA, 19 nt, Homo sapiens
  misc_RNA (1)...(19): siRNA sense strand
gaaauggacgcuggauuac

SEQ ID NO: 1613827 - RNA, 19 nt, Homo sapiens
  misc_RNA (1)...(19): siRNA sense strand
gaguuguacugcugucaca

SEQ ID NO: 1613828 - RNA, 19 nt, Homo sapiens
  misc_RNA (1)...(19): siRNA sense strand
gcagaaguugcaggaagaa

SEQ ID NO: 1613829 - RNA, 19 nt, Homo sapiens
  misc_RNA (1)...(19): siRNA sense strand
agcagaaguugcaggaaga

SEQ ID NO: 1613830 - RNA, 19 nt, Homo sapiens
  misc_RNA (1)...(19): siRNA sense strand
gacgcuggauuacaagcau

SEQ ID NO: 1613831 - RNA, 19 nt, Homo sapiens
  misc_RNA (1)...(19): siRNA sense strand
gcucaggcagcagaaguug

SEQ ID NO: 1613832 - RNA, 19 nt, Homo sapiens
  misc_RNA (1)...(19): siRNA sense strand
ggaaauggacgcuggauua

SEQ ID NO: 1613833 - RNA, 19 nt, Homo sapiens
  misc_RNA (1)...(19): siRNA sense strand
gaacaaaggaagcaggaaa

SEQ ID NO: 1613834 - RNA, 19 nt, Homo sapiens
  misc_RNA (1)...(19): siRNA sense strand
gcaggaaaaugcucuuaaa

SEQ ID NO: 1613835 - RNA, 19 nt, Homo sapiens
  misc_RNA (1)...(19): siRNA sense strand
aauggacgcuggauuacaa

SEQ ID NO: 1613836 - RNA, 19 nt, Homo sapiens
  misc_RNA (1)...(19): siRNA sense strand
gaaguugcaggaagaacaa

SEQ ID NO: 1613837 - RNA, 19 nt, Homo sapiens
  misc_RNA (1)...(19): siRNA sense strand
gaaauggacgcuggauuac

SEQ ID NO: 1613838 - RNA, 19 nt, Homo sapiens
  misc_RNA (1)...(19): siRNA sense strand
gaguuguacugcugucaca

SEQ ID NO: 1613839 - RNA, 19 nt, Homo sapiens
  misc_RNA (1)...(19): siRNA sense strand
gcagaaguugcaggaagaa

SEQ ID NO: 1613840 - RNA, 19 nt, Homo sapiens
  misc_RNA (1)...(19): siRNA sense strand
agcagaaguugcaggaaga

SEQ ID NO: 1613841 - RNA, 19 nt, Homo sapiens
  misc_RNA (1)...(19): siRNA sense strand
gacgcuggauuacaagcau

SEQ ID NO: 1613842 - RNA, 19 nt, Homo sapiens
  misc_RNA (1)...(19): siRNA sense strand
gcucaggcagcagaaguug

SEQ ID NO: 1613843 - RNA, 19 nt, Homo sapiens
  misc_RNA (1)...(19): siRNA sense strand
ggaaauggacgcuggauua

SEQ ID NO: 1613844 - RNA, 19 nt, Homo sapiens
  misc_RNA (1)...(19): siRNA sense strand
gaacaaaggaagcaggaaa

SEQ ID NO: 1613845 - RNA, 19 nt, Homo sapiens
  misc_RNA (1)...(19): siRNA sense strand
gcaggaaaaugcucuuaaa

SEQ ID NO: 1613846 - RNA, 19 nt, Homo sapiens
  misc_RNA (1)...(19): siRNA sense strand
aauggacgcuggauuacaa

SEQ ID NO: 1613847 - RNA, 19 nt, Homo sapiens
  misc_RNA (1)...(19): siRNA sense strand
gaaguugcaggaagaacaa

SEQ ID NO: 1613848 - RNA, 19 nt, Homo sapiens
  misc_RNA (1)...(19): siRNA sense strand
gaaauggacgcuggauuac

SEQ ID NO: 1613849 - RNA, 19 nt, Homo sapiens
  misc_RNA (1)...(19): siRNA sense strand
gaguuguacugcugucaca

SEQ ID NO: 1613850 - RNA, 19 nt, Homo sapiens
  misc_RNA (1)...(19): siRNA sense strand
gcagaaguugcaggaagaa

SEQ ID NO: 1613851 - RNA, 19 nt, Homo sapiens
  misc_RNA (1)...(19): siRNA sense strand
agcagaaguugcaggaaga

SEQ ID NO: 1613852 - RNA, 19 nt, Homo sapiens
  misc_RNA (1)...(19): siRNA sense strand
gacgcuggauuacaagcau

SEQ ID NO: 1613853 - RNA, 19 nt, Homo sapiens
  misc_RNA (1)...(19): siRNA sense strand
gcucaggcagcagaaguug

SEQ ID NO: 1613854 - RNA, 19 nt, Homo sapiens
  misc_RNA (1)...(19): siRNA sense strand
ggaaauggacgcuggauua

SEQ ID NO: 1613855 - RNA, 19 nt, Homo sapiens
  misc_RNA (1)...(19): siRNA sense strand
gaacaaaggaagcaggaaa

SEQ ID NO: 1613856 - RNA, 19 nt, Homo sapiens
  misc_RNA (1)...(19): siRNA sense strand
aauggacgcuggauuacaa

SEQ ID NO: 1613857 - RNA, 19 nt, Homo sapiens
  misc_RNA (1)...(19): siRNA sense strand
gaaguugcaggaagaacaa

SEQ ID NO: 1613858 - RNA, 19 nt, Homo sapiens
  misc_RNA (1)...(19): siRNA sense strand
gaaauggacgcuggauuac

SEQ ID NO: 1613859 - RNA, 19 nt, Homo sapiens
  misc_RNA (1)...(19): siRNA sense strand
uuuagggacuguucucuuc

SEQ ID NO: 1613860 - RNA, 19 nt, Homo sapiens
  misc_RNA (1)...(19): siRNA sense strand
gaguuguacugcugucaca

SEQ ID NO: 1613861 - RNA, 19 nt, Homo sapiens
  misc_RNA (1)...(19): siRNA sense strand
gcagaaguugcaggaagaa

SEQ ID NO: 1613862 - RNA, 19 nt, Homo sapiens
  misc_RNA (1)...(19): siRNA sense strand
agcagaaguugcaggaaga

SEQ ID NO: 1613863 - RNA, 19 nt, Homo sapiens
  misc_RNA (1)...(19): siRNA sense strand
gacgcuggauuacaagcau

SEQ ID NO: 1613864 - RNA, 19 nt, Homo sapiens
  misc_RNA (1)...(19): siRNA sense strand
gcucaggcagcagaaguug

SEQ ID NO: 1613865 - RNA, 19 nt, Homo sapiens
  misc_RNA (1)...(19): siRNA sense strand
ggaaauggacgcuggauua

SEQ ID NO: 1613866 - RNA, 19 nt, Homo sapiens
  misc_RNA (1)...(19): siRNA sense strand
gaacaaaggaagcaggaaa

SEQ ID NO: 1613867 - RNA, 19 nt, Homo sapiens
  misc_RNA (1)...(19): siRNA sense strand
gcaggaaaaugcucuuaaa

SEQ ID NO: 1613868 - RNA, 19 nt, Homo sapiens
  misc_RNA (1)...(19): siRNA sense strand
aauggacgcuggauuacaa

SEQ ID NO: 1613869 - RNA, 19 nt, Homo sapiens
  misc_RNA (1)...(19): siRNA sense strand
gaaguugcaggaagaacaa

SEQ ID NO: 1613870 - RNA, 19 nt, Homo sapiens
  misc_RNA (1)...(19): siRNA sense strand
gaaauggacgcuggauuac

SEQ ID NO: 1613871 - RNA, 19 nt, Homo sapiens
  misc_RNA (1)...(19): siRNA sense strand
uuuagggacuguucucuuc

SEQ ID NO: 1613872 - RNA, 19 nt, Homo sapiens
  misc_RNA (1)...(19): siRNA sense strand
gaguuguacugcugucaca

SEQ ID NO: 1613873 - RNA, 19 nt, Homo sapiens
  misc_RNA (1)...(19): siRNA sense strand
gcagaaguugcaggaagaa

SEQ ID NO: 1613874 - RNA, 19 nt, Homo sapiens
  misc_RNA (1)...(19): siRNA sense strand
agcagaaguugcaggaaga

SEQ ID NO: 1613875 - RNA, 19 nt, Homo sapiens
  misc_RNA (1)...(19): siRNA sense strand
gacgcuggauuacaagcau

SEQ ID NO: 1613876 - RNA, 19 nt, Homo sapiens
  misc_RNA (1)...(19): siRNA sense strand
gcucaggcagcagaaguug

SEQ ID NO: 1613877 - RNA, 19 nt, Homo sapiens
  misc_RNA (1)...(19): siRNA sense strand
uuuagggacuguucucuuc

SEQ ID NO: 1613878 - RNA, 19 nt, Homo sapiens
  misc_RNA (1)...(19): siRNA sense strand
ggaaauggacgcuggauua

SEQ ID NO: 1613879 - RNA, 19 nt, Homo sapiens
  misc_RNA (1)...(19): siRNA sense strand
gaacaaaggaagcaggaaa

SEQ ID NO: 1613880 - RNA, 19 nt, Homo sapiens
  misc_RNA (1)...(19): siRNA sense strand
gcaggaaaaugcucuuaaa

SEQ ID NO: 1613881 - RNA, 19 nt, Homo sapiens
  misc_RNA (1)...(19): siRNA sense strand
aauggacgcuggauuacaa

SEQ ID NO: 1613882 - RNA, 19 nt, Homo sapiens
  misc_RNA (1)...(19): siRNA sense strand
gaaguugcaggaagaacaa

SEQ ID NO: 1613883 - RNA, 19 nt, Homo sapiens
  misc_RNA (1)...(19): siRNA sense strand
gaaauggacgcuggauuac

SEQ ID NO: 1613884 - RNA, 19 nt, Homo sapiens
  misc_RNA (1)...(19): siRNA sense strand
uuuagggacuguucucuuc

SEQ ID NO: 1613885 - RNA, 19 nt, Homo sapiens
  misc_RNA (1)...(19): siRNA sense strand
gaguuguacugcugucaca

SEQ ID NO: 1613886 - RNA, 19 nt, Homo sapiens
  misc_RNA (1)...(19): siRNA sense strand
gcagaaguugcaggaagaa

SEQ ID NO: 1613887 - RNA, 19 nt, Homo sapiens
  misc_RNA (1)...(19): siRNA sense strand
agcagaaguugcaggaaga

SEQ ID NO: 1613888 - RNA, 19 nt, Homo sapiens
  misc_RNA (1)...(19): siRNA sense strand
gacgcuggauuacaagcau

SEQ ID NO: 1613889 - RNA, 19 nt, Homo sapiens
  misc_RNA (1)...(19): siRNA sense strand
gcucaggcagcagaaguug

SEQ ID NO: 1613890 - RNA, 19 nt, Homo sapiens
  misc_RNA (1)...(19): siRNA sense strand
ggaaauggacgcuggauua

SEQ ID NO: 1613891 - RNA, 19 nt, Homo sapiens
  misc_RNA (1)...(19): siRNA sense strand
gaacaaaggaagcaggaaa

SEQ ID NO: 1613892 - RNA, 19 nt, Homo sapiens
  misc_RNA (1)...(19): siRNA sense strand
gcaggaaaaugcucuuaaa

SEQ ID NO: 1613893 - RNA, 19 nt, Homo sapiens
  misc_RNA (1)...(19): siRNA sense strand
aauggacgcuggauuacaa

SEQ ID NO: 1613894 - RNA, 19 nt, Homo sapiens
  misc_RNA (1)...(19): siRNA sense strand
gaaguugcaggaagaacaa

SEQ ID NO: 1613895 - RNA, 19 nt, Homo sapiens
  misc_RNA (1)...(19): siRNA sense strand
gaaauggacgcuggauuac

SEQ ID NO: 1613896 - RNA, 19 nt, Homo sapiens
  misc_RNA (1)...(19): siRNA sense strand
gaguuguacugcugucaca

SEQ ID NO: 1613897 - RNA, 19 nt, Homo sapiens
  misc_RNA (1)...(19): siRNA sense strand
gcagaaguugcaggaagaa

SEQ ID NO: 1613898 - RNA, 19 nt, Homo sapiens
  misc_RNA (1)...(19): siRNA sense strand
agcagaaguugcaggaaga

SEQ ID NO: 1613899 - RNA, 19 nt, Homo sapiens
  misc_RNA (1)...(19): siRNA sense strand
gacgcuggauuacaagcau

SEQ ID NO: 1613900 - RNA, 19 nt, Homo sapiens
  misc_RNA (1)...(19): siRNA sense strand
gcucaggcagcagaaguug

SEQ ID NO: 1613901 - RNA, 19 nt, Homo sapiens
  misc_RNA (1)...(19): siRNA sense strand
ggaaauggacgcuggauua

SEQ ID NO: 1613902 - RNA, 19 nt, Homo sapiens
  misc_RNA (1)...(19): siRNA sense strand
gaacaaaggaagcaggaaa

SEQ ID NO: 1613903 - RNA, 19 nt, Homo sapiens
  misc_RNA (1)...(19): siRNA sense strand
gcaggaaaaugcucuuaaa

SEQ ID NO: 1613904 - RNA, 19 nt, Homo sapiens
  misc_RNA (1)...(19): siRNA sense strand
aauggacgcuggauuacaa

SEQ ID NO: 1613905 - RNA, 19 nt, Homo sapiens
  misc_RNA (1)...(19): siRNA sense strand
gaaguugcaggaagaacaa

SEQ ID NO: 1613906 - RNA, 19 nt, Homo sapiens
  misc_RNA (1)...(19): siRNA sense strand
gaaauggacgcuggauuac

SEQ ID NO: 1613907 - RNA, 19 nt, Homo sapiens
  misc_RNA (1)...(19): siRNA sense strand
gaguuguacugcugucaca

SEQ ID NO: 1613908 - RNA, 19 nt, Homo sapiens
  misc_RNA (1)...(19): siRNA sense strand
gcagaaguugcaggaagaa

SEQ ID NO: 1613909 - RNA, 19 nt, Homo sapiens
  misc_RNA (1)...(19): siRNA sense strand
agcagaaguugcaggaaga

SEQ ID NO: 1613910 - RNA, 19 nt, Homo sapiens
  misc_RNA (1)...(19): siRNA sense strand
gacgcuggauuacaagcau

SEQ ID NO: 1613911 - RNA, 19 nt, Homo sapiens
  misc_RNA (1)...(19): siRNA sense strand
gcucaggcagcagaaguug

SEQ ID NO: 1613912 - RNA, 19 nt, Homo sapiens
  misc_RNA (1)...(19): siRNA sense strand
ggaaauggacgcuggauua

SEQ ID NO: 1613913 - RNA, 19 nt, Homo sapiens
  misc_RNA (1)...(19): siRNA sense strand
gaacaaaggaagcaggaaa

SEQ ID NO: 1613914 - RNA, 19 nt, Homo sapiens
  misc_RNA (1)...(19): siRNA sense strand
gcaggaaaaugcucuuaaa

SEQ ID NO: 1613915 - RNA, 19 nt, Homo sapiens
  misc_RNA (1)...(19): siRNA sense strand
aauggacgcuggauuacaa

SEQ ID NO: 1613916 - RNA, 19 nt, Homo sapiens
  misc_RNA (1)...(19): siRNA sense strand
gaaguugcaggaagaacaa

SEQ ID NO: 1613917 - RNA, 19 nt, Homo sapiens
  misc_RNA (1)...(19): siRNA sense strand
gaaauggacgcuggauuac

SEQ ID NO: 1613918 - RNA, 19 nt, Homo sapiens
  misc_RNA (1)...(19): siRNA sense strand
gaguuguacugcugucaca

SEQ ID NO: 1613919 - RNA, 19 nt, Homo sapiens
  misc_RNA (1)...(19): siRNA sense strand
gcagaaguugcaggaagaa

SEQ ID NO: 1613920 - RNA, 19 nt, Homo sapiens
  misc_RNA (1)...(19): siRNA sense strand
agcagaaguugcaggaaga

SEQ ID NO: 1613921 - RNA, 19 nt, Homo sapiens
  misc_RNA (1)...(19): siRNA sense strand
gacgcuggauuacaagcau

SEQ ID NO: 1613922 - RNA, 19 nt, Homo sapiens
  misc_RNA (1)...(19): siRNA sense strand
gcucaggcagcagaaguug

SEQ ID NO: 1613923 - RNA, 19 nt, Homo sapiens
  misc_RNA (1)...(19): siRNA sense strand
ggaaauggacgcuggauua

SEQ ID NO: 1613924 - RNA, 19 nt, Homo sapiens
  misc_RNA (1)...(19): siRNA sense strand
gaacaaaggaagcaggaaa

SEQ ID NO: 1613925 - RNA, 19 nt, Homo sapiens
  misc_RNA (1)...(19): siRNA sense strand
aauggacgcuggauuacaa

SEQ ID NO: 1613926 - RNA, 19 nt, Homo sapiens
  misc_RNA (1)...(19): siRNA sense strand
gaaguugcaggaagaacaa

SEQ ID NO: 1613927 - RNA, 19 nt, Homo sapiens
  misc_RNA (1)...(19): siRNA sense strand
gaaauggacgcuggauuac

SEQ ID NO: 1613928 - RNA, 19 nt, Homo sapiens
  misc_RNA (1)...(19): siRNA sense strand
uuuagggacuguucucuuc

SEQ ID NO: 1613929 - RNA, 19 nt, Homo sapiens
  misc_RNA (1)...(19): siRNA sense strand
gaguuguacugcugucaca

SEQ ID NO: 1613930 - RNA, 19 nt, Homo sapiens
  misc_RNA (1)...(19): siRNA sense strand
gcagaaguugcaggaagaa

SEQ ID NO: 1613931 - RNA, 19 nt, Homo sapiens
  misc_RNA (1)...(19): siRNA sense strand
agcagaaguugcaggaaga

SEQ ID NO: 1613932 - RNA, 19 nt, Homo sapiens
  misc_RNA (1)...(19): siRNA sense strand
gacgcuggauuacaagcau

SEQ ID NO: 1613933 - RNA, 19 nt, Homo sapiens
  misc_RNA (1)...(19): siRNA sense strand
gcucaggcagcagaaguug

SEQ ID NO: 1613934 - RNA, 19 nt, Homo sapiens
  misc_RNA (1)...(19): siRNA sense strand
caaagacaacuuccuauuu

SEQ ID NO: 1613935 - RNA, 19 nt, Homo sapiens
  misc_RNA (1)...(19): siRNA sense strand
gacgacaucuuuaucauca

SEQ ID NO: 1613936 - RNA, 19 nt, Homo sapiens
  misc_RNA (1)...(19): siRNA sense strand
gcaaagacaacuuccuauu

SEQ ID NO: 1613937 - RNA, 19 nt, Homo sapiens
  misc_RNA (1)...(19): siRNA sense strand
ccaacaccauguccaacua

SEQ ID NO: 1613938 - RNA, 19 nt, Homo sapiens
  misc_RNA (1)...(19): siRNA sense strand
gggcaaagacaacuuccua

SEQ ID NO: 1613939 - RNA, 19 nt, Homo sapiens
  misc_RNA (1)...(19): siRNA sense strand
ggagaacacccaagaugug

SEQ ID NO: 1613940 - RNA, 19 nt, Homo sapiens
  misc_RNA (1)...(19): siRNA sense strand
gaaguugccaggugaauac

SEQ ID NO: 1613941 - RNA, 19 nt, Homo sapiens
  misc_RNA (1)...(19): siRNA sense strand
cucaugagcucccaucuuc

SEQ ID NO: 1613942 - RNA, 19 nt, Homo sapiens
  misc_RNA (1)...(19): siRNA sense strand
caaaggcgaagugcaguuu

SEQ ID NO: 1613943 - RNA, 19 nt, Homo sapiens
  misc_RNA (1)...(19): siRNA sense strand
ggacgacgacaucuuuauc

SEQ ID NO: 1613944 - RNA, 19 nt, Homo sapiens
  misc_RNA (1)...(19): siRNA sense strand
gacaacuuccuauuuauca

SEQ ID NO: 1613945 - RNA, 19 nt, Homo sapiens
  misc_RNA (1)...(19): siRNA sense strand
gcgggacgacgacaucuuu

SEQ ID NO: 1613946 - RNA, 19 nt, Homo sapiens
  misc_RNA (1)...(19): siRNA sense strand
cgaccuggaugaucgagau

SEQ ID NO: 1613947 - RNA, 19 nt, Homo sapiens
  misc_RNA (1)...(19): siRNA sense strand
uggucucccucuaucauua

SEQ ID NO: 1613948 - RNA, 19 nt, Homo sapiens
  misc_RNA (1)...(19): siRNA sense strand
gcacccacgacccucauaa

SEQ ID NO: 1613949 - RNA, 19 nt, Homo sapiens
  misc_RNA (1)...(19): siRNA sense strand
gcggagaacacccaagaug

SEQ ID NO: 1613950 - RNA, 19 nt, Homo sapiens
  misc_RNA (1)...(19): siRNA sense strand
gugaauacuuccgguacaa

SEQ ID NO: 1613951 - RNA, 19 nt, Homo sapiens
  misc_RNA (1)...(19): siRNA sense strand
ggaugaagggcaaagacaa

SEQ ID NO: 1613952 - RNA, 19 nt, Homo sapiens
  misc_RNA (1)...(19): siRNA sense strand
ggugaauacuuccgguaca

SEQ ID NO: 1613953 - RNA, 19 nt, Homo sapiens
  misc_RNA (1)...(19): siRNA sense strand
guugccaggugaauacuuc

SEQ ID NO: 1613954 - RNA, 19 nt, Homo sapiens
  misc_RNA (1)...(19): siRNA sense strand
gacgacgacaucuuuauca

SEQ ID NO: 1613955 - RNA, 19 nt, Homo sapiens
  misc_RNA (1)...(19): siRNA sense strand
ccauccagaucuucaccaa

SEQ ID NO: 1613956 - RNA, 19 nt, Homo sapiens
  misc_RNA (1)...(19): siRNA sense strand
gcaucagcuuggcggagaa

SEQ ID NO: 1613957 - RNA, 19 nt, Homo sapiens
  misc_RNA (1)...(19): siRNA sense strand
ccaaggccaaggugaucua

SEQ ID NO: 1613958 - RNA, 19 nt, Homo sapiens
  misc_RNA (1)...(19): siRNA sense strand
agaaguugccaggugaaua

SEQ ID NO: 1613959 - RNA, 19 nt, Homo sapiens
  misc_RNA (1)...(19): siRNA sense strand
guuguggucucccucuauc

SEQ ID NO: 1613960 - RNA, 19 nt, Homo sapiens
  misc_RNA (1)...(19): siRNA sense strand
gggacgacgacaucuuuau

SEQ ID NO: 1613961 - RNA, 19 nt, Homo sapiens
  misc_RNA (1)...(19): siRNA sense strand
gcucccaucuucccaucca

SEQ ID NO: 1613962 - RNA, 19 nt, Homo sapiens
  misc_RNA (1)...(19): siRNA sense strand
gaugaagggcaaagacaac

SEQ ID NO: 1613963 - RNA, 19 nt, Homo sapiens
  misc_RNA (1)...(19): siRNA sense strand
guggcacacucaaccuuca

SEQ ID NO: 1613964 - RNA, 19 nt, Homo sapiens
  misc_RNA (1)...(19): siRNA sense strand
agacaacuuccuauuuauc

SEQ ID NO: 1613965 - RNA, 19 nt, Homo sapiens
  misc_RNA (1)...(19): siRNA sense strand
cgacgacaucuuuaucauc

SEQ ID NO: 1613966 - RNA, 19 nt, Homo sapiens
  misc_RNA (1)...(19): siRNA sense strand
ggcaaagacaacuuccuau

SEQ ID NO: 1613967 - RNA, 19 nt, Homo sapiens
  misc_RNA (1)...(19): siRNA sense strand
aggccaaggugaucuacau

SEQ ID NO: 1613968 - RNA, 19 nt, Homo sapiens
  misc_RNA (1)...(19): siRNA sense strand
cggagaacacccaagaugu

SEQ ID NO: 1613969 - RNA, 19 nt, Homo sapiens
  misc_RNA (1)...(19): siRNA sense strand
gcuccaaggccaaggugau

SEQ ID NO: 1613970 - RNA, 19 nt, Homo sapiens
  misc_RNA (1)...(19): siRNA sense strand
caaagacaacuuccuauuu

SEQ ID NO: 1613971 - RNA, 19 nt, Homo sapiens
  misc_RNA (1)...(19): siRNA sense strand
gacgacaucuuuaucauca

SEQ ID NO: 1613972 - RNA, 19 nt, Homo sapiens
  misc_RNA (1)...(19): siRNA sense strand
gcaaagacaacuuccuauu

SEQ ID NO: 1613973 - RNA, 19 nt, Homo sapiens
  misc_RNA (1)...(19): siRNA sense strand
ccaacaccauguccaacua

SEQ ID NO: 1613974 - RNA, 19 nt, Homo sapiens
  misc_RNA (1)...(19): siRNA sense strand
gggcaaagacaacuuccua

SEQ ID NO: 1613975 - RNA, 19 nt, Homo sapiens
  misc_RNA (1)...(19): siRNA sense strand
ggagaacacccaagaugug

SEQ ID NO: 1613976 - RNA, 19 nt, Homo sapiens
  misc_RNA (1)...(19): siRNA sense strand
gaaguugccaggugaauac

SEQ ID NO: 1613977 - RNA, 19 nt, Homo sapiens
  misc_RNA (1)...(19): siRNA sense strand
cucaugagcucccaucuuc

SEQ ID NO: 1613978 - RNA, 19 nt, Homo sapiens
  misc_RNA (1)...(19): siRNA sense strand
caaaggcgaagugcaguuu

SEQ ID NO: 1613979 - RNA, 19 nt, Homo sapiens
  misc_RNA (1)...(19): siRNA sense strand
ggacgacgacaucuuuauc

SEQ ID NO: 1613980 - RNA, 19 nt, Homo sapiens
  misc_RNA (1)...(19): siRNA sense strand
gacaacuuccuauuuauca

SEQ ID NO: 1613981 - RNA, 19 nt, Homo sapiens
  misc_RNA (1)...(19): siRNA sense strand
gcgggacgacgacaucuuu

SEQ ID NO: 1613982 - RNA, 19 nt, Homo sapiens
  misc_RNA (1)...(19): siRNA sense strand
cgaccuggaugaucgagau

SEQ ID NO: 1613983 - RNA, 19 nt, Homo sapiens
  misc_RNA (1)...(19): siRNA sense strand
uggucucccucuaucauua

SEQ ID NO: 1613984 - RNA, 19 nt, Homo sapiens
  misc_RNA (1)...(19): siRNA sense strand
gcacccacgacccucauaa

SEQ ID NO: 1613985 - RNA, 19 nt, Homo sapiens
  misc_RNA (1)...(19): siRNA sense strand
gcggagaacacccaagaug

SEQ ID NO: 1613986 - RNA, 19 nt, Homo sapiens
  misc_RNA (1)...(19): siRNA sense strand
gugaauacuuccgguacaa

SEQ ID NO: 1613987 - RNA, 19 nt, Homo sapiens
  misc_RNA (1)...(19): siRNA sense strand
ggaugaagggcaaagacaa

SEQ ID NO: 1613988 - RNA, 19 nt, Homo sapiens
  misc_RNA (1)...(19): siRNA sense strand
ggugaauacuuccgguaca

SEQ ID NO: 1613989 - RNA, 19 nt, Homo sapiens
  misc_RNA (1)...(19): siRNA sense strand
guugccaggugaauacuuc

SEQ ID NO: 1613990 - RNA, 19 nt, Homo sapiens
  misc_RNA (1)...(19): siRNA sense strand
gacgacgacaucuuuauca

SEQ ID NO: 1613991 - RNA, 19 nt, Homo sapiens
  misc_RNA (1)...(19): siRNA sense strand
ccauccagaucuucaccaa

SEQ ID NO: 1613992 - RNA, 19 nt, Homo sapiens
  misc_RNA (1)...(19): siRNA sense strand
gcaucagcuuggcggagaa

SEQ ID NO: 1613993 - RNA, 19 nt, Homo sapiens
  misc_RNA (1)...(19): siRNA sense strand
ccaaggccaaggugaucua

SEQ ID NO: 1613994 - RNA, 19 nt, Homo sapiens
  misc_RNA (1)...(19): siRNA sense strand
agaaguugccaggugaaua

SEQ ID NO: 1613995 - RNA, 19 nt, Homo sapiens
  misc_RNA (1)...(19): siRNA sense strand
guuguggucucccucuauc

SEQ ID NO: 1613996 - RNA, 19 nt, Homo sapiens
  misc_RNA (1)...(19): siRNA sense strand
gggacgacgacaucuuuau

SEQ ID NO: 1613997 - RNA, 19 nt, Homo sapiens
  misc_RNA (1)...(19): siRNA sense strand
gcucccaucuucccaucca

SEQ ID NO: 1613998 - RNA, 19 nt, Homo sapiens
  misc_RNA (1)...(19): siRNA sense strand
gaugaagggcaaagacaac

SEQ ID NO: 1613999 - RNA, 19 nt, Homo sapiens
  misc_RNA (1)...(19): siRNA sense strand
guggcacacucaaccuuca

SEQ ID NO: 1614000 - RNA, 19 nt, Homo sapiens
  misc_RNA (1)...(19): siRNA sense strand
agacaacuuccuauuuauc

SEQ ID NO: 1614001 - RNA, 19 nt, Homo sapiens
  misc_RNA (1)...(19): siRNA sense strand
cgacgacaucuuuaucauc

SEQ ID NO: 1614002 - RNA, 19 nt, Homo sapiens
  misc_RNA (1)...(19): siRNA sense strand
ggcaaagacaacuuccuau

SEQ ID NO: 1614003 - RNA, 19 nt, Homo sapiens
  misc_RNA (1)...(19): siRNA sense strand
aggccaaggugaucuacau

SEQ ID NO: 1614004 - RNA, 19 nt, Homo sapiens
  misc_RNA (1)...(19): siRNA sense strand
cggagaacacccaagaugu

SEQ ID NO: 1614005 - RNA, 19 nt, Homo sapiens
  misc_RNA (1)...(19): siRNA sense strand
gcuccaaggccaaggugau

SEQ ID NO: 1614006 - RNA, 19 nt, Homo sapiens
  misc_RNA (1)...(19): siRNA sense strand
ggaaaggaauuggauauaa

SEQ ID NO: 1614007 - RNA, 19 nt, Homo sapiens
  misc_RNA (1)...(19): siRNA sense strand
gaagaacccucaagcaauc

SEQ ID NO: 1614008 - RNA, 19 nt, Homo sapiens
  misc_RNA (1)...(19): siRNA sense strand
caacauaucguaucagaug

SEQ ID NO: 1614009 - RNA, 19 nt, Homo sapiens
  misc_RNA (1)...(19): siRNA sense strand
gaagaacaauacuuaccuu

SEQ ID NO: 1614010 - RNA, 19 nt, Homo sapiens
  misc_RNA (1)...(19): siRNA sense strand
gcucaaacuuggacaguga

SEQ ID NO: 1614011 - RNA, 19 nt, Homo sapiens
  misc_RNA (1)...(19): siRNA sense strand
gacagcagaugaaggaauu

SEQ ID NO: 1614012 - RNA, 19 nt, Homo sapiens
  misc_RNA (1)...(19): siRNA sense strand
caagcaaucucccaucuuc

SEQ ID NO: 1614013 - RNA, 19 nt, Homo sapiens
  misc_RNA (1)...(19): siRNA sense strand
agaaacagaucgaccagaa

SEQ ID NO: 1614014 - RNA, 19 nt, Homo sapiens
  misc_RNA (1)...(19): siRNA sense strand
ccaaauaugccuccagauu

SEQ ID NO: 1614015 - RNA, 19 nt, Homo sapiens
  misc_RNA (1)...(19): siRNA sense strand
aaaguuagcagaccaguuu

SEQ ID NO: 1614016 - RNA, 19 nt, Homo sapiens
  misc_RNA (1)...(19): siRNA sense strand
gcagacauacaucauuuaa

SEQ ID NO: 1614017 - RNA, 19 nt, Homo sapiens
  misc_RNA (1)...(19): siRNA sense strand
ugaagagguuagaauauga

SEQ ID NO: 1614018 - RNA, 19 nt, Homo sapiens
  misc_RNA (1)...(19): siRNA sense strand
gugaagagguuagaauaug

SEQ ID NO: 1614019 - RNA, 19 nt, Homo sapiens
  misc_RNA (1)...(19): siRNA sense strand
ggacagagucagugauuuc

SEQ ID NO: 1614020 - RNA, 19 nt, Homo sapiens
  misc_RNA (1)...(19): siRNA sense strand
uggcagacauacaucauuu

SEQ ID NO: 1614021 - RNA, 19 nt, Homo sapiens
  misc_RNA (1)...(19): siRNA sense strand
caaccucucuccccaaaua

SEQ ID NO: 1614022 - RNA, 19 nt, Homo sapiens
  misc_RNA (1)...(19): siRNA sense strand
cugagaauguugcagauaa

SEQ ID NO: 1614023 - RNA, 19 nt, Homo sapiens
  misc_RNA (1)...(19): siRNA sense strand
gaacgagagcuucaaaugg

SEQ ID NO: 1614024 - RNA, 19 nt, Homo sapiens
  misc_RNA (1)...(19): siRNA sense strand
caaauaugccuccagauuc

SEQ ID NO: 1614025 - RNA, 19 nt, Homo sapiens
  misc_RNA (1)...(19): siRNA sense strand
aaauaugccuccagauuca

SEQ ID NO: 1614026 - RNA, 19 nt, Homo sapiens
  misc_RNA (1)...(19): siRNA sense strand
ggacagugaacccagaauu

SEQ ID NO: 1614027 - RNA, 19 nt, Homo sapiens
  misc_RNA (1)...(19): siRNA sense strand
ccaguccucuucagcguuu

SEQ ID NO: 1614028 - RNA, 19 nt, Homo sapiens
  misc_RNA (1)...(19): siRNA sense strand
caaaugauggaaaggaauu

SEQ ID NO: 1614029 - RNA, 19 nt, Homo sapiens
  misc_RNA (1)...(19): siRNA sense strand
gaagagguuagaauaugaa

SEQ ID NO: 1614030 - RNA, 19 nt, Homo sapiens
  misc_RNA (1)...(19): siRNA sense strand
acaaucaaguaguaccuaa

SEQ ID NO: 1614031 - RNA, 19 nt, Homo sapiens
  misc_RNA (1)...(19): siRNA sense strand
aacgagagcuucaaaugga

SEQ ID NO: 1614032 - RNA, 19 nt, Homo sapiens
  misc_RNA (1)...(19): siRNA sense strand
auacuuaccuugugaagag

SEQ ID NO: 1614033 - RNA, 19 nt, Homo sapiens
  misc_RNA (1)...(19): siRNA sense strand
gagguuagaauaugaaagu

SEQ ID NO: 1614034 - RNA, 19 nt, Homo sapiens
  misc_RNA (1)...(19): siRNA sense strand
gacuauaggaagaacaaua

SEQ ID NO: 1614035 - RNA, 19 nt, Homo sapiens
  misc_RNA (1)...(19): siRNA sense strand
uaaagcaggcuaccaagga

SEQ ID NO: 1614036 - RNA, 19 nt, Homo sapiens
  misc_RNA (1)...(19): siRNA sense strand
gcagaugaaggaauugaga

SEQ ID NO: 1614037 - RNA, 19 nt, Homo sapiens
  misc_RNA (1)...(19): siRNA sense strand
agaacaacauaucguauca

SEQ ID NO: 1614038 - RNA, 19 nt, Homo sapiens
  misc_RNA (1)...(19): siRNA sense strand
aagaccagcuucaggacua

SEQ ID NO: 1614039 - RNA, 19 nt, Homo sapiens
  misc_RNA (1)...(19): siRNA sense strand
gaauguugcagauaagaau

SEQ ID NO: 1614040 - RNA, 19 nt, Homo sapiens
  misc_RNA (1)...(19): siRNA sense strand
caaaagagguggugaugca

SEQ ID NO: 1614041 - RNA, 19 nt, Homo sapiens
  misc_RNA (1)...(19): siRNA sense strand
aaaaguagcugagaauguu

SEQ ID NO: 1614042 - RNA, 19 nt, Homo sapiens
  misc_RNA (1)...(19): siRNA sense strand
agucagugauuuccauaaa

SEQ ID NO: 1614043 - RNA, 19 nt, Homo sapiens
  misc_RNA (1)...(19): siRNA sense strand
ugaagaacccucaagcaau

SEQ ID NO: 1614044 - RNA, 19 nt, Homo sapiens
  misc_RNA (1)...(19): siRNA sense strand
ugaaagucaucaagcaauc

SEQ ID NO: 1614045 - RNA, 19 nt, Homo sapiens
  misc_RNA (1)...(19): siRNA sense strand
gauggaaaggaauuggaua

SEQ ID NO: 1614046 - RNA, 19 nt, Homo sapiens
  misc_RNA (1)...(19): siRNA sense strand
gaagccuccuauuucaguu

SEQ ID NO: 1614047 - RNA, 19 nt, Homo sapiens
  misc_RNA (1)...(19): siRNA sense strand
ggaagccuccuauuucagu

SEQ ID NO: 1614048 - RNA, 19 nt, Homo sapiens
  misc_RNA (1)...(19): siRNA sense strand
agggaugccuggaauagaa

SEQ ID NO: 1614049 - RNA, 19 nt, Homo sapiens
  misc_RNA (1)...(19): siRNA sense strand
gcgaggaugacaagguuaa

SEQ ID NO: 1614050 - RNA, 19 nt, Homo sapiens
  misc_RNA (1)...(19): siRNA sense strand
aaauggauccugcagacua

SEQ ID NO: 1614051 - RNA, 19 nt, Homo sapiens
  misc_RNA (1)...(19): siRNA sense strand
acacauaaaccacaaugga

SEQ ID NO: 1614052 - RNA, 19 nt, Homo sapiens
  misc_RNA (1)...(19): siRNA sense strand
gcaagagacccaaaagauu

SEQ ID NO: 1614053 - RNA, 19 nt, Homo sapiens
  misc_RNA (1)...(19): siRNA sense strand
ucaggaauuucuucgacaa

SEQ ID NO: 1614054 - RNA, 19 nt, Homo sapiens
  misc_RNA (1)...(19): siRNA sense strand
ggaugacaagguuaaacua

SEQ ID NO: 1614055 - RNA, 19 nt, Homo sapiens
  misc_RNA (1)...(19): siRNA sense strand
aacaacauaucguaucaga

SEQ ID NO: 1614056 - RNA, 19 nt, Homo sapiens
  misc_RNA (1)...(19): siRNA sense strand
gccuccagauucacacaua

SEQ ID NO: 1614057 - RNA, 19 nt, Homo sapiens
  misc_RNA (1)...(19): siRNA sense strand
gagcacagcaugaagaaaa

SEQ ID NO: 1614058 - RNA, 19 nt, Homo sapiens
  misc_RNA (1)...(19): siRNA sense strand
gagagcacagcaugaagaa

SEQ ID NO: 1614059 - RNA, 19 nt, Homo sapiens
  misc_RNA (1)...(19): siRNA sense strand
ggacagcagaugaaggaau

SEQ ID NO: 1614060 - RNA, 19 nt, Homo sapiens
  misc_RNA (1)...(19): siRNA sense strand
gaagagaaugaccuagcaa

SEQ ID NO: 1614061 - RNA, 19 nt, Homo sapiens
  misc_RNA (1)...(19): siRNA sense strand
ggaagagaugcgaggauga

SEQ ID NO: 1614062 - RNA, 19 nt, Homo sapiens
  misc_RNA (1)...(19): siRNA sense strand
gaacccucaagcaaucaua

SEQ ID NO: 1614063 - RNA, 19 nt, Homo sapiens
  misc_RNA (1)...(19): siRNA sense strand
ugggaaagaacaaaucaaa

SEQ ID NO: 1614064 - RNA, 19 nt, Homo sapiens
  misc_RNA (1)...(19): siRNA sense strand
gacagugaacccagaauuc

SEQ ID NO: 1614065 - RNA, 19 nt, Homo sapiens
  misc_RNA (1)...(19): siRNA sense strand
agaagagaaugaccuagca

SEQ ID NO: 1614066 - RNA, 19 nt, Homo sapiens
  misc_RNA (1)...(19): siRNA sense strand
ggaaagaacaaaucaaaag

SEQ ID NO: 1614067 - RNA, 19 nt, Homo sapiens
  misc_RNA (1)...(19): siRNA sense strand
ugacaagguuaaacuacag

SEQ ID NO: 1614068 - RNA, 19 nt, Homo sapiens
  misc_RNA (1)...(19): siRNA sense strand
gaacccagaauucaaacag

SEQ ID NO: 1614069 - RNA, 19 nt, Homo sapiens
  misc_RNA (1)...(19): siRNA sense strand
acauaaaccacaauggaaa

SEQ ID NO: 1614070 - RNA, 19 nt, Homo sapiens
  misc_RNA (1)...(19): siRNA sense strand
ccuccagauucacacauaa

SEQ ID NO: 1614071 - RNA, 19 nt, Homo sapiens
  misc_RNA (1)...(19): siRNA sense strand
ggcagacauacaucauuua

SEQ ID NO: 1614072 - RNA, 19 nt, Homo sapiens
  misc_RNA (1)...(19): siRNA sense strand
cacauaaaccacaauggaa

SEQ ID NO: 1614073 - RNA, 19 nt, Homo sapiens
  misc_RNA (1)...(19): siRNA sense strand
gcgcaauucggaccucuug

SEQ ID NO: 1614074 - RNA, 19 nt, Homo sapiens
  misc_RNA (1)...(19): siRNA sense strand
agaacgagagcuucaaaug

SEQ ID NO: 1614075 - RNA, 19 nt, Homo sapiens
  misc_RNA (1)...(19): siRNA sense strand
ccaaggacagagucaguga

SEQ ID NO: 1614076 - RNA, 19 nt, Homo sapiens
  misc_RNA (1)...(19): siRNA sense strand
ucagauggcagacauacau

SEQ ID NO: 1614077 - RNA, 19 nt, Homo sapiens
  misc_RNA (1)...(19): siRNA sense strand
gguggacacgcacaagaaa

SEQ ID NO: 1614078 - RNA, 19 nt, Homo sapiens
  misc_RNA (1)...(19): siRNA sense strand
gcugagaauguugcagaua

SEQ ID NO: 1614079 - RNA, 19 nt, Homo sapiens
  misc_RNA (1)...(19): siRNA sense strand
ugagagcacagcaugaaga

SEQ ID NO: 1614080 - RNA, 19 nt, Homo sapiens
  misc_RNA (1)...(19): siRNA sense strand
ggaagaacaauacuuaccu

SEQ ID NO: 1614081 - RNA, 19 nt, Homo sapiens
  misc_RNA (1)...(19): siRNA sense strand
guggacagcagaugaagga

SEQ ID NO: 1614082 - RNA, 19 nt, Homo sapiens
  misc_RNA (1)...(19): siRNA sense strand
cagagucagugauuuccau

SEQ ID NO: 1614083 - RNA, 19 nt, Homo sapiens
  misc_RNA (1)...(19): siRNA sense strand
gagaauguugcagauaaga

SEQ ID NO: 1614084 - RNA, 19 nt, Homo sapiens
  misc_RNA (1)...(19): siRNA sense strand
ugagaauguugcagauaag

SEQ ID NO: 1614085 - RNA, 19 nt, Homo sapiens
  misc_RNA (1)...(19): siRNA sense strand
uggaaaggaauuggauaua

SEQ ID NO: 1614086 - RNA, 19 nt, Homo sapiens
  misc_RNA (1)...(19): siRNA sense strand
uacagaacaacauaucgua

SEQ ID NO: 1614087 - RNA, 19 nt, Homo sapiens
  misc_RNA (1)...(19): siRNA sense strand
gaaacagaucgaccagaag

SEQ ID NO: 1614088 - RNA, 19 nt, Homo sapiens
  misc_RNA (1)...(19): siRNA sense strand
ccacaugggaaagaacaaa

SEQ ID NO: 1614089 - RNA, 19 nt, Homo sapiens
  misc_RNA (1)...(19): siRNA sense strand
cguaucagauggcagacau

SEQ ID NO: 1614090 - RNA, 19 nt, Homo sapiens
  misc_RNA (1)...(19): siRNA sense strand
aauggauccugcagacuau

SEQ ID NO: 1614091 - RNA, 19 nt, Homo sapiens
  misc_RNA (1)...(19): siRNA sense strand
gagaugcgaggaugacaag

SEQ ID NO: 1614092 - RNA, 19 nt, Homo sapiens
  misc_RNA (1)...(19): siRNA sense strand
gaugacaagguuaaacuac

SEQ ID NO: 1614093 - RNA, 19 nt, Homo sapiens
  misc_RNA (1)...(19): siRNA sense strand
caagagacccaaaagauuc

SEQ ID NO: 1614094 - RNA, 19 nt, Homo sapiens
  misc_RNA (1)...(19): siRNA sense strand
ccagaauucaaacagauau

SEQ ID NO: 1614095 - RNA, 19 nt, Homo sapiens
  misc_RNA (1)...(19): siRNA sense strand
gaagagaugcgaggaugac

SEQ ID NO: 1614096 - RNA, 19 nt, Homo sapiens
  misc_RNA (1)...(19): siRNA sense strand
cagaacaacauaucguauc

SEQ ID NO: 1614097 - RNA, 19 nt, Homo sapiens
  misc_RNA (1)...(19): siRNA sense strand
aauagaagagaaugaccua

SEQ ID NO: 1614098 - RNA, 19 nt, Homo sapiens
  misc_RNA (1)...(19): siRNA sense strand
ccucuucagcguuuaauuc

SEQ ID NO: 1614099 - RNA, 19 nt, Homo sapiens
  misc_RNA (1)...(19): siRNA sense strand
auucggaccucuugcuguu

SEQ ID NO: 1614100 - RNA, 19 nt, Homo sapiens
  misc_RNA (1)...(19): siRNA sense strand
gacaaccucucuccccaaa

SEQ ID NO: 1614101 - RNA, 19 nt, Homo sapiens
  misc_RNA (1)...(19): siRNA sense strand
cuauuucaguuucucaaca

SEQ ID NO: 1614102 - RNA, 19 nt, Homo sapiens
  misc_RNA (1)...(19): siRNA sense strand
caaucaaguaguaccuaaa

SEQ ID NO: 1614103 - RNA, 19 nt, Homo sapiens
  misc_RNA (1)...(19): siRNA sense strand
ugagcuucgucaggaauuu

SEQ ID NO: 1614104 - RNA, 19 nt, Homo sapiens
  misc_RNA (1)...(19): siRNA sense strand
agguuaaacuacagaacaa

SEQ ID NO: 1614105 - RNA, 19 nt, Homo sapiens
  misc_RNA (1)...(19): siRNA sense strand
gaaagucaucaagcaaucu

SEQ ID NO: 1614106 - RNA, 19 nt, Homo sapiens
  misc_RNA (1)...(19): siRNA sense strand
ggaaaggaauuggauauaa

SEQ ID NO: 1614107 - RNA, 19 nt, Homo sapiens
  misc_RNA (1)...(19): siRNA sense strand
gaagaacccucaagcaauc

SEQ ID NO: 1614108 - RNA, 19 nt, Homo sapiens
  misc_RNA (1)...(19): siRNA sense strand
caacauaucguaucagaug

SEQ ID NO: 1614109 - RNA, 19 nt, Homo sapiens
  misc_RNA (1)...(19): siRNA sense strand
gaagaacaauacuuaccuu

SEQ ID NO: 1614110 - RNA, 19 nt, Homo sapiens
  misc_RNA (1)...(19): siRNA sense strand
gcucaaacuuggacaguga

SEQ ID NO: 1614111 - RNA, 19 nt, Homo sapiens
  misc_RNA (1)...(19): siRNA sense strand
gacagcagaugaaggaauu

SEQ ID NO: 1614112 - RNA, 19 nt, Homo sapiens
  misc_RNA (1)...(19): siRNA sense strand
caagcaaucucccaucuuc

SEQ ID NO: 1614113 - RNA, 19 nt, Homo sapiens
  misc_RNA (1)...(19): siRNA sense strand
agaaacagaucgaccagaa

SEQ ID NO: 1614114 - RNA, 19 nt, Homo sapiens
  misc_RNA (1)...(19): siRNA sense strand
ccaaauaugccuccagauu

SEQ ID NO: 1614115 - RNA, 19 nt, Homo sapiens
  misc_RNA (1)...(19): siRNA sense strand
aaaguuagcagaccaguuu

SEQ ID NO: 1614116 - RNA, 19 nt, Homo sapiens
  misc_RNA (1)...(19): siRNA sense strand
gcagacauacaucauuuaa

SEQ ID NO: 1614117 - RNA, 19 nt, Homo sapiens
  misc_RNA (1)...(19): siRNA sense strand
ugaagagguuagaauauga

SEQ ID NO: 1614118 - RNA, 19 nt, Homo sapiens
  misc_RNA (1)...(19): siRNA sense strand
gugaagagguuagaauaug

SEQ ID NO: 1614119 - RNA, 19 nt, Homo sapiens
  misc_RNA (1)...(19): siRNA sense strand
ggacagagucagugauuuc

SEQ ID NO: 1614120 - RNA, 19 nt, Homo sapiens
  misc_RNA (1)...(19): siRNA sense strand
uggcagacauacaucauuu

SEQ ID NO: 1614121 - RNA, 19 nt, Homo sapiens
  misc_RNA (1)...(19): siRNA sense strand
caaccucucuccccaaaua

SEQ ID NO: 1614122 - RNA, 19 nt, Homo sapiens
  misc_RNA (1)...(19): siRNA sense strand
cugagaauguugcagauaa

SEQ ID NO: 1614123 - RNA, 19 nt, Homo sapiens
  misc_RNA (1)...(19): siRNA sense strand
gaacgagagcuucaaaugg

SEQ ID NO: 1614124 - RNA, 19 nt, Homo sapiens
  misc_RNA (1)...(19): siRNA sense strand
caaauaugccuccagauuc

SEQ ID NO: 1614125 - RNA, 19 nt, Homo sapiens
  misc_RNA (1)...(19): siRNA sense strand
aaauaugccuccagauuca

SEQ ID NO: 1614126 - RNA, 19 nt, Homo sapiens
  misc_RNA (1)...(19): siRNA sense strand
ggacagugaacccagaauu

SEQ ID NO: 1614127 - RNA, 19 nt, Homo sapiens
  misc_RNA (1)...(19): siRNA sense strand
ccaguccucuucagcguuu

SEQ ID NO: 1614128 - RNA, 19 nt, Homo sapiens
  misc_RNA (1)...(19): siRNA sense strand
caaaugauggaaaggaauu

SEQ ID NO: 1614129 - RNA, 19 nt, Homo sapiens
  misc_RNA (1)...(19): siRNA sense strand
gaagagguuagaauaugaa

SEQ ID NO: 1614130 - RNA, 19 nt, Homo sapiens
  misc_RNA (1)...(19): siRNA sense strand
acaaucaaguaguaccuaa

SEQ ID NO: 1614131 - RNA, 19 nt, Homo sapiens
  misc_RNA (1)...(19): siRNA sense strand
aacgagagcuucaaaugga

SEQ ID NO: 1614132 - RNA, 19 nt, Homo sapiens
  misc_RNA (1)...(19): siRNA sense strand
auacuuaccuugugaagag

SEQ ID NO: 1614133 - RNA, 19 nt, Homo sapiens
  misc_RNA (1)...(19): siRNA sense strand
gagguuagaauaugaaagu

SEQ ID NO: 1614134 - RNA, 19 nt, Homo sapiens
  misc_RNA (1)...(19): siRNA sense strand
gacuauaggaagaacaaua

SEQ ID NO: 1614135 - RNA, 19 nt, Homo sapiens
  misc_RNA (1)...(19): siRNA sense strand
uaaagcaggcuaccaagga

SEQ ID NO: 1614136 - RNA, 19 nt, Homo sapiens
  misc_RNA (1)...(19): siRNA sense strand
gcagaugaaggaauugaga

SEQ ID NO: 1614137 - RNA, 19 nt, Homo sapiens
  misc_RNA (1)...(19): siRNA sense strand
agaacaacauaucguauca

SEQ ID NO: 1614138 - RNA, 19 nt, Homo sapiens
  misc_RNA (1)...(19): siRNA sense strand
aagaccagcuucaggacua

SEQ ID NO: 1614139 - RNA, 19 nt, Homo sapiens
  misc_RNA (1)...(19): siRNA sense strand
gaauguugcagauaagaau

SEQ ID NO: 1614140 - RNA, 19 nt, Homo sapiens
  misc_RNA (1)...(19): siRNA sense strand
caaaagagguggugaugca

SEQ ID NO: 1614141 - RNA, 19 nt, Homo sapiens
  misc_RNA (1)...(19): siRNA sense strand
aaaaguagcugagaauguu

SEQ ID NO: 1614142 - RNA, 19 nt, Homo sapiens
  misc_RNA (1)...(19): siRNA sense strand
agucagugauuuccauaaa

SEQ ID NO: 1614143 - RNA, 19 nt, Homo sapiens
  misc_RNA (1)...(19): siRNA sense strand
ugaagaacccucaagcaau

SEQ ID NO: 1614144 - RNA, 19 nt, Homo sapiens
  misc_RNA (1)...(19): siRNA sense strand
ugaaagucaucaagcaauc

SEQ ID NO: 1614145 - RNA, 19 nt, Homo sapiens
  misc_RNA (1)...(19): siRNA sense strand
gauggaaaggaauuggaua

SEQ ID NO: 1614146 - RNA, 19 nt, Homo sapiens
  misc_RNA (1)...(19): siRNA sense strand
gaagccuccuauuucaguu

SEQ ID NO: 1614147 - RNA, 19 nt, Homo sapiens
  misc_RNA (1)...(19): siRNA sense strand
ggaagccuccuauuucagu

SEQ ID NO: 1614148 - RNA, 19 nt, Homo sapiens
  misc_RNA (1)...(19): siRNA sense strand
agggaugccuggaauagaa

SEQ ID NO: 1614149 - RNA, 19 nt, Homo sapiens
  misc_RNA (1)...(19): siRNA sense strand
gcgaggaugacaagguuaa

SEQ ID NO: 1614150 - RNA, 19 nt, Homo sapiens
  misc_RNA (1)...(19): siRNA sense strand
aaauggauccugcagacua

SEQ ID NO: 1614151 - RNA, 19 nt, Homo sapiens
  misc_RNA (1)...(19): siRNA sense strand
acacauaaaccacaaugga

SEQ ID NO: 1614152 - RNA, 19 nt, Homo sapiens
  misc_RNA (1)...(19): siRNA sense strand
gcaagagacccaaaagauu

SEQ ID NO: 1614153 - RNA, 19 nt, Homo sapiens
  misc_RNA (1)...(19): siRNA sense strand
ucaggaauuucuucgacaa

SEQ ID NO: 1614154 - RNA, 19 nt, Homo sapiens
  misc_RNA (1)...(19): siRNA sense strand
ggaugacaagguuaaacua

SEQ ID NO: 1614155 - RNA, 19 nt, Homo sapiens
  misc_RNA (1)...(19): siRNA sense strand
aacaacauaucguaucaga

SEQ ID NO: 1614156 - RNA, 19 nt, Homo sapiens
  misc_RNA (1)...(19): siRNA sense strand
gccuccagauucacacaua

SEQ ID NO: 1614157 - RNA, 19 nt, Homo sapiens
  misc_RNA (1)...(19): siRNA sense strand
gagcacagcaugaagaaaa

SEQ ID NO: 1614158 - RNA, 19 nt, Homo sapiens
  misc_RNA (1)...(19): siRNA sense strand
gagagcacagcaugaagaa

SEQ ID NO: 1614159 - RNA, 19 nt, Homo sapiens
  misc_RNA (1)...(19): siRNA sense strand
ggacagcagaugaaggaau

SEQ ID NO: 1614160 - RNA, 19 nt, Homo sapiens
  misc_RNA (1)...(19): siRNA sense strand
gaagagaaugaccuagcaa

SEQ ID NO: 1614161 - RNA, 19 nt, Homo sapiens
  misc_RNA (1)...(19): siRNA sense strand
ggaagagaugcgaggauga

SEQ ID NO: 1614162 - RNA, 19 nt, Homo sapiens
  misc_RNA (1)...(19): siRNA sense strand
gaacccucaagcaaucaua

SEQ ID NO: 1614163 - RNA, 19 nt, Homo sapiens
  misc_RNA (1)...(19): siRNA sense strand
ugggaaagaacaaaucaaa

SEQ ID NO: 1614164 - RNA, 19 nt, Homo sapiens
  misc_RNA (1)...(19): siRNA sense strand
gacagugaacccagaauuc

SEQ ID NO: 1614165 - RNA, 19 nt, Homo sapiens
  misc_RNA (1)...(19): siRNA sense strand
agaagagaaugaccuagca

SEQ ID NO: 1614166 - RNA, 19 nt, Homo sapiens
  misc_RNA (1)...(19): siRNA sense strand
ggaaagaacaaaucaaaag

SEQ ID NO: 1614167 - RNA, 19 nt, Homo sapiens
  misc_RNA (1)...(19): siRNA sense strand
ugacaagguuaaacuacag

SEQ ID NO: 1614168 - RNA, 19 nt, Homo sapiens
  misc_RNA (1)...(19): siRNA sense strand
gaacccagaauucaaacag

SEQ ID NO: 1614169 - RNA, 19 nt, Homo sapiens
  misc_RNA (1)...(19): siRNA sense strand
acauaaaccacaauggaaa

SEQ ID NO: 1614170 - RNA, 19 nt, Homo sapiens
  misc_RNA (1)...(19): siRNA sense strand
ccuccagauucacacauaa

SEQ ID NO: 1614171 - RNA, 19 nt, Homo sapiens
  misc_RNA (1)...(19): siRNA sense strand
ggcagacauacaucauuua

SEQ ID NO: 1614172 - RNA, 19 nt, Homo sapiens
  misc_RNA (1)...(19): siRNA sense strand
cacauaaaccacaauggaa

SEQ ID NO: 1614173 - RNA, 19 nt, Homo sapiens
  misc_RNA (1)...(19): siRNA sense strand
gcgcaauucggaccucuug

SEQ ID NO: 1614174 - RNA, 19 nt, Homo sapiens
  misc_RNA (1)...(19): siRNA sense strand
agaacgagagcuucaaaug

SEQ ID NO: 1614175 - RNA, 19 nt, Homo sapiens
  misc_RNA (1)...(19): siRNA sense strand
ccaaggacagagucaguga

SEQ ID NO: 1614176 - RNA, 19 nt, Homo sapiens
  misc_RNA (1)...(19): siRNA sense strand
ucagauggcagacauacau

SEQ ID NO: 1614177 - RNA, 19 nt, Homo sapiens
  misc_RNA (1)...(19): siRNA sense strand
gguggacacgcacaagaaa

SEQ ID NO: 1614178 - RNA, 19 nt, Homo sapiens
  misc_RNA (1)...(19): siRNA sense strand
gcugagaauguugcagaua

SEQ ID NO: 1614179 - RNA, 19 nt, Homo sapiens
  misc_RNA (1)...(19): siRNA sense strand
ugagagcacagcaugaaga

SEQ ID NO: 1614180 - RNA, 19 nt, Homo sapiens
  misc_RNA (1)...(19): siRNA sense strand
ggaagaacaauacuuaccu

SEQ ID NO: 1614181 - RNA, 19 nt, Homo sapiens
  misc_RNA (1)...(19): siRNA sense strand
guggacagcagaugaagga

SEQ ID NO: 1614182 - RNA, 19 nt, Homo sapiens
  misc_RNA (1)...(19): siRNA sense strand
cagagucagugauuuccau

SEQ ID NO: 1614183 - RNA, 19 nt, Homo sapiens
  misc_RNA (1)...(19): siRNA sense strand
gagaauguugcagauaaga

SEQ ID NO: 1614184 - RNA, 19 nt, Homo sapiens
  misc_RNA (1)...(19): siRNA sense strand
ugagaauguugcagauaag

SEQ ID NO: 1614185 - RNA, 19 nt, Homo sapiens
  misc_RNA (1)...(19): siRNA sense strand
uggaaaggaauuggauaua

SEQ ID NO: 1614186 - RNA, 19 nt, Homo sapiens
  misc_RNA (1)...(19): siRNA sense strand
uacagaacaacauaucgua

SEQ ID NO: 1614187 - RNA, 19 nt, Homo sapiens
  misc_RNA (1)...(19): siRNA sense strand
gaaacagaucgaccagaag

SEQ ID NO: 1614188 - RNA, 19 nt, Homo sapiens
  misc_RNA (1)...(19): siRNA sense strand
ccacaugggaaagaacaaa

SEQ ID NO: 1614189 - RNA, 19 nt, Homo sapiens
  misc_RNA (1)...(19): siRNA sense strand
cguaucagauggcagacau

SEQ ID NO: 1614190 - RNA, 19 nt, Homo sapiens
  misc_RNA (1)...(19): siRNA sense strand
aauggauccugcagacuau

SEQ ID NO: 1614191 - RNA, 19 nt, Homo sapiens
  misc_RNA (1)...(19): siRNA sense strand
gagaugcgaggaugacaag

SEQ ID NO: 1614192 - RNA, 19 nt, Homo sapiens
  misc_RNA (1)...(19): siRNA sense strand
gaugacaagguuaaacuac

SEQ ID NO: 1614193 - RNA, 19 nt, Homo sapiens
  misc_RNA (1)...(19): siRNA sense strand
caagagacccaaaagauuc

SEQ ID NO: 1614194 - RNA, 19 nt, Homo sapiens
  misc_RNA (1)...(19): siRNA sense strand
ccagaauucaaacagauau

SEQ ID NO: 1614195 - RNA, 19 nt, Homo sapiens
  misc_RNA (1)...(19): siRNA sense strand
gaagagaugcgaggaugac

SEQ ID NO: 1614196 - RNA, 19 nt, Homo sapiens
  misc_RNA (1)...(19): siRNA sense strand
cagaacaacauaucguauc

SEQ ID NO: 1614197 - RNA, 19 nt, Homo sapiens
  misc_RNA (1)...(19): siRNA sense strand
aauagaagagaaugaccua

SEQ ID NO: 1614198 - RNA, 19 nt, Homo sapiens
  misc_RNA (1)...(19): siRNA sense strand
ccucuucagcguuuaauuc

SEQ ID NO: 1614199 - RNA, 19 nt, Homo sapiens
  misc_RNA (1)...(19): siRNA sense strand
auucggaccucuugcuguu

SEQ ID NO: 1614200 - RNA, 19 nt, Homo sapiens
  misc_RNA (1)...(19): siRNA sense strand
gacaaccucucuccccaaa

SEQ ID NO: 1614201 - RNA, 19 nt, Homo sapiens
  misc_RNA (1)...(19): siRNA sense strand
cuauuucaguuucucaaca

SEQ ID NO: 1614202 - RNA, 19 nt, Homo sapiens
  misc_RNA (1)...(19): siRNA sense strand
caaucaaguaguaccuaaa

SEQ ID NO: 1614203 - RNA, 19 nt, Homo sapiens
  misc_RNA (1)...(19): siRNA sense strand
ugagcuucgucaggaauuu

SEQ ID NO: 1614204 - RNA, 19 nt, Homo sapiens
  misc_RNA (1)...(19): siRNA sense strand
agguuaaacuacagaacaa

SEQ ID NO: 1614205 - RNA, 19 nt, Homo sapiens
  misc_RNA (1)...(19): siRNA sense strand
gaaagucaucaagcaaucu

SEQ ID NO: 1614206 - RNA, 19 nt, Homo sapiens
  misc_RNA (1)...(19): siRNA sense strand
ggaaaggaauuggauauaa

SEQ ID NO: 1614207 - RNA, 19 nt, Homo sapiens
  misc_RNA (1)...(19): siRNA sense strand
gaagaacccucaagcaauc

SEQ ID NO: 1614208 - RNA, 19 nt, Homo sapiens
  misc_RNA (1)...(19): siRNA sense strand
caacauaucguaucagaug

SEQ ID NO: 1614209 - RNA, 19 nt, Homo sapiens
  misc_RNA (1)...(19): siRNA sense strand
gaagaacaauacuuaccuu

SEQ ID NO: 1614210 - RNA, 19 nt, Homo sapiens
  misc_RNA (1)...(19): siRNA sense strand
gcucaaacuuggacaguga

SEQ ID NO: 1614211 - RNA, 19 nt, Homo sapiens
  misc_RNA (1)...(19): siRNA sense strand
gacagcagaugaaggaauu

SEQ ID NO: 1614212 - RNA, 19 nt, Homo sapiens
  misc_RNA (1)...(19): siRNA sense strand
caagcaaucucccaucuuc

SEQ ID NO: 1614213 - RNA, 19 nt, Homo sapiens
  misc_RNA (1)...(19): siRNA sense strand
agaaacagaucgaccagaa

SEQ ID NO: 1614214 - RNA, 19 nt, Homo sapiens
  misc_RNA (1)...(19): siRNA sense strand
ccaaauaugccuccagauu

SEQ ID NO: 1614215 - RNA, 19 nt, Homo sapiens
  misc_RNA (1)...(19): siRNA sense strand
aaaguuagcagaccaguuu

SEQ ID NO: 1614216 - RNA, 19 nt, Homo sapiens
  misc_RNA (1)...(19): siRNA sense strand
gcagacauacaucauuuaa

SEQ ID NO: 1614217 - RNA, 19 nt, Homo sapiens
  misc_RNA (1)...(19): siRNA sense strand
ugaagagguuagaauauga

SEQ ID NO: 1614218 - RNA, 19 nt, Homo sapiens
  misc_RNA (1)...(19): siRNA sense strand
gugaagagguuagaauaug

SEQ ID NO: 1614219 - RNA, 19 nt, Homo sapiens
  misc_RNA (1)...(19): siRNA sense strand
ggacagagucagugauuuc

SEQ ID NO: 1614220 - RNA, 19 nt, Homo sapiens
  misc_RNA (1)...(19): siRNA sense strand
uggcagacauacaucauuu

SEQ ID NO: 1614221 - RNA, 19 nt, Homo sapiens
  misc_RNA (1)...(19): siRNA sense strand
caaccucucuccccaaaua

SEQ ID NO: 1614222 - RNA, 19 nt, Homo sapiens
  misc_RNA (1)...(19): siRNA sense strand
cugagaauguugcagauaa

SEQ ID NO: 1614223 - RNA, 19 nt, Homo sapiens
  misc_RNA (1)...(19): siRNA sense strand
gaacgagagcuucaaaugg

SEQ ID NO: 1614224 - RNA, 19 nt, Homo sapiens
  misc_RNA (1)...(19): siRNA sense strand
caaauaugccuccagauuc

SEQ ID NO: 1614225 - RNA, 19 nt, Homo sapiens
  misc_RNA (1)...(19): siRNA sense strand
aaauaugccuccagauuca

SEQ ID NO: 1614226 - RNA, 19 nt, Homo sapiens
  misc_RNA (1)...(19): siRNA sense strand
ggacagugaacccagaauu

SEQ ID NO: 1614227 - RNA, 19 nt, Homo sapiens
  misc_RNA (1)...(19): siRNA sense strand
ccaguccucuucagcguuu

SEQ ID NO: 1614228 - RNA, 19 nt, Homo sapiens
  misc_RNA (1)...(19): siRNA sense strand
caaaugauggaaaggaauu

SEQ ID NO: 1614229 - RNA, 19 nt, Homo sapiens
  misc_RNA (1)...(19): siRNA sense strand
gaagagguuagaauaugaa

SEQ ID NO: 1614230 - RNA, 19 nt, Homo sapiens
  misc_RNA (1)...(19): siRNA sense strand
acaaucaaguaguaccuaa

SEQ ID NO: 1614231 - RNA, 19 nt, Homo sapiens
  misc_RNA (1)...(19): siRNA sense strand
aacgagagcuucaaaugga

SEQ ID NO: 1614232 - RNA, 19 nt, Homo sapiens
  misc_RNA (1)...(19): siRNA sense strand
auacuuaccuugugaagag

SEQ ID NO: 1614233 - RNA, 19 nt, Homo sapiens
  misc_RNA (1)...(19): siRNA sense strand
gagguuagaauaugaaagu

SEQ ID NO: 1614234 - RNA, 19 nt, Homo sapiens
  misc_RNA (1)...(19): siRNA sense strand
gacuauaggaagaacaaua

SEQ ID NO: 1614235 - RNA, 19 nt, Homo sapiens
  misc_RNA (1)...(19): siRNA sense strand
uaaagcaggcuaccaagga

SEQ ID NO: 1614236 - RNA, 19 nt, Homo sapiens
  misc_RNA (1)...(19): siRNA sense strand
gcagaugaaggaauugaga

SEQ ID NO: 1614237 - RNA, 19 nt, Homo sapiens
  misc_RNA (1)...(19): siRNA sense strand
agaacaacauaucguauca

SEQ ID NO: 1614238 - RNA, 19 nt, Homo sapiens
  misc_RNA (1)...(19): siRNA sense strand
aagaccagcuucaggacua

SEQ ID NO: 1614239 - RNA, 19 nt, Homo sapiens
  misc_RNA (1)...(19): siRNA sense strand
gaauguugcagauaagaau

SEQ ID NO: 1614240 - RNA, 19 nt, Homo sapiens
  misc_RNA (1)...(19): siRNA sense strand
caaaagagguggugaugca

SEQ ID NO: 1614241 - RNA, 19 nt, Homo sapiens
  misc_RNA (1)...(19): siRNA sense strand
aaaaguagcugagaauguu

SEQ ID NO: 1614242 - RNA, 19 nt, Homo sapiens
  misc_RNA (1)...(19): siRNA sense strand
agucagugauuuccauaaa

SEQ ID NO: 1614243 - RNA, 19 nt, Homo sapiens
  misc_RNA (1)...(19): siRNA sense strand
ugaagaacccucaagcaau

SEQ ID NO: 1614244 - RNA, 19 nt, Homo sapiens
  misc_RNA (1)...(19): siRNA sense strand
ugaaagucaucaagcaauc

SEQ ID NO: 1614245 - RNA, 19 nt, Homo sapiens
  misc_RNA (1)...(19): siRNA sense strand
gauggaaaggaauuggaua

SEQ ID NO: 1614246 - RNA, 19 nt, Homo sapiens
  misc_RNA (1)...(19): siRNA sense strand
gaagccuccuauuucaguu

SEQ ID NO: 1614247 - RNA, 19 nt, Homo sapiens
  misc_RNA (1)...(19): siRNA sense strand
ggaagccuccuauuucagu

SEQ ID NO: 1614248 - RNA, 19 nt, Homo sapiens
  misc_RNA (1)...(19): siRNA sense strand
agggaugccuggaauagaa

SEQ ID NO: 1614249 - RNA, 19 nt, Homo sapiens
  misc_RNA (1)...(19): siRNA sense strand
gcgaggaugacaagguuaa

SEQ ID NO: 1614250 - RNA, 19 nt, Homo sapiens
  misc_RNA (1)...(19): siRNA sense strand
aaauggauccugcagacua

SEQ ID NO: 1614251 - RNA, 19 nt, Homo sapiens
  misc_RNA (1)...(19): siRNA sense strand
acacauaaaccacaaugga

SEQ ID NO: 1614252 - RNA, 19 nt, Homo sapiens
  misc_RNA (1)...(19): siRNA sense strand
gcaagagacccaaaagauu

SEQ ID NO: 1614253 - RNA, 19 nt, Homo sapiens
  misc_RNA (1)...(19): siRNA sense strand
ucaggaauuucuucgacaa

SEQ ID NO: 1614254 - RNA, 19 nt, Homo sapiens
  misc_RNA (1)...(19): siRNA sense strand
ggaugacaagguuaaacua

SEQ ID NO: 1614255 - RNA, 19 nt, Homo sapiens
  misc_RNA (1)...(19): siRNA sense strand
aacaacauaucguaucaga

SEQ ID NO: 1614256 - RNA, 19 nt, Homo sapiens
  misc_RNA (1)...(19): siRNA sense strand
gccuccagauucacacaua

SEQ ID NO: 1614257 - RNA, 19 nt, Homo sapiens
  misc_RNA (1)...(19): siRNA sense strand
gagcacagcaugaagaaaa

SEQ ID NO: 1614258 - RNA, 19 nt, Homo sapiens
  misc_RNA (1)...(19): siRNA sense strand
gagagcacagcaugaagaa

SEQ ID NO: 1614259 - RNA, 19 nt, Homo sapiens
  misc_RNA (1)...(19): siRNA sense strand
ggacagcagaugaaggaau

SEQ ID NO: 1614260 - RNA, 19 nt, Homo sapiens
  misc_RNA (1)...(19): siRNA sense strand
gaagagaaugaccuagcaa

SEQ ID NO: 1614261 - RNA, 19 nt, Homo sapiens
  misc_RNA (1)...(19): siRNA sense strand
ggaagagaugcgaggauga

SEQ ID NO: 1614262 - RNA, 19 nt, Homo sapiens
  misc_RNA (1)...(19): siRNA sense strand
gaacccucaagcaaucaua

SEQ ID NO: 1614263 - RNA, 19 nt, Homo sapiens
  misc_RNA (1)...(19): siRNA sense strand
ugggaaagaacaaaucaaa

SEQ ID NO: 1614264 - RNA, 19 nt, Homo sapiens
  misc_RNA (1)...(19): siRNA sense strand
gacagugaacccagaauuc

SEQ ID NO: 1614265 - RNA, 19 nt, Homo sapiens
  misc_RNA (1)...(19): siRNA sense strand
agaagagaaugaccuagca

SEQ ID NO: 1614266 - RNA, 19 nt, Homo sapiens
  misc_RNA (1)...(19): siRNA sense strand
ggaaagaacaaaucaaaag

SEQ ID NO: 1614267 - RNA, 19 nt, Homo sapiens
  misc_RNA (1)...(19): siRNA sense strand
ugacaagguuaaacuacag

SEQ ID NO: 1614268 - RNA, 19 nt, Homo sapiens
  misc_RNA (1)...(19): siRNA sense strand
gaacccagaauucaaacag

SEQ ID NO: 1614269 - RNA, 19 nt, Homo sapiens
  misc_RNA (1)...(19): siRNA sense strand
acauaaaccacaauggaaa

SEQ ID NO: 1614270 - RNA, 19 nt, Homo sapiens
  misc_RNA (1)...(19): siRNA sense strand
ccuccagauucacacauaa

SEQ ID NO: 1614271 - RNA, 19 nt, Homo sapiens
  misc_RNA (1)...(19): siRNA sense strand
ggcagacauacaucauuua

SEQ ID NO: 1614272 - RNA, 19 nt, Homo sapiens
  misc_RNA (1)...(19): siRNA sense strand
cacauaaaccacaauggaa

SEQ ID NO: 1614273 - RNA, 19 nt, Homo sapiens
  misc_RNA (1)...(19): siRNA sense strand
gcgcaauucggaccucuug

SEQ ID NO: 1614274 - RNA, 19 nt, Homo sapiens
  misc_RNA (1)...(19): siRNA sense strand
agaacgagagcuucaaaug

SEQ ID NO: 1614275 - RNA, 19 nt, Homo sapiens
  misc_RNA (1)...(19): siRNA sense strand
ccaaggacagagucaguga

SEQ ID NO: 1614276 - RNA, 19 nt, Homo sapiens
  misc_RNA (1)...(19): siRNA sense strand
ucagauggcagacauacau

SEQ ID NO: 1614277 - RNA, 19 nt, Homo sapiens
  misc_RNA (1)...(19): siRNA sense strand
gguggacacgcacaagaaa

SEQ ID NO: 1614278 - RNA, 19 nt, Homo sapiens
  misc_RNA (1)...(19): siRNA sense strand
gcugagaauguugcagaua

SEQ ID NO: 1614279 - RNA, 19 nt, Homo sapiens
  misc_RNA (1)...(19): siRNA sense strand
ugagagcacagcaugaaga

SEQ ID NO: 1614280 - RNA, 19 nt, Homo sapiens
  misc_RNA (1)...(19): siRNA sense strand
ggaagaacaauacuuaccu

SEQ ID NO: 1614281 - RNA, 19 nt, Homo sapiens
  misc_RNA (1)...(19): siRNA sense strand
guggacagcagaugaagga

SEQ ID NO: 1614282 - RNA, 19 nt, Homo sapiens
  misc_RNA (1)...(19): siRNA sense strand
cagagucagugauuuccau

SEQ ID NO: 1614283 - RNA, 19 nt, Homo sapiens
  misc_RNA (1)...(19): siRNA sense strand
gagaauguugcagauaaga

SEQ ID NO: 1614284 - RNA, 19 nt, Homo sapiens
  misc_RNA (1)...(19): siRNA sense strand
ugagaauguugcagauaag

SEQ ID NO: 1614285 - RNA, 19 nt, Homo sapiens
  misc_RNA (1)...(19): siRNA sense strand
uggaaaggaauuggauaua

SEQ ID NO: 1614286 - RNA, 19 nt, Homo sapiens
  misc_RNA (1)...(19): siRNA sense strand
uacagaacaacauaucgua

SEQ ID NO: 1614287 - RNA, 19 nt, Homo sapiens
  misc_RNA (1)...(19): siRNA sense strand
gaaacagaucgaccagaag

SEQ ID NO: 1614288 - RNA, 19 nt, Homo sapiens
  misc_RNA (1)...(19): siRNA sense strand
ccacaugggaaagaacaaa

SEQ ID NO: 1614289 - RNA, 19 nt, Homo sapiens
  misc_RNA (1)...(19): siRNA sense strand
cguaucagauggcagacau

SEQ ID NO: 1614290 - RNA, 19 nt, Homo sapiens
  misc_RNA (1)...(19): siRNA sense strand
aauggauccugcagacuau

SEQ ID NO: 1614291 - RNA, 19 nt, Homo sapiens
  misc_RNA (1)...(19): siRNA sense strand
gagaugcgaggaugacaag

SEQ ID NO: 1614292 - RNA, 19 nt, Homo sapiens
  misc_RNA (1)...(19): siRNA sense strand
gaugacaagguuaaacuac

SEQ ID NO: 1614293 - RNA, 19 nt, Homo sapiens
  misc_RNA (1)...(19): siRNA sense strand
caagagacccaaaagauuc

SEQ ID NO: 1614294 - RNA, 19 nt, Homo sapiens
  misc_RNA (1)...(19): siRNA sense strand
ccagaauucaaacagauau

SEQ ID NO: 1614295 - RNA, 19 nt, Homo sapiens
  misc_RNA (1)...(19): siRNA sense strand
gaagagaugcgaggaugac

SEQ ID NO: 1614296 - RNA, 19 nt, Homo sapiens
  misc_RNA (1)...(19): siRNA sense strand
cagaacaacauaucguauc

SEQ ID NO: 1614297 - RNA, 19 nt, Homo sapiens
  misc_RNA (1)...(19): siRNA sense strand
aauagaagagaaugaccua

SEQ ID NO: 1614298 - RNA, 19 nt, Homo sapiens
  misc_RNA (1)...(19): siRNA sense strand
ccucuucagcguuuaauuc

SEQ ID NO: 1614299 - RNA, 19 nt, Homo sapiens
  misc_RNA (1)...(19): siRNA sense strand
auucggaccucuugcuguu

SEQ ID NO: 1614300 - RNA, 19 nt, Homo sapiens
  misc_RNA (1)...(19): siRNA sense strand
gacaaccucucuccccaaa

SEQ ID NO: 1614301 - RNA, 19 nt, Homo sapiens
  misc_RNA (1)...(19): siRNA sense strand
cuauuucaguuucucaaca

SEQ ID NO: 1614302 - RNA, 19 nt, Homo sapiens
  misc_RNA (1)...(19): siRNA sense strand
caaucaaguaguaccuaaa

SEQ ID NO: 1614303 - RNA, 19 nt, Homo sapiens
  misc_RNA (1)...(19): siRNA sense strand
ugagcuucgucaggaauuu

SEQ ID NO: 1614304 - RNA, 19 nt, Homo sapiens
  misc_RNA (1)...(19): siRNA sense strand
agguuaaacuacagaacaa

SEQ ID NO: 1614305 - RNA, 19 nt, Homo sapiens
  misc_RNA (1)...(19): siRNA sense strand
gaaagucaucaagcaaucu

SEQ ID NO: 1614306 - RNA, 19 nt, Homo sapiens
  misc_RNA (1)...(19): siRNA sense strand
ggaaaggaauuggauauaa

SEQ ID NO: 1614307 - RNA, 19 nt, Homo sapiens
  misc_RNA (1)...(19): siRNA sense strand
gaagaacccucaagcaauc

SEQ ID NO: 1614308 - RNA, 19 nt, Homo sapiens
  misc_RNA (1)...(19): siRNA sense strand
caacauaucguaucagaug

SEQ ID NO: 1614309 - RNA, 19 nt, Homo sapiens
  misc_RNA (1)...(19): siRNA sense strand
gaagaacaauacuuaccuu

SEQ ID NO: 1614310 - RNA, 19 nt, Homo sapiens
  misc_RNA (1)...(19): siRNA sense strand
gcucaaacuuggacaguga

SEQ ID NO: 1614311 - RNA, 19 nt, Homo sapiens
  misc_RNA (1)...(19): siRNA sense strand
gacagcagaugaaggaauu

SEQ ID NO: 1614312 - RNA, 19 nt, Homo sapiens
  misc_RNA (1)...(19): siRNA sense strand
caagcaaucucccaucuuc

SEQ ID NO: 1614313 - RNA, 19 nt, Homo sapiens
  misc_RNA (1)...(19): siRNA sense strand
agaaacagaucgaccagaa

SEQ ID NO: 1614314 - RNA, 19 nt, Homo sapiens
  misc_RNA (1)...(19): siRNA sense strand
ccaaauaugccuccagauu

SEQ ID NO: 1614315 - RNA, 19 nt, Homo sapiens
  misc_RNA (1)...(19): siRNA sense strand
aaaguuagcagaccaguuu

SEQ ID NO: 1614316 - RNA, 19 nt, Homo sapiens
  misc_RNA (1)...(19): siRNA sense strand
gcagacauacaucauuuaa

SEQ ID NO: 1614317 - RNA, 19 nt, Homo sapiens
  misc_RNA (1)...(19): siRNA sense strand
ugaagagguuagaauauga

SEQ ID NO: 1614318 - RNA, 19 nt, Homo sapiens
  misc_RNA (1)...(19): siRNA sense strand
gugaagagguuagaauaug

SEQ ID NO: 1614319 - RNA, 19 nt, Homo sapiens
  misc_RNA (1)...(19): siRNA sense strand
ggacagagucagugauuuc

SEQ ID NO: 1614320 - RNA, 19 nt, Homo sapiens
  misc_RNA (1)...(19): siRNA sense strand
uggcagacauacaucauuu

SEQ ID NO: 1614321 - RNA, 19 nt, Homo sapiens
  misc_RNA (1)...(19): siRNA sense strand
caaccucucuccccaaaua

SEQ ID NO: 1614322 - RNA, 19 nt, Homo sapiens
  misc_RNA (1)...(19): siRNA sense strand
cugagaauguugcagauaa

SEQ ID NO: 1614323 - RNA, 19 nt, Homo sapiens
  misc_RNA (1)...(19): siRNA sense strand
gaacgagagcuucaaaugg

SEQ ID NO: 1614324 - RNA, 19 nt, Homo sapiens
  misc_RNA (1)...(19): siRNA sense strand
caaauaugccuccagauuc

SEQ ID NO: 1614325 - RNA, 19 nt, Homo sapiens
  misc_RNA (1)...(19): siRNA sense strand
aaauaugccuccagauuca

SEQ ID NO: 1614326 - RNA, 19 nt, Homo sapiens
  misc_RNA (1)...(19): siRNA sense strand
ggacagugaacccagaauu

SEQ ID NO: 1614327 - RNA, 19 nt, Homo sapiens
  misc_RNA (1)...(19): siRNA sense strand
ccaguccucuucagcguuu

SEQ ID NO: 1614328 - RNA, 19 nt, Homo sapiens
  misc_RNA (1)...(19): siRNA sense strand
caaaugauggaaaggaauu

SEQ ID NO: 1614329 - RNA, 19 nt, Homo sapiens
  misc_RNA (1)...(19): siRNA sense strand
gaagagguuagaauaugaa

SEQ ID NO: 1614330 - RNA, 19 nt, Homo sapiens
  misc_RNA (1)...(19): siRNA sense strand
acaaucaaguaguaccuaa

SEQ ID NO: 1614331 - RNA, 19 nt, Homo sapiens
  misc_RNA (1)...(19): siRNA sense strand
aacgagagcuucaaaugga

SEQ ID NO: 1614332 - RNA, 19 nt, Homo sapiens
  misc_RNA (1)...(19): siRNA sense strand
auacuuaccuugugaagag

SEQ ID NO: 1614333 - RNA, 19 nt, Homo sapiens
  misc_RNA (1)...(19): siRNA sense strand
gagguuagaauaugaaagu

SEQ ID NO: 1614334 - RNA, 19 nt, Homo sapiens
  misc_RNA (1)...(19): siRNA sense strand
gacuauaggaagaacaaua

SEQ ID NO: 1614335 - RNA, 19 nt, Homo sapiens
  misc_RNA (1)...(19): siRNA sense strand
uaaagcaggcuaccaagga

SEQ ID NO: 1614336 - RNA, 19 nt, Homo sapiens
  misc_RNA (1)...(19): siRNA sense strand
gcagaugaaggaauugaga

SEQ ID NO: 1614337 - RNA, 19 nt, Homo sapiens
  misc_RNA (1)...(19): siRNA sense strand
agaacaacauaucguauca

SEQ ID NO: 1614338 - RNA, 19 nt, Homo sapiens
  misc_RNA (1)...(19): siRNA sense strand
aagaccagcuucaggacua

SEQ ID NO: 1614339 - RNA, 19 nt, Homo sapiens
  misc_RNA (1)...(19): siRNA sense strand
gaauguugcagauaagaau

SEQ ID NO: 1614340 - RNA, 19 nt, Homo sapiens
  misc_RNA (1)...(19): siRNA sense strand
caaaagagguggugaugca

SEQ ID NO: 1614341 - RNA, 19 nt, Homo sapiens
  misc_RNA (1)...(19): siRNA sense strand
aaaaguagcugagaauguu

SEQ ID NO: 1614342 - RNA, 19 nt, Homo sapiens
  misc_RNA (1)...(19): siRNA sense strand
agucagugauuuccauaaa

SEQ ID NO: 1614343 - RNA, 19 nt, Homo sapiens
  misc_RNA (1)...(19): siRNA sense strand
ugaagaacccucaagcaau

SEQ ID NO: 1614344 - RNA, 19 nt, Homo sapiens
  misc_RNA (1)...(19): siRNA sense strand
ugaaagucaucaagcaauc

SEQ ID NO: 1614345 - RNA, 19 nt, Homo sapiens
  misc_RNA (1)...(19): siRNA sense strand
gauggaaaggaauuggaua

SEQ ID NO: 1614346 - RNA, 19 nt, Homo sapiens
  misc_RNA (1)...(19): siRNA sense strand
gaagccuccuauuucaguu

SEQ ID NO: 1614347 - RNA, 19 nt, Homo sapiens
  misc_RNA (1)...(19): siRNA sense strand
ggaagccuccuauuucagu

SEQ ID NO: 1614348 - RNA, 19 nt, Homo sapiens
  misc_RNA (1)...(19): siRNA sense strand
agggaugccuggaauagaa

SEQ ID NO: 1614349 - RNA, 19 nt, Homo sapiens
  misc_RNA (1)...(19): siRNA sense strand
gcgaggaugacaagguuaa

SEQ ID NO: 1614350 - RNA, 19 nt, Homo sapiens
  misc_RNA (1)...(19): siRNA sense strand
aaauggauccugcagacua

SEQ ID NO: 1614351 - RNA, 19 nt, Homo sapiens
  misc_RNA (1)...(19): siRNA sense strand
acacauaaaccacaaugga

SEQ ID NO: 1614352 - RNA, 19 nt, Homo sapiens
  misc_RNA (1)...(19): siRNA sense strand
gcaagagacccaaaagauu

SEQ ID NO: 1614353 - RNA, 19 nt, Homo sapiens
  misc_RNA (1)...(19): siRNA sense strand
ucaggaauuucuucgacaa

SEQ ID NO: 1614354 - RNA, 19 nt, Homo sapiens
  misc_RNA (1)...(19): siRNA sense strand
ggaugacaagguuaaacua

SEQ ID NO: 1614355 - RNA, 19 nt, Homo sapiens
  misc_RNA (1)...(19): siRNA sense strand
aacaacauaucguaucaga

SEQ ID NO: 1614356 - RNA, 19 nt, Homo sapiens
  misc_RNA (1)...(19): siRNA sense strand
gccuccagauucacacaua

SEQ ID NO: 1614357 - RNA, 19 nt, Homo sapiens
  misc_RNA (1)...(19): siRNA sense strand
gagcacagcaugaagaaaa

SEQ ID NO: 1614358 - RNA, 19 nt, Homo sapiens
  misc_RNA (1)...(19): siRNA sense strand
gagagcacagcaugaagaa

SEQ ID NO: 1614359 - RNA, 19 nt, Homo sapiens
  misc_RNA (1)...(19): siRNA sense strand
ggacagcagaugaaggaau

SEQ ID NO: 1614360 - RNA, 19 nt, Homo sapiens
  misc_RNA (1)...(19): siRNA sense strand
gaagagaaugaccuagcaa

SEQ ID NO: 1614361 - RNA, 19 nt, Homo sapiens
  misc_RNA (1)...(19): siRNA sense strand
ggaagagaugcgaggauga

SEQ ID NO: 1614362 - RNA, 19 nt, Homo sapiens
  misc_RNA (1)...(19): siRNA sense strand
gaacccucaagcaaucaua

SEQ ID NO: 1614363 - RNA, 19 nt, Homo sapiens
  misc_RNA (1)...(19): siRNA sense strand
ugggaaagaacaaaucaaa

SEQ ID NO: 1614364 - RNA, 19 nt, Homo sapiens
  misc_RNA (1)...(19): siRNA sense strand
gacagugaacccagaauuc

SEQ ID NO: 1614365 - RNA, 19 nt, Homo sapiens
  misc_RNA (1)...(19): siRNA sense strand
agaagagaaugaccuagca

SEQ ID NO: 1614366 - RNA, 19 nt, Homo sapiens
  misc_RNA (1)...(19): siRNA sense strand
ggaaagaacaaaucaaaag

SEQ ID NO: 1614367 - RNA, 19 nt, Homo sapiens
  misc_RNA (1)...(19): siRNA sense strand
ugacaagguuaaacuacag

SEQ ID NO: 1614368 - RNA, 19 nt, Homo sapiens
  misc_RNA (1)...(19): siRNA sense strand
gaacccagaauucaaacag

SEQ ID NO: 1614369 - RNA, 19 nt, Homo sapiens
  misc_RNA (1)...(19): siRNA sense strand
acauaaaccacaauggaaa

SEQ ID NO: 1614370 - RNA, 19 nt, Homo sapiens
  misc_RNA (1)...(19): siRNA sense strand
ccuccagauucacacauaa

SEQ ID NO: 1614371 - RNA, 19 nt, Homo sapiens
  misc_RNA (1)...(19): siRNA sense strand
ggcagacauacaucauuua

SEQ ID NO: 1614372 - RNA, 19 nt, Homo sapiens
  misc_RNA (1)...(19): siRNA sense strand
cacauaaaccacaauggaa

SEQ ID NO: 1614373 - RNA, 19 nt, Homo sapiens
  misc_RNA (1)...(19): siRNA sense strand
gcgcaauucggaccucuug

SEQ ID NO: 1614374 - RNA, 19 nt, Homo sapiens
  misc_RNA (1)...(19): siRNA sense strand
agaacgagagcuucaaaug

SEQ ID NO: 1614375 - RNA, 19 nt, Homo sapiens
  misc_RNA (1)...(19): siRNA sense strand
ccaaggacagagucaguga

SEQ ID NO: 1614376 - RNA, 19 nt, Homo sapiens
  misc_RNA (1)...(19): siRNA sense strand
ucagauggcagacauacau

SEQ ID NO: 1614377 - RNA, 19 nt, Homo sapiens
  misc_RNA (1)...(19): siRNA sense strand
gguggacacgcacaagaaa

SEQ ID NO: 1614378 - RNA, 19 nt, Homo sapiens
  misc_RNA (1)...(19): siRNA sense strand
gcugagaauguugcagaua

SEQ ID NO: 1614379 - RNA, 19 nt, Homo sapiens
  misc_RNA (1)...(19): siRNA sense strand
ugagagcacagcaugaaga

SEQ ID NO: 1614380 - RNA, 19 nt, Homo sapiens
  misc_RNA (1)...(19): siRNA sense strand
ggaagaacaauacuuaccu

SEQ ID NO: 1614381 - RNA, 19 nt, Homo sapiens
  misc_RNA (1)...(19): siRNA sense strand
guggacagcagaugaagga

SEQ ID NO: 1614382 - RNA, 19 nt, Homo sapiens
  misc_RNA (1)...(19): siRNA sense strand
cagagucagugauuuccau

SEQ ID NO: 1614383 - RNA, 19 nt, Homo sapiens
  misc_RNA (1)...(19): siRNA sense strand
gagaauguugcagauaaga

SEQ ID NO: 1614384 - RNA, 19 nt, Homo sapiens
  misc_RNA (1)...(19): siRNA sense strand
ugagaauguugcagauaag

SEQ ID NO: 1614385 - RNA, 19 nt, Homo sapiens
  misc_RNA (1)...(19): siRNA sense strand
uggaaaggaauuggauaua

SEQ ID NO: 1614386 - RNA, 19 nt, Homo sapiens
  misc_RNA (1)...(19): siRNA sense strand
uacagaacaacauaucgua

SEQ ID NO: 1614387 - RNA, 19 nt, Homo sapiens
  misc_RNA (1)...(19): siRNA sense strand
gaaacagaucgaccagaag

SEQ ID NO: 1614388 - RNA, 19 nt, Homo sapiens
  misc_RNA (1)...(19): siRNA sense strand
ccacaugggaaagaacaaa

SEQ ID NO: 1614389 - RNA, 19 nt, Homo sapiens
  misc_RNA (1)...(19): siRNA sense strand
cguaucagauggcagacau

SEQ ID NO: 1614390 - RNA, 19 nt, Homo sapiens
  misc_RNA (1)...(19): siRNA sense strand
aauggauccugcagacuau

SEQ ID NO: 1614391 - RNA, 19 nt, Homo sapiens
  misc_RNA (1)...(19): siRNA sense strand
gagaugcgaggaugacaag

SEQ ID NO: 1614392 - RNA, 19 nt, Homo sapiens
  misc_RNA (1)...(19): siRNA sense strand
gaugacaagguuaaacuac

SEQ ID NO: 1614393 - RNA, 19 nt, Homo sapiens
  misc_RNA (1)...(19): siRNA sense strand
caagagacccaaaagauuc

SEQ ID NO: 1614394 - RNA, 19 nt, Homo sapiens
  misc_RNA (1)...(19): siRNA sense strand
ccagaauucaaacagauau

SEQ ID NO: 1614395 - RNA, 19 nt, Homo sapiens
  misc_RNA (1)...(19): siRNA sense strand
gaagagaugcgaggaugac

SEQ ID NO: 1614396 - RNA, 19 nt, Homo sapiens
  misc_RNA (1)...(19): siRNA sense strand
cagaacaacauaucguauc

SEQ ID NO: 1614397 - RNA, 19 nt, Homo sapiens
  misc_RNA (1)...(19): siRNA sense strand
aauagaagagaaugaccua

SEQ ID NO: 1614398 - RNA, 19 nt, Homo sapiens
  misc_RNA (1)...(19): siRNA sense strand
ccucuucagcguuuaauuc

SEQ ID NO: 1614399 - RNA, 19 nt, Homo sapiens
  misc_RNA (1)...(19): siRNA sense strand
auucggaccucuugcuguu

SEQ ID NO: 1614400 - RNA, 19 nt, Homo sapiens
  misc_RNA (1)...(19): siRNA sense strand
gacaaccucucuccccaaa

SEQ ID NO: 1614401 - RNA, 19 nt, Homo sapiens
  misc_RNA (1)...(19): siRNA sense strand
cuauuucaguuucucaaca

SEQ ID NO: 1614402 - RNA, 19 nt, Homo sapiens
  misc_RNA (1)...(19): siRNA sense strand
caaucaaguaguaccuaaa

SEQ ID NO: 1614403 - RNA, 19 nt, Homo sapiens
  misc_RNA (1)...(19): siRNA sense strand
ugagcuucgucaggaauuu

SEQ ID NO: 1614404 - RNA, 19 nt, Homo sapiens
  misc_RNA (1)...(19): siRNA sense strand
agguuaaacuacagaacaa

SEQ ID NO: 1614405 - RNA, 19 nt, Homo sapiens
  misc_RNA (1)...(19): siRNA sense strand
gaaagucaucaagcaaucu

SEQ ID NO: 1614406 - RNA, 19 nt, Homo sapiens
  misc_RNA (1)...(19): siRNA sense strand
gcaccaaguucacuguuua

SEQ ID NO: 1614407 - RNA, 19 nt, Homo sapiens
  misc_RNA (1)...(19): siRNA sense strand
ccaauuaccucaucucugu

SEQ ID NO: 1614408 - RNA, 19 nt, Homo sapiens
  misc_RNA (1)...(19): siRNA sense strand
ggacagcuauaucgggaaa

SEQ ID NO: 1614409 - RNA, 19 nt, Homo sapiens
  misc_RNA (1)...(19): siRNA sense strand
ggaaggagaagaagggaaa

SEQ ID NO: 1614410 - RNA, 19 nt, Homo sapiens
  misc_RNA (1)...(19): siRNA sense strand
ggaagagaaagaagaguaa

SEQ ID NO: 1614411 - RNA, 19 nt, Homo sapiens
  misc_RNA (1)...(19): siRNA sense strand
aaacugcgguccaacuuga

SEQ ID NO: 1614412 - RNA, 19 nt, Homo sapiens
  misc_RNA (1)...(19): siRNA sense strand
cuagcacgcuggcagaaua

SEQ ID NO: 1614413 - RNA, 19 nt, Homo sapiens
  misc_RNA (1)...(19): siRNA sense strand
cagcagcacuggcagaaga

SEQ ID NO: 1614414 - RNA, 19 nt, Homo sapiens
  misc_RNA (1)...(19): siRNA sense strand
gcaaugacccggacuacau

SEQ ID NO: 1614415 - RNA, 19 nt, Homo sapiens
  misc_RNA (1)...(19): siRNA sense strand
ggaaggaagagaaagaaga

SEQ ID NO: 1614416 - RNA, 19 nt, Homo sapiens
  misc_RNA (1)...(19): siRNA sense strand
ccucccagcuaaauaguaa

SEQ ID NO: 1614417 - RNA, 19 nt, Homo sapiens
  misc_RNA (1)...(19): siRNA sense strand
gagcagaagcagaagaaga

SEQ ID NO: 1614418 - RNA, 19 nt, Homo sapiens
  misc_RNA (1)...(19): siRNA sense strand
caaguucacuguuuaugac

SEQ ID NO: 1614419 - RNA, 19 nt, Homo sapiens
  misc_RNA (1)...(19): siRNA sense strand
gaagagaaagaagaguaaa

SEQ ID NO: 1614420 - RNA, 19 nt, Homo sapiens
  misc_RNA (1)...(19): siRNA sense strand
gaagaagggaaagcacaaa

SEQ ID NO: 1614421 - RNA, 19 nt, Homo sapiens
  misc_RNA (1)...(19): siRNA sense strand
caccauggauuacaacuac

SEQ ID NO: 1614422 - RNA, 19 nt, Homo sapiens
  misc_RNA (1)...(19): siRNA sense strand
uuuggaaaguggaaccuua

SEQ ID NO: 1614423 - RNA, 19 nt, Homo sapiens
  misc_RNA (1)...(19): siRNA sense strand
ggcaccaaguucacuguuu

SEQ ID NO: 1614424 - RNA, 19 nt, Homo sapiens
  misc_RNA (1)...(19): siRNA sense strand
gaaacugcgguccaacuug

SEQ ID NO: 1614425 - RNA, 19 nt, Homo sapiens
  misc_RNA (1)...(19): siRNA sense strand
ggaaacugcgguccaacuu

SEQ ID NO: 1614426 - RNA, 19 nt, Homo sapiens
  misc_RNA (1)...(19): siRNA sense strand
gaaggaagagaaagaagag

SEQ ID NO: 1614427 - RNA, 19 nt, Homo sapiens
  misc_RNA (1)...(19): siRNA sense strand
ccaaguucacuguuuauga

SEQ ID NO: 1614428 - RNA, 19 nt, Homo sapiens
  misc_RNA (1)...(19): siRNA sense strand
acaccugucuggaaugaug

SEQ ID NO: 1614429 - RNA, 19 nt, Homo sapiens
  misc_RNA (1)...(19): siRNA sense strand
ugacacacaguccuaugua

SEQ ID NO: 1614430 - RNA, 19 nt, Homo sapiens
  misc_RNA (1)...(19): siRNA sense strand
acacaggccuccgugaaga

SEQ ID NO: 1614431 - RNA, 19 nt, Homo sapiens
  misc_RNA (1)...(19): siRNA sense strand
uccaggaucuugaggaguu

SEQ ID NO: 1614432 - RNA, 19 nt, Homo sapiens
  misc_RNA (1)...(19): siRNA sense strand
gaacacggagaguaucauc

SEQ ID NO: 1614433 - RNA, 19 nt, Homo sapiens
  misc_RNA (1)...(19): siRNA sense strand
gcaacgagcaugagacacu

SEQ ID NO: 1614434 - RNA, 19 nt, Homo sapiens
  misc_RNA (1)...(19): siRNA sense strand
cagaggauguguucaccau

SEQ ID NO: 1614435 - RNA, 19 nt, Homo sapiens
  misc_RNA (1)...(19): siRNA sense strand
ggaagaugagcgugauugu

SEQ ID NO: 1614436 - RNA, 19 nt, Homo sapiens
  misc_RNA (1)...(19): siRNA sense strand
aauaagaacacggagagua

SEQ ID NO: 1614437 - RNA, 19 nt, Homo sapiens
  misc_RNA (1)...(19): siRNA sense strand
gugccacgaugcagaggaa

SEQ ID NO: 1614438 - RNA, 19 nt, Homo sapiens
  misc_RNA (1)...(19): siRNA sense strand
ccauugcccuguccagcuu

SEQ ID NO: 1614439 - RNA, 19 nt, Homo sapiens
  misc_RNA (1)...(19): siRNA sense strand
gcaccagcuucagccaaga

SEQ ID NO: 1614440 - RNA, 19 nt, Homo sapiens
  misc_RNA (1)...(19): siRNA sense strand
cugcaggccuuugccauug

SEQ ID NO: 1614441 - RNA, 19 nt, Homo sapiens
  misc_RNA (1)...(19): siRNA sense strand
gcacgcuggcagaauaaga

SEQ ID NO: 1614442 - RNA, 19 nt, Homo sapiens
  misc_RNA (1)...(19): siRNA sense strand
acaaacgucuuaggcuuca

SEQ ID NO: 1614443 - RNA, 19 nt, Homo sapiens
  misc_RNA (1)...(19): siRNA sense strand
guucacuguuuaugacaau

SEQ ID NO: 1614444 - RNA, 19 nt, Homo sapiens
  misc_RNA (1)...(19): siRNA sense strand
gcaccuggaccgugaggau

SEQ ID NO: 1614445 - RNA, 19 nt, Homo sapiens
  misc_RNA (1)...(19): siRNA sense strand
gguagcagaggauguguuc

SEQ ID NO: 1614446 - RNA, 19 nt, Homo sapiens
  misc_RNA (1)...(19): siRNA sense strand
auaagaacacggagaguau

SEQ ID NO: 1614447 - RNA, 19 nt, Homo sapiens
  misc_RNA (1)...(19): siRNA sense strand
gaagaugagcgugauuguc

SEQ ID NO: 1614448 - RNA, 19 nt, Homo sapiens
  misc_RNA (1)...(19): siRNA sense strand
ugacgaggaugaggaggau

SEQ ID NO: 1614449 - RNA, 19 nt, Homo sapiens
  misc_RNA (1)...(19): siRNA sense strand
gacacacaguccuauguac

SEQ ID NO: 1614450 - RNA, 19 nt, Homo sapiens
  misc_RNA (1)...(19): siRNA sense strand
gcaguggcagcaccagcua

SEQ ID NO: 1614451 - RNA, 19 nt, Homo sapiens
  misc_RNA (1)...(19): siRNA sense strand
aggaagagaaagaagagua

SEQ ID NO: 1614452 - RNA, 19 nt, Homo sapiens
  misc_RNA (1)...(19): siRNA sense strand
ugaggcagcagaagcuuga

SEQ ID NO: 1614453 - RNA, 19 nt, Homo sapiens
  misc_RNA (1)...(19): siRNA sense strand
gcaucacucgggacaagaa

SEQ ID NO: 1614454 - RNA, 19 nt, Homo sapiens
  misc_RNA (1)...(19): siRNA sense strand
caggguaucaccaucaaau

SEQ ID NO: 1614455 - RNA, 19 nt, Homo sapiens
  misc_RNA (1)...(19): siRNA sense strand
gcgggaaggaagagaaaga

SEQ ID NO: 1614456 - RNA, 19 nt, Homo sapiens
  misc_RNA (1)...(19): siRNA sense strand
ggccucauccuccacuuug

SEQ ID NO: 1614457 - RNA, 19 nt, Homo sapiens
  misc_RNA (1)...(19): siRNA sense strand
ccagcagcaugagcuuuga

SEQ ID NO: 1614458 - RNA, 19 nt, Homo sapiens
  misc_RNA (1)...(19): siRNA sense strand
gaacuuccagaucauccau

SEQ ID NO: 1614459 - RNA, 19 nt, Homo sapiens
  misc_RNA (1)...(19): siRNA sense strand
acacaguccuauguacuca

SEQ ID NO: 1614460 - RNA, 19 nt, Homo sapiens
  misc_RNA (1)...(19): siRNA sense strand
cagcaccagcuaccaaguu

SEQ ID NO: 1614461 - RNA, 19 nt, Homo sapiens
  misc_RNA (1)...(19): siRNA sense strand
caugagcuuugacgaggau

SEQ ID NO: 1614462 - RNA, 19 nt, Homo sapiens
  misc_RNA (1)...(19): siRNA sense strand
caagcuggcgugcgaguag

SEQ ID NO: 1614463 - RNA, 19 nt, Homo sapiens
  misc_RNA (1)...(19): siRNA sense strand
gcaagcuggcgugcgagua

SEQ ID NO: 1614464 - RNA, 19 nt, Homo sapiens
  misc_RNA (1)...(19): siRNA sense strand
gauguguucaccauggauu

SEQ ID NO: 1614465 - RNA, 19 nt, Homo sapiens
  misc_RNA (1)...(19): siRNA sense strand
gaaaccugaggcagcagaa

SEQ ID NO: 1614466 - RNA, 19 nt, Homo sapiens
  misc_RNA (1)...(19): siRNA sense strand
agcagaagcagaagaagaa

SEQ ID NO: 1614467 - RNA, 19 nt, Homo sapiens
  misc_RNA (1)...(19): siRNA sense strand
gaggaugaggaggagaaua

SEQ ID NO: 1614468 - RNA, 19 nt, Homo sapiens
  misc_RNA (1)...(19): siRNA sense strand
gcuccucccagcuaaauag

SEQ ID NO: 1614469 - RNA, 19 nt, Homo sapiens
  misc_RNA (1)...(19): siRNA sense strand
ccaggaucuugaggaguuu

SEQ ID NO: 1614470 - RNA, 19 nt, Homo sapiens
  misc_RNA (1)...(19): siRNA sense strand
ccaaggcccagugcagauu

SEQ ID NO: 1614471 - RNA, 19 nt, Homo sapiens
  misc_RNA (1)...(19): siRNA sense strand
gaugacacacaguccuaug

SEQ ID NO: 1614472 - RNA, 19 nt, Homo sapiens
  misc_RNA (1)...(19): siRNA sense strand
gugauugucccaggcauga

SEQ ID NO: 1614473 - RNA, 19 nt, Homo sapiens
  misc_RNA (1)...(19): siRNA sense strand
ccgcaucacucgggacaag

SEQ ID NO: 1614474 - RNA, 19 nt, Homo sapiens
  misc_RNA (1)...(19): siRNA sense strand
ucaccauggauuacaacua

SEQ ID NO: 1614475 - RNA, 19 nt, Homo sapiens
  misc_RNA (1)...(19): siRNA sense strand
ucaucgagcugcaaaacaa

SEQ ID NO: 1614476 - RNA, 19 nt, Homo sapiens
  misc_RNA (1)...(19): siRNA sense strand
ccgcuaggaaggagaagaa

SEQ ID NO: 1614477 - RNA, 19 nt, Homo sapiens
  misc_RNA (1)...(19): siRNA sense strand
agaagaagggaaagcacaa

SEQ ID NO: 1614478 - RNA, 19 nt, Homo sapiens
  misc_RNA (1)...(19): siRNA sense strand
acacggagaguaucaucga

SEQ ID NO: 1614479 - RNA, 19 nt, Homo sapiens
  misc_RNA (1)...(19): siRNA sense strand
ccagcuaccaaguucaaga

SEQ ID NO: 1614480 - RNA, 19 nt, Homo sapiens
  misc_RNA (1)...(19): siRNA sense strand
cuugaggaguuugcacuga

SEQ ID NO: 1614481 - RNA, 19 nt, Homo sapiens
  misc_RNA (1)...(19): siRNA sense strand
uagcacgcuggcagaauaa

SEQ ID NO: 1614482 - RNA, 19 nt, Homo sapiens
  misc_RNA (1)...(19): siRNA sense strand
ggaaaguggaaccuuacgu

SEQ ID NO: 1614483 - RNA, 19 nt, Homo sapiens
  misc_RNA (1)...(19): siRNA sense strand
gcauguaccccaccuacuu

SEQ ID NO: 1614484 - RNA, 19 nt, Homo sapiens
  misc_RNA (1)...(19): siRNA sense strand
ccaacuugaugggcaccaa

SEQ ID NO: 1614485 - RNA, 19 nt, Homo sapiens
  misc_RNA (1)...(19): siRNA sense strand
caaugacccggacuacauc

SEQ ID NO: 1614486 - RNA, 19 nt, Homo sapiens
  misc_RNA (1)...(19): siRNA sense strand
aguccuauguacucaacuu

SEQ ID NO: 1614487 - RNA, 19 nt, Homo sapiens
  misc_RNA (1)...(19): siRNA sense strand
gcugugugcuacgagacaa

SEQ ID NO: 1614488 - RNA, 19 nt, Homo sapiens
  misc_RNA (1)...(19): siRNA sense strand
gcaccaaguucacuguuua

SEQ ID NO: 1614489 - RNA, 19 nt, Homo sapiens
  misc_RNA (1)...(19): siRNA sense strand
ccaauuaccucaucucugu

SEQ ID NO: 1614490 - RNA, 19 nt, Homo sapiens
  misc_RNA (1)...(19): siRNA sense strand
ggacagcuauaucgggaaa

SEQ ID NO: 1614491 - RNA, 19 nt, Homo sapiens
  misc_RNA (1)...(19): siRNA sense strand
ggaaggagaagaagggaaa

SEQ ID NO: 1614492 - RNA, 19 nt, Homo sapiens
  misc_RNA (1)...(19): siRNA sense strand
ggaagagaaagaagaguaa

SEQ ID NO: 1614493 - RNA, 19 nt, Homo sapiens
  misc_RNA (1)...(19): siRNA sense strand
aaacugcgguccaacuuga

SEQ ID NO: 1614494 - RNA, 19 nt, Homo sapiens
  misc_RNA (1)...(19): siRNA sense strand
cuagcacgcuggcagaaua

SEQ ID NO: 1614495 - RNA, 19 nt, Homo sapiens
  misc_RNA (1)...(19): siRNA sense strand
cagcagcacuggcagaaga

SEQ ID NO: 1614496 - RNA, 19 nt, Homo sapiens
  misc_RNA (1)...(19): siRNA sense strand
gcaaugacccggacuacau

SEQ ID NO: 1614497 - RNA, 19 nt, Homo sapiens
  misc_RNA (1)...(19): siRNA sense strand
ggaaggaagagaaagaaga

SEQ ID NO: 1614498 - RNA, 19 nt, Homo sapiens
  misc_RNA (1)...(19): siRNA sense strand
ccucccagcuaaauaguaa

SEQ ID NO: 1614499 - RNA, 19 nt, Homo sapiens
  misc_RNA (1)...(19): siRNA sense strand
gagcagaagcagaagaaga

SEQ ID NO: 1614500 - RNA, 19 nt, Homo sapiens
  misc_RNA (1)...(19): siRNA sense strand
caaguucacuguuuaugac

SEQ ID NO: 1614501 - RNA, 19 nt, Homo sapiens
  misc_RNA (1)...(19): siRNA sense strand
gaagagaaagaagaguaaa

SEQ ID NO: 1614502 - RNA, 19 nt, Homo sapiens
  misc_RNA (1)...(19): siRNA sense strand
gaagaagggaaagcacaaa

SEQ ID NO: 1614503 - RNA, 19 nt, Homo sapiens
  misc_RNA (1)...(19): siRNA sense strand
caccauggauuacaacuac

SEQ ID NO: 1614504 - RNA, 19 nt, Homo sapiens
  misc_RNA (1)...(19): siRNA sense strand
uuuggaaaguggaaccuua

SEQ ID NO: 1614505 - RNA, 19 nt, Homo sapiens
  misc_RNA (1)...(19): siRNA sense strand
ggcaccaaguucacuguuu

SEQ ID NO: 1614506 - RNA, 19 nt, Homo sapiens
  misc_RNA (1)...(19): siRNA sense strand
gaaacugcgguccaacuug

SEQ ID NO: 1614507 - RNA, 19 nt, Homo sapiens
  misc_RNA (1)...(19): siRNA sense strand
ggaaacugcgguccaacuu

SEQ ID NO: 1614508 - RNA, 19 nt, Homo sapiens
  misc_RNA (1)...(19): siRNA sense strand
gaaggaagagaaagaagag

SEQ ID NO: 1614509 - RNA, 19 nt, Homo sapiens
  misc_RNA (1)...(19): siRNA sense strand
ccaaguucacuguuuauga

SEQ ID NO: 1614510 - RNA, 19 nt, Homo sapiens
  misc_RNA (1)...(19): siRNA sense strand
acaccugucuggaaugaug

SEQ ID NO: 1614511 - RNA, 19 nt, Homo sapiens
  misc_RNA (1)...(19): siRNA sense strand
ugacacacaguccuaugua

SEQ ID NO: 1614512 - RNA, 19 nt, Homo sapiens
  misc_RNA (1)...(19): siRNA sense strand
acacaggccuccgugaaga

SEQ ID NO: 1614513 - RNA, 19 nt, Homo sapiens
  misc_RNA (1)...(19): siRNA sense strand
uccaggaucuugaggaguu

SEQ ID NO: 1614514 - RNA, 19 nt, Homo sapiens
  misc_RNA (1)...(19): siRNA sense strand
gaacacggagaguaucauc

SEQ ID NO: 1614515 - RNA, 19 nt, Homo sapiens
  misc_RNA (1)...(19): siRNA sense strand
gcaacgagcaugagacacu

SEQ ID NO: 1614516 - RNA, 19 nt, Homo sapiens
  misc_RNA (1)...(19): siRNA sense strand
cagaggauguguucaccau

SEQ ID NO: 1614517 - RNA, 19 nt, Homo sapiens
  misc_RNA (1)...(19): siRNA sense strand
ggaagaugagcgugauugu

SEQ ID NO: 1614518 - RNA, 19 nt, Homo sapiens
  misc_RNA (1)...(19): siRNA sense strand
aauaagaacacggagagua

SEQ ID NO: 1614519 - RNA, 19 nt, Homo sapiens
  misc_RNA (1)...(19): siRNA sense strand
gugccacgaugcagaggaa

SEQ ID NO: 1614520 - RNA, 19 nt, Homo sapiens
  misc_RNA (1)...(19): siRNA sense strand
ccauugcccuguccagcuu

SEQ ID NO: 1614521 - RNA, 19 nt, Homo sapiens
  misc_RNA (1)...(19): siRNA sense strand
gcaccagcuucagccaaga

SEQ ID NO: 1614522 - RNA, 19 nt, Homo sapiens
  misc_RNA (1)...(19): siRNA sense strand
cugcaggccuuugccauug

SEQ ID NO: 1614523 - RNA, 19 nt, Homo sapiens
  misc_RNA (1)...(19): siRNA sense strand
gcacgcuggcagaauaaga

SEQ ID NO: 1614524 - RNA, 19 nt, Homo sapiens
  misc_RNA (1)...(19): siRNA sense strand
acaaacgucuuaggcuuca

SEQ ID NO: 1614525 - RNA, 19 nt, Homo sapiens
  misc_RNA (1)...(19): siRNA sense strand
guucacuguuuaugacaau

SEQ ID NO: 1614526 - RNA, 19 nt, Homo sapiens
  misc_RNA (1)...(19): siRNA sense strand
gcaccuggaccgugaggau

SEQ ID NO: 1614527 - RNA, 19 nt, Homo sapiens
  misc_RNA (1)...(19): siRNA sense strand
gguagcagaggauguguuc

SEQ ID NO: 1614528 - RNA, 19 nt, Homo sapiens
  misc_RNA (1)...(19): siRNA sense strand
auaagaacacggagaguau

SEQ ID NO: 1614529 - RNA, 19 nt, Homo sapiens
  misc_RNA (1)...(19): siRNA sense strand
gaagaugagcgugauuguc

SEQ ID NO: 1614530 - RNA, 19 nt, Homo sapiens
  misc_RNA (1)...(19): siRNA sense strand
ugacgaggaugaggaggau

SEQ ID NO: 1614531 - RNA, 19 nt, Homo sapiens
  misc_RNA (1)...(19): siRNA sense strand
gacacacaguccuauguac

SEQ ID NO: 1614532 - RNA, 19 nt, Homo sapiens
  misc_RNA (1)...(19): siRNA sense strand
gcaguggcagcaccagcua

SEQ ID NO: 1614533 - RNA, 19 nt, Homo sapiens
  misc_RNA (1)...(19): siRNA sense strand
aggaagagaaagaagagua

SEQ ID NO: 1614534 - RNA, 19 nt, Homo sapiens
  misc_RNA (1)...(19): siRNA sense strand
ugaggcagcagaagcuuga

SEQ ID NO: 1614535 - RNA, 19 nt, Homo sapiens
  misc_RNA (1)...(19): siRNA sense strand
gcaucacucgggacaagaa

SEQ ID NO: 1614536 - RNA, 19 nt, Homo sapiens
  misc_RNA (1)...(19): siRNA sense strand
caggguaucaccaucaaau

SEQ ID NO: 1614537 - RNA, 19 nt, Homo sapiens
  misc_RNA (1)...(19): siRNA sense strand
gcgggaaggaagagaaaga

SEQ ID NO: 1614538 - RNA, 19 nt, Homo sapiens
  misc_RNA (1)...(19): siRNA sense strand
ggccucauccuccacuuug

SEQ ID NO: 1614539 - RNA, 19 nt, Homo sapiens
  misc_RNA (1)...(19): siRNA sense strand
ccagcagcaugagcuuuga

SEQ ID NO: 1614540 - RNA, 19 nt, Homo sapiens
  misc_RNA (1)...(19): siRNA sense strand
gaacuuccagaucauccau

SEQ ID NO: 1614541 - RNA, 19 nt, Homo sapiens
  misc_RNA (1)...(19): siRNA sense strand
acacaguccuauguacuca

SEQ ID NO: 1614542 - RNA, 19 nt, Homo sapiens
  misc_RNA (1)...(19): siRNA sense strand
cagcaccagcuaccaaguu

SEQ ID NO: 1614543 - RNA, 19 nt, Homo sapiens
  misc_RNA (1)...(19): siRNA sense strand
caugagcuuugacgaggau

SEQ ID NO: 1614544 - RNA, 19 nt, Homo sapiens
  misc_RNA (1)...(19): siRNA sense strand
caagcuggcgugcgaguag

SEQ ID NO: 1614545 - RNA, 19 nt, Homo sapiens
  misc_RNA (1)...(19): siRNA sense strand
gcaagcuggcgugcgagua

SEQ ID NO: 1614546 - RNA, 19 nt, Homo sapiens
  misc_RNA (1)...(19): siRNA sense strand
gauguguucaccauggauu

SEQ ID NO: 1614547 - RNA, 19 nt, Homo sapiens
  misc_RNA (1)...(19): siRNA sense strand
gaaaccugaggcagcagaa

SEQ ID NO: 1614548 - RNA, 19 nt, Homo sapiens
  misc_RNA (1)...(19): siRNA sense strand
agcagaagcagaagaagaa

SEQ ID NO: 1614549 - RNA, 19 nt, Homo sapiens
  misc_RNA (1)...(19): siRNA sense strand
gaggaugaggaggagaaua

SEQ ID NO: 1614550 - RNA, 19 nt, Homo sapiens
  misc_RNA (1)...(19): siRNA sense strand
gcuccucccagcuaaauag

SEQ ID NO: 1614551 - RNA, 19 nt, Homo sapiens
  misc_RNA (1)...(19): siRNA sense strand
ccaggaucuugaggaguuu

SEQ ID NO: 1614552 - RNA, 19 nt, Homo sapiens
  misc_RNA (1)...(19): siRNA sense strand
ccaaggcccagugcagauu

SEQ ID NO: 1614553 - RNA, 19 nt, Homo sapiens
  misc_RNA (1)...(19): siRNA sense strand
gaugacacacaguccuaug

SEQ ID NO: 1614554 - RNA, 19 nt, Homo sapiens
  misc_RNA (1)...(19): siRNA sense strand
gugauugucccaggcauga

SEQ ID NO: 1614555 - RNA, 19 nt, Homo sapiens
  misc_RNA (1)...(19): siRNA sense strand
ccgcaucacucgggacaag

SEQ ID NO: 1614556 - RNA, 19 nt, Homo sapiens
  misc_RNA (1)...(19): siRNA sense strand
ucaccauggauuacaacua

SEQ ID NO: 1614557 - RNA, 19 nt, Homo sapiens
  misc_RNA (1)...(19): siRNA sense strand
ucaucgagcugcaaaacaa

SEQ ID NO: 1614558 - RNA, 19 nt, Homo sapiens
  misc_RNA (1)...(19): siRNA sense strand
ccgcuaggaaggagaagaa

SEQ ID NO: 1614559 - RNA, 19 nt, Homo sapiens
  misc_RNA (1)...(19): siRNA sense strand
agaagaagggaaagcacaa

SEQ ID NO: 1614560 - RNA, 19 nt, Homo sapiens
  misc_RNA (1)...(19): siRNA sense strand
acacggagaguaucaucga

SEQ ID NO: 1614561 - RNA, 19 nt, Homo sapiens
  misc_RNA (1)...(19): siRNA sense strand
ccagcuaccaaguucaaga

SEQ ID NO: 1614562 - RNA, 19 nt, Homo sapiens
  misc_RNA (1)...(19): siRNA sense strand
cuugaggaguuugcacuga

SEQ ID NO: 1614563 - RNA, 19 nt, Homo sapiens
  misc_RNA (1)...(19): siRNA sense strand
uagcacgcuggcagaauaa

SEQ ID NO: 1614564 - RNA, 19 nt, Homo sapiens
  misc_RNA (1)...(19): siRNA sense strand
ggaaaguggaaccuuacgu

SEQ ID NO: 1614565 - RNA, 19 nt, Homo sapiens
  misc_RNA (1)...(19): siRNA sense strand
gcauguaccccaccuacuu

SEQ ID NO: 1614566 - RNA, 19 nt, Homo sapiens
  misc_RNA (1)...(19): siRNA sense strand
ccaacuugaugggcaccaa

SEQ ID NO: 1614567 - RNA, 19 nt, Homo sapiens
  misc_RNA (1)...(19): siRNA sense strand
caaugacccggacuacauc

SEQ ID NO: 1614568 - RNA, 19 nt, Homo sapiens
  misc_RNA (1)...(19): siRNA sense strand
aguccuauguacucaacuu

SEQ ID NO: 1614569 - RNA, 19 nt, Homo sapiens
  misc_RNA (1)...(19): siRNA sense strand
gcugugugcuacgagacaa

SEQ ID NO: 1614570 - RNA, 19 nt, Homo sapiens
  misc_RNA (1)...(19): siRNA sense strand
gaagagagauguguggaaa

SEQ ID NO: 1614571 - RNA, 19 nt, Homo sapiens
  misc_RNA (1)...(19): siRNA sense strand
ucacagagcgguugaaauu

SEQ ID NO: 1614572 - RNA, 19 nt, Homo sapiens
  misc_RNA (1)...(19): siRNA sense strand
uguaguggcugaaauauau

SEQ ID NO: 1614573 - RNA, 19 nt, Homo sapiens
  misc_RNA (1)...(19): siRNA sense strand
ucagagaagugaagagaga

SEQ ID NO: 1614574 - RNA, 19 nt, Homo sapiens
  misc_RNA (1)...(19): siRNA sense strand
acagagcgguugaaauuga

SEQ ID NO: 1614575 - RNA, 19 nt, Homo sapiens
  misc_RNA (1)...(19): siRNA sense strand
caacagcagugucuauuuu

SEQ ID NO: 1614576 - RNA, 19 nt, Homo sapiens
  misc_RNA (1)...(19): siRNA sense strand
gaagaagucagagaaguga

SEQ ID NO: 1614577 - RNA, 19 nt, Homo sapiens
  misc_RNA (1)...(19): siRNA sense strand
gaacucagucaacgcauga

SEQ ID NO: 1614578 - RNA, 19 nt, Homo sapiens
  misc_RNA (1)...(19): siRNA sense strand
gcugggagcuacucagaau

SEQ ID NO: 1614579 - RNA, 19 nt, Homo sapiens
  misc_RNA (1)...(19): siRNA sense strand
agagagauguguggaaauu

SEQ ID NO: 1614580 - RNA, 19 nt, Homo sapiens
  misc_RNA (1)...(19): siRNA sense strand
gcaacagcagugucuauuu

SEQ ID NO: 1614581 - RNA, 19 nt, Homo sapiens
  misc_RNA (1)...(19): siRNA sense strand
gaacucucuugugaccuua

SEQ ID NO: 1614582 - RNA, 19 nt, Homo sapiens
  misc_RNA (1)...(19): siRNA sense strand
gccuaaacauugcuuucua

SEQ ID NO: 1614583 - RNA, 19 nt, Homo sapiens
  misc_RNA (1)...(19): siRNA sense strand
cagugaaaccucagacaua

SEQ ID NO: 1614584 - RNA, 19 nt, Homo sapiens
  misc_RNA (1)...(19): siRNA sense strand
ggacagagacaauggaaaa

SEQ ID NO: 1614585 - RNA, 19 nt, Homo sapiens
  misc_RNA (1)...(19): siRNA sense strand
cuugugaccuuaccaguga

SEQ ID NO: 1614586 - RNA, 19 nt, Homo sapiens
  misc_RNA (1)...(19): siRNA sense strand
uauaucagcccauguuaga

SEQ ID NO: 1614587 - RNA, 19 nt, Homo sapiens
  misc_RNA (1)...(19): siRNA sense strand
gacagaagaagucagagaa

SEQ ID NO: 1614588 - RNA, 19 nt, Homo sapiens
  misc_RNA (1)...(19): siRNA sense strand
acauacaggaaccuuauua

SEQ ID NO: 1614589 - RNA, 19 nt, Homo sapiens
  misc_RNA (1)...(19): siRNA sense strand
cagaagaagucagagaagu

SEQ ID NO: 1614590 - RNA, 19 nt, Homo sapiens
  misc_RNA (1)...(19): siRNA sense strand
uuucuaggcuuccucauca

SEQ ID NO: 1614591 - RNA, 19 nt, Homo sapiens
  misc_RNA (1)...(19): siRNA sense strand
ccucaucaguuucuuccuu

SEQ ID NO: 1614592 - RNA, 19 nt, Homo sapiens
  misc_RNA (1)...(19): siRNA sense strand
aaauauaucagcccauguu

SEQ ID NO: 1614593 - RNA, 19 nt, Homo sapiens
  misc_RNA (1)...(19): siRNA sense strand
uaacaccacacuccagcua

SEQ ID NO: 1614594 - RNA, 19 nt, Homo sapiens
  misc_RNA (1)...(19): siRNA sense strand
cucaucaguuucuuccuua

SEQ ID NO: 1614595 - RNA, 19 nt, Homo sapiens
  misc_RNA (1)...(19): siRNA sense strand
agaacucucuugugaccuu

SEQ ID NO: 1614596 - RNA, 19 nt, Homo sapiens
  misc_RNA (1)...(19): siRNA sense strand
ccuaaacauugcuuucuag

SEQ ID NO: 1614597 - RNA, 19 nt, Homo sapiens
  misc_RNA (1)...(19): siRNA sense strand
cagagcgguugaaauugaa

SEQ ID NO: 1614598 - RNA, 19 nt, Homo sapiens
  misc_RNA (1)...(19): siRNA sense strand
gaagugaagagagaugugu

SEQ ID NO: 1614599 - RNA, 19 nt, Homo sapiens
  misc_RNA (1)...(19): siRNA sense strand
gguugaaauugaagcucua

SEQ ID NO: 1614600 - RNA, 19 nt, Homo sapiens
  misc_RNA (1)...(19): siRNA sense strand
agacauacaggaaccuuau

SEQ ID NO: 1614601 - RNA, 19 nt, Homo sapiens
  misc_RNA (1)...(19): siRNA sense strand
uaggcuuccucaucaguuu

SEQ ID NO: 1614602 - RNA, 19 nt, Homo sapiens
  misc_RNA (1)...(19): siRNA sense strand
gaaauugaagcucuaacac

SEQ ID NO: 1614603 - RNA, 19 nt, Homo sapiens
  misc_RNA (1)...(19): siRNA sense strand
ugaaauugaagcucuaaca

SEQ ID NO: 1614604 - RNA, 19 nt, Homo sapiens
  misc_RNA (1)...(19): siRNA sense strand
gaagucagagaagugaaga

SEQ ID NO: 1614605 - RNA, 19 nt, Homo sapiens
  misc_RNA (1)...(19): siRNA sense strand
guguaguggcugaaauaua

SEQ ID NO: 1614606 - RNA, 19 nt, Homo sapiens
  misc_RNA (1)...(19): siRNA sense strand
gaaauauaucagcccaugu

SEQ ID NO: 1614607 - RNA, 19 nt, Homo sapiens
  misc_RNA (1)...(19): siRNA sense strand
caacgcaugagucucugaa

SEQ ID NO: 1614608 - RNA, 19 nt, Homo sapiens
  misc_RNA (1)...(19): siRNA sense strand
ggcaacagcagugucuauu

SEQ ID NO: 1614609 - RNA, 19 nt, Homo sapiens
  misc_RNA (1)...(19): siRNA sense strand
cagacauacaggaaccuua

SEQ ID NO: 1614610 - RNA, 19 nt, Homo sapiens
  misc_RNA (1)...(19): siRNA sense strand
aauauaucagcccauguua

SEQ ID NO: 1614611 - RNA, 19 nt, Homo sapiens
  misc_RNA (1)...(19): siRNA sense strand
agaagaagucagagaagug

SEQ ID NO: 1614612 - RNA, 19 nt, Homo sapiens
  misc_RNA (1)...(19): siRNA sense strand
agacagaagaagucagaga

SEQ ID NO: 1614613 - RNA, 19 nt, Homo sapiens
  misc_RNA (1)...(19): siRNA sense strand
uuagacagaagaagucaga

SEQ ID NO: 1614614 - RNA, 19 nt, Homo sapiens
  misc_RNA (1)...(19): siRNA sense strand
agugaaaccucagacauac

SEQ ID NO: 1614615 - RNA, 19 nt, Homo sapiens
  misc_RNA (1)...(19): siRNA sense strand
ugaagagagauguguggaa

SEQ ID NO: 1614616 - RNA, 19 nt, Homo sapiens
  misc_RNA (1)...(19): siRNA sense strand
uaucagcccauguuagaca

SEQ ID NO: 1614617 - RNA, 19 nt, Homo sapiens
  misc_RNA (1)...(19): siRNA sense strand
gacauacaggaaccuuauu

SEQ ID NO: 1614618 - RNA, 19 nt, Homo sapiens
  misc_RNA (1)...(19): siRNA sense strand
cauguuagacagaagaagu

SEQ ID NO: 1614619 - RNA, 19 nt, Homo sapiens
  misc_RNA (1)...(19): siRNA sense strand
gagaagugaagagagaugu

SEQ ID NO: 1614620 - RNA, 19 nt, Homo sapiens
  misc_RNA (1)...(19): siRNA sense strand
cagcccauguuagacagaa

SEQ ID NO: 1614621 - RNA, 19 nt, Homo sapiens
  misc_RNA (1)...(19): siRNA sense strand
ccagugaaaccucagacau

SEQ ID NO: 1614622 - RNA, 19 nt, Homo sapiens
  misc_RNA (1)...(19): siRNA sense strand
gaagagagauguguggaaa

SEQ ID NO: 1614623 - RNA, 19 nt, Homo sapiens
  misc_RNA (1)...(19): siRNA sense strand
ucacagagcgguugaaauu

SEQ ID NO: 1614624 - RNA, 19 nt, Homo sapiens
  misc_RNA (1)...(19): siRNA sense strand
uguaguggcugaaauauau

SEQ ID NO: 1614625 - RNA, 19 nt, Homo sapiens
  misc_RNA (1)...(19): siRNA sense strand
ucagagaagugaagagaga

SEQ ID NO: 1614626 - RNA, 19 nt, Homo sapiens
  misc_RNA (1)...(19): siRNA sense strand
acagagcgguugaaauuga

SEQ ID NO: 1614627 - RNA, 19 nt, Homo sapiens
  misc_RNA (1)...(19): siRNA sense strand
caacagcagugucuauuuu

SEQ ID NO: 1614628 - RNA, 19 nt, Homo sapiens
  misc_RNA (1)...(19): siRNA sense strand
gaagaagucagagaaguga

SEQ ID NO: 1614629 - RNA, 19 nt, Homo sapiens
  misc_RNA (1)...(19): siRNA sense strand
gaacucagucaacgcauga

SEQ ID NO: 1614630 - RNA, 19 nt, Homo sapiens
  misc_RNA (1)...(19): siRNA sense strand
gcugggagcuacucagaau

SEQ ID NO: 1614631 - RNA, 19 nt, Homo sapiens
  misc_RNA (1)...(19): siRNA sense strand
agagagauguguggaaauu

SEQ ID NO: 1614632 - RNA, 19 nt, Homo sapiens
  misc_RNA (1)...(19): siRNA sense strand
gcaacagcagugucuauuu

SEQ ID NO: 1614633 - RNA, 19 nt, Homo sapiens
  misc_RNA (1)...(19): siRNA sense strand
gaacucucuugugaccuua

SEQ ID NO: 1614634 - RNA, 19 nt, Homo sapiens
  misc_RNA (1)...(19): siRNA sense strand
gccuaaacauugcuuucua

SEQ ID NO: 1614635 - RNA, 19 nt, Homo sapiens
  misc_RNA (1)...(19): siRNA sense strand
cagugaaaccucagacaua

SEQ ID NO: 1614636 - RNA, 19 nt, Homo sapiens
  misc_RNA (1)...(19): siRNA sense strand
ggacagagacaauggaaaa

SEQ ID NO: 1614637 - RNA, 19 nt, Homo sapiens
  misc_RNA (1)...(19): siRNA sense strand
cuugugaccuuaccaguga

SEQ ID NO: 1614638 - RNA, 19 nt, Homo sapiens
  misc_RNA (1)...(19): siRNA sense strand
uauaucagcccauguuaga

SEQ ID NO: 1614639 - RNA, 19 nt, Homo sapiens
  misc_RNA (1)...(19): siRNA sense strand
gacagaagaagucagagaa

SEQ ID NO: 1614640 - RNA, 19 nt, Homo sapiens
  misc_RNA (1)...(19): siRNA sense strand
acauacaggaaccuuauua

SEQ ID NO: 1614641 - RNA, 19 nt, Homo sapiens
  misc_RNA (1)...(19): siRNA sense strand
cagaagaagucagagaagu

SEQ ID NO: 1614642 - RNA, 19 nt, Homo sapiens
  misc_RNA (1)...(19): siRNA sense strand
uuucuaggcuuccucauca

SEQ ID NO: 1614643 - RNA, 19 nt, Homo sapiens
  misc_RNA (1)...(19): siRNA sense strand
ccucaucaguuucuuccuu

SEQ ID NO: 1614644 - RNA, 19 nt, Homo sapiens
  misc_RNA (1)...(19): siRNA sense strand
aaauauaucagcccauguu

SEQ ID NO: 1614645 - RNA, 19 nt, Homo sapiens
  misc_RNA (1)...(19): siRNA sense strand
uaacaccacacuccagcua

SEQ ID NO: 1614646 - RNA, 19 nt, Homo sapiens
  misc_RNA (1)...(19): siRNA sense strand
cucaucaguuucuuccuua

SEQ ID NO: 1614647 - RNA, 19 nt, Homo sapiens
  misc_RNA (1)...(19): siRNA sense strand
agaacucucuugugaccuu

SEQ ID NO: 1614648 - RNA, 19 nt, Homo sapiens
  misc_RNA (1)...(19): siRNA sense strand
ccuaaacauugcuuucuag

SEQ ID NO: 1614649 - RNA, 19 nt, Homo sapiens
  misc_RNA (1)...(19): siRNA sense strand
cagagcgguugaaauugaa

SEQ ID NO: 1614650 - RNA, 19 nt, Homo sapiens
  misc_RNA (1)...(19): siRNA sense strand
gaagugaagagagaugugu

SEQ ID NO: 1614651 - RNA, 19 nt, Homo sapiens
  misc_RNA (1)...(19): siRNA sense strand
gguugaaauugaagcucua

SEQ ID NO: 1614652 - RNA, 19 nt, Homo sapiens
  misc_RNA (1)...(19): siRNA sense strand
agacauacaggaaccuuau

SEQ ID NO: 1614653 - RNA, 19 nt, Homo sapiens
  misc_RNA (1)...(19): siRNA sense strand
uaggcuuccucaucaguuu

SEQ ID NO: 1614654 - RNA, 19 nt, Homo sapiens
  misc_RNA (1)...(19): siRNA sense strand
gaaauugaagcucuaacac

SEQ ID NO: 1614655 - RNA, 19 nt, Homo sapiens
  misc_RNA (1)...(19): siRNA sense strand
ugaaauugaagcucuaaca

SEQ ID NO: 1614656 - RNA, 19 nt, Homo sapiens
  misc_RNA (1)...(19): siRNA sense strand
gaagucagagaagugaaga

SEQ ID NO: 1614657 - RNA, 19 nt, Homo sapiens
  misc_RNA (1)...(19): siRNA sense strand
guguaguggcugaaauaua

SEQ ID NO: 1614658 - RNA, 19 nt, Homo sapiens
  misc_RNA (1)...(19): siRNA sense strand
gaaauauaucagcccaugu

SEQ ID NO: 1614659 - RNA, 19 nt, Homo sapiens
  misc_RNA (1)...(19): siRNA sense strand
caacgcaugagucucugaa

SEQ ID NO: 1614660 - RNA, 19 nt, Homo sapiens
  misc_RNA (1)...(19): siRNA sense strand
ggcaacagcagugucuauu

SEQ ID NO: 1614661 - RNA, 19 nt, Homo sapiens
  misc_RNA (1)...(19): siRNA sense strand
cagacauacaggaaccuua

SEQ ID NO: 1614662 - RNA, 19 nt, Homo sapiens
  misc_RNA (1)...(19): siRNA sense strand
aauauaucagcccauguua

SEQ ID NO: 1614663 - RNA, 19 nt, Homo sapiens
  misc_RNA (1)...(19): siRNA sense strand
agaagaagucagagaagug

SEQ ID NO: 1614664 - RNA, 19 nt, Homo sapiens
  misc_RNA (1)...(19): siRNA sense strand
agacagaagaagucagaga

SEQ ID NO: 1614665 - RNA, 19 nt, Homo sapiens
  misc_RNA (1)...(19): siRNA sense strand
uuagacagaagaagucaga

SEQ ID NO: 1614666 - RNA, 19 nt, Homo sapiens
  misc_RNA (1)...(19): siRNA sense strand
agugaaaccucagacauac

SEQ ID NO: 1614667 - RNA, 19 nt, Homo sapiens
  misc_RNA (1)...(19): siRNA sense strand
ugaagagagauguguggaa

SEQ ID NO: 1614668 - RNA, 19 nt, Homo sapiens
  misc_RNA (1)...(19): siRNA sense strand
uaucagcccauguuagaca

SEQ ID NO: 1614669 - RNA, 19 nt, Homo sapiens
  misc_RNA (1)...(19): siRNA sense strand
gacauacaggaaccuuauu

SEQ ID NO: 1614670 - RNA, 19 nt, Homo sapiens
  misc_RNA (1)...(19): siRNA sense strand
cauguuagacagaagaagu

SEQ ID NO: 1614671 - RNA, 19 nt, Homo sapiens
  misc_RNA (1)...(19): siRNA sense strand
gagaagugaagagagaugu

SEQ ID NO: 1614672 - RNA, 19 nt, Homo sapiens
  misc_RNA (1)...(19): siRNA sense strand
cagcccauguuagacagaa

SEQ ID NO: 1614673 - RNA, 19 nt, Homo sapiens
  misc_RNA (1)...(19): siRNA sense strand
ccagugaaaccucagacau

SEQ ID NO: 1614674 - RNA, 19 nt, Homo sapiens
  misc_RNA (1)...(19): siRNA sense strand
caacagcagugucuauuuu

SEQ ID NO: 1614675 - RNA, 19 nt, Homo sapiens
  misc_RNA (1)...(19): siRNA sense strand
gaacucagucaacgcauga

SEQ ID NO: 1614676 - RNA, 19 nt, Homo sapiens
  misc_RNA (1)...(19): siRNA sense strand
gcugggagcuacucagaau

SEQ ID NO: 1614677 - RNA, 19 nt, Homo sapiens
  misc_RNA (1)...(19): siRNA sense strand
gcaacagcagugucuauuu

SEQ ID NO: 1614678 - RNA, 19 nt, Homo sapiens
  misc_RNA (1)...(19): siRNA sense strand
gaacucucuugugaccuua

SEQ ID NO: 1614679 - RNA, 19 nt, Homo sapiens
  misc_RNA (1)...(19): siRNA sense strand
gccuaaacauugcuuucua

SEQ ID NO: 1614680 - RNA, 19 nt, Homo sapiens
  misc_RNA (1)...(19): siRNA sense strand
cagugaaaccucagacaua

SEQ ID NO: 1614681 - RNA, 19 nt, Homo sapiens
  misc_RNA (1)...(19): siRNA sense strand
ggacagagacaauggaaaa

SEQ ID NO: 1614682 - RNA, 19 nt, Homo sapiens
  misc_RNA (1)...(19): siRNA sense strand
cuugugaccuuaccaguga

SEQ ID NO: 1614683 - RNA, 19 nt, Homo sapiens
  misc_RNA (1)...(19): siRNA sense strand
acauacaggaaccuuauua

SEQ ID NO: 1614684 - RNA, 19 nt, Homo sapiens
  misc_RNA (1)...(19): siRNA sense strand
ccucaucaguuucuuccuu

SEQ ID NO: 1614685 - RNA, 19 nt, Homo sapiens
  misc_RNA (1)...(19): siRNA sense strand
uuucuaggcuuccucauca

SEQ ID NO: 1614686 - RNA, 19 nt, Homo sapiens
  misc_RNA (1)...(19): siRNA sense strand
cucaucaguuucuuccuua

SEQ ID NO: 1614687 - RNA, 19 nt, Homo sapiens
  misc_RNA (1)...(19): siRNA sense strand
agaacucucuugugaccuu

SEQ ID NO: 1614688 - RNA, 19 nt, Homo sapiens
  misc_RNA (1)...(19): siRNA sense strand
ccuaaacauugcuuucuag

SEQ ID NO: 1614689 - RNA, 19 nt, Homo sapiens
  misc_RNA (1)...(19): siRNA sense strand
uaggcuuccucaucaguuu

SEQ ID NO: 1614690 - RNA, 19 nt, Homo sapiens
  misc_RNA (1)...(19): siRNA sense strand
agacauacaggaaccuuau

SEQ ID NO: 1614691 - RNA, 19 nt, Homo sapiens
  misc_RNA (1)...(19): siRNA sense strand
caacgcaugagucucugaa

SEQ ID NO: 1614692 - RNA, 19 nt, Homo sapiens
  misc_RNA (1)...(19): siRNA sense strand
ggcaacagcagugucuauu

SEQ ID NO: 1614693 - RNA, 19 nt, Homo sapiens
  misc_RNA (1)...(19): siRNA sense strand
cagacauacaggaaccuua

SEQ ID NO: 1614694 - RNA, 19 nt, Homo sapiens
  misc_RNA (1)...(19): siRNA sense strand
agugaaaccucagacauac

SEQ ID NO: 1614695 - RNA, 19 nt, Homo sapiens
  misc_RNA (1)...(19): siRNA sense strand
gacauacaggaaccuuauu

SEQ ID NO: 1614696 - RNA, 19 nt, Homo sapiens
  misc_RNA (1)...(19): siRNA sense strand
ccagugaaaccucagacau

SEQ ID NO: 1614697 - RNA, 19 nt, Homo sapiens
  misc_RNA (1)...(19): siRNA sense strand
gaagagagauguguggaaa

SEQ ID NO: 1614698 - RNA, 19 nt, Homo sapiens
  misc_RNA (1)...(19): siRNA sense strand
ucacagagcgguugaaauu

SEQ ID NO: 1614699 - RNA, 19 nt, Homo sapiens
  misc_RNA (1)...(19): siRNA sense strand
uguaguggcugaaauauau

SEQ ID NO: 1614700 - RNA, 19 nt, Homo sapiens
  misc_RNA (1)...(19): siRNA sense strand
ucagagaagugaagagaga

SEQ ID NO: 1614701 - RNA, 19 nt, Homo sapiens
  misc_RNA (1)...(19): siRNA sense strand
acagagcgguugaaauuga

SEQ ID NO: 1614702 - RNA, 19 nt, Homo sapiens
  misc_RNA (1)...(19): siRNA sense strand
caacagcagugucuauuuu

SEQ ID NO: 1614703 - RNA, 19 nt, Homo sapiens
  misc_RNA (1)...(19): siRNA sense strand
gaagaagucagagaaguga

SEQ ID NO: 1614704 - RNA, 19 nt, Homo sapiens
  misc_RNA (1)...(19): siRNA sense strand
gaacucagucaacgcauga

SEQ ID NO: 1614705 - RNA, 19 nt, Homo sapiens
  misc_RNA (1)...(19): siRNA sense strand
gcugggagcuacucagaau

SEQ ID NO: 1614706 - RNA, 19 nt, Homo sapiens
  misc_RNA (1)...(19): siRNA sense strand
agagagauguguggaaauu

SEQ ID NO: 1614707 - RNA, 19 nt, Homo sapiens
  misc_RNA (1)...(19): siRNA sense strand
gcaacagcagugucuauuu

SEQ ID NO: 1614708 - RNA, 19 nt, Homo sapiens
  misc_RNA (1)...(19): siRNA sense strand
gaacucucuugugaccuua

SEQ ID NO: 1614709 - RNA, 19 nt, Homo sapiens
  misc_RNA (1)...(19): siRNA sense strand
gccuaaacauugcuuucua

SEQ ID NO: 1614710 - RNA, 19 nt, Homo sapiens
  misc_RNA (1)...(19): siRNA sense strand
cagugaaaccucagacaua

SEQ ID NO: 1614711 - RNA, 19 nt, Homo sapiens
  misc_RNA (1)...(19): siRNA sense strand
ggacagagacaauggaaaa

SEQ ID NO: 1614712 - RNA, 19 nt, Homo sapiens
  misc_RNA (1)...(19): siRNA sense strand
cuugugaccuuaccaguga

SEQ ID NO: 1614713 - RNA, 19 nt, Homo sapiens
  misc_RNA (1)...(19): siRNA sense strand
uauaucagcccauguuaga

SEQ ID NO: 1614714 - RNA, 19 nt, Homo sapiens
  misc_RNA (1)...(19): siRNA sense strand
gacagaagaagucagagaa

SEQ ID NO: 1614715 - RNA, 19 nt, Homo sapiens
  misc_RNA (1)...(19): siRNA sense strand
acauacaggaaccuuauua

SEQ ID NO: 1614716 - RNA, 19 nt, Homo sapiens
  misc_RNA (1)...(19): siRNA sense strand
cagaagaagucagagaagu

SEQ ID NO: 1614717 - RNA, 19 nt, Homo sapiens
  misc_RNA (1)...(19): siRNA sense strand
uuucuaggcuuccucauca

SEQ ID NO: 1614718 - RNA, 19 nt, Homo sapiens
  misc_RNA (1)...(19): siRNA sense strand
ccucaucaguuucuuccuu

SEQ ID NO: 1614719 - RNA, 19 nt, Homo sapiens
  misc_RNA (1)...(19): siRNA sense strand
aaauauaucagcccauguu

SEQ ID NO: 1614720 - RNA, 19 nt, Homo sapiens
  misc_RNA (1)...(19): siRNA sense strand
uaacaccacacuccagcua

SEQ ID NO: 1614721 - RNA, 19 nt, Homo sapiens
  misc_RNA (1)...(19): siRNA sense strand
cucaucaguuucuuccuua

SEQ ID NO: 1614722 - RNA, 19 nt, Homo sapiens
  misc_RNA (1)...(19): siRNA sense strand
agaacucucuugugaccuu

SEQ ID NO: 1614723 - RNA, 19 nt, Homo sapiens
  misc_RNA (1)...(19): siRNA sense strand
ccuaaacauugcuuucuag

SEQ ID NO: 1614724 - RNA, 19 nt, Homo sapiens
  misc_RNA (1)...(19): siRNA sense strand
cagagcgguugaaauugaa

SEQ ID NO: 1614725 - RNA, 19 nt, Homo sapiens
  misc_RNA (1)...(19): siRNA sense strand
gaagugaagagagaugugu

SEQ ID NO: 1614726 - RNA, 19 nt, Homo sapiens
  misc_RNA (1)...(19): siRNA sense strand
gguugaaauugaagcucua

SEQ ID NO: 1614727 - RNA, 19 nt, Homo sapiens
  misc_RNA (1)...(19): siRNA sense strand
agacauacaggaaccuuau

SEQ ID NO: 1614728 - RNA, 19 nt, Homo sapiens
  misc_RNA (1)...(19): siRNA sense strand
uaggcuuccucaucaguuu

SEQ ID NO: 1614729 - RNA, 19 nt, Homo sapiens
  misc_RNA (1)...(19): siRNA sense strand
gaaauugaagcucuaacac

SEQ ID NO: 1614730 - RNA, 19 nt, Homo sapiens
  misc_RNA (1)...(19): siRNA sense strand
ugaaauugaagcucuaaca

SEQ ID NO: 1614731 - RNA, 19 nt, Homo sapiens
  misc_RNA (1)...(19): siRNA sense strand
gaagucagagaagugaaga

SEQ ID NO: 1614732 - RNA, 19 nt, Homo sapiens
  misc_RNA (1)...(19): siRNA sense strand
guguaguggcugaaauaua

SEQ ID NO: 1614733 - RNA, 19 nt, Homo sapiens
  misc_RNA (1)...(19): siRNA sense strand
gaaauauaucagcccaugu

SEQ ID NO: 1614734 - RNA, 19 nt, Homo sapiens
  misc_RNA (1)...(19): siRNA sense strand
caacgcaugagucucugaa

SEQ ID NO: 1614735 - RNA, 19 nt, Homo sapiens
  misc_RNA (1)...(19): siRNA sense strand
ggcaacagcagugucuauu

SEQ ID NO: 1614736 - RNA, 19 nt, Homo sapiens
  misc_RNA (1)...(19): siRNA sense strand
cagacauacaggaaccuua

SEQ ID NO: 1614737 - RNA, 19 nt, Homo sapiens
  misc_RNA (1)...(19): siRNA sense strand
aauauaucagcccauguua

SEQ ID NO: 1614738 - RNA, 19 nt, Homo sapiens
  misc_RNA (1)...(19): siRNA sense strand
agaagaagucagagaagug

SEQ ID NO: 1614739 - RNA, 19 nt, Homo sapiens
  misc_RNA (1)...(19): siRNA sense strand
agacagaagaagucagaga

SEQ ID NO: 1614740 - RNA, 19 nt, Homo sapiens
  misc_RNA (1)...(19): siRNA sense strand
uuagacagaagaagucaga

SEQ ID NO: 1614741 - RNA, 19 nt, Homo sapiens
  misc_RNA (1)...(19): siRNA sense strand
agugaaaccucagacauac

SEQ ID NO: 1614742 - RNA, 19 nt, Homo sapiens
  misc_RNA (1)...(19): siRNA sense strand
ugaagagagauguguggaa

SEQ ID NO: 1614743 - RNA, 19 nt, Homo sapiens
  misc_RNA (1)...(19): siRNA sense strand
uaucagcccauguuagaca

SEQ ID NO: 1614744 - RNA, 19 nt, Homo sapiens
  misc_RNA (1)...(19): siRNA sense strand
gacauacaggaaccuuauu

SEQ ID NO: 1614745 - RNA, 19 nt, Homo sapiens
  misc_RNA (1)...(19): siRNA sense strand
cauguuagacagaagaagu

SEQ ID NO: 1614746 - RNA, 19 nt, Homo sapiens
  misc_RNA (1)...(19): siRNA sense strand
gagaagugaagagagaugu

SEQ ID NO: 1614747 - RNA, 19 nt, Homo sapiens
  misc_RNA (1)...(19): siRNA sense strand
cagcccauguuagacagaa

SEQ ID NO: 1614748 - RNA, 19 nt, Homo sapiens
  misc_RNA (1)...(19): siRNA sense strand
ccagugaaaccucagacau

SEQ ID NO: 1614749 - RNA, 19 nt, Homo sapiens
  misc_RNA (1)...(19): siRNA sense strand
gaagagagauguguggaaa

SEQ ID NO: 1614750 - RNA, 19 nt, Homo sapiens
  misc_RNA (1)...(19): siRNA sense strand
ucacagagcgguugaaauu

SEQ ID NO: 1614751 - RNA, 19 nt, Homo sapiens
  misc_RNA (1)...(19): siRNA sense strand
uguaguggcugaaauauau

SEQ ID NO: 1614752 - RNA, 19 nt, Homo sapiens
  misc_RNA (1)...(19): siRNA sense strand
ucagagaagugaagagaga

SEQ ID NO: 1614753 - RNA, 19 nt, Homo sapiens
  misc_RNA (1)...(19): siRNA sense strand
acagagcgguugaaauuga

SEQ ID NO: 1614754 - RNA, 19 nt, Homo sapiens
  misc_RNA (1)...(19): siRNA sense strand
caacagcagugucuauuuu

SEQ ID NO: 1614755 - RNA, 19 nt, Homo sapiens
  misc_RNA (1)...(19): siRNA sense strand
gaagaagucagagaaguga

SEQ ID NO: 1614756 - RNA, 19 nt, Homo sapiens
  misc_RNA (1)...(19): siRNA sense strand
gaacucagucaacgcauga

SEQ ID NO: 1614757 - RNA, 19 nt, Homo sapiens
  misc_RNA (1)...(19): siRNA sense strand
gcugggagcuacucagaau

SEQ ID NO: 1614758 - RNA, 19 nt, Homo sapiens
  misc_RNA (1)...(19): siRNA sense strand
agagagauguguggaaauu

SEQ ID NO: 1614759 - RNA, 19 nt, Homo sapiens
  misc_RNA (1)...(19): siRNA sense strand
gcaacagcagugucuauuu

SEQ ID NO: 1614760 - RNA, 19 nt, Homo sapiens
  misc_RNA (1)...(19): siRNA sense strand
gaacucucuugugaccuua

SEQ ID NO: 1614761 - RNA, 19 nt, Homo sapiens
  misc_RNA (1)...(19): siRNA sense strand
gccuaaacauugcuuucua

SEQ ID NO: 1614762 - RNA, 19 nt, Homo sapiens
  misc_RNA (1)...(19): siRNA sense strand
cagugaaaccucagacaua

SEQ ID NO: 1614763 - RNA, 19 nt, Homo sapiens
  misc_RNA (1)...(19): siRNA sense strand
ggacagagacaauggaaaa

SEQ ID NO: 1614764 - RNA, 19 nt, Homo sapiens
  misc_RNA (1)...(19): siRNA sense strand
cuugugaccuuaccaguga

SEQ ID NO: 1614765 - RNA, 19 nt, Homo sapiens
  misc_RNA (1)...(19): siRNA sense strand
uauaucagcccauguuaga

SEQ ID NO: 1614766 - RNA, 19 nt, Homo sapiens
  misc_RNA (1)...(19): siRNA sense strand
gacagaagaagucagagaa

SEQ ID NO: 1614767 - RNA, 19 nt, Homo sapiens
  misc_RNA (1)...(19): siRNA sense strand
acauacaggaaccuuauua

SEQ ID NO: 1614768 - RNA, 19 nt, Homo sapiens
  misc_RNA (1)...(19): siRNA sense strand
cagaagaagucagagaagu

SEQ ID NO: 1614769 - RNA, 19 nt, Homo sapiens
  misc_RNA (1)...(19): siRNA sense strand
uuucuaggcuuccucauca

SEQ ID NO: 1614770 - RNA, 19 nt, Homo sapiens
  misc_RNA (1)...(19): siRNA sense strand
ccucaucaguuucuuccuu

SEQ ID NO: 1614771 - RNA, 19 nt, Homo sapiens
  misc_RNA (1)...(19): siRNA sense strand
aaauauaucagcccauguu

SEQ ID NO: 1614772 - RNA, 19 nt, Homo sapiens
  misc_RNA (1)...(19): siRNA sense strand
uaacaccacacuccagcua

SEQ ID NO: 1614773 - RNA, 19 nt, Homo sapiens
  misc_RNA (1)...(19): siRNA sense strand
cucaucaguuucuuccuua

SEQ ID NO: 1614774 - RNA, 19 nt, Homo sapiens
  misc_RNA (1)...(19): siRNA sense strand
agaacucucuugugaccuu

SEQ ID NO: 1614775 - RNA, 19 nt, Homo sapiens
  misc_RNA (1)...(19): siRNA sense strand
ccuaaacauugcuuucuag

SEQ ID NO: 1614776 - RNA, 19 nt, Homo sapiens
  misc_RNA (1)...(19): siRNA sense strand
cagagcgguugaaauugaa

SEQ ID NO: 1614777 - RNA, 19 nt, Homo sapiens
  misc_RNA (1)...(19): siRNA sense strand
gaagugaagagagaugugu

SEQ ID NO: 1614778 - RNA, 19 nt, Homo sapiens
  misc_RNA (1)...(19): siRNA sense strand
gguugaaauugaagcucua

SEQ ID NO: 1614779 - RNA, 19 nt, Homo sapiens
  misc_RNA (1)...(19): siRNA sense strand
agacauacaggaaccuuau

SEQ ID NO: 1614780 - RNA, 19 nt, Homo sapiens
  misc_RNA (1)...(19): siRNA sense strand
uaggcuuccucaucaguuu

SEQ ID NO: 1614781 - RNA, 19 nt, Homo sapiens
  misc_RNA (1)...(19): siRNA sense strand
gaaauugaagcucuaacac

SEQ ID NO: 1614782 - RNA, 19 nt, Homo sapiens
  misc_RNA (1)...(19): siRNA sense strand
ugaaauugaagcucuaaca

SEQ ID NO: 1614783 - RNA, 19 nt, Homo sapiens
  misc_RNA (1)...(19): siRNA sense strand
gaagucagagaagugaaga

SEQ ID NO: 1614784 - RNA, 19 nt, Homo sapiens
  misc_RNA (1)...(19): siRNA sense strand
guguaguggcugaaauaua

SEQ ID NO: 1614785 - RNA, 19 nt, Homo sapiens
  misc_RNA (1)...(19): siRNA sense strand
gaaauauaucagcccaugu

SEQ ID NO: 1614786 - RNA, 19 nt, Homo sapiens
  misc_RNA (1)...(19): siRNA sense strand
caacgcaugagucucugaa

SEQ ID NO: 1614787 - RNA, 19 nt, Homo sapiens
  misc_RNA (1)...(19): siRNA sense strand
ggcaacagcagugucuauu

SEQ ID NO: 1614788 - RNA, 19 nt, Homo sapiens
  misc_RNA (1)...(19): siRNA sense strand
cagacauacaggaaccuua

SEQ ID NO: 1614789 - RNA, 19 nt, Homo sapiens
  misc_RNA (1)...(19): siRNA sense strand
aauauaucagcccauguua

SEQ ID NO: 1614790 - RNA, 19 nt, Homo sapiens
  misc_RNA (1)...(19): siRNA sense strand
agaagaagucagagaagug

SEQ ID NO: 1614791 - RNA, 19 nt, Homo sapiens
  misc_RNA (1)...(19): siRNA sense strand
agacagaagaagucagaga

SEQ ID NO: 1614792 - RNA, 19 nt, Homo sapiens
  misc_RNA (1)...(19): siRNA sense strand
uuagacagaagaagucaga

SEQ ID NO: 1614793 - RNA, 19 nt, Homo sapiens
  misc_RNA (1)...(19): siRNA sense strand
agugaaaccucagacauac

SEQ ID NO: 1614794 - RNA, 19 nt, Homo sapiens
  misc_RNA (1)...(19): siRNA sense strand
ugaagagagauguguggaa

SEQ ID NO: 1614795 - RNA, 19 nt, Homo sapiens
  misc_RNA (1)...(19): siRNA sense strand
uaucagcccauguuagaca

SEQ ID NO: 1614796 - RNA, 19 nt, Homo sapiens
  misc_RNA (1)...(19): siRNA sense strand
gacauacaggaaccuuauu

SEQ ID NO: 1614797 - RNA, 19 nt, Homo sapiens
  misc_RNA (1)...(19): siRNA sense strand
cauguuagacagaagaagu

SEQ ID NO: 1614798 - RNA, 19 nt, Homo sapiens
  misc_RNA (1)...(19): siRNA sense strand
gagaagugaagagagaugu

SEQ ID NO: 1614799 - RNA, 19 nt, Homo sapiens
  misc_RNA (1)...(19): siRNA sense strand
cagcccauguuagacagaa

SEQ ID NO: 1614800 - RNA, 19 nt, Homo sapiens
  misc_RNA (1)...(19): siRNA sense strand
ccagugaaaccucagacau

SEQ ID NO: 1614801 - RNA, 19 nt, Homo sapiens
  misc_RNA (1)...(19): siRNA sense strand
caacagcagugucuauuuu

SEQ ID NO: 1614802 - RNA, 19 nt, Homo sapiens
  misc_RNA (1)...(19): siRNA sense strand
gaacucagucaacgcauga

SEQ ID NO: 1614803 - RNA, 19 nt, Homo sapiens
  misc_RNA (1)...(19): siRNA sense strand
gcugggagcuacucagaau

SEQ ID NO: 1614804 - RNA, 19 nt, Homo sapiens
  misc_RNA (1)...(19): siRNA sense strand
gcaacagcagugucuauuu

SEQ ID NO: 1614805 - RNA, 19 nt, Homo sapiens
  misc_RNA (1)...(19): siRNA sense strand
gaacucucuugugaccuua

SEQ ID NO: 1614806 - RNA, 19 nt, Homo sapiens
  misc_RNA (1)...(19): siRNA sense strand
gccuaaacauugcuuucua

SEQ ID NO: 1614807 - RNA, 19 nt, Homo sapiens
  misc_RNA (1)...(19): siRNA sense strand
cagugaaaccucagacaua

SEQ ID NO: 1614808 - RNA, 19 nt, Homo sapiens
  misc_RNA (1)...(19): siRNA sense strand
ggacagagacaauggaaaa

SEQ ID NO: 1614809 - RNA, 19 nt, Homo sapiens
  misc_RNA (1)...(19): siRNA sense strand
cuugugaccuuaccaguga

SEQ ID NO: 1614810 - RNA, 19 nt, Homo sapiens
  misc_RNA (1)...(19): siRNA sense strand
acauacaggaaccuuauua

SEQ ID NO: 1614811 - RNA, 19 nt, Homo sapiens
  misc_RNA (1)...(19): siRNA sense strand
ccucaucaguuucuuccuu

SEQ ID NO: 1614812 - RNA, 19 nt, Homo sapiens
  misc_RNA (1)...(19): siRNA sense strand
uuucuaggcuuccucauca

SEQ ID NO: 1614813 - RNA, 19 nt, Homo sapiens
  misc_RNA (1)...(19): siRNA sense strand
cucaucaguuucuuccuua

SEQ ID NO: 1614814 - RNA, 19 nt, Homo sapiens
  misc_RNA (1)...(19): siRNA sense strand
agaacucucuugugaccuu

SEQ ID NO: 1614815 - RNA, 19 nt, Homo sapiens
  misc_RNA (1)...(19): siRNA sense strand
ccuaaacauugcuuucuag

SEQ ID NO: 1614816 - RNA, 19 nt, Homo sapiens
  misc_RNA (1)...(19): siRNA sense strand
uaggcuuccucaucaguuu

SEQ ID NO: 1614817 - RNA, 19 nt, Homo sapiens
  misc_RNA (1)...(19): siRNA sense strand
agacauacaggaaccuuau

SEQ ID NO: 1614818 - RNA, 19 nt, Homo sapiens
  misc_RNA (1)...(19): siRNA sense strand
caacgcaugagucucugaa

SEQ ID NO: 1614819 - RNA, 19 nt, Homo sapiens
  misc_RNA (1)...(19): siRNA sense strand
ggcaacagcagugucuauu

SEQ ID NO: 1614820 - RNA, 19 nt, Homo sapiens
  misc_RNA (1)...(19): siRNA sense strand
cagacauacaggaaccuua

SEQ ID NO: 1614821 - RNA, 19 nt, Homo sapiens
  misc_RNA (1)...(19): siRNA sense strand
agugaaaccucagacauac

SEQ ID NO: 1614822 - RNA, 19 nt, Homo sapiens
  misc_RNA (1)...(19): siRNA sense strand
gacauacaggaaccuuauu

SEQ ID NO: 1614823 - RNA, 19 nt, Homo sapiens
  misc_RNA (1)...(19): siRNA sense strand
ccagugaaaccucagacau

SEQ ID NO: 1614824 - RNA, 19 nt, Homo sapiens
  misc_RNA (1)...(19): siRNA sense strand
aaacagaacuuccuacuuu

SEQ ID NO: 1614825 - RNA, 19 nt, Homo sapiens
  misc_RNA (1)...(19): siRNA sense strand
caagaaagguaaucuguaa

SEQ ID NO: 1614826 - RNA, 19 nt, Homo sapiens
  misc_RNA (1)...(19): siRNA sense strand
gaacuggauugaauuacuu

SEQ ID NO: 1614827 - RNA, 19 nt, Homo sapiens
  misc_RNA (1)...(19): siRNA sense strand
uuacguggcuguauguuaa

SEQ ID NO: 1614828 - RNA, 19 nt, Homo sapiens
  misc_RNA (1)...(19): siRNA sense strand
gaauuagcauugagaggaa

SEQ ID NO: 1614829 - RNA, 19 nt, Homo sapiens
  misc_RNA (1)...(19): siRNA sense strand
ggaagccguucuugacaaa

SEQ ID NO: 1614830 - RNA, 19 nt, Homo sapiens
  misc_RNA (1)...(19): siRNA sense strand
gggauguucuucuugauga

SEQ ID NO: 1614831 - RNA, 19 nt, Homo sapiens
  misc_RNA (1)...(19): siRNA sense strand
caacagagaaacagaacuu

SEQ ID NO: 1614832 - RNA, 19 nt, Homo sapiens
  misc_RNA (1)...(19): siRNA sense strand
gagaggaagguuacaacua

SEQ ID NO: 1614833 - RNA, 19 nt, Homo sapiens
  misc_RNA (1)...(19): siRNA sense strand
gaaacucagccuccagaaa

SEQ ID NO: 1614834 - RNA, 19 nt, Homo sapiens
  misc_RNA (1)...(19): siRNA sense strand
ucaaggaccgcgaggguua

SEQ ID NO: 1614835 - RNA, 19 nt, Homo sapiens
  misc_RNA (1)...(19): siRNA sense strand
gaaacagaacuuccuacuu

SEQ ID NO: 1614836 - RNA, 19 nt, Homo sapiens
  misc_RNA (1)...(19): siRNA sense strand
agaggaagguuacaacuag

SEQ ID NO: 1614837 - RNA, 19 nt, Homo sapiens
  misc_RNA (1)...(19): siRNA sense strand
gaaauguacgggaacgauu

SEQ ID NO: 1614838 - RNA, 19 nt, Homo sapiens
  misc_RNA (1)...(19): siRNA sense strand
uaagucagaugcuccaaca

SEQ ID NO: 1614839 - RNA, 19 nt, Homo sapiens
  misc_RNA (1)...(19): siRNA sense strand
ggaaaaggguguauugaca

SEQ ID NO: 1614840 - RNA, 19 nt, Homo sapiens
  misc_RNA (1)...(19): siRNA sense strand
cagaaacgguccagaacug

SEQ ID NO: 1614841 - RNA, 19 nt, Homo sapiens
  misc_RNA (1)...(19): siRNA sense strand
gaaagguaaucuguaaguc

SEQ ID NO: 1614842 - RNA, 19 nt, Homo sapiens
  misc_RNA (1)...(19): siRNA sense strand
gaagcucugaagcauguua

SEQ ID NO: 1614843 - RNA, 19 nt, Homo sapiens
  misc_RNA (1)...(19): siRNA sense strand
ggacgagcaguaugauuug

SEQ ID NO: 1614844 - RNA, 19 nt, Homo sapiens
  misc_RNA (1)...(19): siRNA sense strand
gaggaagguuacaacuaga

SEQ ID NO: 1614845 - RNA, 19 nt, Homo sapiens
  misc_RNA (1)...(19): siRNA sense strand
aaauguacgggaacgauua

SEQ ID NO: 1614846 - RNA, 19 nt, Homo sapiens
  misc_RNA (1)...(19): siRNA sense strand
acuagaggcuuguggaaug

SEQ ID NO: 1614847 - RNA, 19 nt, Homo sapiens
  misc_RNA (1)...(19): siRNA sense strand
guacgggaacgauuagcua

SEQ ID NO: 1614848 - RNA, 19 nt, Homo sapiens
  misc_RNA (1)...(19): siRNA sense strand
gcggcagcuucucgacuua

SEQ ID NO: 1614849 - RNA, 19 nt, Homo sapiens
  misc_RNA (1)...(19): siRNA sense strand
cuguauaucaucuggauua

SEQ ID NO: 1614850 - RNA, 19 nt, Homo sapiens
  misc_RNA (1)...(19): siRNA sense strand
uauaucaucuggauuacgu

SEQ ID NO: 1614851 - RNA, 19 nt, Homo sapiens
  misc_RNA (1)...(19): siRNA sense strand
caagggcgacuccaaggaa

SEQ ID NO: 1614852 - RNA, 19 nt, Homo sapiens
  misc_RNA (1)...(19): siRNA sense strand
ggcuguauguuaauugaau

SEQ ID NO: 1614853 - RNA, 19 nt, Homo sapiens
  misc_RNA (1)...(19): siRNA sense strand
ccucggacguccuggagaa

SEQ ID NO: 1614854 - RNA, 19 nt, Homo sapiens
  misc_RNA (1)...(19): siRNA sense strand
aagcagcgccucaucaaga

SEQ ID NO: 1614855 - RNA, 19 nt, Homo sapiens
  misc_RNA (1)...(19): siRNA sense strand
ccgcgaggguuacacauca

SEQ ID NO: 1614856 - RNA, 19 nt, Homo sapiens
  misc_RNA (1)...(19): siRNA sense strand
uggauugaauuacuuagug

SEQ ID NO: 1614857 - RNA, 19 nt, Homo sapiens
  misc_RNA (1)...(19): siRNA sense strand
gacuguauaucaucuggau

SEQ ID NO: 1614858 - RNA, 19 nt, Homo sapiens
  misc_RNA (1)...(19): siRNA sense strand
cuuagacccugaaguggaa

SEQ ID NO: 1614859 - RNA, 19 nt, Homo sapiens
  misc_RNA (1)...(19): siRNA sense strand
uggacgagcaguaugauuu

SEQ ID NO: 1614860 - RNA, 19 nt, Homo sapiens
  misc_RNA (1)...(19): siRNA sense strand
ccaauaacaacauuaagca

SEQ ID NO: 1614861 - RNA, 19 nt, Homo sapiens
  misc_RNA (1)...(19): siRNA sense strand
acaagaaagguaaucugua

SEQ ID NO: 1614862 - RNA, 19 nt, Homo sapiens
  misc_RNA (1)...(19): siRNA sense strand
caacuagaggcuuguggaa

SEQ ID NO: 1614863 - RNA, 19 nt, Homo sapiens
  misc_RNA (1)...(19): siRNA sense strand
ccucaccaauaacaacauu

SEQ ID NO: 1614864 - RNA, 19 nt, Homo sapiens
  misc_RNA (1)...(19): siRNA sense strand
aaacgcggcugacccugau

SEQ ID NO: 1614865 - RNA, 19 nt, Homo sapiens
  misc_RNA (1)...(19): siRNA sense strand
ugaagcauguuaaggaaac

SEQ ID NO: 1614866 - RNA, 19 nt, Homo sapiens
  misc_RNA (1)...(19): siRNA sense strand
ucugaagcauguuaaggaa

SEQ ID NO: 1614867 - RNA, 19 nt, Homo sapiens
  misc_RNA (1)...(19): siRNA sense strand
ggauguucuucuugaugaa

SEQ ID NO: 1614868 - RNA, 19 nt, Homo sapiens
  misc_RNA (1)...(19): siRNA sense strand
guggcuguauguuaauuga

SEQ ID NO: 1614869 - RNA, 19 nt, Homo sapiens
  misc_RNA (1)...(19): siRNA sense strand
ggaaugagacguaaaaguc

SEQ ID NO: 1614870 - RNA, 19 nt, Homo sapiens
  misc_RNA (1)...(19): siRNA sense strand
cuagaggcuuguggaauga

SEQ ID NO: 1614871 - RNA, 19 nt, Homo sapiens
  misc_RNA (1)...(19): siRNA sense strand
ugacaacagagaaacagaa

SEQ ID NO: 1614872 - RNA, 19 nt, Homo sapiens
  misc_RNA (1)...(19): siRNA sense strand
aaacucagccuccagaaac

SEQ ID NO: 1614873 - RNA, 19 nt, Homo sapiens
  misc_RNA (1)...(19): siRNA sense strand
ugaaggccaacaccaauga

SEQ ID NO: 1614874 - RNA, 19 nt, Homo sapiens
  misc_RNA (1)...(19): siRNA sense strand
gcaggacgacgacgacaag

SEQ ID NO: 1614875 - RNA, 19 nt, Homo sapiens
  misc_RNA (1)...(19): siRNA sense strand
caacaccaaugagguucug

SEQ ID NO: 1614876 - RNA, 19 nt, Homo sapiens
  misc_RNA (1)...(19): siRNA sense strand
uggauuacguggcuguaug

SEQ ID NO: 1614877 - RNA, 19 nt, Homo sapiens
  misc_RNA (1)...(19): siRNA sense strand
aaagguaaucuguaaguca

SEQ ID NO: 1614878 - RNA, 19 nt, Homo sapiens
  misc_RNA (1)...(19): siRNA sense strand
caucaagaaaguacaggaa

SEQ ID NO: 1614879 - RNA, 19 nt, Homo sapiens
  misc_RNA (1)...(19): siRNA sense strand
augaagcucugaagcaugu

SEQ ID NO: 1614880 - RNA, 19 nt, Homo sapiens
  misc_RNA (1)...(19): siRNA sense strand
ugaugaagcucugaagcau

SEQ ID NO: 1614881 - RNA, 19 nt, Homo sapiens
  misc_RNA (1)...(19): siRNA sense strand
uaacaagaaagguaaucug

SEQ ID NO: 1614882 - RNA, 19 nt, Homo sapiens
  misc_RNA (1)...(19): siRNA sense strand
agaacuggauugaauuacu

SEQ ID NO: 1614883 - RNA, 19 nt, Homo sapiens
  misc_RNA (1)...(19): siRNA sense strand
aagccguucuugacaaaug

SEQ ID NO: 1614884 - RNA, 19 nt, Homo sapiens
  misc_RNA (1)...(19): siRNA sense strand
guacaggaagccguucuug

SEQ ID NO: 1614885 - RNA, 19 nt, Homo sapiens
  misc_RNA (1)...(19): siRNA sense strand
gaaaaggguguauugacaa

SEQ ID NO: 1614886 - RNA, 19 nt, Homo sapiens
  misc_RNA (1)...(19): siRNA sense strand
ggccaacaccaaugagguu

SEQ ID NO: 1614887 - RNA, 19 nt, Homo sapiens
  misc_RNA (1)...(19): siRNA sense strand
acacauccccucaccaaua

SEQ ID NO: 1614888 - RNA, 19 nt, Homo sapiens
  misc_RNA (1)...(19): siRNA sense strand
ggauuacguggcuguaugu

SEQ ID NO: 1614889 - RNA, 19 nt, Homo sapiens
  misc_RNA (1)...(19): siRNA sense strand
ggcagcuucucgacuuaga

SEQ ID NO: 1614890 - RNA, 19 nt, Homo sapiens
  misc_RNA (1)...(19): siRNA sense strand
agaaagguaaucuguaagu

SEQ ID NO: 1614891 - RNA, 19 nt, Homo sapiens
  misc_RNA (1)...(19): siRNA sense strand
ggaaacucagccuccagaa

SEQ ID NO: 1614892 - RNA, 19 nt, Homo sapiens
  misc_RNA (1)...(19): siRNA sense strand
gcauugagaggaagguuac

SEQ ID NO: 1614893 - RNA, 19 nt, Homo sapiens
  misc_RNA (1)...(19): siRNA sense strand
gcuuguggaaugagacgua

SEQ ID NO: 1614894 - RNA, 19 nt, Homo sapiens
  misc_RNA (1)...(19): siRNA sense strand
aggaagccguucuugacaa

SEQ ID NO: 1614895 - RNA, 19 nt, Homo sapiens
  misc_RNA (1)...(19): siRNA sense strand
cacauccccucaccaauaa

SEQ ID NO: 1614896 - RNA, 19 nt, Homo sapiens
  misc_RNA (1)...(19): siRNA sense strand
agagaaacagaacuuccua

SEQ ID NO: 1614897 - RNA, 19 nt, Homo sapiens
  misc_RNA (1)...(19): siRNA sense strand
ggaccgcgaggguuacaca

SEQ ID NO: 1614898 - RNA, 19 nt, Homo sapiens
  misc_RNA (1)...(19): siRNA sense strand
caacacauccccucaccaa

SEQ ID NO: 1614899 - RNA, 19 nt, Homo sapiens
  misc_RNA (1)...(19): siRNA sense strand
aagggcgacuccaaggaaa

SEQ ID NO: 1614900 - RNA, 19 nt, Homo sapiens
  misc_RNA (1)...(19): siRNA sense strand
uuaagcagcgccucaucaa

SEQ ID NO: 1614901 - RNA, 19 nt, Homo sapiens
  misc_RNA (1)...(19): siRNA sense strand
gcuugcuggcccucauuua

SEQ ID NO: 1614902 - RNA, 19 nt, Homo sapiens
  misc_RNA (1)...(19): siRNA sense strand
ugaaguggaaugucugaag

SEQ ID NO: 1614903 - RNA, 19 nt, Homo sapiens
  misc_RNA (1)...(19): siRNA sense strand
cgaggguuacacaucauuu

SEQ ID NO: 1614904 - RNA, 19 nt, Homo sapiens
  misc_RNA (1)...(19): siRNA sense strand
gcgaggguuacacaucauu

SEQ ID NO: 1614905 - RNA, 19 nt, Homo sapiens
  misc_RNA (1)...(19): siRNA sense strand
uacaggaagccguucuuga

SEQ ID NO: 1614906 - RNA, 19 nt, Homo sapiens
  misc_RNA (1)...(19): siRNA sense strand
uguauugacaacagagaaa

SEQ ID NO: 1614907 - RNA, 19 nt, Homo sapiens
  misc_RNA (1)...(19): siRNA sense strand
ugcggcagcuucucgacuu

SEQ ID NO: 1614908 - RNA, 19 nt, Homo sapiens
  misc_RNA (1)...(19): siRNA sense strand
caagagagugcggcagcuu

SEQ ID NO: 1614909 - RNA, 19 nt, Homo sapiens
  misc_RNA (1)...(19): siRNA sense strand
aacaagaaagguaaucugu

SEQ ID NO: 1614910 - RNA, 19 nt, Homo sapiens
  misc_RNA (1)...(19): siRNA sense strand
agcagcgccucaucaagaa

SEQ ID NO: 1614911 - RNA, 19 nt, Homo sapiens
  misc_RNA (1)...(19): siRNA sense strand
gcucggagauggugaaaua

SEQ ID NO: 1614912 - RNA, 19 nt, Homo sapiens
  misc_RNA (1)...(19): siRNA sense strand
cgaagaggcuuauuaugga

SEQ ID NO: 1614913 - RNA, 19 nt, Homo sapiens
  misc_RNA (1)...(19): siRNA sense strand
gaagaagagucccaucaca

SEQ ID NO: 1614914 - RNA, 19 nt, Homo sapiens
  misc_RNA (1)...(19): siRNA sense strand
gaagaggcuuauuauggaa

SEQ ID NO: 1614915 - RNA, 19 nt, Homo sapiens
  misc_RNA (1)...(19): siRNA sense strand
gaagcaaccuggaaaucag

SEQ ID NO: 1614916 - RNA, 19 nt, Homo sapiens
  misc_RNA (1)...(19): siRNA sense strand
cagcagcgauaucucaguu

SEQ ID NO: 1614917 - RNA, 19 nt, Homo sapiens
  misc_RNA (1)...(19): siRNA sense strand
acacuuacauccugaucaa

SEQ ID NO: 1614918 - RNA, 19 nt, Homo sapiens
  misc_RNA (1)...(19): siRNA sense strand
uggccaaacugcauaagaa

SEQ ID NO: 1614919 - RNA, 19 nt, Homo sapiens
  misc_RNA (1)...(19): siRNA sense strand
caaaguaucauuuccucuu

SEQ ID NO: 1614920 - RNA, 19 nt, Homo sapiens
  misc_RNA (1)...(19): siRNA sense strand
gauugggucuguuaaugau

SEQ ID NO: 1614921 - RNA, 19 nt, Homo sapiens
  misc_RNA (1)...(19): siRNA sense strand
ucacaccaauccaccagaa

SEQ ID NO: 1614922 - RNA, 19 nt, Homo sapiens
  misc_RNA (1)...(19): siRNA sense strand
gagauggugaaauacguua

SEQ ID NO: 1614923 - RNA, 19 nt, Homo sapiens
  misc_RNA (1)...(19): siRNA sense strand
uauccgaagaggcuuauua

SEQ ID NO: 1614924 - RNA, 19 nt, Homo sapiens
  misc_RNA (1)...(19): siRNA sense strand
gugcaacccucaaaguauc

SEQ ID NO: 1614925 - RNA, 19 nt, Homo sapiens
  misc_RNA (1)...(19): siRNA sense strand
gcagcgauaucucaguuac

SEQ ID NO: 1614926 - RNA, 19 nt, Homo sapiens
  misc_RNA (1)...(19): siRNA sense strand
acaccaauccaccagaaua

SEQ ID NO: 1614927 - RNA, 19 nt, Homo sapiens
  misc_RNA (1)...(19): siRNA sense strand
ccaauccaccagaauauga

SEQ ID NO: 1614928 - RNA, 19 nt, Homo sapiens
  misc_RNA (1)...(19): siRNA sense strand
gauccugggccuuaucuau

SEQ ID NO: 1614929 - RNA, 19 nt, Homo sapiens
  misc_RNA (1)...(19): siRNA sense strand
gcaagcaccacacuuacau

SEQ ID NO: 1614930 - RNA, 19 nt, Homo sapiens
  misc_RNA (1)...(19): siRNA sense strand
ccgaagaggcuuauuaugg

SEQ ID NO: 1614931 - RNA, 19 nt, Homo sapiens
  misc_RNA (1)...(19): siRNA sense strand
ggugcaacccucaaaguau

SEQ ID NO: 1614932 - RNA, 19 nt, Homo sapiens
  misc_RNA (1)...(19): siRNA sense strand
ggaaaucagcaagauggaa

SEQ ID NO: 1614933 - RNA, 19 nt, Homo sapiens
  misc_RNA (1)...(19): siRNA sense strand
cgaagcaaccuggaaauca

SEQ ID NO: 1614934 - RNA, 19 nt, Homo sapiens
  misc_RNA (1)...(19): siRNA sense strand
ccaaacugcauaagaagga

SEQ ID NO: 1614935 - RNA, 19 nt, Homo sapiens
  misc_RNA (1)...(19): siRNA sense strand
ggagauggugaaauacguu

SEQ ID NO: 1614936 - RNA, 19 nt, Homo sapiens
  misc_RNA (1)...(19): siRNA sense strand
caaacugcauaagaaggaa

SEQ ID NO: 1614937 - RNA, 19 nt, Homo sapiens
  misc_RNA (1)...(19): siRNA sense strand
gagcaucugcgguaugucu

SEQ ID NO: 1614938 - RNA, 19 nt, Homo sapiens
  misc_RNA (1)...(19): siRNA sense strand
ggcuuauuauggaagauuu

SEQ ID NO: 1614939 - RNA, 19 nt, Homo sapiens
  misc_RNA (1)...(19): siRNA sense strand
uggcggaguuggugcaguu

SEQ ID NO: 1614940 - RNA, 19 nt, Homo sapiens
  misc_RNA (1)...(19): siRNA sense strand
ugaaagacaagaagaagag

SEQ ID NO: 1614941 - RNA, 19 nt, Homo sapiens
  misc_RNA (1)...(19): siRNA sense strand
ugcgguaugucuuugguuu

SEQ ID NO: 1614942 - RNA, 19 nt, Homo sapiens
  misc_RNA (1)...(19): siRNA sense strand
caucugcgguaugucuuug

SEQ ID NO: 1614943 - RNA, 19 nt, Homo sapiens
  misc_RNA (1)...(19): siRNA sense strand
gugaaagacaagaagaaga

SEQ ID NO: 1614944 - RNA, 19 nt, Homo sapiens
  misc_RNA (1)...(19): siRNA sense strand
gcaucugcgguaugucuuu

SEQ ID NO: 1614945 - RNA, 19 nt, Homo sapiens
  misc_RNA (1)...(19): siRNA sense strand
gugcagcagcgauaucuca

SEQ ID NO: 1614946 - RNA, 19 nt, Homo sapiens
  misc_RNA (1)...(19): siRNA sense strand
caccaauccaccagaauau

SEQ ID NO: 1614947 - RNA, 19 nt, Homo sapiens
  misc_RNA (1)...(19): siRNA sense strand
agauugggucuguuaauga

SEQ ID NO: 1614948 - RNA, 19 nt, Homo sapiens
  misc_RNA (1)...(19): siRNA sense strand
uccugggccuuaucuauau

SEQ ID NO: 1614949 - RNA, 19 nt, Homo sapiens
  misc_RNA (1)...(19): siRNA sense strand
uugggucuguuaaugauga

SEQ ID NO: 1614950 - RNA, 19 nt, Homo sapiens
  misc_RNA (1)...(19): siRNA sense strand
aagaagaagagucccauca

SEQ ID NO: 1614951 - RNA, 19 nt, Homo sapiens
  misc_RNA (1)...(19): siRNA sense strand
caauccaccagaauaugaa

SEQ ID NO: 1614952 - RNA, 19 nt, Homo sapiens
  misc_RNA (1)...(19): siRNA sense strand
gcaguuccuccuggugaaa

SEQ ID NO: 1614953 - RNA, 19 nt, Homo sapiens
  misc_RNA (1)...(19): siRNA sense strand
auacguuauuggagacuug

SEQ ID NO: 1614954 - RNA, 19 nt, Homo sapiens
  misc_RNA (1)...(19): siRNA sense strand
gaaagacaagaagaagagu

SEQ ID NO: 1614955 - RNA, 19 nt, Homo sapiens
  misc_RNA (1)...(19): siRNA sense strand
ggagauggccccagauugg

SEQ ID NO: 1614956 - RNA, 19 nt, Homo sapiens
  misc_RNA (1)...(19): siRNA sense strand
aaguaucauuuccucuuug

SEQ ID NO: 1614957 - RNA, 19 nt, Homo sapiens
  misc_RNA (1)...(19): siRNA sense strand
auuggagacuugaagauuc

SEQ ID NO: 1614958 - RNA, 19 nt, Homo sapiens
  misc_RNA (1)...(19): siRNA sense strand
cuuacauccugaucaacaa

SEQ ID NO: 1614959 - RNA, 19 nt, Homo sapiens
  misc_RNA (1)...(19): siRNA sense strand
uauuggagacuugaagauu

SEQ ID NO: 1614960 - RNA, 19 nt, Homo sapiens
  misc_RNA (1)...(19): siRNA sense strand
ggugaaagacaagaagaag

SEQ ID NO: 1614961 - RNA, 19 nt, Homo sapiens
  misc_RNA (1)...(19): siRNA sense strand
guuauuggagacuugaaga

SEQ ID NO: 1614962 - RNA, 19 nt, Homo sapiens
  misc_RNA (1)...(19): siRNA sense strand
accgcaagcaccacacuua

SEQ ID NO: 1614963 - RNA, 19 nt, Homo sapiens
  misc_RNA (1)...(19): siRNA sense strand
agaggcuuauuauggaaga

SEQ ID NO: 1614964 - RNA, 19 nt, Homo sapiens
  misc_RNA (1)...(19): siRNA sense strand
ggguauccgaagaggcuua

SEQ ID NO: 1614965 - RNA, 19 nt, Homo sapiens
  misc_RNA (1)...(19): siRNA sense strand
augaugauccugggccuua

SEQ ID NO: 1614966 - RNA, 19 nt, Homo sapiens
  misc_RNA (1)...(19): siRNA sense strand
ggagaagucuggcgaggaa

SEQ ID NO: 1614967 - RNA, 19 nt, Homo sapiens
  misc_RNA (1)...(19): siRNA sense strand
cgagauaacaugaguauug

SEQ ID NO: 1614968 - RNA, 19 nt, Homo sapiens
  misc_RNA (1)...(19): siRNA sense strand
gagauaacaugaguauugu

SEQ ID NO: 1614969 - RNA, 19 nt, Homo sapiens
  misc_RNA (1)...(19): siRNA sense strand
uugaagagauuauggagaa

SEQ ID NO: 1614970 - RNA, 19 nt, Homo sapiens
  misc_RNA (1)...(19): siRNA sense strand
gaaggaaugccugaucuug

SEQ ID NO: 1614971 - RNA, 19 nt, Homo sapiens
  misc_RNA (1)...(19): siRNA sense strand
ggaagucgagauaacauga

SEQ ID NO: 1614972 - RNA, 19 nt, Homo sapiens
  misc_RNA (1)...(19): siRNA sense strand
gcuggcaagcguaauguua

SEQ ID NO: 1614973 - RNA, 19 nt, Homo sapiens
  misc_RNA (1)...(19): siRNA sense strand
ccacauagagaaagugaug

SEQ ID NO: 1614974 - RNA, 19 nt, Homo sapiens
  misc_RNA (1)...(19): siRNA sense strand
gcaagcguaauguuauuga

SEQ ID NO: 1614975 - RNA, 19 nt, Homo sapiens
  misc_RNA (1)...(19): siRNA sense strand
caagcguaauguuauugaa

SEQ ID NO: 1614976 - RNA, 19 nt, Homo sapiens
  misc_RNA (1)...(19): siRNA sense strand
gaauccacauagagaaagu

SEQ ID NO: 1614977 - RNA, 19 nt, Homo sapiens
  misc_RNA (1)...(19): siRNA sense strand
uggcaagcguaauguuauu

SEQ ID NO: 1614978 - RNA, 19 nt, Homo sapiens
  misc_RNA (1)...(19): siRNA sense strand
gauaacaugaguauuguac

SEQ ID NO: 1614979 - RNA, 19 nt, Homo sapiens
  misc_RNA (1)...(19): siRNA sense strand
gauaagcacuuggaaucac

SEQ ID NO: 1614980 - RNA, 19 nt, Homo sapiens
  misc_RNA (1)...(19): siRNA sense strand
ggaaggaaugccugaucuu

SEQ ID NO: 1614981 - RNA, 19 nt, Homo sapiens
  misc_RNA (1)...(19): siRNA sense strand
ggauaagcacuuggaauca

SEQ ID NO: 1614982 - RNA, 19 nt, Homo sapiens
  misc_RNA (1)...(19): siRNA sense strand
ugccugaucuugcccaugu

SEQ ID NO: 1614983 - RNA, 19 nt, Homo sapiens
  misc_RNA (1)...(19): siRNA sense strand
caucuugucugcagaaaau

SEQ ID NO: 1614984 - RNA, 19 nt, Homo sapiens
  misc_RNA (1)...(19): siRNA sense strand
uagacugaauccacauaga

SEQ ID NO: 1614985 - RNA, 19 nt, Homo sapiens
  misc_RNA (1)...(19): siRNA sense strand
gcagaaaauaucccaaauu

SEQ ID NO: 1614986 - RNA, 19 nt, Homo sapiens
  misc_RNA (1)...(19): siRNA sense strand
gaagagauuauggagaagu

SEQ ID NO: 1614987 - RNA, 19 nt, Homo sapiens
  misc_RNA (1)...(19): siRNA sense strand
uugaagcuguuuauaguag

SEQ ID NO: 1614988 - RNA, 19 nt, Homo sapiens
  misc_RNA (1)...(19): siRNA sense strand
aaucacggguugaagagau

SEQ ID NO: 1614989 - RNA, 19 nt, Homo sapiens
  misc_RNA (1)...(19): siRNA sense strand
guauuguacuaguuugcuu

SEQ ID NO: 1614990 - RNA, 19 nt, Homo sapiens
  misc_RNA (1)...(19): siRNA sense strand
gaggaaggaaugccugauc

SEQ ID NO: 1614991 - RNA, 19 nt, Homo sapiens
  misc_RNA (1)...(19): siRNA sense strand
ggaaucacggguugaagag

SEQ ID NO: 1614992 - RNA, 19 nt, Homo sapiens
  misc_RNA (1)...(19): siRNA sense strand
gaagcuguuuauaguagac

SEQ ID NO: 1614993 - RNA, 19 nt, Homo sapiens
  misc_RNA (1)...(19): siRNA sense strand
cucccaaggucucagauga

SEQ ID NO: 1614994 - RNA, 19 nt, Homo sapiens
  misc_RNA (1)...(19): siRNA sense strand
auucagaguuggauaagca

SEQ ID NO: 1614995 - RNA, 19 nt, Homo sapiens
  misc_RNA (1)...(19): siRNA sense strand
ugaagcuguuuauaguaga

SEQ ID NO: 1614996 - RNA, 19 nt, Homo sapiens
  misc_RNA (1)...(19): siRNA sense strand
agaguuggauaagcacuug

SEQ ID NO: 1614997 - RNA, 19 nt, Homo sapiens
  misc_RNA (1)...(19): siRNA sense strand
uggauaagcacuuggaauc

SEQ ID NO: 1614998 - RNA, 19 nt, Homo sapiens
  misc_RNA (1)...(19): siRNA sense strand
gacugaauccacauagaga

SEQ ID NO: 1614999 - RNA, 19 nt, Homo sapiens
  misc_RNA (1)...(19): siRNA sense strand
aagauucagaguuggauaa

SEQ ID NO: 1615000 - RNA, 19 nt, Homo sapiens
  misc_RNA (1)...(19): siRNA sense strand
uggaaucacggguugaaga

SEQ ID NO: 1615001 - RNA, 19 nt, Homo sapiens
  misc_RNA (1)...(19): siRNA sense strand
guacuaguuugcuuuucaa

SEQ ID NO: 1615002 - RNA, 19 nt, Homo sapiens
  misc_RNA (1)...(19): siRNA sense strand
gucgagauaacaugaguau

SEQ ID NO: 1615003 - RNA, 19 nt, Homo sapiens
  misc_RNA (1)...(19): siRNA sense strand
gcgcaucuugucugcagaa

SEQ ID NO: 1615004 - RNA, 19 nt, Homo sapiens
  misc_RNA (1)...(19): siRNA sense strand
aaagauucagaguuggaua

SEQ ID NO: 1615005 - RNA, 19 nt, Homo sapiens
  misc_RNA (1)...(19): siRNA sense strand
aggaaggaaugccugaucu

SEQ ID NO: 1615006 - RNA, 19 nt, Homo sapiens
  misc_RNA (1)...(19): siRNA sense strand
gggaagucgagauaacaug

SEQ ID NO: 1615007 - RNA, 19 nt, Homo sapiens
  misc_RNA (1)...(19): siRNA sense strand
gaaucacggguugaagaga

SEQ ID NO: 1615008 - RNA, 19 nt, Homo sapiens
  misc_RNA (1)...(19): siRNA sense strand
cccaaggucucagaugaag

SEQ ID NO: 1615009 - RNA, 19 nt, Homo sapiens
  misc_RNA (1)...(19): siRNA sense strand
gaagucuggcgaggaagga

SEQ ID NO: 1615010 - RNA, 19 nt, Homo sapiens
  misc_RNA (1)...(19): siRNA sense strand
aagagauuauggagaaguc

SEQ ID NO: 1615011 - RNA, 19 nt, Homo sapiens
  misc_RNA (1)...(19): siRNA sense strand
ggagaagucuggcgaggaa

SEQ ID NO: 1615012 - RNA, 19 nt, Homo sapiens
  misc_RNA (1)...(19): siRNA sense strand
cgagauaacaugaguauug

SEQ ID NO: 1615013 - RNA, 19 nt, Homo sapiens
  misc_RNA (1)...(19): siRNA sense strand
gagauaacaugaguauugu

SEQ ID NO: 1615014 - RNA, 19 nt, Homo sapiens
  misc_RNA (1)...(19): siRNA sense strand
uugaagagauuauggagaa

SEQ ID NO: 1615015 - RNA, 19 nt, Homo sapiens
  misc_RNA (1)...(19): siRNA sense strand
gaaggaaugccugaucuug

SEQ ID NO: 1615016 - RNA, 19 nt, Homo sapiens
  misc_RNA (1)...(19): siRNA sense strand
ggaagucgagauaacauga

SEQ ID NO: 1615017 - RNA, 19 nt, Homo sapiens
  misc_RNA (1)...(19): siRNA sense strand
gcuggcaagcguaauguua

SEQ ID NO: 1615018 - RNA, 19 nt, Homo sapiens
  misc_RNA (1)...(19): siRNA sense strand
ccacauagagaaagugaug

SEQ ID NO: 1615019 - RNA, 19 nt, Homo sapiens
  misc_RNA (1)...(19): siRNA sense strand
gcaagcguaauguuauuga

SEQ ID NO: 1615020 - RNA, 19 nt, Homo sapiens
  misc_RNA (1)...(19): siRNA sense strand
caagcguaauguuauugaa

SEQ ID NO: 1615021 - RNA, 19 nt, Homo sapiens
  misc_RNA (1)...(19): siRNA sense strand
gaauccacauagagaaagu

SEQ ID NO: 1615022 - RNA, 19 nt, Homo sapiens
  misc_RNA (1)...(19): siRNA sense strand
uggcaagcguaauguuauu

SEQ ID NO: 1615023 - RNA, 19 nt, Homo sapiens
  misc_RNA (1)...(19): siRNA sense strand
gauaacaugaguauuguac

SEQ ID NO: 1615024 - RNA, 19 nt, Homo sapiens
  misc_RNA (1)...(19): siRNA sense strand
gauaagcacuuggaaucac

SEQ ID NO: 1615025 - RNA, 19 nt, Homo sapiens
  misc_RNA (1)...(19): siRNA sense strand
ggaaggaaugccugaucuu

SEQ ID NO: 1615026 - RNA, 19 nt, Homo sapiens
  misc_RNA (1)...(19): siRNA sense strand
ggauaagcacuuggaauca

SEQ ID NO: 1615027 - RNA, 19 nt, Homo sapiens
  misc_RNA (1)...(19): siRNA sense strand
ugccugaucuugcccaugu

SEQ ID NO: 1615028 - RNA, 19 nt, Homo sapiens
  misc_RNA (1)...(19): siRNA sense strand
caucuugucugcagaaaau

SEQ ID NO: 1615029 - RNA, 19 nt, Homo sapiens
  misc_RNA (1)...(19): siRNA sense strand
uagacugaauccacauaga

SEQ ID NO: 1615030 - RNA, 19 nt, Homo sapiens
  misc_RNA (1)...(19): siRNA sense strand
gcagaaaauaucccaaauu

SEQ ID NO: 1615031 - RNA, 19 nt, Homo sapiens
  misc_RNA (1)...(19): siRNA sense strand
gaagagauuauggagaagu

SEQ ID NO: 1615032 - RNA, 19 nt, Homo sapiens
  misc_RNA (1)...(19): siRNA sense strand
uugaagcuguuuauaguag

SEQ ID NO: 1615033 - RNA, 19 nt, Homo sapiens
  misc_RNA (1)...(19): siRNA sense strand
aaucacggguugaagagau

SEQ ID NO: 1615034 - RNA, 19 nt, Homo sapiens
  misc_RNA (1)...(19): siRNA sense strand
guauuguacuaguuugcuu

SEQ ID NO: 1615035 - RNA, 19 nt, Homo sapiens
  misc_RNA (1)...(19): siRNA sense strand
gaggaaggaaugccugauc

SEQ ID NO: 1615036 - RNA, 19 nt, Homo sapiens
  misc_RNA (1)...(19): siRNA sense strand
ggaaucacggguugaagag

SEQ ID NO: 1615037 - RNA, 19 nt, Homo sapiens
  misc_RNA (1)...(19): siRNA sense strand
gaagcuguuuauaguagac

SEQ ID NO: 1615038 - RNA, 19 nt, Homo sapiens
  misc_RNA (1)...(19): siRNA sense strand
cucccaaggucucagauga

SEQ ID NO: 1615039 - RNA, 19 nt, Homo sapiens
  misc_RNA (1)...(19): siRNA sense strand
auucagaguuggauaagca

SEQ ID NO: 1615040 - RNA, 19 nt, Homo sapiens
  misc_RNA (1)...(19): siRNA sense strand
ugaagcuguuuauaguaga

SEQ ID NO: 1615041 - RNA, 19 nt, Homo sapiens
  misc_RNA (1)...(19): siRNA sense strand
agaguuggauaagcacuug

SEQ ID NO: 1615042 - RNA, 19 nt, Homo sapiens
  misc_RNA (1)...(19): siRNA sense strand
uggauaagcacuuggaauc

SEQ ID NO: 1615043 - RNA, 19 nt, Homo sapiens
  misc_RNA (1)...(19): siRNA sense strand
gacugaauccacauagaga

SEQ ID NO: 1615044 - RNA, 19 nt, Homo sapiens
  misc_RNA (1)...(19): siRNA sense strand
aagauucagaguuggauaa

SEQ ID NO: 1615045 - RNA, 19 nt, Homo sapiens
  misc_RNA (1)...(19): siRNA sense strand
uggaaucacggguugaaga

SEQ ID NO: 1615046 - RNA, 19 nt, Homo sapiens
  misc_RNA (1)...(19): siRNA sense strand
guacuaguuugcuuuucaa

SEQ ID NO: 1615047 - RNA, 19 nt, Homo sapiens
  misc_RNA (1)...(19): siRNA sense strand
gucgagauaacaugaguau

SEQ ID NO: 1615048 - RNA, 19 nt, Homo sapiens
  misc_RNA (1)...(19): siRNA sense strand
gcgcaucuugucugcagaa

SEQ ID NO: 1615049 - RNA, 19 nt, Homo sapiens
  misc_RNA (1)...(19): siRNA sense strand
aaagauucagaguuggaua

SEQ ID NO: 1615050 - RNA, 19 nt, Homo sapiens
  misc_RNA (1)...(19): siRNA sense strand
aggaaggaaugccugaucu

SEQ ID NO: 1615051 - RNA, 19 nt, Homo sapiens
  misc_RNA (1)...(19): siRNA sense strand
gggaagucgagauaacaug

SEQ ID NO: 1615052 - RNA, 19 nt, Homo sapiens
  misc_RNA (1)...(19): siRNA sense strand
gaaucacggguugaagaga

SEQ ID NO: 1615053 - RNA, 19 nt, Homo sapiens
  misc_RNA (1)...(19): siRNA sense strand
cccaaggucucagaugaag

SEQ ID NO: 1615054 - RNA, 19 nt, Homo sapiens
  misc_RNA (1)...(19): siRNA sense strand
gaagucuggcgaggaagga

SEQ ID NO: 1615055 - RNA, 19 nt, Homo sapiens
  misc_RNA (1)...(19): siRNA sense strand
aagagauuauggagaaguc

SEQ ID NO: 1615056 - RNA, 19 nt, Homo sapiens
  misc_RNA (1)...(19): siRNA sense strand
ggagaagucuggcgaggaa

SEQ ID NO: 1615057 - RNA, 19 nt, Homo sapiens
  misc_RNA (1)...(19): siRNA sense strand
uugaagagauuauggagaa

SEQ ID NO: 1615058 - RNA, 19 nt, Homo sapiens
  misc_RNA (1)...(19): siRNA sense strand
gaaggaaugccugaucuug

SEQ ID NO: 1615059 - RNA, 19 nt, Homo sapiens
  misc_RNA (1)...(19): siRNA sense strand
gcuggcaagcguaauguua

SEQ ID NO: 1615060 - RNA, 19 nt, Homo sapiens
  misc_RNA (1)...(19): siRNA sense strand
ccacauagagaaagugaug

SEQ ID NO: 1615061 - RNA, 19 nt, Homo sapiens
  misc_RNA (1)...(19): siRNA sense strand
gcaagcguaauguuauuga

SEQ ID NO: 1615062 - RNA, 19 nt, Homo sapiens
  misc_RNA (1)...(19): siRNA sense strand
caagcguaauguuauugaa

SEQ ID NO: 1615063 - RNA, 19 nt, Homo sapiens
  misc_RNA (1)...(19): siRNA sense strand
gaauccacauagagaaagu

SEQ ID NO: 1615064 - RNA, 19 nt, Homo sapiens
  misc_RNA (1)...(19): siRNA sense strand
uggcaagcguaauguuauu

SEQ ID NO: 1615065 - RNA, 19 nt, Homo sapiens
  misc_RNA (1)...(19): siRNA sense strand
gauaagcacuuggaaucac

SEQ ID NO: 1615066 - RNA, 19 nt, Homo sapiens
  misc_RNA (1)...(19): siRNA sense strand
ggaaggaaugccugaucuu

SEQ ID NO: 1615067 - RNA, 19 nt, Homo sapiens
  misc_RNA (1)...(19): siRNA sense strand
ggauaagcacuuggaauca

SEQ ID NO: 1615068 - RNA, 19 nt, Homo sapiens
  misc_RNA (1)...(19): siRNA sense strand
ugccugaucuugcccaugu

SEQ ID NO: 1615069 - RNA, 19 nt, Homo sapiens
  misc_RNA (1)...(19): siRNA sense strand
caucuugucugcagaaaau

SEQ ID NO: 1615070 - RNA, 19 nt, Homo sapiens
  misc_RNA (1)...(19): siRNA sense strand
uagacugaauccacauaga

SEQ ID NO: 1615071 - RNA, 19 nt, Homo sapiens
  misc_RNA (1)...(19): siRNA sense strand
gcagaaaauaucccaaauu

SEQ ID NO: 1615072 - RNA, 19 nt, Homo sapiens
  misc_RNA (1)...(19): siRNA sense strand
gaagagauuauggagaagu

SEQ ID NO: 1615073 - RNA, 19 nt, Homo sapiens
  misc_RNA (1)...(19): siRNA sense strand
uugaagcuguuuauaguag

SEQ ID NO: 1615074 - RNA, 19 nt, Homo sapiens
  misc_RNA (1)...(19): siRNA sense strand
aaucacggguugaagagau

SEQ ID NO: 1615075 - RNA, 19 nt, Homo sapiens
  misc_RNA (1)...(19): siRNA sense strand
guauuguacuaguuugcuu

SEQ ID NO: 1615076 - RNA, 19 nt, Homo sapiens
  misc_RNA (1)...(19): siRNA sense strand
gaggaaggaaugccugauc

SEQ ID NO: 1615077 - RNA, 19 nt, Homo sapiens
  misc_RNA (1)...(19): siRNA sense strand
cucccaaggucucagauga

SEQ ID NO: 1615078 - RNA, 19 nt, Homo sapiens
  misc_RNA (1)...(19): siRNA sense strand
gaagcuguuuauaguagac

SEQ ID NO: 1615079 - RNA, 19 nt, Homo sapiens
  misc_RNA (1)...(19): siRNA sense strand
ggaaucacggguugaagag

SEQ ID NO: 1615080 - RNA, 19 nt, Homo sapiens
  misc_RNA (1)...(19): siRNA sense strand
agaguuggauaagcacuug

SEQ ID NO: 1615081 - RNA, 19 nt, Homo sapiens
  misc_RNA (1)...(19): siRNA sense strand
ugaagcuguuuauaguaga

SEQ ID NO: 1615082 - RNA, 19 nt, Homo sapiens
  misc_RNA (1)...(19): siRNA sense strand
auucagaguuggauaagca

SEQ ID NO: 1615083 - RNA, 19 nt, Homo sapiens
  misc_RNA (1)...(19): siRNA sense strand
uggauaagcacuuggaauc

SEQ ID NO: 1615084 - RNA, 19 nt, Homo sapiens
  misc_RNA (1)...(19): siRNA sense strand
gacugaauccacauagaga

SEQ ID NO: 1615085 - RNA, 19 nt, Homo sapiens
  misc_RNA (1)...(19): siRNA sense strand
aagauucagaguuggauaa

SEQ ID NO: 1615086 - RNA, 19 nt, Homo sapiens
  misc_RNA (1)...(19): siRNA sense strand
uggaaucacggguugaaga

SEQ ID NO: 1615087 - RNA, 19 nt, Homo sapiens
  misc_RNA (1)...(19): siRNA sense strand
gcgcaucuugucugcagaa

SEQ ID NO: 1615088 - RNA, 19 nt, Homo sapiens
  misc_RNA (1)...(19): siRNA sense strand
guacuaguuugcuuuucaa

SEQ ID NO: 1615089 - RNA, 19 nt, Homo sapiens
  misc_RNA (1)...(19): siRNA sense strand
aaagauucagaguuggaua

SEQ ID NO: 1615090 - RNA, 19 nt, Homo sapiens
  misc_RNA (1)...(19): siRNA sense strand
aggaaggaaugccugaucu

SEQ ID NO: 1615091 - RNA, 19 nt, Homo sapiens
  misc_RNA (1)...(19): siRNA sense strand
aagagauuauggagaaguc

SEQ ID NO: 1615092 - RNA, 19 nt, Homo sapiens
  misc_RNA (1)...(19): siRNA sense strand
cccaaggucucagaugaag

SEQ ID NO: 1615093 - RNA, 19 nt, Homo sapiens
  misc_RNA (1)...(19): siRNA sense strand
gaaucacggguugaagaga

SEQ ID NO: 1615094 - RNA, 19 nt, Homo sapiens
  misc_RNA (1)...(19): siRNA sense strand
gaagucuggcgaggaagga

SEQ ID NO: 1615095 - RNA, 19 nt, Homo sapiens
  misc_RNA (1)...(19): siRNA sense strand
ggagaagucuggcgaggaa

SEQ ID NO: 1615096 - RNA, 19 nt, Homo sapiens
  misc_RNA (1)...(19): siRNA sense strand
cgagauaacaugaguauug

SEQ ID NO: 1615097 - RNA, 19 nt, Homo sapiens
  misc_RNA (1)...(19): siRNA sense strand
gagauaacaugaguauugu

SEQ ID NO: 1615098 - RNA, 19 nt, Homo sapiens
  misc_RNA (1)...(19): siRNA sense strand
uugaagagauuauggagaa

SEQ ID NO: 1615099 - RNA, 19 nt, Homo sapiens
  misc_RNA (1)...(19): siRNA sense strand
gaaggaaugccugaucuug

SEQ ID NO: 1615100 - RNA, 19 nt, Homo sapiens
  misc_RNA (1)...(19): siRNA sense strand
ggaagucgagauaacauga

SEQ ID NO: 1615101 - RNA, 19 nt, Homo sapiens
  misc_RNA (1)...(19): siRNA sense strand
gcuggcaagcguaauguua

SEQ ID NO: 1615102 - RNA, 19 nt, Homo sapiens
  misc_RNA (1)...(19): siRNA sense strand
ccacauagagaaagugaug

SEQ ID NO: 1615103 - RNA, 19 nt, Homo sapiens
  misc_RNA (1)...(19): siRNA sense strand
gcaagcguaauguuauuga

SEQ ID NO: 1615104 - RNA, 19 nt, Homo sapiens
  misc_RNA (1)...(19): siRNA sense strand
caagcguaauguuauugaa

SEQ ID NO: 1615105 - RNA, 19 nt, Homo sapiens
  misc_RNA (1)...(19): siRNA sense strand
gaauccacauagagaaagu

SEQ ID NO: 1615106 - RNA, 19 nt, Homo sapiens
  misc_RNA (1)...(19): siRNA sense strand
uggcaagcguaauguuauu

SEQ ID NO: 1615107 - RNA, 19 nt, Homo sapiens
  misc_RNA (1)...(19): siRNA sense strand
gauaacaugaguauuguac

SEQ ID NO: 1615108 - RNA, 19 nt, Homo sapiens
  misc_RNA (1)...(19): siRNA sense strand
gauaagcacuuggaaucac

SEQ ID NO: 1615109 - RNA, 19 nt, Homo sapiens
  misc_RNA (1)...(19): siRNA sense strand
ggaaggaaugccugaucuu

SEQ ID NO: 1615110 - RNA, 19 nt, Homo sapiens
  misc_RNA (1)...(19): siRNA sense strand
ggauaagcacuuggaauca

SEQ ID NO: 1615111 - RNA, 19 nt, Homo sapiens
  misc_RNA (1)...(19): siRNA sense strand
ugccugaucuugcccaugu

SEQ ID NO: 1615112 - RNA, 19 nt, Homo sapiens
  misc_RNA (1)...(19): siRNA sense strand
caucuugucugcagaaaau

SEQ ID NO: 1615113 - RNA, 19 nt, Homo sapiens
  misc_RNA (1)...(19): siRNA sense strand
uagacugaauccacauaga

SEQ ID NO: 1615114 - RNA, 19 nt, Homo sapiens
  misc_RNA (1)...(19): siRNA sense strand
gcagaaaauaucccaaauu

SEQ ID NO: 1615115 - RNA, 19 nt, Homo sapiens
  misc_RNA (1)...(19): siRNA sense strand
gaagagauuauggagaagu

SEQ ID NO: 1615116 - RNA, 19 nt, Homo sapiens
  misc_RNA (1)...(19): siRNA sense strand
uugaagcuguuuauaguag

SEQ ID NO: 1615117 - RNA, 19 nt, Homo sapiens
  misc_RNA (1)...(19): siRNA sense strand
aaucacggguugaagagau

SEQ ID NO: 1615118 - RNA, 19 nt, Homo sapiens
  misc_RNA (1)...(19): siRNA sense strand
guauuguacuaguuugcuu

SEQ ID NO: 1615119 - RNA, 19 nt, Homo sapiens
  misc_RNA (1)...(19): siRNA sense strand
gaggaaggaaugccugauc

SEQ ID NO: 1615120 - RNA, 19 nt, Homo sapiens
  misc_RNA (1)...(19): siRNA sense strand
ggaaucacggguugaagag

SEQ ID NO: 1615121 - RNA, 19 nt, Homo sapiens
  misc_RNA (1)...(19): siRNA sense strand
gaagcuguuuauaguagac

SEQ ID NO: 1615122 - RNA, 19 nt, Homo sapiens
  misc_RNA (1)...(19): siRNA sense strand
cucccaaggucucagauga

SEQ ID NO: 1615123 - RNA, 19 nt, Homo sapiens
  misc_RNA (1)...(19): siRNA sense strand
auucagaguuggauaagca

SEQ ID NO: 1615124 - RNA, 19 nt, Homo sapiens
  misc_RNA (1)...(19): siRNA sense strand
ugaagcuguuuauaguaga

SEQ ID NO: 1615125 - RNA, 19 nt, Homo sapiens
  misc_RNA (1)...(19): siRNA sense strand
agaguuggauaagcacuug

SEQ ID NO: 1615126 - RNA, 19 nt, Homo sapiens
  misc_RNA (1)...(19): siRNA sense strand
uggauaagcacuuggaauc

SEQ ID NO: 1615127 - RNA, 19 nt, Homo sapiens
  misc_RNA (1)...(19): siRNA sense strand
gacugaauccacauagaga

SEQ ID NO: 1615128 - RNA, 19 nt, Homo sapiens
  misc_RNA (1)...(19): siRNA sense strand
aagauucagaguuggauaa

SEQ ID NO: 1615129 - RNA, 19 nt, Homo sapiens
  misc_RNA (1)...(19): siRNA sense strand
uggaaucacggguugaaga

SEQ ID NO: 1615130 - RNA, 19 nt, Homo sapiens
  misc_RNA (1)...(19): siRNA sense strand
guacuaguuugcuuuucaa

SEQ ID NO: 1615131 - RNA, 19 nt, Homo sapiens
  misc_RNA (1)...(19): siRNA sense strand
gucgagauaacaugaguau

SEQ ID NO: 1615132 - RNA, 19 nt, Homo sapiens
  misc_RNA (1)...(19): siRNA sense strand
gcgcaucuugucugcagaa

SEQ ID NO: 1615133 - RNA, 19 nt, Homo sapiens
  misc_RNA (1)...(19): siRNA sense strand
aaagauucagaguuggaua

SEQ ID NO: 1615134 - RNA, 19 nt, Homo sapiens
  misc_RNA (1)...(19): siRNA sense strand
aggaaggaaugccugaucu

SEQ ID NO: 1615135 - RNA, 19 nt, Homo sapiens
  misc_RNA (1)...(19): siRNA sense strand
gggaagucgagauaacaug

SEQ ID NO: 1615136 - RNA, 19 nt, Homo sapiens
  misc_RNA (1)...(19): siRNA sense strand
gaaucacggguugaagaga

SEQ ID NO: 1615137 - RNA, 19 nt, Homo sapiens
  misc_RNA (1)...(19): siRNA sense strand
cccaaggucucagaugaag

SEQ ID NO: 1615138 - RNA, 19 nt, Homo sapiens
  misc_RNA (1)...(19): siRNA sense strand
gaagucuggcgaggaagga

SEQ ID NO: 1615139 - RNA, 19 nt, Homo sapiens
  misc_RNA (1)...(19): siRNA sense strand
aagagauuauggagaaguc

SEQ ID NO: 1615140 - RNA, 19 nt, Homo sapiens
  misc_RNA (1)...(19): siRNA sense strand
ggagaagucuggcgaggaa

SEQ ID NO: 1615141 - RNA, 19 nt, Homo sapiens
  misc_RNA (1)...(19): siRNA sense strand
cgagauaacaugaguauug

SEQ ID NO: 1615142 - RNA, 19 nt, Homo sapiens
  misc_RNA (1)...(19): siRNA sense strand
gagauaacaugaguauugu

SEQ ID NO: 1615143 - RNA, 19 nt, Homo sapiens
  misc_RNA (1)...(19): siRNA sense strand
uugaagagauuauggagaa

SEQ ID NO: 1615144 - RNA, 19 nt, Homo sapiens
  misc_RNA (1)...(19): siRNA sense strand
gaaggaaugccugaucuug

SEQ ID NO: 1615145 - RNA, 19 nt, Homo sapiens
  misc_RNA (1)...(19): siRNA sense strand
ggaagucgagauaacauga

SEQ ID NO: 1615146 - RNA, 19 nt, Homo sapiens
  misc_RNA (1)...(19): siRNA sense strand
gcuggcaagcguaauguua

SEQ ID NO: 1615147 - RNA, 19 nt, Homo sapiens
  misc_RNA (1)...(19): siRNA sense strand
ccacauagagaaagugaug

SEQ ID NO: 1615148 - RNA, 19 nt, Homo sapiens
  misc_RNA (1)...(19): siRNA sense strand
gcaagcguaauguuauuga

SEQ ID NO: 1615149 - RNA, 19 nt, Homo sapiens
  misc_RNA (1)...(19): siRNA sense strand
caagcguaauguuauugaa

SEQ ID NO: 1615150 - RNA, 19 nt, Homo sapiens
  misc_RNA (1)...(19): siRNA sense strand
gaauccacauagagaaagu

SEQ ID NO: 1615151 - RNA, 19 nt, Homo sapiens
  misc_RNA (1)...(19): siRNA sense strand
uggcaagcguaauguuauu

SEQ ID NO: 1615152 - RNA, 19 nt, Homo sapiens
  misc_RNA (1)...(19): siRNA sense strand
gauaacaugaguauuguac

SEQ ID NO: 1615153 - RNA, 19 nt, Homo sapiens
  misc_RNA (1)...(19): siRNA sense strand
gauaagcacuuggaaucac

SEQ ID NO: 1615154 - RNA, 19 nt, Homo sapiens
  misc_RNA (1)...(19): siRNA sense strand
ggaaggaaugccugaucuu

SEQ ID NO: 1615155 - RNA, 19 nt, Homo sapiens
  misc_RNA (1)...(19): siRNA sense strand
ggauaagcacuuggaauca

SEQ ID NO: 1615156 - RNA, 19 nt, Homo sapiens
  misc_RNA (1)...(19): siRNA sense strand
ugccugaucuugcccaugu

SEQ ID NO: 1615157 - RNA, 19 nt, Homo sapiens
  misc_RNA (1)...(19): siRNA sense strand
caucuugucugcagaaaau

SEQ ID NO: 1615158 - RNA, 19 nt, Homo sapiens
  misc_RNA (1)...(19): siRNA sense strand
uagacugaauccacauaga

SEQ ID NO: 1615159 - RNA, 19 nt, Homo sapiens
  misc_RNA (1)...(19): siRNA sense strand
gcagaaaauaucccaaauu

SEQ ID NO: 1615160 - RNA, 19 nt, Homo sapiens
  misc_RNA (1)...(19): siRNA sense strand
gaagagauuauggagaagu

SEQ ID NO: 1615161 - RNA, 19 nt, Homo sapiens
  misc_RNA (1)...(19): siRNA sense strand
uugaagcuguuuauaguag

SEQ ID NO: 1615162 - RNA, 19 nt, Homo sapiens
  misc_RNA (1)...(19): siRNA sense strand
aaucacggguugaagagau

SEQ ID NO: 1615163 - RNA, 19 nt, Homo sapiens
  misc_RNA (1)...(19): siRNA sense strand
guauuguacuaguuugcuu

SEQ ID NO: 1615164 - RNA, 19 nt, Homo sapiens
  misc_RNA (1)...(19): siRNA sense strand
gaggaaggaaugccugauc

SEQ ID NO: 1615165 - RNA, 19 nt, Homo sapiens
  misc_RNA (1)...(19): siRNA sense strand
ggaaucacggguugaagag

SEQ ID NO: 1615166 - RNA, 19 nt, Homo sapiens
  misc_RNA (1)...(19): siRNA sense strand
gaagcuguuuauaguagac

SEQ ID NO: 1615167 - RNA, 19 nt, Homo sapiens
  misc_RNA (1)...(19): siRNA sense strand
cucccaaggucucagauga

SEQ ID NO: 1615168 - RNA, 19 nt, Homo sapiens
  misc_RNA (1)...(19): siRNA sense strand
auucagaguuggauaagca

SEQ ID NO: 1615169 - RNA, 19 nt, Homo sapiens
  misc_RNA (1)...(19): siRNA sense strand
ugaagcuguuuauaguaga

SEQ ID NO: 1615170 - RNA, 19 nt, Homo sapiens
  misc_RNA (1)...(19): siRNA sense strand
agaguuggauaagcacuug

SEQ ID NO: 1615171 - RNA, 19 nt, Homo sapiens
  misc_RNA (1)...(19): siRNA sense strand
uggauaagcacuuggaauc

SEQ ID NO: 1615172 - RNA, 19 nt, Homo sapiens
  misc_RNA (1)...(19): siRNA sense strand
gacugaauccacauagaga

SEQ ID NO: 1615173 - RNA, 19 nt, Homo sapiens
  misc_RNA (1)...(19): siRNA sense strand
aagauucagaguuggauaa

SEQ ID NO: 1615174 - RNA, 19 nt, Homo sapiens
  misc_RNA (1)...(19): siRNA sense strand
uggaaucacggguugaaga

SEQ ID NO: 1615175 - RNA, 19 nt, Homo sapiens
  misc_RNA (1)...(19): siRNA sense strand
guacuaguuugcuuuucaa

SEQ ID NO: 1615176 - RNA, 19 nt, Homo sapiens
  misc_RNA (1)...(19): siRNA sense strand
gucgagauaacaugaguau

SEQ ID NO: 1615177 - RNA, 19 nt, Homo sapiens
  misc_RNA (1)...(19): siRNA sense strand
gcgcaucuugucugcagaa

SEQ ID NO: 1615178 - RNA, 19 nt, Homo sapiens
  misc_RNA (1)...(19): siRNA sense strand
aaagauucagaguuggaua

SEQ ID NO: 1615179 - RNA, 19 nt, Homo sapiens
  misc_RNA (1)...(19): siRNA sense strand
aggaaggaaugccugaucu

SEQ ID NO: 1615180 - RNA, 19 nt, Homo sapiens
  misc_RNA (1)...(19): siRNA sense strand
gggaagucgagauaacaug

SEQ ID NO: 1615181 - RNA, 19 nt, Homo sapiens
  misc_RNA (1)...(19): siRNA sense strand
gaaucacggguugaagaga

SEQ ID NO: 1615182 - RNA, 19 nt, Homo sapiens
  misc_RNA (1)...(19): siRNA sense strand
cccaaggucucagaugaag

SEQ ID NO: 1615183 - RNA, 19 nt, Homo sapiens
  misc_RNA (1)...(19): siRNA sense strand
gaagucuggcgaggaagga

SEQ ID NO: 1615184 - RNA, 19 nt, Homo sapiens
  misc_RNA (1)...(19): siRNA sense strand
aagagauuauggagaaguc

SEQ ID NO: 1615185 - RNA, 19 nt, Homo sapiens
  misc_RNA (1)...(19): siRNA sense strand
ggagaagucuggcgaggaa

SEQ ID NO: 1615186 - RNA, 19 nt, Homo sapiens
  misc_RNA (1)...(19): siRNA sense strand
uugaagagauuauggagaa

SEQ ID NO: 1615187 - RNA, 19 nt, Homo sapiens
  misc_RNA (1)...(19): siRNA sense strand
gaaggaaugccugaucuug

SEQ ID NO: 1615188 - RNA, 19 nt, Homo sapiens
  misc_RNA (1)...(19): siRNA sense strand
gcuggcaagcguaauguua

SEQ ID NO: 1615189 - RNA, 19 nt, Homo sapiens
  misc_RNA (1)...(19): siRNA sense strand
ccacauagagaaagugaug

SEQ ID NO: 1615190 - RNA, 19 nt, Homo sapiens
  misc_RNA (1)...(19): siRNA sense strand
gcaagcguaauguuauuga

SEQ ID NO: 1615191 - RNA, 19 nt, Homo sapiens
  misc_RNA (1)...(19): siRNA sense strand
caagcguaauguuauugaa

SEQ ID NO: 1615192 - RNA, 19 nt, Homo sapiens
  misc_RNA (1)...(19): siRNA sense strand
gaauccacauagagaaagu

SEQ ID NO: 1615193 - RNA, 19 nt, Homo sapiens
  misc_RNA (1)...(19): siRNA sense strand
uggcaagcguaauguuauu

SEQ ID NO: 1615194 - RNA, 19 nt, Homo sapiens
  misc_RNA (1)...(19): siRNA sense strand
gauaagcacuuggaaucac

SEQ ID NO: 1615195 - RNA, 19 nt, Homo sapiens
  misc_RNA (1)...(19): siRNA sense strand
ggaaggaaugccugaucuu

SEQ ID NO: 1615196 - RNA, 19 nt, Homo sapiens
  misc_RNA (1)...(19): siRNA sense strand
ggauaagcacuuggaauca

SEQ ID NO: 1615197 - RNA, 19 nt, Homo sapiens
  misc_RNA (1)...(19): siRNA sense strand
ugccugaucuugcccaugu

SEQ ID NO: 1615198 - RNA, 19 nt, Homo sapiens
  misc_RNA (1)...(19): siRNA sense strand
caucuugucugcagaaaau

SEQ ID NO: 1615199 - RNA, 19 nt, Homo sapiens
  misc_RNA (1)...(19): siRNA sense strand
uagacugaauccacauaga

SEQ ID NO: 1615200 - RNA, 19 nt, Homo sapiens
  misc_RNA (1)...(19): siRNA sense strand
gcagaaaauaucccaaauu

SEQ ID NO: 1615201 - RNA, 19 nt, Homo sapiens
  misc_RNA (1)...(19): siRNA sense strand
gaagagauuauggagaagu

SEQ ID NO: 1615202 - RNA, 19 nt, Homo sapiens
  misc_RNA (1)...(19): siRNA sense strand
uugaagcuguuuauaguag

SEQ ID NO: 1615203 - RNA, 19 nt, Homo sapiens
  misc_RNA (1)...(19): siRNA sense strand
aaucacggguugaagagau

SEQ ID NO: 1615204 - RNA, 19 nt, Homo sapiens
  misc_RNA (1)...(19): siRNA sense strand
guauuguacuaguuugcuu

SEQ ID NO: 1615205 - RNA, 19 nt, Homo sapiens
  misc_RNA (1)...(19): siRNA sense strand
gaggaaggaaugccugauc

SEQ ID NO: 1615206 - RNA, 19 nt, Homo sapiens
  misc_RNA (1)...(19): siRNA sense strand
cucccaaggucucagauga

SEQ ID NO: 1615207 - RNA, 19 nt, Homo sapiens
  misc_RNA (1)...(19): siRNA sense strand
gaagcuguuuauaguagac

SEQ ID NO: 1615208 - RNA, 19 nt, Homo sapiens
  misc_RNA (1)...(19): siRNA sense strand
ggaaucacggguugaagag

SEQ ID NO: 1615209 - RNA, 19 nt, Homo sapiens
  misc_RNA (1)...(19): siRNA sense strand
agaguuggauaagcacuug

SEQ ID NO: 1615210 - RNA, 19 nt, Homo sapiens
  misc_RNA (1)...(19): siRNA sense strand
ugaagcuguuuauaguaga

SEQ ID NO: 1615211 - RNA, 19 nt, Homo sapiens
  misc_RNA (1)...(19): siRNA sense strand
auucagaguuggauaagca

SEQ ID NO: 1615212 - RNA, 19 nt, Homo sapiens
  misc_RNA (1)...(19): siRNA sense strand
uggauaagcacuuggaauc

SEQ ID NO: 1615213 - RNA, 19 nt, Homo sapiens
  misc_RNA (1)...(19): siRNA sense strand
gacugaauccacauagaga

SEQ ID NO: 1615214 - RNA, 19 nt, Homo sapiens
  misc_RNA (1)...(19): siRNA sense strand
aagauucagaguuggauaa

SEQ ID NO: 1615215 - RNA, 19 nt, Homo sapiens
  misc_RNA (1)...(19): siRNA sense strand
uggaaucacggguugaaga

SEQ ID NO: 1615216 - RNA, 19 nt, Homo sapiens
  misc_RNA (1)...(19): siRNA sense strand
gcgcaucuugucugcagaa

SEQ ID NO: 1615217 - RNA, 19 nt, Homo sapiens
  misc_RNA (1)...(19): siRNA sense strand
guacuaguuugcuuuucaa

SEQ ID NO: 1615218 - RNA, 19 nt, Homo sapiens
  misc_RNA (1)...(19): siRNA sense strand
aaagauucagaguuggaua

SEQ ID NO: 1615219 - RNA, 19 nt, Homo sapiens
  misc_RNA (1)...(19): siRNA sense strand
aggaaggaaugccugaucu

SEQ ID NO: 1615220 - RNA, 19 nt, Homo sapiens
  misc_RNA (1)...(19): siRNA sense strand
aagagauuauggagaaguc

SEQ ID NO: 1615221 - RNA, 19 nt, Homo sapiens
  misc_RNA (1)...(19): siRNA sense strand
cccaaggucucagaugaag

SEQ ID NO: 1615222 - RNA, 19 nt, Homo sapiens
  misc_RNA (1)...(19): siRNA sense strand
gaaucacggguugaagaga

SEQ ID NO: 1615223 - RNA, 19 nt, Homo sapiens
  misc_RNA (1)...(19): siRNA sense strand
gaagucuggcgaggaagga

SEQ ID NO: 1615224 - RNA, 19 nt, Homo sapiens
  misc_RNA (1)...(19): siRNA sense strand
ggaaagcccugacggacuu

SEQ ID NO: 1615225 - RNA, 19 nt, Homo sapiens
  misc_RNA (1)...(19): siRNA sense strand
ugaaugacguccuuccuaa

SEQ ID NO: 1615226 - RNA, 19 nt, Homo sapiens
  misc_RNA (1)...(19): siRNA sense strand
ggacuucauucaagaggaa

SEQ ID NO: 1615227 - RNA, 19 nt, Homo sapiens
  misc_RNA (1)...(19): siRNA sense strand
gagauggcgucuaccagaa

SEQ ID NO: 1615228 - RNA, 19 nt, Homo sapiens
  misc_RNA (1)...(19): siRNA sense strand
ugacggacuucauucaaga

SEQ ID NO: 1615229 - RNA, 19 nt, Homo sapiens
  misc_RNA (1)...(19): siRNA sense strand
uguacgagcucaucgagaa

SEQ ID NO: 1615230 - RNA, 19 nt, Homo sapiens
  misc_RNA (1)...(19): siRNA sense strand
gagcuacacucccacuucu

SEQ ID NO: 1615231 - RNA, 19 nt, Homo sapiens
  misc_RNA (1)...(19): siRNA sense strand
caagucggcuguggagaug

SEQ ID NO: 1615232 - RNA, 19 nt, Homo sapiens
  misc_RNA (1)...(19): siRNA sense strand
gggacugggugcauaucuu

SEQ ID NO: 1615233 - RNA, 19 nt, Homo sapiens
  misc_RNA (1)...(19): siRNA sense strand
ggacugggugcauaucuuc

SEQ ID NO: 1615234 - RNA, 19 nt, Homo sapiens
  misc_RNA (1)...(19): siRNA sense strand
cggaaugaaugacguccuu

SEQ ID NO: 1615235 - RNA, 19 nt, Homo sapiens
  misc_RNA (1)...(19): siRNA sense strand
gaggaauuccagcaucuga

SEQ ID NO: 1615236 - RNA, 19 nt, Homo sapiens
  misc_RNA (1)...(19): siRNA sense strand
ucuggaaccugaaguugau

SEQ ID NO: 1615237 - RNA, 19 nt, Homo sapiens
  misc_RNA (1)...(19): siRNA sense strand
uaacaguccgcccuacuuc

SEQ ID NO: 1615238 - RNA, 19 nt, Homo sapiens
  misc_RNA (1)...(19): siRNA sense strand
ggaauuccagcaucugaag

SEQ ID NO: 1615239 - RNA, 19 nt, Homo sapiens
  misc_RNA (1)...(19): siRNA sense strand
gcuacacucccacuucuuc

SEQ ID NO: 1615240 - RNA, 19 nt, Homo sapiens
  misc_RNA (1)...(19): siRNA sense strand
uccagcaucugaagacuca

SEQ ID NO: 1615241 - RNA, 19 nt, Homo sapiens
  misc_RNA (1)...(19): siRNA sense strand
ugacguccuuccuaacagu

SEQ ID NO: 1615242 - RNA, 19 nt, Homo sapiens
  misc_RNA (1)...(19): siRNA sense strand
ggaccaaguacaugaacca

SEQ ID NO: 1615243 - RNA, 19 nt, Homo sapiens
  misc_RNA (1)...(19): siRNA sense strand
ucaucaccguguccaauca

SEQ ID NO: 1615244 - RNA, 19 nt, Homo sapiens
  misc_RNA (1)...(19): siRNA sense strand
gaauuccagcaucugaaga

SEQ ID NO: 1615245 - RNA, 19 nt, Homo sapiens
  misc_RNA (1)...(19): siRNA sense strand
gcgccugauugcugagugu

SEQ ID NO: 1615246 - RNA, 19 nt, Homo sapiens
  misc_RNA (1)...(19): siRNA sense strand
aagaggaauuccagcaucu

SEQ ID NO: 1615247 - RNA, 19 nt, Homo sapiens
  misc_RNA (1)...(19): siRNA sense strand
gggauggacuucauuuugg

SEQ ID NO: 1615248 - RNA, 19 nt, Homo sapiens
  misc_RNA (1)...(19): siRNA sense strand
ccuguggcaugucggaaug

SEQ ID NO: 1615249 - RNA, 19 nt, Homo sapiens
  misc_RNA (1)...(19): siRNA sense strand
uggcaugucggaaugaaug

SEQ ID NO: 1615250 - RNA, 19 nt, Homo sapiens
  misc_RNA (1)...(19): siRNA sense strand
cuaacaguccgcccuacuu

SEQ ID NO: 1615251 - RNA, 19 nt, Homo sapiens
  misc_RNA (1)...(19): siRNA sense strand
ggauggacuucauuuugga

SEQ ID NO: 1615252 - RNA, 19 nt, Homo sapiens
  misc_RNA (1)...(19): siRNA sense strand
caucuggaaccugaaguug

SEQ ID NO: 1615253 - RNA, 19 nt, Homo sapiens
  misc_RNA (1)...(19): siRNA sense strand
acaagucggcuguggagau

SEQ ID NO: 1615254 - RNA, 19 nt, Homo sapiens
  misc_RNA (1)...(19): siRNA sense strand
ucagugcccugccuguacu

SEQ ID NO: 1615255 - RNA, 19 nt, Homo sapiens
  misc_RNA (1)...(19): siRNA sense strand
ggaaagcccugacggacuu

SEQ ID NO: 1615256 - RNA, 19 nt, Homo sapiens
  misc_RNA (1)...(19): siRNA sense strand
ugaaugacguccuuccuaa

SEQ ID NO: 1615257 - RNA, 19 nt, Homo sapiens
  misc_RNA (1)...(19): siRNA sense strand
ggacuucauucaagaggaa

SEQ ID NO: 1615258 - RNA, 19 nt, Homo sapiens
  misc_RNA (1)...(19): siRNA sense strand
gagauggcgucuaccagaa

SEQ ID NO: 1615259 - RNA, 19 nt, Homo sapiens
  misc_RNA (1)...(19): siRNA sense strand
ugacggacuucauucaaga

SEQ ID NO: 1615260 - RNA, 19 nt, Homo sapiens
  misc_RNA (1)...(19): siRNA sense strand
uguacgagcucaucgagaa

SEQ ID NO: 1615261 - RNA, 19 nt, Homo sapiens
  misc_RNA (1)...(19): siRNA sense strand
gagcuacacucccacuucu

SEQ ID NO: 1615262 - RNA, 19 nt, Homo sapiens
  misc_RNA (1)...(19): siRNA sense strand
caagucggcuguggagaug

SEQ ID NO: 1615263 - RNA, 19 nt, Homo sapiens
  misc_RNA (1)...(19): siRNA sense strand
gggacugggugcauaucuu

SEQ ID NO: 1615264 - RNA, 19 nt, Homo sapiens
  misc_RNA (1)...(19): siRNA sense strand
ggacugggugcauaucuuc

SEQ ID NO: 1615265 - RNA, 19 nt, Homo sapiens
  misc_RNA (1)...(19): siRNA sense strand
cggaaugaaugacguccuu

SEQ ID NO: 1615266 - RNA, 19 nt, Homo sapiens
  misc_RNA (1)...(19): siRNA sense strand
gaggaauuccagcaucuga

SEQ ID NO: 1615267 - RNA, 19 nt, Homo sapiens
  misc_RNA (1)...(19): siRNA sense strand
ucuggaaccugaaguugau

SEQ ID NO: 1615268 - RNA, 19 nt, Homo sapiens
  misc_RNA (1)...(19): siRNA sense strand
uaacaguccgcccuacuuc

SEQ ID NO: 1615269 - RNA, 19 nt, Homo sapiens
  misc_RNA (1)...(19): siRNA sense strand
ggaauuccagcaucugaag

SEQ ID NO: 1615270 - RNA, 19 nt, Homo sapiens
  misc_RNA (1)...(19): siRNA sense strand
gcuacacucccacuucuuc

SEQ ID NO: 1615271 - RNA, 19 nt, Homo sapiens
  misc_RNA (1)...(19): siRNA sense strand
uccagcaucugaagacuca

SEQ ID NO: 1615272 - RNA, 19 nt, Homo sapiens
  misc_RNA (1)...(19): siRNA sense strand
ugacguccuuccuaacagu

SEQ ID NO: 1615273 - RNA, 19 nt, Homo sapiens
  misc_RNA (1)...(19): siRNA sense strand
ggaccaaguacaugaacca

SEQ ID NO: 1615274 - RNA, 19 nt, Homo sapiens
  misc_RNA (1)...(19): siRNA sense strand
ucaucaccguguccaauca

SEQ ID NO: 1615275 - RNA, 19 nt, Homo sapiens
  misc_RNA (1)...(19): siRNA sense strand
gaauuccagcaucugaaga

SEQ ID NO: 1615276 - RNA, 19 nt, Homo sapiens
  misc_RNA (1)...(19): siRNA sense strand
gcgccugauugcugagugu

SEQ ID NO: 1615277 - RNA, 19 nt, Homo sapiens
  misc_RNA (1)...(19): siRNA sense strand
aagaggaauuccagcaucu

SEQ ID NO: 1615278 - RNA, 19 nt, Homo sapiens
  misc_RNA (1)...(19): siRNA sense strand
gggauggacuucauuuugg

SEQ ID NO: 1615279 - RNA, 19 nt, Homo sapiens
  misc_RNA (1)...(19): siRNA sense strand
ccuguggcaugucggaaug

SEQ ID NO: 1615280 - RNA, 19 nt, Homo sapiens
  misc_RNA (1)...(19): siRNA sense strand
uggcaugucggaaugaaug

SEQ ID NO: 1615281 - RNA, 19 nt, Homo sapiens
  misc_RNA (1)...(19): siRNA sense strand
cuaacaguccgcccuacuu

SEQ ID NO: 1615282 - RNA, 19 nt, Homo sapiens
  misc_RNA (1)...(19): siRNA sense strand
ggauggacuucauuuugga

SEQ ID NO: 1615283 - RNA, 19 nt, Homo sapiens
  misc_RNA (1)...(19): siRNA sense strand
caucuggaaccugaaguug

SEQ ID NO: 1615284 - RNA, 19 nt, Homo sapiens
  misc_RNA (1)...(19): siRNA sense strand
acaagucggcuguggagau

SEQ ID NO: 1615285 - RNA, 19 nt, Homo sapiens
  misc_RNA (1)...(19): siRNA sense strand
ucagugcccugccuguacu

SEQ ID NO: 1615286 - RNA, 19 nt, Homo sapiens
  misc_RNA (1)...(19): siRNA sense strand
ggaaagcccugacggacuu

SEQ ID NO: 1615287 - RNA, 19 nt, Homo sapiens
  misc_RNA (1)...(19): siRNA sense strand
ugaaugacguccuuccuaa

SEQ ID NO: 1615288 - RNA, 19 nt, Homo sapiens
  misc_RNA (1)...(19): siRNA sense strand
ggacuucauucaagaggaa

SEQ ID NO: 1615289 - RNA, 19 nt, Homo sapiens
  misc_RNA (1)...(19): siRNA sense strand
gagauggcgucuaccagaa

SEQ ID NO: 1615290 - RNA, 19 nt, Homo sapiens
  misc_RNA (1)...(19): siRNA sense strand
ugacggacuucauucaaga

SEQ ID NO: 1615291 - RNA, 19 nt, Homo sapiens
  misc_RNA (1)...(19): siRNA sense strand
uguacgagcucaucgagaa

SEQ ID NO: 1615292 - RNA, 19 nt, Homo sapiens
  misc_RNA (1)...(19): siRNA sense strand
gagcuacacucccacuucu

SEQ ID NO: 1615293 - RNA, 19 nt, Homo sapiens
  misc_RNA (1)...(19): siRNA sense strand
caagucggcuguggagaug

SEQ ID NO: 1615294 - RNA, 19 nt, Homo sapiens
  misc_RNA (1)...(19): siRNA sense strand
gggacugggugcauaucuu

SEQ ID NO: 1615295 - RNA, 19 nt, Homo sapiens
  misc_RNA (1)...(19): siRNA sense strand
ggacugggugcauaucuuc

SEQ ID NO: 1615296 - RNA, 19 nt, Homo sapiens
  misc_RNA (1)...(19): siRNA sense strand
cggaaugaaugacguccuu

SEQ ID NO: 1615297 - RNA, 19 nt, Homo sapiens
  misc_RNA (1)...(19): siRNA sense strand
gaggaauuccagcaucuga

SEQ ID NO: 1615298 - RNA, 19 nt, Homo sapiens
  misc_RNA (1)...(19): siRNA sense strand
ucuggaaccugaaguugau

SEQ ID NO: 1615299 - RNA, 19 nt, Homo sapiens
  misc_RNA (1)...(19): siRNA sense strand
uaacaguccgcccuacuuc

SEQ ID NO: 1615300 - RNA, 19 nt, Homo sapiens
  misc_RNA (1)...(19): siRNA sense strand
ggaauuccagcaucugaag

SEQ ID NO: 1615301 - RNA, 19 nt, Homo sapiens
  misc_RNA (1)...(19): siRNA sense strand
gcuacacucccacuucuuc

SEQ ID NO: 1615302 - RNA, 19 nt, Homo sapiens
  misc_RNA (1)...(19): siRNA sense strand
uccagcaucugaagacuca

SEQ ID NO: 1615303 - RNA, 19 nt, Homo sapiens
  misc_RNA (1)...(19): siRNA sense strand
ugacguccuuccuaacagu

SEQ ID NO: 1615304 - RNA, 19 nt, Homo sapiens
  misc_RNA (1)...(19): siRNA sense strand
ggaccaaguacaugaacca

SEQ ID NO: 1615305 - RNA, 19 nt, Homo sapiens
  misc_RNA (1)...(19): siRNA sense strand
ucaucaccguguccaauca

SEQ ID NO: 1615306 - RNA, 19 nt, Homo sapiens
  misc_RNA (1)...(19): siRNA sense strand
gaauuccagcaucugaaga

SEQ ID NO: 1615307 - RNA, 19 nt, Homo sapiens
  misc_RNA (1)...(19): siRNA sense strand
gcgccugauugcugagugu

SEQ ID NO: 1615308 - RNA, 19 nt, Homo sapiens
  misc_RNA (1)...(19): siRNA sense strand
aagaggaauuccagcaucu

SEQ ID NO: 1615309 - RNA, 19 nt, Homo sapiens
  misc_RNA (1)...(19): siRNA sense strand
gggauggacuucauuuugg

SEQ ID NO: 1615310 - RNA, 19 nt, Homo sapiens
  misc_RNA (1)...(19): siRNA sense strand
ccuguggcaugucggaaug

SEQ ID NO: 1615311 - RNA, 19 nt, Homo sapiens
  misc_RNA (1)...(19): siRNA sense strand
uggcaugucggaaugaaug

SEQ ID NO: 1615312 - RNA, 19 nt, Homo sapiens
  misc_RNA (1)...(19): siRNA sense strand
cuaacaguccgcccuacuu

SEQ ID NO: 1615313 - RNA, 19 nt, Homo sapiens
  misc_RNA (1)...(19): siRNA sense strand
ggauggacuucauuuugga

SEQ ID NO: 1615314 - RNA, 19 nt, Homo sapiens
  misc_RNA (1)...(19): siRNA sense strand
caucuggaaccugaaguug

SEQ ID NO: 1615315 - RNA, 19 nt, Homo sapiens
  misc_RNA (1)...(19): siRNA sense strand
acaagucggcuguggagau

SEQ ID NO: 1615316 - RNA, 19 nt, Homo sapiens
  misc_RNA (1)...(19): siRNA sense strand
ucagugcccugccuguacu

SEQ ID NO: 1615317 - RNA, 19 nt, Homo sapiens
  misc_RNA (1)...(19): siRNA sense strand
ggaaagcccugacggacuu

SEQ ID NO: 1615318 - RNA, 19 nt, Homo sapiens
  misc_RNA (1)...(19): siRNA sense strand
ugaaugacguccuuccuaa

SEQ ID NO: 1615319 - RNA, 19 nt, Homo sapiens
  misc_RNA (1)...(19): siRNA sense strand
ggacuucauucaagaggaa

SEQ ID NO: 1615320 - RNA, 19 nt, Homo sapiens
  misc_RNA (1)...(19): siRNA sense strand
gagauggcgucuaccagaa

SEQ ID NO: 1615321 - RNA, 19 nt, Homo sapiens
  misc_RNA (1)...(19): siRNA sense strand
ugacggacuucauucaaga

SEQ ID NO: 1615322 - RNA, 19 nt, Homo sapiens
  misc_RNA (1)...(19): siRNA sense strand
uguacgagcucaucgagaa

SEQ ID NO: 1615323 - RNA, 19 nt, Homo sapiens
  misc_RNA (1)...(19): siRNA sense strand
gagcuacacucccacuucu

SEQ ID NO: 1615324 - RNA, 19 nt, Homo sapiens
  misc_RNA (1)...(19): siRNA sense strand
caagucggcuguggagaug

SEQ ID NO: 1615325 - RNA, 19 nt, Homo sapiens
  misc_RNA (1)...(19): siRNA sense strand
gggacugggugcauaucuu

SEQ ID NO: 1615326 - RNA, 19 nt, Homo sapiens
  misc_RNA (1)...(19): siRNA sense strand
ggacugggugcauaucuuc

SEQ ID NO: 1615327 - RNA, 19 nt, Homo sapiens
  misc_RNA (1)...(19): siRNA sense strand
cggaaugaaugacguccuu

SEQ ID NO: 1615328 - RNA, 19 nt, Homo sapiens
  misc_RNA (1)...(19): siRNA sense strand
gaggaauuccagcaucuga

SEQ ID NO: 1615329 - RNA, 19 nt, Homo sapiens
  misc_RNA (1)...(19): siRNA sense strand
ucuggaaccugaaguugau

SEQ ID NO: 1615330 - RNA, 19 nt, Homo sapiens
  misc_RNA (1)...(19): siRNA sense strand
uaacaguccgcccuacuuc

SEQ ID NO: 1615331 - RNA, 19 nt, Homo sapiens
  misc_RNA (1)...(19): siRNA sense strand
ggaauuccagcaucugaag

SEQ ID NO: 1615332 - RNA, 19 nt, Homo sapiens
  misc_RNA (1)...(19): siRNA sense strand
gcuacacucccacuucuuc

SEQ ID NO: 1615333 - RNA, 19 nt, Homo sapiens
  misc_RNA (1)...(19): siRNA sense strand
uccagcaucugaagacuca

SEQ ID NO: 1615334 - RNA, 19 nt, Homo sapiens
  misc_RNA (1)...(19): siRNA sense strand
ugacguccuuccuaacagu

SEQ ID NO: 1615335 - RNA, 19 nt, Homo sapiens
  misc_RNA (1)...(19): siRNA sense strand
ggaccaaguacaugaacca

SEQ ID NO: 1615336 - RNA, 19 nt, Homo sapiens
  misc_RNA (1)...(19): siRNA sense strand
ucaucaccguguccaauca

SEQ ID NO: 1615337 - RNA, 19 nt, Homo sapiens
  misc_RNA (1)...(19): siRNA sense strand
gaauuccagcaucugaaga

SEQ ID NO: 1615338 - RNA, 19 nt, Homo sapiens
  misc_RNA (1)...(19): siRNA sense strand
gcgccugauugcugagugu

SEQ ID NO: 1615339 - RNA, 19 nt, Homo sapiens
  misc_RNA (1)...(19): siRNA sense strand
aagaggaauuccagcaucu

SEQ ID NO: 1615340 - RNA, 19 nt, Homo sapiens
  misc_RNA (1)...(19): siRNA sense strand
gggauggacuucauuuugg

SEQ ID NO: 1615341 - RNA, 19 nt, Homo sapiens
  misc_RNA (1)...(19): siRNA sense strand
ccuguggcaugucggaaug

SEQ ID NO: 1615342 - RNA, 19 nt, Homo sapiens
  misc_RNA (1)...(19): siRNA sense strand
uggcaugucggaaugaaug

SEQ ID NO: 1615343 - RNA, 19 nt, Homo sapiens
  misc_RNA (1)...(19): siRNA sense strand
cuaacaguccgcccuacuu

SEQ ID NO: 1615344 - RNA, 19 nt, Homo sapiens
  misc_RNA (1)...(19): siRNA sense strand
ggauggacuucauuuugga

SEQ ID NO: 1615345 - RNA, 19 nt, Homo sapiens
  misc_RNA (1)...(19): siRNA sense strand
caucuggaaccugaaguug

SEQ ID NO: 1615346 - RNA, 19 nt, Homo sapiens
  misc_RNA (1)...(19): siRNA sense strand
acaagucggcuguggagau

SEQ ID NO: 1615347 - RNA, 19 nt, Homo sapiens
  misc_RNA (1)...(19): siRNA sense strand
ucagugcccugccuguacu

SEQ ID NO: 1615348 - RNA, 19 nt, Homo sapiens
  misc_RNA (1)...(19): siRNA sense strand
uguacgagcucaucgagaa

SEQ ID NO: 1615349 - RNA, 19 nt, Homo sapiens
  misc_RNA (1)...(19): siRNA sense strand
ucuggaaccugaaguugau

SEQ ID NO: 1615350 - RNA, 19 nt, Homo sapiens
  misc_RNA (1)...(19): siRNA sense strand
ggaccaaguacaugaacca

SEQ ID NO: 1615351 - RNA, 19 nt, Homo sapiens
  misc_RNA (1)...(19): siRNA sense strand
ucaucaccguguccaauca

SEQ ID NO: 1615352 - RNA, 19 nt, Homo sapiens
  misc_RNA (1)...(19): siRNA sense strand
caucuggaaccugaaguug

SEQ ID NO: 1615353 - RNA, 19 nt, Homo sapiens
  misc_RNA (1)...(19): siRNA sense strand
ggaaagcccugacggacuu

SEQ ID NO: 1615354 - RNA, 19 nt, Homo sapiens
  misc_RNA (1)...(19): siRNA sense strand
ugaaugacguccuuccuaa

SEQ ID NO: 1615355 - RNA, 19 nt, Homo sapiens
  misc_RNA (1)...(19): siRNA sense strand
ggacuucauucaagaggaa

SEQ ID NO: 1615356 - RNA, 19 nt, Homo sapiens
  misc_RNA (1)...(19): siRNA sense strand
gagauggcgucuaccagaa

SEQ ID NO: 1615357 - RNA, 19 nt, Homo sapiens
  misc_RNA (1)...(19): siRNA sense strand
ugacggacuucauucaaga

SEQ ID NO: 1615358 - RNA, 19 nt, Homo sapiens
  misc_RNA (1)...(19): siRNA sense strand
uguacgagcucaucgagaa

SEQ ID NO: 1615359 - RNA, 19 nt, Homo sapiens
  misc_RNA (1)...(19): siRNA sense strand
gagcuacacucccacuucu

SEQ ID NO: 1615360 - RNA, 19 nt, Homo sapiens
  misc_RNA (1)...(19): siRNA sense strand
caagucggcuguggagaug

SEQ ID NO: 1615361 - RNA, 19 nt, Homo sapiens
  misc_RNA (1)...(19): siRNA sense strand
gggacugggugcauaucuu

SEQ ID NO: 1615362 - RNA, 19 nt, Homo sapiens
  misc_RNA (1)...(19): siRNA sense strand
ggacugggugcauaucuuc

SEQ ID NO: 1615363 - RNA, 19 nt, Homo sapiens
  misc_RNA (1)...(19): siRNA sense strand
cggaaugaaugacguccuu

SEQ ID NO: 1615364 - RNA, 19 nt, Homo sapiens
  misc_RNA (1)...(19): siRNA sense strand
gaggaauuccagcaucuga

SEQ ID NO: 1615365 - RNA, 19 nt, Homo sapiens
  misc_RNA (1)...(19): siRNA sense strand
ucuggaaccugaaguugau

SEQ ID NO: 1615366 - RNA, 19 nt, Homo sapiens
  misc_RNA (1)...(19): siRNA sense strand
uaacaguccgcccuacuuc

SEQ ID NO: 1615367 - RNA, 19 nt, Homo sapiens
  misc_RNA (1)...(19): siRNA sense strand
ggaauuccagcaucugaag

SEQ ID NO: 1615368 - RNA, 19 nt, Homo sapiens
  misc_RNA (1)...(19): siRNA sense strand
gcuacacucccacuucuuc

SEQ ID NO: 1615369 - RNA, 19 nt, Homo sapiens
  misc_RNA (1)...(19): siRNA sense strand
uccagcaucugaagacuca

SEQ ID NO: 1615370 - RNA, 19 nt, Homo sapiens
  misc_RNA (1)...(19): siRNA sense strand
ugacguccuuccuaacagu

SEQ ID NO: 1615371 - RNA, 19 nt, Homo sapiens
  misc_RNA (1)...(19): siRNA sense strand
ggaccaaguacaugaacca

SEQ ID NO: 1615372 - RNA, 19 nt, Homo sapiens
  misc_RNA (1)...(19): siRNA sense strand
ucaucaccguguccaauca

SEQ ID NO: 1615373 - RNA, 19 nt, Homo sapiens
  misc_RNA (1)...(19): siRNA sense strand
gaauuccagcaucugaaga

SEQ ID NO: 1615374 - RNA, 19 nt, Homo sapiens
  misc_RNA (1)...(19): siRNA sense strand
gcgccugauugcugagugu

SEQ ID NO: 1615375 - RNA, 19 nt, Homo sapiens
  misc_RNA (1)...(19): siRNA sense strand
aagaggaauuccagcaucu

SEQ ID NO: 1615376 - RNA, 19 nt, Homo sapiens
  misc_RNA (1)...(19): siRNA sense strand
gggauggacuucauuuugg

SEQ ID NO: 1615377 - RNA, 19 nt, Homo sapiens
  misc_RNA (1)...(19): siRNA sense strand
ccuguggcaugucggaaug

SEQ ID NO: 1615378 - RNA, 19 nt, Homo sapiens
  misc_RNA (1)...(19): siRNA sense strand
uggcaugucggaaugaaug

SEQ ID NO: 1615379 - RNA, 19 nt, Homo sapiens
  misc_RNA (1)...(19): siRNA sense strand
cuaacaguccgcccuacuu

SEQ ID NO: 1615380 - RNA, 19 nt, Homo sapiens
  misc_RNA (1)...(19): siRNA sense strand
ggauggacuucauuuugga

SEQ ID NO: 1615381 - RNA, 19 nt, Homo sapiens
  misc_RNA (1)...(19): siRNA sense strand
caucuggaaccugaaguug

SEQ ID NO: 1615382 - RNA, 19 nt, Homo sapiens
  misc_RNA (1)...(19): siRNA sense strand
acaagucggcuguggagau

SEQ ID NO: 1615383 - RNA, 19 nt, Homo sapiens
  misc_RNA (1)...(19): siRNA sense strand
ucagugcccugccuguacu

SEQ ID NO: 1615384 - RNA, 19 nt, Homo sapiens
  misc_RNA (1)...(19): siRNA sense strand
ggaaagcccugacggacuu

SEQ ID NO: 1615385 - RNA, 19 nt, Homo sapiens
  misc_RNA (1)...(19): siRNA sense strand
ugaaugacguccuuccuaa

SEQ ID NO: 1615386 - RNA, 19 nt, Homo sapiens
  misc_RNA (1)...(19): siRNA sense strand
ggacuucauucaagaggaa

SEQ ID NO: 1615387 - RNA, 19 nt, Homo sapiens
  misc_RNA (1)...(19): siRNA sense strand
gagauggcgucuaccagaa

SEQ ID NO: 1615388 - RNA, 19 nt, Homo sapiens
  misc_RNA (1)...(19): siRNA sense strand
ugacggacuucauucaaga

SEQ ID NO: 1615389 - RNA, 19 nt, Homo sapiens
  misc_RNA (1)...(19): siRNA sense strand
uguacgagcucaucgagaa

SEQ ID NO: 1615390 - RNA, 19 nt, Homo sapiens
  misc_RNA (1)...(19): siRNA sense strand
gagcuacacucccacuucu

SEQ ID NO: 1615391 - RNA, 19 nt, Homo sapiens
  misc_RNA (1)...(19): siRNA sense strand
caagucggcuguggagaug

SEQ ID NO: 1615392 - RNA, 19 nt, Homo sapiens
  misc_RNA (1)...(19): siRNA sense strand
gggacugggugcauaucuu

SEQ ID NO: 1615393 - RNA, 19 nt, Homo sapiens
  misc_RNA (1)...(19): siRNA sense strand
ggacugggugcauaucuuc

SEQ ID NO: 1615394 - RNA, 19 nt, Homo sapiens
  misc_RNA (1)...(19): siRNA sense strand
cggaaugaaugacguccuu

SEQ ID NO: 1615395 - RNA, 19 nt, Homo sapiens
  misc_RNA (1)...(19): siRNA sense strand
gaggaauuccagcaucuga

SEQ ID NO: 1615396 - RNA, 19 nt, Homo sapiens
  misc_RNA (1)...(19): siRNA sense strand
ucuggaaccugaaguugau

SEQ ID NO: 1615397 - RNA, 19 nt, Homo sapiens
  misc_RNA (1)...(19): siRNA sense strand
uaacaguccgcccuacuuc

SEQ ID NO: 1615398 - RNA, 19 nt, Homo sapiens
  misc_RNA (1)...(19): siRNA sense strand
ggaauuccagcaucugaag

SEQ ID NO: 1615399 - RNA, 19 nt, Homo sapiens
  misc_RNA (1)...(19): siRNA sense strand
gcuacacucccacuucuuc

SEQ ID NO: 1615400 - RNA, 19 nt, Homo sapiens
  misc_RNA (1)...(19): siRNA sense strand
uccagcaucugaagacuca

SEQ ID NO: 1615401 - RNA, 19 nt, Homo sapiens
  misc_RNA (1)...(19): siRNA sense strand
ugacguccuuccuaacagu

SEQ ID NO: 1615402 - RNA, 19 nt, Homo sapiens
  misc_RNA (1)...(19): siRNA sense strand
ggaccaaguacaugaacca

SEQ ID NO: 1615403 - RNA, 19 nt, Homo sapiens
  misc_RNA (1)...(19): siRNA sense strand
ucaucaccguguccaauca

SEQ ID NO: 1615404 - RNA, 19 nt, Homo sapiens
  misc_RNA (1)...(19): siRNA sense strand
gaauuccagcaucugaaga

SEQ ID NO: 1615405 - RNA, 19 nt, Homo sapiens
  misc_RNA (1)...(19): siRNA sense strand
gcgccugauugcugagugu

SEQ ID NO: 1615406 - RNA, 19 nt, Homo sapiens
  misc_RNA (1)...(19): siRNA sense strand
aagaggaauuccagcaucu

SEQ ID NO: 1615407 - RNA, 19 nt, Homo sapiens
  misc_RNA (1)...(19): siRNA sense strand
gggauggacuucauuuugg

SEQ ID NO: 1615408 - RNA, 19 nt, Homo sapiens
  misc_RNA (1)...(19): siRNA sense strand
ccuguggcaugucggaaug

SEQ ID NO: 1615409 - RNA, 19 nt, Homo sapiens
  misc_RNA (1)...(19): siRNA sense strand
uggcaugucggaaugaaug

SEQ ID NO: 1615410 - RNA, 19 nt, Homo sapiens
  misc_RNA (1)...(19): siRNA sense strand
cuaacaguccgcccuacuu

SEQ ID NO: 1615411 - RNA, 19 nt, Homo sapiens
  misc_RNA (1)...(19): siRNA sense strand
ggauggacuucauuuugga

SEQ ID NO: 1615412 - RNA, 19 nt, Homo sapiens
  misc_RNA (1)...(19): siRNA sense strand
caucuggaaccugaaguug

SEQ ID NO: 1615413 - RNA, 19 nt, Homo sapiens
  misc_RNA (1)...(19): siRNA sense strand
acaagucggcuguggagau

SEQ ID NO: 1615414 - RNA, 19 nt, Homo sapiens
  misc_RNA (1)...(19): siRNA sense strand
ucagugcccugccuguacu

SEQ ID NO: 1615415 - RNA, 19 nt, Homo sapiens
  misc_RNA (1)...(19): siRNA sense strand
ggaaagcccugacggacuu

SEQ ID NO: 1615416 - RNA, 19 nt, Homo sapiens
  misc_RNA (1)...(19): siRNA sense strand
ugaaugacguccuuccuaa

SEQ ID NO: 1615417 - RNA, 19 nt, Homo sapiens
  misc_RNA (1)...(19): siRNA sense strand
ggacuucauucaagaggaa

SEQ ID NO: 1615418 - RNA, 19 nt, Homo sapiens
  misc_RNA (1)...(19): siRNA sense strand
gagauggcgucuaccagaa

SEQ ID NO: 1615419 - RNA, 19 nt, Homo sapiens
  misc_RNA (1)...(19): siRNA sense strand
ugacggacuucauucaaga

SEQ ID NO: 1615420 - RNA, 19 nt, Homo sapiens
  misc_RNA (1)...(19): siRNA sense strand
uguacgagcucaucgagaa

SEQ ID NO: 1615421 - RNA, 19 nt, Homo sapiens
  misc_RNA (1)...(19): siRNA sense strand
gagcuacacucccacuucu

SEQ ID NO: 1615422 - RNA, 19 nt, Homo sapiens
  misc_RNA (1)...(19): siRNA sense strand
caagucggcuguggagaug

SEQ ID NO: 1615423 - RNA, 19 nt, Homo sapiens
  misc_RNA (1)...(19): siRNA sense strand
gggacugggugcauaucuu

SEQ ID NO: 1615424 - RNA, 19 nt, Homo sapiens
  misc_RNA (1)...(19): siRNA sense strand
ggacugggugcauaucuuc

SEQ ID NO: 1615425 - RNA, 19 nt, Homo sapiens
  misc_RNA (1)...(19): siRNA sense strand
cggaaugaaugacguccuu

SEQ ID NO: 1615426 - RNA, 19 nt, Homo sapiens
  misc_RNA (1)...(19): siRNA sense strand
gaggaauuccagcaucuga

SEQ ID NO: 1615427 - RNA, 19 nt, Homo sapiens
  misc_RNA (1)...(19): siRNA sense strand
ucuggaaccugaaguugau

SEQ ID NO: 1615428 - RNA, 19 nt, Homo sapiens
  misc_RNA (1)...(19): siRNA sense strand
uaacaguccgcccuacuuc

SEQ ID NO: 1615429 - RNA, 19 nt, Homo sapiens
  misc_RNA (1)...(19): siRNA sense strand
ggaauuccagcaucugaag

SEQ ID NO: 1615430 - RNA, 19 nt, Homo sapiens
  misc_RNA (1)...(19): siRNA sense strand
gcuacacucccacuucuuc

SEQ ID NO: 1615431 - RNA, 19 nt, Homo sapiens
  misc_RNA (1)...(19): siRNA sense strand
uccagcaucugaagacuca

SEQ ID NO: 1615432 - RNA, 19 nt, Homo sapiens
  misc_RNA (1)...(19): siRNA sense strand
ugacguccuuccuaacagu

SEQ ID NO: 1615433 - RNA, 19 nt, Homo sapiens
  misc_RNA (1)...(19): siRNA sense strand
ggaccaaguacaugaacca

SEQ ID NO: 1615434 - RNA, 19 nt, Homo sapiens
  misc_RNA (1)...(19): siRNA sense strand
ucaucaccguguccaauca

SEQ ID NO: 1615435 - RNA, 19 nt, Homo sapiens
  misc_RNA (1)...(19): siRNA sense strand
gaauuccagcaucugaaga

SEQ ID NO: 1615436 - RNA, 19 nt, Homo sapiens
  misc_RNA (1)...(19): siRNA sense strand
gcgccugauugcugagugu

SEQ ID NO: 1615437 - RNA, 19 nt, Homo sapiens
  misc_RNA (1)...(19): siRNA sense strand
aagaggaauuccagcaucu

SEQ ID NO: 1615438 - RNA, 19 nt, Homo sapiens
  misc_RNA (1)...(19): siRNA sense strand
gggauggacuucauuuugg

SEQ ID NO: 1615439 - RNA, 19 nt, Homo sapiens
  misc_RNA (1)...(19): siRNA sense strand
ccuguggcaugucggaaug

SEQ ID NO: 1615440 - RNA, 19 nt, Homo sapiens
  misc_RNA (1)...(19): siRNA sense strand
uggcaugucggaaugaaug

SEQ ID NO: 1615441 - RNA, 19 nt, Homo sapiens
  misc_RNA (1)...(19): siRNA sense strand
cuaacaguccgcccuacuu

SEQ ID NO: 1615442 - RNA, 19 nt, Homo sapiens
  misc_RNA (1)...(19): siRNA sense strand
ggauggacuucauuuugga

SEQ ID NO: 1615443 - RNA, 19 nt, Homo sapiens
  misc_RNA (1)...(19): siRNA sense strand
caucuggaaccugaaguug

SEQ ID NO: 1615444 - RNA, 19 nt, Homo sapiens
  misc_RNA (1)...(19): siRNA sense strand
acaagucggcuguggagau

SEQ ID NO: 1615445 - RNA, 19 nt, Homo sapiens
  misc_RNA (1)...(19): siRNA sense strand
ucagugcccugccuguacu

SEQ ID NO: 1615446 - RNA, 19 nt, Homo sapiens
  misc_RNA (1)...(19): siRNA sense strand
ggaaagcccugacggacuu

SEQ ID NO: 1615447 - RNA, 19 nt, Homo sapiens
  misc_RNA (1)...(19): siRNA sense strand
ugaaugacguccuuccuaa

SEQ ID NO: 1615448 - RNA, 19 nt, Homo sapiens
  misc_RNA (1)...(19): siRNA sense strand
ggacuucauucaagaggaa

SEQ ID NO: 1615449 - RNA, 19 nt, Homo sapiens
  misc_RNA (1)...(19): siRNA sense strand
gagauggcgucuaccagaa

SEQ ID NO: 1615450 - RNA, 19 nt, Homo sapiens
  misc_RNA (1)...(19): siRNA sense strand
ugacggacuucauucaaga

SEQ ID NO: 1615451 - RNA, 19 nt, Homo sapiens
  misc_RNA (1)...(19): siRNA sense strand
uguacgagcucaucgagaa

SEQ ID NO: 1615452 - RNA, 19 nt, Homo sapiens
  misc_RNA (1)...(19): siRNA sense strand
gagcuacacucccacuucu

SEQ ID NO: 1615453 - RNA, 19 nt, Homo sapiens
  misc_RNA (1)...(19): siRNA sense strand
caagucggcuguggagaug

SEQ ID NO: 1615454 - RNA, 19 nt, Homo sapiens
  misc_RNA (1)...(19): siRNA sense strand
gggacugggugcauaucuu

SEQ ID NO: 1615455 - RNA, 19 nt, Homo sapiens
  misc_RNA (1)...(19): siRNA sense strand
ggacugggugcauaucuuc

SEQ ID NO: 1615456 - RNA, 19 nt, Homo sapiens
  misc_RNA (1)...(19): siRNA sense strand
cggaaugaaugacguccuu

SEQ ID NO: 1615457 - RNA, 19 nt, Homo sapiens
  misc_RNA (1)...(19): siRNA sense strand
gaggaauuccagcaucuga

SEQ ID NO: 1615458 - RNA, 19 nt, Homo sapiens
  misc_RNA (1)...(19): siRNA sense strand
ucuggaaccugaaguugau

SEQ ID NO: 1615459 - RNA, 19 nt, Homo sapiens
  misc_RNA (1)...(19): siRNA sense strand
uaacaguccgcccuacuuc

SEQ ID NO: 1615460 - RNA, 19 nt, Homo sapiens
  misc_RNA (1)...(19): siRNA sense strand
ggaauuccagcaucugaag

SEQ ID NO: 1615461 - RNA, 19 nt, Homo sapiens
  misc_RNA (1)...(19): siRNA sense strand
gcuacacucccacuucuuc

SEQ ID NO: 1615462 - RNA, 19 nt, Homo sapiens
  misc_RNA (1)...(19): siRNA sense strand
uccagcaucugaagacuca

SEQ ID NO: 1615463 - RNA, 19 nt, Homo sapiens
  misc_RNA (1)...(19): siRNA sense strand
ugacguccuuccuaacagu

SEQ ID NO: 1615464 - RNA, 19 nt, Homo sapiens
  misc_RNA (1)...(19): siRNA sense strand
ggaccaaguacaugaacca

SEQ ID NO: 1615465 - RNA, 19 nt, Homo sapiens
  misc_RNA (1)...(19): siRNA sense strand
ucaucaccguguccaauca

SEQ ID NO: 1615466 - RNA, 19 nt, Homo sapiens
  misc_RNA (1)...(19): siRNA sense strand
gaauuccagcaucugaaga

SEQ ID NO: 1615467 - RNA, 19 nt, Homo sapiens
  misc_RNA (1)...(19): siRNA sense strand
gcgccugauugcugagugu

SEQ ID NO: 1615468 - RNA, 19 nt, Homo sapiens
  misc_RNA (1)...(19): siRNA sense strand
aagaggaauuccagcaucu

SEQ ID NO: 1615469 - RNA, 19 nt, Homo sapiens
  misc_RNA (1)...(19): siRNA sense strand
gggauggacuucauuuugg

SEQ ID NO: 1615470 - RNA, 19 nt, Homo sapiens
  misc_RNA (1)...(19): siRNA sense strand
ccuguggcaugucggaaug

SEQ ID NO: 1615471 - RNA, 19 nt, Homo sapiens
  misc_RNA (1)...(19): siRNA sense strand
uggcaugucggaaugaaug

SEQ ID NO: 1615472 - RNA, 19 nt, Homo sapiens
  misc_RNA (1)...(19): siRNA sense strand
cuaacaguccgcccuacuu

SEQ ID NO: 1615473 - RNA, 19 nt, Homo sapiens
  misc_RNA (1)...(19): siRNA sense strand
ggauggacuucauuuugga

SEQ ID NO: 1615474 - RNA, 19 nt, Homo sapiens
  misc_RNA (1)...(19): siRNA sense strand
caucuggaaccugaaguug

SEQ ID NO: 1615475 - RNA, 19 nt, Homo sapiens
  misc_RNA (1)...(19): siRNA sense strand
acaagucggcuguggagau

SEQ ID NO: 1615476 - RNA, 19 nt, Homo sapiens
  misc_RNA (1)...(19): siRNA sense strand
ucagugcccugccuguacu

SEQ ID NO: 1615477 - RNA, 19 nt, Homo sapiens
  misc_RNA (1)...(19): siRNA sense strand
uguacgagcucaucgagaa

SEQ ID NO: 1615478 - RNA, 19 nt, Homo sapiens
  misc_RNA (1)...(19): siRNA sense strand
ucuggaaccugaaguugau

SEQ ID NO: 1615479 - RNA, 19 nt, Homo sapiens
  misc_RNA (1)...(19): siRNA sense strand
ggaccaaguacaugaacca

SEQ ID NO: 1615480 - RNA, 19 nt, Homo sapiens
  misc_RNA (1)...(19): siRNA sense strand
ucaucaccguguccaauca

SEQ ID NO: 1615481 - RNA, 19 nt, Homo sapiens
  misc_RNA (1)...(19): siRNA sense strand
caucuggaaccugaaguug

SEQ ID NO: 1615482 - RNA, 19 nt, Homo sapiens
  misc_RNA (1)...(19): siRNA sense strand
ggaaagcccugacggacuu

SEQ ID NO: 1615483 - RNA, 19 nt, Homo sapiens
  misc_RNA (1)...(19): siRNA sense strand
ugaaugacguccuuccuaa

SEQ ID NO: 1615484 - RNA, 19 nt, Homo sapiens
  misc_RNA (1)...(19): siRNA sense strand
ggacuucauucaagaggaa

SEQ ID NO: 1615485 - RNA, 19 nt, Homo sapiens
  misc_RNA (1)...(19): siRNA sense strand
gagauggcgucuaccagaa

SEQ ID NO: 1615486 - RNA, 19 nt, Homo sapiens
  misc_RNA (1)...(19): siRNA sense strand
ugacggacuucauucaaga

SEQ ID NO: 1615487 - RNA, 19 nt, Homo sapiens
  misc_RNA (1)...(19): siRNA sense strand
uguacgagcucaucgagaa

SEQ ID NO: 1615488 - RNA, 19 nt, Homo sapiens
  misc_RNA (1)...(19): siRNA sense strand
gagcuacacucccacuucu

SEQ ID NO: 1615489 - RNA, 19 nt, Homo sapiens
  misc_RNA (1)...(19): siRNA sense strand
caagucggcuguggagaug

SEQ ID NO: 1615490 - RNA, 19 nt, Homo sapiens
  misc_RNA (1)...(19): siRNA sense strand
gggacugggugcauaucuu

SEQ ID NO: 1615491 - RNA, 19 nt, Homo sapiens
  misc_RNA (1)...(19): siRNA sense strand
ggacugggugcauaucuuc

SEQ ID NO: 1615492 - RNA, 19 nt, Homo sapiens
  misc_RNA (1)...(19): siRNA sense strand
cggaaugaaugacguccuu

SEQ ID NO: 1615493 - RNA, 19 nt, Homo sapiens
  misc_RNA (1)...(19): siRNA sense strand
gaggaauuccagcaucuga

SEQ ID NO: 1615494 - RNA, 19 nt, Homo sapiens
  misc_RNA (1)...(19): siRNA sense strand
ucuggaaccugaaguugau

SEQ ID NO: 1615495 - RNA, 19 nt, Homo sapiens
  misc_RNA (1)...(19): siRNA sense strand
uaacaguccgcccuacuuc

SEQ ID NO: 1615496 - RNA, 19 nt, Homo sapiens
  misc_RNA (1)...(19): siRNA sense strand
ggaauuccagcaucugaag

SEQ ID NO: 1615497 - RNA, 19 nt, Homo sapiens
  misc_RNA (1)...(19): siRNA sense strand
gcuacacucccacuucuuc

SEQ ID NO: 1615498 - RNA, 19 nt, Homo sapiens
  misc_RNA (1)...(19): siRNA sense strand
uccagcaucugaagacuca

SEQ ID NO: 1615499 - RNA, 19 nt, Homo sapiens
  misc_RNA (1)...(19): siRNA sense strand
ugacguccuuccuaacagu

SEQ ID NO: 1615500 - RNA, 19 nt, Homo sapiens
  misc_RNA (1)...(19): siRNA sense strand
ggaccaaguacaugaacca

SEQ ID NO: 1615501 - RNA, 19 nt, Homo sapiens
  misc_RNA (1)...(19): siRNA sense strand
ucaucaccguguccaauca

SEQ ID NO: 1615502 - RNA, 19 nt, Homo sapiens
  misc_RNA (1)...(19): siRNA sense strand
gaauuccagcaucugaaga

SEQ ID NO: 1615503 - RNA, 19 nt, Homo sapiens
  misc_RNA (1)...(19): siRNA sense strand
gcgccugauugcugagugu

SEQ ID NO: 1615504 - RNA, 19 nt, Homo sapiens
  misc_RNA (1)...(19): siRNA sense strand
aagaggaauuccagcaucu

SEQ ID NO: 1615505 - RNA, 19 nt, Homo sapiens
  misc_RNA (1)...(19): siRNA sense strand
gggauggacuucauuuugg

SEQ ID NO: 1615506 - RNA, 19 nt, Homo sapiens
  misc_RNA (1)...(19): siRNA sense strand
ccuguggcaugucggaaug

SEQ ID NO: 1615507 - RNA, 19 nt, Homo sapiens
  misc_RNA (1)...(19): siRNA sense strand
uggcaugucggaaugaaug

SEQ ID NO: 1615508 - RNA, 19 nt, Homo sapiens
  misc_RNA (1)...(19): siRNA sense strand
cuaacaguccgcccuacuu

SEQ ID NO: 1615509 - RNA, 19 nt, Homo sapiens
  misc_RNA (1)...(19): siRNA sense strand
ggauggacuucauuuugga

SEQ ID NO: 1615510 - RNA, 19 nt, Homo sapiens
  misc_RNA (1)...(19): siRNA sense strand
caucuggaaccugaaguug

SEQ ID NO: 1615511 - RNA, 19 nt, Homo sapiens
  misc_RNA (1)...(19): siRNA sense strand
acaagucggcuguggagau

SEQ ID NO: 1615512 - RNA, 19 nt, Homo sapiens
  misc_RNA (1)...(19): siRNA sense strand
ucagugcccugccuguacu

SEQ ID NO: 1615513 - RNA, 19 nt, Homo sapiens
  misc_RNA (1)...(19): siRNA sense strand
ggaaagcccugacggacuu

SEQ ID NO: 1615514 - RNA, 19 nt, Homo sapiens
  misc_RNA (1)...(19): siRNA sense strand
ugaaugacguccuuccuaa

SEQ ID NO: 1615515 - RNA, 19 nt, Homo sapiens
  misc_RNA (1)...(19): siRNA sense strand
ggacuucauucaagaggaa

SEQ ID NO: 1615516 - RNA, 19 nt, Homo sapiens
  misc_RNA (1)...(19): siRNA sense strand
gagauggcgucuaccagaa

SEQ ID NO: 1615517 - RNA, 19 nt, Homo sapiens
  misc_RNA (1)...(19): siRNA sense strand
ugacggacuucauucaaga

SEQ ID NO: 1615518 - RNA, 19 nt, Homo sapiens
  misc_RNA (1)...(19): siRNA sense strand
uguacgagcucaucgagaa

SEQ ID NO: 1615519 - RNA, 19 nt, Homo sapiens
  misc_RNA (1)...(19): siRNA sense strand
gagcuacacucccacuucu

SEQ ID NO: 1615520 - RNA, 19 nt, Homo sapiens
  misc_RNA (1)...(19): siRNA sense strand
caagucggcuguggagaug

SEQ ID NO: 1615521 - RNA, 19 nt, Homo sapiens
  misc_RNA (1)...(19): siRNA sense strand
gggacugggugcauaucuu

SEQ ID NO: 1615522 - RNA, 19 nt, Homo sapiens
  misc_RNA (1)...(19): siRNA sense strand
ggacugggugcauaucuuc

SEQ ID NO: 1615523 - RNA, 19 nt, Homo sapiens
  misc_RNA (1)...(19): siRNA sense strand
cggaaugaaugacguccuu

SEQ ID NO: 1615524 - RNA, 19 nt, Homo sapiens
  misc_RNA (1)...(19): siRNA sense strand
gaggaauuccagcaucuga

SEQ ID NO: 1615525 - RNA, 19 nt, Homo sapiens
  misc_RNA (1)...(19): siRNA sense strand
ucuggaaccugaaguugau

SEQ ID NO: 1615526 - RNA, 19 nt, Homo sapiens
  misc_RNA (1)...(19): siRNA sense strand
uaacaguccgcccuacuuc

SEQ ID NO: 1615527 - RNA, 19 nt, Homo sapiens
  misc_RNA (1)...(19): siRNA sense strand
ggaauuccagcaucugaag

SEQ ID NO: 1615528 - RNA, 19 nt, Homo sapiens
  misc_RNA (1)...(19): siRNA sense strand
gcuacacucccacuucuuc

SEQ ID NO: 1615529 - RNA, 19 nt, Homo sapiens
  misc_RNA (1)...(19): siRNA sense strand
uccagcaucugaagacuca

SEQ ID NO: 1615530 - RNA, 19 nt, Homo sapiens
  misc_RNA (1)...(19): siRNA sense strand
ugacguccuuccuaacagu

SEQ ID NO: 1615531 - RNA, 19 nt, Homo sapiens
  misc_RNA (1)...(19): siRNA sense strand
ggaccaaguacaugaacca

SEQ ID NO: 1615532 - RNA, 19 nt, Homo sapiens
  misc_RNA (1)...(19): siRNA sense strand
ucaucaccguguccaauca

SEQ ID NO: 1615533 - RNA, 19 nt, Homo sapiens
  misc_RNA (1)...(19): siRNA sense strand
gaauuccagcaucugaaga

SEQ ID NO: 1615534 - RNA, 19 nt, Homo sapiens
  misc_RNA (1)...(19): siRNA sense strand
gcgccugauugcugagugu

SEQ ID NO: 1615535 - RNA, 19 nt, Homo sapiens
  misc_RNA (1)...(19): siRNA sense strand
aagaggaauuccagcaucu

SEQ ID NO: 1615536 - RNA, 19 nt, Homo sapiens
  misc_RNA (1)...(19): siRNA sense strand
gggauggacuucauuuugg

SEQ ID NO: 1615537 - RNA, 19 nt, Homo sapiens
  misc_RNA (1)...(19): siRNA sense strand
ccuguggcaugucggaaug

SEQ ID NO: 1615538 - RNA, 19 nt, Homo sapiens
  misc_RNA (1)...(19): siRNA sense strand
uggcaugucggaaugaaug

SEQ ID NO: 1615539 - RNA, 19 nt, Homo sapiens
  misc_RNA (1)...(19): siRNA sense strand
cuaacaguccgcccuacuu

SEQ ID NO: 1615540 - RNA, 19 nt, Homo sapiens
  misc_RNA (1)...(19): siRNA sense strand
ggauggacuucauuuugga

SEQ ID NO: 1615541 - RNA, 19 nt, Homo sapiens
  misc_RNA (1)...(19): siRNA sense strand
caucuggaaccugaaguug

SEQ ID NO: 1615542 - RNA, 19 nt, Homo sapiens
  misc_RNA (1)...(19): siRNA sense strand
acaagucggcuguggagau

SEQ ID NO: 1615543 - RNA, 19 nt, Homo sapiens
  misc_RNA (1)...(19): siRNA sense strand
ucagugcccugccuguacu

SEQ ID NO: 1615544 - RNA, 19 nt, Homo sapiens
  misc_RNA (1)...(19): siRNA sense strand
ggaaagcccugacggacuu

SEQ ID NO: 1615545 - RNA, 19 nt, Homo sapiens
  misc_RNA (1)...(19): siRNA sense strand
ugaaugacguccuuccuaa

SEQ ID NO: 1615546 - RNA, 19 nt, Homo sapiens
  misc_RNA (1)...(19): siRNA sense strand
ggacuucauucaagaggaa

SEQ ID NO: 1615547 - RNA, 19 nt, Homo sapiens
  misc_RNA (1)...(19): siRNA sense strand
gagauggcgucuaccagaa

SEQ ID NO: 1615548 - RNA, 19 nt, Homo sapiens
  misc_RNA (1)...(19): siRNA sense strand
ugacggacuucauucaaga

SEQ ID NO: 1615549 - RNA, 19 nt, Homo sapiens
  misc_RNA (1)...(19): siRNA sense strand
uguacgagcucaucgagaa

SEQ ID NO: 1615550 - RNA, 19 nt, Homo sapiens
  misc_RNA (1)...(19): siRNA sense strand
gagcuacacucccacuucu

SEQ ID NO: 1615551 - RNA, 19 nt, Homo sapiens
  misc_RNA (1)...(19): siRNA sense strand
caagucggcuguggagaug

SEQ ID NO: 1615552 - RNA, 19 nt, Homo sapiens
  misc_RNA (1)...(19): siRNA sense strand
gggacugggugcauaucuu

SEQ ID NO: 1615553 - RNA, 19 nt, Homo sapiens
  misc_RNA (1)...(19): siRNA sense strand
ggacugggugcauaucuuc

SEQ ID NO: 1615554 - RNA, 19 nt, Homo sapiens
  misc_RNA (1)...(19): siRNA sense strand
cggaaugaaugacguccuu

SEQ ID NO: 1615555 - RNA, 19 nt, Homo sapiens
  misc_RNA (1)...(19): siRNA sense strand
gaggaauuccagcaucuga

SEQ ID NO: 1615556 - RNA, 19 nt, Homo sapiens
  misc_RNA (1)...(19): siRNA sense strand
ucuggaaccugaaguugau

SEQ ID NO: 1615557 - RNA, 19 nt, Homo sapiens
  misc_RNA (1)...(19): siRNA sense strand
uaacaguccgcccuacuuc

SEQ ID NO: 1615558 - RNA, 19 nt, Homo sapiens
  misc_RNA (1)...(19): siRNA sense strand
ggaauuccagcaucugaag

SEQ ID NO: 1615559 - RNA, 19 nt, Homo sapiens
  misc_RNA (1)...(19): siRNA sense strand
gcuacacucccacuucuuc

SEQ ID NO: 1615560 - RNA, 19 nt, Homo sapiens
  misc_RNA (1)...(19): siRNA sense strand
uccagcaucugaagacuca

SEQ ID NO: 1615561 - RNA, 19 nt, Homo sapiens
  misc_RNA (1)...(19): siRNA sense strand
ugacguccuuccuaacagu

SEQ ID NO: 1615562 - RNA, 19 nt, Homo sapiens
  misc_RNA (1)...(19): siRNA sense strand
ggaccaaguacaugaacca

SEQ ID NO: 1615563 - RNA, 19 nt, Homo sapiens
  misc_RNA (1)...(19): siRNA sense strand
ucaucaccguguccaauca

SEQ ID NO: 1615564 - RNA, 19 nt, Homo sapiens
  misc_RNA (1)...(19): siRNA sense strand
gaauuccagcaucugaaga

SEQ ID NO: 1615565 - RNA, 19 nt, Homo sapiens
  misc_RNA (1)...(19): siRNA sense strand
gcgccugauugcugagugu

SEQ ID NO: 1615566 - RNA, 19 nt, Homo sapiens
  misc_RNA (1)...(19): siRNA sense strand
aagaggaauuccagcaucu

SEQ ID NO: 1615567 - RNA, 19 nt, Homo sapiens
  misc_RNA (1)...(19): siRNA sense strand
gggauggacuucauuuugg

SEQ ID NO: 1615568 - RNA, 19 nt, Homo sapiens
  misc_RNA (1)...(19): siRNA sense strand
ccuguggcaugucggaaug

SEQ ID NO: 1615569 - RNA, 19 nt, Homo sapiens
  misc_RNA (1)...(19): siRNA sense strand
uggcaugucggaaugaaug

SEQ ID NO: 1615570 - RNA, 19 nt, Homo sapiens
  misc_RNA (1)...(19): siRNA sense strand
cuaacaguccgcccuacuu

SEQ ID NO: 1615571 - RNA, 19 nt, Homo sapiens
  misc_RNA (1)...(19): siRNA sense strand
ggauggacuucauuuugga

SEQ ID NO: 1615572 - RNA, 19 nt, Homo sapiens
  misc_RNA (1)...(19): siRNA sense strand
caucuggaaccugaaguug

SEQ ID NO: 1615573 - RNA, 19 nt, Homo sapiens
  misc_RNA (1)...(19): siRNA sense strand
acaagucggcuguggagau

SEQ ID NO: 1615574 - RNA, 19 nt, Homo sapiens
  misc_RNA (1)...(19): siRNA sense strand
ucagugcccugccuguacu

SEQ ID NO: 1615575 - RNA, 19 nt, Homo sapiens
  misc_RNA (1)...(19): siRNA sense strand
ggaaagcccugacggacuu

SEQ ID NO: 1615576 - RNA, 19 nt, Homo sapiens
  misc_RNA (1)...(19): siRNA sense strand
ugaaugacguccuuccuaa

SEQ ID NO: 1615577 - RNA, 19 nt, Homo sapiens
  misc_RNA (1)...(19): siRNA sense strand
ggacuucauucaagaggaa

SEQ ID NO: 1615578 - RNA, 19 nt, Homo sapiens
  misc_RNA (1)...(19): siRNA sense strand
gagauggcgucuaccagaa

SEQ ID NO: 1615579 - RNA, 19 nt, Homo sapiens
  misc_RNA (1)...(19): siRNA sense strand
ugacggacuucauucaaga

SEQ ID NO: 1615580 - RNA, 19 nt, Homo sapiens
  misc_RNA (1)...(19): siRNA sense strand
uguacgagcucaucgagaa

SEQ ID NO: 1615581 - RNA, 19 nt, Homo sapiens
  misc_RNA (1)...(19): siRNA sense strand
gagcuacacucccacuucu

SEQ ID NO: 1615582 - RNA, 19 nt, Homo sapiens
  misc_RNA (1)...(19): siRNA sense strand
caagucggcuguggagaug

SEQ ID NO: 1615583 - RNA, 19 nt, Homo sapiens
  misc_RNA (1)...(19): siRNA sense strand
gggacugggugcauaucuu

SEQ ID NO: 1615584 - RNA, 19 nt, Homo sapiens
  misc_RNA (1)...(19): siRNA sense strand
ggacugggugcauaucuuc

SEQ ID NO: 1615585 - RNA, 19 nt, Homo sapiens
  misc_RNA (1)...(19): siRNA sense strand
cggaaugaaugacguccuu

SEQ ID NO: 1615586 - RNA, 19 nt, Homo sapiens
  misc_RNA (1)...(19): siRNA sense strand
gaggaauuccagcaucuga

SEQ ID NO: 1615587 - RNA, 19 nt, Homo sapiens
  misc_RNA (1)...(19): siRNA sense strand
ucuggaaccugaaguugau

SEQ ID NO: 1615588 - RNA, 19 nt, Homo sapiens
  misc_RNA (1)...(19): siRNA sense strand
uaacaguccgcccuacuuc

SEQ ID NO: 1615589 - RNA, 19 nt, Homo sapiens
  misc_RNA (1)...(19): siRNA sense strand
ggaauuccagcaucugaag

SEQ ID NO: 1615590 - RNA, 19 nt, Homo sapiens
  misc_RNA (1)...(19): siRNA sense strand
gcuacacucccacuucuuc

SEQ ID NO: 1615591 - RNA, 19 nt, Homo sapiens
  misc_RNA (1)...(19): siRNA sense strand
uccagcaucugaagacuca

SEQ ID NO: 1615592 - RNA, 19 nt, Homo sapiens
  misc_RNA (1)...(19): siRNA sense strand
ugacguccuuccuaacagu

SEQ ID NO: 1615593 - RNA, 19 nt, Homo sapiens
  misc_RNA (1)...(19): siRNA sense strand
ggaccaaguacaugaacca

SEQ ID NO: 1615594 - RNA, 19 nt, Homo sapiens
  misc_RNA (1)...(19): siRNA sense strand
ucaucaccguguccaauca

SEQ ID NO: 1615595 - RNA, 19 nt, Homo sapiens
  misc_RNA (1)...(19): siRNA sense strand
gaauuccagcaucugaaga

SEQ ID NO: 1615596 - RNA, 19 nt, Homo sapiens
  misc_RNA (1)...(19): siRNA sense strand
gcgccugauugcugagugu

SEQ ID NO: 1615597 - RNA, 19 nt, Homo sapiens
  misc_RNA (1)...(19): siRNA sense strand
aagaggaauuccagcaucu

SEQ ID NO: 1615598 - RNA, 19 nt, Homo sapiens
  misc_RNA (1)...(19): siRNA sense strand
gggauggacuucauuuugg

SEQ ID NO: 1615599 - RNA, 19 nt, Homo sapiens
  misc_RNA (1)...(19): siRNA sense strand
ccuguggcaugucggaaug

SEQ ID NO: 1615600 - RNA, 19 nt, Homo sapiens
  misc_RNA (1)...(19): siRNA sense strand
uggcaugucggaaugaaug

SEQ ID NO: 1615601 - RNA, 19 nt, Homo sapiens
  misc_RNA (1)...(19): siRNA sense strand
cuaacaguccgcccuacuu

SEQ ID NO: 1615602 - RNA, 19 nt, Homo sapiens
  misc_RNA (1)...(19): siRNA sense strand
ggauggacuucauuuugga

SEQ ID NO: 1615603 - RNA, 19 nt, Homo sapiens
  misc_RNA (1)...(19): siRNA sense strand
caucuggaaccugaaguug

SEQ ID NO: 1615604 - RNA, 19 nt, Homo sapiens
  misc_RNA (1)...(19): siRNA sense strand
acaagucggcuguggagau

SEQ ID NO: 1615605 - RNA, 19 nt, Homo sapiens
  misc_RNA (1)...(19): siRNA sense strand
ucagugcccugccuguacu

SEQ ID NO: 1615606 - RNA, 19 nt, Homo sapiens
  misc_RNA (1)...(19): siRNA sense strand
uguacgagcucaucgagaa

SEQ ID NO: 1615607 - RNA, 19 nt, Homo sapiens
  misc_RNA (1)...(19): siRNA sense strand
ucuggaaccugaaguugau

SEQ ID NO: 1615608 - RNA, 19 nt, Homo sapiens
  misc_RNA (1)...(19): siRNA sense strand
ggaccaaguacaugaacca

SEQ ID NO: 1615609 - RNA, 19 nt, Homo sapiens
  misc_RNA (1)...(19): siRNA sense strand
ucaucaccguguccaauca

SEQ ID NO: 1615610 - RNA, 19 nt, Homo sapiens
  misc_RNA (1)...(19): siRNA sense strand
caucuggaaccugaaguug

SEQ ID NO: 1615611 - RNA, 19 nt, Homo sapiens
  misc_RNA (1)...(19): siRNA sense strand
ggaaagcccugacggacuu

SEQ ID NO: 1615612 - RNA, 19 nt, Homo sapiens
  misc_RNA (1)...(19): siRNA sense strand
ugaaugacguccuuccuaa

SEQ ID NO: 1615613 - RNA, 19 nt, Homo sapiens
  misc_RNA (1)...(19): siRNA sense strand
ggacuucauucaagaggaa

SEQ ID NO: 1615614 - RNA, 19 nt, Homo sapiens
  misc_RNA (1)...(19): siRNA sense strand
gagauggcgucuaccagaa

SEQ ID NO: 1615615 - RNA, 19 nt, Homo sapiens
  misc_RNA (1)...(19): siRNA sense strand
ugacggacuucauucaaga

SEQ ID NO: 1615616 - RNA, 19 nt, Homo sapiens
  misc_RNA (1)...(19): siRNA sense strand
uguacgagcucaucgagaa

SEQ ID NO: 1615617 - RNA, 19 nt, Homo sapiens
  misc_RNA (1)...(19): siRNA sense strand
gagcuacacucccacuucu

SEQ ID NO: 1615618 - RNA, 19 nt, Homo sapiens
  misc_RNA (1)...(19): siRNA sense strand
caagucggcuguggagaug

SEQ ID NO: 1615619 - RNA, 19 nt, Homo sapiens
  misc_RNA (1)...(19): siRNA sense strand
gggacugggugcauaucuu

SEQ ID NO: 1615620 - RNA, 19 nt, Homo sapiens
  misc_RNA (1)...(19): siRNA sense strand
ggacugggugcauaucuuc

SEQ ID NO: 1615621 - RNA, 19 nt, Homo sapiens
  misc_RNA (1)...(19): siRNA sense strand
cggaaugaaugacguccuu

SEQ ID NO: 1615622 - RNA, 19 nt, Homo sapiens
  misc_RNA (1)...(19): siRNA sense strand
gaggaauuccagcaucuga

SEQ ID NO: 1615623 - RNA, 19 nt, Homo sapiens
  misc_RNA (1)...(19): siRNA sense strand
ucuggaaccugaaguugau

SEQ ID NO: 1615624 - RNA, 19 nt, Homo sapiens
  misc_RNA (1)...(19): siRNA sense strand
uaacaguccgcccuacuuc

SEQ ID NO: 1615625 - RNA, 19 nt, Homo sapiens
  misc_RNA (1)...(19): siRNA sense strand
ggaauuccagcaucugaag

SEQ ID NO: 1615626 - RNA, 19 nt, Homo sapiens
  misc_RNA (1)...(19): siRNA sense strand
gcuacacucccacuucuuc

SEQ ID NO: 1615627 - RNA, 19 nt, Homo sapiens
  misc_RNA (1)...(19): siRNA sense strand
uccagcaucugaagacuca

SEQ ID NO: 1615628 - RNA, 19 nt, Homo sapiens
  misc_RNA (1)...(19): siRNA sense strand
ugacguccuuccuaacagu

SEQ ID NO: 1615629 - RNA, 19 nt, Homo sapiens
  misc_RNA (1)...(19): siRNA sense strand
ggaccaaguacaugaacca

SEQ ID NO: 1615630 - RNA, 19 nt, Homo sapiens
  misc_RNA (1)...(19): siRNA sense strand
ucaucaccguguccaauca

SEQ ID NO: 1615631 - RNA, 19 nt, Homo sapiens
  misc_RNA (1)...(19): siRNA sense strand
gaauuccagcaucugaaga

SEQ ID NO: 1615632 - RNA, 19 nt, Homo sapiens
  misc_RNA (1)...(19): siRNA sense strand
gcgccugauugcugagugu

SEQ ID NO: 1615633 - RNA, 19 nt, Homo sapiens
  misc_RNA (1)...(19): siRNA sense strand
aagaggaauuccagcaucu

SEQ ID NO: 1615634 - RNA, 19 nt, Homo sapiens
  misc_RNA (1)...(19): siRNA sense strand
gggauggacuucauuuugg

SEQ ID NO: 1615635 - RNA, 19 nt, Homo sapiens
  misc_RNA (1)...(19): siRNA sense strand
ccuguggcaugucggaaug

SEQ ID NO: 1615636 - RNA, 19 nt, Homo sapiens
  misc_RNA (1)...(19): siRNA sense strand
uggcaugucggaaugaaug

SEQ ID NO: 1615637 - RNA, 19 nt, Homo sapiens
  misc_RNA (1)...(19): siRNA sense strand
cuaacaguccgcccuacuu

SEQ ID NO: 1615638 - RNA, 19 nt, Homo sapiens
  misc_RNA (1)...(19): siRNA sense strand
ggauggacuucauuuugga

SEQ ID NO: 1615639 - RNA, 19 nt, Homo sapiens
  misc_RNA (1)...(19): siRNA sense strand
caucuggaaccugaaguug

SEQ ID NO: 1615640 - RNA, 19 nt, Homo sapiens
  misc_RNA (1)...(19): siRNA sense strand
acaagucggcuguggagau

SEQ ID NO: 1615641 - RNA, 19 nt, Homo sapiens
  misc_RNA (1)...(19): siRNA sense strand
ucagugcccugccuguacu

SEQ ID NO: 1615642 - RNA, 19 nt, Homo sapiens
  misc_RNA (1)...(19): siRNA sense strand
ggaaagcccugacggacuu

SEQ ID NO: 1615643 - RNA, 19 nt, Homo sapiens
  misc_RNA (1)...(19): siRNA sense strand
ugaaugacguccuuccuaa

SEQ ID NO: 1615644 - RNA, 19 nt, Homo sapiens
  misc_RNA (1)...(19): siRNA sense strand
ggacuucauucaagaggaa

SEQ ID NO: 1615645 - RNA, 19 nt, Homo sapiens
  misc_RNA (1)...(19): siRNA sense strand
gagauggcgucuaccagaa

SEQ ID NO: 1615646 - RNA, 19 nt, Homo sapiens
  misc_RNA (1)...(19): siRNA sense strand
ugacggacuucauucaaga

SEQ ID NO: 1615647 - RNA, 19 nt, Homo sapiens
  misc_RNA (1)...(19): siRNA sense strand
uguacgagcucaucgagaa

SEQ ID NO: 1615648 - RNA, 19 nt, Homo sapiens
  misc_RNA (1)...(19): siRNA sense strand
gagcuacacucccacuucu

SEQ ID NO: 1615649 - RNA, 19 nt, Homo sapiens
  misc_RNA (1)...(19): siRNA sense strand
caagucggcuguggagaug

SEQ ID NO: 1615650 - RNA, 19 nt, Homo sapiens
  misc_RNA (1)...(19): siRNA sense strand
gggacugggugcauaucuu

SEQ ID NO: 1615651 - RNA, 19 nt, Homo sapiens
  misc_RNA (1)...(19): siRNA sense strand
ggacugggugcauaucuuc

SEQ ID NO: 1615652 - RNA, 19 nt, Homo sapiens
  misc_RNA (1)...(19): siRNA sense strand
cggaaugaaugacguccuu

SEQ ID NO: 1615653 - RNA, 19 nt, Homo sapiens
  misc_RNA (1)...(19): siRNA sense strand
gaggaauuccagcaucuga

SEQ ID NO: 1615654 - RNA, 19 nt, Homo sapiens
  misc_RNA (1)...(19): siRNA sense strand
ucuggaaccugaaguugau

SEQ ID NO: 1615655 - RNA, 19 nt, Homo sapiens
  misc_RNA (1)...(19): siRNA sense strand
uaacaguccgcccuacuuc

SEQ ID NO: 1615656 - RNA, 19 nt, Homo sapiens
  misc_RNA (1)...(19): siRNA sense strand
ggaauuccagcaucugaag

SEQ ID NO: 1615657 - RNA, 19 nt, Homo sapiens
  misc_RNA (1)...(19): siRNA sense strand
gcuacacucccacuucuuc

SEQ ID NO: 1615658 - RNA, 19 nt, Homo sapiens
  misc_RNA (1)...(19): siRNA sense strand
uccagcaucugaagacuca

SEQ ID NO: 1615659 - RNA, 19 nt, Homo sapiens
  misc_RNA (1)...(19): siRNA sense strand
ugacguccuuccuaacagu

SEQ ID NO: 1615660 - RNA, 19 nt, Homo sapiens
  misc_RNA (1)...(19): siRNA sense strand
ggaccaaguacaugaacca

SEQ ID NO: 1615661 - RNA, 19 nt, Homo sapiens
  misc_RNA (1)...(19): siRNA sense strand
ucaucaccguguccaauca

SEQ ID NO: 1615662 - RNA, 19 nt, Homo sapiens
  misc_RNA (1)...(19): siRNA sense strand
gaauuccagcaucugaaga

SEQ ID NO: 1615663 - RNA, 19 nt, Homo sapiens
  misc_RNA (1)...(19): siRNA sense strand
gcgccugauugcugagugu

SEQ ID NO: 1615664 - RNA, 19 nt, Homo sapiens
  misc_RNA (1)...(19): siRNA sense strand
aagaggaauuccagcaucu

SEQ ID NO: 1615665 - RNA, 19 nt, Homo sapiens
  misc_RNA (1)...(19): siRNA sense strand
gggauggacuucauuuugg

SEQ ID NO: 1615666 - RNA, 19 nt, Homo sapiens
  misc_RNA (1)...(19): siRNA sense strand
ccuguggcaugucggaaug

SEQ ID NO: 1615667 - RNA, 19 nt, Homo sapiens
  misc_RNA (1)...(19): siRNA sense strand
uggcaugucggaaugaaug

SEQ ID NO: 1615668 - RNA, 19 nt, Homo sapiens
  misc_RNA (1)...(19): siRNA sense strand
cuaacaguccgcccuacuu

SEQ ID NO: 1615669 - RNA, 19 nt, Homo sapiens
  misc_RNA (1)...(19): siRNA sense strand
ggauggacuucauuuugga

SEQ ID NO: 1615670 - RNA, 19 nt, Homo sapiens
  misc_RNA (1)...(19): siRNA sense strand
caucuggaaccugaaguug

SEQ ID NO: 1615671 - RNA, 19 nt, Homo sapiens
  misc_RNA (1)...(19): siRNA sense strand
acaagucggcuguggagau

SEQ ID NO: 1615672 - RNA, 19 nt, Homo sapiens
  misc_RNA (1)...(19): siRNA sense strand
ucagugcccugccuguacu

SEQ ID NO: 1615673 - RNA, 19 nt, Homo sapiens
  misc_RNA (1)...(19): siRNA sense strand
ggaaagcccugacggacuu

SEQ ID NO: 1615674 - RNA, 19 nt, Homo sapiens
  misc_RNA (1)...(19): siRNA sense strand
ugaaugacguccuuccuaa

SEQ ID NO: 1615675 - RNA, 19 nt, Homo sapiens
  misc_RNA (1)...(19): siRNA sense strand
ggacuucauucaagaggaa

SEQ ID NO: 1615676 - RNA, 19 nt, Homo sapiens
  misc_RNA (1)...(19): siRNA sense strand
gagauggcgucuaccagaa

SEQ ID NO: 1615677 - RNA, 19 nt, Homo sapiens
  misc_RNA (1)...(19): siRNA sense strand
ugacggacuucauucaaga

SEQ ID NO: 1615678 - RNA, 19 nt, Homo sapiens
  misc_RNA (1)...(19): siRNA sense strand
uguacgagcucaucgagaa

SEQ ID NO: 1615679 - RNA, 19 nt, Homo sapiens
  misc_RNA (1)...(19): siRNA sense strand
gagcuacacucccacuucu

SEQ ID NO: 1615680 - RNA, 19 nt, Homo sapiens
  misc_RNA (1)...(19): siRNA sense strand
caagucggcuguggagaug

SEQ ID NO: 1615681 - RNA, 19 nt, Homo sapiens
  misc_RNA (1)...(19): siRNA sense strand
gggacugggugcauaucuu

SEQ ID NO: 1615682 - RNA, 19 nt, Homo sapiens
  misc_RNA (1)...(19): siRNA sense strand
ggacugggugcauaucuuc

SEQ ID NO: 1615683 - RNA, 19 nt, Homo sapiens
  misc_RNA (1)...(19): siRNA sense strand
cggaaugaaugacguccuu

SEQ ID NO: 1615684 - RNA, 19 nt, Homo sapiens
  misc_RNA (1)...(19): siRNA sense strand
gaggaauuccagcaucuga

SEQ ID NO: 1615685 - RNA, 19 nt, Homo sapiens
  misc_RNA (1)...(19): siRNA sense strand
ucuggaaccugaaguugau

SEQ ID NO: 1615686 - RNA, 19 nt, Homo sapiens
  misc_RNA (1)...(19): siRNA sense strand
uaacaguccgcccuacuuc

SEQ ID NO: 1615687 - RNA, 19 nt, Homo sapiens
  misc_RNA (1)...(19): siRNA sense strand
ggaauuccagcaucugaag

SEQ ID NO: 1615688 - RNA, 19 nt, Homo sapiens
  misc_RNA (1)...(19): siRNA sense strand
gcuacacucccacuucuuc

SEQ ID NO: 1615689 - RNA, 19 nt, Homo sapiens
  misc_RNA (1)...(19): siRNA sense strand
uccagcaucugaagacuca

SEQ ID NO: 1615690 - RNA, 19 nt, Homo sapiens
  misc_RNA (1)...(19): siRNA sense strand
ugacguccuuccuaacagu

SEQ ID NO: 1615691 - RNA, 19 nt, Homo sapiens
  misc_RNA (1)...(19): siRNA sense strand
ggaccaaguacaugaacca

SEQ ID NO: 1615692 - RNA, 19 nt, Homo sapiens
  misc_RNA (1)...(19): siRNA sense strand
ucaucaccguguccaauca

SEQ ID NO: 1615693 - RNA, 19 nt, Homo sapiens
  misc_RNA (1)...(19): siRNA sense strand
gaauuccagcaucugaaga

SEQ ID NO: 1615694 - RNA, 19 nt, Homo sapiens
  misc_RNA (1)...(19): siRNA sense strand
gcgccugauugcugagugu

SEQ ID NO: 1615695 - RNA, 19 nt, Homo sapiens
  misc_RNA (1)...(19): siRNA sense strand
aagaggaauuccagcaucu

SEQ ID NO: 1615696 - RNA, 19 nt, Homo sapiens
  misc_RNA (1)...(19): siRNA sense strand
gggauggacuucauuuugg

SEQ ID NO: 1615697 - RNA, 19 nt, Homo sapiens
  misc_RNA (1)...(19): siRNA sense strand
ccuguggcaugucggaaug

SEQ ID NO: 1615698 - RNA, 19 nt, Homo sapiens
  misc_RNA (1)...(19): siRNA sense strand
uggcaugucggaaugaaug

SEQ ID NO: 1615699 - RNA, 19 nt, Homo sapiens
  misc_RNA (1)...(19): siRNA sense strand
cuaacaguccgcccuacuu

SEQ ID NO: 1615700 - RNA, 19 nt, Homo sapiens
  misc_RNA (1)...(19): siRNA sense strand
ggauggacuucauuuugga

SEQ ID NO: 1615701 - RNA, 19 nt, Homo sapiens
  misc_RNA (1)...(19): siRNA sense strand
caucuggaaccugaaguug

SEQ ID NO: 1615702 - RNA, 19 nt, Homo sapiens
  misc_RNA (1)...(19): siRNA sense strand
acaagucggcuguggagau

SEQ ID NO: 1615703 - RNA, 19 nt, Homo sapiens
  misc_RNA (1)...(19): siRNA sense strand
ucagugcccugccuguacu

SEQ ID NO: 1615704 - RNA, 19 nt, Homo sapiens
  misc_RNA (1)...(19): siRNA sense strand
ggaaagcccugacggacuu

SEQ ID NO: 1615705 - RNA, 19 nt, Homo sapiens
  misc_RNA (1)...(19): siRNA sense strand
ugaaugacguccuuccuaa

SEQ ID NO: 1615706 - RNA, 19 nt, Homo sapiens
  misc_RNA (1)...(19): siRNA sense strand
ggacuucauucaagaggaa

SEQ ID NO: 1615707 - RNA, 19 nt, Homo sapiens
  misc_RNA (1)...(19): siRNA sense strand
gagauggcgucuaccagaa

SEQ ID NO: 1615708 - RNA, 19 nt, Homo sapiens
  misc_RNA (1)...(19): siRNA sense strand
ugacggacuucauucaaga

SEQ ID NO: 1615709 - RNA, 19 nt, Homo sapiens
  misc_RNA (1)...(19): siRNA sense strand
uguacgagcucaucgagaa

SEQ ID NO: 1615710 - RNA, 19 nt, Homo sapiens
  misc_RNA (1)...(19): siRNA sense strand
gagcuacacucccacuucu

SEQ ID NO: 1615711 - RNA, 19 nt, Homo sapiens
  misc_RNA (1)...(19): siRNA sense strand
caagucggcuguggagaug

SEQ ID NO: 1615712 - RNA, 19 nt, Homo sapiens
  misc_RNA (1)...(19): siRNA sense strand
gggacugggugcauaucuu

SEQ ID NO: 1615713 - RNA, 19 nt, Homo sapiens
  misc_RNA (1)...(19): siRNA sense strand
ggacugggugcauaucuuc

SEQ ID NO: 1615714 - RNA, 19 nt, Homo sapiens
  misc_RNA (1)...(19): siRNA sense strand
cggaaugaaugacguccuu

SEQ ID NO: 1615715 - RNA, 19 nt, Homo sapiens
  misc_RNA (1)...(19): siRNA sense strand
gaggaauuccagcaucuga

SEQ ID NO: 1615716 - RNA, 19 nt, Homo sapiens
  misc_RNA (1)...(19): siRNA sense strand
ucuggaaccugaaguugau

SEQ ID NO: 1615717 - RNA, 19 nt, Homo sapiens
  misc_RNA (1)...(19): siRNA sense strand
uaacaguccgcccuacuuc

SEQ ID NO: 1615718 - RNA, 19 nt, Homo sapiens
  misc_RNA (1)...(19): siRNA sense strand
ggaauuccagcaucugaag

SEQ ID NO: 1615719 - RNA, 19 nt, Homo sapiens
  misc_RNA (1)...(19): siRNA sense strand
gcuacacucccacuucuuc

SEQ ID NO: 1615720 - RNA, 19 nt, Homo sapiens
  misc_RNA (1)...(19): siRNA sense strand
uccagcaucugaagacuca

SEQ ID NO: 1615721 - RNA, 19 nt, Homo sapiens
  misc_RNA (1)...(19): siRNA sense strand
ugacguccuuccuaacagu

SEQ ID NO: 1615722 - RNA, 19 nt, Homo sapiens
  misc_RNA (1)...(19): siRNA sense strand
ggaccaaguacaugaacca

SEQ ID NO: 1615723 - RNA, 19 nt, Homo sapiens
  misc_RNA (1)...(19): siRNA sense strand
ucaucaccguguccaauca

SEQ ID NO: 1615724 - RNA, 19 nt, Homo sapiens
  misc_RNA (1)...(19): siRNA sense strand
gaauuccagcaucugaaga

SEQ ID NO: 1615725 - RNA, 19 nt, Homo sapiens
  misc_RNA (1)...(19): siRNA sense strand
gcgccugauugcugagugu

SEQ ID NO: 1615726 - RNA, 19 nt, Homo sapiens
  misc_RNA (1)...(19): siRNA sense strand
aagaggaauuccagcaucu

SEQ ID NO: 1615727 - RNA, 19 nt, Homo sapiens
  misc_RNA (1)...(19): siRNA sense strand
gggauggacuucauuuugg

SEQ ID NO: 1615728 - RNA, 19 nt, Homo sapiens
  misc_RNA (1)...(19): siRNA sense strand
ccuguggcaugucggaaug

SEQ ID NO: 1615729 - RNA, 19 nt, Homo sapiens
  misc_RNA (1)...(19): siRNA sense strand
uggcaugucggaaugaaug

SEQ ID NO: 1615730 - RNA, 19 nt, Homo sapiens
  misc_RNA (1)...(19): siRNA sense strand
cuaacaguccgcccuacuu

SEQ ID NO: 1615731 - RNA, 19 nt, Homo sapiens
  misc_RNA (1)...(19): siRNA sense strand
ggauggacuucauuuugga

SEQ ID NO: 1615732 - RNA, 19 nt, Homo sapiens
  misc_RNA (1)...(19): siRNA sense strand
caucuggaaccugaaguug

SEQ ID NO: 1615733 - RNA, 19 nt, Homo sapiens
  misc_RNA (1)...(19): siRNA sense strand
acaagucggcuguggagau

SEQ ID NO: 1615734 - RNA, 19 nt, Homo sapiens
  misc_RNA (1)...(19): siRNA sense strand
ucagugcccugccuguacu

SEQ ID NO: 1615735 - RNA, 19 nt, Homo sapiens
  misc_RNA (1)...(19): siRNA sense strand
uguacgagcucaucgagaa

SEQ ID NO: 1615736 - RNA, 19 nt, Homo sapiens
  misc_RNA (1)...(19): siRNA sense strand
ucuggaaccugaaguugau

SEQ ID NO: 1615737 - RNA, 19 nt, Homo sapiens
  misc_RNA (1)...(19): siRNA sense strand
ggaccaaguacaugaacca

SEQ ID NO: 1615738 - RNA, 19 nt, Homo sapiens
  misc_RNA (1)...(19): siRNA sense strand
ucaucaccguguccaauca

SEQ ID NO: 1615739 - RNA, 19 nt, Homo sapiens
  misc_RNA (1)...(19): siRNA sense strand
caucuggaaccugaaguug

SEQ ID NO: 1615740 - RNA, 19 nt, Homo sapiens
  misc_RNA (1)...(19): siRNA sense strand
caacacaaauuauggcaaa

SEQ ID NO: 1615741 - RNA, 19 nt, Homo sapiens
  misc_RNA (1)...(19): siRNA sense strand
gaacaccguuacccaauga

SEQ ID NO: 1615742 - RNA, 19 nt, Homo sapiens
  misc_RNA (1)...(19): siRNA sense strand
ccaccgagcucuucaguug

SEQ ID NO: 1615743 - RNA, 19 nt, Homo sapiens
  misc_RNA (1)...(19): siRNA sense strand
cgaauuaagugucaccauu

SEQ ID NO: 1615744 - RNA, 19 nt, Homo sapiens
  misc_RNA (1)...(19): siRNA sense strand
gaagacugccuuuacuuaa

SEQ ID NO: 1615745 - RNA, 19 nt, Homo sapiens
  misc_RNA (1)...(19): siRNA sense strand
gaccagcucuaucugcaua

SEQ ID NO: 1615746 - RNA, 19 nt, Homo sapiens
  misc_RNA (1)...(19): siRNA sense strand
caaguacacucggauauug

SEQ ID NO: 1615747 - RNA, 19 nt, Homo sapiens
  misc_RNA (1)...(19): siRNA sense strand
gaaguggccugguccaagu

SEQ ID NO: 1615748 - RNA, 19 nt, Homo sapiens
  misc_RNA (1)...(19): siRNA sense strand
gaucaugucucugcagaug

SEQ ID NO: 1615749 - RNA, 19 nt, Homo sapiens
  misc_RNA (1)...(19): siRNA sense strand
ugaacgagauauuccagua

SEQ ID NO: 1615750 - RNA, 19 nt, Homo sapiens
  misc_RNA (1)...(19): siRNA sense strand
uaacugcucuugccaucaa

SEQ ID NO: 1615751 - RNA, 19 nt, Homo sapiens
  misc_RNA (1)...(19): siRNA sense strand
uaacuaccgucugggaaua

SEQ ID NO: 1615752 - RNA, 19 nt, Homo sapiens
  misc_RNA (1)...(19): siRNA sense strand
ggacaaaacaguacaaauu

SEQ ID NO: 1615753 - RNA, 19 nt, Homo sapiens
  misc_RNA (1)...(19): siRNA sense strand
caaaugauaucgcucacau

SEQ ID NO: 1615754 - RNA, 19 nt, Homo sapiens
  misc_RNA (1)...(19): siRNA sense strand
ccacggacaugguagaaug

SEQ ID NO: 1615755 - RNA, 19 nt, Homo sapiens
  misc_RNA (1)...(19): siRNA sense strand
ggacugcuauggcuuccuu

SEQ ID NO: 1615756 - RNA, 19 nt, Homo sapiens
  misc_RNA (1)...(19): siRNA sense strand
acacaacuguccucauuga

SEQ ID NO: 1615757 - RNA, 19 nt, Homo sapiens
  misc_RNA (1)...(19): siRNA sense strand
ugaagacugccuuuacuua

SEQ ID NO: 1615758 - RNA, 19 nt, Homo sapiens
  misc_RNA (1)...(19): siRNA sense strand
agaaacaccacaaaugaua

SEQ ID NO: 1615759 - RNA, 19 nt, Homo sapiens
  misc_RNA (1)...(19): siRNA sense strand
ccaaguucauucacacaaa

SEQ ID NO: 1615760 - RNA, 19 nt, Homo sapiens
  misc_RNA (1)...(19): siRNA sense strand
gaauuaagugucaccauug

SEQ ID NO: 1615761 - RNA, 19 nt, Homo sapiens
  misc_RNA (1)...(19): siRNA sense strand
ggaacaagaacuacaagga

SEQ ID NO: 1615762 - RNA, 19 nt, Homo sapiens
  misc_RNA (1)...(19): siRNA sense strand
ccaaacaccaucaccauga

SEQ ID NO: 1615763 - RNA, 19 nt, Homo sapiens
  misc_RNA (1)...(19): siRNA sense strand
ccgaaauacuacucaguuu

SEQ ID NO: 1615764 - RNA, 19 nt, Homo sapiens
  misc_RNA (1)...(19): siRNA sense strand
agagaaacaccacaaauga

SEQ ID NO: 1615765 - RNA, 19 nt, Homo sapiens
  misc_RNA (1)...(19): siRNA sense strand
gacaagaggcgccaugaga

SEQ ID NO: 1615766 - RNA, 19 nt, Homo sapiens
  misc_RNA (1)...(19): siRNA sense strand
cuacuucuaugccuucuau

SEQ ID NO: 1615767 - RNA, 19 nt, Homo sapiens
  misc_RNA (1)...(19): siRNA sense strand
ugaccuauguucaagauca

SEQ ID NO: 1615768 - RNA, 19 nt, Homo sapiens
  misc_RNA (1)...(19): siRNA sense strand
caauuuggauacuuugaug

SEQ ID NO: 1615769 - RNA, 19 nt, Homo sapiens
  misc_RNA (1)...(19): siRNA sense strand
gaugaccuauguucaagau

SEQ ID NO: 1615770 - RNA, 19 nt, Homo sapiens
  misc_RNA (1)...(19): siRNA sense strand
gagauauuccaguauguuu

SEQ ID NO: 1615771 - RNA, 19 nt, Homo sapiens
  misc_RNA (1)...(19): siRNA sense strand
gcacaacuugaacgagaua

SEQ ID NO: 1615772 - RNA, 19 nt, Homo sapiens
  misc_RNA (1)...(19): siRNA sense strand
ccaauguccuccugugguu

SEQ ID NO: 1615773 - RNA, 19 nt, Homo sapiens
  misc_RNA (1)...(19): siRNA sense strand
gaacgaagagaucaugucu

SEQ ID NO: 1615774 - RNA, 19 nt, Homo sapiens
  misc_RNA (1)...(19): siRNA sense strand
gaaacaccacaaaugauau

SEQ ID NO: 1615775 - RNA, 19 nt, Homo sapiens
  misc_RNA (1)...(19): siRNA sense strand
guaagaagcccgucauggu

SEQ ID NO: 1615776 - RNA, 19 nt, Homo sapiens
  misc_RNA (1)...(19): siRNA sense strand
gaacgagauauuccaguau

SEQ ID NO: 1615777 - RNA, 19 nt, Homo sapiens
  misc_RNA (1)...(19): siRNA sense strand
ccaaagaccagcucuaucu

SEQ ID NO: 1615778 - RNA, 19 nt, Homo sapiens
  misc_RNA (1)...(19): siRNA sense strand
ccaaguauaaucccaaaga

SEQ ID NO: 1615779 - RNA, 19 nt, Homo sapiens
  misc_RNA (1)...(19): siRNA sense strand
gcuauggcuuccuuuguug

SEQ ID NO: 1615780 - RNA, 19 nt, Homo sapiens
  misc_RNA (1)...(19): siRNA sense strand
ggacuggcauccgaaauac

SEQ ID NO: 1615781 - RNA, 19 nt, Homo sapiens
  misc_RNA (1)...(19): siRNA sense strand
gaaaccaaacgagauuauu

SEQ ID NO: 1615782 - RNA, 19 nt, Homo sapiens
  misc_RNA (1)...(19): siRNA sense strand
gaaauacuacucaguuugc

SEQ ID NO: 1615783 - RNA, 19 nt, Homo sapiens
  misc_RNA (1)...(19): siRNA sense strand
caacuguccucauugaaac

SEQ ID NO: 1615784 - RNA, 19 nt, Homo sapiens
  misc_RNA (1)...(19): siRNA sense strand
gauaccaaguucauucaca

SEQ ID NO: 1615785 - RNA, 19 nt, Homo sapiens
  misc_RNA (1)...(19): siRNA sense strand
ugacaucauuucccuaugg

SEQ ID NO: 1615786 - RNA, 19 nt, Homo sapiens
  misc_RNA (1)...(19): siRNA sense strand
cagagaaacaccacaaaug

SEQ ID NO: 1615787 - RNA, 19 nt, Homo sapiens
  misc_RNA (1)...(19): siRNA sense strand
gagaaacaccacaaaugau

SEQ ID NO: 1615788 - RNA, 19 nt, Homo sapiens
  misc_RNA (1)...(19): siRNA sense strand
caaccgcuuugaagaagug

SEQ ID NO: 1615789 - RNA, 19 nt, Homo sapiens
  misc_RNA (1)...(19): siRNA sense strand
uagaaugccugcggaacaa

SEQ ID NO: 1615790 - RNA, 19 nt, Homo sapiens
  misc_RNA (1)...(19): siRNA sense strand
ucaaguucauguacacaga

SEQ ID NO: 1615791 - RNA, 19 nt, Homo sapiens
  misc_RNA (1)...(19): siRNA sense strand
cgaaauacuacucaguuug

SEQ ID NO: 1615792 - RNA, 19 nt, Homo sapiens
  misc_RNA (1)...(19): siRNA sense strand
caacuugaacgagauauuc

SEQ ID NO: 1615793 - RNA, 19 nt, Homo sapiens
  misc_RNA (1)...(19): siRNA sense strand
caagcacaguauccaguug

SEQ ID NO: 1615794 - RNA, 19 nt, Homo sapiens
  misc_RNA (1)...(19): siRNA sense strand
gcgggagacuaucaaguuc

SEQ ID NO: 1615795 - RNA, 19 nt, Homo sapiens
  misc_RNA (1)...(19): siRNA sense strand
gggaaggccugaaguucgu

SEQ ID NO: 1615796 - RNA, 19 nt, Homo sapiens
  misc_RNA (1)...(19): siRNA sense strand
agacugggccgauaaggaa

SEQ ID NO: 1615797 - RNA, 19 nt, Homo sapiens
  misc_RNA (1)...(19): siRNA sense strand
auacuuugaugaccuaugu

SEQ ID NO: 1615798 - RNA, 19 nt, Homo sapiens
  misc_RNA (1)...(19): siRNA sense strand
gauauuccaguauguuuca

SEQ ID NO: 1615799 - RNA, 19 nt, Homo sapiens
  misc_RNA (1)...(19): siRNA sense strand
ccaaguacacucggauauu

SEQ ID NO: 1615800 - RNA, 19 nt, Homo sapiens
  misc_RNA (1)...(19): siRNA sense strand
acuaugggcuccuggauca

SEQ ID NO: 1615801 - RNA, 19 nt, Homo sapiens
  misc_RNA (1)...(19): siRNA sense strand
caaggucggcugcaacaug

SEQ ID NO: 1615802 - RNA, 19 nt, Homo sapiens
  misc_RNA (1)...(19): siRNA sense strand
aaaccaaacgagauuauuc

SEQ ID NO: 1615803 - RNA, 19 nt, Homo sapiens
  misc_RNA (1)...(19): siRNA sense strand
ccacggaagaugauauuca

SEQ ID NO: 1615804 - RNA, 19 nt, Homo sapiens
  misc_RNA (1)...(19): siRNA sense strand
gaccuauguucaagaucaa

SEQ ID NO: 1615805 - RNA, 19 nt, Homo sapiens
  misc_RNA (1)...(19): siRNA sense strand
acaacuguccucauugaaa

SEQ ID NO: 1615806 - RNA, 19 nt, Homo sapiens
  misc_RNA (1)...(19): siRNA sense strand
gggagacuaucaaguucau

SEQ ID NO: 1615807 - RNA, 19 nt, Homo sapiens
  misc_RNA (1)...(19): siRNA sense strand
gcccaacgacuuugacuuc

SEQ ID NO: 1615808 - RNA, 19 nt, Homo sapiens
  misc_RNA (1)...(19): siRNA sense strand
guagaaugccugcggaaca

SEQ ID NO: 1615809 - RNA, 19 nt, Homo sapiens
  misc_RNA (1)...(19): siRNA sense strand
cagaaggccaucauucaga

SEQ ID NO: 1615810 - RNA, 19 nt, Homo sapiens
  misc_RNA (1)...(19): siRNA sense strand
ugagagauccuuacugcau

SEQ ID NO: 1615811 - RNA, 19 nt, Homo sapiens
  misc_RNA (1)...(19): siRNA sense strand
ggacauuccaccacuagag

SEQ ID NO: 1615812 - RNA, 19 nt, Homo sapiens
  misc_RNA (1)...(19): siRNA sense strand
guccaaguauaaucccaaa

SEQ ID NO: 1615813 - RNA, 19 nt, Homo sapiens
  misc_RNA (1)...(19): siRNA sense strand
gagacuaucaaguucaugu

SEQ ID NO: 1615814 - RNA, 19 nt, Homo sapiens
  misc_RNA (1)...(19): siRNA sense strand
ucaucgugaucaccauuaa

SEQ ID NO: 1615815 - RNA, 19 nt, Homo sapiens
  misc_RNA (1)...(19): siRNA sense strand
ggaaacgucaucgugauca

SEQ ID NO: 1615816 - RNA, 19 nt, Homo sapiens
  misc_RNA (1)...(19): siRNA sense strand
gcaccggcaacaugauuga

SEQ ID NO: 1615817 - RNA, 19 nt, Homo sapiens
  misc_RNA (1)...(19): siRNA sense strand
gauccuuacugcaugacau

SEQ ID NO: 1615818 - RNA, 19 nt, Homo sapiens
  misc_RNA (1)...(19): siRNA sense strand
ccagagaaacaccacaaau

SEQ ID NO: 1615819 - RNA, 19 nt, Homo sapiens
  misc_RNA (1)...(19): siRNA sense strand
accgagcucuucaguugua

SEQ ID NO: 1615820 - RNA, 19 nt, Homo sapiens
  misc_RNA (1)...(19): siRNA sense strand
uggacuggcauccgaaaua

SEQ ID NO: 1615821 - RNA, 19 nt, Homo sapiens
  misc_RNA (1)...(19): siRNA sense strand
acacagacugggccgauaa

SEQ ID NO: 1615822 - RNA, 19 nt, Homo sapiens
  misc_RNA (1)...(19): siRNA sense strand
ggagaaugugggagccuuu

SEQ ID NO: 1615823 - RNA, 19 nt, Homo sapiens
  misc_RNA (1)...(19): siRNA sense strand
gagggcaccggcaacauga

SEQ ID NO: 1615824 - RNA, 19 nt, Homo sapiens
  misc_RNA (1)...(19): siRNA sense strand
agagauccuuacugcauga

SEQ ID NO: 1615825 - RNA, 19 nt, Homo sapiens
  misc_RNA (1)...(19): siRNA sense strand
gauauggccaaccaccaaa

SEQ ID NO: 1615826 - RNA, 19 nt, Homo sapiens
  misc_RNA (1)...(19): siRNA sense strand
ugcuauggcuuccuuuguu

SEQ ID NO: 1615827 - RNA, 19 nt, Homo sapiens
  misc_RNA (1)...(19): siRNA sense strand
agaacaccguuacccaaug

SEQ ID NO: 1615828 - RNA, 19 nt, Homo sapiens
  misc_RNA (1)...(19): siRNA sense strand
caacaaucccaaacacucu

SEQ ID NO: 1615829 - RNA, 19 nt, Homo sapiens
  misc_RNA (1)...(19): siRNA sense strand
caaguauaaucccaaagac

SEQ ID NO: 1615830 - RNA, 19 nt, Homo sapiens
  misc_RNA (1)...(19): siRNA sense strand
caaguucauucacacaaaa

SEQ ID NO: 1615831 - RNA, 19 nt, Homo sapiens
  misc_RNA (1)...(19): siRNA sense strand
uggauacuuugaugaccua

SEQ ID NO: 1615832 - RNA, 19 nt, Homo sapiens
  misc_RNA (1)...(19): siRNA sense strand
aacgagauauuccaguaug

SEQ ID NO: 1615833 - RNA, 19 nt, Homo sapiens
  misc_RNA (1)...(19): siRNA sense strand
ccagcucuaucugcauauu

SEQ ID NO: 1615834 - RNA, 19 nt, Homo sapiens
  misc_RNA (1)...(19): siRNA sense strand
caggauaccaaguucauuc

SEQ ID NO: 1615835 - RNA, 19 nt, Homo sapiens
  misc_RNA (1)...(19): siRNA sense strand
ugguggcucucuuuacuga

SEQ ID NO: 1615836 - RNA, 19 nt, Homo sapiens
  misc_RNA (1)...(19): siRNA sense strand
uggacggcaucguggauaa

SEQ ID NO: 1615837 - RNA, 19 nt, Homo sapiens
  misc_RNA (1)...(19): siRNA sense strand
ugacagccaagcacaguau

SEQ ID NO: 1615838 - RNA, 19 nt, Homo sapiens
  misc_RNA (1)...(19): siRNA sense strand
caaaacuggugauccaaau

SEQ ID NO: 1615839 - RNA, 19 nt, Homo sapiens
  misc_RNA (1)...(19): siRNA sense strand
uaaggacccucacaaaaca

SEQ ID NO: 1615840 - RNA, 19 nt, Homo sapiens
  misc_RNA (1)...(19): siRNA sense strand
caacacaaauuauggcaaa

SEQ ID NO: 1615841 - RNA, 19 nt, Homo sapiens
  misc_RNA (1)...(19): siRNA sense strand
gaacaccguuacccaauga

SEQ ID NO: 1615842 - RNA, 19 nt, Homo sapiens
  misc_RNA (1)...(19): siRNA sense strand
ccaccgagcucuucaguug

SEQ ID NO: 1615843 - RNA, 19 nt, Homo sapiens
  misc_RNA (1)...(19): siRNA sense strand
cgaauuaagugucaccauu

SEQ ID NO: 1615844 - RNA, 19 nt, Homo sapiens
  misc_RNA (1)...(19): siRNA sense strand
gaagacugccuuuacuuaa

SEQ ID NO: 1615845 - RNA, 19 nt, Homo sapiens
  misc_RNA (1)...(19): siRNA sense strand
gaccagcucuaucugcaua

SEQ ID NO: 1615846 - RNA, 19 nt, Homo sapiens
  misc_RNA (1)...(19): siRNA sense strand
caaguacacucggauauug

SEQ ID NO: 1615847 - RNA, 19 nt, Homo sapiens
  misc_RNA (1)...(19): siRNA sense strand
gaaguggccugguccaagu

SEQ ID NO: 1615848 - RNA, 19 nt, Homo sapiens
  misc_RNA (1)...(19): siRNA sense strand
gaucaugucucugcagaug

SEQ ID NO: 1615849 - RNA, 19 nt, Homo sapiens
  misc_RNA (1)...(19): siRNA sense strand
ugaacgagauauuccagua

SEQ ID NO: 1615850 - RNA, 19 nt, Homo sapiens
  misc_RNA (1)...(19): siRNA sense strand
uaacugcucuugccaucaa

SEQ ID NO: 1615851 - RNA, 19 nt, Homo sapiens
  misc_RNA (1)...(19): siRNA sense strand
uaacuaccgucugggaaua

SEQ ID NO: 1615852 - RNA, 19 nt, Homo sapiens
  misc_RNA (1)...(19): siRNA sense strand
ggacaaaacaguacaaauu

SEQ ID NO: 1615853 - RNA, 19 nt, Homo sapiens
  misc_RNA (1)...(19): siRNA sense strand
caaaugauaucgcucacau

SEQ ID NO: 1615854 - RNA, 19 nt, Homo sapiens
  misc_RNA (1)...(19): siRNA sense strand
ccacggacaugguagaaug

SEQ ID NO: 1615855 - RNA, 19 nt, Homo sapiens
  misc_RNA (1)...(19): siRNA sense strand
ggacugcuauggcuuccuu

SEQ ID NO: 1615856 - RNA, 19 nt, Homo sapiens
  misc_RNA (1)...(19): siRNA sense strand
acacaacuguccucauuga

SEQ ID NO: 1615857 - RNA, 19 nt, Homo sapiens
  misc_RNA (1)...(19): siRNA sense strand
ugaagacugccuuuacuua

SEQ ID NO: 1615858 - RNA, 19 nt, Homo sapiens
  misc_RNA (1)...(19): siRNA sense strand
agaaacaccacaaaugaua

SEQ ID NO: 1615859 - RNA, 19 nt, Homo sapiens
  misc_RNA (1)...(19): siRNA sense strand
ccaaguucauucacacaaa

SEQ ID NO: 1615860 - RNA, 19 nt, Homo sapiens
  misc_RNA (1)...(19): siRNA sense strand
gaauuaagugucaccauug

SEQ ID NO: 1615861 - RNA, 19 nt, Homo sapiens
  misc_RNA (1)...(19): siRNA sense strand
ggaacaagaacuacaagga

SEQ ID NO: 1615862 - RNA, 19 nt, Homo sapiens
  misc_RNA (1)...(19): siRNA sense strand
ccaaacaccaucaccauga

SEQ ID NO: 1615863 - RNA, 19 nt, Homo sapiens
  misc_RNA (1)...(19): siRNA sense strand
ccgaaauacuacucaguuu

SEQ ID NO: 1615864 - RNA, 19 nt, Homo sapiens
  misc_RNA (1)...(19): siRNA sense strand
agagaaacaccacaaauga

SEQ ID NO: 1615865 - RNA, 19 nt, Homo sapiens
  misc_RNA (1)...(19): siRNA sense strand
gacaagaggcgccaugaga

SEQ ID NO: 1615866 - RNA, 19 nt, Homo sapiens
  misc_RNA (1)...(19): siRNA sense strand
cuacuucuaugccuucuau

SEQ ID NO: 1615867 - RNA, 19 nt, Homo sapiens
  misc_RNA (1)...(19): siRNA sense strand
ugaccuauguucaagauca

SEQ ID NO: 1615868 - RNA, 19 nt, Homo sapiens
  misc_RNA (1)...(19): siRNA sense strand
caauuuggauacuuugaug

SEQ ID NO: 1615869 - RNA, 19 nt, Homo sapiens
  misc_RNA (1)...(19): siRNA sense strand
gaugaccuauguucaagau

SEQ ID NO: 1615870 - RNA, 19 nt, Homo sapiens
  misc_RNA (1)...(19): siRNA sense strand
gagauauuccaguauguuu

SEQ ID NO: 1615871 - RNA, 19 nt, Homo sapiens
  misc_RNA (1)...(19): siRNA sense strand
gcacaacuugaacgagaua

SEQ ID NO: 1615872 - RNA, 19 nt, Homo sapiens
  misc_RNA (1)...(19): siRNA sense strand
ccaauguccuccugugguu

SEQ ID NO: 1615873 - RNA, 19 nt, Homo sapiens
  misc_RNA (1)...(19): siRNA sense strand
gaacgaagagaucaugucu

SEQ ID NO: 1615874 - RNA, 19 nt, Homo sapiens
  misc_RNA (1)...(19): siRNA sense strand
gaaacaccacaaaugauau

SEQ ID NO: 1615875 - RNA, 19 nt, Homo sapiens
  misc_RNA (1)...(19): siRNA sense strand
guaagaagcccgucauggu

SEQ ID NO: 1615876 - RNA, 19 nt, Homo sapiens
  misc_RNA (1)...(19): siRNA sense strand
gaacgagauauuccaguau

SEQ ID NO: 1615877 - RNA, 19 nt, Homo sapiens
  misc_RNA (1)...(19): siRNA sense strand
ccaaagaccagcucuaucu

SEQ ID NO: 1615878 - RNA, 19 nt, Homo sapiens
  misc_RNA (1)...(19): siRNA sense strand
ccaaguauaaucccaaaga

SEQ ID NO: 1615879 - RNA, 19 nt, Homo sapiens
  misc_RNA (1)...(19): siRNA sense strand
gcuauggcuuccuuuguug

SEQ ID NO: 1615880 - RNA, 19 nt, Homo sapiens
  misc_RNA (1)...(19): siRNA sense strand
ggacuggcauccgaaauac

SEQ ID NO: 1615881 - RNA, 19 nt, Homo sapiens
  misc_RNA (1)...(19): siRNA sense strand
gaaaccaaacgagauuauu

SEQ ID NO: 1615882 - RNA, 19 nt, Homo sapiens
  misc_RNA (1)...(19): siRNA sense strand
gaaauacuacucaguuugc

SEQ ID NO: 1615883 - RNA, 19 nt, Homo sapiens
  misc_RNA (1)...(19): siRNA sense strand
caacuguccucauugaaac

SEQ ID NO: 1615884 - RNA, 19 nt, Homo sapiens
  misc_RNA (1)...(19): siRNA sense strand
gauaccaaguucauucaca

SEQ ID NO: 1615885 - RNA, 19 nt, Homo sapiens
  misc_RNA (1)...(19): siRNA sense strand
ugacaucauuucccuaugg

SEQ ID NO: 1615886 - RNA, 19 nt, Homo sapiens
  misc_RNA (1)...(19): siRNA sense strand
cagagaaacaccacaaaug

SEQ ID NO: 1615887 - RNA, 19 nt, Homo sapiens
  misc_RNA (1)...(19): siRNA sense strand
gagaaacaccacaaaugau

SEQ ID NO: 1615888 - RNA, 19 nt, Homo sapiens
  misc_RNA (1)...(19): siRNA sense strand
caaccgcuuugaagaagug

SEQ ID NO: 1615889 - RNA, 19 nt, Homo sapiens
  misc_RNA (1)...(19): siRNA sense strand
uagaaugccugcggaacaa

SEQ ID NO: 1615890 - RNA, 19 nt, Homo sapiens
  misc_RNA (1)...(19): siRNA sense strand
ucaaguucauguacacaga

SEQ ID NO: 1615891 - RNA, 19 nt, Homo sapiens
  misc_RNA (1)...(19): siRNA sense strand
cgaaauacuacucaguuug

SEQ ID NO: 1615892 - RNA, 19 nt, Homo sapiens
  misc_RNA (1)...(19): siRNA sense strand
caacuugaacgagauauuc

SEQ ID NO: 1615893 - RNA, 19 nt, Homo sapiens
  misc_RNA (1)...(19): siRNA sense strand
caagcacaguauccaguug

SEQ ID NO: 1615894 - RNA, 19 nt, Homo sapiens
  misc_RNA (1)...(19): siRNA sense strand
gcgggagacuaucaaguuc

SEQ ID NO: 1615895 - RNA, 19 nt, Homo sapiens
  misc_RNA (1)...(19): siRNA sense strand
gggaaggccugaaguucgu

SEQ ID NO: 1615896 - RNA, 19 nt, Homo sapiens
  misc_RNA (1)...(19): siRNA sense strand
agacugggccgauaaggaa

SEQ ID NO: 1615897 - RNA, 19 nt, Homo sapiens
  misc_RNA (1)...(19): siRNA sense strand
auacuuugaugaccuaugu

SEQ ID NO: 1615898 - RNA, 19 nt, Homo sapiens
  misc_RNA (1)...(19): siRNA sense strand
gauauuccaguauguuuca

SEQ ID NO: 1615899 - RNA, 19 nt, Homo sapiens
  misc_RNA (1)...(19): siRNA sense strand
ccaaguacacucggauauu

SEQ ID NO: 1615900 - RNA, 19 nt, Homo sapiens
  misc_RNA (1)...(19): siRNA sense strand
acuaugggcuccuggauca

SEQ ID NO: 1615901 - RNA, 19 nt, Homo sapiens
  misc_RNA (1)...(19): siRNA sense strand
caaggucggcugcaacaug

SEQ ID NO: 1615902 - RNA, 19 nt, Homo sapiens
  misc_RNA (1)...(19): siRNA sense strand
aaaccaaacgagauuauuc

SEQ ID NO: 1615903 - RNA, 19 nt, Homo sapiens
  misc_RNA (1)...(19): siRNA sense strand
ccacggaagaugauauuca

SEQ ID NO: 1615904 - RNA, 19 nt, Homo sapiens
  misc_RNA (1)...(19): siRNA sense strand
gaccuauguucaagaucaa

SEQ ID NO: 1615905 - RNA, 19 nt, Homo sapiens
  misc_RNA (1)...(19): siRNA sense strand
acaacuguccucauugaaa

SEQ ID NO: 1615906 - RNA, 19 nt, Homo sapiens
  misc_RNA (1)...(19): siRNA sense strand
gggagacuaucaaguucau

SEQ ID NO: 1615907 - RNA, 19 nt, Homo sapiens
  misc_RNA (1)...(19): siRNA sense strand
gcccaacgacuuugacuuc

SEQ ID NO: 1615908 - RNA, 19 nt, Homo sapiens
  misc_RNA (1)...(19): siRNA sense strand
guagaaugccugcggaaca

SEQ ID NO: 1615909 - RNA, 19 nt, Homo sapiens
  misc_RNA (1)...(19): siRNA sense strand
cagaaggccaucauucaga

SEQ ID NO: 1615910 - RNA, 19 nt, Homo sapiens
  misc_RNA (1)...(19): siRNA sense strand
ugagagauccuuacugcau

SEQ ID NO: 1615911 - RNA, 19 nt, Homo sapiens
  misc_RNA (1)...(19): siRNA sense strand
ggacauuccaccacuagag

SEQ ID NO: 1615912 - RNA, 19 nt, Homo sapiens
  misc_RNA (1)...(19): siRNA sense strand
guccaaguauaaucccaaa

SEQ ID NO: 1615913 - RNA, 19 nt, Homo sapiens
  misc_RNA (1)...(19): siRNA sense strand
gagacuaucaaguucaugu

SEQ ID NO: 1615914 - RNA, 19 nt, Homo sapiens
  misc_RNA (1)...(19): siRNA sense strand
ucaucgugaucaccauuaa

SEQ ID NO: 1615915 - RNA, 19 nt, Homo sapiens
  misc_RNA (1)...(19): siRNA sense strand
ggaaacgucaucgugauca

SEQ ID NO: 1615916 - RNA, 19 nt, Homo sapiens
  misc_RNA (1)...(19): siRNA sense strand
gcaccggcaacaugauuga

SEQ ID NO: 1615917 - RNA, 19 nt, Homo sapiens
  misc_RNA (1)...(19): siRNA sense strand
gauccuuacugcaugacau

SEQ ID NO: 1615918 - RNA, 19 nt, Homo sapiens
  misc_RNA (1)...(19): siRNA sense strand
ccagagaaacaccacaaau

SEQ ID NO: 1615919 - RNA, 19 nt, Homo sapiens
  misc_RNA (1)...(19): siRNA sense strand
accgagcucuucaguugua

SEQ ID NO: 1615920 - RNA, 19 nt, Homo sapiens
  misc_RNA (1)...(19): siRNA sense strand
uggacuggcauccgaaaua

SEQ ID NO: 1615921 - RNA, 19 nt, Homo sapiens
  misc_RNA (1)...(19): siRNA sense strand
acacagacugggccgauaa

SEQ ID NO: 1615922 - RNA, 19 nt, Homo sapiens
  misc_RNA (1)...(19): siRNA sense strand
ggagaaugugggagccuuu

SEQ ID NO: 1615923 - RNA, 19 nt, Homo sapiens
  misc_RNA (1)...(19): siRNA sense strand
gagggcaccggcaacauga

SEQ ID NO: 1615924 - RNA, 19 nt, Homo sapiens
  misc_RNA (1)...(19): siRNA sense strand
agagauccuuacugcauga

SEQ ID NO: 1615925 - RNA, 19 nt, Homo sapiens
  misc_RNA (1)...(19): siRNA sense strand
gauauggccaaccaccaaa

SEQ ID NO: 1615926 - RNA, 19 nt, Homo sapiens
  misc_RNA (1)...(19): siRNA sense strand
ugcuauggcuuccuuuguu

SEQ ID NO: 1615927 - RNA, 19 nt, Homo sapiens
  misc_RNA (1)...(19): siRNA sense strand
agaacaccguuacccaaug

SEQ ID NO: 1615928 - RNA, 19 nt, Homo sapiens
  misc_RNA (1)...(19): siRNA sense strand
caacaaucccaaacacucu

SEQ ID NO: 1615929 - RNA, 19 nt, Homo sapiens
  misc_RNA (1)...(19): siRNA sense strand
caaguauaaucccaaagac

SEQ ID NO: 1615930 - RNA, 19 nt, Homo sapiens
  misc_RNA (1)...(19): siRNA sense strand
caaguucauucacacaaaa

SEQ ID NO: 1615931 - RNA, 19 nt, Homo sapiens
  misc_RNA (1)...(19): siRNA sense strand
uggauacuuugaugaccua

SEQ ID NO: 1615932 - RNA, 19 nt, Homo sapiens
  misc_RNA (1)...(19): siRNA sense strand
aacgagauauuccaguaug

SEQ ID NO: 1615933 - RNA, 19 nt, Homo sapiens
  misc_RNA (1)...(19): siRNA sense strand
ccagcucuaucugcauauu

SEQ ID NO: 1615934 - RNA, 19 nt, Homo sapiens
  misc_RNA (1)...(19): siRNA sense strand
caggauaccaaguucauuc

SEQ ID NO: 1615935 - RNA, 19 nt, Homo sapiens
  misc_RNA (1)...(19): siRNA sense strand
ugguggcucucuuuacuga

SEQ ID NO: 1615936 - RNA, 19 nt, Homo sapiens
  misc_RNA (1)...(19): siRNA sense strand
uggacggcaucguggauaa

SEQ ID NO: 1615937 - RNA, 19 nt, Homo sapiens
  misc_RNA (1)...(19): siRNA sense strand
ugacagccaagcacaguau

SEQ ID NO: 1615938 - RNA, 19 nt, Homo sapiens
  misc_RNA (1)...(19): siRNA sense strand
caaaacuggugauccaaau

SEQ ID NO: 1615939 - RNA, 19 nt, Homo sapiens
  misc_RNA (1)...(19): siRNA sense strand
uaaggacccucacaaaaca

SEQ ID NO: 1615940 - RNA, 19 nt, Homo sapiens
  misc_RNA (1)...(19): siRNA sense strand
gaaugugccuugcagauua

SEQ ID NO: 1615941 - RNA, 19 nt, Homo sapiens
  misc_RNA (1)...(19): siRNA sense strand
gaacacggaucaaugacau

SEQ ID NO: 1615942 - RNA, 19 nt, Homo sapiens
  misc_RNA (1)...(19): siRNA sense strand
cuacagaucugagcacuga

SEQ ID NO: 1615943 - RNA, 19 nt, Homo sapiens
  misc_RNA (1)...(19): siRNA sense strand
gaagggcuguuuaucuuuc

SEQ ID NO: 1615944 - RNA, 19 nt, Homo sapiens
  misc_RNA (1)...(19): siRNA sense strand
gacgauaccuccaagacuu

SEQ ID NO: 1615945 - RNA, 19 nt, Homo sapiens
  misc_RNA (1)...(19): siRNA sense strand
gugaagggcuguuuaucuu

SEQ ID NO: 1615946 - RNA, 19 nt, Homo sapiens
  misc_RNA (1)...(19): siRNA sense strand
gagauucaauguguauuug

SEQ ID NO: 1615947 - RNA, 19 nt, Homo sapiens
  misc_RNA (1)...(19): siRNA sense strand
gaacagagugagagauuca

SEQ ID NO: 1615948 - RNA, 19 nt, Homo sapiens
  misc_RNA (1)...(19): siRNA sense strand
gagaacagagugagagauu

SEQ ID NO: 1615949 - RNA, 19 nt, Homo sapiens
  misc_RNA (1)...(19): siRNA sense strand
gaagaacguagcucgauug

SEQ ID NO: 1615950 - RNA, 19 nt, Homo sapiens
  misc_RNA (1)...(19): siRNA sense strand
ccauagggauuuauuucaa

SEQ ID NO: 1615951 - RNA, 19 nt, Homo sapiens
  misc_RNA (1)...(19): siRNA sense strand
gauacuacgugguucacuu

SEQ ID NO: 1615952 - RNA, 19 nt, Homo sapiens
  misc_RNA (1)...(19): siRNA sense strand
gcagauuacauaugaguau

SEQ ID NO: 1615953 - RNA, 19 nt, Homo sapiens
  misc_RNA (1)...(19): siRNA sense strand
cugcauauuucagguguua

SEQ ID NO: 1615954 - RNA, 19 nt, Homo sapiens
  misc_RNA (1)...(19): siRNA sense strand
ugaagaacguagcucgauu

SEQ ID NO: 1615955 - RNA, 19 nt, Homo sapiens
  misc_RNA (1)...(19): siRNA sense strand
ucaauaaugugaagaacgu

SEQ ID NO: 1615956 - RNA, 19 nt, Homo sapiens
  misc_RNA (1)...(19): siRNA sense strand
cacgagcgcuugcuacaga

SEQ ID NO: 1615957 - RNA, 19 nt, Homo sapiens
  misc_RNA (1)...(19): siRNA sense strand
gggaggccaucuaucagaa

SEQ ID NO: 1615958 - RNA, 19 nt, Homo sapiens
  misc_RNA (1)...(19): siRNA sense strand
gaaacaugccauagggauu

SEQ ID NO: 1615959 - RNA, 19 nt, Homo sapiens
  misc_RNA (1)...(19): siRNA sense strand
ugaacgugcugcauauuuc

SEQ ID NO: 1615960 - RNA, 19 nt, Homo sapiens
  misc_RNA (1)...(19): siRNA sense strand
gcagggaggaugugugaga

SEQ ID NO: 1615961 - RNA, 19 nt, Homo sapiens
  misc_RNA (1)...(19): siRNA sense strand
ccuugcagauuacauauga

SEQ ID NO: 1615962 - RNA, 19 nt, Homo sapiens
  misc_RNA (1)...(19): siRNA sense strand
gaugaguggugcaaaguac

SEQ ID NO: 1615963 - RNA, 19 nt, Homo sapiens
  misc_RNA (1)...(19): siRNA sense strand
ugaugaacgugcugcauau

SEQ ID NO: 1615964 - RNA, 19 nt, Homo sapiens
  misc_RNA (1)...(19): siRNA sense strand
agugagagauucaaugugu

SEQ ID NO: 1615965 - RNA, 19 nt, Homo sapiens
  misc_RNA (1)...(19): siRNA sense strand
aaacaugccauagggauuu

SEQ ID NO: 1615966 - RNA, 19 nt, Homo sapiens
  misc_RNA (1)...(19): siRNA sense strand
gauggaguguguaggaaca

SEQ ID NO: 1615967 - RNA, 19 nt, Homo sapiens
  misc_RNA (1)...(19): siRNA sense strand
gaacgugcugcauauuuca

SEQ ID NO: 1615968 - RNA, 19 nt, Homo sapiens
  misc_RNA (1)...(19): siRNA sense strand
guaggaacacggaucaaug

SEQ ID NO: 1615969 - RNA, 19 nt, Homo sapiens
  misc_RNA (1)...(19): siRNA sense strand
gugagagauucaaugugua

SEQ ID NO: 1615970 - RNA, 19 nt, Homo sapiens
  misc_RNA (1)...(19): siRNA sense strand
gcugaugaguggugcaaag

SEQ ID NO: 1615971 - RNA, 19 nt, Homo sapiens
  misc_RNA (1)...(19): siRNA sense strand
uaggaacacggaucaauga

SEQ ID NO: 1615972 - RNA, 19 nt, Homo sapiens
  misc_RNA (1)...(19): siRNA sense strand
cgaaugugccuugcagauu

SEQ ID NO: 1615973 - RNA, 19 nt, Homo sapiens
  misc_RNA (1)...(19): siRNA sense strand
ggugaagggcuguuuaucu

SEQ ID NO: 1615974 - RNA, 19 nt, Homo sapiens
  misc_RNA (1)...(19): siRNA sense strand
ccagauggaguguguagga

SEQ ID NO: 1615975 - RNA, 19 nt, Homo sapiens
  misc_RNA (1)...(19): siRNA sense strand
gcugguuaguauucaagaa

SEQ ID NO: 1615976 - RNA, 19 nt, Homo sapiens
  misc_RNA (1)...(19): siRNA sense strand
gagagaacagagugagaga

SEQ ID NO: 1615977 - RNA, 19 nt, Homo sapiens
  misc_RNA (1)...(19): siRNA sense strand
ggaacacggaucaaugaca

SEQ ID NO: 1615978 - RNA, 19 nt, Homo sapiens
  misc_RNA (1)...(19): siRNA sense strand
gaggccaucuaucagaaag

SEQ ID NO: 1615979 - RNA, 19 nt, Homo sapiens
  misc_RNA (1)...(19): siRNA sense strand
cagauggaguguguaggaa

SEQ ID NO: 1615980 - RNA, 19 nt, Homo sapiens
  misc_RNA (1)...(19): siRNA sense strand
acucgaugcuccagaugaa

SEQ ID NO: 1615981 - RNA, 19 nt, Homo sapiens
  misc_RNA (1)...(19): siRNA sense strand
ccagaaucccagagucaaa

SEQ ID NO: 1615982 - RNA, 19 nt, Homo sapiens
  misc_RNA (1)...(19): siRNA sense strand
acagaacucaauaauguga

SEQ ID NO: 1615983 - RNA, 19 nt, Homo sapiens
  misc_RNA (1)...(19): siRNA sense strand
ugagagauucaauguguau

SEQ ID NO: 1615984 - RNA, 19 nt, Homo sapiens
  misc_RNA (1)...(19): siRNA sense strand
gagagagaacagagugaga

SEQ ID NO: 1615985 - RNA, 19 nt, Homo sapiens
  misc_RNA (1)...(19): siRNA sense strand
ccuuggagagccugacuua

SEQ ID NO: 1615986 - RNA, 19 nt, Homo sapiens
  misc_RNA (1)...(19): siRNA sense strand
ccaagaaacaugccauagg

SEQ ID NO: 1615987 - RNA, 19 nt, Homo sapiens
  misc_RNA (1)...(19): siRNA sense strand
ggaggccaucuaucagaaa

SEQ ID NO: 1615988 - RNA, 19 nt, Homo sapiens
  misc_RNA (1)...(19): siRNA sense strand
gaugcugguuaguauucaa

SEQ ID NO: 1615989 - RNA, 19 nt, Homo sapiens
  misc_RNA (1)...(19): siRNA sense strand
ugaagggcuguuuaucuuu

SEQ ID NO: 1615990 - RNA, 19 nt, Homo sapiens
  misc_RNA (1)...(19): siRNA sense strand
gugccuugcagauuacaua

SEQ ID NO: 1615991 - RNA, 19 nt, Homo sapiens
  misc_RNA (1)...(19): siRNA sense strand
uggagagccugacuuacug

SEQ ID NO: 1615992 - RNA, 19 nt, Homo sapiens
  misc_RNA (1)...(19): siRNA sense strand
gcgaugcugguuaguauuc

SEQ ID NO: 1615993 - RNA, 19 nt, Homo sapiens
  misc_RNA (1)...(19): siRNA sense strand
gugcaaaguacuccagaug

SEQ ID NO: 1615994 - RNA, 19 nt, Homo sapiens
  misc_RNA (1)...(19): siRNA sense strand
cugaugaacgugcugcaua

SEQ ID NO: 1615995 - RNA, 19 nt, Homo sapiens
  misc_RNA (1)...(19): siRNA sense strand
gcauauuucagguguuauc

SEQ ID NO: 1615996 - RNA, 19 nt, Homo sapiens
  misc_RNA (1)...(19): siRNA sense strand
ggccaucuaucagaaaguc

SEQ ID NO: 1615997 - RNA, 19 nt, Homo sapiens
  misc_RNA (1)...(19): siRNA sense strand
caccaagaaacaugccaua

SEQ ID NO: 1615998 - RNA, 19 nt, Homo sapiens
  misc_RNA (1)...(19): siRNA sense strand
ccacugggguugagagaga

SEQ ID NO: 1615999 - RNA, 19 nt, Homo sapiens
  misc_RNA (1)...(19): siRNA sense strand
gcgaaugugccuugcagau

SEQ ID NO: 1616000 - RNA, 19 nt, Homo sapiens
  misc_RNA (1)...(19): siRNA sense strand
gauguuuccagcccucuga

SEQ ID NO: 1616001 - RNA, 19 nt, Homo sapiens
  misc_RNA (1)...(19): siRNA sense strand
ucaaugacgauaccuccaa

SEQ ID NO: 1616002 - RNA, 19 nt, Homo sapiens
  misc_RNA (1)...(19): siRNA sense strand
gguuacagaacucaauaau

SEQ ID NO: 1616003 - RNA, 19 nt, Homo sapiens
  misc_RNA (1)...(19): siRNA sense strand
gaugaacgugcugcauauu

SEQ ID NO: 1616004 - RNA, 19 nt, Homo sapiens
  misc_RNA (1)...(19): siRNA sense strand
aacaugccauagggauuua

SEQ ID NO: 1616005 - RNA, 19 nt, Homo sapiens
  misc_RNA (1)...(19): siRNA sense strand
gaacucaauaaugugaaga

SEQ ID NO: 1616006 - RNA, 19 nt, Homo sapiens
  misc_RNA (1)...(19): siRNA sense strand
guuacagaacucaauaaug

SEQ ID NO: 1616007 - RNA, 19 nt, Homo sapiens
  misc_RNA (1)...(19): siRNA sense strand
gccauagggauuuauuuca

SEQ ID NO: 1616008 - RNA, 19 nt, Homo sapiens
  misc_RNA (1)...(19): siRNA sense strand
agagugagagauucaaugu

SEQ ID NO: 1616009 - RNA, 19 nt, Homo sapiens
  misc_RNA (1)...(19): siRNA sense strand
ggugcaaaguacuccagau

SEQ ID NO: 1616010 - RNA, 19 nt, Homo sapiens
  misc_RNA (1)...(19): siRNA sense strand
cuacgugguucacuuuuga

SEQ ID NO: 1616011 - RNA, 19 nt, Homo sapiens
  misc_RNA (1)...(19): siRNA sense strand
uaagguuacagaacucaau

SEQ ID NO: 1616012 - RNA, 19 nt, Homo sapiens
  misc_RNA (1)...(19): siRNA sense strand
ugaugaguggugcaaagua

SEQ ID NO: 1616013 - RNA, 19 nt, Homo sapiens
  misc_RNA (1)...(19): siRNA sense strand
auacuacgugguucacuuu

SEQ ID NO: 1616014 - RNA, 19 nt, Homo sapiens
  misc_RNA (1)...(19): siRNA sense strand
aagguuacagaacucaaua

SEQ ID NO: 1616015 - RNA, 19 nt, Homo sapiens
  misc_RNA (1)...(19): siRNA sense strand
uaucauaagguuacagaac

SEQ ID NO: 1616016 - RNA, 19 nt, Homo sapiens
  misc_RNA (1)...(19): siRNA sense strand
agaacucaauaaugugaag

SEQ ID NO: 1616017 - RNA, 19 nt, Homo sapiens
  misc_RNA (1)...(19): siRNA sense strand
agaacagagugagagauuc

SEQ ID NO: 1616018 - RNA, 19 nt, Homo sapiens
  misc_RNA (1)...(19): siRNA sense strand
ucauaagguuacagaacuc

SEQ ID NO: 1616019 - RNA, 19 nt, Homo sapiens
  misc_RNA (1)...(19): siRNA sense strand
cagagugagagauucaaug

SEQ ID NO: 1616020 - RNA, 19 nt, Homo sapiens
  misc_RNA (1)...(19): siRNA sense strand
gugaagaacguagcucgau

SEQ ID NO: 1616021 - RNA, 19 nt, Homo sapiens
  misc_RNA (1)...(19): siRNA sense strand
gaaugugccuugcagauua

SEQ ID NO: 1616022 - RNA, 19 nt, Homo sapiens
  misc_RNA (1)...(19): siRNA sense strand
gaacacggaucaaugacau

SEQ ID NO: 1616023 - RNA, 19 nt, Homo sapiens
  misc_RNA (1)...(19): siRNA sense strand
cuacagaucugagcacuga

SEQ ID NO: 1616024 - RNA, 19 nt, Homo sapiens
  misc_RNA (1)...(19): siRNA sense strand
gaagggcuguuuaucuuuc

SEQ ID NO: 1616025 - RNA, 19 nt, Homo sapiens
  misc_RNA (1)...(19): siRNA sense strand
gugaagggcuguuuaucuu

SEQ ID NO: 1616026 - RNA, 19 nt, Homo sapiens
  misc_RNA (1)...(19): siRNA sense strand
gagauucaauguguauuug

SEQ ID NO: 1616027 - RNA, 19 nt, Homo sapiens
  misc_RNA (1)...(19): siRNA sense strand
gaacagagugagagauuca

SEQ ID NO: 1616028 - RNA, 19 nt, Homo sapiens
  misc_RNA (1)...(19): siRNA sense strand
gagaacagagugagagauu

SEQ ID NO: 1616029 - RNA, 19 nt, Homo sapiens
  misc_RNA (1)...(19): siRNA sense strand
gauacuacgugguucacuu

SEQ ID NO: 1616030 - RNA, 19 nt, Homo sapiens
  misc_RNA (1)...(19): siRNA sense strand
gcagauuacauaugaguau

SEQ ID NO: 1616031 - RNA, 19 nt, Homo sapiens
  misc_RNA (1)...(19): siRNA sense strand
gggaggccaucuaucagaa

SEQ ID NO: 1616032 - RNA, 19 nt, Homo sapiens
  misc_RNA (1)...(19): siRNA sense strand
cacgagcgcuugcuacaga

SEQ ID NO: 1616033 - RNA, 19 nt, Homo sapiens
  misc_RNA (1)...(19): siRNA sense strand
ccuugcagauuacauauga

SEQ ID NO: 1616034 - RNA, 19 nt, Homo sapiens
  misc_RNA (1)...(19): siRNA sense strand
gcagggaggaugugugaga

SEQ ID NO: 1616035 - RNA, 19 nt, Homo sapiens
  misc_RNA (1)...(19): siRNA sense strand
agugagagauucaaugugu

SEQ ID NO: 1616036 - RNA, 19 nt, Homo sapiens
  misc_RNA (1)...(19): siRNA sense strand
gugagagauucaaugugua

SEQ ID NO: 1616037 - RNA, 19 nt, Homo sapiens
  misc_RNA (1)...(19): siRNA sense strand
guaggaacacggaucaaug

SEQ ID NO: 1616038 - RNA, 19 nt, Homo sapiens
  misc_RNA (1)...(19): siRNA sense strand
uaggaacacggaucaauga

SEQ ID NO: 1616039 - RNA, 19 nt, Homo sapiens
  misc_RNA (1)...(19): siRNA sense strand
cgaaugugccuugcagauu

SEQ ID NO: 1616040 - RNA, 19 nt, Homo sapiens
  misc_RNA (1)...(19): siRNA sense strand
ggugaagggcuguuuaucu

SEQ ID NO: 1616041 - RNA, 19 nt, Homo sapiens
  misc_RNA (1)...(19): siRNA sense strand
gagagaacagagugagaga

SEQ ID NO: 1616042 - RNA, 19 nt, Homo sapiens
  misc_RNA (1)...(19): siRNA sense strand
ggaacacggaucaaugaca

SEQ ID NO: 1616043 - RNA, 19 nt, Homo sapiens
  misc_RNA (1)...(19): siRNA sense strand
gaggccaucuaucagaaag

SEQ ID NO: 1616044 - RNA, 19 nt, Homo sapiens
  misc_RNA (1)...(19): siRNA sense strand
gagagagaacagagugaga

SEQ ID NO: 1616045 - RNA, 19 nt, Homo sapiens
  misc_RNA (1)...(19): siRNA sense strand
acucgaugcuccagaugaa

SEQ ID NO: 1616046 - RNA, 19 nt, Homo sapiens
  misc_RNA (1)...(19): siRNA sense strand
ccuuggagagccugacuua

SEQ ID NO: 1616047 - RNA, 19 nt, Homo sapiens
  misc_RNA (1)...(19): siRNA sense strand
ccagaaucccagagucaaa

SEQ ID NO: 1616048 - RNA, 19 nt, Homo sapiens
  misc_RNA (1)...(19): siRNA sense strand
ugagagauucaauguguau

SEQ ID NO: 1616049 - RNA, 19 nt, Homo sapiens
  misc_RNA (1)...(19): siRNA sense strand
uggagagccugacuuacug

SEQ ID NO: 1616050 - RNA, 19 nt, Homo sapiens
  misc_RNA (1)...(19): siRNA sense strand
ggaggccaucuaucagaaa

SEQ ID NO: 1616051 - RNA, 19 nt, Homo sapiens
  misc_RNA (1)...(19): siRNA sense strand
ugaagggcuguuuaucuuu

SEQ ID NO: 1616052 - RNA, 19 nt, Homo sapiens
  misc_RNA (1)...(19): siRNA sense strand
gugccuugcagauuacaua

SEQ ID NO: 1616053 - RNA, 19 nt, Homo sapiens
  misc_RNA (1)...(19): siRNA sense strand
ccacugggguugagagaga

SEQ ID NO: 1616054 - RNA, 19 nt, Homo sapiens
  misc_RNA (1)...(19): siRNA sense strand
ggccaucuaucagaaaguc

SEQ ID NO: 1616055 - RNA, 19 nt, Homo sapiens
  misc_RNA (1)...(19): siRNA sense strand
gcgaaugugccuugcagau

SEQ ID NO: 1616056 - RNA, 19 nt, Homo sapiens
  misc_RNA (1)...(19): siRNA sense strand
gauguuuccagcccucuga

SEQ ID NO: 1616057 - RNA, 19 nt, Homo sapiens
  misc_RNA (1)...(19): siRNA sense strand
agagugagagauucaaugu

SEQ ID NO: 1616058 - RNA, 19 nt, Homo sapiens
  misc_RNA (1)...(19): siRNA sense strand
cuacgugguucacuuuuga

SEQ ID NO: 1616059 - RNA, 19 nt, Homo sapiens
  misc_RNA (1)...(19): siRNA sense strand
auacuacgugguucacuuu

SEQ ID NO: 1616060 - RNA, 19 nt, Homo sapiens
  misc_RNA (1)...(19): siRNA sense strand
agaacagagugagagauuc

SEQ ID NO: 1616061 - RNA, 19 nt, Homo sapiens
  misc_RNA (1)...(19): siRNA sense strand
cagagugagagauucaaug

SEQ ID NO: 1616062 - RNA, 19 nt, Homo sapiens
  misc_RNA (1)...(19): siRNA sense strand
gaaugugccuugcagauua

SEQ ID NO: 1616063 - RNA, 19 nt, Homo sapiens
  misc_RNA (1)...(19): siRNA sense strand
gaacacggaucaaugacau

SEQ ID NO: 1616064 - RNA, 19 nt, Homo sapiens
  misc_RNA (1)...(19): siRNA sense strand
cuacagaucugagcacuga

SEQ ID NO: 1616065 - RNA, 19 nt, Homo sapiens
  misc_RNA (1)...(19): siRNA sense strand
gaagggcuguuuaucuuuc

SEQ ID NO: 1616066 - RNA, 19 nt, Homo sapiens
  misc_RNA (1)...(19): siRNA sense strand
gacgauaccuccaagacuu

SEQ ID NO: 1616067 - RNA, 19 nt, Homo sapiens
  misc_RNA (1)...(19): siRNA sense strand
gugaagggcuguuuaucuu

SEQ ID NO: 1616068 - RNA, 19 nt, Homo sapiens
  misc_RNA (1)...(19): siRNA sense strand
gagauucaauguguauuug

SEQ ID NO: 1616069 - RNA, 19 nt, Homo sapiens
  misc_RNA (1)...(19): siRNA sense strand
gaacagagugagagauuca

SEQ ID NO: 1616070 - RNA, 19 nt, Homo sapiens
  misc_RNA (1)...(19): siRNA sense strand
gagaacagagugagagauu

SEQ ID NO: 1616071 - RNA, 19 nt, Homo sapiens
  misc_RNA (1)...(19): siRNA sense strand
gaagaacguagcucgauug

SEQ ID NO: 1616072 - RNA, 19 nt, Homo sapiens
  misc_RNA (1)...(19): siRNA sense strand
ccauagggauuuauuucaa

SEQ ID NO: 1616073 - RNA, 19 nt, Homo sapiens
  misc_RNA (1)...(19): siRNA sense strand
gauacuacgugguucacuu

SEQ ID NO: 1616074 - RNA, 19 nt, Homo sapiens
  misc_RNA (1)...(19): siRNA sense strand
gcagauuacauaugaguau

SEQ ID NO: 1616075 - RNA, 19 nt, Homo sapiens
  misc_RNA (1)...(19): siRNA sense strand
cugcauauuucagguguua

SEQ ID NO: 1616076 - RNA, 19 nt, Homo sapiens
  misc_RNA (1)...(19): siRNA sense strand
ugaagaacguagcucgauu

SEQ ID NO: 1616077 - RNA, 19 nt, Homo sapiens
  misc_RNA (1)...(19): siRNA sense strand
ucaauaaugugaagaacgu

SEQ ID NO: 1616078 - RNA, 19 nt, Homo sapiens
  misc_RNA (1)...(19): siRNA sense strand
cacgagcgcuugcuacaga

SEQ ID NO: 1616079 - RNA, 19 nt, Homo sapiens
  misc_RNA (1)...(19): siRNA sense strand
gggaggccaucuaucagaa

SEQ ID NO: 1616080 - RNA, 19 nt, Homo sapiens
  misc_RNA (1)...(19): siRNA sense strand
gaaacaugccauagggauu

SEQ ID NO: 1616081 - RNA, 19 nt, Homo sapiens
  misc_RNA (1)...(19): siRNA sense strand
ugaacgugcugcauauuuc

SEQ ID NO: 1616082 - RNA, 19 nt, Homo sapiens
  misc_RNA (1)...(19): siRNA sense strand
gcagggaggaugugugaga

SEQ ID NO: 1616083 - RNA, 19 nt, Homo sapiens
  misc_RNA (1)...(19): siRNA sense strand
ccuugcagauuacauauga

SEQ ID NO: 1616084 - RNA, 19 nt, Homo sapiens
  misc_RNA (1)...(19): siRNA sense strand
gaugaguggugcaaaguac

SEQ ID NO: 1616085 - RNA, 19 nt, Homo sapiens
  misc_RNA (1)...(19): siRNA sense strand
ugaugaacgugcugcauau

SEQ ID NO: 1616086 - RNA, 19 nt, Homo sapiens
  misc_RNA (1)...(19): siRNA sense strand
agugagagauucaaugugu

SEQ ID NO: 1616087 - RNA, 19 nt, Homo sapiens
  misc_RNA (1)...(19): siRNA sense strand
aaacaugccauagggauuu

SEQ ID NO: 1616088 - RNA, 19 nt, Homo sapiens
  misc_RNA (1)...(19): siRNA sense strand
gauggaguguguaggaaca

SEQ ID NO: 1616089 - RNA, 19 nt, Homo sapiens
  misc_RNA (1)...(19): siRNA sense strand
gaacgugcugcauauuuca

SEQ ID NO: 1616090 - RNA, 19 nt, Homo sapiens
  misc_RNA (1)...(19): siRNA sense strand
guaggaacacggaucaaug

SEQ ID NO: 1616091 - RNA, 19 nt, Homo sapiens
  misc_RNA (1)...(19): siRNA sense strand
gugagagauucaaugugua

SEQ ID NO: 1616092 - RNA, 19 nt, Homo sapiens
  misc_RNA (1)...(19): siRNA sense strand
gcugaugaguggugcaaag

SEQ ID NO: 1616093 - RNA, 19 nt, Homo sapiens
  misc_RNA (1)...(19): siRNA sense strand
uaggaacacggaucaauga

SEQ ID NO: 1616094 - RNA, 19 nt, Homo sapiens
  misc_RNA (1)...(19): siRNA sense strand
cgaaugugccuugcagauu

SEQ ID NO: 1616095 - RNA, 19 nt, Homo sapiens
  misc_RNA (1)...(19): siRNA sense strand
ggugaagggcuguuuaucu

SEQ ID NO: 1616096 - RNA, 19 nt, Homo sapiens
  misc_RNA (1)...(19): siRNA sense strand
ccagauggaguguguagga

SEQ ID NO: 1616097 - RNA, 19 nt, Homo sapiens
  misc_RNA (1)...(19): siRNA sense strand
gcugguuaguauucaagaa

SEQ ID NO: 1616098 - RNA, 19 nt, Homo sapiens
  misc_RNA (1)...(19): siRNA sense strand
gagagaacagagugagaga

SEQ ID NO: 1616099 - RNA, 19 nt, Homo sapiens
  misc_RNA (1)...(19): siRNA sense strand
ggaacacggaucaaugaca

SEQ ID NO: 1616100 - RNA, 19 nt, Homo sapiens
  misc_RNA (1)...(19): siRNA sense strand
gaggccaucuaucagaaag

SEQ ID NO: 1616101 - RNA, 19 nt, Homo sapiens
  misc_RNA (1)...(19): siRNA sense strand
cagauggaguguguaggaa

SEQ ID NO: 1616102 - RNA, 19 nt, Homo sapiens
  misc_RNA (1)...(19): siRNA sense strand
acucgaugcuccagaugaa

SEQ ID NO: 1616103 - RNA, 19 nt, Homo sapiens
  misc_RNA (1)...(19): siRNA sense strand
ccagaaucccagagucaaa

SEQ ID NO: 1616104 - RNA, 19 nt, Homo sapiens
  misc_RNA (1)...(19): siRNA sense strand
acagaacucaauaauguga

SEQ ID NO: 1616105 - RNA, 19 nt, Homo sapiens
  misc_RNA (1)...(19): siRNA sense strand
ugagagauucaauguguau

SEQ ID NO: 1616106 - RNA, 19 nt, Homo sapiens
  misc_RNA (1)...(19): siRNA sense strand
gagagagaacagagugaga

SEQ ID NO: 1616107 - RNA, 19 nt, Homo sapiens
  misc_RNA (1)...(19): siRNA sense strand
ccuuggagagccugacuua

SEQ ID NO: 1616108 - RNA, 19 nt, Homo sapiens
  misc_RNA (1)...(19): siRNA sense strand
ccaagaaacaugccauagg

SEQ ID NO: 1616109 - RNA, 19 nt, Homo sapiens
  misc_RNA (1)...(19): siRNA sense strand
ggaggccaucuaucagaaa

SEQ ID NO: 1616110 - RNA, 19 nt, Homo sapiens
  misc_RNA (1)...(19): siRNA sense strand
gaugcugguuaguauucaa

SEQ ID NO: 1616111 - RNA, 19 nt, Homo sapiens
  misc_RNA (1)...(19): siRNA sense strand
ugaagggcuguuuaucuuu

SEQ ID NO: 1616112 - RNA, 19 nt, Homo sapiens
  misc_RNA (1)...(19): siRNA sense strand
gugccuugcagauuacaua

SEQ ID NO: 1616113 - RNA, 19 nt, Homo sapiens
  misc_RNA (1)...(19): siRNA sense strand
uggagagccugacuuacug

SEQ ID NO: 1616114 - RNA, 19 nt, Homo sapiens
  misc_RNA (1)...(19): siRNA sense strand
gcgaugcugguuaguauuc

SEQ ID NO: 1616115 - RNA, 19 nt, Homo sapiens
  misc_RNA (1)...(19): siRNA sense strand
gugcaaaguacuccagaug

SEQ ID NO: 1616116 - RNA, 19 nt, Homo sapiens
  misc_RNA (1)...(19): siRNA sense strand
cugaugaacgugcugcaua

SEQ ID NO: 1616117 - RNA, 19 nt, Homo sapiens
  misc_RNA (1)...(19): siRNA sense strand
gcauauuucagguguuauc

SEQ ID NO: 1616118 - RNA, 19 nt, Homo sapiens
  misc_RNA (1)...(19): siRNA sense strand
ggccaucuaucagaaaguc

SEQ ID NO: 1616119 - RNA, 19 nt, Homo sapiens
  misc_RNA (1)...(19): siRNA sense strand
caccaagaaacaugccaua

SEQ ID NO: 1616120 - RNA, 19 nt, Homo sapiens
  misc_RNA (1)...(19): siRNA sense strand
ccacugggguugagagaga

SEQ ID NO: 1616121 - RNA, 19 nt, Homo sapiens
  misc_RNA (1)...(19): siRNA sense strand
gcgaaugugccuugcagau

SEQ ID NO: 1616122 - RNA, 19 nt, Homo sapiens
  misc_RNA (1)...(19): siRNA sense strand
gauguuuccagcccucuga

SEQ ID NO: 1616123 - RNA, 19 nt, Homo sapiens
  misc_RNA (1)...(19): siRNA sense strand
ucaaugacgauaccuccaa

SEQ ID NO: 1616124 - RNA, 19 nt, Homo sapiens
  misc_RNA (1)...(19): siRNA sense strand
gguuacagaacucaauaau

SEQ ID NO: 1616125 - RNA, 19 nt, Homo sapiens
  misc_RNA (1)...(19): siRNA sense strand
gaugaacgugcugcauauu

SEQ ID NO: 1616126 - RNA, 19 nt, Homo sapiens
  misc_RNA (1)...(19): siRNA sense strand
aacaugccauagggauuua

SEQ ID NO: 1616127 - RNA, 19 nt, Homo sapiens
  misc_RNA (1)...(19): siRNA sense strand
gaacucaauaaugugaaga

SEQ ID NO: 1616128 - RNA, 19 nt, Homo sapiens
  misc_RNA (1)...(19): siRNA sense strand
guuacagaacucaauaaug

SEQ ID NO: 1616129 - RNA, 19 nt, Homo sapiens
  misc_RNA (1)...(19): siRNA sense strand
gccauagggauuuauuuca

SEQ ID NO: 1616130 - RNA, 19 nt, Homo sapiens
  misc_RNA (1)...(19): siRNA sense strand
agagugagagauucaaugu

SEQ ID NO: 1616131 - RNA, 19 nt, Homo sapiens
  misc_RNA (1)...(19): siRNA sense strand
ggugcaaaguacuccagau

SEQ ID NO: 1616132 - RNA, 19 nt, Homo sapiens
  misc_RNA (1)...(19): siRNA sense strand
cuacgugguucacuuuuga

SEQ ID NO: 1616133 - RNA, 19 nt, Homo sapiens
  misc_RNA (1)...(19): siRNA sense strand
uaagguuacagaacucaau

SEQ ID NO: 1616134 - RNA, 19 nt, Homo sapiens
  misc_RNA (1)...(19): siRNA sense strand
ugaugaguggugcaaagua

SEQ ID NO: 1616135 - RNA, 19 nt, Homo sapiens
  misc_RNA (1)...(19): siRNA sense strand
auacuacgugguucacuuu

SEQ ID NO: 1616136 - RNA, 19 nt, Homo sapiens
  misc_RNA (1)...(19): siRNA sense strand
aagguuacagaacucaaua

SEQ ID NO: 1616137 - RNA, 19 nt, Homo sapiens
  misc_RNA (1)...(19): siRNA sense strand
uaucauaagguuacagaac

SEQ ID NO: 1616138 - RNA, 19 nt, Homo sapiens
  misc_RNA (1)...(19): siRNA sense strand
agaacucaauaaugugaag

SEQ ID NO: 1616139 - RNA, 19 nt, Homo sapiens
  misc_RNA (1)...(19): siRNA sense strand
agaacagagugagagauuc

SEQ ID NO: 1616140 - RNA, 19 nt, Homo sapiens
  misc_RNA (1)...(19): siRNA sense strand
ucauaagguuacagaacuc

SEQ ID NO: 1616141 - RNA, 19 nt, Homo sapiens
  misc_RNA (1)...(19): siRNA sense strand
cagagugagagauucaaug

SEQ ID NO: 1616142 - RNA, 19 nt, Homo sapiens
  misc_RNA (1)...(19): siRNA sense strand
gugaagaacguagcucgau

SEQ ID NO: 1616143 - RNA, 19 nt, Homo sapiens
  misc_RNA (1)...(19): siRNA sense strand
gaaugugccuugcagauua

SEQ ID NO: 1616144 - RNA, 19 nt, Homo sapiens
  misc_RNA (1)...(19): siRNA sense strand
gaacacggaucaaugacau

SEQ ID NO: 1616145 - RNA, 19 nt, Homo sapiens
  misc_RNA (1)...(19): siRNA sense strand
cuacagaucugagcacuga

SEQ ID NO: 1616146 - RNA, 19 nt, Homo sapiens
  misc_RNA (1)...(19): siRNA sense strand
gaagggcuguuuaucuuuc

SEQ ID NO: 1616147 - RNA, 19 nt, Homo sapiens
  misc_RNA (1)...(19): siRNA sense strand
gugaagggcuguuuaucuu

SEQ ID NO: 1616148 - RNA, 19 nt, Homo sapiens
  misc_RNA (1)...(19): siRNA sense strand
gagauucaauguguauuug

SEQ ID NO: 1616149 - RNA, 19 nt, Homo sapiens
  misc_RNA (1)...(19): siRNA sense strand
gaacagagugagagauuca

SEQ ID NO: 1616150 - RNA, 19 nt, Homo sapiens
  misc_RNA (1)...(19): siRNA sense strand
gagaacagagugagagauu

SEQ ID NO: 1616151 - RNA, 19 nt, Homo sapiens
  misc_RNA (1)...(19): siRNA sense strand
gauacuacgugguucacuu

SEQ ID NO: 1616152 - RNA, 19 nt, Homo sapiens
  misc_RNA (1)...(19): siRNA sense strand
gcagauuacauaugaguau

SEQ ID NO: 1616153 - RNA, 19 nt, Homo sapiens
  misc_RNA (1)...(19): siRNA sense strand
gggaggccaucuaucagaa

SEQ ID NO: 1616154 - RNA, 19 nt, Homo sapiens
  misc_RNA (1)...(19): siRNA sense strand
cacgagcgcuugcuacaga

SEQ ID NO: 1616155 - RNA, 19 nt, Homo sapiens
  misc_RNA (1)...(19): siRNA sense strand
ccuugcagauuacauauga

SEQ ID NO: 1616156 - RNA, 19 nt, Homo sapiens
  misc_RNA (1)...(19): siRNA sense strand
gcagggaggaugugugaga

SEQ ID NO: 1616157 - RNA, 19 nt, Homo sapiens
  misc_RNA (1)...(19): siRNA sense strand
agugagagauucaaugugu

SEQ ID NO: 1616158 - RNA, 19 nt, Homo sapiens
  misc_RNA (1)...(19): siRNA sense strand
gugagagauucaaugugua

SEQ ID NO: 1616159 - RNA, 19 nt, Homo sapiens
  misc_RNA (1)...(19): siRNA sense strand
guaggaacacggaucaaug

SEQ ID NO: 1616160 - RNA, 19 nt, Homo sapiens
  misc_RNA (1)...(19): siRNA sense strand
uaggaacacggaucaauga

SEQ ID NO: 1616161 - RNA, 19 nt, Homo sapiens
  misc_RNA (1)...(19): siRNA sense strand
cgaaugugccuugcagauu

SEQ ID NO: 1616162 - RNA, 19 nt, Homo sapiens
  misc_RNA (1)...(19): siRNA sense strand
ggugaagggcuguuuaucu

SEQ ID NO: 1616163 - RNA, 19 nt, Homo sapiens
  misc_RNA (1)...(19): siRNA sense strand
gagagaacagagugagaga

SEQ ID NO: 1616164 - RNA, 19 nt, Homo sapiens
  misc_RNA (1)...(19): siRNA sense strand
ggaacacggaucaaugaca

SEQ ID NO: 1616165 - RNA, 19 nt, Homo sapiens
  misc_RNA (1)...(19): siRNA sense strand
gaggccaucuaucagaaag

SEQ ID NO: 1616166 - RNA, 19 nt, Homo sapiens
  misc_RNA (1)...(19): siRNA sense strand
gagagagaacagagugaga

SEQ ID NO: 1616167 - RNA, 19 nt, Homo sapiens
  misc_RNA (1)...(19): siRNA sense strand
acucgaugcuccagaugaa

SEQ ID NO: 1616168 - RNA, 19 nt, Homo sapiens
  misc_RNA (1)...(19): siRNA sense strand
ccuuggagagccugacuua

SEQ ID NO: 1616169 - RNA, 19 nt, Homo sapiens
  misc_RNA (1)...(19): siRNA sense strand
ccagaaucccagagucaaa

SEQ ID NO: 1616170 - RNA, 19 nt, Homo sapiens
  misc_RNA (1)...(19): siRNA sense strand
ugagagauucaauguguau

SEQ ID NO: 1616171 - RNA, 19 nt, Homo sapiens
  misc_RNA (1)...(19): siRNA sense strand
uggagagccugacuuacug

SEQ ID NO: 1616172 - RNA, 19 nt, Homo sapiens
  misc_RNA (1)...(19): siRNA sense strand
ggaggccaucuaucagaaa

SEQ ID NO: 1616173 - RNA, 19 nt, Homo sapiens
  misc_RNA (1)...(19): siRNA sense strand
ugaagggcuguuuaucuuu

SEQ ID NO: 1616174 - RNA, 19 nt, Homo sapiens
  misc_RNA (1)...(19): siRNA sense strand
gugccuugcagauuacaua

SEQ ID NO: 1616175 - RNA, 19 nt, Homo sapiens
  misc_RNA (1)...(19): siRNA sense strand
ccacugggguugagagaga

SEQ ID NO: 1616176 - RNA, 19 nt, Homo sapiens
  misc_RNA (1)...(19): siRNA sense strand
ggccaucuaucagaaaguc

SEQ ID NO: 1616177 - RNA, 19 nt, Homo sapiens
  misc_RNA (1)...(19): siRNA sense strand
gcgaaugugccuugcagau

SEQ ID NO: 1616178 - RNA, 19 nt, Homo sapiens
  misc_RNA (1)...(19): siRNA sense strand
gauguuuccagcccucuga

SEQ ID NO: 1616179 - RNA, 19 nt, Homo sapiens
  misc_RNA (1)...(19): siRNA sense strand
agagugagagauucaaugu

SEQ ID NO: 1616180 - RNA, 19 nt, Homo sapiens
  misc_RNA (1)...(19): siRNA sense strand
cuacgugguucacuuuuga

SEQ ID NO: 1616181 - RNA, 19 nt, Homo sapiens
  misc_RNA (1)...(19): siRNA sense strand
auacuacgugguucacuuu

SEQ ID NO: 1616182 - RNA, 19 nt, Homo sapiens
  misc_RNA (1)...(19): siRNA sense strand
agaacagagugagagauuc

SEQ ID NO: 1616183 - RNA, 19 nt, Homo sapiens
  misc_RNA (1)...(19): siRNA sense strand
cagagugagagauucaaug

SEQ ID NO: 1616184 - RNA, 19 nt, Homo sapiens
  misc_RNA (1)...(19): siRNA sense strand
ggaaucaucgucgugaaca

SEQ ID NO: 1616185 - RNA, 19 nt, Homo sapiens
  misc_RNA (1)...(19): siRNA sense strand
agaagggagugcagggaau

SEQ ID NO: 1616186 - RNA, 19 nt, Homo sapiens
  misc_RNA (1)...(19): siRNA sense strand
gaagggagugcagggaauc

SEQ ID NO: 1616187 - RNA, 19 nt, Homo sapiens
  misc_RNA (1)...(19): siRNA sense strand
ggaaucaucgucgugaaca

SEQ ID NO: 1616188 - RNA, 19 nt, Homo sapiens
  misc_RNA (1)...(19): siRNA sense strand
agaagggagugcagggaau

SEQ ID NO: 1616189 - RNA, 19 nt, Homo sapiens
  misc_RNA (1)...(19): siRNA sense strand
gaagggagugcagggaauc

SEQ ID NO: 1616190 - RNA, 19 nt, Homo sapiens
  misc_RNA (1)...(19): siRNA sense strand
ggaaucaucgucgugaaca

SEQ ID NO: 1616191 - RNA, 19 nt, Homo sapiens
  misc_RNA (1)...(19): siRNA sense strand
agaagggagugcagggaau

SEQ ID NO: 1616192 - RNA, 19 nt, Homo sapiens
  misc_RNA (1)...(19): siRNA sense strand
gaagggagugcagggaauc

SEQ ID NO: 1616193 - RNA, 19 nt, Homo sapiens
  misc_RNA (1)...(19): siRNA sense strand
ggaaucaucgucgugaaca

SEQ ID NO: 1616194 - RNA, 19 nt, Homo sapiens
  misc_RNA (1)...(19): siRNA sense strand
agaagggagugcagggaau

SEQ ID NO: 1616195 - RNA, 19 nt, Homo sapiens
  misc_RNA (1)...(19): siRNA sense strand
gaagggagugcagggaauc

SEQ ID NO: 1616196 - RNA, 19 nt, Homo sapiens
  misc_RNA (1)...(19): siRNA sense strand
gaugguaucugggauguua

SEQ ID NO: 1616197 - RNA, 19 nt, Homo sapiens
  misc_RNA (1)...(19): siRNA sense strand
gaagaaacauggugcagau

SEQ ID NO: 1616198 - RNA, 19 nt, Homo sapiens
  misc_RNA (1)...(19): siRNA sense strand
gcagguggcucuguaauga

SEQ ID NO: 1616199 - RNA, 19 nt, Homo sapiens
  misc_RNA (1)...(19): siRNA sense strand
guucucagguugccaaaua

SEQ ID NO: 1616200 - RNA, 19 nt, Homo sapiens
  misc_RNA (1)...(19): siRNA sense strand
guaauccgcuggagaaaga

SEQ ID NO: 1616201 - RNA, 19 nt, Homo sapiens
  misc_RNA (1)...(19): siRNA sense strand
gaugaacacaugagaguua

SEQ ID NO: 1616202 - RNA, 19 nt, Homo sapiens
  misc_RNA (1)...(19): siRNA sense strand
ugaagaagaugaucaguuc

SEQ ID NO: 1616203 - RNA, 19 nt, Homo sapiens
  misc_RNA (1)...(19): siRNA sense strand
gaaaugaagagcucuguga

SEQ ID NO: 1616204 - RNA, 19 nt, Homo sapiens
  misc_RNA (1)...(19): siRNA sense strand
ggagauugaugaacacaug

SEQ ID NO: 1616205 - RNA, 19 nt, Homo sapiens
  misc_RNA (1)...(19): siRNA sense strand
gaaugcagguggcucugua

SEQ ID NO: 1616206 - RNA, 19 nt, Homo sapiens
  misc_RNA (1)...(19): siRNA sense strand
gguaauggguugcgauaug

SEQ ID NO: 1616207 - RNA, 19 nt, Homo sapiens
  misc_RNA (1)...(19): siRNA sense strand
gaaacauggugcagauaga

SEQ ID NO: 1616208 - RNA, 19 nt, Homo sapiens
  misc_RNA (1)...(19): siRNA sense strand
uagaucacaucaccaauaa

SEQ ID NO: 1616209 - RNA, 19 nt, Homo sapiens
  misc_RNA (1)...(19): siRNA sense strand
ugagaaaguuugcaaugaa

SEQ ID NO: 1616210 - RNA, 19 nt, Homo sapiens
  misc_RNA (1)...(19): siRNA sense strand
ucaagagguuuacuuugua

SEQ ID NO: 1616211 - RNA, 19 nt, Homo sapiens
  misc_RNA (1)...(19): siRNA sense strand
gaagaaggaggcagaguug

SEQ ID NO: 1616212 - RNA, 19 nt, Homo sapiens
  misc_RNA (1)...(19): siRNA sense strand
gaaaguuugcaaugaagua

SEQ ID NO: 1616213 - RNA, 19 nt, Homo sapiens
  misc_RNA (1)...(19): siRNA sense strand
caagaucacaaaccaagua

SEQ ID NO: 1616214 - RNA, 19 nt, Homo sapiens
  misc_RNA (1)...(19): siRNA sense strand
aggcagaguuggacaagua

SEQ ID NO: 1616215 - RNA, 19 nt, Homo sapiens
  misc_RNA (1)...(19): siRNA sense strand
caaguaauccgcuggagaa

SEQ ID NO: 1616216 - RNA, 19 nt, Homo sapiens
  misc_RNA (1)...(19): siRNA sense strand
gaauggcucucuggcugua

SEQ ID NO: 1616217 - RNA, 19 nt, Homo sapiens
  misc_RNA (1)...(19): siRNA sense strand
acaaauguguccauggaaa

SEQ ID NO: 1616218 - RNA, 19 nt, Homo sapiens
  misc_RNA (1)...(19): siRNA sense strand
ugaaguccaugauauugaa

SEQ ID NO: 1616219 - RNA, 19 nt, Homo sapiens
  misc_RNA (1)...(19): siRNA sense strand
gagaaagaacgaauucaga

SEQ ID NO: 1616220 - RNA, 19 nt, Homo sapiens
  misc_RNA (1)...(19): siRNA sense strand
augaagagcucugugauuu

SEQ ID NO: 1616221 - RNA, 19 nt, Homo sapiens
  misc_RNA (1)...(19): siRNA sense strand
uuacaaauguguccaugga

SEQ ID NO: 1616222 - RNA, 19 nt, Homo sapiens
  misc_RNA (1)...(19): siRNA sense strand
gucgacaccuguuuguaua

SEQ ID NO: 1616223 - RNA, 19 nt, Homo sapiens
  misc_RNA (1)...(19): siRNA sense strand
gagaaaguuugcaaugaag

SEQ ID NO: 1616224 - RNA, 19 nt, Homo sapiens
  misc_RNA (1)...(19): siRNA sense strand
gaucacaaaccaaguaauc

SEQ ID NO: 1616225 - RNA, 19 nt, Homo sapiens
  misc_RNA (1)...(19): siRNA sense strand
cagaagcagugaagaagga

SEQ ID NO: 1616226 - RNA, 19 nt, Homo sapiens
  misc_RNA (1)...(19): siRNA sense strand
gaagagcucugugauuuug

SEQ ID NO: 1616227 - RNA, 19 nt, Homo sapiens
  misc_RNA (1)...(19): siRNA sense strand
guaaagaauggaaucagaa

SEQ ID NO: 1616228 - RNA, 19 nt, Homo sapiens
  misc_RNA (1)...(19): siRNA sense strand
ggaagucgagacaacauga

SEQ ID NO: 1616229 - RNA, 19 nt, Homo sapiens
  misc_RNA (1)...(19): siRNA sense strand
ccaaaugcacccaaaguau

SEQ ID NO: 1616230 - RNA, 19 nt, Homo sapiens
  misc_RNA (1)...(19): siRNA sense strand
gcugugagcauuuguuaga

SEQ ID NO: 1616231 - RNA, 19 nt, Homo sapiens
  misc_RNA (1)...(19): siRNA sense strand
caaaguaucgccagaagca

SEQ ID NO: 1616232 - RNA, 19 nt, Homo sapiens
  misc_RNA (1)...(19): siRNA sense strand
uguaaagaauggaaucaga

SEQ ID NO: 1616233 - RNA, 19 nt, Homo sapiens
  misc_RNA (1)...(19): siRNA sense strand
gaaauggaggaugcacaua

SEQ ID NO: 1616234 - RNA, 19 nt, Homo sapiens
  misc_RNA (1)...(19): siRNA sense strand
caagagguuuacuuuguag

SEQ ID NO: 1616235 - RNA, 19 nt, Homo sapiens
  misc_RNA (1)...(19): siRNA sense strand
guaggugucuuaauuucuc

SEQ ID NO: 1616236 - RNA, 19 nt, Homo sapiens
  misc_RNA (1)...(19): siRNA sense strand
ggacuugaaucguggucau

SEQ ID NO: 1616237 - RNA, 19 nt, Homo sapiens
  misc_RNA (1)...(19): siRNA sense strand
cgagacaacaugaguguga

SEQ ID NO: 1616238 - RNA, 19 nt, Homo sapiens
  misc_RNA (1)...(19): siRNA sense strand
cugaugaccuugagaaagu

SEQ ID NO: 1616239 - RNA, 19 nt, Homo sapiens
  misc_RNA (1)...(19): siRNA sense strand
uuagaucacaucaccaaua

SEQ ID NO: 1616240 - RNA, 19 nt, Homo sapiens
  misc_RNA (1)...(19): siRNA sense strand
ggucauucuuugcugugua

SEQ ID NO: 1616241 - RNA, 19 nt, Homo sapiens
  misc_RNA (1)...(19): siRNA sense strand
cucaagagguuuacuuugu

SEQ ID NO: 1616242 - RNA, 19 nt, Homo sapiens
  misc_RNA (1)...(19): siRNA sense strand
gagguuuacuuuguaggaa

SEQ ID NO: 1616243 - RNA, 19 nt, Homo sapiens
  misc_RNA (1)...(19): siRNA sense strand
caaaugcacccaaaguauc

SEQ ID NO: 1616244 - RNA, 19 nt, Homo sapiens
  misc_RNA (1)...(19): siRNA sense strand
agaaagaacgaauucagaa

SEQ ID NO: 1616245 - RNA, 19 nt, Homo sapiens
  misc_RNA (1)...(19): siRNA sense strand
guucauuucuucacacaag

SEQ ID NO: 1616246 - RNA, 19 nt, Homo sapiens
  misc_RNA (1)...(19): siRNA sense strand
ugagaguuaugucagagaa

SEQ ID NO: 1616247 - RNA, 19 nt, Homo sapiens
  misc_RNA (1)...(19): siRNA sense strand
uuuguaagauccagacuug

SEQ ID NO: 1616248 - RNA, 19 nt, Homo sapiens
  misc_RNA (1)...(19): siRNA sense strand
gggauguuaugggaaauga

SEQ ID NO: 1616249 - RNA, 19 nt, Homo sapiens
  misc_RNA (1)...(19): siRNA sense strand
ucauuauccuugcauguga

SEQ ID NO: 1616250 - RNA, 19 nt, Homo sapiens
  misc_RNA (1)...(19): siRNA sense strand
gcuguaggugucuuaauuu

SEQ ID NO: 1616251 - RNA, 19 nt, Homo sapiens
  misc_RNA (1)...(19): siRNA sense strand
augcaaggcuggcguguug

SEQ ID NO: 1616252 - RNA, 19 nt, Homo sapiens
  misc_RNA (1)...(19): siRNA sense strand
guaauggguugcgauaugg

SEQ ID NO: 1616253 - RNA, 19 nt, Homo sapiens
  misc_RNA (1)...(19): siRNA sense strand
guaaugauucagcguguga

SEQ ID NO: 1616254 - RNA, 19 nt, Homo sapiens
  misc_RNA (1)...(19): siRNA sense strand
uaagggaagucgagacaac

SEQ ID NO: 1616255 - RNA, 19 nt, Homo sapiens
  misc_RNA (1)...(19): siRNA sense strand
guaccuggaaugcagagua

SEQ ID NO: 1616256 - RNA, 19 nt, Homo sapiens
  misc_RNA (1)...(19): siRNA sense strand
gagcauuuguuagaucaca

SEQ ID NO: 1616257 - RNA, 19 nt, Homo sapiens
  misc_RNA (1)...(19): siRNA sense strand
gagccugaaguccaugaua

SEQ ID NO: 1616258 - RNA, 19 nt, Homo sapiens
  misc_RNA (1)...(19): siRNA sense strand
ggagaaagaacgaauucag

SEQ ID NO: 1616259 - RNA, 19 nt, Homo sapiens
  misc_RNA (1)...(19): siRNA sense strand
gaacagguuuucuggagau

SEQ ID NO: 1616260 - RNA, 19 nt, Homo sapiens
  misc_RNA (1)...(19): siRNA sense strand
ccaauaaccaggauuuuaa

SEQ ID NO: 1616261 - RNA, 19 nt, Homo sapiens
  misc_RNA (1)...(19): siRNA sense strand
ucaccaauaaccaggauuu

SEQ ID NO: 1616262 - RNA, 19 nt, Homo sapiens
  misc_RNA (1)...(19): siRNA sense strand
ugaagaaggaggcagaguu

SEQ ID NO: 1616263 - RNA, 19 nt, Homo sapiens
  misc_RNA (1)...(19): siRNA sense strand
caacaugagugugauuuug

SEQ ID NO: 1616264 - RNA, 19 nt, Homo sapiens
  misc_RNA (1)...(19): siRNA sense strand
gauaugggcuaagcagcau

SEQ ID NO: 1616265 - RNA, 19 nt, Homo sapiens
  misc_RNA (1)...(19): siRNA sense strand
auacggcugugaucgguuu

SEQ ID NO: 1616266 - RNA, 19 nt, Homo sapiens
  misc_RNA (1)...(19): siRNA sense strand
uugagaaaguuugcaauga

SEQ ID NO: 1616267 - RNA, 19 nt, Homo sapiens
  misc_RNA (1)...(19): siRNA sense strand
agaguuaugucagagaaga

SEQ ID NO: 1616268 - RNA, 19 nt, Homo sapiens
  misc_RNA (1)...(19): siRNA sense strand
gaaguagucgacaccuguu

SEQ ID NO: 1616269 - RNA, 19 nt, Homo sapiens
  misc_RNA (1)...(19): siRNA sense strand
gugagcauuuguuagauca

SEQ ID NO: 1616270 - RNA, 19 nt, Homo sapiens
  misc_RNA (1)...(19): siRNA sense strand
gcaaggcuggcguguugaa

SEQ ID NO: 1616271 - RNA, 19 nt, Homo sapiens
  misc_RNA (1)...(19): siRNA sense strand
cauuaacuguggagacuca

SEQ ID NO: 1616272 - RNA, 19 nt, Homo sapiens
  misc_RNA (1)...(19): siRNA sense strand
gcaugcugguucucagguu

SEQ ID NO: 1616273 - RNA, 19 nt, Homo sapiens
  misc_RNA (1)...(19): siRNA sense strand
uguaagauccagacuugaa

SEQ ID NO: 1616274 - RNA, 19 nt, Homo sapiens
  misc_RNA (1)...(19): siRNA sense strand
ucugggauguuaugggaaa

SEQ ID NO: 1616275 - RNA, 19 nt, Homo sapiens
  misc_RNA (1)...(19): siRNA sense strand
gacaacaugagugugauuu

SEQ ID NO: 1616276 - RNA, 19 nt, Homo sapiens
  misc_RNA (1)...(19): siRNA sense strand
gcagauagaagugggucaa

SEQ ID NO: 1616277 - RNA, 19 nt, Homo sapiens
  misc_RNA (1)...(19): siRNA sense strand
ucacugaugaccuugagaa

SEQ ID NO: 1616278 - RNA, 19 nt, Homo sapiens
  misc_RNA (1)...(19): siRNA sense strand
aggagcaccuucuguggaa

SEQ ID NO: 1616279 - RNA, 19 nt, Homo sapiens
  misc_RNA (1)...(19): siRNA sense strand
gacucaagagguuuacuuu

SEQ ID NO: 1616280 - RNA, 19 nt, Homo sapiens
  misc_RNA (1)...(19): siRNA sense strand
uguggagacucaagagguu

SEQ ID NO: 1616281 - RNA, 19 nt, Homo sapiens
  misc_RNA (1)...(19): siRNA sense strand
agcuguaggugucuuaauu

SEQ ID NO: 1616282 - RNA, 19 nt, Homo sapiens
  misc_RNA (1)...(19): siRNA sense strand
caacagcuguaggugucuu

SEQ ID NO: 1616283 - RNA, 19 nt, Homo sapiens
  misc_RNA (1)...(19): siRNA sense strand
cacacaagaucacaaacca

SEQ ID NO: 1616284 - RNA, 19 nt, Homo sapiens
  misc_RNA (1)...(19): siRNA sense strand
ggacaaguaccuggaaugc

SEQ ID NO: 1616285 - RNA, 19 nt, Homo sapiens
  misc_RNA (1)...(19): siRNA sense strand
gagacaacaugagugugau

SEQ ID NO: 1616286 - RNA, 19 nt, Homo sapiens
  misc_RNA (1)...(19): siRNA sense strand
gcucugugauuuuguaaga

SEQ ID NO: 1616287 - RNA, 19 nt, Homo sapiens
  misc_RNA (1)...(19): siRNA sense strand
uccaugauauugaaagauc

SEQ ID NO: 1616288 - RNA, 19 nt, Homo sapiens
  misc_RNA (1)...(19): siRNA sense strand
gauauugaaagaucugaag

SEQ ID NO: 1616289 - RNA, 19 nt, Homo sapiens
  misc_RNA (1)...(19): siRNA sense strand
cgacaccuguuuguauaag

SEQ ID NO: 1616290 - RNA, 19 nt, Homo sapiens
  misc_RNA (1)...(19): siRNA sense strand
gucauucuuugcuguguau

SEQ ID NO: 1616291 - RNA, 19 nt, Homo sapiens
  misc_RNA (1)...(19): siRNA sense strand
gauguuaugggaaaugaag

SEQ ID NO: 1616292 - RNA, 19 nt, Homo sapiens
  misc_RNA (1)...(19): siRNA sense strand
aaacauggugcagauagaa

SEQ ID NO: 1616293 - RNA, 19 nt, Homo sapiens
  misc_RNA (1)...(19): siRNA sense strand
gaagaagaugaucaguuca

SEQ ID NO: 1616294 - RNA, 19 nt, Homo sapiens
  misc_RNA (1)...(19): siRNA sense strand
gaaguccaugauauugaaa

SEQ ID NO: 1616295 - RNA, 19 nt, Homo sapiens
  misc_RNA (1)...(19): siRNA sense strand
agccugaaguccaugauau

SEQ ID NO: 1616296 - RNA, 19 nt, Homo sapiens
  misc_RNA (1)...(19): siRNA sense strand
gaugguaucugggauguua

SEQ ID NO: 1616297 - RNA, 19 nt, Homo sapiens
  misc_RNA (1)...(19): siRNA sense strand
gaagaaacauggugcagau

SEQ ID NO: 1616298 - RNA, 19 nt, Homo sapiens
  misc_RNA (1)...(19): siRNA sense strand
gcagguggcucuguaauga

SEQ ID NO: 1616299 - RNA, 19 nt, Homo sapiens
  misc_RNA (1)...(19): siRNA sense strand
guucucagguugccaaaua

SEQ ID NO: 1616300 - RNA, 19 nt, Homo sapiens
  misc_RNA (1)...(19): siRNA sense strand
guaauccgcuggagaaaga

SEQ ID NO: 1616301 - RNA, 19 nt, Homo sapiens
  misc_RNA (1)...(19): siRNA sense strand
gaugaacacaugagaguua

SEQ ID NO: 1616302 - RNA, 19 nt, Homo sapiens
  misc_RNA (1)...(19): siRNA sense strand
ugaagaagaugaucaguuc

SEQ ID NO: 1616303 - RNA, 19 nt, Homo sapiens
  misc_RNA (1)...(19): siRNA sense strand
gaaaugaagagcucuguga

SEQ ID NO: 1616304 - RNA, 19 nt, Homo sapiens
  misc_RNA (1)...(19): siRNA sense strand
ggagauugaugaacacaug

SEQ ID NO: 1616305 - RNA, 19 nt, Homo sapiens
  misc_RNA (1)...(19): siRNA sense strand
gaaugcagguggcucugua

SEQ ID NO: 1616306 - RNA, 19 nt, Homo sapiens
  misc_RNA (1)...(19): siRNA sense strand
gguaauggguugcgauaug

SEQ ID NO: 1616307 - RNA, 19 nt, Homo sapiens
  misc_RNA (1)...(19): siRNA sense strand
gaaacauggugcagauaga

SEQ ID NO: 1616308 - RNA, 19 nt, Homo sapiens
  misc_RNA (1)...(19): siRNA sense strand
uagaucacaucaccaauaa

SEQ ID NO: 1616309 - RNA, 19 nt, Homo sapiens
  misc_RNA (1)...(19): siRNA sense strand
ugagaaaguuugcaaugaa

SEQ ID NO: 1616310 - RNA, 19 nt, Homo sapiens
  misc_RNA (1)...(19): siRNA sense strand
ucaagagguuuacuuugua

SEQ ID NO: 1616311 - RNA, 19 nt, Homo sapiens
  misc_RNA (1)...(19): siRNA sense strand
gaagaaggaggcagaguug

SEQ ID NO: 1616312 - RNA, 19 nt, Homo sapiens
  misc_RNA (1)...(19): siRNA sense strand
gaaaguuugcaaugaagua

SEQ ID NO: 1616313 - RNA, 19 nt, Homo sapiens
  misc_RNA (1)...(19): siRNA sense strand
caagaucacaaaccaagua

SEQ ID NO: 1616314 - RNA, 19 nt, Homo sapiens
  misc_RNA (1)...(19): siRNA sense strand
aggcagaguuggacaagua

SEQ ID NO: 1616315 - RNA, 19 nt, Homo sapiens
  misc_RNA (1)...(19): siRNA sense strand
caaguaauccgcuggagaa

SEQ ID NO: 1616316 - RNA, 19 nt, Homo sapiens
  misc_RNA (1)...(19): siRNA sense strand
gaauggcucucuggcugua

SEQ ID NO: 1616317 - RNA, 19 nt, Homo sapiens
  misc_RNA (1)...(19): siRNA sense strand
acaaauguguccauggaaa

SEQ ID NO: 1616318 - RNA, 19 nt, Homo sapiens
  misc_RNA (1)...(19): siRNA sense strand
ugaaguccaugauauugaa

SEQ ID NO: 1616319 - RNA, 19 nt, Homo sapiens
  misc_RNA (1)...(19): siRNA sense strand
gagaaagaacgaauucaga

SEQ ID NO: 1616320 - RNA, 19 nt, Homo sapiens
  misc_RNA (1)...(19): siRNA sense strand
augaagagcucugugauuu

SEQ ID NO: 1616321 - RNA, 19 nt, Homo sapiens
  misc_RNA (1)...(19): siRNA sense strand
uuacaaauguguccaugga

SEQ ID NO: 1616322 - RNA, 19 nt, Homo sapiens
  misc_RNA (1)...(19): siRNA sense strand
gucgacaccuguuuguaua

SEQ ID NO: 1616323 - RNA, 19 nt, Homo sapiens
  misc_RNA (1)...(19): siRNA sense strand
gagaaaguuugcaaugaag

SEQ ID NO: 1616324 - RNA, 19 nt, Homo sapiens
  misc_RNA (1)...(19): siRNA sense strand
gaucacaaaccaaguaauc

SEQ ID NO: 1616325 - RNA, 19 nt, Homo sapiens
  misc_RNA (1)...(19): siRNA sense strand
cagaagcagugaagaagga

SEQ ID NO: 1616326 - RNA, 19 nt, Homo sapiens
  misc_RNA (1)...(19): siRNA sense strand
gaagagcucugugauuuug

SEQ ID NO: 1616327 - RNA, 19 nt, Homo sapiens
  misc_RNA (1)...(19): siRNA sense strand
guaaagaauggaaucagaa

SEQ ID NO: 1616328 - RNA, 19 nt, Homo sapiens
  misc_RNA (1)...(19): siRNA sense strand
ggaagucgagacaacauga

SEQ ID NO: 1616329 - RNA, 19 nt, Homo sapiens
  misc_RNA (1)...(19): siRNA sense strand
ccaaaugcacccaaaguau

SEQ ID NO: 1616330 - RNA, 19 nt, Homo sapiens
  misc_RNA (1)...(19): siRNA sense strand
gcugugagcauuuguuaga

SEQ ID NO: 1616331 - RNA, 19 nt, Homo sapiens
  misc_RNA (1)...(19): siRNA sense strand
caaaguaucgccagaagca

SEQ ID NO: 1616332 - RNA, 19 nt, Homo sapiens
  misc_RNA (1)...(19): siRNA sense strand
uguaaagaauggaaucaga

SEQ ID NO: 1616333 - RNA, 19 nt, Homo sapiens
  misc_RNA (1)...(19): siRNA sense strand
gaaauggaggaugcacaua

SEQ ID NO: 1616334 - RNA, 19 nt, Homo sapiens
  misc_RNA (1)...(19): siRNA sense strand
caagagguuuacuuuguag

SEQ ID NO: 1616335 - RNA, 19 nt, Homo sapiens
  misc_RNA (1)...(19): siRNA sense strand
guaggugucuuaauuucuc

SEQ ID NO: 1616336 - RNA, 19 nt, Homo sapiens
  misc_RNA (1)...(19): siRNA sense strand
ggacuugaaucguggucau

SEQ ID NO: 1616337 - RNA, 19 nt, Homo sapiens
  misc_RNA (1)...(19): siRNA sense strand
cgagacaacaugaguguga

SEQ ID NO: 1616338 - RNA, 19 nt, Homo sapiens
  misc_RNA (1)...(19): siRNA sense strand
cugaugaccuugagaaagu

SEQ ID NO: 1616339 - RNA, 19 nt, Homo sapiens
  misc_RNA (1)...(19): siRNA sense strand
uuagaucacaucaccaaua

SEQ ID NO: 1616340 - RNA, 19 nt, Homo sapiens
  misc_RNA (1)...(19): siRNA sense strand
ggucauucuuugcugugua

SEQ ID NO: 1616341 - RNA, 19 nt, Homo sapiens
  misc_RNA (1)...(19): siRNA sense strand
cucaagagguuuacuuugu

SEQ ID NO: 1616342 - RNA, 19 nt, Homo sapiens
  misc_RNA (1)...(19): siRNA sense strand
gagguuuacuuuguaggaa

SEQ ID NO: 1616343 - RNA, 19 nt, Homo sapiens
  misc_RNA (1)...(19): siRNA sense strand
caaaugcacccaaaguauc

SEQ ID NO: 1616344 - RNA, 19 nt, Homo sapiens
  misc_RNA (1)...(19): siRNA sense strand
agaaagaacgaauucagaa

SEQ ID NO: 1616345 - RNA, 19 nt, Homo sapiens
  misc_RNA (1)...(19): siRNA sense strand
guucauuucuucacacaag

SEQ ID NO: 1616346 - RNA, 19 nt, Homo sapiens
  misc_RNA (1)...(19): siRNA sense strand
ugagaguuaugucagagaa

SEQ ID NO: 1616347 - RNA, 19 nt, Homo sapiens
  misc_RNA (1)...(19): siRNA sense strand
uuuguaagauccagacuug

SEQ ID NO: 1616348 - RNA, 19 nt, Homo sapiens
  misc_RNA (1)...(19): siRNA sense strand
gggauguuaugggaaauga

SEQ ID NO: 1616349 - RNA, 19 nt, Homo sapiens
  misc_RNA (1)...(19): siRNA sense strand
ucauuauccuugcauguga

SEQ ID NO: 1616350 - RNA, 19 nt, Homo sapiens
  misc_RNA (1)...(19): siRNA sense strand
gcuguaggugucuuaauuu

SEQ ID NO: 1616351 - RNA, 19 nt, Homo sapiens
  misc_RNA (1)...(19): siRNA sense strand
augcaaggcuggcguguug

SEQ ID NO: 1616352 - RNA, 19 nt, Homo sapiens
  misc_RNA (1)...(19): siRNA sense strand
guaauggguugcgauaugg

SEQ ID NO: 1616353 - RNA, 19 nt, Homo sapiens
  misc_RNA (1)...(19): siRNA sense strand
guaaugauucagcguguga

SEQ ID NO: 1616354 - RNA, 19 nt, Homo sapiens
  misc_RNA (1)...(19): siRNA sense strand
uaagggaagucgagacaac

SEQ ID NO: 1616355 - RNA, 19 nt, Homo sapiens
  misc_RNA (1)...(19): siRNA sense strand
guaccuggaaugcagagua

SEQ ID NO: 1616356 - RNA, 19 nt, Homo sapiens
  misc_RNA (1)...(19): siRNA sense strand
gagcauuuguuagaucaca

SEQ ID NO: 1616357 - RNA, 19 nt, Homo sapiens
  misc_RNA (1)...(19): siRNA sense strand
gagccugaaguccaugaua

SEQ ID NO: 1616358 - RNA, 19 nt, Homo sapiens
  misc_RNA (1)...(19): siRNA sense strand
ggagaaagaacgaauucag

SEQ ID NO: 1616359 - RNA, 19 nt, Homo sapiens
  misc_RNA (1)...(19): siRNA sense strand
gaacagguuuucuggagau

SEQ ID NO: 1616360 - RNA, 19 nt, Homo sapiens
  misc_RNA (1)...(19): siRNA sense strand
ccaauaaccaggauuuuaa

SEQ ID NO: 1616361 - RNA, 19 nt, Homo sapiens
  misc_RNA (1)...(19): siRNA sense strand
ucaccaauaaccaggauuu

SEQ ID NO: 1616362 - RNA, 19 nt, Homo sapiens
  misc_RNA (1)...(19): siRNA sense strand
ugaagaaggaggcagaguu

SEQ ID NO: 1616363 - RNA, 19 nt, Homo sapiens
  misc_RNA (1)...(19): siRNA sense strand
caacaugagugugauuuug

SEQ ID NO: 1616364 - RNA, 19 nt, Homo sapiens
  misc_RNA (1)...(19): siRNA sense strand
gauaugggcuaagcagcau

SEQ ID NO: 1616365 - RNA, 19 nt, Homo sapiens
  misc_RNA (1)...(19): siRNA sense strand
auacggcugugaucgguuu

SEQ ID NO: 1616366 - RNA, 19 nt, Homo sapiens
  misc_RNA (1)...(19): siRNA sense strand
uugagaaaguuugcaauga

SEQ ID NO: 1616367 - RNA, 19 nt, Homo sapiens
  misc_RNA (1)...(19): siRNA sense strand
agaguuaugucagagaaga

SEQ ID NO: 1616368 - RNA, 19 nt, Homo sapiens
  misc_RNA (1)...(19): siRNA sense strand
gaaguagucgacaccuguu

SEQ ID NO: 1616369 - RNA, 19 nt, Homo sapiens
  misc_RNA (1)...(19): siRNA sense strand
gugagcauuuguuagauca

SEQ ID NO: 1616370 - RNA, 19 nt, Homo sapiens
  misc_RNA (1)...(19): siRNA sense strand
gcaaggcuggcguguugaa

SEQ ID NO: 1616371 - RNA, 19 nt, Homo sapiens
  misc_RNA (1)...(19): siRNA sense strand
cauuaacuguggagacuca

SEQ ID NO: 1616372 - RNA, 19 nt, Homo sapiens
  misc_RNA (1)...(19): siRNA sense strand
gcaugcugguucucagguu

SEQ ID NO: 1616373 - RNA, 19 nt, Homo sapiens
  misc_RNA (1)...(19): siRNA sense strand
uguaagauccagacuugaa

SEQ ID NO: 1616374 - RNA, 19 nt, Homo sapiens
  misc_RNA (1)...(19): siRNA sense strand
ucugggauguuaugggaaa

SEQ ID NO: 1616375 - RNA, 19 nt, Homo sapiens
  misc_RNA (1)...(19): siRNA sense strand
gacaacaugagugugauuu

SEQ ID NO: 1616376 - RNA, 19 nt, Homo sapiens
  misc_RNA (1)...(19): siRNA sense strand
gcagauagaagugggucaa

SEQ ID NO: 1616377 - RNA, 19 nt, Homo sapiens
  misc_RNA (1)...(19): siRNA sense strand
ucacugaugaccuugagaa

SEQ ID NO: 1616378 - RNA, 19 nt, Homo sapiens
  misc_RNA (1)...(19): siRNA sense strand
aggagcaccuucuguggaa

SEQ ID NO: 1616379 - RNA, 19 nt, Homo sapiens
  misc_RNA (1)...(19): siRNA sense strand
gacucaagagguuuacuuu

SEQ ID NO: 1616380 - RNA, 19 nt, Homo sapiens
  misc_RNA (1)...(19): siRNA sense strand
uguggagacucaagagguu

SEQ ID NO: 1616381 - RNA, 19 nt, Homo sapiens
  misc_RNA (1)...(19): siRNA sense strand
agcuguaggugucuuaauu

SEQ ID NO: 1616382 - RNA, 19 nt, Homo sapiens
  misc_RNA (1)...(19): siRNA sense strand
caacagcuguaggugucuu

SEQ ID NO: 1616383 - RNA, 19 nt, Homo sapiens
  misc_RNA (1)...(19): siRNA sense strand
cacacaagaucacaaacca

SEQ ID NO: 1616384 - RNA, 19 nt, Homo sapiens
  misc_RNA (1)...(19): siRNA sense strand
ggacaaguaccuggaaugc

SEQ ID NO: 1616385 - RNA, 19 nt, Homo sapiens
  misc_RNA (1)...(19): siRNA sense strand
gagacaacaugagugugau

SEQ ID NO: 1616386 - RNA, 19 nt, Homo sapiens
  misc_RNA (1)...(19): siRNA sense strand
gcucugugauuuuguaaga

SEQ ID NO: 1616387 - RNA, 19 nt, Homo sapiens
  misc_RNA (1)...(19): siRNA sense strand
uccaugauauugaaagauc

SEQ ID NO: 1616388 - RNA, 19 nt, Homo sapiens
  misc_RNA (1)...(19): siRNA sense strand
gauauugaaagaucugaag

SEQ ID NO: 1616389 - RNA, 19 nt, Homo sapiens
  misc_RNA (1)...(19): siRNA sense strand
cgacaccuguuuguauaag

SEQ ID NO: 1616390 - RNA, 19 nt, Homo sapiens
  misc_RNA (1)...(19): siRNA sense strand
gucauucuuugcuguguau

SEQ ID NO: 1616391 - RNA, 19 nt, Homo sapiens
  misc_RNA (1)...(19): siRNA sense strand
gauguuaugggaaaugaag

SEQ ID NO: 1616392 - RNA, 19 nt, Homo sapiens
  misc_RNA (1)...(19): siRNA sense strand
aaacauggugcagauagaa

SEQ ID NO: 1616393 - RNA, 19 nt, Homo sapiens
  misc_RNA (1)...(19): siRNA sense strand
gaagaagaugaucaguuca

SEQ ID NO: 1616394 - RNA, 19 nt, Homo sapiens
  misc_RNA (1)...(19): siRNA sense strand
gaaguccaugauauugaaa

SEQ ID NO: 1616395 - RNA, 19 nt, Homo sapiens
  misc_RNA (1)...(19): siRNA sense strand
agccugaaguccaugauau

SEQ ID NO: 1616396 - RNA, 19 nt, Homo sapiens
  misc_RNA (1)...(19): siRNA sense strand
gaugguaucugggauguua

SEQ ID NO: 1616397 - RNA, 19 nt, Homo sapiens
  misc_RNA (1)...(19): siRNA sense strand
gaagaaacauggugcagau

SEQ ID NO: 1616398 - RNA, 19 nt, Homo sapiens
  misc_RNA (1)...(19): siRNA sense strand
gcagguggcucuguaauga

SEQ ID NO: 1616399 - RNA, 19 nt, Homo sapiens
  misc_RNA (1)...(19): siRNA sense strand
guucucagguugccaaaua

SEQ ID NO: 1616400 - RNA, 19 nt, Homo sapiens
  misc_RNA (1)...(19): siRNA sense strand
guaauccgcuggagaaaga

SEQ ID NO: 1616401 - RNA, 19 nt, Homo sapiens
  misc_RNA (1)...(19): siRNA sense strand
gaugaacacaugagaguua

SEQ ID NO: 1616402 - RNA, 19 nt, Homo sapiens
  misc_RNA (1)...(19): siRNA sense strand
ugaagaagaugaucaguuc

SEQ ID NO: 1616403 - RNA, 19 nt, Homo sapiens
  misc_RNA (1)...(19): siRNA sense strand
gaaaugaagagcucuguga

SEQ ID NO: 1616404 - RNA, 19 nt, Homo sapiens
  misc_RNA (1)...(19): siRNA sense strand
ggagauugaugaacacaug

SEQ ID NO: 1616405 - RNA, 19 nt, Homo sapiens
  misc_RNA (1)...(19): siRNA sense strand
gaaugcagguggcucugua

SEQ ID NO: 1616406 - RNA, 19 nt, Homo sapiens
  misc_RNA (1)...(19): siRNA sense strand
gguaauggguugcgauaug

SEQ ID NO: 1616407 - RNA, 19 nt, Homo sapiens
  misc_RNA (1)...(19): siRNA sense strand
gaaacauggugcagauaga

SEQ ID NO: 1616408 - RNA, 19 nt, Homo sapiens
  misc_RNA (1)...(19): siRNA sense strand
uagaucacaucaccaauaa

SEQ ID NO: 1616409 - RNA, 19 nt, Homo sapiens
  misc_RNA (1)...(19): siRNA sense strand
ugagaaaguuugcaaugaa

SEQ ID NO: 1616410 - RNA, 19 nt, Homo sapiens
  misc_RNA (1)...(19): siRNA sense strand
ucaagagguuuacuuugua

SEQ ID NO: 1616411 - RNA, 19 nt, Homo sapiens
  misc_RNA (1)...(19): siRNA sense strand
gaagaaggaggcagaguug

SEQ ID NO: 1616412 - RNA, 19 nt, Homo sapiens
  misc_RNA (1)...(19): siRNA sense strand
gaaaguuugcaaugaagua

SEQ ID NO: 1616413 - RNA, 19 nt, Homo sapiens
  misc_RNA (1)...(19): siRNA sense strand
caagaucacaaaccaagua

SEQ ID NO: 1616414 - RNA, 19 nt, Homo sapiens
  misc_RNA (1)...(19): siRNA sense strand
aggcagaguuggacaagua

SEQ ID NO: 1616415 - RNA, 19 nt, Homo sapiens
  misc_RNA (1)...(19): siRNA sense strand
caaguaauccgcuggagaa

SEQ ID NO: 1616416 - RNA, 19 nt, Homo sapiens
  misc_RNA (1)...(19): siRNA sense strand
gaauggcucucuggcugua

SEQ ID NO: 1616417 - RNA, 19 nt, Homo sapiens
  misc_RNA (1)...(19): siRNA sense strand
acaaauguguccauggaaa

SEQ ID NO: 1616418 - RNA, 19 nt, Homo sapiens
  misc_RNA (1)...(19): siRNA sense strand
ugaaguccaugauauugaa

SEQ ID NO: 1616419 - RNA, 19 nt, Homo sapiens
  misc_RNA (1)...(19): siRNA sense strand
gagaaagaacgaauucaga

SEQ ID NO: 1616420 - RNA, 19 nt, Homo sapiens
  misc_RNA (1)...(19): siRNA sense strand
augaagagcucugugauuu

SEQ ID NO: 1616421 - RNA, 19 nt, Homo sapiens
  misc_RNA (1)...(19): siRNA sense strand
uuacaaauguguccaugga

SEQ ID NO: 1616422 - RNA, 19 nt, Homo sapiens
  misc_RNA (1)...(19): siRNA sense strand
gucgacaccuguuuguaua

SEQ ID NO: 1616423 - RNA, 19 nt, Homo sapiens
  misc_RNA (1)...(19): siRNA sense strand
gagaaaguuugcaaugaag

SEQ ID NO: 1616424 - RNA, 19 nt, Homo sapiens
  misc_RNA (1)...(19): siRNA sense strand
gaucacaaaccaaguaauc

SEQ ID NO: 1616425 - RNA, 19 nt, Homo sapiens
  misc_RNA (1)...(19): siRNA sense strand
cagaagcagugaagaagga

SEQ ID NO: 1616426 - RNA, 19 nt, Homo sapiens
  misc_RNA (1)...(19): siRNA sense strand
gaagagcucugugauuuug

SEQ ID NO: 1616427 - RNA, 19 nt, Homo sapiens
  misc_RNA (1)...(19): siRNA sense strand
guaaagaauggaaucagaa

SEQ ID NO: 1616428 - RNA, 19 nt, Homo sapiens
  misc_RNA (1)...(19): siRNA sense strand
ggaagucgagacaacauga

SEQ ID NO: 1616429 - RNA, 19 nt, Homo sapiens
  misc_RNA (1)...(19): siRNA sense strand
ccaaaugcacccaaaguau

SEQ ID NO: 1616430 - RNA, 19 nt, Homo sapiens
  misc_RNA (1)...(19): siRNA sense strand
gcugugagcauuuguuaga

SEQ ID NO: 1616431 - RNA, 19 nt, Homo sapiens
  misc_RNA (1)...(19): siRNA sense strand
caaaguaucgccagaagca

SEQ ID NO: 1616432 - RNA, 19 nt, Homo sapiens
  misc_RNA (1)...(19): siRNA sense strand
uguaaagaauggaaucaga

SEQ ID NO: 1616433 - RNA, 19 nt, Homo sapiens
  misc_RNA (1)...(19): siRNA sense strand
gaaauggaggaugcacaua

SEQ ID NO: 1616434 - RNA, 19 nt, Homo sapiens
  misc_RNA (1)...(19): siRNA sense strand
caagagguuuacuuuguag

SEQ ID NO: 1616435 - RNA, 19 nt, Homo sapiens
  misc_RNA (1)...(19): siRNA sense strand
guaggugucuuaauuucuc

SEQ ID NO: 1616436 - RNA, 19 nt, Homo sapiens
  misc_RNA (1)...(19): siRNA sense strand
ggacuugaaucguggucau

SEQ ID NO: 1616437 - RNA, 19 nt, Homo sapiens
  misc_RNA (1)...(19): siRNA sense strand
cgagacaacaugaguguga

SEQ ID NO: 1616438 - RNA, 19 nt, Homo sapiens
  misc_RNA (1)...(19): siRNA sense strand
cugaugaccuugagaaagu

SEQ ID NO: 1616439 - RNA, 19 nt, Homo sapiens
  misc_RNA (1)...(19): siRNA sense strand
uuagaucacaucaccaaua

SEQ ID NO: 1616440 - RNA, 19 nt, Homo sapiens
  misc_RNA (1)...(19): siRNA sense strand
ggucauucuuugcugugua

SEQ ID NO: 1616441 - RNA, 19 nt, Homo sapiens
  misc_RNA (1)...(19): siRNA sense strand
cucaagagguuuacuuugu

SEQ ID NO: 1616442 - RNA, 19 nt, Homo sapiens
  misc_RNA (1)...(19): siRNA sense strand
gagguuuacuuuguaggaa

SEQ ID NO: 1616443 - RNA, 19 nt, Homo sapiens
  misc_RNA (1)...(19): siRNA sense strand
caaaugcacccaaaguauc

SEQ ID NO: 1616444 - RNA, 19 nt, Homo sapiens
  misc_RNA (1)...(19): siRNA sense strand
agaaagaacgaauucagaa

SEQ ID NO: 1616445 - RNA, 19 nt, Homo sapiens
  misc_RNA (1)...(19): siRNA sense strand
guucauuucuucacacaag

SEQ ID NO: 1616446 - RNA, 19 nt, Homo sapiens
  misc_RNA (1)...(19): siRNA sense strand
ugagaguuaugucagagaa

SEQ ID NO: 1616447 - RNA, 19 nt, Homo sapiens
  misc_RNA (1)...(19): siRNA sense strand
uuuguaagauccagacuug

SEQ ID NO: 1616448 - RNA, 19 nt, Homo sapiens
  misc_RNA (1)...(19): siRNA sense strand
gggauguuaugggaaauga

SEQ ID NO: 1616449 - RNA, 19 nt, Homo sapiens
  misc_RNA (1)...(19): siRNA sense strand
ucauuauccuugcauguga

SEQ ID NO: 1616450 - RNA, 19 nt, Homo sapiens
  misc_RNA (1)...(19): siRNA sense strand
gcuguaggugucuuaauuu

SEQ ID NO: 1616451 - RNA, 19 nt, Homo sapiens
  misc_RNA (1)...(19): siRNA sense strand
augcaaggcuggcguguug

SEQ ID NO: 1616452 - RNA, 19 nt, Homo sapiens
  misc_RNA (1)...(19): siRNA sense strand
guaauggguugcgauaugg

SEQ ID NO: 1616453 - RNA, 19 nt, Homo sapiens
  misc_RNA (1)...(19): siRNA sense strand
guaaugauucagcguguga

SEQ ID NO: 1616454 - RNA, 19 nt, Homo sapiens
  misc_RNA (1)...(19): siRNA sense strand
uaagggaagucgagacaac

SEQ ID NO: 1616455 - RNA, 19 nt, Homo sapiens
  misc_RNA (1)...(19): siRNA sense strand
guaccuggaaugcagagua

SEQ ID NO: 1616456 - RNA, 19 nt, Homo sapiens
  misc_RNA (1)...(19): siRNA sense strand
gagcauuuguuagaucaca

SEQ ID NO: 1616457 - RNA, 19 nt, Homo sapiens
  misc_RNA (1)...(19): siRNA sense strand
gagccugaaguccaugaua

SEQ ID NO: 1616458 - RNA, 19 nt, Homo sapiens
  misc_RNA (1)...(19): siRNA sense strand
ggagaaagaacgaauucag

SEQ ID NO: 1616459 - RNA, 19 nt, Homo sapiens
  misc_RNA (1)...(19): siRNA sense strand
gaacagguuuucuggagau

SEQ ID NO: 1616460 - RNA, 19 nt, Homo sapiens
  misc_RNA (1)...(19): siRNA sense strand
ccaauaaccaggauuuuaa

SEQ ID NO: 1616461 - RNA, 19 nt, Homo sapiens
  misc_RNA (1)...(19): siRNA sense strand
ucaccaauaaccaggauuu

SEQ ID NO: 1616462 - RNA, 19 nt, Homo sapiens
  misc_RNA (1)...(19): siRNA sense strand
ugaagaaggaggcagaguu

SEQ ID NO: 1616463 - RNA, 19 nt, Homo sapiens
  misc_RNA (1)...(19): siRNA sense strand
caacaugagugugauuuug

SEQ ID NO: 1616464 - RNA, 19 nt, Homo sapiens
  misc_RNA (1)...(19): siRNA sense strand
gauaugggcuaagcagcau

SEQ ID NO: 1616465 - RNA, 19 nt, Homo sapiens
  misc_RNA (1)...(19): siRNA sense strand
auacggcugugaucgguuu

SEQ ID NO: 1616466 - RNA, 19 nt, Homo sapiens
  misc_RNA (1)...(19): siRNA sense strand
uugagaaaguuugcaauga

SEQ ID NO: 1616467 - RNA, 19 nt, Homo sapiens
  misc_RNA (1)...(19): siRNA sense strand
agaguuaugucagagaaga

SEQ ID NO: 1616468 - RNA, 19 nt, Homo sapiens
  misc_RNA (1)...(19): siRNA sense strand
gaaguagucgacaccuguu

SEQ ID NO: 1616469 - RNA, 19 nt, Homo sapiens
  misc_RNA (1)...(19): siRNA sense strand
gugagcauuuguuagauca

SEQ ID NO: 1616470 - RNA, 19 nt, Homo sapiens
  misc_RNA (1)...(19): siRNA sense strand
gcaaggcuggcguguugaa

SEQ ID NO: 1616471 - RNA, 19 nt, Homo sapiens
  misc_RNA (1)...(19): siRNA sense strand
cauuaacuguggagacuca

SEQ ID NO: 1616472 - RNA, 19 nt, Homo sapiens
  misc_RNA (1)...(19): siRNA sense strand
gcaugcugguucucagguu

SEQ ID NO: 1616473 - RNA, 19 nt, Homo sapiens
  misc_RNA (1)...(19): siRNA sense strand
uguaagauccagacuugaa

SEQ ID NO: 1616474 - RNA, 19 nt, Homo sapiens
  misc_RNA (1)...(19): siRNA sense strand
ucugggauguuaugggaaa

SEQ ID NO: 1616475 - RNA, 19 nt, Homo sapiens
  misc_RNA (1)...(19): siRNA sense strand
gacaacaugagugugauuu

SEQ ID NO: 1616476 - RNA, 19 nt, Homo sapiens
  misc_RNA (1)...(19): siRNA sense strand
gcagauagaagugggucaa

SEQ ID NO: 1616477 - RNA, 19 nt, Homo sapiens
  misc_RNA (1)...(19): siRNA sense strand
ucacugaugaccuugagaa

SEQ ID NO: 1616478 - RNA, 19 nt, Homo sapiens
  misc_RNA (1)...(19): siRNA sense strand
aggagcaccuucuguggaa

SEQ ID NO: 1616479 - RNA, 19 nt, Homo sapiens
  misc_RNA (1)...(19): siRNA sense strand
gacucaagagguuuacuuu

SEQ ID NO: 1616480 - RNA, 19 nt, Homo sapiens
  misc_RNA (1)...(19): siRNA sense strand
uguggagacucaagagguu

SEQ ID NO: 1616481 - RNA, 19 nt, Homo sapiens
  misc_RNA (1)...(19): siRNA sense strand
agcuguaggugucuuaauu

SEQ ID NO: 1616482 - RNA, 19 nt, Homo sapiens
  misc_RNA (1)...(19): siRNA sense strand
caacagcuguaggugucuu

SEQ ID NO: 1616483 - RNA, 19 nt, Homo sapiens
  misc_RNA (1)...(19): siRNA sense strand
cacacaagaucacaaacca

SEQ ID NO: 1616484 - RNA, 19 nt, Homo sapiens
  misc_RNA (1)...(19): siRNA sense strand
ggacaaguaccuggaaugc

SEQ ID NO: 1616485 - RNA, 19 nt, Homo sapiens
  misc_RNA (1)...(19): siRNA sense strand
gagacaacaugagugugau

SEQ ID NO: 1616486 - RNA, 19 nt, Homo sapiens
  misc_RNA (1)...(19): siRNA sense strand
gcucugugauuuuguaaga

SEQ ID NO: 1616487 - RNA, 19 nt, Homo sapiens
  misc_RNA (1)...(19): siRNA sense strand
uccaugauauugaaagauc

SEQ ID NO: 1616488 - RNA, 19 nt, Homo sapiens
  misc_RNA (1)...(19): siRNA sense strand
gauauugaaagaucugaag

SEQ ID NO: 1616489 - RNA, 19 nt, Homo sapiens
  misc_RNA (1)...(19): siRNA sense strand
cgacaccuguuuguauaag

SEQ ID NO: 1616490 - RNA, 19 nt, Homo sapiens
  misc_RNA (1)...(19): siRNA sense strand
gucauucuuugcuguguau

SEQ ID NO: 1616491 - RNA, 19 nt, Homo sapiens
  misc_RNA (1)...(19): siRNA sense strand
gauguuaugggaaaugaag

SEQ ID NO: 1616492 - RNA, 19 nt, Homo sapiens
  misc_RNA (1)...(19): siRNA sense strand
aaacauggugcagauagaa

SEQ ID NO: 1616493 - RNA, 19 nt, Homo sapiens
  misc_RNA (1)...(19): siRNA sense strand
gaagaagaugaucaguuca

SEQ ID NO: 1616494 - RNA, 19 nt, Homo sapiens
  misc_RNA (1)...(19): siRNA sense strand
gaaguccaugauauugaaa

SEQ ID NO: 1616495 - RNA, 19 nt, Homo sapiens
  misc_RNA (1)...(19): siRNA sense strand
agccugaaguccaugauau

SEQ ID NO: 1616496 - RNA, 19 nt, Homo sapiens
  misc_RNA (1)...(19): siRNA sense strand
gaugguaucugggauguua

SEQ ID NO: 1616497 - RNA, 19 nt, Homo sapiens
  misc_RNA (1)...(19): siRNA sense strand
gaagaaacauggugcagau

SEQ ID NO: 1616498 - RNA, 19 nt, Homo sapiens
  misc_RNA (1)...(19): siRNA sense strand
gcagguggcucuguaauga

SEQ ID NO: 1616499 - RNA, 19 nt, Homo sapiens
  misc_RNA (1)...(19): siRNA sense strand
guucucagguugccaaaua

SEQ ID NO: 1616500 - RNA, 19 nt, Homo sapiens
  misc_RNA (1)...(19): siRNA sense strand
guaauccgcuggagaaaga

SEQ ID NO: 1616501 - RNA, 19 nt, Homo sapiens
  misc_RNA (1)...(19): siRNA sense strand
gaugaacacaugagaguua

SEQ ID NO: 1616502 - RNA, 19 nt, Homo sapiens
  misc_RNA (1)...(19): siRNA sense strand
ugaagaagaugaucaguuc

SEQ ID NO: 1616503 - RNA, 19 nt, Homo sapiens
  misc_RNA (1)...(19): siRNA sense strand
gaaaugaagagcucuguga

SEQ ID NO: 1616504 - RNA, 19 nt, Homo sapiens
  misc_RNA (1)...(19): siRNA sense strand
ggagauugaugaacacaug

SEQ ID NO: 1616505 - RNA, 19 nt, Homo sapiens
  misc_RNA (1)...(19): siRNA sense strand
gaaugcagguggcucugua

SEQ ID NO: 1616506 - RNA, 19 nt, Homo sapiens
  misc_RNA (1)...(19): siRNA sense strand
gguaauggguugcgauaug

SEQ ID NO: 1616507 - RNA, 19 nt, Homo sapiens
  misc_RNA (1)...(19): siRNA sense strand
gaaacauggugcagauaga

SEQ ID NO: 1616508 - RNA, 19 nt, Homo sapiens
  misc_RNA (1)...(19): siRNA sense strand
uagaucacaucaccaauaa

SEQ ID NO: 1616509 - RNA, 19 nt, Homo sapiens
  misc_RNA (1)...(19): siRNA sense strand
ugagaaaguuugcaaugaa

SEQ ID NO: 1616510 - RNA, 19 nt, Homo sapiens
  misc_RNA (1)...(19): siRNA sense strand
ucaagagguuuacuuugua

SEQ ID NO: 1616511 - RNA, 19 nt, Homo sapiens
  misc_RNA (1)...(19): siRNA sense strand
gaagaaggaggcagaguug

SEQ ID NO: 1616512 - RNA, 19 nt, Homo sapiens
  misc_RNA (1)...(19): siRNA sense strand
gaaaguuugcaaugaagua

SEQ ID NO: 1616513 - RNA, 19 nt, Homo sapiens
  misc_RNA (1)...(19): siRNA sense strand
caagaucacaaaccaagua

SEQ ID NO: 1616514 - RNA, 19 nt, Homo sapiens
  misc_RNA (1)...(19): siRNA sense strand
aggcagaguuggacaagua

SEQ ID NO: 1616515 - RNA, 19 nt, Homo sapiens
  misc_RNA (1)...(19): siRNA sense strand
caaguaauccgcuggagaa

SEQ ID NO: 1616516 - RNA, 19 nt, Homo sapiens
  misc_RNA (1)...(19): siRNA sense strand
gaauggcucucuggcugua

SEQ ID NO: 1616517 - RNA, 19 nt, Homo sapiens
  misc_RNA (1)...(19): siRNA sense strand
acaaauguguccauggaaa

SEQ ID NO: 1616518 - RNA, 19 nt, Homo sapiens
  misc_RNA (1)...(19): siRNA sense strand
ugaaguccaugauauugaa

SEQ ID NO: 1616519 - RNA, 19 nt, Homo sapiens
  misc_RNA (1)...(19): siRNA sense strand
gagaaagaacgaauucaga

SEQ ID NO: 1616520 - RNA, 19 nt, Homo sapiens
  misc_RNA (1)...(19): siRNA sense strand
augaagagcucugugauuu

SEQ ID NO: 1616521 - RNA, 19 nt, Homo sapiens
  misc_RNA (1)...(19): siRNA sense strand
uuacaaauguguccaugga

SEQ ID NO: 1616522 - RNA, 19 nt, Homo sapiens
  misc_RNA (1)...(19): siRNA sense strand
gucgacaccuguuuguaua

SEQ ID NO: 1616523 - RNA, 19 nt, Homo sapiens
  misc_RNA (1)...(19): siRNA sense strand
gagaaaguuugcaaugaag

SEQ ID NO: 1616524 - RNA, 19 nt, Homo sapiens
  misc_RNA (1)...(19): siRNA sense strand
gaucacaaaccaaguaauc

SEQ ID NO: 1616525 - RNA, 19 nt, Homo sapiens
  misc_RNA (1)...(19): siRNA sense strand
cagaagcagugaagaagga

SEQ ID NO: 1616526 - RNA, 19 nt, Homo sapiens
  misc_RNA (1)...(19): siRNA sense strand
gaagagcucugugauuuug

SEQ ID NO: 1616527 - RNA, 19 nt, Homo sapiens
  misc_RNA (1)...(19): siRNA sense strand
guaaagaauggaaucagaa

SEQ ID NO: 1616528 - RNA, 19 nt, Homo sapiens
  misc_RNA (1)...(19): siRNA sense strand
ggaagucgagacaacauga

SEQ ID NO: 1616529 - RNA, 19 nt, Homo sapiens
  misc_RNA (1)...(19): siRNA sense strand
ccaaaugcacccaaaguau

SEQ ID NO: 1616530 - RNA, 19 nt, Homo sapiens
  misc_RNA (1)...(19): siRNA sense strand
gcugugagcauuuguuaga

SEQ ID NO: 1616531 - RNA, 19 nt, Homo sapiens
  misc_RNA (1)...(19): siRNA sense strand
caaaguaucgccagaagca

SEQ ID NO: 1616532 - RNA, 19 nt, Homo sapiens
  misc_RNA (1)...(19): siRNA sense strand
uguaaagaauggaaucaga

SEQ ID NO: 1616533 - RNA, 19 nt, Homo sapiens
  misc_RNA (1)...(19): siRNA sense strand
gaaauggaggaugcacaua

SEQ ID NO: 1616534 - RNA, 19 nt, Homo sapiens
  misc_RNA (1)...(19): siRNA sense strand
caagagguuuacuuuguag

SEQ ID NO: 1616535 - RNA, 19 nt, Homo sapiens
  misc_RNA (1)...(19): siRNA sense strand
guaggugucuuaauuucuc

SEQ ID NO: 1616536 - RNA, 19 nt, Homo sapiens
  misc_RNA (1)...(19): siRNA sense strand
ggacuugaaucguggucau

SEQ ID NO: 1616537 - RNA, 19 nt, Homo sapiens
  misc_RNA (1)...(19): siRNA sense strand
cgagacaacaugaguguga

SEQ ID NO: 1616538 - RNA, 19 nt, Homo sapiens
  misc_RNA (1)...(19): siRNA sense strand
cugaugaccuugagaaagu

SEQ ID NO: 1616539 - RNA, 19 nt, Homo sapiens
  misc_RNA (1)...(19): siRNA sense strand
uuagaucacaucaccaaua

SEQ ID NO: 1616540 - RNA, 19 nt, Homo sapiens
  misc_RNA (1)...(19): siRNA sense strand
ggucauucuuugcugugua

SEQ ID NO: 1616541 - RNA, 19 nt, Homo sapiens
  misc_RNA (1)...(19): siRNA sense strand
cucaagagguuuacuuugu

SEQ ID NO: 1616542 - RNA, 19 nt, Homo sapiens
  misc_RNA (1)...(19): siRNA sense strand
gagguuuacuuuguaggaa

SEQ ID NO: 1616543 - RNA, 19 nt, Homo sapiens
  misc_RNA (1)...(19): siRNA sense strand
caaaugcacccaaaguauc

SEQ ID NO: 1616544 - RNA, 19 nt, Homo sapiens
  misc_RNA (1)...(19): siRNA sense strand
agaaagaacgaauucagaa

SEQ ID NO: 1616545 - RNA, 19 nt, Homo sapiens
  misc_RNA (1)...(19): siRNA sense strand
guucauuucuucacacaag

SEQ ID NO: 1616546 - RNA, 19 nt, Homo sapiens
  misc_RNA (1)...(19): siRNA sense strand
ugagaguuaugucagagaa

SEQ ID NO: 1616547 - RNA, 19 nt, Homo sapiens
  misc_RNA (1)...(19): siRNA sense strand
uuuguaagauccagacuug

SEQ ID NO: 1616548 - RNA, 19 nt, Homo sapiens
  misc_RNA (1)...(19): siRNA sense strand
gggauguuaugggaaauga

SEQ ID NO: 1616549 - RNA, 19 nt, Homo sapiens
  misc_RNA (1)...(19): siRNA sense strand
ucauuauccuugcauguga

SEQ ID NO: 1616550 - RNA, 19 nt, Homo sapiens
  misc_RNA (1)...(19): siRNA sense strand
gcuguaggugucuuaauuu

SEQ ID NO: 1616551 - RNA, 19 nt, Homo sapiens
  misc_RNA (1)...(19): siRNA sense strand
augcaaggcuggcguguug

SEQ ID NO: 1616552 - RNA, 19 nt, Homo sapiens
  misc_RNA (1)...(19): siRNA sense strand
guaauggguugcgauaugg

SEQ ID NO: 1616553 - RNA, 19 nt, Homo sapiens
  misc_RNA (1)...(19): siRNA sense strand
guaaugauucagcguguga

SEQ ID NO: 1616554 - RNA, 19 nt, Homo sapiens
  misc_RNA (1)...(19): siRNA sense strand
uaagggaagucgagacaac

SEQ ID NO: 1616555 - RNA, 19 nt, Homo sapiens
  misc_RNA (1)...(19): siRNA sense strand
guaccuggaaugcagagua

SEQ ID NO: 1616556 - RNA, 19 nt, Homo sapiens
  misc_RNA (1)...(19): siRNA sense strand
gagcauuuguuagaucaca

SEQ ID NO: 1616557 - RNA, 19 nt, Homo sapiens
  misc_RNA (1)...(19): siRNA sense strand
gagccugaaguccaugaua

SEQ ID NO: 1616558 - RNA, 19 nt, Homo sapiens
  misc_RNA (1)...(19): siRNA sense strand
ggagaaagaacgaauucag

SEQ ID NO: 1616559 - RNA, 19 nt, Homo sapiens
  misc_RNA (1)...(19): siRNA sense strand
gaacagguuuucuggagau

SEQ ID NO: 1616560 - RNA, 19 nt, Homo sapiens
  misc_RNA (1)...(19): siRNA sense strand
ccaauaaccaggauuuuaa

SEQ ID NO: 1616561 - RNA, 19 nt, Homo sapiens
  misc_RNA (1)...(19): siRNA sense strand
ucaccaauaaccaggauuu

SEQ ID NO: 1616562 - RNA, 19 nt, Homo sapiens
  misc_RNA (1)...(19): siRNA sense strand
ugaagaaggaggcagaguu

SEQ ID NO: 1616563 - RNA, 19 nt, Homo sapiens
  misc_RNA (1)...(19): siRNA sense strand
caacaugagugugauuuug

SEQ ID NO: 1616564 - RNA, 19 nt, Homo sapiens
  misc_RNA (1)...(19): siRNA sense strand
gauaugggcuaagcagcau

SEQ ID NO: 1616565 - RNA, 19 nt, Homo sapiens
  misc_RNA (1)...(19): siRNA sense strand
auacggcugugaucgguuu

SEQ ID NO: 1616566 - RNA, 19 nt, Homo sapiens
  misc_RNA (1)...(19): siRNA sense strand
uugagaaaguuugcaauga

SEQ ID NO: 1616567 - RNA, 19 nt, Homo sapiens
  misc_RNA (1)...(19): siRNA sense strand
agaguuaugucagagaaga

SEQ ID NO: 1616568 - RNA, 19 nt, Homo sapiens
  misc_RNA (1)...(19): siRNA sense strand
gaaguagucgacaccuguu

SEQ ID NO: 1616569 - RNA, 19 nt, Homo sapiens
  misc_RNA (1)...(19): siRNA sense strand
gugagcauuuguuagauca

SEQ ID NO: 1616570 - RNA, 19 nt, Homo sapiens
  misc_RNA (1)...(19): siRNA sense strand
gcaaggcuggcguguugaa

SEQ ID NO: 1616571 - RNA, 19 nt, Homo sapiens
  misc_RNA (1)...(19): siRNA sense strand
cauuaacuguggagacuca

SEQ ID NO: 1616572 - RNA, 19 nt, Homo sapiens
  misc_RNA (1)...(19): siRNA sense strand
gcaugcugguucucagguu

SEQ ID NO: 1616573 - RNA, 19 nt, Homo sapiens
  misc_RNA (1)...(19): siRNA sense strand
uguaagauccagacuugaa

SEQ ID NO: 1616574 - RNA, 19 nt, Homo sapiens
  misc_RNA (1)...(19): siRNA sense strand
ucugggauguuaugggaaa

SEQ ID NO: 1616575 - RNA, 19 nt, Homo sapiens
  misc_RNA (1)...(19): siRNA sense strand
gacaacaugagugugauuu

SEQ ID NO: 1616576 - RNA, 19 nt, Homo sapiens
  misc_RNA (1)...(19): siRNA sense strand
gcagauagaagugggucaa

SEQ ID NO: 1616577 - RNA, 19 nt, Homo sapiens
  misc_RNA (1)...(19): siRNA sense strand
ucacugaugaccuugagaa

SEQ ID NO: 1616578 - RNA, 19 nt, Homo sapiens
  misc_RNA (1)...(19): siRNA sense strand
aggagcaccuucuguggaa

SEQ ID NO: 1616579 - RNA, 19 nt, Homo sapiens
  misc_RNA (1)...(19): siRNA sense strand
gacucaagagguuuacuuu

SEQ ID NO: 1616580 - RNA, 19 nt, Homo sapiens
  misc_RNA (1)...(19): siRNA sense strand
uguggagacucaagagguu

SEQ ID NO: 1616581 - RNA, 19 nt, Homo sapiens
  misc_RNA (1)...(19): siRNA sense strand
agcuguaggugucuuaauu

SEQ ID NO: 1616582 - RNA, 19 nt, Homo sapiens
  misc_RNA (1)...(19): siRNA sense strand
caacagcuguaggugucuu

SEQ ID NO: 1616583 - RNA, 19 nt, Homo sapiens
  misc_RNA (1)...(19): siRNA sense strand
cacacaagaucacaaacca

SEQ ID NO: 1616584 - RNA, 19 nt, Homo sapiens
  misc_RNA (1)...(19): siRNA sense strand
ggacaaguaccuggaaugc

SEQ ID NO: 1616585 - RNA, 19 nt, Homo sapiens
  misc_RNA (1)...(19): siRNA sense strand
gagacaacaugagugugau

SEQ ID NO: 1616586 - RNA, 19 nt, Homo sapiens
  misc_RNA (1)...(19): siRNA sense strand
gcucugugauuuuguaaga

SEQ ID NO: 1616587 - RNA, 19 nt, Homo sapiens
  misc_RNA (1)...(19): siRNA sense strand
uccaugauauugaaagauc

SEQ ID NO: 1616588 - RNA, 19 nt, Homo sapiens
  misc_RNA (1)...(19): siRNA sense strand
gauauugaaagaucugaag

SEQ ID NO: 1616589 - RNA, 19 nt, Homo sapiens
  misc_RNA (1)...(19): siRNA sense strand
cgacaccuguuuguauaag

SEQ ID NO: 1616590 - RNA, 19 nt, Homo sapiens
  misc_RNA (1)...(19): siRNA sense strand
gucauucuuugcuguguau

SEQ ID NO: 1616591 - RNA, 19 nt, Homo sapiens
  misc_RNA (1)...(19): siRNA sense strand
gauguuaugggaaaugaag

SEQ ID NO: 1616592 - RNA, 19 nt, Homo sapiens
  misc_RNA (1)...(19): siRNA sense strand
aaacauggugcagauagaa

SEQ ID NO: 1616593 - RNA, 19 nt, Homo sapiens
  misc_RNA (1)...(19): siRNA sense strand
gaagaagaugaucaguuca

SEQ ID NO: 1616594 - RNA, 19 nt, Homo sapiens
  misc_RNA (1)...(19): siRNA sense strand
gaaguccaugauauugaaa

SEQ ID NO: 1616595 - RNA, 19 nt, Homo sapiens
  misc_RNA (1)...(19): siRNA sense strand
agccugaaguccaugauau

SEQ ID NO: 1616596 - RNA, 19 nt, Homo sapiens
  misc_RNA (1)...(19): siRNA sense strand
gaugguaucugggauguua

SEQ ID NO: 1616597 - RNA, 19 nt, Homo sapiens
  misc_RNA (1)...(19): siRNA sense strand
gaagaaacauggugcagau

SEQ ID NO: 1616598 - RNA, 19 nt, Homo sapiens
  misc_RNA (1)...(19): siRNA sense strand
gcagguggcucuguaauga

SEQ ID NO: 1616599 - RNA, 19 nt, Homo sapiens
  misc_RNA (1)...(19): siRNA sense strand
guucucagguugccaaaua

SEQ ID NO: 1616600 - RNA, 19 nt, Homo sapiens
  misc_RNA (1)...(19): siRNA sense strand
guaauccgcuggagaaaga

SEQ ID NO: 1616601 - RNA, 19 nt, Homo sapiens
  misc_RNA (1)...(19): siRNA sense strand
gaugaacacaugagaguua

SEQ ID NO: 1616602 - RNA, 19 nt, Homo sapiens
  misc_RNA (1)...(19): siRNA sense strand
ugaagaagaugaucaguuc

SEQ ID NO: 1616603 - RNA, 19 nt, Homo sapiens
  misc_RNA (1)...(19): siRNA sense strand
gaaaugaagagcucuguga

SEQ ID NO: 1616604 - RNA, 19 nt, Homo sapiens
  misc_RNA (1)...(19): siRNA sense strand
ggagauugaugaacacaug

SEQ ID NO: 1616605 - RNA, 19 nt, Homo sapiens
  misc_RNA (1)...(19): siRNA sense strand
gaaugcagguggcucugua

SEQ ID NO: 1616606 - RNA, 19 nt, Homo sapiens
  misc_RNA (1)...(19): siRNA sense strand
gguaauggguugcgauaug

SEQ ID NO: 1616607 - RNA, 19 nt, Homo sapiens
  misc_RNA (1)...(19): siRNA sense strand
gaaacauggugcagauaga

SEQ ID NO: 1616608 - RNA, 19 nt, Homo sapiens
  misc_RNA (1)...(19): siRNA sense strand
uagaucacaucaccaauaa

SEQ ID NO: 1616609 - RNA, 19 nt, Homo sapiens
  misc_RNA (1)...(19): siRNA sense strand
ugagaaaguuugcaaugaa

SEQ ID NO: 1616610 - RNA, 19 nt, Homo sapiens
  misc_RNA (1)...(19): siRNA sense strand
ucaagagguuuacuuugua

SEQ ID NO: 1616611 - RNA, 19 nt, Homo sapiens
  misc_RNA (1)...(19): siRNA sense strand
gaagaaggaggcagaguug

SEQ ID NO: 1616612 - RNA, 19 nt, Homo sapiens
  misc_RNA (1)...(19): siRNA sense strand
gaaaguuugcaaugaagua

SEQ ID NO: 1616613 - RNA, 19 nt, Homo sapiens
  misc_RNA (1)...(19): siRNA sense strand
caagaucacaaaccaagua

SEQ ID NO: 1616614 - RNA, 19 nt, Homo sapiens
  misc_RNA (1)...(19): siRNA sense strand
aggcagaguuggacaagua

SEQ ID NO: 1616615 - RNA, 19 nt, Homo sapiens
  misc_RNA (1)...(19): siRNA sense strand
caaguaauccgcuggagaa

SEQ ID NO: 1616616 - RNA, 19 nt, Homo sapiens
  misc_RNA (1)...(19): siRNA sense strand
gaauggcucucuggcugua

SEQ ID NO: 1616617 - RNA, 19 nt, Homo sapiens
  misc_RNA (1)...(19): siRNA sense strand
acaaauguguccauggaaa

SEQ ID NO: 1616618 - RNA, 19 nt, Homo sapiens
  misc_RNA (1)...(19): siRNA sense strand
ugaaguccaugauauugaa

SEQ ID NO: 1616619 - RNA, 19 nt, Homo sapiens
  misc_RNA (1)...(19): siRNA sense strand
gagaaagaacgaauucaga

SEQ ID NO: 1616620 - RNA, 19 nt, Homo sapiens
  misc_RNA (1)...(19): siRNA sense strand
augaagagcucugugauuu

SEQ ID NO: 1616621 - RNA, 19 nt, Homo sapiens
  misc_RNA (1)...(19): siRNA sense strand
uuacaaauguguccaugga

SEQ ID NO: 1616622 - RNA, 19 nt, Homo sapiens
  misc_RNA (1)...(19): siRNA sense strand
gucgacaccuguuuguaua

SEQ ID NO: 1616623 - RNA, 19 nt, Homo sapiens
  misc_RNA (1)...(19): siRNA sense strand
gagaaaguuugcaaugaag

SEQ ID NO: 1616624 - RNA, 19 nt, Homo sapiens
  misc_RNA (1)...(19): siRNA sense strand
gaucacaaaccaaguaauc

SEQ ID NO: 1616625 - RNA, 19 nt, Homo sapiens
  misc_RNA (1)...(19): siRNA sense strand
cagaagcagugaagaagga

SEQ ID NO: 1616626 - RNA, 19 nt, Homo sapiens
  misc_RNA (1)...(19): siRNA sense strand
gaagagcucugugauuuug

SEQ ID NO: 1616627 - RNA, 19 nt, Homo sapiens
  misc_RNA (1)...(19): siRNA sense strand
guaaagaauggaaucagaa

SEQ ID NO: 1616628 - RNA, 19 nt, Homo sapiens
  misc_RNA (1)...(19): siRNA sense strand
ggaagucgagacaacauga

SEQ ID NO: 1616629 - RNA, 19 nt, Homo sapiens
  misc_RNA (1)...(19): siRNA sense strand
ccaaaugcacccaaaguau

SEQ ID NO: 1616630 - RNA, 19 nt, Homo sapiens
  misc_RNA (1)...(19): siRNA sense strand
gcugugagcauuuguuaga

SEQ ID NO: 1616631 - RNA, 19 nt, Homo sapiens
  misc_RNA (1)...(19): siRNA sense strand
caaaguaucgccagaagca

SEQ ID NO: 1616632 - RNA, 19 nt, Homo sapiens
  misc_RNA (1)...(19): siRNA sense strand
uguaaagaauggaaucaga

SEQ ID NO: 1616633 - RNA, 19 nt, Homo sapiens
  misc_RNA (1)...(19): siRNA sense strand
gaaauggaggaugcacaua

SEQ ID NO: 1616634 - RNA, 19 nt, Homo sapiens
  misc_RNA (1)...(19): siRNA sense strand
caagagguuuacuuuguag

SEQ ID NO: 1616635 - RNA, 19 nt, Homo sapiens
  misc_RNA (1)...(19): siRNA sense strand
guaggugucuuaauuucuc

SEQ ID NO: 1616636 - RNA, 19 nt, Homo sapiens
  misc_RNA (1)...(19): siRNA sense strand
ggacuugaaucguggucau

SEQ ID NO: 1616637 - RNA, 19 nt, Homo sapiens
  misc_RNA (1)...(19): siRNA sense strand
cgagacaacaugaguguga

SEQ ID NO: 1616638 - RNA, 19 nt, Homo sapiens
  misc_RNA (1)...(19): siRNA sense strand
cugaugaccuugagaaagu

SEQ ID NO: 1616639 - RNA, 19 nt, Homo sapiens
  misc_RNA (1)...(19): siRNA sense strand
uuagaucacaucaccaaua

SEQ ID NO: 1616640 - RNA, 19 nt, Homo sapiens
  misc_RNA (1)...(19): siRNA sense strand
ggucauucuuugcugugua

SEQ ID NO: 1616641 - RNA, 19 nt, Homo sapiens
  misc_RNA (1)...(19): siRNA sense strand
cucaagagguuuacuuugu

SEQ ID NO: 1616642 - RNA, 19 nt, Homo sapiens
  misc_RNA (1)...(19): siRNA sense strand
gagguuuacuuuguaggaa

SEQ ID NO: 1616643 - RNA, 19 nt, Homo sapiens
  misc_RNA (1)...(19): siRNA sense strand
caaaugcacccaaaguauc

SEQ ID NO: 1616644 - RNA, 19 nt, Homo sapiens
  misc_RNA (1)...(19): siRNA sense strand
agaaagaacgaauucagaa

SEQ ID NO: 1616645 - RNA, 19 nt, Homo sapiens
  misc_RNA (1)...(19): siRNA sense strand
guucauuucuucacacaag

SEQ ID NO: 1616646 - RNA, 19 nt, Homo sapiens
  misc_RNA (1)...(19): siRNA sense strand
ugagaguuaugucagagaa

SEQ ID NO: 1616647 - RNA, 19 nt, Homo sapiens
  misc_RNA (1)...(19): siRNA sense strand
uuuguaagauccagacuug

SEQ ID NO: 1616648 - RNA, 19 nt, Homo sapiens
  misc_RNA (1)...(19): siRNA sense strand
gggauguuaugggaaauga

SEQ ID NO: 1616649 - RNA, 19 nt, Homo sapiens
  misc_RNA (1)...(19): siRNA sense strand
ucauuauccuugcauguga

SEQ ID NO: 1616650 - RNA, 19 nt, Homo sapiens
  misc_RNA (1)...(19): siRNA sense strand
gcuguaggugucuuaauuu

SEQ ID NO: 1616651 - RNA, 19 nt, Homo sapiens
  misc_RNA (1)...(19): siRNA sense strand
augcaaggcuggcguguug

SEQ ID NO: 1616652 - RNA, 19 nt, Homo sapiens
  misc_RNA (1)...(19): siRNA sense strand
guaauggguugcgauaugg

SEQ ID NO: 1616653 - RNA, 19 nt, Homo sapiens
  misc_RNA (1)...(19): siRNA sense strand
guaaugauucagcguguga

SEQ ID NO: 1616654 - RNA, 19 nt, Homo sapiens
  misc_RNA (1)...(19): siRNA sense strand
uaagggaagucgagacaac

SEQ ID NO: 1616655 - RNA, 19 nt, Homo sapiens
  misc_RNA (1)...(19): siRNA sense strand
guaccuggaaugcagagua

SEQ ID NO: 1616656 - RNA, 19 nt, Homo sapiens
  misc_RNA (1)...(19): siRNA sense strand
gagcauuuguuagaucaca

SEQ ID NO: 1616657 - RNA, 19 nt, Homo sapiens
  misc_RNA (1)...(19): siRNA sense strand
gagccugaaguccaugaua

SEQ ID NO: 1616658 - RNA, 19 nt, Homo sapiens
  misc_RNA (1)...(19): siRNA sense strand
ggagaaagaacgaauucag

SEQ ID NO: 1616659 - RNA, 19 nt, Homo sapiens
  misc_RNA (1)...(19): siRNA sense strand
gaacagguuuucuggagau

SEQ ID NO: 1616660 - RNA, 19 nt, Homo sapiens
  misc_RNA (1)...(19): siRNA sense strand
ccaauaaccaggauuuuaa

SEQ ID NO: 1616661 - RNA, 19 nt, Homo sapiens
  misc_RNA (1)...(19): siRNA sense strand
ucaccaauaaccaggauuu

SEQ ID NO: 1616662 - RNA, 19 nt, Homo sapiens
  misc_RNA (1)...(19): siRNA sense strand
ugaagaaggaggcagaguu

SEQ ID NO: 1616663 - RNA, 19 nt, Homo sapiens
  misc_RNA (1)...(19): siRNA sense strand
caacaugagugugauuuug

SEQ ID NO: 1616664 - RNA, 19 nt, Homo sapiens
  misc_RNA (1)...(19): siRNA sense strand
gauaugggcuaagcagcau

SEQ ID NO: 1616665 - RNA, 19 nt, Homo sapiens
  misc_RNA (1)...(19): siRNA sense strand
auacggcugugaucgguuu

SEQ ID NO: 1616666 - RNA, 19 nt, Homo sapiens
  misc_RNA (1)...(19): siRNA sense strand
uugagaaaguuugcaauga

SEQ ID NO: 1616667 - RNA, 19 nt, Homo sapiens
  misc_RNA (1)...(19): siRNA sense strand
agaguuaugucagagaaga

SEQ ID NO: 1616668 - RNA, 19 nt, Homo sapiens
  misc_RNA (1)...(19): siRNA sense strand
gaaguagucgacaccuguu

SEQ ID NO: 1616669 - RNA, 19 nt, Homo sapiens
  misc_RNA (1)...(19): siRNA sense strand
gugagcauuuguuagauca

SEQ ID NO: 1616670 - RNA, 19 nt, Homo sapiens
  misc_RNA (1)...(19): siRNA sense strand
gcaaggcuggcguguugaa

SEQ ID NO: 1616671 - RNA, 19 nt, Homo sapiens
  misc_RNA (1)...(19): siRNA sense strand
cauuaacuguggagacuca

SEQ ID NO: 1616672 - RNA, 19 nt, Homo sapiens
  misc_RNA (1)...(19): siRNA sense strand
gcaugcugguucucagguu

SEQ ID NO: 1616673 - RNA, 19 nt, Homo sapiens
  misc_RNA (1)...(19): siRNA sense strand
uguaagauccagacuugaa

SEQ ID NO: 1616674 - RNA, 19 nt, Homo sapiens
  misc_RNA (1)...(19): siRNA sense strand
ucugggauguuaugggaaa

SEQ ID NO: 1616675 - RNA, 19 nt, Homo sapiens
  misc_RNA (1)...(19): siRNA sense strand
gacaacaugagugugauuu

SEQ ID NO: 1616676 - RNA, 19 nt, Homo sapiens
  misc_RNA (1)...(19): siRNA sense strand
gcagauagaagugggucaa

SEQ ID NO: 1616677 - RNA, 19 nt, Homo sapiens
  misc_RNA (1)...(19): siRNA sense strand
ucacugaugaccuugagaa

SEQ ID NO: 1616678 - RNA, 19 nt, Homo sapiens
  misc_RNA (1)...(19): siRNA sense strand
aggagcaccuucuguggaa

SEQ ID NO: 1616679 - RNA, 19 nt, Homo sapiens
  misc_RNA (1)...(19): siRNA sense strand
gacucaagagguuuacuuu

SEQ ID NO: 1616680 - RNA, 19 nt, Homo sapiens
  misc_RNA (1)...(19): siRNA sense strand
uguggagacucaagagguu

SEQ ID NO: 1616681 - RNA, 19 nt, Homo sapiens
  misc_RNA (1)...(19): siRNA sense strand
agcuguaggugucuuaauu

SEQ ID NO: 1616682 - RNA, 19 nt, Homo sapiens
  misc_RNA (1)...(19): siRNA sense strand
caacagcuguaggugucuu

SEQ ID NO: 1616683 - RNA, 19 nt, Homo sapiens
  misc_RNA (1)...(19): siRNA sense strand
cacacaagaucacaaacca

SEQ ID NO: 1616684 - RNA, 19 nt, Homo sapiens
  misc_RNA (1)...(19): siRNA sense strand
ggacaaguaccuggaaugc

SEQ ID NO: 1616685 - RNA, 19 nt, Homo sapiens
  misc_RNA (1)...(19): siRNA sense strand
gagacaacaugagugugau

SEQ ID NO: 1616686 - RNA, 19 nt, Homo sapiens
  misc_RNA (1)...(19): siRNA sense strand
gcucugugauuuuguaaga

SEQ ID NO: 1616687 - RNA, 19 nt, Homo sapiens
  misc_RNA (1)...(19): siRNA sense strand
uccaugauauugaaagauc

SEQ ID NO: 1616688 - RNA, 19 nt, Homo sapiens
  misc_RNA (1)...(19): siRNA sense strand
gauauugaaagaucugaag

SEQ ID NO: 1616689 - RNA, 19 nt, Homo sapiens
  misc_RNA (1)...(19): siRNA sense strand
cgacaccuguuuguauaag

SEQ ID NO: 1616690 - RNA, 19 nt, Homo sapiens
  misc_RNA (1)...(19): siRNA sense strand
gucauucuuugcuguguau

SEQ ID NO: 1616691 - RNA, 19 nt, Homo sapiens
  misc_RNA (1)...(19): siRNA sense strand
gauguuaugggaaaugaag

SEQ ID NO: 1616692 - RNA, 19 nt, Homo sapiens
  misc_RNA (1)...(19): siRNA sense strand
aaacauggugcagauagaa

SEQ ID NO: 1616693 - RNA, 19 nt, Homo sapiens
  misc_RNA (1)...(19): siRNA sense strand
gaagaagaugaucaguuca

SEQ ID NO: 1616694 - RNA, 19 nt, Homo sapiens
  misc_RNA (1)...(19): siRNA sense strand
gaaguccaugauauugaaa

SEQ ID NO: 1616695 - RNA, 19 nt, Homo sapiens
  misc_RNA (1)...(19): siRNA sense strand
agccugaaguccaugauau

SEQ ID NO: 1616696 - RNA, 19 nt, Homo sapiens
  misc_RNA (1)...(19): siRNA sense strand
gaugguaucugggauguua

SEQ ID NO: 1616697 - RNA, 19 nt, Homo sapiens
  misc_RNA (1)...(19): siRNA sense strand
gaagaaacauggugcagau

SEQ ID NO: 1616698 - RNA, 19 nt, Homo sapiens
  misc_RNA (1)...(19): siRNA sense strand
gcagguggcucuguaauga

SEQ ID NO: 1616699 - RNA, 19 nt, Homo sapiens
  misc_RNA (1)...(19): siRNA sense strand
guucucagguugccaaaua

SEQ ID NO: 1616700 - RNA, 19 nt, Homo sapiens
  misc_RNA (1)...(19): siRNA sense strand
guaauccgcuggagaaaga

SEQ ID NO: 1616701 - RNA, 19 nt, Homo sapiens
  misc_RNA (1)...(19): siRNA sense strand
gaugaacacaugagaguua

SEQ ID NO: 1616702 - RNA, 19 nt, Homo sapiens
  misc_RNA (1)...(19): siRNA sense strand
ugaagaagaugaucaguuc

SEQ ID NO: 1616703 - RNA, 19 nt, Homo sapiens
  misc_RNA (1)...(19): siRNA sense strand
gaaaugaagagcucuguga

SEQ ID NO: 1616704 - RNA, 19 nt, Homo sapiens
  misc_RNA (1)...(19): siRNA sense strand
ggagauugaugaacacaug

SEQ ID NO: 1616705 - RNA, 19 nt, Homo sapiens
  misc_RNA (1)...(19): siRNA sense strand
gaaugcagguggcucugua

SEQ ID NO: 1616706 - RNA, 19 nt, Homo sapiens
  misc_RNA (1)...(19): siRNA sense strand
gguaauggguugcgauaug

SEQ ID NO: 1616707 - RNA, 19 nt, Homo sapiens
  misc_RNA (1)...(19): siRNA sense strand
gaaacauggugcagauaga

SEQ ID NO: 1616708 - RNA, 19 nt, Homo sapiens
  misc_RNA (1)...(19): siRNA sense strand
uagaucacaucaccaauaa

SEQ ID NO: 1616709 - RNA, 19 nt, Homo sapiens
  misc_RNA (1)...(19): siRNA sense strand
ugagaaaguuugcaaugaa

SEQ ID NO: 1616710 - RNA, 19 nt, Homo sapiens
  misc_RNA (1)...(19): siRNA sense strand
ucaagagguuuacuuugua

SEQ ID NO: 1616711 - RNA, 19 nt, Homo sapiens
  misc_RNA (1)...(19): siRNA sense strand
gaagaaggaggcagaguug

SEQ ID NO: 1616712 - RNA, 19 nt, Homo sapiens
  misc_RNA (1)...(19): siRNA sense strand
gaaaguuugcaaugaagua

SEQ ID NO: 1616713 - RNA, 19 nt, Homo sapiens
  misc_RNA (1)...(19): siRNA sense strand
caagaucacaaaccaagua

SEQ ID NO: 1616714 - RNA, 19 nt, Homo sapiens
  misc_RNA (1)...(19): siRNA sense strand
aggcagaguuggacaagua

SEQ ID NO: 1616715 - RNA, 19 nt, Homo sapiens
  misc_RNA (1)...(19): siRNA sense strand
caaguaauccgcuggagaa

SEQ ID NO: 1616716 - RNA, 19 nt, Homo sapiens
  misc_RNA (1)...(19): siRNA sense strand
gaauggcucucuggcugua

SEQ ID NO: 1616717 - RNA, 19 nt, Homo sapiens
  misc_RNA (1)...(19): siRNA sense strand
acaaauguguccauggaaa

SEQ ID NO: 1616718 - RNA, 19 nt, Homo sapiens
  misc_RNA (1)...(19): siRNA sense strand
ugaaguccaugauauugaa

SEQ ID NO: 1616719 - RNA, 19 nt, Homo sapiens
  misc_RNA (1)...(19): siRNA sense strand
gagaaagaacgaauucaga

SEQ ID NO: 1616720 - RNA, 19 nt, Homo sapiens
  misc_RNA (1)...(19): siRNA sense strand
augaagagcucugugauuu

SEQ ID NO: 1616721 - RNA, 19 nt, Homo sapiens
  misc_RNA (1)...(19): siRNA sense strand
uuacaaauguguccaugga

SEQ ID NO: 1616722 - RNA, 19 nt, Homo sapiens
  misc_RNA (1)...(19): siRNA sense strand
gucgacaccuguuuguaua

SEQ ID NO: 1616723 - RNA, 19 nt, Homo sapiens
  misc_RNA (1)...(19): siRNA sense strand
gagaaaguuugcaaugaag

SEQ ID NO: 1616724 - RNA, 19 nt, Homo sapiens
  misc_RNA (1)...(19): siRNA sense strand
gaucacaaaccaaguaauc

SEQ ID NO: 1616725 - RNA, 19 nt, Homo sapiens
  misc_RNA (1)...(19): siRNA sense strand
cagaagcagugaagaagga

SEQ ID NO: 1616726 - RNA, 19 nt, Homo sapiens
  misc_RNA (1)...(19): siRNA sense strand
gaagagcucugugauuuug

SEQ ID NO: 1616727 - RNA, 19 nt, Homo sapiens
  misc_RNA (1)...(19): siRNA sense strand
guaaagaauggaaucagaa

SEQ ID NO: 1616728 - RNA, 19 nt, Homo sapiens
  misc_RNA (1)...(19): siRNA sense strand
ggaagucgagacaacauga

SEQ ID NO: 1616729 - RNA, 19 nt, Homo sapiens
  misc_RNA (1)...(19): siRNA sense strand
ccaaaugcacccaaaguau

SEQ ID NO: 1616730 - RNA, 19 nt, Homo sapiens
  misc_RNA (1)...(19): siRNA sense strand
gcugugagcauuuguuaga

SEQ ID NO: 1616731 - RNA, 19 nt, Homo sapiens
  misc_RNA (1)...(19): siRNA sense strand
caaaguaucgccagaagca

SEQ ID NO: 1616732 - RNA, 19 nt, Homo sapiens
  misc_RNA (1)...(19): siRNA sense strand
uguaaagaauggaaucaga

SEQ ID NO: 1616733 - RNA, 19 nt, Homo sapiens
  misc_RNA (1)...(19): siRNA sense strand
gaaauggaggaugcacaua

SEQ ID NO: 1616734 - RNA, 19 nt, Homo sapiens
  misc_RNA (1)...(19): siRNA sense strand
caagagguuuacuuuguag

SEQ ID NO: 1616735 - RNA, 19 nt, Homo sapiens
  misc_RNA (1)...(19): siRNA sense strand
guaggugucuuaauuucuc

SEQ ID NO: 1616736 - RNA, 19 nt, Homo sapiens
  misc_RNA (1)...(19): siRNA sense strand
ggacuugaaucguggucau

SEQ ID NO: 1616737 - RNA, 19 nt, Homo sapiens
  misc_RNA (1)...(19): siRNA sense strand
cgagacaacaugaguguga

SEQ ID NO: 1616738 - RNA, 19 nt, Homo sapiens
  misc_RNA (1)...(19): siRNA sense strand
cugaugaccuugagaaagu

SEQ ID NO: 1616739 - RNA, 19 nt, Homo sapiens
  misc_RNA (1)...(19): siRNA sense strand
uuagaucacaucaccaaua

SEQ ID NO: 1616740 - RNA, 19 nt, Homo sapiens
  misc_RNA (1)...(19): siRNA sense strand
ggucauucuuugcugugua

SEQ ID NO: 1616741 - RNA, 19 nt, Homo sapiens
  misc_RNA (1)...(19): siRNA sense strand
cucaagagguuuacuuugu

SEQ ID NO: 1616742 - RNA, 19 nt, Homo sapiens
  misc_RNA (1)...(19): siRNA sense strand
gagguuuacuuuguaggaa

SEQ ID NO: 1616743 - RNA, 19 nt, Homo sapiens
  misc_RNA (1)...(19): siRNA sense strand
caaaugcacccaaaguauc

SEQ ID NO: 1616744 - RNA, 19 nt, Homo sapiens
  misc_RNA (1)...(19): siRNA sense strand
agaaagaacgaauucagaa

SEQ ID NO: 1616745 - RNA, 19 nt, Homo sapiens
  misc_RNA (1)...(19): siRNA sense strand
guucauuucuucacacaag

SEQ ID NO: 1616746 - RNA, 19 nt, Homo sapiens
  misc_RNA (1)...(19): siRNA sense strand
ugagaguuaugucagagaa

SEQ ID NO: 1616747 - RNA, 19 nt, Homo sapiens
  misc_RNA (1)...(19): siRNA sense strand
uuuguaagauccagacuug

SEQ ID NO: 1616748 - RNA, 19 nt, Homo sapiens
  misc_RNA (1)...(19): siRNA sense strand
gggauguuaugggaaauga

SEQ ID NO: 1616749 - RNA, 19 nt, Homo sapiens
  misc_RNA (1)...(19): siRNA sense strand
ucauuauccuugcauguga

SEQ ID NO: 1616750 - RNA, 19 nt, Homo sapiens
  misc_RNA (1)...(19): siRNA sense strand
gcuguaggugucuuaauuu

SEQ ID NO: 1616751 - RNA, 19 nt, Homo sapiens
  misc_RNA (1)...(19): siRNA sense strand
augcaaggcuggcguguug

SEQ ID NO: 1616752 - RNA, 19 nt, Homo sapiens
  misc_RNA (1)...(19): siRNA sense strand
guaauggguugcgauaugg

SEQ ID NO: 1616753 - RNA, 19 nt, Homo sapiens
  misc_RNA (1)...(19): siRNA sense strand
guaaugauucagcguguga

SEQ ID NO: 1616754 - RNA, 19 nt, Homo sapiens
  misc_RNA (1)...(19): siRNA sense strand
uaagggaagucgagacaac

SEQ ID NO: 1616755 - RNA, 19 nt, Homo sapiens
  misc_RNA (1)...(19): siRNA sense strand
guaccuggaaugcagagua

SEQ ID NO: 1616756 - RNA, 19 nt, Homo sapiens
  misc_RNA (1)...(19): siRNA sense strand
gagcauuuguuagaucaca

SEQ ID NO: 1616757 - RNA, 19 nt, Homo sapiens
  misc_RNA (1)...(19): siRNA sense strand
gagccugaaguccaugaua

SEQ ID NO: 1616758 - RNA, 19 nt, Homo sapiens
  misc_RNA (1)...(19): siRNA sense strand
ggagaaagaacgaauucag

SEQ ID NO: 1616759 - RNA, 19 nt, Homo sapiens
  misc_RNA (1)...(19): siRNA sense strand
gaacagguuuucuggagau

SEQ ID NO: 1616760 - RNA, 19 nt, Homo sapiens
  misc_RNA (1)...(19): siRNA sense strand
ccaauaaccaggauuuuaa

SEQ ID NO: 1616761 - RNA, 19 nt, Homo sapiens
  misc_RNA (1)...(19): siRNA sense strand
ucaccaauaaccaggauuu

SEQ ID NO: 1616762 - RNA, 19 nt, Homo sapiens
  misc_RNA (1)...(19): siRNA sense strand
ugaagaaggaggcagaguu

SEQ ID NO: 1616763 - RNA, 19 nt, Homo sapiens
  misc_RNA (1)...(19): siRNA sense strand
caacaugagugugauuuug

SEQ ID NO: 1616764 - RNA, 19 nt, Homo sapiens
  misc_RNA (1)...(19): siRNA sense strand
gauaugggcuaagcagcau

SEQ ID NO: 1616765 - RNA, 19 nt, Homo sapiens
  misc_RNA (1)...(19): siRNA sense strand
auacggcugugaucgguuu

SEQ ID NO: 1616766 - RNA, 19 nt, Homo sapiens
  misc_RNA (1)...(19): siRNA sense strand
uugagaaaguuugcaauga

SEQ ID NO: 1616767 - RNA, 19 nt, Homo sapiens
  misc_RNA (1)...(19): siRNA sense strand
agaguuaugucagagaaga

SEQ ID NO: 1616768 - RNA, 19 nt, Homo sapiens
  misc_RNA (1)...(19): siRNA sense strand
gaaguagucgacaccuguu

SEQ ID NO: 1616769 - RNA, 19 nt, Homo sapiens
  misc_RNA (1)...(19): siRNA sense strand
gugagcauuuguuagauca

SEQ ID NO: 1616770 - RNA, 19 nt, Homo sapiens
  misc_RNA (1)...(19): siRNA sense strand
gcaaggcuggcguguugaa

SEQ ID NO: 1616771 - RNA, 19 nt, Homo sapiens
  misc_RNA (1)...(19): siRNA sense strand
cauuaacuguggagacuca

SEQ ID NO: 1616772 - RNA, 19 nt, Homo sapiens
  misc_RNA (1)...(19): siRNA sense strand
gcaugcugguucucagguu

SEQ ID NO: 1616773 - RNA, 19 nt, Homo sapiens
  misc_RNA (1)...(19): siRNA sense strand
uguaagauccagacuugaa

SEQ ID NO: 1616774 - RNA, 19 nt, Homo sapiens
  misc_RNA (1)...(19): siRNA sense strand
ucugggauguuaugggaaa

SEQ ID NO: 1616775 - RNA, 19 nt, Homo sapiens
  misc_RNA (1)...(19): siRNA sense strand
gacaacaugagugugauuu

SEQ ID NO: 1616776 - RNA, 19 nt, Homo sapiens
  misc_RNA (1)...(19): siRNA sense strand
gcagauagaagugggucaa

SEQ ID NO: 1616777 - RNA, 19 nt, Homo sapiens
  misc_RNA (1)...(19): siRNA sense strand
ucacugaugaccuugagaa

SEQ ID NO: 1616778 - RNA, 19 nt, Homo sapiens
  misc_RNA (1)...(19): siRNA sense strand
aggagcaccuucuguggaa

SEQ ID NO: 1616779 - RNA, 19 nt, Homo sapiens
  misc_RNA (1)...(19): siRNA sense strand
gacucaagagguuuacuuu

SEQ ID NO: 1616780 - RNA, 19 nt, Homo sapiens
  misc_RNA (1)...(19): siRNA sense strand
uguggagacucaagagguu

SEQ ID NO: 1616781 - RNA, 19 nt, Homo sapiens
  misc_RNA (1)...(19): siRNA sense strand
agcuguaggugucuuaauu

SEQ ID NO: 1616782 - RNA, 19 nt, Homo sapiens
  misc_RNA (1)...(19): siRNA sense strand
caacagcuguaggugucuu

SEQ ID NO: 1616783 - RNA, 19 nt, Homo sapiens
  misc_RNA (1)...(19): siRNA sense strand
cacacaagaucacaaacca

SEQ ID NO: 1616784 - RNA, 19 nt, Homo sapiens
  misc_RNA (1)...(19): siRNA sense strand
ggacaaguaccuggaaugc

SEQ ID NO: 1616785 - RNA, 19 nt, Homo sapiens
  misc_RNA (1)...(19): siRNA sense strand
gagacaacaugagugugau

SEQ ID NO: 1616786 - RNA, 19 nt, Homo sapiens
  misc_RNA (1)...(19): siRNA sense strand
gcucugugauuuuguaaga

SEQ ID NO: 1616787 - RNA, 19 nt, Homo sapiens
  misc_RNA (1)...(19): siRNA sense strand
uccaugauauugaaagauc

SEQ ID NO: 1616788 - RNA, 19 nt, Homo sapiens
  misc_RNA (1)...(19): siRNA sense strand
gauauugaaagaucugaag

SEQ ID NO: 1616789 - RNA, 19 nt, Homo sapiens
  misc_RNA (1)...(19): siRNA sense strand
cgacaccuguuuguauaag

SEQ ID NO: 1616790 - RNA, 19 nt, Homo sapiens
  misc_RNA (1)...(19): siRNA sense strand
gucauucuuugcuguguau

SEQ ID NO: 1616791 - RNA, 19 nt, Homo sapiens
  misc_RNA (1)...(19): siRNA sense strand
gauguuaugggaaaugaag

SEQ ID NO: 1616792 - RNA, 19 nt, Homo sapiens
  misc_RNA (1)...(19): siRNA sense strand
aaacauggugcagauagaa

SEQ ID NO: 1616793 - RNA, 19 nt, Homo sapiens
  misc_RNA (1)...(19): siRNA sense strand
gaagaagaugaucaguuca

SEQ ID NO: 1616794 - RNA, 19 nt, Homo sapiens
  misc_RNA (1)...(19): siRNA sense strand
gaaguccaugauauugaaa

SEQ ID NO: 1616795 - RNA, 19 nt, Homo sapiens
  misc_RNA (1)...(19): siRNA sense strand
agccugaaguccaugauau

SEQ ID NO: 1616796 - RNA, 19 nt, Homo sapiens
  misc_RNA (1)...(19): siRNA sense strand
ggagagcauucaaacaguu

SEQ ID NO: 1616797 - RNA, 19 nt, Homo sapiens
  misc_RNA (1)...(19): siRNA sense strand
ugaccuggaugcagaaauu

SEQ ID NO: 1616798 - RNA, 19 nt, Homo sapiens
  misc_RNA (1)...(19): siRNA sense strand
ucaaacaguuggacguaga

SEQ ID NO: 1616799 - RNA, 19 nt, Homo sapiens
  misc_RNA (1)...(19): siRNA sense strand
agaagcagcucugaccaaa

SEQ ID NO: 1616800 - RNA, 19 nt, Homo sapiens
  misc_RNA (1)...(19): siRNA sense strand
gaaauucuacaagcucuga

SEQ ID NO: 1616801 - RNA, 19 nt, Homo sapiens
  misc_RNA (1)...(19): siRNA sense strand
caauagaacaguugaaguc

SEQ ID NO: 1616802 - RNA, 19 nt, Homo sapiens
  misc_RNA (1)...(19): siRNA sense strand
ucucuacucuggccaacaa

SEQ ID NO: 1616803 - RNA, 19 nt, Homo sapiens
  misc_RNA (1)...(19): siRNA sense strand
cacaggcgguuucugcuau

SEQ ID NO: 1616804 - RNA, 19 nt, Homo sapiens
  misc_RNA (1)...(19): siRNA sense strand
acucugaagucauucucua

SEQ ID NO: 1616805 - RNA, 19 nt, Homo sapiens
  misc_RNA (1)...(19): siRNA sense strand
ugagagcuguuaccuuguc

SEQ ID NO: 1616806 - RNA, 19 nt, Homo sapiens
  misc_RNA (1)...(19): siRNA sense strand
ugaagucauucucuacucu

SEQ ID NO: 1616807 - RNA, 19 nt, Homo sapiens
  misc_RNA (1)...(19): siRNA sense strand
gagagcauucaaacaguug

SEQ ID NO: 1616808 - RNA, 19 nt, Homo sapiens
  misc_RNA (1)...(19): siRNA sense strand
aagcagcucugaccaaagc

SEQ ID NO: 1616809 - RNA, 19 nt, Homo sapiens
  misc_RNA (1)...(19): siRNA sense strand
acacccugcuggaguucua

SEQ ID NO: 1616810 - RNA, 19 nt, Homo sapiens
  misc_RNA (1)...(19): siRNA sense strand
cuaccacaauagaacaguu

SEQ ID NO: 1616811 - RNA, 19 nt, Homo sapiens
  misc_RNA (1)...(19): siRNA sense strand
cugcuggaguucuacuuga

SEQ ID NO: 1616812 - RNA, 19 nt, Homo sapiens
  misc_RNA (1)...(19): siRNA sense strand
caaacaguuggacguagaa

SEQ ID NO: 1616813 - RNA, 19 nt, Homo sapiens
  misc_RNA (1)...(19): siRNA sense strand
cggagagcauucaaacagu

SEQ ID NO: 1616814 - RNA, 19 nt, Homo sapiens
  misc_RNA (1)...(19): siRNA sense strand
gcuggaguucuacuugaaa

SEQ ID NO: 1616815 - RNA, 19 nt, Homo sapiens
  misc_RNA (1)...(19): siRNA sense strand
gcaacccagucaagaaaau

SEQ ID NO: 1616816 - RNA, 19 nt, Homo sapiens
  misc_RNA (1)...(19): siRNA sense strand
cugcaacccagucaagaaa

SEQ ID NO: 1616817 - RNA, 19 nt, Homo sapiens
  misc_RNA (1)...(19): siRNA sense strand
acacaggcgguuucugcua

SEQ ID NO: 1616818 - RNA, 19 nt, Homo sapiens
  misc_RNA (1)...(19): siRNA sense strand
acaggcgguuucugcuauu

SEQ ID NO: 1616819 - RNA, 19 nt, Homo sapiens
  misc_RNA (1)...(19): siRNA sense strand
aaacuaccacaauagaaca

SEQ ID NO: 1616820 - RNA, 19 nt, Homo sapiens
  misc_RNA (1)...(19): siRNA sense strand
caucgugucacaacugcaa

SEQ ID NO: 1616821 - RNA, 19 nt, Homo sapiens
  misc_RNA (1)...(19): siRNA sense strand
uagaagcagcucugaccaa

SEQ ID NO: 1616822 - RNA, 19 nt, Homo sapiens
  misc_RNA (1)...(19): siRNA sense strand
ccacaauagaacaguugaa

SEQ ID NO: 1616823 - RNA, 19 nt, Homo sapiens
  misc_RNA (1)...(19): siRNA sense strand
gaagcagcucugaccaaag

SEQ ID NO: 1616824 - RNA, 19 nt, Homo sapiens
  misc_RNA (1)...(19): siRNA sense strand
ccggagagcauucaaacag

SEQ ID NO: 1616825 - RNA, 19 nt, Homo sapiens
  misc_RNA (1)...(19): siRNA sense strand
ggagagcauucaaacaguu

SEQ ID NO: 1616826 - RNA, 19 nt, Homo sapiens
  misc_RNA (1)...(19): siRNA sense strand
ugaccuggaugcagaaauu

SEQ ID NO: 1616827 - RNA, 19 nt, Homo sapiens
  misc_RNA (1)...(19): siRNA sense strand
ucaaacaguuggacguaga

SEQ ID NO: 1616828 - RNA, 19 nt, Homo sapiens
  misc_RNA (1)...(19): siRNA sense strand
agaagcagcucugaccaaa

SEQ ID NO: 1616829 - RNA, 19 nt, Homo sapiens
  misc_RNA (1)...(19): siRNA sense strand
gaaauucuacaagcucuga

SEQ ID NO: 1616830 - RNA, 19 nt, Homo sapiens
  misc_RNA (1)...(19): siRNA sense strand
cacaggcgguuucugcuau

SEQ ID NO: 1616831 - RNA, 19 nt, Homo sapiens
  misc_RNA (1)...(19): siRNA sense strand
gagagcauucaaacaguug

SEQ ID NO: 1616832 - RNA, 19 nt, Homo sapiens
  misc_RNA (1)...(19): siRNA sense strand
aagcagcucugaccaaagc

SEQ ID NO: 1616833 - RNA, 19 nt, Homo sapiens
  misc_RNA (1)...(19): siRNA sense strand
cggagagcauucaaacagu

SEQ ID NO: 1616834 - RNA, 19 nt, Homo sapiens
  misc_RNA (1)...(19): siRNA sense strand
caaacaguuggacguagaa

SEQ ID NO: 1616835 - RNA, 19 nt, Homo sapiens
  misc_RNA (1)...(19): siRNA sense strand
acacaggcgguuucugcua

SEQ ID NO: 1616836 - RNA, 19 nt, Homo sapiens
  misc_RNA (1)...(19): siRNA sense strand
acaggcgguuucugcuauu

SEQ ID NO: 1616837 - RNA, 19 nt, Homo sapiens
  misc_RNA (1)...(19): siRNA sense strand
uagaagcagcucugaccaa

SEQ ID NO: 1616838 - RNA, 19 nt, Homo sapiens
  misc_RNA (1)...(19): siRNA sense strand
ccggagagcauucaaacag

SEQ ID NO: 1616839 - RNA, 19 nt, Homo sapiens
  misc_RNA (1)...(19): siRNA sense strand
gaagcagcucugaccaaag

SEQ ID NO: 1616840 - RNA, 19 nt, Homo sapiens
  misc_RNA (1)...(19): siRNA sense strand
ggcaggaccuuuacuguua

SEQ ID NO: 1616841 - RNA, 19 nt, Homo sapiens
  misc_RNA (1)...(19): siRNA sense strand
ggaaaucuuugccauugau

SEQ ID NO: 1616842 - RNA, 19 nt, Homo sapiens
  misc_RNA (1)...(19): siRNA sense strand
agacauggcuggaaagauc

SEQ ID NO: 1616843 - RNA, 19 nt, Homo sapiens
  misc_RNA (1)...(19): siRNA sense strand
ggaagaagacagacggaaa

SEQ ID NO: 1616844 - RNA, 19 nt, Homo sapiens
  misc_RNA (1)...(19): siRNA sense strand
gaacgauguuaaaguugga

SEQ ID NO: 1616845 - RNA, 19 nt, Homo sapiens
  misc_RNA (1)...(19): siRNA sense strand
agaaggagauggagagcaa

SEQ ID NO: 1616846 - RNA, 19 nt, Homo sapiens
  misc_RNA (1)...(19): siRNA sense strand
gcacagcccgcucacgauu

SEQ ID NO: 1616847 - RNA, 19 nt, Homo sapiens
  misc_RNA (1)...(19): siRNA sense strand
guacgaaggccacgugaau

SEQ ID NO: 1616848 - RNA, 19 nt, Homo sapiens
  misc_RNA (1)...(19): siRNA sense strand
gggaaaucuuugccauuga

SEQ ID NO: 1616849 - RNA, 19 nt, Homo sapiens
  misc_RNA (1)...(19): siRNA sense strand
agugaacgauguuaaaguu

SEQ ID NO: 1616850 - RNA, 19 nt, Homo sapiens
  misc_RNA (1)...(19): siRNA sense strand
ccacccgccuguuucauga

SEQ ID NO: 1616851 - RNA, 19 nt, Homo sapiens
  misc_RNA (1)...(19): siRNA sense strand
gaucugcguuguggaaauc

SEQ ID NO: 1616852 - RNA, 19 nt, Homo sapiens
  misc_RNA (1)...(19): siRNA sense strand
cuucagacauggcuggaaa

SEQ ID NO: 1616853 - RNA, 19 nt, Homo sapiens
  misc_RNA (1)...(19): siRNA sense strand
gggcaggaccuuuacuguu

SEQ ID NO: 1616854 - RNA, 19 nt, Homo sapiens
  misc_RNA (1)...(19): siRNA sense strand
gaagaagacagacggaaaa

SEQ ID NO: 1616855 - RNA, 19 nt, Homo sapiens
  misc_RNA (1)...(19): siRNA sense strand
gcacgaggaagaaggaauc

SEQ ID NO: 1616856 - RNA, 19 nt, Homo sapiens
  misc_RNA (1)...(19): siRNA sense strand
ggagauggagagcaagaga

SEQ ID NO: 1616857 - RNA, 19 nt, Homo sapiens
  misc_RNA (1)...(19): siRNA sense strand
cgaagugcguaaggcagua

SEQ ID NO: 1616858 - RNA, 19 nt, Homo sapiens
  misc_RNA (1)...(19): siRNA sense strand
ccaaguaugguaucaucaa

SEQ ID NO: 1616859 - RNA, 19 nt, Homo sapiens
  misc_RNA (1)...(19): siRNA sense strand
gugcggauccuccaagaug

SEQ ID NO: 1616860 - RNA, 19 nt, Homo sapiens
  misc_RNA (1)...(19): siRNA sense strand
ggggaaaucuuugccauug

SEQ ID NO: 1616861 - RNA, 19 nt, Homo sapiens
  misc_RNA (1)...(19): siRNA sense strand
gcaggaccuuuacuguuac

SEQ ID NO: 1616862 - RNA, 19 nt, Homo sapiens
  misc_RNA (1)...(19): siRNA sense strand
ccacggugaugacgagucu

SEQ ID NO: 1616863 - RNA, 19 nt, Homo sapiens
  misc_RNA (1)...(19): siRNA sense strand
ucaucaaccugcaaagucu

SEQ ID NO: 1616864 - RNA, 19 nt, Homo sapiens
  misc_RNA (1)...(19): siRNA sense strand
caaguaugguaucaucaac

SEQ ID NO: 1616865 - RNA, 19 nt, Homo sapiens
  misc_RNA (1)...(19): siRNA sense strand
caggacugcuacacgagaa

SEQ ID NO: 1616866 - RNA, 19 nt, Homo sapiens
  misc_RNA (1)...(19): siRNA sense strand
gaaggccacgugaaugagu

SEQ ID NO: 1616867 - RNA, 19 nt, Homo sapiens
  misc_RNA (1)...(19): siRNA sense strand
gcacgaaaaccucuacuuc

SEQ ID NO: 1616868 - RNA, 19 nt, Homo sapiens
  misc_RNA (1)...(19): siRNA sense strand
caacagugaccggcucuuc

SEQ ID NO: 1616869 - RNA, 19 nt, Homo sapiens
  misc_RNA (1)...(19): siRNA sense strand
gcuccucugcuguuuaaug

SEQ ID NO: 1616870 - RNA, 19 nt, Homo sapiens
  misc_RNA (1)...(19): siRNA sense strand
gguaucaucaaccugcaaa

SEQ ID NO: 1616871 - RNA, 19 nt, Homo sapiens
  misc_RNA (1)...(19): siRNA sense strand
cacagugaacgauguuaaa

SEQ ID NO: 1616872 - RNA, 19 nt, Homo sapiens
  misc_RNA (1)...(19): siRNA sense strand
ccuccaagaugagcaauac

SEQ ID NO: 1616873 - RNA, 19 nt, Homo sapiens
  misc_RNA (1)...(19): siRNA sense strand
acgaaggccacgugaauga

SEQ ID NO: 1616874 - RNA, 19 nt, Homo sapiens
  misc_RNA (1)...(19): siRNA sense strand
gaccugaggaccacgaagu

SEQ ID NO: 1616875 - RNA, 19 nt, Homo sapiens
  misc_RNA (1)...(19): siRNA sense strand
aaggccacgugaaugagua

SEQ ID NO: 1616876 - RNA, 19 nt, Homo sapiens
  misc_RNA (1)...(19): siRNA sense strand
cagcugggaccuccucugu

SEQ ID NO: 1616877 - RNA, 19 nt, Homo sapiens
  misc_RNA (1)...(19): siRNA sense strand
gcaugugcacgaggaagaa

SEQ ID NO: 1616878 - RNA, 19 nt, Homo sapiens
  misc_RNA (1)...(19): siRNA sense strand
gcuccaggaagaagacaga

SEQ ID NO: 1616879 - RNA, 19 nt, Homo sapiens
  misc_RNA (1)...(19): siRNA sense strand
cuccaaguaugguaucauc

SEQ ID NO: 1616880 - RNA, 19 nt, Homo sapiens
  misc_RNA (1)...(19): siRNA sense strand
gaaaucuuugccauugauc

SEQ ID NO: 1616881 - RNA, 19 nt, Homo sapiens
  misc_RNA (1)...(19): siRNA sense strand
ugaucugcguuguggaaau

SEQ ID NO: 1616882 - RNA, 19 nt, Homo sapiens
  misc_RNA (1)...(19): siRNA sense strand
ggcaggaccuuuacuguua

SEQ ID NO: 1616883 - RNA, 19 nt, Homo sapiens
  misc_RNA (1)...(19): siRNA sense strand
ggaaaucuuugccauugau

SEQ ID NO: 1616884 - RNA, 19 nt, Homo sapiens
  misc_RNA (1)...(19): siRNA sense strand
agacauggcuggaaagauc

SEQ ID NO: 1616885 - RNA, 19 nt, Homo sapiens
  misc_RNA (1)...(19): siRNA sense strand
ggaagaagacagacggaaa

SEQ ID NO: 1616886 - RNA, 19 nt, Homo sapiens
  misc_RNA (1)...(19): siRNA sense strand
gaacgauguuaaaguugga

SEQ ID NO: 1616887 - RNA, 19 nt, Homo sapiens
  misc_RNA (1)...(19): siRNA sense strand
guacgaaggccacgugaau

SEQ ID NO: 1616888 - RNA, 19 nt, Homo sapiens
  misc_RNA (1)...(19): siRNA sense strand
gggaaaucuuugccauuga

SEQ ID NO: 1616889 - RNA, 19 nt, Homo sapiens
  misc_RNA (1)...(19): siRNA sense strand
agugaacgauguuaaaguu

SEQ ID NO: 1616890 - RNA, 19 nt, Homo sapiens
  misc_RNA (1)...(19): siRNA sense strand
ccacccgccuguuucauga

SEQ ID NO: 1616891 - RNA, 19 nt, Homo sapiens
  misc_RNA (1)...(19): siRNA sense strand
gaucugcguuguggaaauc

SEQ ID NO: 1616892 - RNA, 19 nt, Homo sapiens
  misc_RNA (1)...(19): siRNA sense strand
cuucagacauggcuggaaa

SEQ ID NO: 1616893 - RNA, 19 nt, Homo sapiens
  misc_RNA (1)...(19): siRNA sense strand
gggcaggaccuuuacuguu

SEQ ID NO: 1616894 - RNA, 19 nt, Homo sapiens
  misc_RNA (1)...(19): siRNA sense strand
gaagaagacagacggaaaa

SEQ ID NO: 1616895 - RNA, 19 nt, Homo sapiens
  misc_RNA (1)...(19): siRNA sense strand
gcacgaggaagaaggaauc

SEQ ID NO: 1616896 - RNA, 19 nt, Homo sapiens
  misc_RNA (1)...(19): siRNA sense strand
cgaagugcguaaggcagua

SEQ ID NO: 1616897 - RNA, 19 nt, Homo sapiens
  misc_RNA (1)...(19): siRNA sense strand
ccaaguaugguaucaucaa

SEQ ID NO: 1616898 - RNA, 19 nt, Homo sapiens
  misc_RNA (1)...(19): siRNA sense strand
gugcggauccuccaagaug

SEQ ID NO: 1616899 - RNA, 19 nt, Homo sapiens
  misc_RNA (1)...(19): siRNA sense strand
ggggaaaucuuugccauug

SEQ ID NO: 1616900 - RNA, 19 nt, Homo sapiens
  misc_RNA (1)...(19): siRNA sense strand
gcaggaccuuuacuguuac

SEQ ID NO: 1616901 - RNA, 19 nt, Homo sapiens
  misc_RNA (1)...(19): siRNA sense strand
ucaucaaccugcaaagucu

SEQ ID NO: 1616902 - RNA, 19 nt, Homo sapiens
  misc_RNA (1)...(19): siRNA sense strand
caaguaugguaucaucaac

SEQ ID NO: 1616903 - RNA, 19 nt, Homo sapiens
  misc_RNA (1)...(19): siRNA sense strand
caggacugcuacacgagaa

SEQ ID NO: 1616904 - RNA, 19 nt, Homo sapiens
  misc_RNA (1)...(19): siRNA sense strand
gaaggccacgugaaugagu

SEQ ID NO: 1616905 - RNA, 19 nt, Homo sapiens
  misc_RNA (1)...(19): siRNA sense strand
gcacgaaaaccucuacuuc

SEQ ID NO: 1616906 - RNA, 19 nt, Homo sapiens
  misc_RNA (1)...(19): siRNA sense strand
gguaucaucaaccugcaaa

SEQ ID NO: 1616907 - RNA, 19 nt, Homo sapiens
  misc_RNA (1)...(19): siRNA sense strand
caacagugaccggcucuuc

SEQ ID NO: 1616908 - RNA, 19 nt, Homo sapiens
  misc_RNA (1)...(19): siRNA sense strand
gcuccucugcuguuuaaug

SEQ ID NO: 1616909 - RNA, 19 nt, Homo sapiens
  misc_RNA (1)...(19): siRNA sense strand
ccuccaagaugagcaauac

SEQ ID NO: 1616910 - RNA, 19 nt, Homo sapiens
  misc_RNA (1)...(19): siRNA sense strand
cacagugaacgauguuaaa

SEQ ID NO: 1616911 - RNA, 19 nt, Homo sapiens
  misc_RNA (1)...(19): siRNA sense strand
acgaaggccacgugaauga

SEQ ID NO: 1616912 - RNA, 19 nt, Homo sapiens
  misc_RNA (1)...(19): siRNA sense strand
gaccugaggaccacgaagu

SEQ ID NO: 1616913 - RNA, 19 nt, Homo sapiens
  misc_RNA (1)...(19): siRNA sense strand
aaggccacgugaaugagua

SEQ ID NO: 1616914 - RNA, 19 nt, Homo sapiens
  misc_RNA (1)...(19): siRNA sense strand
gcaugugcacgaggaagaa

SEQ ID NO: 1616915 - RNA, 19 nt, Homo sapiens
  misc_RNA (1)...(19): siRNA sense strand
gcuccaggaagaagacaga

SEQ ID NO: 1616916 - RNA, 19 nt, Homo sapiens
  misc_RNA (1)...(19): siRNA sense strand
cuccaaguaugguaucauc

SEQ ID NO: 1616917 - RNA, 19 nt, Homo sapiens
  misc_RNA (1)...(19): siRNA sense strand
gaaaucuuugccauugauc

SEQ ID NO: 1616918 - RNA, 19 nt, Homo sapiens
  misc_RNA (1)...(19): siRNA sense strand
ugaucugcguuguggaaau

SEQ ID NO: 1616919 - RNA, 19 nt, Homo sapiens
  misc_RNA (1)...(19): siRNA sense strand
ggcaggaccuuuacuguua

SEQ ID NO: 1616920 - RNA, 19 nt, Homo sapiens
  misc_RNA (1)...(19): siRNA sense strand
ggaaaucuuugccauugau

SEQ ID NO: 1616921 - RNA, 19 nt, Homo sapiens
  misc_RNA (1)...(19): siRNA sense strand
agacauggcuggaaagauc

SEQ ID NO: 1616922 - RNA, 19 nt, Homo sapiens
  misc_RNA (1)...(19): siRNA sense strand
ggaagaagacagacggaaa

SEQ ID NO: 1616923 - RNA, 19 nt, Homo sapiens
  misc_RNA (1)...(19): siRNA sense strand
gaacgauguuaaaguugga

SEQ ID NO: 1616924 - RNA, 19 nt, Homo sapiens
  misc_RNA (1)...(19): siRNA sense strand
agaaggagauggagagcaa

SEQ ID NO: 1616925 - RNA, 19 nt, Homo sapiens
  misc_RNA (1)...(19): siRNA sense strand
gcacagcccgcucacgauu

SEQ ID NO: 1616926 - RNA, 19 nt, Homo sapiens
  misc_RNA (1)...(19): siRNA sense strand
guacgaaggccacgugaau

SEQ ID NO: 1616927 - RNA, 19 nt, Homo sapiens
  misc_RNA (1)...(19): siRNA sense strand
gggaaaucuuugccauuga

SEQ ID NO: 1616928 - RNA, 19 nt, Homo sapiens
  misc_RNA (1)...(19): siRNA sense strand
agugaacgauguuaaaguu

SEQ ID NO: 1616929 - RNA, 19 nt, Homo sapiens
  misc_RNA (1)...(19): siRNA sense strand
ccacccgccuguuucauga

SEQ ID NO: 1616930 - RNA, 19 nt, Homo sapiens
  misc_RNA (1)...(19): siRNA sense strand
gaucugcguuguggaaauc

SEQ ID NO: 1616931 - RNA, 19 nt, Homo sapiens
  misc_RNA (1)...(19): siRNA sense strand
cuucagacauggcuggaaa

SEQ ID NO: 1616932 - RNA, 19 nt, Homo sapiens
  misc_RNA (1)...(19): siRNA sense strand
gggcaggaccuuuacuguu

SEQ ID NO: 1616933 - RNA, 19 nt, Homo sapiens
  misc_RNA (1)...(19): siRNA sense strand
gaagaagacagacggaaaa

SEQ ID NO: 1616934 - RNA, 19 nt, Homo sapiens
  misc_RNA (1)...(19): siRNA sense strand
gcacgaggaagaaggaauc

SEQ ID NO: 1616935 - RNA, 19 nt, Homo sapiens
  misc_RNA (1)...(19): siRNA sense strand
ggagauggagagcaagaga

SEQ ID NO: 1616936 - RNA, 19 nt, Homo sapiens
  misc_RNA (1)...(19): siRNA sense strand
cgaagugcguaaggcagua

SEQ ID NO: 1616937 - RNA, 19 nt, Homo sapiens
  misc_RNA (1)...(19): siRNA sense strand
ccaaguaugguaucaucaa

SEQ ID NO: 1616938 - RNA, 19 nt, Homo sapiens
  misc_RNA (1)...(19): siRNA sense strand
gugcggauccuccaagaug

SEQ ID NO: 1616939 - RNA, 19 nt, Homo sapiens
  misc_RNA (1)...(19): siRNA sense strand
ggggaaaucuuugccauug

SEQ ID NO: 1616940 - RNA, 19 nt, Homo sapiens
  misc_RNA (1)...(19): siRNA sense strand
gcaggaccuuuacuguuac

SEQ ID NO: 1616941 - RNA, 19 nt, Homo sapiens
  misc_RNA (1)...(19): siRNA sense strand
ccacggugaugacgagucu

SEQ ID NO: 1616942 - RNA, 19 nt, Homo sapiens
  misc_RNA (1)...(19): siRNA sense strand
ucaucaaccugcaaagucu

SEQ ID NO: 1616943 - RNA, 19 nt, Homo sapiens
  misc_RNA (1)...(19): siRNA sense strand
caaguaugguaucaucaac

SEQ ID NO: 1616944 - RNA, 19 nt, Homo sapiens
  misc_RNA (1)...(19): siRNA sense strand
caggacugcuacacgagaa

SEQ ID NO: 1616945 - RNA, 19 nt, Homo sapiens
  misc_RNA (1)...(19): siRNA sense strand
gaaggccacgugaaugagu

SEQ ID NO: 1616946 - RNA, 19 nt, Homo sapiens
  misc_RNA (1)...(19): siRNA sense strand
gcacgaaaaccucuacuuc

SEQ ID NO: 1616947 - RNA, 19 nt, Homo sapiens
  misc_RNA (1)...(19): siRNA sense strand
caacagugaccggcucuuc

SEQ ID NO: 1616948 - RNA, 19 nt, Homo sapiens
  misc_RNA (1)...(19): siRNA sense strand
gcuccucugcuguuuaaug

SEQ ID NO: 1616949 - RNA, 19 nt, Homo sapiens
  misc_RNA (1)...(19): siRNA sense strand
gguaucaucaaccugcaaa

SEQ ID NO: 1616950 - RNA, 19 nt, Homo sapiens
  misc_RNA (1)...(19): siRNA sense strand
cacagugaacgauguuaaa

SEQ ID NO: 1616951 - RNA, 19 nt, Homo sapiens
  misc_RNA (1)...(19): siRNA sense strand
ccuccaagaugagcaauac

SEQ ID NO: 1616952 - RNA, 19 nt, Homo sapiens
  misc_RNA (1)...(19): siRNA sense strand
acgaaggccacgugaauga

SEQ ID NO: 1616953 - RNA, 19 nt, Homo sapiens
  misc_RNA (1)...(19): siRNA sense strand
gaccugaggaccacgaagu

SEQ ID NO: 1616954 - RNA, 19 nt, Homo sapiens
  misc_RNA (1)...(19): siRNA sense strand
aaggccacgugaaugagua

SEQ ID NO: 1616955 - RNA, 19 nt, Homo sapiens
  misc_RNA (1)...(19): siRNA sense strand
cagcugggaccuccucugu

SEQ ID NO: 1616956 - RNA, 19 nt, Homo sapiens
  misc_RNA (1)...(19): siRNA sense strand
gcaugugcacgaggaagaa

SEQ ID NO: 1616957 - RNA, 19 nt, Homo sapiens
  misc_RNA (1)...(19): siRNA sense strand
gcuccaggaagaagacaga

SEQ ID NO: 1616958 - RNA, 19 nt, Homo sapiens
  misc_RNA (1)...(19): siRNA sense strand
cuccaaguaugguaucauc

SEQ ID NO: 1616959 - RNA, 19 nt, Homo sapiens
  misc_RNA (1)...(19): siRNA sense strand
gaaaucuuugccauugauc

SEQ ID NO: 1616960 - RNA, 19 nt, Homo sapiens
  misc_RNA (1)...(19): siRNA sense strand
ugaucugcguuguggaaau

SEQ ID NO: 1616961 - RNA, 19 nt, Homo sapiens
  misc_RNA (1)...(19): siRNA sense strand
ggcaggaccuuuacuguua

SEQ ID NO: 1616962 - RNA, 19 nt, Homo sapiens
  misc_RNA (1)...(19): siRNA sense strand
ggaaaucuuugccauugau

SEQ ID NO: 1616963 - RNA, 19 nt, Homo sapiens
  misc_RNA (1)...(19): siRNA sense strand
agacauggcuggaaagauc

SEQ ID NO: 1616964 - RNA, 19 nt, Homo sapiens
  misc_RNA (1)...(19): siRNA sense strand
ggaagaagacagacggaaa

SEQ ID NO: 1616965 - RNA, 19 nt, Homo sapiens
  misc_RNA (1)...(19): siRNA sense strand
gaacgauguuaaaguugga

SEQ ID NO: 1616966 - RNA, 19 nt, Homo sapiens
  misc_RNA (1)...(19): siRNA sense strand
agaaggagauggagagcaa

SEQ ID NO: 1616967 - RNA, 19 nt, Homo sapiens
  misc_RNA (1)...(19): siRNA sense strand
gcacagcccgcucacgauu

SEQ ID NO: 1616968 - RNA, 19 nt, Homo sapiens
  misc_RNA (1)...(19): siRNA sense strand
guacgaaggccacgugaau

SEQ ID NO: 1616969 - RNA, 19 nt, Homo sapiens
  misc_RNA (1)...(19): siRNA sense strand
gggaaaucuuugccauuga

SEQ ID NO: 1616970 - RNA, 19 nt, Homo sapiens
  misc_RNA (1)...(19): siRNA sense strand
agugaacgauguuaaaguu

SEQ ID NO: 1616971 - RNA, 19 nt, Homo sapiens
  misc_RNA (1)...(19): siRNA sense strand
ccacccgccuguuucauga

SEQ ID NO: 1616972 - RNA, 19 nt, Homo sapiens
  misc_RNA (1)...(19): siRNA sense strand
gaucugcguuguggaaauc

SEQ ID NO: 1616973 - RNA, 19 nt, Homo sapiens
  misc_RNA (1)...(19): siRNA sense strand
cuucagacauggcuggaaa

SEQ ID NO: 1616974 - RNA, 19 nt, Homo sapiens
  misc_RNA (1)...(19): siRNA sense strand
gggcaggaccuuuacuguu

SEQ ID NO: 1616975 - RNA, 19 nt, Homo sapiens
  misc_RNA (1)...(19): siRNA sense strand
gaagaagacagacggaaaa

SEQ ID NO: 1616976 - RNA, 19 nt, Homo sapiens
  misc_RNA (1)...(19): siRNA sense strand
gcacgaggaagaaggaauc

SEQ ID NO: 1616977 - RNA, 19 nt, Homo sapiens
  misc_RNA (1)...(19): siRNA sense strand
ggagauggagagcaagaga

SEQ ID NO: 1616978 - RNA, 19 nt, Homo sapiens
  misc_RNA (1)...(19): siRNA sense strand
cgaagugcguaaggcagua

SEQ ID NO: 1616979 - RNA, 19 nt, Homo sapiens
  misc_RNA (1)...(19): siRNA sense strand
ccaaguaugguaucaucaa

SEQ ID NO: 1616980 - RNA, 19 nt, Homo sapiens
  misc_RNA (1)...(19): siRNA sense strand
gugcggauccuccaagaug

SEQ ID NO: 1616981 - RNA, 19 nt, Homo sapiens
  misc_RNA (1)...(19): siRNA sense strand
ggggaaaucuuugccauug

SEQ ID NO: 1616982 - RNA, 19 nt, Homo sapiens
  misc_RNA (1)...(19): siRNA sense strand
gcaggaccuuuacuguuac

SEQ ID NO: 1616983 - RNA, 19 nt, Homo sapiens
  misc_RNA (1)...(19): siRNA sense strand
ccacggugaugacgagucu

SEQ ID NO: 1616984 - RNA, 19 nt, Homo sapiens
  misc_RNA (1)...(19): siRNA sense strand
ucaucaaccugcaaagucu

SEQ ID NO: 1616985 - RNA, 19 nt, Homo sapiens
  misc_RNA (1)...(19): siRNA sense strand
caaguaugguaucaucaac

SEQ ID NO: 1616986 - RNA, 19 nt, Homo sapiens
  misc_RNA (1)...(19): siRNA sense strand
caggacugcuacacgagaa

SEQ ID NO: 1616987 - RNA, 19 nt, Homo sapiens
  misc_RNA (1)...(19): siRNA sense strand
gaaggccacgugaaugagu

SEQ ID NO: 1616988 - RNA, 19 nt, Homo sapiens
  misc_RNA (1)...(19): siRNA sense strand
gcacgaaaaccucuacuuc

SEQ ID NO: 1616989 - RNA, 19 nt, Homo sapiens
  misc_RNA (1)...(19): siRNA sense strand
caacagugaccggcucuuc

SEQ ID NO: 1616990 - RNA, 19 nt, Homo sapiens
  misc_RNA (1)...(19): siRNA sense strand
gcuccucugcuguuuaaug

SEQ ID NO: 1616991 - RNA, 19 nt, Homo sapiens
  misc_RNA (1)...(19): siRNA sense strand
gguaucaucaaccugcaaa

SEQ ID NO: 1616992 - RNA, 19 nt, Homo sapiens
  misc_RNA (1)...(19): siRNA sense strand
cacagugaacgauguuaaa

SEQ ID NO: 1616993 - RNA, 19 nt, Homo sapiens
  misc_RNA (1)...(19): siRNA sense strand
ccuccaagaugagcaauac

SEQ ID NO: 1616994 - RNA, 19 nt, Homo sapiens
  misc_RNA (1)...(19): siRNA sense strand
acgaaggccacgugaauga

SEQ ID NO: 1616995 - RNA, 19 nt, Homo sapiens
  misc_RNA (1)...(19): siRNA sense strand
gaccugaggaccacgaagu

SEQ ID NO: 1616996 - RNA, 19 nt, Homo sapiens
  misc_RNA (1)...(19): siRNA sense strand
aaggccacgugaaugagua

SEQ ID NO: 1616997 - RNA, 19 nt, Homo sapiens
  misc_RNA (1)...(19): siRNA sense strand
cagcugggaccuccucugu

SEQ ID NO: 1616998 - RNA, 19 nt, Homo sapiens
  misc_RNA (1)...(19): siRNA sense strand
gcaugugcacgaggaagaa

SEQ ID NO: 1616999 - RNA, 19 nt, Homo sapiens
  misc_RNA (1)...(19): siRNA sense strand
gcuccaggaagaagacaga

SEQ ID NO: 1617000 - RNA, 19 nt, Homo sapiens
  misc_RNA (1)...(19): siRNA sense strand
cuccaaguaugguaucauc

SEQ ID NO: 1617001 - RNA, 19 nt, Homo sapiens
  misc_RNA (1)...(19): siRNA sense strand
gaaaucuuugccauugauc

SEQ ID NO: 1617002 - RNA, 19 nt, Homo sapiens
  misc_RNA (1)...(19): siRNA sense strand
ugaucugcguuguggaaau

SEQ ID NO: 1617003 - RNA, 19 nt, Homo sapiens
  misc_RNA (1)...(19): siRNA sense strand
ggcaggaccuuuacuguua

SEQ ID NO: 1617004 - RNA, 19 nt, Homo sapiens
  misc_RNA (1)...(19): siRNA sense strand
ggaaaucuuugccauugau

SEQ ID NO: 1617005 - RNA, 19 nt, Homo sapiens
  misc_RNA (1)...(19): siRNA sense strand
agacauggcuggaaagauc

SEQ ID NO: 1617006 - RNA, 19 nt, Homo sapiens
  misc_RNA (1)...(19): siRNA sense strand
ggaagaagacagacggaaa

SEQ ID NO: 1617007 - RNA, 19 nt, Homo sapiens
  misc_RNA (1)...(19): siRNA sense strand
gaacgauguuaaaguugga

SEQ ID NO: 1617008 - RNA, 19 nt, Homo sapiens
  misc_RNA (1)...(19): siRNA sense strand
guacgaaggccacgugaau

SEQ ID NO: 1617009 - RNA, 19 nt, Homo sapiens
  misc_RNA (1)...(19): siRNA sense strand
gggaaaucuuugccauuga

SEQ ID NO: 1617010 - RNA, 19 nt, Homo sapiens
  misc_RNA (1)...(19): siRNA sense strand
agugaacgauguuaaaguu

SEQ ID NO: 1617011 - RNA, 19 nt, Homo sapiens
  misc_RNA (1)...(19): siRNA sense strand
ccacccgccuguuucauga

SEQ ID NO: 1617012 - RNA, 19 nt, Homo sapiens
  misc_RNA (1)...(19): siRNA sense strand
gaucugcguuguggaaauc

SEQ ID NO: 1617013 - RNA, 19 nt, Homo sapiens
  misc_RNA (1)...(19): siRNA sense strand
cuucagacauggcuggaaa

SEQ ID NO: 1617014 - RNA, 19 nt, Homo sapiens
  misc_RNA (1)...(19): siRNA sense strand
gggcaggaccuuuacuguu

SEQ ID NO: 1617015 - RNA, 19 nt, Homo sapiens
  misc_RNA (1)...(19): siRNA sense strand
gaagaagacagacggaaaa

SEQ ID NO: 1617016 - RNA, 19 nt, Homo sapiens
  misc_RNA (1)...(19): siRNA sense strand
gcacgaggaagaaggaauc

SEQ ID NO: 1617017 - RNA, 19 nt, Homo sapiens
  misc_RNA (1)...(19): siRNA sense strand
cgaagugcguaaggcagua

SEQ ID NO: 1617018 - RNA, 19 nt, Homo sapiens
  misc_RNA (1)...(19): siRNA sense strand
ccaaguaugguaucaucaa

SEQ ID NO: 1617019 - RNA, 19 nt, Homo sapiens
  misc_RNA (1)...(19): siRNA sense strand
gugcggauccuccaagaug

SEQ ID NO: 1617020 - RNA, 19 nt, Homo sapiens
  misc_RNA (1)...(19): siRNA sense strand
ggggaaaucuuugccauug

SEQ ID NO: 1617021 - RNA, 19 nt, Homo sapiens
  misc_RNA (1)...(19): siRNA sense strand
gcaggaccuuuacuguuac

SEQ ID NO: 1617022 - RNA, 19 nt, Homo sapiens
  misc_RNA (1)...(19): siRNA sense strand
ucaucaaccugcaaagucu

SEQ ID NO: 1617023 - RNA, 19 nt, Homo sapiens
  misc_RNA (1)...(19): siRNA sense strand
caaguaugguaucaucaac

SEQ ID NO: 1617024 - RNA, 19 nt, Homo sapiens
  misc_RNA (1)...(19): siRNA sense strand
caggacugcuacacgagaa

SEQ ID NO: 1617025 - RNA, 19 nt, Homo sapiens
  misc_RNA (1)...(19): siRNA sense strand
gaaggccacgugaaugagu

SEQ ID NO: 1617026 - RNA, 19 nt, Homo sapiens
  misc_RNA (1)...(19): siRNA sense strand
gcacgaaaaccucuacuuc

SEQ ID NO: 1617027 - RNA, 19 nt, Homo sapiens
  misc_RNA (1)...(19): siRNA sense strand
gguaucaucaaccugcaaa

SEQ ID NO: 1617028 - RNA, 19 nt, Homo sapiens
  misc_RNA (1)...(19): siRNA sense strand
caacagugaccggcucuuc

SEQ ID NO: 1617029 - RNA, 19 nt, Homo sapiens
  misc_RNA (1)...(19): siRNA sense strand
gcuccucugcuguuuaaug

SEQ ID NO: 1617030 - RNA, 19 nt, Homo sapiens
  misc_RNA (1)...(19): siRNA sense strand
ccuccaagaugagcaauac

SEQ ID NO: 1617031 - RNA, 19 nt, Homo sapiens
  misc_RNA (1)...(19): siRNA sense strand
cacagugaacgauguuaaa

SEQ ID NO: 1617032 - RNA, 19 nt, Homo sapiens
  misc_RNA (1)...(19): siRNA sense strand
acgaaggccacgugaauga

SEQ ID NO: 1617033 - RNA, 19 nt, Homo sapiens
  misc_RNA (1)...(19): siRNA sense strand
gaccugaggaccacgaagu

SEQ ID NO: 1617034 - RNA, 19 nt, Homo sapiens
  misc_RNA (1)...(19): siRNA sense strand
aaggccacgugaaugagua

SEQ ID NO: 1617035 - RNA, 19 nt, Homo sapiens
  misc_RNA (1)...(19): siRNA sense strand
gcaugugcacgaggaagaa

SEQ ID NO: 1617036 - RNA, 19 nt, Homo sapiens
  misc_RNA (1)...(19): siRNA sense strand
gcuccaggaagaagacaga

SEQ ID NO: 1617037 - RNA, 19 nt, Homo sapiens
  misc_RNA (1)...(19): siRNA sense strand
cuccaaguaugguaucauc

SEQ ID NO: 1617038 - RNA, 19 nt, Homo sapiens
  misc_RNA (1)...(19): siRNA sense strand
gaaaucuuugccauugauc

SEQ ID NO: 1617039 - RNA, 19 nt, Homo sapiens
  misc_RNA (1)...(19): siRNA sense strand
ugaucugcguuguggaaau

SEQ ID NO: 1617040 - RNA, 19 nt, Homo sapiens
  misc_RNA (1)...(19): siRNA sense strand
ggcaggaccuuuacuguua

SEQ ID NO: 1617041 - RNA, 19 nt, Homo sapiens
  misc_RNA (1)...(19): siRNA sense strand
ggaaaucuuugccauugau

SEQ ID NO: 1617042 - RNA, 19 nt, Homo sapiens
  misc_RNA (1)...(19): siRNA sense strand
agacauggcuggaaagauc

SEQ ID NO: 1617043 - RNA, 19 nt, Homo sapiens
  misc_RNA (1)...(19): siRNA sense strand
ggaagaagacagacggaaa

SEQ ID NO: 1617044 - RNA, 19 nt, Homo sapiens
  misc_RNA (1)...(19): siRNA sense strand
gaacgauguuaaaguugga

SEQ ID NO: 1617045 - RNA, 19 nt, Homo sapiens
  misc_RNA (1)...(19): siRNA sense strand
agaaggagauggagagcaa

SEQ ID NO: 1617046 - RNA, 19 nt, Homo sapiens
  misc_RNA (1)...(19): siRNA sense strand
gcacagcccgcucacgauu

SEQ ID NO: 1617047 - RNA, 19 nt, Homo sapiens
  misc_RNA (1)...(19): siRNA sense strand
guacgaaggccacgugaau

SEQ ID NO: 1617048 - RNA, 19 nt, Homo sapiens
  misc_RNA (1)...(19): siRNA sense strand
gggaaaucuuugccauuga

SEQ ID NO: 1617049 - RNA, 19 nt, Homo sapiens
  misc_RNA (1)...(19): siRNA sense strand
agugaacgauguuaaaguu

SEQ ID NO: 1617050 - RNA, 19 nt, Homo sapiens
  misc_RNA (1)...(19): siRNA sense strand
ccacccgccuguuucauga

SEQ ID NO: 1617051 - RNA, 19 nt, Homo sapiens
  misc_RNA (1)...(19): siRNA sense strand
gaucugcguuguggaaauc

SEQ ID NO: 1617052 - RNA, 19 nt, Homo sapiens
  misc_RNA (1)...(19): siRNA sense strand
cuucagacauggcuggaaa

SEQ ID NO: 1617053 - RNA, 19 nt, Homo sapiens
  misc_RNA (1)...(19): siRNA sense strand
gggcaggaccuuuacuguu

SEQ ID NO: 1617054 - RNA, 19 nt, Homo sapiens
  misc_RNA (1)...(19): siRNA sense strand
gaagaagacagacggaaaa

SEQ ID NO: 1617055 - RNA, 19 nt, Homo sapiens
  misc_RNA (1)...(19): siRNA sense strand
gcacgaggaagaaggaauc

SEQ ID NO: 1617056 - RNA, 19 nt, Homo sapiens
  misc_RNA (1)...(19): siRNA sense strand
ggagauggagagcaagaga

SEQ ID NO: 1617057 - RNA, 19 nt, Homo sapiens
  misc_RNA (1)...(19): siRNA sense strand
cgaagugcguaaggcagua

SEQ ID NO: 1617058 - RNA, 19 nt, Homo sapiens
  misc_RNA (1)...(19): siRNA sense strand
ccaaguaugguaucaucaa

SEQ ID NO: 1617059 - RNA, 19 nt, Homo sapiens
  misc_RNA (1)...(19): siRNA sense strand
gugcggauccuccaagaug

SEQ ID NO: 1617060 - RNA, 19 nt, Homo sapiens
  misc_RNA (1)...(19): siRNA sense strand
ggggaaaucuuugccauug

SEQ ID NO: 1617061 - RNA, 19 nt, Homo sapiens
  misc_RNA (1)...(19): siRNA sense strand
gcaggaccuuuacuguuac

SEQ ID NO: 1617062 - RNA, 19 nt, Homo sapiens
  misc_RNA (1)...(19): siRNA sense strand
ccacggugaugacgagucu

SEQ ID NO: 1617063 - RNA, 19 nt, Homo sapiens
  misc_RNA (1)...(19): siRNA sense strand
ucaucaaccugcaaagucu

SEQ ID NO: 1617064 - RNA, 19 nt, Homo sapiens
  misc_RNA (1)...(19): siRNA sense strand
caaguaugguaucaucaac

SEQ ID NO: 1617065 - RNA, 19 nt, Homo sapiens
  misc_RNA (1)...(19): siRNA sense strand
caggacugcuacacgagaa

SEQ ID NO: 1617066 - RNA, 19 nt, Homo sapiens
  misc_RNA (1)...(19): siRNA sense strand
gaaggccacgugaaugagu

SEQ ID NO: 1617067 - RNA, 19 nt, Homo sapiens
  misc_RNA (1)...(19): siRNA sense strand
gcacgaaaaccucuacuuc

SEQ ID NO: 1617068 - RNA, 19 nt, Homo sapiens
  misc_RNA (1)...(19): siRNA sense strand
caacagugaccggcucuuc

SEQ ID NO: 1617069 - RNA, 19 nt, Homo sapiens
  misc_RNA (1)...(19): siRNA sense strand
gcuccucugcuguuuaaug

SEQ ID NO: 1617070 - RNA, 19 nt, Homo sapiens
  misc_RNA (1)...(19): siRNA sense strand
gguaucaucaaccugcaaa

SEQ ID NO: 1617071 - RNA, 19 nt, Homo sapiens
  misc_RNA (1)...(19): siRNA sense strand
cacagugaacgauguuaaa

SEQ ID NO: 1617072 - RNA, 19 nt, Homo sapiens
  misc_RNA (1)...(19): siRNA sense strand
ccuccaagaugagcaauac

SEQ ID NO: 1617073 - RNA, 19 nt, Homo sapiens
  misc_RNA (1)...(19): siRNA sense strand
acgaaggccacgugaauga

SEQ ID NO: 1617074 - RNA, 19 nt, Homo sapiens
  misc_RNA (1)...(19): siRNA sense strand
gaccugaggaccacgaagu

SEQ ID NO: 1617075 - RNA, 19 nt, Homo sapiens
  misc_RNA (1)...(19): siRNA sense strand
aaggccacgugaaugagua

SEQ ID NO: 1617076 - RNA, 19 nt, Homo sapiens
  misc_RNA (1)...(19): siRNA sense strand
cagcugggaccuccucugu

SEQ ID NO: 1617077 - RNA, 19 nt, Homo sapiens
  misc_RNA (1)...(19): siRNA sense strand
gcaugugcacgaggaagaa

SEQ ID NO: 1617078 - RNA, 19 nt, Homo sapiens
  misc_RNA (1)...(19): siRNA sense strand
gcuccaggaagaagacaga

SEQ ID NO: 1617079 - RNA, 19 nt, Homo sapiens
  misc_RNA (1)...(19): siRNA sense strand
cuccaaguaugguaucauc

SEQ ID NO: 1617080 - RNA, 19 nt, Homo sapiens
  misc_RNA (1)...(19): siRNA sense strand
gaaaucuuugccauugauc

SEQ ID NO: 1617081 - RNA, 19 nt, Homo sapiens
  misc_RNA (1)...(19): siRNA sense strand
ugaucugcguuguggaaau

SEQ ID NO: 1617082 - RNA, 19 nt, Homo sapiens
  misc_RNA (1)...(19): siRNA sense strand
gaagggagaccuacuaaau

SEQ ID NO: 1617083 - RNA, 19 nt, Homo sapiens
  misc_RNA (1)...(19): siRNA sense strand
aaauagacauggacaauga

SEQ ID NO: 1617084 - RNA, 19 nt, Homo sapiens
  misc_RNA (1)...(19): siRNA sense strand
ccaacacgaugaacuauag

SEQ ID NO: 1617085 - RNA, 19 nt, Homo sapiens
  misc_RNA (1)...(19): siRNA sense strand
ggagagcaccgaagaagug

SEQ ID NO: 1617086 - RNA, 19 nt, Homo sapiens
  misc_RNA (1)...(19): siRNA sense strand
cgagauaaaccucuacuug

SEQ ID NO: 1617087 - RNA, 19 nt, Homo sapiens
  misc_RNA (1)...(19): siRNA sense strand
ccagaaaacugcucuaaga

SEQ ID NO: 1617088 - RNA, 19 nt, Homo sapiens
  misc_RNA (1)...(19): siRNA sense strand
gaaaacugcucuaagacaa

SEQ ID NO: 1617089 - RNA, 19 nt, Homo sapiens
  misc_RNA (1)...(19): siRNA sense strand
uaagaagaaugaccaugau

SEQ ID NO: 1617090 - RNA, 19 nt, Homo sapiens
  misc_RNA (1)...(19): siRNA sense strand
caagaagggagaccuacua

SEQ ID NO: 1617091 - RNA, 19 nt, Homo sapiens
  misc_RNA (1)...(19): siRNA sense strand
ggugauggcuucauuucuc

SEQ ID NO: 1617092 - RNA, 19 nt, Homo sapiens
  misc_RNA (1)...(19): siRNA sense strand
cuaaagacggcucgaaauu

SEQ ID NO: 1617093 - RNA, 19 nt, Homo sapiens
  misc_RNA (1)...(19): siRNA sense strand
aaagacggcucgaaauucu

SEQ ID NO: 1617094 - RNA, 19 nt, Homo sapiens
  misc_RNA (1)...(19): siRNA sense strand
gcauugagacauuuaaaca

SEQ ID NO: 1617095 - RNA, 19 nt, Homo sapiens
  misc_RNA (1)...(19): siRNA sense strand
gagcaccgaagaagugaaa

SEQ ID NO: 1617096 - RNA, 19 nt, Homo sapiens
  misc_RNA (1)...(19): siRNA sense strand
gaaaagcgaaaaguaguua

SEQ ID NO: 1617097 - RNA, 19 nt, Homo sapiens
  misc_RNA (1)...(19): siRNA sense strand
aaccaugcauuucuuauuc

SEQ ID NO: 1617098 - RNA, 19 nt, Homo sapiens
  misc_RNA (1)...(19): siRNA sense strand
ucauuucucccaaggaaua

SEQ ID NO: 1617099 - RNA, 19 nt, Homo sapiens
  misc_RNA (1)...(19): siRNA sense strand
uuaagaagaaugaccauga

SEQ ID NO: 1617100 - RNA, 19 nt, Homo sapiens
  misc_RNA (1)...(19): siRNA sense strand
agauaaaccucuacuugca

SEQ ID NO: 1617101 - RNA, 19 nt, Homo sapiens
  misc_RNA (1)...(19): siRNA sense strand
gagcauugagacauuuaaa

SEQ ID NO: 1617102 - RNA, 19 nt, Homo sapiens
  misc_RNA (1)...(19): siRNA sense strand
gauaugugcccuggagaaa

SEQ ID NO: 1617103 - RNA, 19 nt, Homo sapiens
  misc_RNA (1)...(19): siRNA sense strand
uaaagacggcucgaaauuc

SEQ ID NO: 1617104 - RNA, 19 nt, Homo sapiens
  misc_RNA (1)...(19): siRNA sense strand
gcuaaagacggcucgaaau

SEQ ID NO: 1617105 - RNA, 19 nt, Homo sapiens
  misc_RNA (1)...(19): siRNA sense strand
gaugagaagccacgugaca

SEQ ID NO: 1617106 - RNA, 19 nt, Homo sapiens
  misc_RNA (1)...(19): siRNA sense strand
auaaaccucuacuugcaaa

SEQ ID NO: 1617107 - RNA, 19 nt, Homo sapiens
  misc_RNA (1)...(19): siRNA sense strand
gauaaaccucuacuugcaa

SEQ ID NO: 1617108 - RNA, 19 nt, Homo sapiens
  misc_RNA (1)...(19): siRNA sense strand
caaaggaccacggagcauu

SEQ ID NO: 1617109 - RNA, 19 nt, Homo sapiens
  misc_RNA (1)...(19): siRNA sense strand
gcucuaagacaagcaagaa

SEQ ID NO: 1617110 - RNA, 19 nt, Homo sapiens
  misc_RNA (1)...(19): siRNA sense strand
caaauagacauggacaaug

SEQ ID NO: 1617111 - RNA, 19 nt, Homo sapiens
  misc_RNA (1)...(19): siRNA sense strand
cuucauuucucccaaggaa

SEQ ID NO: 1617112 - RNA, 19 nt, Homo sapiens
  misc_RNA (1)...(19): siRNA sense strand
gacauugcuaugacagaua

SEQ ID NO: 1617113 - RNA, 19 nt, Homo sapiens
  misc_RNA (1)...(19): siRNA sense strand
ugauggugauggcuucauu

SEQ ID NO: 1617114 - RNA, 19 nt, Homo sapiens
  misc_RNA (1)...(19): siRNA sense strand
ggaccacggagcauugaga

SEQ ID NO: 1617115 - RNA, 19 nt, Homo sapiens
  misc_RNA (1)...(19): siRNA sense strand
acauugcuaugacagauau

SEQ ID NO: 1617116 - RNA, 19 nt, Homo sapiens
  misc_RNA (1)...(19): siRNA sense strand
cauaaaaggccuagacauu

SEQ ID NO: 1617117 - RNA, 19 nt, Homo sapiens
  misc_RNA (1)...(19): siRNA sense strand
acaggcagcucucuaaagc

SEQ ID NO: 1617118 - RNA, 19 nt, Homo sapiens
  misc_RNA (1)...(19): siRNA sense strand
cacggagcauugagacauu

SEQ ID NO: 1617119 - RNA, 19 nt, Homo sapiens
  misc_RNA (1)...(19): siRNA sense strand
gaggagagcaccgaagaag

SEQ ID NO: 1617120 - RNA, 19 nt, Homo sapiens
  misc_RNA (1)...(19): siRNA sense strand
caauguauaccaacacgau

SEQ ID NO: 1617121 - RNA, 19 nt, Homo sapiens
  misc_RNA (1)...(19): siRNA sense strand
gauggugauggcuucauuu

SEQ ID NO: 1617122 - RNA, 19 nt, Homo sapiens
  misc_RNA (1)...(19): siRNA sense strand
acggcuaccuggcuaaaga

SEQ ID NO: 1617123 - RNA, 19 nt, Homo sapiens
  misc_RNA (1)...(19): siRNA sense strand
ccgaagaagugaaaauaga

SEQ ID NO: 1617124 - RNA, 19 nt, Homo sapiens
  misc_RNA (1)...(19): siRNA sense strand
aagccgagauaaaccucua

SEQ ID NO: 1617125 - RNA, 19 nt, Homo sapiens
  misc_RNA (1)...(19): siRNA sense strand
acaaauagacauggacaau

SEQ ID NO: 1617126 - RNA, 19 nt, Homo sapiens
  misc_RNA (1)...(19): siRNA sense strand
ggagcauugagacauuuaa

SEQ ID NO: 1617127 - RNA, 19 nt, Homo sapiens
  misc_RNA (1)...(19): siRNA sense strand
ggagaaaagcgaaaaguag

SEQ ID NO: 1617128 - RNA, 19 nt, Homo sapiens
  misc_RNA (1)...(19): siRNA sense strand
ggcuaaagacggcucgaaa

SEQ ID NO: 1617129 - RNA, 19 nt, Homo sapiens
  misc_RNA (1)...(19): siRNA sense strand
agacauugcuaugacagau

SEQ ID NO: 1617130 - RNA, 19 nt, Homo sapiens
  misc_RNA (1)...(19): siRNA sense strand
aagaagggagaccuacuaa

SEQ ID NO: 1617131 - RNA, 19 nt, Homo sapiens
  misc_RNA (1)...(19): siRNA sense strand
caagucauaucaggaugca

SEQ ID NO: 1617132 - RNA, 19 nt, Homo sapiens
  misc_RNA (1)...(19): siRNA sense strand
ugacaggcagcucucuaaa

SEQ ID NO: 1617133 - RNA, 19 nt, Homo sapiens
  misc_RNA (1)...(19): siRNA sense strand
auaccaacacgaugaacua

SEQ ID NO: 1617134 - RNA, 19 nt, Homo sapiens
  misc_RNA (1)...(19): siRNA sense strand
aaaggaccacggagcauug

SEQ ID NO: 1617135 - RNA, 19 nt, Homo sapiens
  misc_RNA (1)...(19): siRNA sense strand
agggagaccuacuaaaugc

SEQ ID NO: 1617136 - RNA, 19 nt, Homo sapiens
  misc_RNA (1)...(19): siRNA sense strand
gagagcaccgaagaaguga

SEQ ID NO: 1617137 - RNA, 19 nt, Homo sapiens
  misc_RNA (1)...(19): siRNA sense strand
ggccuagacauugcuauga

SEQ ID NO: 1617138 - RNA, 19 nt, Homo sapiens
  misc_RNA (1)...(19): siRNA sense strand
aagggagaccuacuaaaug

SEQ ID NO: 1617139 - RNA, 19 nt, Homo sapiens
  misc_RNA (1)...(19): siRNA sense strand
gguguugggcaagucauaa

SEQ ID NO: 1617140 - RNA, 19 nt, Homo sapiens
  misc_RNA (1)...(19): siRNA sense strand
ggaugcaguuuuagaagau

SEQ ID NO: 1617141 - RNA, 19 nt, Homo sapiens
  misc_RNA (1)...(19): siRNA sense strand
gcauuucuuauucagauuc

SEQ ID NO: 1617142 - RNA, 19 nt, Homo sapiens
  misc_RNA (1)...(19): siRNA sense strand
gacaggcagcucucuaaag

SEQ ID NO: 1617143 - RNA, 19 nt, Homo sapiens
  misc_RNA (1)...(19): siRNA sense strand
ccuagacauugcuaugaca

SEQ ID NO: 1617144 - RNA, 19 nt, Homo sapiens
  misc_RNA (1)...(19): siRNA sense strand
gcaagaagggagaccuacu

SEQ ID NO: 1617145 - RNA, 19 nt, Homo sapiens
  misc_RNA (1)...(19): siRNA sense strand
ccacggagcauugagacau

SEQ ID NO: 1617146 - RNA, 19 nt, Homo sapiens
  misc_RNA (1)...(19): siRNA sense strand
aagaggagagcaccgaaga

SEQ ID NO: 1617147 - RNA, 19 nt, Homo sapiens
  misc_RNA (1)...(19): siRNA sense strand
gagaagccacgugacaagu

SEQ ID NO: 1617148 - RNA, 19 nt, Homo sapiens
  misc_RNA (1)...(19): siRNA sense strand
uaaaaggccuagacauugc

SEQ ID NO: 1617149 - RNA, 19 nt, Homo sapiens
  misc_RNA (1)...(19): siRNA sense strand
gagaaaagcgaaaaguagu

SEQ ID NO: 1617150 - RNA, 19 nt, Homo sapiens
  misc_RNA (1)...(19): siRNA sense strand
gaagggagaccuacuaaau

SEQ ID NO: 1617151 - RNA, 19 nt, Homo sapiens
  misc_RNA (1)...(19): siRNA sense strand
aaauagacauggacaauga

SEQ ID NO: 1617152 - RNA, 19 nt, Homo sapiens
  misc_RNA (1)...(19): siRNA sense strand
ccaacacgaugaacuauag

SEQ ID NO: 1617153 - RNA, 19 nt, Homo sapiens
  misc_RNA (1)...(19): siRNA sense strand
ggagagcaccgaagaagug

SEQ ID NO: 1617154 - RNA, 19 nt, Homo sapiens
  misc_RNA (1)...(19): siRNA sense strand
cgagauaaaccucuacuug

SEQ ID NO: 1617155 - RNA, 19 nt, Homo sapiens
  misc_RNA (1)...(19): siRNA sense strand
ccagaaaacugcucuaaga

SEQ ID NO: 1617156 - RNA, 19 nt, Homo sapiens
  misc_RNA (1)...(19): siRNA sense strand
gaaaacugcucuaagacaa

SEQ ID NO: 1617157 - RNA, 19 nt, Homo sapiens
  misc_RNA (1)...(19): siRNA sense strand
uaagaagaaugaccaugau

SEQ ID NO: 1617158 - RNA, 19 nt, Homo sapiens
  misc_RNA (1)...(19): siRNA sense strand
caagaagggagaccuacua

SEQ ID NO: 1617159 - RNA, 19 nt, Homo sapiens
  misc_RNA (1)...(19): siRNA sense strand
ggugauggcuucauuucuc

SEQ ID NO: 1617160 - RNA, 19 nt, Homo sapiens
  misc_RNA (1)...(19): siRNA sense strand
cuaaagacggcucgaaauu

SEQ ID NO: 1617161 - RNA, 19 nt, Homo sapiens
  misc_RNA (1)...(19): siRNA sense strand
aaagacggcucgaaauucu

SEQ ID NO: 1617162 - RNA, 19 nt, Homo sapiens
  misc_RNA (1)...(19): siRNA sense strand
gcauugagacauuuaaaca

SEQ ID NO: 1617163 - RNA, 19 nt, Homo sapiens
  misc_RNA (1)...(19): siRNA sense strand
gagcaccgaagaagugaaa

SEQ ID NO: 1617164 - RNA, 19 nt, Homo sapiens
  misc_RNA (1)...(19): siRNA sense strand
gaaaagcgaaaaguaguua

SEQ ID NO: 1617165 - RNA, 19 nt, Homo sapiens
  misc_RNA (1)...(19): siRNA sense strand
aaccaugcauuucuuauuc

SEQ ID NO: 1617166 - RNA, 19 nt, Homo sapiens
  misc_RNA (1)...(19): siRNA sense strand
ucauuucucccaaggaaua

SEQ ID NO: 1617167 - RNA, 19 nt, Homo sapiens
  misc_RNA (1)...(19): siRNA sense strand
uuaagaagaaugaccauga

SEQ ID NO: 1617168 - RNA, 19 nt, Homo sapiens
  misc_RNA (1)...(19): siRNA sense strand
agauaaaccucuacuugca

SEQ ID NO: 1617169 - RNA, 19 nt, Homo sapiens
  misc_RNA (1)...(19): siRNA sense strand
gagcauugagacauuuaaa

SEQ ID NO: 1617170 - RNA, 19 nt, Homo sapiens
  misc_RNA (1)...(19): siRNA sense strand
gauaugugcccuggagaaa

SEQ ID NO: 1617171 - RNA, 19 nt, Homo sapiens
  misc_RNA (1)...(19): siRNA sense strand
uaaagacggcucgaaauuc

SEQ ID NO: 1617172 - RNA, 19 nt, Homo sapiens
  misc_RNA (1)...(19): siRNA sense strand
gcuaaagacggcucgaaau

SEQ ID NO: 1617173 - RNA, 19 nt, Homo sapiens
  misc_RNA (1)...(19): siRNA sense strand
gaugagaagccacgugaca

SEQ ID NO: 1617174 - RNA, 19 nt, Homo sapiens
  misc_RNA (1)...(19): siRNA sense strand
auaaaccucuacuugcaaa

SEQ ID NO: 1617175 - RNA, 19 nt, Homo sapiens
  misc_RNA (1)...(19): siRNA sense strand
gauaaaccucuacuugcaa

SEQ ID NO: 1617176 - RNA, 19 nt, Homo sapiens
  misc_RNA (1)...(19): siRNA sense strand
caaaggaccacggagcauu

SEQ ID NO: 1617177 - RNA, 19 nt, Homo sapiens
  misc_RNA (1)...(19): siRNA sense strand
gcucuaagacaagcaagaa

SEQ ID NO: 1617178 - RNA, 19 nt, Homo sapiens
  misc_RNA (1)...(19): siRNA sense strand
caaauagacauggacaaug

SEQ ID NO: 1617179 - RNA, 19 nt, Homo sapiens
  misc_RNA (1)...(19): siRNA sense strand
cuucauuucucccaaggaa

SEQ ID NO: 1617180 - RNA, 19 nt, Homo sapiens
  misc_RNA (1)...(19): siRNA sense strand
gacauugcuaugacagaua

SEQ ID NO: 1617181 - RNA, 19 nt, Homo sapiens
  misc_RNA (1)...(19): siRNA sense strand
ugauggugauggcuucauu

SEQ ID NO: 1617182 - RNA, 19 nt, Homo sapiens
  misc_RNA (1)...(19): siRNA sense strand
ggaccacggagcauugaga

SEQ ID NO: 1617183 - RNA, 19 nt, Homo sapiens
  misc_RNA (1)...(19): siRNA sense strand
acauugcuaugacagauau

SEQ ID NO: 1617184 - RNA, 19 nt, Homo sapiens
  misc_RNA (1)...(19): siRNA sense strand
cauaaaaggccuagacauu

SEQ ID NO: 1617185 - RNA, 19 nt, Homo sapiens
  misc_RNA (1)...(19): siRNA sense strand
acaggcagcucucuaaagc

SEQ ID NO: 1617186 - RNA, 19 nt, Homo sapiens
  misc_RNA (1)...(19): siRNA sense strand
cacggagcauugagacauu

SEQ ID NO: 1617187 - RNA, 19 nt, Homo sapiens
  misc_RNA (1)...(19): siRNA sense strand
gaggagagcaccgaagaag

SEQ ID NO: 1617188 - RNA, 19 nt, Homo sapiens
  misc_RNA (1)...(19): siRNA sense strand
caauguauaccaacacgau

SEQ ID NO: 1617189 - RNA, 19 nt, Homo sapiens
  misc_RNA (1)...(19): siRNA sense strand
gauggugauggcuucauuu

SEQ ID NO: 1617190 - RNA, 19 nt, Homo sapiens
  misc_RNA (1)...(19): siRNA sense strand
acggcuaccuggcuaaaga

SEQ ID NO: 1617191 - RNA, 19 nt, Homo sapiens
  misc_RNA (1)...(19): siRNA sense strand
ccgaagaagugaaaauaga

SEQ ID NO: 1617192 - RNA, 19 nt, Homo sapiens
  misc_RNA (1)...(19): siRNA sense strand
aagccgagauaaaccucua

SEQ ID NO: 1617193 - RNA, 19 nt, Homo sapiens
  misc_RNA (1)...(19): siRNA sense strand
acaaauagacauggacaau

SEQ ID NO: 1617194 - RNA, 19 nt, Homo sapiens
  misc_RNA (1)...(19): siRNA sense strand
ggagcauugagacauuuaa

SEQ ID NO: 1617195 - RNA, 19 nt, Homo sapiens
  misc_RNA (1)...(19): siRNA sense strand
ggagaaaagcgaaaaguag

SEQ ID NO: 1617196 - RNA, 19 nt, Homo sapiens
  misc_RNA (1)...(19): siRNA sense strand
ggcuaaagacggcucgaaa

SEQ ID NO: 1617197 - RNA, 19 nt, Homo sapiens
  misc_RNA (1)...(19): siRNA sense strand
agacauugcuaugacagau

SEQ ID NO: 1617198 - RNA, 19 nt, Homo sapiens
  misc_RNA (1)...(19): siRNA sense strand
aagaagggagaccuacuaa

SEQ ID NO: 1617199 - RNA, 19 nt, Homo sapiens
  misc_RNA (1)...(19): siRNA sense strand
caagucauaucaggaugca

SEQ ID NO: 1617200 - RNA, 19 nt, Homo sapiens
  misc_RNA (1)...(19): siRNA sense strand
ugacaggcagcucucuaaa

SEQ ID NO: 1617201 - RNA, 19 nt, Homo sapiens
  misc_RNA (1)...(19): siRNA sense strand
auaccaacacgaugaacua

SEQ ID NO: 1617202 - RNA, 19 nt, Homo sapiens
  misc_RNA (1)...(19): siRNA sense strand
aaaggaccacggagcauug

SEQ ID NO: 1617203 - RNA, 19 nt, Homo sapiens
  misc_RNA (1)...(19): siRNA sense strand
agggagaccuacuaaaugc

SEQ ID NO: 1617204 - RNA, 19 nt, Homo sapiens
  misc_RNA (1)...(19): siRNA sense strand
gagagcaccgaagaaguga

SEQ ID NO: 1617205 - RNA, 19 nt, Homo sapiens
  misc_RNA (1)...(19): siRNA sense strand
ggccuagacauugcuauga

SEQ ID NO: 1617206 - RNA, 19 nt, Homo sapiens
  misc_RNA (1)...(19): siRNA sense strand
aagggagaccuacuaaaug

SEQ ID NO: 1617207 - RNA, 19 nt, Homo sapiens
  misc_RNA (1)...(19): siRNA sense strand
gguguugggcaagucauaa

SEQ ID NO: 1617208 - RNA, 19 nt, Homo sapiens
  misc_RNA (1)...(19): siRNA sense strand
ggaugcaguuuuagaagau

SEQ ID NO: 1617209 - RNA, 19 nt, Homo sapiens
  misc_RNA (1)...(19): siRNA sense strand
gcauuucuuauucagauuc

SEQ ID NO: 1617210 - RNA, 19 nt, Homo sapiens
  misc_RNA (1)...(19): siRNA sense strand
gacaggcagcucucuaaag

SEQ ID NO: 1617211 - RNA, 19 nt, Homo sapiens
  misc_RNA (1)...(19): siRNA sense strand
ccuagacauugcuaugaca

SEQ ID NO: 1617212 - RNA, 19 nt, Homo sapiens
  misc_RNA (1)...(19): siRNA sense strand
gcaagaagggagaccuacu

SEQ ID NO: 1617213 - RNA, 19 nt, Homo sapiens
  misc_RNA (1)...(19): siRNA sense strand
ccacggagcauugagacau

SEQ ID NO: 1617214 - RNA, 19 nt, Homo sapiens
  misc_RNA (1)...(19): siRNA sense strand
aagaggagagcaccgaaga

SEQ ID NO: 1617215 - RNA, 19 nt, Homo sapiens
  misc_RNA (1)...(19): siRNA sense strand
gagaagccacgugacaagu

SEQ ID NO: 1617216 - RNA, 19 nt, Homo sapiens
  misc_RNA (1)...(19): siRNA sense strand
uaaaaggccuagacauugc

SEQ ID NO: 1617217 - RNA, 19 nt, Homo sapiens
  misc_RNA (1)...(19): siRNA sense strand
gagaaaagcgaaaaguagu

SEQ ID NO: 1617218 - RNA, 19 nt, Homo sapiens
  misc_RNA (1)...(19): siRNA sense strand
gcacuaugaucuauauguu

SEQ ID NO: 1617219 - RNA, 19 nt, Homo sapiens
  misc_RNA (1)...(19): siRNA sense strand
gaacaacccaguuuacaga

SEQ ID NO: 1617220 - RNA, 19 nt, Homo sapiens
  misc_RNA (1)...(19): siRNA sense strand
ggacaauauuuacauguug

SEQ ID NO: 1617221 - RNA, 19 nt, Homo sapiens
  misc_RNA (1)...(19): siRNA sense strand
gaacugugaugaacuugga

SEQ ID NO: 1617222 - RNA, 19 nt, Homo sapiens
  misc_RNA (1)...(19): siRNA sense strand
gaagucagaaguacaguuu

SEQ ID NO: 1617223 - RNA, 19 nt, Homo sapiens
  misc_RNA (1)...(19): siRNA sense strand
gggaagaagguuuggauua

SEQ ID NO: 1617224 - RNA, 19 nt, Homo sapiens
  misc_RNA (1)...(19): siRNA sense strand
aaagagaucuaguccagaa

SEQ ID NO: 1617225 - RNA, 19 nt, Homo sapiens
  misc_RNA (1)...(19): siRNA sense strand
ggaagaagguuuggauuac

SEQ ID NO: 1617226 - RNA, 19 nt, Homo sapiens
  misc_RNA (1)...(19): siRNA sense strand
ggacugcagaggacuguua

SEQ ID NO: 1617227 - RNA, 19 nt, Homo sapiens
  misc_RNA (1)...(19): siRNA sense strand
ggaucgacauuccaccaua

SEQ ID NO: 1617228 - RNA, 19 nt, Homo sapiens
  misc_RNA (1)...(19): siRNA sense strand
gcagaggacuguuagaaaa

SEQ ID NO: 1617229 - RNA, 19 nt, Homo sapiens
  misc_RNA (1)...(19): siRNA sense strand
ucacagaggagaauaagaa

SEQ ID NO: 1617230 - RNA, 19 nt, Homo sapiens
  misc_RNA (1)...(19): siRNA sense strand
ccagauaguggucaguuua

SEQ ID NO: 1617231 - RNA, 19 nt, Homo sapiens
  misc_RNA (1)...(19): siRNA sense strand
gaggagaccugcggguuug

SEQ ID NO: 1617232 - RNA, 19 nt, Homo sapiens
  misc_RNA (1)...(19): siRNA sense strand
gaaacccaauggcagaaau

SEQ ID NO: 1617233 - RNA, 19 nt, Homo sapiens
  misc_RNA (1)...(19): siRNA sense strand
gaucgacauuccaccauau

SEQ ID NO: 1617234 - RNA, 19 nt, Homo sapiens
  misc_RNA (1)...(19): siRNA sense strand
augaaaugcugaauccuua

SEQ ID NO: 1617235 - RNA, 19 nt, Homo sapiens
  misc_RNA (1)...(19): siRNA sense strand
gaacuggagcugaucauag

SEQ ID NO: 1617236 - RNA, 19 nt, Homo sapiens
  misc_RNA (1)...(19): siRNA sense strand
aaucgaagcccaguucuua

SEQ ID NO: 1617237 - RNA, 19 nt, Homo sapiens
  misc_RNA (1)...(19): siRNA sense strand
gaaccagcacuaugaucua

SEQ ID NO: 1617238 - RNA, 19 nt, Homo sapiens
  misc_RNA (1)...(19): siRNA sense strand
gaaaugcugaauccuuauu

SEQ ID NO: 1617239 - RNA, 19 nt, Homo sapiens
  misc_RNA (1)...(19): siRNA sense strand
gaaggcccauaccugcuuu

SEQ ID NO: 1617240 - RNA, 19 nt, Homo sapiens
  misc_RNA (1)...(19): siRNA sense strand
gcucaucccucaacaucug

SEQ ID NO: 1617241 - RNA, 19 nt, Homo sapiens
  misc_RNA (1)...(19): siRNA sense strand
ccagcacuaugaucuauau

SEQ ID NO: 1617242 - RNA, 19 nt, Homo sapiens
  misc_RNA (1)...(19): siRNA sense strand
ggaggagaccugcggguuu

SEQ ID NO: 1617243 - RNA, 19 nt, Homo sapiens
  misc_RNA (1)...(19): siRNA sense strand
gcaucgaaguguccagaga

SEQ ID NO: 1617244 - RNA, 19 nt, Homo sapiens
  misc_RNA (1)...(19): siRNA sense strand
ggcaagcgguggagacguu

SEQ ID NO: 1617245 - RNA, 19 nt, Homo sapiens
  misc_RNA (1)...(19): siRNA sense strand
cagaggagaauaagaaaga

SEQ ID NO: 1617246 - RNA, 19 nt, Homo sapiens
  misc_RNA (1)...(19): siRNA sense strand
aagaauacguccgguugua

SEQ ID NO: 1617247 - RNA, 19 nt, Homo sapiens
  misc_RNA (1)...(19): siRNA sense strand
ccaaugccaucagcagauu

SEQ ID NO: 1617248 - RNA, 19 nt, Homo sapiens
  misc_RNA (1)...(19): siRNA sense strand
augagaagcucuacgagaa

SEQ ID NO: 1617249 - RNA, 19 nt, Homo sapiens
  misc_RNA (1)...(19): siRNA sense strand
agaaggaacuggagcugau

SEQ ID NO: 1617250 - RNA, 19 nt, Homo sapiens
  misc_RNA (1)...(19): siRNA sense strand
aaacuaaaccccucagaua

SEQ ID NO: 1617251 - RNA, 19 nt, Homo sapiens
  misc_RNA (1)...(19): siRNA sense strand
ggaacuggagcugaucaua

SEQ ID NO: 1617252 - RNA, 19 nt, Homo sapiens
  misc_RNA (1)...(19): siRNA sense strand
ucacagugcccuucuacaa

SEQ ID NO: 1617253 - RNA, 19 nt, Homo sapiens
  misc_RNA (1)...(19): siRNA sense strand
cggacaauauuuacauguu

SEQ ID NO: 1617254 - RNA, 19 nt, Homo sapiens
  misc_RNA (1)...(19): siRNA sense strand
uaaccgaacaacccaguuu

SEQ ID NO: 1617255 - RNA, 19 nt, Homo sapiens
  misc_RNA (1)...(19): siRNA sense strand
aaggaacgguguaugaaga

SEQ ID NO: 1617256 - RNA, 19 nt, Homo sapiens
  misc_RNA (1)...(19): siRNA sense strand
gaacggcuccagcaucaag
